United States Patent Application Publication US 2018/0305408 A1 - sequence listing, part 6

SEQ ID NO: 95624 - protein, 29 aa, Artificial Sequence
  Cyclic GFR-binding peptide
  MOD_RES (3)..(4): Xaa is C or S
STXXAPVKTEPISMLYLDNGRVLLKFKYE

SEQ ID NO: 95625 - protein, 24 aa, Artificial Sequence
  Cyclic GFR-binding peptide
PTELSPISMLYKDEYDKVVLKYHY

SEQ ID NO: 95626 - protein, 39 aa, Artificial Sequence; identical to SEQ ID NO: 8646
  Cyclic GFR-binding peptide
  MOD_RES (6)..(38): Xaa is C or S

SEQ ID NO: 95627 - protein, 31 aa, Artificial Sequence; identical to SEQ ID NO: 37343
  Cyclic GFR-binding peptide
  MOD_RES (30)..(30): Xaa is C or S

SEQ ID NO: 95628 - protein, 38 aa, Artificial Sequence; identical to SEQ ID NO: 8648
  Cyclic GFR-binding peptide
  MOD_RES (2)..(3)..(35)..(37): Xaa is C or S

SEQ ID NO: 95629 - protein, 29 aa, Artificial Sequence
  Cyclic GFR-binding peptide
  MOD_RES (27)..(29): Xaa is C or S
LNAISILYFVGRTPKVLKKYRMVVKSXKX

SEQ ID NO: 95630 - protein, 40 aa, Artificial Sequence; identical to SEQ ID NO: 8654
  Cyclic GFR-binding peptide
  MOD_RES (6)..(7)..(38)..(40): Xaa is C or S

SEQ ID NO: 95631 - protein, 38 aa, Artificial Sequence; identical to SEQ ID NO: 8656
  Cyclic GFR-binding peptide
  MOD_RES (6)..(7)..(38): Xaa is C or S

SEQ ID NO: 95632 - protein, 27 aa, Artificial Sequence
  Cyclic GFR-binding peptide
  MOD_RES (1)..(2): Xaa is C or S
XXVPTRLNAISILYFDSANNVVLKKYR

SEQ ID NO: 95633 - protein, 31 aa, Artificial Sequence; identical to SEQ ID NO: 37352
  Cyclic GFR-binding peptide
  MOD_RES (29)..(31): Xaa is C or S

SEQ ID NO: 95634 - protein, 35 aa, Artificial Sequence; identical to SEQ ID NO: 8658
  Cyclic GFR-binding peptide
  MOD_RES (6)..(7): Xaa is C or S

SEQ ID NO: 95635 - protein, 39 aa, Artificial Sequence; identical to SEQ ID NO: 8659
  Cyclic GFR-binding peptide
  MOD_RES (5)..(6)..(37)..(39): Xaa is C or S

SEQ ID NO: 95636 - protein, 30 aa, Artificial Sequence; identical to SEQ ID NO: 37358
  Cyclic GFR-binding peptide

SEQ ID NO: 95637 - protein, 31 aa, Artificial Sequence; identical to SEQ ID NO: 8663
  Cyclic GFR-binding peptide
  MOD_RES (2)..(3): Xaa is C or S

SEQ ID NO: 95638 - protein, 27 aa, Artificial Sequence
  Cyclic GFR-binding peptide
APTKLSPISVLYKDDSSNVILKYHYNM

SEQ ID NO: 95639 - protein, 29 aa, Artificial Sequence
  Cyclic GFR-binding peptide
  MOD_RES (1)..(2): Xaa is C or S
XXAPVKTEPISMLYLDNGRVLLKFKYEMI

SEQ ID NO: 95640 - protein, 33 aa, Artificial Sequence; identical to SEQ ID NO: 8665
  Cyclic GFR-binding peptide
  MOD_RES (4)..(4): Xaa is C or S

SEQ ID NO: 95641 - protein, 29 aa, Artificial Sequence
  Cyclic GFR-binding peptide
  MOD_RES (2)..(3): Xaa is C or S
PXXVPQALSATSILYYVGRKPKVLRKHRM

SEQ ID NO: 95642 - protein, 29 aa, Artificial Sequence
  Cyclic GFR-binding peptide
  MOD_RES (27)..(29): Xaa is C or S
SATSMLYYDEYDKVVLRKHREMVVEGXGX

SEQ ID NO: 95643 - protein, 39 aa, Artificial Sequence; identical to SEQ ID NO: 43171
  Cyclic GFR-binding peptide
  MOD_RES (6)..(7)..(39): Xaa is C or S

SEQ ID NO: 95644 - protein, 38 aa, Artificial Sequence; identical to SEQ ID NO: 8669
  Cyclic GFR-binding peptide
  MOD_RES (4)..(5)..(36)..(38): Xaa is C or S

SEQ ID NO: 95645 - protein, 29 aa, Artificial Sequence
  Cyclic GFR-binding peptide
  MOD_RES (29)..(29): Xaa is C or S
QALEPISILYLVGRKPKVKFKYEMIVRSX

SEQ ID NO: 95646 - protein, 27 aa, Artificial Sequence
  Cyclic GFR-binding peptide
PARLSPISILYKDAANNVVLKYHYDMV

SEQ ID NO: 95647 - protein, 25 aa, Artificial Sequence
  Cyclic GFR-binding peptide
KLSATSILYYDKGVVTYLRKHRGMA

SEQ ID NO: 95648 - protein, 21 aa, Artificial Sequence
  Cyclic GFR-binding peptide
MSPINILYFDENKNVVYGKIP

SEQ ID NO: 95649 - protein, 29 aa, Artificial Sequence
  Cyclic GFR-binding peptide
PTKLSATSILYYDKGVVTYLRKHRGMAVS

SEQ ID NO: 95650 - protein, 37 aa, Artificial Sequence; identical to SEQ ID NO: 8672
  Cyclic GFR-binding peptide
  MOD_RES (5)..(37): Xaa is C or S

SEQ ID NO: 95651 - protein, 31 aa, Artificial Sequence; identical to SEQ ID NO: 8673
  Cyclic GFR-binding peptide
  MOD_RES (28)..(30): Xaa is C or S

SEQ ID NO: 95652 - protein, 32 aa, Artificial Sequence; identical to SEQ ID NO: 8674
  Cyclic GFR-binding peptide
  MOD_RES (4)..(5): Xaa is C or S

SEQ ID NO: 95653 - protein, 24 aa, Artificial Sequence
  Cyclic GFR-binding peptide
TQLSPISVLYKDDSSNVILKYHYN

SEQ ID NO: 95654 - protein, 28 aa, Artificial Sequence
  Cyclic GFR-binding peptide
QALEPISILYLVGRKPKVKFKYEMIVRS

SEQ ID NO: 95655 - protein, 24 aa, Artificial Sequence
  Cyclic GFR-binding peptide
PTELSPINMLYFDENEKVVYGKIP

SEQ ID NO: 95656 - protein, 32 aa, Artificial Sequence; identical to SEQ ID NO: 77964
  Cyclic GFR-binding peptide
  MOD_RES (6)..(7): Xaa is C or S

SEQ ID NO: 95657 - protein, 30 aa, Artificial Sequence; identical to SEQ ID NO: 37372
  Cyclic GFR-binding peptide
  MOD_RES (28)..(30): Xaa is C or S

SEQ ID NO: 95658 - protein, 24 aa, Artificial Sequence
  Cyclic GFR-binding peptide
ELSATSMLYYDENEKVVLRKHRDM

SEQ ID NO: 95659 - protein, 35 aa, Artificial Sequence; identical to SEQ ID NO: 8684
  Cyclic GFR-binding peptide
  MOD_RES (3)..(4)..(35): Xaa is C or S

SEQ ID NO: 95660 - protein, 37 aa, Artificial Sequence; identical to SEQ ID NO: 8687
  Cyclic GFR-binding peptide
  MOD_RES (5)..(6)..(37): Xaa is C or S

SEQ ID NO: 95661 - protein, 30 aa, Artificial Sequence
  Cyclic GFR-binding peptide
  MOD_RES (1)..(1): Xaa is C or S
XVPARLSATSILYYDAANNVVLRKHRDMVV

SEQ ID NO: 95662 - protein, 37 aa, Artificial Sequence; identical to SEQ ID NO: 8690
  Cyclic GFR-binding peptide
  MOD_RES (4)..(5)..(37): Xaa is C or S

SEQ ID NO: 95663 - protein, 26 aa, Artificial Sequence
  Cyclic GFR-binding peptide
LSATSVLYYDDMGVPTLRKHREGMSV

SEQ ID NO: 95664 - protein, 28 aa, Artificial Sequence
  Cyclic GFR-binding peptide
VPTELSPISMLYKDENEKVVLKYHYDMV

SEQ ID NO: 95665 - protein, 31 aa, Artificial Sequence; identical to SEQ ID NO: 8693
  Cyclic GFR-binding peptide
  MOD_RES (2)..(3): Xaa is C or S

SEQ ID NO: 95666 - protein, 31 aa, Artificial Sequence; identical to SEQ ID NO: 37390
  Cyclic GFR-binding peptide
  MOD_RES (1)..(1): Xaa is C or S

SEQ ID NO: 95667 - protein, 22 aa, Artificial Sequence
  Cyclic GFR-binding peptide
SPINILYFVGRTPKVYGKIPMV

SEQ ID NO: 95668 - protein, 40 aa, Artificial Sequence; identical to SEQ ID NO: 43199
  Cyclic GFR-binding peptide
  MOD_RES (4)..(5)..(37)..(39): Xaa is C or S

SEQ ID NO: 95669 - protein, 34 aa, Artificial Sequence
  Cyclic GFR-binding peptide
  MOD_RES (6)..(7): Xaa is C or S
RVPSTXXAPVKTSATSMLYYDNGRVLLLRKHRMI

SEQ ID NO: 95670 - protein, 30 aa, Artificial Sequence; identical to SEQ ID NO: 37392
  Cyclic GFR-binding peptide
  MOD_RES (1)..(1): Xaa is C or S

SEQ ID NO: 95671 - protein, 38 aa, Artificial Sequence; identical to SEQ ID NO: 8698
  Cyclic GFR-binding peptide
  MOD_RES (4)..(5)..(36)..(38): Xaa is C or S

SEQ ID NO: 95672 - protein, 33 aa, Artificial Sequence; identical to SEQ ID NO: 37393
  Cyclic GFR-binding peptide
  MOD_RES (1)..(2): Xaa is C or S

SEQ ID NO: 95673 - protein, 27 aa, Artificial Sequence
  Cyclic GFR-binding peptide
VPEKMNAISILYFDENKNVVLKKYRNM

SEQ ID NO: 95674 - protein, 21 aa, Artificial Sequence
  Cyclic GFR-binding peptide
SPISVLYKDDSSNVILKYHYN

SEQ ID NO: 95675 - protein, 27 aa, Artificial Sequence
  Cyclic GFR-binding peptide
PQALNAISILYFVGRKPKVLKKYRMIV

SEQ ID NO: 95676 - protein, 26 aa, Artificial Sequence
  Cyclic GFR-binding peptide
KTSPINMLYFDNGRVLLYGKIPMIVE

SEQ ID NO: 95677 - protein, 36 aa, Artificial Sequence
  Cyclic GFR-binding peptide
  MOD_RES (5)..(6): Xaa is C or S
SAGPXXTPTKMSATSMLYYNDKQQIILRKHRGMVVD

SEQ ID NO: 95678 - protein, 35 aa, Artificial Sequence; identical to SEQ ID NO: 8703
  Cyclic GFR-binding peptide
  MOD_RES (6)..(7): Xaa is C or S

SEQ ID NO: 95679 - protein, 31 aa, Artificial Sequence; identical to SEQ ID NO: 37401
  Cyclic GFR-binding peptide
  MOD_RES (31)..(31): Xaa is C or S

SEQ ID NO: 95680 - protein, 33 aa, Artificial Sequence; identical to SEQ ID NO: 43210
  Cyclic GFR-binding peptide
  MOD_RES (30)..(32): Xaa is C or S

SEQ ID NO: 95681 - protein, 32 aa, Artificial Sequence; identical to SEQ ID NO: 37403
  Cyclic GFR-binding peptide
  MOD_RES (1)..(2): Xaa is C or S

SEQ ID NO: 95682 - protein, 28 aa, Artificial Sequence
  Cyclic GFR-binding peptide
  MOD_RES (27)..(27): Xaa is C or S
SPINMLYFDENEKVVYGKIPDMVVEGXG

SEQ ID NO: 95683 - protein, 24 aa, Artificial Sequence
  Cyclic GFR-binding peptide
SPISVLYKDSSNNVILKYHYNMVV

SEQ ID NO: 95684 - protein, 25 aa, Artificial Sequence
  Cyclic GFR-binding peptide
VPTELSPINMLYFDEYDKVVYGKIP

SEQ ID NO: 95685 - protein, 29 aa, Artificial Sequence
  Cyclic GFR-binding peptide
  MOD_RES (28)..(28): Xaa is C or S
NAISVLYFDDMGVPTLKKYREGMSVAEXG

SEQ ID NO: 95686 - protein, 34 aa, Artificial Sequence; identical to SEQ ID NO: 8707
  Cyclic GFR-binding peptide
  MOD_RES (5)..(6): Xaa is C or S

SEQ ID NO: 95687 - protein, 23 aa, Artificial Sequence
  Cyclic GFR-binding peptide
LSPINVLYFDDSSNVIYGKIPNM

SEQ ID NO: 95688 - protein, 37 aa, Artificial Sequence; identical to SEQ ID NO: 37409
  Cyclic GFR-binding peptide
  MOD_RES (4)..(5)..(37): Xaa is C or S

SEQ ID NO: 95689 - protein, 29 aa, Artificial Sequence
  Cyclic GFR-binding peptide
  MOD_RES (27)..(29): Xaa is C or S
SPISVLYKDDSSNVILKYHYNMVVRAXGX

SEQ ID NO: 95690 - protein, 34 aa, Artificial Sequence; identical to SEQ ID NO: 37411
  Cyclic GFR-binding peptide
  MOD_RES (1)..(33): Xaa is C or S

SEQ ID NO: 95691 - protein, 31 aa, Artificial Sequence
  Cyclic GFR-binding peptide
  MOD_RES (28)..(30): Xaa is C or S
MSATSILYYDENKNVVLRKHRNMTVESXAXR

SEQ ID NO: 95692 - protein, 33 aa, Artificial Sequence; identical to SEQ ID NO: 43218
  Cyclic GFR-binding peptide
  MOD_RES (31)..(33): Xaa is C or S

SEQ ID NO: 95693 - protein, 31 aa, Artificial Sequence; identical to SEQ ID NO: 8713
  Cyclic GFR-binding peptide
  MOD_RES (2)..(2): Xaa is C or S

SEQ ID NO: 95694 - protein, 36 aa, Artificial Sequence; identical to SEQ ID NO: 37414
  Cyclic GFR-binding peptide
  MOD_RES (1)..(2)..(34)..(36): Xaa is C or S

SEQ ID NO: 95695 - protein, 32 aa, Artificial Sequence; identical to SEQ ID NO: 8715
  Cyclic GFR-binding peptide
  MOD_RES (6)..(7): Xaa is C or S

SEQ ID NO: 95696 - protein, 28 aa, Artificial Sequence
  Cyclic GFR-binding peptide
  MOD_RES (27)..(27): Xaa is C or S
EPISILYLDAANNVVKFKYEDMVVEAXG

SEQ ID NO: 95697 - protein, 36 aa, Artificial Sequence; identical to SEQ ID NO: 37420
  Cyclic GFR-binding peptide
  MOD_RES (3)..(4)..(36): Xaa is C or S

SEQ ID NO: 95698 - protein, 32 aa, Artificial Sequence; identical to SEQ ID NO: 37422
  Cyclic GFR-binding peptide
  MOD_RES (6)..(7): Xaa is C or S

SEQ ID NO: 95699 - protein, 31 aa, Artificial Sequence
  Cyclic GFR-binding peptide
  MOD_RES (5)..(6): Xaa is C or S
TPPTXXVPTRLEPISILYLDSANNVVKFKYE

SEQ ID NO: 95700 - protein, 24 aa, Artificial Sequence
  Cyclic GFR-binding peptide
KLSPISVLYKDDSSNVILKYHYNM

SEQ ID NO: 95701 - protein, 30 aa, Artificial Sequence
  Cyclic GFR-binding peptide
  MOD_RES (2)..(3): Xaa is C or S
AXXVPTKLSATSILYYDKGVVTYLRKHRGM

SEQ ID NO: 95702 - protein, 42 aa, Artificial Sequence; identical to SEQ ID NO: 8720
  Cyclic GFR-binding peptide
  MOD_RES (6)..(7)..(39)..(41): Xaa is C or S

SEQ ID NO: 95703 - protein, 36 aa, Artificial Sequence; identical to SEQ ID NO: 37426
  Cyclic GFR-binding peptide
  MOD_RES (1)..(2)..(34)..(36): Xaa is C or S

SEQ ID NO: 95704 - protein, 33 aa, Artificial Sequence; identical to SEQ ID NO: 8723
  Cyclic GFR-binding peptide
  MOD_RES (5)..(6): Xaa is C or S

SEQ ID NO: 95705 - protein, 40 aa, Artificial Sequence; identical to SEQ ID NO: 8724
  Cyclic GFR-binding peptide
  MOD_RES (6)..(7)..(39): Xaa is C or S

SEQ ID NO: 95706 - protein, 29 aa, Artificial Sequence
  Cyclic GFR-binding peptide
VPARLSATSILYYDAANNVVLRKHRDMVV

SEQ ID NO: 95707 - protein, 35 aa, Artificial Sequence; identical to SEQ ID NO: 8729
  Cyclic GFR-binding peptide
  MOD_RES (4)..(5): Xaa is C or S

SEQ ID NO: 95708 - protein, 37 aa, Artificial Sequence
  Cyclic GFR-binding peptide
  MOD_RES (5)..(6): Xaa is C or S
SAGPXXTPTKMSPISMLYKNDKQQIILKYHYGMVVDR

SEQ ID NO: 95709 - protein, 29 aa, Artificial Sequence
  Cyclic GFR-binding peptide
VPTRLSPINILYFDSANNVVYGKIPDMVV

SEQ ID NO: 95710 - protein, 25 aa, Artificial Sequence
  Cyclic GFR-binding peptide
KMEPISMLYLNDKQQIIKFKYEGMV

SEQ ID NO: 95711 - protein, 41 aa, Artificial Sequence; identical to SEQ ID NO: 37438
  Cyclic GFR-binding peptide
  MOD_RES (6)..(7)..(39)..(41): Xaa is C or S

SEQ ID NO: 95712 - protein, 27 aa, Artificial Sequence
  Cyclic GFR-binding peptide
VKTNAISMLYFDNGRVLLLKKYRMIVE

SEQ ID NO: 95713 - protein, 34 aa, Artificial Sequence
  Cyclic GFR-binding peptide
  MOD_RES (31)..(33): Xaa is C or S
PTKLSATSILYYDKGVVTYLRKHRGMAVSEXGXR

SEQ ID NO: 95714 - protein, 32 aa, Artificial Sequence; identical to SEQ ID NO: 8738
  Cyclic GFR-binding peptide
  MOD_RES (5)..(6): Xaa is C or S

SEQ ID NO: 95715 - protein, 35 aa, Artificial Sequence; identical to SEQ ID NO: 8742
  Cyclic GFR-binding peptide
  MOD_RES (3)..(4): Xaa is C or S

SEQ ID NO: 95716 - protein, 23 aa, Artificial Sequence
  Cyclic GFR-binding peptide
DLSPINILYFIGKTPKIYGKIPM

SEQ ID NO: 95717 - protein, 37 aa, Artificial Sequence; identical to SEQ ID NO: 43235
  Cyclic GFR-binding peptide
  MOD_RES (6)..(7): Xaa is C or S

SEQ ID NO: 95718 - protein, 40 aa, Artificial Sequence
  Cyclic GFR-binding peptide
  MOD_RES (6)..(7)..(39): Xaa is C or S
STPPTXXVPTRLEPISILYLDSANNVVKFKYEDMVVESXG

SEQ ID NO: 95719 - protein, 31 aa, Artificial Sequence; identical to SEQ ID NO: 37443
  Cyclic GFR-binding peptide
  MOD_RES (30)..(30): Xaa is C or S

SEQ ID NO: 95720 - protein, 29 aa, Artificial Sequence
  Cyclic GFR-binding peptide
  MOD_RES (3)..(4): Xaa is C or S
SPXXVSQDLSATSILYYIGKTPKILRKHR

SEQ ID NO: 95721 - protein, 28 aa, Artificial Sequence
  Cyclic GFR-binding peptide
QDLSATSILYYIGKTPKILRKHRMIVKS

SEQ ID NO: 95722 - protein, 34 aa, Artificial Sequence
  Cyclic GFR-binding peptide
  MOD_RES (32)..(34): Xaa is C or S
VPARLSATSILYYDAANNVVLRKHRDMVVEAXGX

SEQ ID NO: 95723 - protein, 28 aa, Artificial Sequence
  Cyclic GFR-binding peptide
  MOD_RES (2)..(3): Xaa is C or S
AXXVPTELSPISMLYKDEYDKVVLKYHY

SEQ ID NO: 95724 - protein, 26 aa, Artificial Sequence
  Cyclic GFR-binding peptide
SPINVLYFDDMGVPTYGKIPEGMSVA

SEQ ID NO: 95725 - protein, 33 aa, Artificial Sequence; identical to SEQ ID NO: 43240
  Cyclic GFR-binding peptide
  MOD_RES (4)..(5): Xaa is C or S

SEQ ID NO: 95726 - protein, 37 aa, Artificial Sequence; identical to SEQ ID NO: 43241
  Cyclic GFR-binding peptide
  MOD_RES (5)..(6): Xaa is C or S

SEQ ID NO: 95727 - protein, 34 aa, Artificial Sequence; identical to SEQ ID NO: 43244
  Cyclic GFR-binding peptide
  MOD_RES (4)..(5): Xaa is C or S

SEQ ID NO: 95728 - protein, 30 aa, Artificial Sequence; identical to SEQ ID NO: 8751
  Cyclic GFR-binding peptide
  MOD_RES (30)..(30): Xaa is C or S

SEQ ID NO: 95729 - protein, 21 aa, Artificial Sequence
  Cyclic GFR-binding peptide
MNAISMLYFNDKQQIILKKYR

SEQ ID NO: 95730 - protein, 28 aa, Artificial Sequence
  Cyclic GFR-binding peptide
  MOD_RES (1)..(1): Xaa is C or S
XAPVKTEPISMLYLDNGRVLLKFKYEMI

SEQ ID NO: 95731 - protein, 30 aa, Artificial Sequence; identical to SEQ ID NO: 8754
  Cyclic GFR-binding peptide
  MOD_RES (2)..(3): Xaa is C or S

SEQ ID NO: 95732 - protein, 25 aa, Artificial Sequence
  Cyclic GFR-binding peptide
DLSATSILYYVGRTPKVLRKHRMVV

SEQ ID NO: 95733 - protein, 28 aa, Artificial Sequence
  Cyclic GFR-binding peptide
  MOD_RES (28)..(28): Xaa is C or S
LEPISILYLDAANNVVKFKYEDMVVEAX

SEQ ID NO: 95734 - protein, 38 aa, Artificial Sequence; identical to SEQ ID NO: 43256
  Cyclic GFR-binding peptide
  MOD_RES (4)..(5)..(38): Xaa is C or S

SEQ ID NO: 95735 - protein, 38 aa, Artificial Sequence; identical to SEQ ID NO: 8758
  Cyclic GFR-binding peptide
  MOD_RES (6)..(7)..(38): Xaa is C or S

SEQ ID NO: 95736 - protein, 33 aa, Artificial Sequence; identical to SEQ ID NO: 37456
  Cyclic GFR-binding peptide
  MOD_RES (1)..(2): Xaa is C or S

SEQ ID NO: 95737 - protein, 30 aa, Artificial Sequence; identical to SEQ ID NO: 8759
  Cyclic GFR-binding peptide

SEQ ID NO: 95738 - protein, 41 aa, Artificial Sequence
  Cyclic GFR-binding peptide
  MOD_RES (6)..(7)..(38)..(40): Xaa is C or S
RVPSTXXAPVKTEPISMLYLDNGRVLLKFKYEMIVEEXGXL

SEQ ID NO: 95739 - protein, 34 aa, Artificial Sequence; identical to SEQ ID NO: 8760
  Cyclic GFR-binding peptide
  MOD_RES (2)..(3): Xaa is C or S

SEQ ID NO: 95740 - protein, 35 aa, Artificial Sequence; identical to SEQ ID NO: 43261
  Cyclic GFR-binding peptide
  MOD_RES (1)..(33)..(35): Xaa is C or S

SEQ ID NO: 95741 - protein, 27 aa, Artificial Sequence
  Cyclic GFR-binding peptide
  MOD_RES (27)..(27): Xaa is C or S
TNAISMLYFDNGRVLLLKKYRMIVEEX

SEQ ID NO: 95742 - protein, 36 aa, Artificial Sequence; identical to SEQ ID NO: 8762
  Cyclic GFR-binding peptide
  MOD_RES (5)..(6): Xaa is C or S

SEQ ID NO: 95743 - protein, 23 aa, Artificial Sequence
  Cyclic GFR-binding peptide
RLNAISILYFDSANNVVLKKYRD

SEQ ID NO: 95744 - protein, 33 aa, Artificial Sequence; identical to SEQ ID NO: 43264
  Cyclic GFR-binding peptide
  MOD_RES (6)..(7): Xaa is C or S

SEQ ID NO: 95745 - protein, 25 aa, Artificial Sequence
  Cyclic GFR-binding peptide
LSPISILYKDSANNVVLKYHYDMVV

SEQ ID NO: 95746 - protein, 29 aa, Artificial Sequence
  Cyclic GFR-binding peptide
  MOD_RES (2)..(3): Xaa is C or S
PXXVPEKMSPINILYFDENKNVVYGKIPN

SEQ ID NO: 95747 - protein, 24 aa, Artificial Sequence
  Cyclic GFR-binding peptide
NAISILYFDAANNVVLKKYRDMVV

SEQ ID NO: 95748 - protein, 31 aa, Artificial Sequence; identical to SEQ ID NO: 19048
  Cyclic GFR-binding peptide
  MOD_RES (29)..(31): Xaa is C or S

SEQ ID NO: 95749 - protein, 40 aa, Artificial Sequence
  Cyclic GFR-binding peptide
  MOD_RES (6)..(7)..(39): Xaa is C or S
HVPKPXXAPTKLSATSVLYYDDSSNVILRKHRNMVVRSXG

SEQ ID NO: 95750 - protein, 21 aa, Artificial Sequence
  Cyclic GFR-binding peptide
NAISILYFVGRKPKVLKKYRM

SEQ ID NO: 95751 - protein, 27 aa, Artificial Sequence
  Cyclic GFR-binding peptide
MSPISILYKDENKNVVLKYHYNMTVES

SEQ ID NO: 95752 - protein, 42 aa, Artificial Sequence; identical to SEQ ID NO: 43265
  Cyclic GFR-binding peptide
  MOD_RES (6)..(7)..(39)..(41): Xaa is C or S

SEQ ID NO: 95753 - protein, 24 aa, Artificial Sequence
  Cyclic GFR-binding peptide
SATSMLYYDNGRVLLLRKHRMIVE

SEQ ID NO: 95754 - protein, 38 aa, Artificial Sequence; identical to SEQ ID NO: 8769
  Cyclic GFR-binding peptide
  MOD_RES (4)..(36)..(38): Xaa is C or S

SEQ ID NO: 95755 - protein, 35 aa, Artificial Sequence
  Cyclic GFR-binding peptide
  MOD_RES (4)..(5): Xaa is C or S
PASXXVPARLSATSILYYDAANNVVLRKHRDMVVE

SEQ ID NO: 95756 - protein, 26 aa, Artificial Sequence
  Cyclic GFR-binding peptide
LSATSILYYDAANNVVLRKHRDMVVE

SEQ ID NO: 95757 - protein, 26 aa, Artificial Sequence
  Cyclic GFR-binding peptide
MSPINILYFDENKNVVYGKIPNMTVE

SEQ ID NO: 95758 - protein, 27 aa, Artificial Sequence
  Cyclic GFR-binding peptide
VPTRLSPISILYKDSANNVVLKYHYDM

SEQ ID NO: 95759 - protein, 31 aa, Artificial Sequence; identical to SEQ ID NO: 8775
  Cyclic GFR-binding peptide
  MOD_RES (31)..(31): Xaa is C or S

SEQ ID NO: 95760 - protein, 27 aa, Artificial Sequence
  Cyclic GFR-binding peptide
TKLSPINVLYFDDSSNVIYGKIPNMVV

SEQ ID NO: 95761 - protein, 23 aa, Artificial Sequence
  Cyclic GFR-binding peptide
LSPINILYFDSANNVVYGKIPDM

SEQ ID NO: 95762 - protein, 41 aa, Artificial Sequence; identical to SEQ ID NO: 8776
  Cyclic GFR-binding peptide
  MOD_RES (6)..(7)..(38)..(40): Xaa is C or S

SEQ ID NO: 95763 - protein, 24 aa, Artificial Sequence
  Cyclic GFR-binding peptide
PTELEPISMLYLDEYDKVVKFKYE

SEQ ID NO: 95764 - protein, 38 aa, Artificial Sequence; identical to SEQ ID NO: 8777
  Cyclic GFR-binding peptide
  MOD_RES (5)..(6): Xaa is C or S

SEQ ID NO: 95765 - protein, 37 aa, Artificial Sequence; identical to SEQ ID NO: 37483
  Cyclic GFR-binding peptide
  MOD_RES (2)..(3)..(34)..(36): Xaa is C or S

SEQ ID NO: 95766 - protein, 34 aa, Artificial Sequence; identical to SEQ ID NO: 8780
  Cyclic GFR-binding peptide
  MOD_RES (6)..(7): Xaa is C or S

SEQ ID NO: 95767 - protein, 36 aa, Artificial Sequence; identical to SEQ ID NO: 37485
  Cyclic GFR-binding peptide
  MOD_RES (4)..(5): Xaa is C or S

SEQ ID NO: 95768 - protein, 21 aa, Artificial Sequence
  Cyclic GFR-binding peptide
TSPINMLYFDNGRVLLYGKIP

SEQ ID NO: 95769 - protein, 38 aa, Artificial Sequence
  Cyclic GFR-binding peptide
  MOD_RES (4)..(5)..(36)..(38): Xaa is C or S
AAPXXVPQALSPINILYFVGRKPKVYGKIPMIVRSXKX

SEQ ID NO: 95770 - protein, 31 aa, Artificial Sequence; identical to SEQ ID NO: 8784
  Cyclic GFR-binding peptide
  MOD_RES (4)..(5): Xaa is C or S

SEQ ID NO: 95771 - protein, 32 aa, Artificial Sequence; identical to SEQ ID NO: 37492
  Cyclic GFR-binding peptide
  MOD_RES (1)..(32): Xaa is C or S

SEQ ID NO: 95772 - protein, 29 aa, Artificial Sequence
  Cyclic GFR-binding peptide
  MOD_RES (2)..(3): Xaa is C or S
TXXAPVKTNAISMLYFDNGRVLLLKKYRM

SEQ ID NO: 95773 - protein, 32 aa, Artificial Sequence
  Cyclic GFR-binding peptide
  MOD_RES (2)..(3): Xaa is C or S
PXXTPTKMEPISMLYLNDKQQIIKFKYEGMVV

SEQ ID NO: 95774 - protein, 33 aa, Artificial Sequence; identical to SEQ ID NO: 37495
  Cyclic GFR-binding peptide
  MOD_RES (1)..(32): Xaa is C or S

SEQ ID NO: 95775 - protein, 25 aa, Artificial Sequence
  Cyclic GFR-binding peptide
VPTRLEPISILYLDSANNVVKFKYE

SEQ ID NO: 95776 - protein, 25 aa, Artificial Sequence
  Cyclic GFR-binding peptide
SPINVLYFDSSNNVIYGKIPNMVVK

SEQ ID NO: 95777 - protein, 40 aa, Artificial Sequence
  Cyclic GFR-binding peptide
  MOD_RES (6)..(7)..(39): Xaa is C or S
STPPTXXVPTRLSATSILYYDSANNVVLRKHRDMVVESXG

SEQ ID NO: 95778 - protein, 31 aa, Artificial Sequence; identical to SEQ ID NO: 37498
  Cyclic GFR-binding peptide
  MOD_RES (28)..(30): Xaa is C or S

SEQ ID NO: 95779 - protein, 25 aa, Artificial Sequence
  Cyclic GFR-binding peptide
RLSPINILYFDSANNVVYGKIPDMV

SEQ ID NO: 95780 - protein, 29 aa, Artificial Sequence
  Cyclic GFR-binding peptide
  MOD_RES (28)..(28): Xaa is C or S
MSATSMLYYNDKQQIILRKHRGMVVDRXG

SEQ ID NO: 95781 - protein, 30 aa, Artificial Sequence; identical to SEQ ID NO: 37499
  Cyclic GFR-binding peptide
  MOD_RES (3)..(4): Xaa is C or S

SEQ ID NO: 95782 - protein, 30 aa, Artificial Sequence; identical to SEQ ID NO: 8791
  Cyclic GFR-binding peptide
  MOD_RES (30)..(30): Xaa is C or S

SEQ ID NO: 95783 - protein, 33 aa, Artificial Sequence; identical to SEQ ID NO: 43298
  Cyclic GFR-binding peptide
  MOD_RES (4)..(5): Xaa is C or S

SEQ ID NO: 95784 - protein, 22 aa, Artificial Sequence
  Cyclic GFR-binding peptide
ELEPISMLYLDENEKVVKFKYE

SEQ ID NO: 95785 - protein, 25 aa, Artificial Sequence
  Cyclic GFR-binding peptide
SQDLEPISILYLIGKTPKIKFKYEM

SEQ ID NO: 95786 - protein, 24 aa, Artificial Sequence
  Cyclic GFR-binding peptide
KMSATSMLYYNDKQQIILRKHRGM

SEQ ID NO: 95787 - protein, 30 aa, Artificial Sequence; identical to SEQ ID NO: 8795
  Cyclic GFR-binding peptide
  MOD_RES (27)..(29): Xaa is C or S

SEQ ID NO: 95788 - protein, 32 aa, Artificial Sequence; identical to SEQ ID NO: 8797
  Cyclic GFR-binding peptide
  MOD_RES (1)..(32): Xaa is C or S

SEQ ID NO: 95789 - protein, 28 aa, Artificial Sequence
  Cyclic GFR-binding peptide
  MOD_RES (1)..(1): Xaa is C or S
XVPARLSPISILYKDAANNVVLKYHYDM

SEQ ID NO: 95790 - protein, 30 aa, Artificial Sequence; identical to SEQ ID NO: 37509
  Cyclic GFR-binding peptide

SEQ ID NO: 95791 - protein, 31 aa, Artificial Sequence; identical to SEQ ID NO: 8798
  Cyclic GFR-binding peptide
  MOD_RES (31)..(31): Xaa is C or S

SEQ ID NO: 95792 - protein, 30 aa, Artificial Sequence; identical to SEQ ID NO: 8800
  Cyclic GFR-binding peptide
  MOD_RES (4)..(5): Xaa is C or S

SEQ ID NO: 95793 - protein, 25 aa, Artificial Sequence
  Cyclic GFR-binding peptide
TRLSPINILYFDSANNVVYGKIPDM

SEQ ID NO: 95794 - protein, 23 aa, Artificial Sequence
  Cyclic GFR-binding peptide
SATSVLYYDDMGVPTLRKHREGM

SEQ ID NO: 95795 - protein, 29 aa, Artificial Sequence
  Cyclic GFR-binding peptide
  MOD_RES (3)..(4): Xaa is C or S
STXXAPVKTSPISMLYKDNGRVLLLKYHY

SEQ ID NO: 95796 - protein, 31 aa, Artificial Sequence
  Cyclic GFR-binding peptide
  MOD_RES (30)..(30): Xaa is C or S
PQDLSPINILYFVGRTPKVYGKIPMVVKSXK

SEQ ID NO: 95797 - protein, 40 aa, Artificial Sequence; identical to SEQ ID NO: 8807
  Cyclic GFR-binding peptide
  MOD_RES (6)..(7)..(38)..(40): Xaa is C or S

SEQ ID NO: 95798 - protein, 34 aa, Artificial Sequence; identical to SEQ ID NO: 8808
  Cyclic GFR-binding peptide
  MOD_RES (4)..(5): Xaa is C or S

SEQ ID NO: 95799 - protein, 30 aa, Artificial Sequence; identical to SEQ ID NO: 8810
  Cyclic GFR-binding peptide
  MOD_RES (29)..(29): Xaa is C or S

SEQ ID NO: 95800 - protein, 39 aa, Artificial Sequence; identical to SEQ ID NO: 41829
  Cyclic GFR-binding peptide
  MOD_RES (6)..(7)..(39): Xaa is C or S

SEQ ID NO: 95801 - protein, 27 aa, Artificial Sequence
  Cyclic GFR-binding peptide
PTQLEPISVLYLDDSSNVIKFKYENMV

SEQ ID NO: 95802 - protein, 33 aa, Artificial Sequence
  Cyclic GFR-binding peptide
  MOD_RES (5)..(6): Xaa is C or S
IPEPXXVPEKMSPISILYKDENKNVVLKYHYNM

SEQ ID NO: 95803 - protein, 31 aa, Artificial Sequence
  Cyclic GFR-binding peptide
  MOD_RES (4)..(5): Xaa is C or S
PEPXXVPEKMNAISILYFDENKNVVLKKYRN

SEQ ID NO: 95804 - protein, 31 aa, Artificial Sequence; identical to SEQ ID NO: 37526
  Cyclic GFR-binding peptide
  MOD_RES (29)..(31): Xaa is C or S

SEQ ID NO: 95805 - protein, 31 aa, Artificial Sequence; identical to SEQ ID NO: 8815
  Cyclic GFR-binding peptide
  MOD_RES (1)..(2): Xaa is C or S

SEQ ID NO: 95806 - protein, 32 aa, Artificial Sequence; identical to SEQ ID NO: 37529
  Cyclic GFR-binding peptide
  MOD_RES (3)..(4): Xaa is C or S

SEQ ID NO: 95807 - protein, 30 aa, Artificial Sequence
  Cyclic GFR-binding peptide
  MOD_RES (27)..(29): Xaa is C or S
EPISMLYLNDKQQIIKFKYEGMVVDRXGXS

SEQ ID NO: 95808 - protein, 29 aa, Artificial Sequence
  Cyclic GFR-binding peptide
  MOD_RES (2)..(3): Xaa is C or S
TXXAPVKTSATSMLYYDNGRVLLLRKHRM

SEQ ID NO: 95809 - protein, 24 aa, Artificial Sequence
  Cyclic GFR-binding peptide
TELEPISMLYLDEYDKVVKFKYEE

SEQ ID NO: 95810 - protein, 34 aa, Artificial Sequence
  Cyclic GFR-binding peptide
  MOD_RES (32)..(34): Xaa is C or S
VPEKMSPINILYFDENKNVVYGKIPNMTVESXAX

SEQ ID NO: 95811 - protein, 30 aa, Artificial Sequence; identical to SEQ ID NO: 8817
  Cyclic GFR-binding peptide
  MOD_RES (29)..(29): Xaa is C or S

SEQ ID NO: 95812 - protein, 36 aa, Artificial Sequence; identical to SEQ ID NO: 8818
  Cyclic GFR-binding peptide
  MOD_RES (1)..(33)..(35): Xaa is C or S

SEQ ID NO: 95813 - protein, 29 aa, Artificial Sequence
  Cyclic GFR-binding peptide
  MOD_RES (28)..(28): Xaa is C or S
LSPISVLYKDDSSNVILKYHYNMVVRSXG

SEQ ID NO: 95814 - protein, 30 aa, Artificial Sequence
  Cyclic GFR-binding peptide
  MOD_RES (29)..(29): Xaa is C or S
KMSATSILYYDENKNVVLRKHRNMTVESXA

SEQ ID NO: 95815 - protein, 29 aa, Artificial Sequence
  Cyclic GFR-binding peptide
PTKLSPISILYKDKGVVTYLKYHYGMAVS

SEQ ID NO: 95816 - protein, 25 aa, Artificial Sequence
  Cyclic GFR-binding peptide
TKLSPISVLYKDDSSNVILKYHYNM

SEQ ID NO: 95817 - protein, 38 aa, Artificial Sequence
  Cyclic GFR-binding peptide
  MOD_RES (6)..(7): Xaa is C or S
STPPTXXVPTRLSPISILYKDSANNVVLKYHYDMVVES

SEQ ID NO: 95818 - protein, 28 aa, Artificial Sequence
  Cyclic GFR-binding peptide
SQDLSPINILYFIGKTPKIYGKIPMIVK

SEQ ID NO: 95819 - protein, 35 aa, Artificial Sequence
  Cyclic GFR-binding peptide
  MOD_RES (5)..(6): Xaa is C or S
TPPTXXVPTRLSPISILYKDSANNVVLKYHYDMVV

SEQ ID NO: 95820 - protein, 23 aa, Artificial Sequence
  Cyclic GFR-binding peptide
VKTEPISMLYLDNGRVLLKFKYE

SEQ ID NO: 95821 - protein, 32 aa, Artificial Sequence
  Cyclic GFR-binding peptide
  MOD_RES (5)..(6): Xaa is C or S
SAAPXXVPQALSPINILYFVGRKPKVYGKIPM

SEQ ID NO: 95822 - protein, 30 aa, Artificial Sequence; identical to SEQ ID NO: 41863
  Cyclic GFR-binding peptide

SEQ ID NO: 95823 - protein, 30 aa, Artificial Sequence; identical to SEQ ID NO: 37550
  Cyclic GFR-binding peptide
  MOD_RES (2)..(3): Xaa is C or S

SEQ ID NO: 95824 - protein, 30 aa, Artificial Sequence
  Cyclic GFR-binding peptide
  MOD_RES (30)..(30): Xaa is C or S
SQDLSPINILYFIGKTPKIYGKIPMIVKSX

SEQ ID NO: 95825 - protein, 35 aa, Artificial Sequence; identical to SEQ ID NO: 41867
  Cyclic GFR-binding peptide
  MOD_RES (1)..(33)..(35): Xaa is C or S

SEQ ID NO: 95826 - protein, 31 aa, Artificial Sequence; identical to SEQ ID NO: 8833
  Cyclic GFR-binding peptide
  MOD_RES (1)..(1): Xaa is C or S

SEQ ID NO: 95827 - protein, 35 aa, Artificial Sequence; identical to SEQ ID NO: 41870
  Cyclic GFR-binding peptide
  MOD_RES (1)..(2)..(35): Xaa is C or S

SEQ ID NO: 95828 - protein, 38 aa, Artificial Sequence; identical to SEQ ID NO: 8835
  Cyclic GFR-binding peptide
  MOD_RES (6)..(38): Xaa is C or S

SEQ ID NO: 95829 - protein, 31 aa, Artificial Sequence; identical to SEQ ID NO: 8836
  Cyclic GFR-binding peptide
  MOD_RES (3)..(4): Xaa is C or S

SEQ ID NO: 95830 - protein, 30 aa, Artificial Sequence; identical to SEQ ID NO: 37556
  Cyclic GFR-binding peptide
  MOD_RES (1)..(2): Xaa is C or S

SEQ ID NO: 95831 - protein, 27 aa, Artificial Sequence
  Cyclic GFR-binding peptide
ALSATSILYYVGRKPKVLRKHRMIVRS

SEQ ID NO: 95832 - protein, 38 aa, Artificial Sequence; identical to SEQ ID NO: 41873
  Cyclic GFR-binding peptide
  MOD_RES (5)..(6)..(37): Xaa is C or S

SEQ ID NO: 95833 - protein, 35 aa, Artificial Sequence; identical to SEQ ID NO: 37558
  Cyclic GFR-binding peptide
  MOD_RES (1)..(33)..(35): Xaa is C or S

SEQ ID NO: 95834 - protein, 23 aa, Artificial Sequence
  Cyclic GFR-binding peptide
TEPISMLYLDNGRVLLKFKYEMI

SEQ ID NO: 95835 - protein, 30 aa, Artificial Sequence; identical to SEQ ID NO: 37560
  Cyclic GFR-binding peptide
  MOD_RES (4)..(5): Xaa is C or S

SEQ ID NO: 95836 - protein, 34 aa, Artificial Sequence; identical to SEQ ID NO: 37561
  Cyclic GFR-binding peptide
  MOD_RES (1)..(2)..(34): Xaa is C or S

SEQ ID NO: 95837 - protein, 30 aa, Artificial Sequence
  Cyclic GFR-binding peptide
  MOD_RES (2)..(3): Xaa is C or S
PXXVPEKMSPINILYFDENKNVVYGKIPNM

SEQ ID NO: 95838 - protein, 31 aa, Artificial Sequence; identical to SEQ ID NO: 37563
  Cyclic GFR-binding peptide
  MOD_RES (2)..(3): Xaa is C or S

SEQ ID NO: 95839 - protein, 32 aa, Artificial Sequence; identical to SEQ ID NO: 19119
  Cyclic GFR-binding peptide
  MOD_RES (3)..(4): Xaa is C or S

SEQ ID NO: 95840 - protein, 29 aa, Artificial Sequence
  Cyclic GFR-binding peptide
  MOD_RES (29)..(29): Xaa is C or S
VKTSPINMLYFDNGRVLLYGKIPMIVEEX

SEQ ID NO: 95841 - protein, 21 aa, Artificial Sequence
  Cyclic GFR-binding peptide
LSATSILYYIGKTPKILRKHR

SEQ ID NO: 95842 - protein, 35 aa, Artificial Sequence; identical to SEQ ID NO: 8842
  Cyclic GFR-binding peptide
  MOD_RES (1)..(33)..(35): Xaa is C or S

SEQ ID NO: 95843 - protein, 23 aa, Artificial Sequence
  Cyclic GFR-binding peptide
ARLSATSILYYDAANNVVLRKHR

SEQ ID NO: 95844 - protein, 25 aa, Artificial Sequence
  Cyclic GFR-binding peptide
MNAISMLYFNDKQQIILKKYRGMVV

SEQ ID NO: 95845 - protein, 26 aa, Artificial Sequence
  Cyclic GFR-binding peptide
ELSATSMLYYDEYDKVVLRKHREMVV

SEQ ID NO: 95846 - protein, 41 aa, Artificial Sequence; identical to SEQ ID NO: 8854
  Cyclic GFR-binding peptide
  MOD_RES (5)..(6)..(38)..(40): Xaa is C or S

SEQ ID NO: 95847 - protein, 29 aa, Artificial Sequence
  Cyclic GFR-binding peptide
  MOD_RES (1)..(1): Xaa is C or S
XVPQDLSPISILYKVGRTPKVLKYHYMVV

SEQ ID NO: 95848 - protein, 30 aa, Artificial Sequence; identical to SEQ ID NO: 37573
  Cyclic GFR-binding peptide
  MOD_RES (28)..(30): Xaa is C or S

SEQ ID NO: 95849 - protein, 26 aa, Artificial Sequence
  Cyclic GFR-binding peptide
  MOD_RES (26)..(26): Xaa is C or S
SPISILYKVGRTPKVLKYHYMVVKSX

SEQ ID NO: 95850 - protein, 29 aa, Artificial Sequence
  Cyclic GFR-binding peptide
EKMEPISILYLDENKNVVKFKYENMTVES

SEQ ID NO: 95851 - protein, 27 aa, Artificial Sequence
  Cyclic GFR-binding peptide
  MOD_RES (26)..(26): Xaa is C or S
SPISILYKIGKTPKILKYHYMIVKSXK

SEQ ID NO: 95852 - protein, 24 aa, Artificial Sequence
  Cyclic GFR-binding peptide
LNAISILYFVGRKPKVLKKYRMIV

SEQ ID NO: 95853 - protein, 33 aa, Artificial Sequence; identical to SEQ ID NO: 19135
  Cyclic GFR-binding peptide
  MOD_RES (1)..(33): Xaa is C or S

SEQ ID NO: 95854 - protein, 31 aa, Artificial Sequence; identical to SEQ ID NO: 8864
  Cyclic GFR-binding peptide
  MOD_RES (30)..(30): Xaa is C or S

SEQ ID NO: 95855 - protein, 27 aa, Artificial Sequence
  Cyclic GFR-binding peptide
QDLNAISILYFVGRTPKVLKKYRMVVK

SEQ ID NO: 95856 - protein, 34 aa, Artificial Sequence; identical to SEQ ID NO: 8867
  Cyclic GFR-binding peptide
  MOD_RES (1)..(32)..(34): Xaa is C or S

SEQ ID NO: 95857 - protein, 34 aa, Artificial Sequence; identical to SEQ ID NO: 37582
  Cyclic GFR-binding peptide
  MOD_RES (31)..(33): Xaa is C or S

SEQ ID NO: 95858 - protein, 24 aa, Artificial Sequence
  Cyclic GFR-binding peptide
KMSATSILYYDENKNVVLRKHRNM

SEQ ID NO: 95859 - protein, 28 aa, Artificial Sequence
  Cyclic GFR-binding peptide
  MOD_RES (2)..(3): Xaa is C or S
TXXAPVKTEPISMLYLDNGRVLLKFKYE

SEQ ID NO: 95860 - protein, 32 aa, Artificial Sequence; identical to SEQ ID NO: 8874
  Cyclic GFR-binding peptide
  MOD_RES (6)..(7): Xaa is C or S

SEQ ID NO: 95861 - protein, 26 aa, Artificial Sequence
  Cyclic GFR-binding peptide
PTELSPINMLYFDENEKVVYGKIPDM

SEQ ID NO: 95862 - protein, 25 aa, Artificial Sequence
  Cyclic GFR-binding peptide
EKMSPISILYKDENKNVVLKYHYNM

SEQ ID NO: 95863 - protein, 27 aa, Artificial Sequence
  Cyclic GFR-binding peptide
  MOD_RES (1)..(2): Xaa is C or S
XXAPTQLSATSVLYYDDSSNVILRKHR

SEQ ID NO: 95864 - protein, 34 aa, Artificial Sequence; identical to SEQ ID NO: 41910
  Cyclic GFR-binding peptide
  MOD_RES (6)..(7): Xaa is C or S

SEQ ID NO: 95865 - protein, 29 aa, Artificial Sequence
  Cyclic GFR-binding peptide
  MOD_RES (27)..(29): Xaa is C or S
TSPISMLYKDNGRVLLLKYHYMIVEEXGX

SEQ ID NO: 95866 - protein, 35 aa, Artificial Sequence; identical to SEQ ID NO: 76790
  Cyclic GFR-binding peptide
  MOD_RES (1)..(2)..(34): Xaa is C or S

SEQ ID NO: 95867 - protein, 36 aa, Artificial Sequence; identical to SEQ ID NO: 41914
  Cyclic GFR-binding peptide
  MOD_RES (5)..(6): Xaa is C or S

SEQ ID NO: 95868 - protein, 28 aa, Artificial Sequence
  Cyclic GFR-binding peptide
  MOD_RES (2)..(3): Xaa is C or S
TXXVPTRLSPINILYFDSANNVVYGKIP

SEQ ID NO: 95869 - protein, 29 aa, Artificial Sequence
  Cyclic GFR-binding peptide
  MOD_RES (2)..(2): Xaa is C or S
TXAPTKLEPISVLYLDDSSNVIKFKYENM

SEQ ID NO: 95870 - protein, 25 aa, Artificial Sequence
  Cyclic GFR-binding peptide
TRLSATSILYYDSANNVVLRKHRDM

SEQ ID NO: 95871 - protein, 28 aa, Artificial Sequence
  Cyclic GFR-binding peptide
  MOD_RES (1)..(2): Xaa is C or S
XXAPTKLSPINVLYFDDSSNVIYGKIPN

SEQ ID NO: 95872 - protein, 29 aa, Artificial Sequence
  Cyclic GFR-binding peptide
TELSPISMLYKDENEKVVLKYHYDMVVEG

SEQ ID NO: 95873 - protein, 31 aa, Artificial Sequence; identical to SEQ ID NO: 8882
  Cyclic GFR-binding peptide
  MOD_RES (3)..(4): Xaa is C or S

SEQ ID NO: 95874 - protein, 27 aa, Artificial Sequence
  Cyclic GFR-binding peptide
PTKLSPINVLYFDDSSNVIYGKIPNMV

SEQ ID NO: 95875 - protein, 31 aa, Artificial Sequence
  Cyclic GFR-binding peptide
  MOD_RES (3)..(4): Xaa is C or S
PTXXVPTRLSPISILYKDSANNVVLKYHYDM

SEQ ID NO: 95876 - protein, 29 aa, Artificial Sequence
  Cyclic GFR-binding peptide
  MOD_RES (2)..(3): Xaa is C or S
AXXVPTKLNAISVLYFDDMGVPTLKKYRE

SEQ ID NO: 95877 - protein, 31 aa, Artificial Sequence; identical to SEQ ID NO: 19170
  Cyclic GFR-binding peptide
  MOD_RES (1)..(1): Xaa is C or S

SEQ ID NO: 95878 - protein, 37 aa, Artificial Sequence; identical to SEQ ID NO: 8889
  Cyclic GFR-binding peptide
  MOD_RES (2)..(34)..(36): Xaa is C or S

SEQ ID NO: 95879 - protein, 25 aa, Artificial Sequence
  Cyclic GFR-binding peptide
LSPINMLYFDEYDKVVYGKIPEMVV

SEQ ID NO: 95880 - protein, 24 aa, Artificial Sequence
  Cyclic GFR-binding peptide
SPINILYFDAANNVVYGKIPDMVV

SEQ ID NO: 95881 - protein, 34 aa, Artificial Sequence
  Cyclic GFR-binding peptide
  MOD_RES (6)..(7): Xaa is C or S
GIPEPXXVPEKMNAISILYFDENKNVVLKKYRNM

SEQ ID NO: 95882 - protein, 36 aa, Artificial Sequence
  Cyclic GFR-binding peptide
  MOD_RES (5)..(6): Xaa is C or S
TPPTXXVPTRLSATSILYYDSANNVVLRKHRDMVVE

SEQ ID NO: 95883 - protein, 28 aa, Artificial Sequence
  Cyclic GFR-binding peptide
  MOD_RES (2)..(3): Xaa is C or S
PXXVPQALSPINILYFVGRKPKVYGKIP

SEQ ID NO: 95884 - protein, 20 aa, Artificial Sequence
  Cyclic GFR-binding peptide
SPINILYFDSANNVVYGKIP

SEQ ID NO: 95885 - protein, 37 aa, Artificial Sequence
  Cyclic GFR-binding peptide
  MOD_RES (6)..(7): Xaa is C or S
ASAAPXXVPQALSPINILYFVGRKPKVYGKIPMIVRS

SEQ ID NO: 95886 - protein, 29 aa, Artificial Sequence
  Cyclic GFR-binding peptide
  MOD_RES (1)..(1): Xaa is C or S
XAPVKTSPINMLYFDNGRVLLYGKIPMIV

SEQ ID NO: 95887 - protein, 26 aa, Artificial Sequence
  Cyclic GFR-binding peptide
APVKTSPISMLYKDNGRVLLLKYHYM

SEQ ID NO: 95888 - protein, 29 aa, Artificial Sequence
  Cyclic GFR-binding peptide
  MOD_RES (3)..(3): Xaa is C or S
PTXAPTKLSPINVLYFDDSSNVIYGKIPN

SEQ ID NO: 95889 - protein, 34 aa, Artificial Sequence; identical to SEQ ID NO: 41951
  Cyclic GFR-binding peptide
  MOD_RES (3)..(4): Xaa is C or S

SEQ ID NO: 95890 - protein, 26 aa, Artificial Sequence
  Cyclic GFR-binding peptide
SPISILYKDAANNVVLKYHYDMVVEA

SEQ ID NO: 95891 - protein, 32 aa, Artificial Sequence; identical to SEQ ID NO: 8896
  Cyclic GFR-binding peptide
  MOD_RES (4)..(5): Xaa is C or S

SEQ ID NO: 95892 - protein, 22 aa, Artificial Sequence
  Cyclic GFR-binding peptide
NAISILYFVGRTPKVLKKYRMV

SEQ ID NO: 95893 - protein, 27 aa, Artificial Sequence
  Cyclic GFR-binding peptide
  MOD_RES (1)..(1): Xaa is C or S
XVPTKLSPISILYKDKGVVTYLKYHYG

SEQ ID NO: 95894 - protein, 24 aa, Artificial Sequence
  Cyclic GFR-binding peptide
QALSPINILYFVGRKPKVYGKIPM

SEQ ID NO: 95895 - protein, 35 aa, Artificial Sequence; identical to SEQ ID NO: 8903
  Cyclic GFR-binding peptide
  MOD_RES (1)..(2)..(33)..(35): Xaa is C or S

SEQ ID NO: 95896 - protein, 31 aa, Artificial Sequence; identical to SEQ ID NO: 37611
  Cyclic GFR-binding peptide
  MOD_RES (31)..(31): Xaa is C or S

SEQ ID NO: 95897 - protein, 41 aa, Artificial Sequence
  Cyclic GFR-binding peptide
  MOD_RES (6)..(7)..(38)..(40): Xaa is C or S
RVPSTXXAPVKTSATSMLYYDNGRVLLLRKHRMIVEEXGXL

SEQ ID NO: 95898 - protein, 34 aa, Artificial Sequence; identical to SEQ ID NO: 37613
  Cyclic GFR-binding peptide
  MOD_RES (2)..(3): Xaa is C or S

SEQ ID NO: 95899 - protein, 39 aa, Artificial Sequence; identical to SEQ ID NO: 37614
  Cyclic GFR-binding peptide
  MOD_RES (6)..(7)..(39): Xaa is C or S

SEQ ID NO: 95900 - protein, 23 aa, Artificial Sequence
  Cyclic GFR-binding peptide
SPISMLYKNDKQQIILKYHYGMV

SEQ ID NO: 95901 - protein, 40 aa, Artificial Sequence
  Cyclic GFR-binding peptide
  MOD_RES (4)..(5)..(37)..(39): Xaa is C or S
AGPXXTPTKMSATSMLYYNDKQQIILRKHRGMVVDRXGXS

SEQ ID NO: 95902 - protein, 30 aa, Artificial Sequence
  Cyclic GFR-binding peptide
  MOD_RES (29)..(29): Xaa is C or S
KLSATSILYYDKGVVTYLRKHRGMAVSEXG

SEQ ID NO: 95903 - protein, 35 aa, Artificial Sequence
  Cyclic GFR-binding peptide
  MOD_RES (4)..(5): Xaa is C or S
AGPXXTPTKMSATSMLYYNDKQQIILRKHRGMVVD

SEQ ID NO: 95904 - protein, 31 aa, Artificial Sequence; identical to SEQ ID NO: 8909
  Cyclic GFR-binding peptide
  MOD_RES (3)..(4): Xaa is C or S

SEQ ID NO: 95905 - protein, 35 aa, Artificial Sequence; identical to SEQ ID NO: 37624
  Cyclic GFR-binding peptide
  MOD_RES (4)..(5): Xaa is C or S

SEQ ID NO: 95906 - protein, 30 aa, Artificial Sequence; identical to SEQ ID NO: 37626
  Cyclic GFR-binding peptide

SEQ ID NO: 95907 - protein, 31 aa, Artificial Sequence
  Cyclic GFR-binding peptide
  MOD_RES (30)..(30): Xaa is C or S
EKMSPINILYFDENKNVVYGKIPNMTVESXA

SEQ ID NO: 95908 - protein, 38 aa, Artificial Sequence; identical to SEQ ID NO: 41982
  Cyclic GFR-binding peptide
  MOD_RES (2)..(3)..(35)..(37): Xaa is C or S

SEQ ID NO: 95909 - protein, 33 aa, Artificial Sequence; identical to SEQ ID NO: 41989
  Cyclic GFR-binding peptide
  MOD_RES (4)..(5): Xaa is C or S

SEQ ID NO: 95910 - protein, 33 aa, Artificial Sequence; identical to SEQ ID NO: 8919
  Cyclic GFR-binding peptide
  MOD_RES (5)..(6): Xaa is C or S

SEQ ID NO: 95911 - protein, 28 aa, Artificial Sequence
  Cyclic GFR-binding peptide
TELSATSMLYYDEYDKVVLRKHREMVVE

SEQ ID NO: 95912 - protein, 35 aa, Artificial Sequence; identical to SEQ ID NO: 41994
  Cyclic GFR-binding peptide
  MOD_RES (1)..(33)..(35): Xaa is C or S

SEQ ID NO: 95913 - protein, 33 aa, Artificial Sequence; identical to SEQ ID NO: 37637
  Cyclic GFR-binding peptide
  MOD_RES (2)..(3): Xaa is C or S

SEQ ID NO: 95914 - protein, 36 aa, Artificial Sequence; identical to SEQ ID NO: 8922
  Cyclic GFR-binding peptide
  MOD_RES (3)..(4)..(35): Xaa is C or S

SEQ ID NO: 95915 - protein, 40 aa, Artificial Sequence; identical to SEQ ID NO: 8924
  Cyclic GFR-binding peptide
  MOD_RES (7)..(39): Xaa is C or S

SEQ ID NO: 95916 - protein, 36 aa, Artificial Sequence; identical to SEQ ID NO: 41999
  Cyclic GFR-binding peptide
  MOD_RES (6)..(6): Xaa is C or S

SEQ ID NO: 95917 - protein, 35 aa, Artificial Sequence; identical to SEQ ID NO: 42000
  Cyclic GFR-binding peptide
  MOD_RES (5)..(6): Xaa is C or S

SEQ ID NO: 95918 - protein, 39 aa, Artificial Sequence; identical to SEQ ID NO: 42001
  Cyclic GFR-binding peptide
  MOD_RES (6)..(7)..(39): Xaa is C or S

SEQ ID NO: 95919 - protein, 40 aa, Artificial Sequence; identical to SEQ ID NO: 8929
  Cyclic GFR-binding peptide
  MOD_RES (4)..(5)..(37)..(39): Xaa is C or S

SEQ ID NO: 95920 - protein, 32 aa, Artificial Sequence; identical to SEQ ID NO: 8931
  Cyclic GFR-binding peptide
  MOD_RES (1)..(2): Xaa is C or S

SEQ ID NO: 95921 - protein, 27 aa, Artificial Sequence
  Cyclic GFR-binding peptide
  MOD_RES (1)..(1): Xaa is C or S
XVPTELSATSMLYYDEYDKVVLRKHRE

SEQ ID NO: 95922 - protein, 29 aa, Artificial Sequence
  Cyclic GFR-binding peptide
PEKMSPISILYKDENKNVVLKYHYNMTVE

SEQ ID NO: 95923 - protein, 36 aa, Artificial Sequence; identical to SEQ ID NO: 42008
  Cyclic GFR-binding peptide
  MOD_RES (3)..(4)..(35): Xaa is C or S

SEQ ID NO: 95924 - protein, 36 aa, Artificial Sequence; identical to SEQ ID NO: 8934
  Cyclic GFR-binding peptide
  MOD_RES (2)..(3)..(36): Xaa is C or S

SEQ ID NO: 95925 - protein, 28 aa, Artificial Sequence
  Cyclic GFR-binding peptide
  MOD_RES (1)..(1): Xaa is C or S
XTPTKMNAISMLYFNDKQQIILKKYRGM

SEQ ID NO: 95926 - protein, 32 aa, Artificial Sequence; identical to SEQ ID NO: 8935
  Cyclic GFR-binding peptide
  MOD_RES (29)..(31): Xaa is C or S

SEQ ID NO: 95927 - protein, 32 aa, Artificial Sequence; identical to SEQ ID NO: 8936
  Cyclic GFR-binding peptide
  MOD_RES (32)..(32): Xaa is C or S

SEQ ID NO: 95928 - protein, 33 aa, Artificial Sequence
  Cyclic GFR-binding peptide
  MOD_RES (31)..(33): Xaa is C or S
PTKLSATSILYYDKGVVTYLRKHRGMAVSEXGX

SEQ ID NO: 95929 - protein, 28 aa, Artificial Sequence
  Cyclic GFR-binding peptide
PEKMNAISILYFDENKNVVLKKYRNMTV

SEQ ID NO: 95930 - protein, 23 aa, Artificial Sequence
  Cyclic GFR-binding peptide
QALNAISILYFVGRKPKVLKKYR

SEQ ID NO: 95931 - protein, 38 aa, Artificial Sequence; identical to SEQ ID NO: 8941
  Cyclic GFR-binding peptide
  MOD_RES (3)..(4)..(36)..(38): Xaa is C or S

SEQ ID NO: 95932 - protein, 25 aa, Artificial Sequence
  Cyclic GFR-binding peptide
LNAISILYFDAANNVVLKKYRDMVV

SEQ ID NO: 95933 - protein, 27 aa, Artificial Sequence
  Cyclic GFR-binding peptide
  MOD_RES (1)..(2): Xaa is C or S
XXAPTKLEPISVLYLDDSSNVIKFKYE

SEQ ID NO: 95934 - protein, 33 aa, Artificial Sequence; identical to SEQ ID NO: 37662
  Cyclic GFR-binding peptide
  MOD_RES (5)..(6): Xaa is C or S

SEQ ID NO: 95935 - protein, 32 aa, Artificial Sequence; identical to SEQ ID NO: 76824
  Cyclic GFR-binding peptide
  MOD_RES (5)..(6): Xaa is C or S

SEQ ID NO: 95936 - protein, 32 aa, Artificial Sequence; identical to SEQ ID NO: 37669
  Cyclic GFR-binding peptide
  MOD_RES (1)..(2): Xaa is C or S

SEQ ID NO: 95937 - protein, 32 aa, Artificial Sequence; identical to SEQ ID NO: 8947
  Cyclic GFR-binding peptide
  MOD_RES (30)..(32): Xaa is C or S

SEQ ID NO: 95938 - protein, 22 aa, Artificial Sequence
  Cyclic GFR-binding peptide
KMSATSMLYYNDKQQIILRKHR

SEQ ID NO: 95939 - protein, 33 aa, Artificial Sequence
  Cyclic GFR-binding peptide
  MOD_RES (31)..(33): Xaa is C or S
PTKMEPISMLYLNDKQQIIKFKYEGMVVDRXGX

SEQ ID NO: 95940 - protein, 34 aa, Artificial Sequence; identical to SEQ ID NO: 8948
  Cyclic GFR-binding peptide
  MOD_RES (1)..(33): Xaa is C or S

SEQ ID NO: 95941 - protein, 37 aa, Artificial Sequence; identical to SEQ ID NO: 37680
  Cyclic GFR-binding peptide
  MOD_RES (4)..(5)..(37): Xaa is C or S

SEQ ID NO: 95942 - protein, 33 aa, Artificial Sequence
  Cyclic GFR-binding peptide
  MOD_RES (5)..(6): Xaa is C or S
IPEPXXVPEKMSATSILYYDENKNVVLRKHRNM

SEQ ID NO: 95943 - protein, 25 aa, Artificial Sequence
  Cyclic GFR-binding peptide
TKLSATSVLYYDDSSNVILRKHRNM

SEQ ID NO: 95944 - protein, 26 aa, Artificial Sequence
  Cyclic GFR-binding peptide
APTKLEPISVLYLDSSNNVIKFKYEN

SEQ ID NO: 95945 - protein, 33 aa, Artificial Sequence
  Cyclic GFR-binding peptide
  MOD_RES (30)..(32): Xaa is C or S
TKLSATSILYYDKGVVTYLRKHRGMAVSEXGXR

SEQ ID NO: 95946 - protein, 35 aa, Artificial Sequence
  Cyclic GFR-binding peptide
  MOD_RES (1)..(33)..(35): Xaa is C or S
XVPEKMSATSILYYDENKNVVLRKHRNMTVESXAX

SEQ ID NO: 95947 - protein, 31 aa, Artificial Sequence; identical to SEQ ID NO: 42037
  Cyclic GFR-binding peptide

SEQ ID NO: 95948 - protein, 24 aa, Artificial Sequence
  Cyclic GFR-binding peptide
KLSATSVLYYDDMGVPTLRKHREG

SEQ ID NO: 95949 - protein, 27 aa, Artificial Sequence
  Cyclic GFR-binding peptide
  MOD_RES (1)..(1): Xaa is C or S
XVPTELSPISMLYKDENEKVVLKYHYD

SEQ ID NO: 95950 - protein, 34 aa, Artificial Sequence; identical to SEQ ID NO: 42043
  Cyclic GFR-binding peptide
  MOD_RES (2)..(3)..(34): Xaa is C or S

SEQ ID NO: 95951 - protein, 33 aa, Artificial Sequence; identical to SEQ ID NO: 8966
  Cyclic GFR-binding peptide
  MOD_RES (5)..(6): Xaa is C or S

SEQ ID NO: 95952 - protein, 34 aa, Artificial Sequence
  Cyclic GFR-binding peptide
  MOD_RES (31)..(33): Xaa is C or S
PEKMEPISILYLDENKNVVKFKYENMTVESXAXR

SEQ ID NO: 95953 - protein, 22 aa, Artificial Sequence
  Cyclic GFR-binding peptide
LSPISMLYKDEYDKVVLKYHYE

SEQ ID NO: 95954 - protein, 36 aa, Artificial Sequence; identical to SEQ ID NO: 37694
  Cyclic GFR-binding peptide
  MOD_RES (3)..(4)..(36): Xaa is C or S

SEQ ID NO: 95955 - protein, 36 aa, Artificial Sequence; identical to SEQ ID NO: 8972
  Cyclic GFR-binding peptide
  MOD_RES (4)..(5): Xaa is C or S

SEQ ID NO: 95956 - protein, 30 aa, Artificial Sequence; identical to SEQ ID NO: 37698
  Cyclic GFR-binding peptide
  MOD_RES (27)..(29): Xaa is C or S

SEQ ID NO: 95957 - protein, 33 aa, Artificial Sequence; identical to SEQ ID NO: 42048
  Cyclic GFR-binding peptide
  MOD_RES (6)..(7): Xaa is C or S

SEQ ID NO: 95958 - protein, 36 aa, Artificial Sequence; identical to SEQ ID NO: 8979
  Cyclic GFR-binding peptide
  MOD_RES (2)..(3)..(35): Xaa is C or S

SEQ ID NO: 95959 - protein, 33 aa, Artificial Sequence; identical to SEQ ID NO: 76833
  Cyclic GFR-binding peptide
  MOD_RES (4)..(5): Xaa is C or S

SEQ ID NO: 95960 - protein, 33 aa, Artificial Sequence
  Cyclic GFR-binding peptide
  MOD_RES (5)..(6): Xaa is C or S
SAGPXXTPTKMSPISMLYKNDKQQIILKYHYGM

SEQ ID NO: 95961 - protein, 32 aa, Artificial Sequence; identical to SEQ ID NO: 37706
  Cyclic GFR-binding peptide
  MOD_RES (5)..(5): Xaa is C or S

SEQ ID NO: 95962 - protein, 23 aa, Artificial Sequence
  Cyclic GFR-binding peptide
RLEPISILYLDSANNVVKFKYED

SEQ ID NO: 95963 - protein, 32 aa, Artificial Sequence; identical to SEQ ID NO: 76834
  Cyclic GFR-binding peptide
  MOD_RES (30)..(32): Xaa is C or S

SEQ ID NO: 95964 - protein, 22 aa, Artificial Sequence
  Cyclic GFR-binding peptide
ALSATSILYYVGRKPKVLRKHR

SEQ ID NO: 95965 - protein, 31 aa, Artificial Sequence; identical to SEQ ID NO: 8983
  Cyclic GFR-binding peptide
  MOD_RES (3)..(3): Xaa is C or S

SEQ ID NO: 95966 - protein, 27 aa, Artificial Sequence
  Cyclic GFR-binding peptide
KTNAISMLYFDNGRVLLLKKYRMIVEE

SEQ ID NO: 95967 - protein, 34 aa, Artificial Sequence; identical to SEQ ID NO: 42054
  Cyclic GFR-binding peptide
  MOD_RES (3)..(4): Xaa is C or S

SEQ ID NO: 95968 - protein, 35 aa, Artificial Sequence
  Cyclic GFR-binding peptide
  MOD_RES (1)..(2)..(34): Xaa is C or S
XXVPEKMNAISILYFDENKNVVLKKYRNMTVESXA

SEQ ID NO: 95969 - protein, 27 aa, Artificial Sequence
  Cyclic GFR-binding peptide
TPTKMEPISMLYLNDKQQIIKFKYEGM

SEQ ID NO: 95970 - protein, 22 aa, Artificial Sequence
  Cyclic GFR-binding peptide
RLEPISILYLDSANNVVKFKYE

SEQ ID NO: 95971 - protein, 32 aa, Artificial Sequence; identical to SEQ ID NO: 37707
  Cyclic GFR-binding peptide
  MOD_RES (30)..(32): Xaa is C or S

SEQ ID NO: 95972 - protein, 31 aa, Artificial Sequence; identical to SEQ ID NO: 37709
  Cyclic GFR-binding peptide
  MOD_RES (1)..(1): Xaa is C or S

SEQ ID NO: 95973 - protein, 38 aa, Artificial Sequence
  Cyclic GFR-binding peptide
  MOD_RES (3)..(4)..(36)..(38): Xaa is C or S
EPXXVPEKMSPINILYFDENKNVVYGKIPNMTVESXAX

SEQ ID NO: 95974 - protein, 32 aa, Artificial Sequence; identical to SEQ ID NO: 42059
  Cyclic GFR-binding peptide
  MOD_RES (1)..(2): Xaa is C or S

SEQ ID NO: 95975 - protein, 25 aa, Artificial Sequence
  Cyclic GFR-binding peptide
LSATSVLYYDDSSNVILRKHRNMVV

SEQ ID NO: 95976 - protein, 25 aa, Artificial Sequence
  Cyclic GFR-binding peptide
KMSATSMLYYNDKQQIILRKHRGMV

SEQ ID NO: 95977 - protein, 30 aa, Artificial Sequence; identical to SEQ ID NO: 8992
  Cyclic GFR-binding peptide
  MOD_RES (2)..(3): Xaa is C or S

SEQ ID NO: 95978 - protein, 40 aa, Artificial Sequence
  Cyclic GFR-binding peptide
  MOD_RES (5)..(6)..(38)..(40): Xaa is C or S
TPPTXXVPTRLSPISILYKDSANNVVLKYHYDMVVESXGX

SEQ ID NO: 95979 - protein, 39 aa, Artificial Sequence
  Cyclic GFR-binding peptide
  MOD_RES (6)..(7)..(39): Xaa is C or S
HVPKPXXAPTKLEPISVLYLDDSSNVIKFKYENMVVRSX

SEQ ID NO: 95980 - protein, 22 aa, Artificial Sequence
  Cyclic GFR-binding peptide
LEPISILYLVGRTPKVKFKYEM

SEQ ID NO: 95981 - protein, 29 aa, Artificial Sequence
  Cyclic GFR-binding peptide
  MOD_RES (28)..(28): Xaa is C or S
MEPISILYLDENKNVVKFKYENMTVESXA

SEQ ID NO: 95982 - protein, 30 aa, Artificial Sequence
  Cyclic GFR-binding peptide
  MOD_RES (30)..(30): Xaa is C or S
TRLSPISILYKDSANNVVLKYHYDMVVESX

SEQ ID NO: 95983 - protein, 40 aa, Artificial Sequence; identical to SEQ ID NO: 9001
  Cyclic GFR-binding peptide
  MOD_RES (5)..(6)..(38)..(40): Xaa is C or S

SEQ ID NO: 95984 - protein, 36 aa, Artificial Sequence; identical to SEQ ID NO: 76848
  Cyclic GFR-binding peptide
  MOD_RES (5)..(6): Xaa is C or S

SEQ ID NO: 95985 - protein, 26 aa, Artificial Sequence
  Cyclic GFR-binding peptide
NAISMLYFNDKQQIILKKYRGMVVDR

SEQ ID NO: 95986 - protein, 36 aa, Artificial Sequence; identical to SEQ ID NO: 37726
  Cyclic GFR-binding peptide
  MOD_RES (2)..(3)..(35): Xaa is C or S

SEQ ID NO: 95987 - protein, 35 aa, Artificial Sequence
  Cyclic GFR-binding peptide
  MOD_RES (3)..(4)..(35): Xaa is C or S
STXXAPVKTEPISMLYLDNGRVLLKFKYEMIVEEX

SEQ ID NO: 95988 - protein, 32 aa, Artificial Sequence; identical to SEQ ID NO: 76852
  Cyclic GFR-binding peptide
  MOD_RES (30)..(32): Xaa is C or S

SEQ ID NO: 95989 - protein, 38 aa, Artificial Sequence; identical to SEQ ID NO: 42075
  Cyclic GFR-binding peptide
  MOD_RES (2)..(3)..(35)..(37): Xaa is C or S

SEQ ID NO: 95990 - protein, 34 aa, Artificial Sequence; identical to SEQ ID NO: 9004
  Cyclic GFR-binding peptide
  MOD_RES (5)..(5): Xaa is C or S

SEQ ID NO: 95991 - protein, 27 aa, Artificial Sequence
  Cyclic GFR-binding peptide
LEPISVLYLDSSNNVIKFKYENMVVKA

SEQ ID NO: 95992 - protein, 26 aa, Artificial Sequence
  Cyclic GFR-binding peptide
PTRLNAISILYFDSANNVVLKKYRDM

SEQ ID NO: 95993 - protein, 38 aa, Artificial Sequence
  Cyclic GFR-binding peptide
  MOD_RES (3)..(4)..(35)..(37): Xaa is C or S
STXXAPVKTEPISMLYLDNGRVLLKFKYEMIVEEXGXL

SEQ ID NO: 95994 - protein, 27 aa, Artificial Sequence
  Cyclic GFR-binding peptide
  MOD_RES (27)..(27): Xaa is C or S
SPISVLYKDSSNNVILKYHYNMVVKAX

SEQ ID NO: 95995 - protein, 32 aa, Artificial Sequence; identical to SEQ ID NO: 42083
  Cyclic GFR-binding peptide
  MOD_RES (2)..(3): Xaa is C or S

SEQ ID NO: 95996 - protein, 32 aa, Artificial Sequence; identical to SEQ ID NO: 9010
  Cyclic GFR-binding peptide
  MOD_RES (7)..(7): Xaa is C or S

SEQ ID NO: 95997 - protein, 35 aa, Artificial Sequence; identical to SEQ ID NO: 42086
  Cyclic GFR-binding peptide
  MOD_RES (6)..(7): Xaa is C or S

SEQ ID NO: 95998 - protein, 33 aa, Artificial Sequence
  Cyclic GFR-binding peptide
  MOD_RES (2)..(3): Xaa is C or S
PXXVPEKMSPINILYFDENKNVVYGKIPNMTVE

SEQ ID NO: 95999 - protein, 33 aa, Artificial Sequence
  Cyclic GFR-binding peptide
  MOD_RES (5)..(6): Xaa is C or S
TPPTXXVPTRLEPISILYLDSANNVVKFKYEDM

SEQ ID NO: 96000 - protein, 30 aa, Artificial Sequence
  Cyclic GFR-binding peptide
  MOD_RES (27)..(29): Xaa is C or S
EPISILYLDENKNVVKFKYENMTVESXAXR

SEQ ID NO: 96001 - protein, 24 aa, Artificial Sequence
  Cyclic GFR-binding peptide
DLSPISILYKVGRTPKVLKYHYMV

SEQ ID NO: 96002 - protein, 29 aa, Artificial Sequence
  Cyclic GFR-binding peptide
  MOD_RES (2)..(3): Xaa is C or S
AXXVPTKLSATSVLYYDDMGVPTLRKHRE

SEQ ID NO: 96003 - protein, 28 aa, Artificial Sequence
  Cyclic GFR-binding peptide
  MOD_RES (27)..(27): Xaa is C or S
TSATSMLYYDNGRVLLLRKHRMIVEEXG

SEQ ID NO: 96004 - protein, 31 aa, Artificial Sequence; identical to SEQ ID NO: 9020
  Cyclic GFR-binding peptide
  MOD_RES (4)..(5): Xaa is C or S

SEQ ID NO: 96005 - protein, 35 aa, Artificial Sequence; identical to SEQ ID NO: 37744
  Cyclic GFR-binding peptide
  MOD_RES (4)..(5): Xaa is C or S

SEQ ID NO: 96006 - protein, 24 aa, Artificial Sequence
  Cyclic GFR-binding peptide
PTELSATSMLYYDEYDKVVLRKHR

SEQ ID NO: 96007 - protein, 33 aa, Artificial Sequence; identical to SEQ ID NO: 37746
  Cyclic GFR-binding peptide
  MOD_RES (31)..(33): Xaa is C or S

SEQ ID NO: 96008 - protein, 26 aa, Artificial Sequence
  Cyclic GFR-binding peptide
VPTKLNAISVLYFDDMGVPTLKKYRE

SEQ ID NO: 96009 - protein, 26 aa, Artificial Sequence
  Cyclic GFR-binding peptide
  MOD_RES (1)..(1): Xaa is C or S
XAPVKTEPISMLYLDNGRVLLKFKYE

SEQ ID NO: 96010 - protein, 31 aa, Artificial Sequence; identical to SEQ ID NO: 9026
  Cyclic GFR-binding peptide
  MOD_RES (3)..(3): Xaa is C or S

SEQ ID NO: 96011 - protein, 37 aa, Artificial Sequence
  Cyclic GFR-binding peptide
  MOD_RES (2)..(3)..(35)..(37): Xaa is C or S
PXXTPTKMSATSMLYYNDKQQIILRKHRGMVVDRXGX

SEQ ID NO: 96012 - protein, 24 aa, Artificial Sequence
  Cyclic GFR-binding peptide
SATSILYYDSANNVVLRKHRDMVV

SEQ ID NO: 96013 - protein, 35 aa, Artificial Sequence; identical to SEQ ID NO: 19272
  Cyclic GFR-binding peptide
  MOD_RES (32)..(34): Xaa is C or S

SEQ ID NO: 96014 - protein, 28 aa, Artificial Sequence
  Cyclic GFR-binding peptide
ELSATSMLYYDENEKVVLRKHRDMVVEG

SEQ ID NO: 96015 - protein, 29 aa, Artificial Sequence
  Cyclic GFR-binding peptide
  MOD_RES (2)..(3): Xaa is C or S
AXXAPTKLEPISVLYLDSSNNVIKFKYEN

SEQ ID NO: 96016 - protein, 27 aa, Artificial Sequence
  Cyclic GFR-binding peptide
  MOD_RES (27)..(27): Xaa is C or S
TEPISMLYLDNGRVLLKFKYEMIVEEX

SEQ ID NO: 96017 - protein, 20 aa, Artificial Sequence
  Cyclic GFR-binding peptide
EPISMLYLDNGRVLLKFKYE

SEQ ID NO: 96018 - protein, 29 aa, Artificial Sequence
  Cyclic GFR-binding peptide
VPTELSATSMLYYDEYDKVVLRKHREMVV

SEQ ID NO: 96019 - protein, 22 aa, Artificial Sequence
  Cyclic GFR-binding peptide
KLEPISVLYLDSSNNVIKFKYE

SEQ ID NO: 96020 - protein, 39 aa, Artificial Sequence; identical to SEQ ID NO: 9034
  Cyclic GFR-binding peptide
  MOD_RES (3)..(4)..(37)..(39): Xaa is C or S

SEQ ID NO: 96021 - protein, 24 aa, Artificial Sequence
  Cyclic GFR-binding peptide
ALEPISILYLVGRKPKVKFKYEMI

SEQ ID NO: 96022 - protein, 39 aa, Artificial Sequence; identical to SEQ ID NO: 9035
  Cyclic GFR-binding peptide
  MOD_RES (4)..(5)..(36)..(38): Xaa is C or S

SEQ ID NO: 96023 - protein, 40 aa, Artificial Sequence; identical to SEQ ID NO: 37758
  Cyclic GFR-binding peptide
  MOD_RES (6)..(7)..(38)..(40): Xaa is C or S

SEQ ID NO: 96024 - protein, 27 aa, Artificial Sequence
  Cyclic GFR-binding peptide
QALSPINILYFVGRKPKVYGKIPMIVR

SEQ ID NO: 96025 - protein, 35 aa, Artificial Sequence
  Cyclic GFR-binding peptide
  MOD_RES (2)..(3)..(34): Xaa is C or S
PXXVPQALSPINILYFVGRKPKVYGKIPMIVRSXK

SEQ ID NO: 96026 - protein, 29 aa, Artificial Sequence
  Cyclic GFR-binding peptide
  MOD_RES (2)..(3): Xaa is C or S
PXXTPTKMNAISMLYFNDKQQIILKKYRG

SEQ ID NO: 96027 - protein, 33 aa, Artificial Sequence; identical to SEQ ID NO: 9036
  Cyclic GFR-binding peptide
  MOD_RES (5)..(6): Xaa is C or S

SEQ ID NO: 96028 - protein, 34 aa, Artificial Sequence; identical to SEQ ID NO: 37761
  Cyclic GFR-binding peptide
  MOD_RES (31)..(33): Xaa is C or S

SEQ ID NO: 96029 - protein, 30 aa, Artificial Sequence; identical to SEQ ID NO: 37763
  Cyclic GFR-binding peptide

SEQ ID NO: 96030 - protein, 29 aa, Artificial Sequence
  Cyclic GFR-binding peptide
TRLSPINILYFDSANNVVYGKIPDMVVES

SEQ ID NO: 96031 - protein, 30 aa, Artificial Sequence; identical to SEQ ID NO: 37764
  Cyclic GFR-binding peptide
  MOD_RES (1)..(2): Xaa is C or S

SEQ ID NO: 96032 - protein, 30 aa, Artificial Sequence; identical to SEQ ID NO: 37765
  Cyclic GFR-binding peptide
  MOD_RES (2)..(3): Xaa is C or S

SEQ ID NO: 96033 - protein, 39 aa, Artificial Sequence
  Cyclic GFR-binding peptide
  MOD_RES (5)..(6)..(38): Xaa is C or S
APASXXVPARLSATSILYYDAANNVVLRKHRDMVVEAXG

SEQ ID NO: 96034 - protein, 27 aa, Artificial Sequence
  Cyclic GFR-binding peptide
ARLEPISILYLDAANNVVKFKYEDMVV

SEQ ID NO: 96035 - protein, 32 aa, Artificial Sequence; identical to SEQ ID NO: 42125
  Cyclic GFR-binding peptide
  MOD_RES (1)..(2): Xaa is C or S

SEQ ID NO: 96036 - protein, 28 aa, Artificial Sequence
  Cyclic GFR-binding peptide
PTKLSPINILYFDKGVVTYYGKIPGMAV

SEQ ID NO: 96037 - protein, 29 aa, Artificial Sequence
  Cyclic GFR-binding peptide
  MOD_RES (27)..(29): Xaa is C or S
NAISMLYFNDKQQIILKKYRGMVVDRXGX

SEQ ID NO: 96038 - protein, 38 aa, Artificial Sequence; identical to SEQ ID NO: 37771
  Cyclic GFR-binding peptide
  MOD_RES (3)..(4)..(36)..(38): Xaa is C or S

SEQ ID NO: 96039 - protein, 39 aa, Artificial Sequence
  Cyclic GFR-binding peptide
  MOD_RES (6)..(7)..(38): Xaa is C or S
RVPSTXXAPVKTSATSMLYYDNGRVLLLRKHRMIVEEXG

SEQ ID NO: 96040 - protein, 29 aa, Artificial Sequence
  Cyclic GFR-binding peptide
EKMNAISILYFDENKNVVLKKYRNMTVES

SEQ ID NO: 96041 - protein, 27 aa, Artificial Sequence
  Cyclic GFR-binding peptide
DLNAISILYFVGRTPKVLKKYRMVVKS

SEQ ID NO: 96042 - protein, 41 aa, Artificial Sequence; identical to SEQ ID NO: 9054
  Cyclic GFR-binding peptide
  MOD_RES (5)..(6)..(38)..(40): Xaa is C or S

SEQ ID NO: 96043 - protein, 25 aa, Artificial Sequence
  Cyclic GFR-binding peptide
PTKLEPISVLYLDDMGVPTKFKYEE

SEQ ID NO: 96044 - protein, 29 aa, Artificial Sequence
  Cyclic GFR-binding peptide
  MOD_RES (27)..(29): Xaa is C or S
LSPISILYKVGRKPKVLKYHYMIVRSXKX

SEQ ID NO: 96045 - protein, 38 aa, Artificial Sequence; identical to SEQ ID NO: 9058
  Cyclic GFR-binding peptide
  MOD_RES (4)..(5)..(36)..(38): Xaa is C or S

SEQ ID NO: 96046 - protein, 35 aa, Artificial Sequence; identical to SEQ ID NO: 42143
  Cyclic GFR-binding peptide
  MOD_RES (2)..(3)..(34): Xaa is C or S

SEQ ID NO: 96047 - protein, 34 aa, Artificial Sequence; identical to SEQ ID NO: 42146
  Cyclic GFR-binding peptide
  MOD_RES (1)..(2)..(34): Xaa is C or S

SEQ ID NO: 96048 - protein, 29 aa, Artificial Sequence
  Cyclic GFR-binding peptide
  MOD_RES (1)..(1): Xaa is C or S
XVPARLEPISILYLDAANNVVKFKYEDMV

SEQ ID NO: 96049 - protein, 25 aa, Artificial Sequence
  Cyclic GFR-binding peptide
QALNAISILYFVGRKPKVLKKYRMI

SEQ ID NO: 96050 - protein, 22 aa, Artificial Sequence
  Cyclic GFR-binding peptide
KMSPISMLYKNDKQQIILKYHY

SEQ ID NO: 96051 - protein, 23 aa, Artificial Sequence
  Cyclic GFR-binding peptide
LSPISILYKDAANNVVLKYHYDM

SEQ ID NO: 96052 - protein, 33 aa, Artificial Sequence; identical to SEQ ID NO: 42150
  Cyclic GFR-binding peptide
  MOD_RES (6)..(7): Xaa is C or S

SEQ ID NO: 96053 - protein, 29 aa, Artificial Sequence
  Cyclic GFR-binding peptide
PTKMSPISMLYKNDKQQIILKYHYGMVVD

SEQ ID NO: 96054 - protein, 35 aa, Artificial Sequence; identical to SEQ ID NO: 42151
  Cyclic GFR-binding peptide
  MOD_RES (3)..(4): Xaa is C or S

SEQ ID NO: 96055 - protein, 29 aa, Artificial Sequence
  Cyclic GFR-binding peptide
  MOD_RES (29)..(29): Xaa is C or S
QDLEPISILYLIGKTPKIKFKYEMIVKSX

SEQ ID NO: 96056 - protein, 28 aa, Artificial Sequence
  Cyclic GFR-binding peptide
  MOD_RES (27)..(27): Xaa is C or S
LSATSILYYIGKTPKILRKHRMIVKSXK

SEQ ID NO: 96057 - protein, 31 aa, Artificial Sequence
  Cyclic GFR-binding peptide
  MOD_RES (1)..(2): Xaa is C or S
XXVPEKMSPISILYKDENKNVVLKYHYNMTV

SEQ ID NO: 96058 - protein, 33 aa, Artificial Sequence; identical to SEQ ID NO: 42156
  Cyclic GFR-binding peptide
  MOD_RES (1)..(1): Xaa is C or S

SEQ ID NO: 96059 - protein, 35 aa, Artificial Sequence; identical to SEQ ID NO: 37792
  Cyclic GFR-binding peptide
  MOD_RES (2)..(3)..(34): Xaa is C or S

SEQ ID NO: 96060 - protein, 25 aa, Artificial Sequence
  Cyclic GFR-binding peptide
RLEPISILYLDAANNVVKFKYEDMV

SEQ ID NO: 96061 - protein, 40 aa, Artificial Sequence
  Cyclic GFR-binding peptide
  MOD_RES (5)..(6)..(38)..(40): Xaa is C or S
IPEPXXVPEKMEPISILYLDENKNVVKFKYENMTVESXAX

SEQ ID NO: 96062 - protein, 29 aa, Artificial Sequence
  Cyclic GFR-binding peptide
  MOD_RES (1)..(2): Xaa is C or S
XXTPTKMNAISMLYFNDKQQIILKKYRGM

SEQ ID NO: 96063 - protein, 34 aa, Artificial Sequence; identical to SEQ ID NO: 76883
  Cyclic GFR-binding peptide
  MOD_RES (6)..(7): Xaa is C or S

SEQ ID NO: 96064 - protein, 38 aa, Artificial Sequence
  Cyclic GFR-binding peptide
  MOD_RES (5)..(6)..(38): Xaa is C or S
SAGPXXTPTKMSATSMLYYNDKQQIILRKHRGMVVDRX

SEQ ID NO: 96065 - protein, 28 aa, Artificial Sequence
  Cyclic GFR-binding peptide
EKMSPISILYKDENKNVVLKYHYNMTVE

SEQ ID NO: 96066 - protein, 41 aa, Artificial Sequence; identical to SEQ ID NO: 37800
  Cyclic GFR-binding peptide
  MOD_RES (5)..(6)..(38)..(40): Xaa is C or S

SEQ ID NO: 96067 - protein, 35 aa, Artificial Sequence; identical to SEQ ID NO: 9072
  Cyclic GFR-binding peptide
  MOD_RES (1)..(2)..(33)..(35): Xaa is C or S

SEQ ID NO: 96068 - protein, 30 aa, Artificial Sequence
  Cyclic GFR-binding peptide
  MOD_RES (4)..(5): Xaa is C or S
SKAXXVPTKLSATSILYYDKGVVTYLRKHR

SEQ ID NO: 96069 - protein, 32 aa, Artificial Sequence; identical to SEQ ID NO: 42162
  Cyclic GFR-binding peptide
  MOD_RES (2)..(3): Xaa is C or S

SEQ ID NO: 96070 - protein, 31 aa, Artificial Sequence
  Cyclic GFR-binding peptide
  MOD_RES (29)..(31): Xaa is C or S
RLSATSILYYDAANNVVLRKHRDMVVEAXGX

SEQ ID NO: 96071 - protein, 23 aa, Artificial Sequence
  Cyclic GFR-binding peptide
EPISVLYLDSSNNVIKFKYENMV

SEQ ID NO: 96072 - protein, 28 aa, Artificial Sequence
  Cyclic GFR-binding peptide
KMSATSMLYYNDKQQIILRKHRGMVVDR

SEQ ID NO: 96073 - protein, 23 aa, Artificial Sequence
  Cyclic GFR-binding peptide
QALSPISILYKVGRKPKVLKYHY

SEQ ID NO: 96074 - protein, 32 aa, Artificial Sequence
  Cyclic GFR-binding peptide
  MOD_RES (6)..(7): Xaa is C or S
GSAGPXXTPTKMEPISMLYLNDKQQIIKFKYE

SEQ ID NO: 96075 - protein, 32 aa, Artificial Sequence; identical to SEQ ID NO: 37808
  Cyclic GFR-binding peptide
  MOD_RES (1)..(2): Xaa is C or S

SEQ ID NO: 96076 - protein, 28 aa, Artificial Sequence
  Cyclic GFR-binding peptide
  MOD_RES (3)..(3): Xaa is C or S
PTXAPTKLSPISVLYKDDSSNVILKYHY

SEQ ID NO: 96077 - protein, 34 aa, Artificial Sequence; identical to SEQ ID NO: 76887
  Cyclic GFR-binding peptide
  MOD_RES (3)..(4): Xaa is C or S

SEQ ID NO: 96078 - protein, 26 aa, Artificial Sequence
  Cyclic GFR-binding peptide
KMSPINILYFDENKNVVYGKIPNMTV

SEQ ID NO: 96079 - protein, 24 aa, Artificial Sequence
  Cyclic GFR-binding peptide
KLEPISVLYLDDSSNVIKFKYENM

SEQ ID NO: 96080 - protein, 33 aa, Artificial Sequence; identical to SEQ ID NO: 42173
  Cyclic GFR-binding peptide
  MOD_RES (6)..(6): Xaa is C or S

SEQ ID NO: 96081 - protein, 34 aa, Artificial Sequence; identical to SEQ ID NO: 42175
  Cyclic GFR-binding peptide
  MOD_RES (31)..(33): Xaa is C or S

SEQ ID NO: 96082 - protein, 29 aa, Artificial Sequence
  Cyclic GFR-binding peptide
  MOD_RES (29)..(29): Xaa is C or S
QDLSPINILYFVGRTPKVYGKIPMVVKSX

SEQ ID NO: 96083 - protein, 34 aa, Artificial Sequence; identical to SEQ ID NO: 9084
  Cyclic GFR-binding peptide
  MOD_RES (31)..(33): Xaa is C or S

SEQ ID NO: 96084 - protein, 36 aa, Artificial Sequence
  Cyclic GFR-binding peptide
  MOD_RES (3)..(4)..(35): Xaa is C or S
STXXAPVKTEPISMLYLDNGRVLLKFKYEMIVEEXG

SEQ ID NO: 96085 - protein, 28 aa, Artificial Sequence
  Cyclic GFR-binding peptide
QDLSPINILYFVGRTPKVYGKIPMVVKS

SEQ ID NO: 96086 - protein, 33 aa, Artificial Sequence; identical to SEQ ID NO: 37818
  Cyclic GFR-binding peptide
  MOD_RES (5)..(6): Xaa is C or S

SEQ ID NO: 96087 - protein, 36 aa, Artificial Sequence; identical to SEQ ID NO: 9088
  Cyclic GFR-binding peptide
  MOD_RES (6)..(7): Xaa is C or S

SEQ ID NO: 96088 - protein, 37 aa, Artificial Sequence
  Cyclic GFR-binding peptide
  MOD_RES (6)..(7): Xaa is C or S
ASASPXXVPQDLSPINILYFVGRTPKVYGKIPMVVKS

SEQ ID NO: 96089 - protein, 34 aa, Artificial Sequence; identical to SEQ ID NO: 37821
  Cyclic GFR-binding peptide
  MOD_RES (3)..(4): Xaa is C or S

SEQ ID NO: 96090 - protein, 38 aa, Artificial Sequence; identical to SEQ ID NO: 37822
  Cyclic GFR-binding peptide
  MOD_RES (3)..(4)..(35)..(37): Xaa is C or S

SEQ ID NO: 96091 - protein, 25 aa, Artificial Sequence
  Cyclic GFR-binding peptide
LNAISMLYFDEYDKVVLKKYREMVV

SEQ ID NO: 96092 - protein, 28 aa, Artificial Sequence
  Cyclic GFR-binding peptide
VPQALSATSILYYVGRKPKVLRKHRMIV

SEQ ID NO: 96093 - protein, 25 aa, Artificial Sequence
  Cyclic GFR-binding peptide
APTKLSATSVLYYDDSSNVILRKHR

SEQ ID NO: 96094 - protein, 25 aa, Artificial Sequence
  Cyclic GFR-binding peptide
LNAISILYFVGRTPKVLKKYRMVVK

SEQ ID NO: 96095 - protein, 32 aa, Artificial Sequence
  Cyclic GFR-binding peptide
  MOD_RES (30)..(32): Xaa is C or S
PQDLSPINILYFVGRTPKVYGKIPMVVKSXKX

SEQ ID NO: 96096 - protein, 32 aa, Artificial Sequence; identical to SEQ ID NO: 42189
  Cyclic GFR-binding peptide
  MOD_RES (31)..(31): Xaa is C or S

SEQ ID NO: 96097 - protein, 29 aa, Artificial Sequence
  Cyclic GFR-binding peptide
  MOD_RES (27)..(29): Xaa is C or S
NAISVLYFDSSNNVILKKYRNMVVKAXGX

SEQ ID NO: 96098 - protein, 35 aa, Artificial Sequence; identical to SEQ ID NO: 9099
  Cyclic GFR-binding peptide
  MOD_RES (32)..(34): Xaa is C or S

SEQ ID NO: 96099 - protein, 39 aa, Artificial Sequence
  Cyclic GFR-binding peptide
  MOD_RES (4)..(5)..(37)..(39): Xaa is C or S
PPTXXVPTRLSPISILYKDSANNVVLKYHYDMVVESXGX

SEQ ID NO: 96100 - protein, 43 aa, Artificial Sequence; identical to SEQ ID NO: 37833
  Cyclic GFR-binding peptide
  MOD_RES (6)..(7)..(40)..(42): Xaa is C or S

SEQ ID NO: 96101 - protein, 32 aa, Artificial Sequence; identical to SEQ ID NO: 37837
  Cyclic GFR-binding peptide
  MOD_RES (2)..(3): Xaa is C or S

SEQ ID NO: 96102 - protein, 33 aa, Artificial Sequence; identical to SEQ ID NO: 9107
  Cyclic GFR-binding peptide
  MOD_RES (1)..(2)..(33): Xaa is C or S

SEQ ID NO: 96103 - protein, 29 aa, Artificial Sequence
  Cyclic GFR-binding peptide
  MOD_RES (2)..(3): Xaa is C or S
PXXVSQDLSPINILYFIGKTPKIYGKIPM

SEQ ID NO: 96104 - protein, 26 aa, Artificial Sequence
  Cyclic GFR-binding peptide
  MOD_RES (1)..(1): Xaa is C or S
XVPTKLEPISVLYLDDMGVPTKFKYE

SEQ ID NO: 96105 - protein, 38 aa, Artificial Sequence; identical to SEQ ID NO: 9109
  Cyclic GFR-binding peptide
  MOD_RES (2)..(3)..(36)..(38): Xaa is C or S

SEQ ID NO: 96106 - protein, 26 aa, Artificial Sequence
  Cyclic GFR-binding peptide
  MOD_RES (1)..(1): Xaa is C or S
XVPQDLEPISILYLVGRTPKVKFKYE

SEQ ID NO: 96107 - protein, 36 aa, Artificial Sequence; identical to SEQ ID NO: 9110
  Cyclic GFR-binding peptide
  MOD_RES (4)..(5): Xaa is C or S

SEQ ID NO: 96108 - protein, 39 aa, Artificial Sequence; identical to SEQ ID NO: 9111
  Cyclic GFR-binding peptide
  MOD_RES (5)..(6)..(38): Xaa is C or S

SEQ ID NO: 96109 - protein, 28 aa, Artificial Sequence
  Cyclic GFR-binding peptide
  MOD_RES (28)..(28): Xaa is C or S
ALSPISILYKVGRKPKVLKYHYMIVRSX

SEQ ID NO: 96110 - protein, 32 aa, Artificial Sequence; identical to SEQ ID NO: 42200
  Cyclic GFR-binding peptide
  MOD_RES (30)..(32): Xaa is C or S

SEQ ID NO: 96111 - protein, 26 aa, Artificial Sequence
  Cyclic GFR-binding peptide
SATSILYYDKGVVTYLRKHRGMAVSE

SEQ ID NO: 96112 - protein, 32 aa, Artificial Sequence; identical to SEQ ID NO: 37851
  Cyclic GFR-binding peptide
  MOD_RES (29)..(31): Xaa is C or S

SEQ ID NO: 96113 - protein, 30 aa, Artificial Sequence
  Cyclic GFR-binding peptide
  MOD_RES (27)..(29): Xaa is C or S
SPISMLYKNDKQQIILKYHYGMVVDRXGXS

SEQ ID NO: 96114 - protein, 23 aa, Artificial Sequence
  Cyclic GFR-binding peptide
KLNAISVLYFDDMGVPTLKKYRE

SEQ ID NO: 96115 - protein, 34 aa, Artificial Sequence; identical to SEQ ID NO: 37856
  Cyclic GFR-binding peptide
  MOD_RES (6)..(7): Xaa is C or S

SEQ ID NO: 96116 - protein, 40 aa, Artificial Sequence; identical to SEQ ID NO: 37857
  Cyclic GFR-binding peptide
  MOD_RES (5)..(6)..(38)..(40): Xaa is C or S

SEQ ID NO: 96117 - protein, 32 aa, Artificial Sequence; identical to SEQ ID NO: 37858
  Cyclic GFR-binding peptide
  MOD_RES (5)..(6): Xaa is C or S

SEQ ID NO: 96118 - protein, 35 aa, Artificial Sequence
  Cyclic GFR-binding peptide
  MOD_RES (1)..(32)..(34): Xaa is C or S
XAPVKTEPISMLYLDNGRVLLKFKYEMIVEEXGXL

SEQ ID NO: 96119 - protein, 30 aa, Artificial Sequence
  Cyclic GFR-binding peptide
  MOD_RES (27)..(29): Xaa is C or S
LSPINILYFIGKTPKIYGKIPMIVKSXKXS

SEQ ID NO: 96120 - protein, 34 aa, Artificial Sequence; identical to SEQ ID NO: 37861
  Cyclic GFR-binding peptide
  MOD_RES (5)..(6): Xaa is C or S

SEQ ID NO: 96121 - protein, 29 aa, Artificial Sequence
  Cyclic GFR-binding peptide
  MOD_RES (26)..(28): Xaa is C or S
SPINILYFVGRTPKVYGKIPMVVKSXKXS

SEQ ID NO: 96122 - protein, 28 aa, Artificial Sequence
  Cyclic GFR-binding peptide
RLNAISILYFDAANNVVLKKYRDMVVEA

SEQ ID NO: 96123 - protein, 28 aa, Artificial Sequence
  Cyclic GFR-binding peptide
VPARLSPINILYFDAANNVVYGKIPDMV

SEQ ID NO: 96124 - protein, 33 aa, Artificial Sequence; identical to SEQ ID NO: 9126
  Cyclic GFR-binding peptide
  MOD_RES (2)..(3): Xaa is C or S

SEQ ID NO: 96125 - protein, 31 aa, Artificial Sequence; identical to SEQ ID NO: 9128
  Cyclic GFR-binding peptide
  MOD_RES (3)..(4): Xaa is C or S

SEQ ID NO: 96126 - protein, 29 aa, Artificial Sequence
  Cyclic GFR-binding peptide
  MOD_RES (3)..(4): Xaa is C or S
SPXXVSQDLEPISILYLIGKTPKIKFKYE

SEQ ID NO: 96127 - protein, 27 aa, Artificial Sequence
  Cyclic GFR-binding peptide
TKMNAISMLYFNDKQQIILKKYRGMVV

SEQ ID NO: 96128 - protein, 36 aa, Artificial Sequence
  Cyclic GFR-binding peptide
  MOD_RES (1)..(2)..(34)..(36): Xaa is C or S
XXVPEKMEPISILYLDENKNVVKFKYENMTVESXAX

SEQ ID NO: 96129 - protein, 27 aa, Artificial Sequence
  Cyclic GFR-binding peptide
SQDLSATSILYYIGKTPKILRKHRMIV

SEQ ID NO: 96130 - protein, 35 aa, Artificial Sequence; identical to SEQ ID NO: 37879
  Cyclic GFR-binding peptide
  MOD_RES (4)..(5): Xaa is C or S

SEQ ID NO: 96131 - protein, 26 aa, Artificial Sequence
  Cyclic GFR-binding peptide
EPISMLYLDENEKVVKFKYEDMVVEG

SEQ ID NO: 96132 - protein, 31 aa, Artificial Sequence; identical to SEQ ID NO: 37883
  Cyclic GFR-binding peptide
  MOD_RES (1)..(1): Xaa is C or S

SEQ ID NO: 96133 - protein, 26 aa, Artificial Sequence
  Cyclic GFR-binding peptide
LSPINILYFDKGVVTYYGKIPGMAVS

SEQ ID NO: 96134 - protein, 31 aa, Artificial Sequence
  Cyclic GFR-binding peptide
  MOD_RES (1)..(1): Xaa is C or S
XAPVKTEPISMLYLDNGRVLLKFKYEMIVEE

SEQ ID NO: 96135 - protein, 33 aa, Artificial Sequence; identical to SEQ ID NO: 37885
  Cyclic GFR-binding peptide
  MOD_RES (1)..(2): Xaa is C or S

SEQ ID NO: 96136 - protein, 37 aa, Artificial Sequence; identical to SEQ ID NO: 37886
  Cyclic GFR-binding peptide
  MOD_RES (5)..(6): Xaa is C or S

SEQ ID NO: 96137 - protein, 25 aa, Artificial Sequence
  Cyclic GFR-binding peptide
PTELSPISMLYKDEYDKVVLKYHYE

SEQ ID NO: 96138 - protein, 34 aa, Artificial Sequence; identical to SEQ ID NO: 9141
  Cyclic GFR-binding peptide
  MOD_RES (1)..(32)..(34): Xaa is C or S

SEQ ID NO: 96139 - protein, 30 aa, Artificial Sequence; identical to SEQ ID NO: 37891
  Cyclic GFR-binding peptide
  MOD_RES (27)..(29): Xaa is C or S

SEQ ID NO: 96140 - protein, 32 aa, Artificial Sequence; identical to SEQ ID NO: 9142
  Cyclic GFR-binding peptide
  MOD_RES (2)..(3): Xaa is C or S

SEQ ID NO: 96141 - protein, 37 aa, Artificial Sequence; identical to SEQ ID NO: 37894
  Cyclic GFR-binding peptide
  MOD_RES (1)..(2)..(34)..(36): Xaa is C or S

SEQ ID NO: 96142 - protein, 38 aa, Artificial Sequence; identical to SEQ ID NO: 37896
  Cyclic GFR-binding peptide
  MOD_RES (6)..(7): Xaa is C or S

SEQ ID NO: 96143 - protein, 30 aa, Artificial Sequence; identical to SEQ ID NO: 42238
  Cyclic GFR-binding peptide
  MOD_RES (29)..(29): Xaa is C or S

SEQ ID NO: 96144 - protein, 24 aa, Artificial Sequence
  Cyclic GFR-binding peptide
LSPISILYKDSANNVVLKYHYDMV

SEQ ID NO: 96145 - protein, 22 aa, Artificial Sequence
  Cyclic GFR-binding peptide
LSPINVLYFDDMGVPTYGKIPE

SEQ ID NO: 96146 - protein, 37 aa, Artificial Sequence; identical to SEQ ID NO: 42243
  Cyclic GFR-binding peptide
  MOD_RES (6)..(7): Xaa is C or S

SEQ ID NO: 96147 - protein, 35 aa, Artificial Sequence; identical to SEQ ID NO: 9146
  Cyclic GFR-binding peptide
  MOD_RES (2)..(3)..(35): Xaa is C or S

SEQ ID NO: 96148 - protein, 34 aa, Artificial Sequence
  Cyclic GFR-binding peptide
  MOD_RES (2)..(3): Xaa is C or S
PXXTPTKMSPISMLYKNDKQQIILKYHYGMVVDR

SEQ ID NO: 96149 - protein, 29 aa, Artificial Sequence
  Cyclic GFR-binding peptide
  MOD_RES (27)..(29): Xaa is C or S
NAISILYFDAANNVVLKKYRDMVVEAXGX

SEQ ID NO: 96150 - protein, 31 aa, Artificial Sequence; identical to SEQ ID NO: 9151
  Cyclic GFR-binding peptide
  MOD_RES (28)..(30): Xaa is C or S

SEQ ID NO: 96151 - protein, 39 aa, Artificial Sequence; identical to SEQ ID NO: 76928
  Cyclic GFR-binding peptide
  MOD_RES (4)..(5)..(36)..(38): Xaa is C or S

SEQ ID NO: 96152 - protein, 21 aa, Artificial Sequence
  Cyclic GFR-binding peptide
LSPISILYKIGKTPKILKYHY

SEQ ID NO: 96153 - protein, 28 aa, Artificial Sequence
  Cyclic GFR-binding peptide
  MOD_RES (1)..(1): Xaa is C or S
XVSQDLSPINILYFIGKTPKIYGKIPMI

SEQ ID NO: 96154 - protein, 31 aa, Artificial Sequence; identical to SEQ ID NO: 37914
  Cyclic GFR-binding peptide
  MOD_RES (28)..(30): Xaa is C or S

SEQ ID NO: 96155 - protein, 31 aa, Artificial Sequence; identical to SEQ ID NO: 42253
  Cyclic GFR-binding peptide
  MOD_RES (31)..(31): Xaa is C or S

SEQ ID NO: 96156 - protein, 38 aa, Artificial Sequence; identical to SEQ ID NO: 37916
  Cyclic GFR-binding peptide
  MOD_RES (4)..(5)..(37): Xaa is C or S

SEQ ID NO: 96157 - protein, 32 aa, Artificial Sequence
  Cyclic GFR-binding peptide
  MOD_RES (2)..(3): Xaa is C or S
TXXAPVKTSPISMLYKDNGRVLLLKYHYMIVE

SEQ ID NO: 96158 - protein, 32 aa, Artificial Sequence; identical to SEQ ID NO: 37918
  Cyclic GFR-binding peptide
  MOD_RES (1)..(2): Xaa is C or S

SEQ ID NO: 96159 - protein, 28 aa, Artificial Sequence
  Cyclic GFR-binding peptide
  MOD_RES (1)..(1): Xaa is C or S
XVPTKLSPINVLYFDDMGVPTYGKIPEG

SEQ ID NO: 96160 - protein, 26 aa, Artificial Sequence
  Cyclic GFR-binding peptide
PVKTSATSMLYYDNGRVLLLRKHRMI

SEQ ID NO: 96161 - protein, 24 aa, Artificial Sequence
  Cyclic GFR-binding peptide
PTKLSPINVLYFDDMGVPTYGKIP

SEQ ID NO: 96162 - protein, 35 aa, Artificial Sequence
  Cyclic GFR-binding peptide
  MOD_RES (2)..(3)..(35): Xaa is C or S
TXXVPTRLSPISILYKDSANNVVLKYHYDMVVESX

SEQ ID NO: 96163 - protein, 39 aa, Artificial Sequence; identical to SEQ ID NO: 42270
  Cyclic GFR-binding peptide
  MOD_RES (3)..(4)..(36)..(38): Xaa is C or S

SEQ ID NO: 96164 - protein, 37 aa, Artificial Sequence; identical to SEQ ID NO: 42271
  Cyclic GFR-binding peptide
  MOD_RES (2)..(3)..(34)..(36): Xaa is C or S

SEQ ID NO: 96165 - protein, 28 aa, Artificial Sequence
  Cyclic GFR-binding peptide
  MOD_RES (27)..(27): Xaa is C or S
NAISMLYFNDKQQIILKKYRGMVVDRXG

SEQ ID NO: 96166 - protein, 38 aa, Artificial Sequence; identical to SEQ ID NO: 19406
  Cyclic GFR-binding peptide
  MOD_RES (3)..(4)..(36)..(38): Xaa is C or S

SEQ ID NO: 96167 - protein, 29 aa, Artificial Sequence
  Cyclic GFR-binding peptide
  MOD_RES (1)..(1): Xaa is C or S
XVPEKMSATSILYYDENKNVVLRKHRNMT

SEQ ID NO: 96168 - protein, 26 aa, Artificial Sequence
  Cyclic GFR-binding peptide
RLSATSILYYDAANNVVLRKHRDMVV

SEQ ID NO: 96169 - protein, 30 aa, Artificial Sequence; identical to SEQ ID NO: 37931
  Cyclic GFR-binding peptide
  MOD_RES (4)..(5): Xaa is C or S

SEQ ID NO: 96170 - protein, 27 aa, Artificial Sequence
  Cyclic GFR-binding peptide
ELSPINMLYFDENEKVVYGKIPDMVVE

SEQ ID NO: 96171 - protein, 31 aa, Artificial Sequence; identical to SEQ ID NO: 9172
  Cyclic GFR-binding peptide
  MOD_RES (31)..(31): Xaa is C or S

SEQ ID NO: 96172 - protein, 28 aa, Artificial Sequence
  Cyclic GFR-binding peptide
  MOD_RES (2)..(2): Xaa is C or S
TXAPTKLSPISVLYKDDSSNVILKYHYN

SEQ ID NO: 96173 - protein, 40 aa, Artificial Sequence; identical to SEQ ID NO: 37937
  Cyclic GFR-binding peptide
  MOD_RES (5)..(6)..(37)..(39): Xaa is C or S

SEQ ID NO: 96174 - protein, 30 aa, Artificial Sequence
  Cyclic GFR-binding peptide
  MOD_RES (27)..(29): Xaa is C or S
TEPISMLYLDNGRVLLKFKYEMIVEEXGXL

SEQ ID NO: 96175 - protein, 35 aa, Artificial Sequence; identical to SEQ ID NO: 9176
  Cyclic GFR-binding peptide
  MOD_RES (6)..(7): Xaa is C or S

SEQ ID NO: 96176 - protein, 32 aa, Artificial Sequence; identical to SEQ ID NO: 9177
  Cyclic GFR-binding peptide
  MOD_RES (29)..(31): Xaa is C or S

SEQ ID NO: 96177 - protein, 21 aa, Artificial Sequence
  Cyclic GFR-binding peptide
LEPISVLYLDDSSNVIKFKYE

SEQ ID NO: 96178 - protein, 32 aa, Artificial Sequence
  Cyclic GFR-binding peptide
  MOD_RES (29)..(31): Xaa is C or S
KMSPISMLYKNDKQQIILKYHYGMVVDRXGXS

SEQ ID NO: 96179 - protein, 39 aa, Artificial Sequence
  Cyclic GFR-binding peptide
  MOD_RES (5)..(6)..(37)..(39): Xaa is C or S
SAAPXXVPQALSPINILYFVGRKPKVYGKIPMIVRSXKX

SEQ ID NO: 96180 - protein, 38 aa, Artificial Sequence; identical to SEQ ID NO: 42285
  Cyclic GFR-binding peptide
  MOD_RES (5)..(6)..(38): Xaa is C or S

SEQ ID NO: 96181 - protein, 36 aa, Artificial Sequence; identical to SEQ ID NO: 76945
  Cyclic GFR-binding peptide
  MOD_RES (3)..(4)..(36): Xaa is C or S

SEQ ID NO: 96182 - protein, 29 aa, Artificial Sequence
  Cyclic GFR-binding peptide
PARLEPISILYLDAANNVVKFKYEDMVVE

SEQ ID NO: 96183 - protein, 32 aa, Artificial Sequence; identical to SEQ ID NO: 9185
  Cyclic GFR-binding peptide

SEQ ID NO: 96184 - protein, 30 aa, Artificial Sequence
  Cyclic GFR-binding peptide
  MOD_RES (4)..(5): Xaa is C or S
PPTXXVPTRLSPISILYKDSANNVVLKYHY

SEQ ID NO: 96185 - protein, 28 aa, Artificial Sequence
  Cyclic GFR-binding peptide
ARLEPISILYLDAANNVVKFKYEDMVVE

SEQ ID NO: 96186 - protein, 41 aa, Artificial Sequence
  Cyclic GFR-binding peptide
  MOD_RES (5)..(6)..(38)..(40): Xaa is C or S
IPEPXXVPEKMNAISILYFDENKNVVLKKYRNMTVESXAXR

SEQ ID NO: 96187 - protein, 29 aa, Artificial Sequence
  Cyclic GFR-binding peptide
  MOD_RES (28)..(28): Xaa is C or S
LNAISILYFDAANNVVLKKYRDMVVEAXG

SEQ ID NO: 96188 - protein, 32 aa, Artificial Sequence
  Cyclic GFR-binding peptide
  MOD_RES (2)..(3): Xaa is C or S
PXXVPQDLSPINILYFVGRTPKVYGKIPMVVK

SEQ ID NO: 96189 - protein, 34 aa, Artificial Sequence; identical to SEQ ID NO: 9195
  Cyclic GFR-binding peptide
  MOD_RES (4)..(5): Xaa is C or S

SEQ ID NO: 96190 - protein, 36 aa, Artificial Sequence; identical to SEQ ID NO: 37961
  Cyclic GFR-binding peptide
  MOD_RES (6)..(7): Xaa is C or S

SEQ ID NO: 96191 - protein, 29 aa, Artificial Sequence
  Cyclic GFR-binding peptide
  MOD_RES (27)..(29): Xaa is C or S
LSPINILYFIGKTPKIYGKIPMIVKSXKX

SEQ ID NO: 96192 - protein, 27 aa, Artificial Sequence
  Cyclic GFR-binding peptide
  MOD_RES (27)..(27): Xaa is C or S
EPISMLYLDENEKVVKFKYEDMVVEGX

SEQ ID NO: 96193 - protein, 41 aa, Artificial Sequence; identical to SEQ ID NO: 37965
  Cyclic GFR-binding peptide
  MOD_RES (6)..(7)..(38)..(40): Xaa is C or S

SEQ ID NO: 96194 - protein, 34 aa, Artificial Sequence; identical to SEQ ID NO: 37966
  Cyclic GFR-binding peptide
  MOD_RES (2)..(3): Xaa is C or S

SEQ ID NO: 96195 - protein, 35 aa, Artificial Sequence; identical to SEQ ID NO: 37968
  Cyclic GFR-binding peptide
  MOD_RES (5)..(6): Xaa is C or S

SEQ ID NO: 96196 - protein, 37 aa, Artificial Sequence; identical to SEQ ID NO: 9199
  Cyclic GFR-binding peptide
  MOD_RES (3)..(4)..(36): Xaa is C or S

SEQ ID NO: 96197 - protein, 27 aa, Artificial Sequence
  Cyclic GFR-binding peptide
VKTEPISMLYLDNGRVLLKFKYEMIVE

SEQ ID NO: 96198 - protein, 31 aa, Artificial Sequence; identical to SEQ ID NO: 76956
  Cyclic GFR-binding peptide
  MOD_RES (3)..(4): Xaa is C or S

SEQ ID NO: 96199 - protein, 39 aa, Artificial Sequence
  Cyclic GFR-binding peptide
  MOD_RES (5)..(6)..(38): Xaa is C or S
SAGPXXTPTKMEPISMLYLNDKQQIIKFKYEGMVVDRXG

SEQ ID NO: 96200 - protein, 36 aa, Artificial Sequence; identical to SEQ ID NO: 42311
  Cyclic GFR-binding peptide
  MOD_RES (2)..(3)..(36): Xaa is C or S

SEQ ID NO: 96201 - protein, 40 aa, Artificial Sequence; identical to SEQ ID NO: 37977
  Cyclic GFR-binding peptide
  MOD_RES (4)..(5)..(37)..(39): Xaa is C or S

SEQ ID NO: 96202 - protein, 28 aa, Artificial Sequence
  Cyclic GFR-binding peptide
TELEPISMLYLDEYDKVVKFKYEEMVVE

SEQ ID NO: 96203 - protein, 32 aa, Artificial Sequence; identical to SEQ ID NO: 9204
  Cyclic GFR-binding peptide
  MOD_RES (30)..(32): Xaa is C or S

SEQ ID NO: 96204 - protein, 32 aa, Artificial Sequence
  Cyclic GFR-binding peptide
  MOD_RES (29)..(31): Xaa is C or S
KMEPISILYLDENKNVVKFKYENMTVESXAXR

SEQ ID NO: 96205 - protein, 34 aa, Artificial Sequence; identical to SEQ ID NO: 9205
  Cyclic GFR-binding peptide
  MOD_RES (4)..(5): Xaa is C or S

SEQ ID NO: 96206 - protein, 28 aa, Artificial Sequence
  Cyclic GFR-binding peptide
PTRLSATSILYYDSANNVVLRKHRDMVV

SEQ ID NO: 96207 - protein, 26 aa, Artificial Sequence
  Cyclic GFR-binding peptide
  MOD_RES (26)..(26): Xaa is C or S
SATSILYYIGKTPKILRKHRMIVKSX

SEQ ID NO: 96208 - protein, 34 aa, Artificial Sequence; identical to SEQ ID NO: 42316
  Cyclic GFR-binding peptide
  MOD_RES (1)..(33): Xaa is C or S

SEQ ID NO: 96209 - protein, 35 aa, Artificial Sequence
  Cyclic GFR-binding peptide
  MOD_RES (1)..(33)..(35): Xaa is C or S
XVPTRLEPISILYLDSANNVVKFKYEDMVVESXGX

SEQ ID NO: 96210 - protein, 26 aa, Artificial Sequence
  Cyclic GFR-binding peptide
TQLSPINVLYFDDSSNVIYGKIPNMV

SEQ ID NO: 96211 - protein, 41 aa, Artificial Sequence; identical to SEQ ID NO: 9211
  Cyclic GFR-binding peptide
  MOD_RES (6)..(7)..(39)..(41): Xaa is C or S

SEQ ID NO: 96212 - protein, 36 aa, Artificial Sequence; identical to SEQ ID NO: 42321
  Cyclic GFR-binding peptide
  MOD_RES (3)..(4)..(36): Xaa is C or S

SEQ ID NO: 96213 - protein, 30 aa, Artificial Sequence; identical to SEQ ID NO: 37985
  Cyclic GFR-binding peptide
  MOD_RES (3)..(4): Xaa is C or S

SEQ ID NO: 96214 - protein, 21 aa, Artificial Sequence
  Cyclic GFR-binding peptide
LNAISILYFVGRKPKVLKKYR

SEQ ID NO: 96215 - protein, 29 aa, Artificial Sequence
  Cyclic GFR-binding peptide
  MOD_RES (29)..(29): Xaa is C or S
ELSPINMLYFDEYDKVVYGKIPEMVVEGX

SEQ ID NO: 96216 - protein, 26 aa, Artificial Sequence
  Cyclic GFR-binding peptide
RLSPISILYKDAANNVVLKYHYDMVV

SEQ ID NO: 96217 - protein, 22 aa, Artificial Sequence
  Cyclic GFR-binding peptide
LSPISILYKVGRKPKVLKYHYM

SEQ ID NO: 96218 - protein, 37 aa, Artificial Sequence; identical to SEQ ID NO: 9218
  Cyclic GFR-binding peptide
  MOD_RES (4)..(36): Xaa is C or S

SEQ ID NO: 96219 - protein, 26 aa, Artificial Sequence
  Cyclic GFR-binding peptide
  MOD_RES (1)..(1): Xaa is C or S
XVPTRLSPINILYFDSANNVVYGKIP

SEQ ID NO: 96220 - protein, 33 aa, Artificial Sequence
  Cyclic GFR-binding peptide
  MOD_RES (6)..(7): Xaa is C or S
STPPTXXVPTRLSPISILYKDSANNVVLKYHYD

SEQ ID NO: 96221 - protein, 37 aa, Artificial Sequence; identical to SEQ ID NO: 9219
  Cyclic GFR-binding peptide
  MOD_RES (2)..(3)..(35)..(37): Xaa is C or S

SEQ ID NO: 96222 - protein, 33 aa, Artificial Sequence; identical to SEQ ID NO: 37996
  Cyclic GFR-binding peptide
  MOD_RES (31)..(33): Xaa is C or S

SEQ ID NO: 96223 - protein, 28 aa, Artificial Sequence
  Cyclic GFR-binding peptide
  MOD_RES (28)..(28): Xaa is C or S
LSATSILYYDKGVVTYLRKHRGMAVSEX

SEQ ID NO: 96224 - protein, 42 aa, Artificial Sequence; identical to SEQ ID NO: 9224
  Cyclic GFR-binding peptide
  MOD_RES (7)..(39)..(41): Xaa is C or S

SEQ ID NO: 96225 - protein, 27 aa, Artificial Sequence
  Cyclic GFR-binding peptide
  MOD_RES (27)..(27): Xaa is C or S
SPISILYKDKGVVTYLKYHYGMAVSEX

SEQ ID NO: 96226 - protein, 31 aa, Artificial Sequence; identical to SEQ ID NO: 38000
  Cyclic GFR-binding peptide
  MOD_RES (2)..(3): Xaa is C or S

SEQ ID NO: 96227 - protein, 33 aa, Artificial Sequence
  Cyclic GFR-binding peptide
  MOD_RES (32)..(32): Xaa is C or S
VPEKMSPISILYKDENKNVVLKYHYNMTVESXA

SEQ ID NO: 96228 - protein, 35 aa, Artificial Sequence; identical to SEQ ID NO: 9226
  Cyclic GFR-binding peptide
  MOD_RES (3)..(4): Xaa is C or S

SEQ ID NO: 96229 - protein, 37 aa, Artificial Sequence
  Cyclic GFR-binding peptide
  MOD_RES (2)..(3)..(34)..(36): Xaa is C or S
PXXVSQDLSPINILYFIGKTPKIYGKIPMIVKSXKXS

SEQ ID NO: 96230 - protein, 36 aa, Artificial Sequence; identical to SEQ ID NO: 38004
  Cyclic GFR-binding peptide
  MOD_RES (5)..(6): Xaa is C or S

SEQ ID NO: 96231 - protein, 38 aa, Artificial Sequence; identical to SEQ ID NO: 42358
  Cyclic GFR-binding peptide
  MOD_RES (6)..(7): Xaa is C or S

SEQ ID NO: 96232 - protein, 34 aa, Artificial Sequence
  Cyclic GFR-binding peptide
  MOD_RES (5)..(6): Xaa is C or S
SASPXXVPQDLSPINILYFVGRTPKVYGKIPMVV

SEQ ID NO: 96233 - protein, 38 aa, Artificial Sequence; identical to SEQ ID NO: 9229
  Cyclic GFR-binding peptide
  MOD_RES (2)..(3)..(35)..(37): Xaa is C or S

SEQ ID NO: 96234 - protein, 27 aa, Artificial Sequence
  Cyclic GFR-binding peptide
  MOD_RES (27)..(27): Xaa is C or S
SATSILYYDSANNVVLRKHRDMVVESX

SEQ ID NO: 96235 - protein, 29 aa, Artificial Sequence
  Cyclic GFR-binding peptide
  MOD_RES (3)..(4): Xaa is C or S
KAXXVPTELSPINMLYFDEYDKVVYGKIP

SEQ ID NO: 96236 - protein, 34 aa, Artificial Sequence; identical to SEQ ID NO: 42361
  Cyclic GFR-binding peptide
  MOD_RES (2)..(3): Xaa is C or S

SEQ ID NO: 96237 - protein, 30 aa, Artificial Sequence; identical to SEQ ID NO: 42362
  Cyclic GFR-binding peptide
  MOD_RES (4)..(5): Xaa is C or S

SEQ ID NO: 96238 - protein, 30 aa, Artificial Sequence
  Cyclic GFR-binding peptide
PTRLSATSILYYDSANNVVLRKHRDMVVES

SEQ ID NO: 96239 - protein, 31 aa, Artificial Sequence; identical to SEQ ID NO: 9231
  Cyclic GFR-binding peptide
  MOD_RES (31)..(31): Xaa is C or S

SEQ ID NO: 96240 - protein, 27 aa, Artificial Sequence
  Cyclic GFR-binding peptide
  MOD_RES (1)..(1): Xaa is C or S
XAPTKLEPISVLYLDSSNNVIKFKYEN

SEQ ID NO: 96241 - protein, 38 aa, Artificial Sequence; identical to SEQ ID NO: 38017
  Cyclic GFR-binding peptide
  MOD_RES (3)..(4)..(36)..(38): Xaa is C or S

SEQ ID NO: 96242 - protein, 26 aa, Artificial Sequence
  Cyclic GFR-binding peptide
KMNAISILYFDENKNVVLKKYRNMTV

SEQ ID NO: 96243 - protein, 21 aa, Artificial Sequence
  Cyclic GFR-binding peptide
NAISVLYFDSSNNVILKKYRN

SEQ ID NO: 96244 - protein, 35 aa, Artificial Sequence; identical to SEQ ID NO: 9237
  Cyclic GFR-binding peptide
  MOD_RES (32)..(34): Xaa is C or S

SEQ ID NO: 96245 - protein, 34 aa, Artificial Sequence; identical to SEQ ID NO: 9240
  Cyclic GFR-binding peptide
  MOD_RES (2)..(3): Xaa is C or S

SEQ ID NO: 96246 - protein, 31 aa, Artificial Sequence
  Cyclic GFR-binding peptide
  MOD_RES (2)..(3): Xaa is C or S
PXXVPEKMNAISILYFDENKNVVLKKYRNMT

SEQ ID NO: 96247 - protein, 26 aa, Artificial Sequence
  Cyclic GFR-binding peptide
PTKLNAISILYFDKGVVTYLKKYRGM

SEQ ID NO: 96248 - protein, 30 aa, Artificial Sequence; identical to SEQ ID NO: 42373
  Cyclic GFR-binding peptide

SEQ ID NO: 96249 - protein, 34 aa, Artificial Sequence
  Cyclic GFR-binding peptide
  MOD_RES (2)..(3): Xaa is C or S
PXXVPEKMEPISILYLDENKNVVKFKYENMTVES

SEQ ID NO: 96250 - protein, 38 aa, Artificial Sequence; identical to SEQ ID NO: 38029
  Cyclic GFR-binding peptide
  MOD_RES (2)..(3)..(35)..(37): Xaa is C or S

SEQ ID NO: 96251 - protein, 28 aa, Artificial Sequence
  Cyclic GFR-binding peptide
TQLSPINVLYFDDSSNVIYGKIPNMVVR

SEQ ID NO: 96252 - protein, 39 aa, Artificial Sequence; identical to SEQ ID NO: 38036
  Cyclic GFR-binding peptide
  MOD_RES (4)..(5)..(37)..(39): Xaa is C or S

SEQ ID NO: 96253 - protein, 25 aa, Artificial Sequence
  Cyclic GFR-binding peptide
TKLSATSILYYDKGVVTYLRKHRGM

SEQ ID NO: 96254 - protein, 34 aa, Artificial Sequence; identical to SEQ ID NO: 9249
  Cyclic GFR-binding peptide
  MOD_RES (3)..(4): Xaa is C or S

SEQ ID NO: 96255 - protein, 23 aa, Artificial Sequence
  Cyclic GFR-binding peptide
RLNAISILYFDAANNVVLKKYRD

SEQ ID NO: 96256 - protein, 27 aa, Artificial Sequence
  Cyclic GFR-binding peptide
  MOD_RES (1)..(2): Xaa is C or S
XXVPTELSATSMLYYDEYDKVVLRKHR

SEQ ID NO: 96257 - protein, 30 aa, Artificial Sequence; identical to SEQ ID NO: 9252
  Cyclic GFR-binding peptide
  MOD_RES (4)..(5): Xaa is C or S

SEQ ID NO: 96258 - protein, 28 aa, Artificial Sequence
  Cyclic GFR-binding peptide
  MOD_RES (27)..(27): Xaa is C or S
EPISMLYLNDKQQIIKFKYEGMVVDRXG

SEQ ID NO: 96259 - protein, 32 aa, Artificial Sequence
  Cyclic GFR-binding peptide
  MOD_RES (29)..(31): Xaa is C or S
KMSPISILYKDENKNVVLKYHYNMTVESXAXR

SEQ ID NO: 96260 - protein, 41 aa, Artificial Sequence
  Cyclic GFR-binding peptide
  MOD_RES (5)..(6)..(38)..(40): Xaa is C or S
TPPTXXVPTRLEPISILYLDSANNVVKFKYEDMVVESXGXR

SEQ ID NO: 96261 - protein, 23 aa, Artificial Sequence
  Cyclic GFR-binding peptide
NAISMLYFDEYDKVVLKKYREMV

SEQ ID NO: 96262 - protein, 24 aa, Artificial Sequence
  Cyclic GFR-binding peptide
TKMEPISMLYLNDKQQIIKFKYEG

SEQ ID NO: 96263 - protein, 29 aa, Artificial Sequence
  Cyclic GFR-binding peptide
  MOD_RES (27)..(29): Xaa is C or S
SATSILYYDENKNVVLRKHRNMTVESXAX

SEQ ID NO: 96264 - protein, 38 aa, Artificial Sequence; identical to SEQ ID NO: 9257
  Cyclic GFR-binding peptide
  MOD_RES (5)..(6)..(38): Xaa is C or S

SEQ ID NO: 96265 - protein, 28 aa, Artificial Sequence
  Cyclic GFR-binding peptide
SQDLNAISILYFIGKTPKILKKYRMIVK

SEQ ID NO: 96266 - protein, 24 aa, Artificial Sequence
  Cyclic GFR-binding peptide
QDLEPISILYLIGKTPKIKFKYEM

SEQ ID NO: 96267 - protein, 36 aa, Artificial Sequence
  Cyclic GFR-binding peptide
  MOD_RES (6)..(7): Xaa is C or S
GIPEPXXVPEKMEPISILYLDENKNVVKFKYENMTV

SEQ ID NO: 96268 - protein, 33 aa, Artificial Sequence
  Cyclic GFR-binding peptide
  MOD_RES (2)..(3): Xaa is C or S
PXXVSQDLSPINILYFIGKTPKIYGKIPMIVKS

SEQ ID NO: 96269 - protein, 37 aa, Artificial Sequence; identical to SEQ ID NO: 42400
  Cyclic GFR-binding peptide
  MOD_RES (3)..(4)..(36): Xaa is C or S

SEQ ID NO: 96270 - protein, 34 aa, Artificial Sequence; identical to SEQ ID NO: 9263
  Cyclic GFR-binding peptide
  MOD_RES (5)..(5): Xaa is C or S

SEQ ID NO: 96271 - protein, 24 aa, Artificial Sequence
  Cyclic GFR-binding peptide
PTRLSATSILYYDSANNVVLRKHR

SEQ ID NO: 96272 - protein, 36 aa, Artificial Sequence; identical to SEQ ID NO: 9264
  Cyclic GFR-binding peptide
  MOD_RES (3)..(4)..(35): Xaa is C or S

SEQ ID NO: 96273 - protein, 36 aa, Artificial Sequence; identical to SEQ ID NO: 42405
  Cyclic GFR-binding peptide
  MOD_RES (4)..(5): Xaa is C or S

SEQ ID NO: 96274 - protein, 28 aa, Artificial Sequence
  Cyclic GFR-binding peptide
  MOD_RES (2)..(3): Xaa is C or S
SXXVPARLSPINILYFDAANNVVYGKIP

SEQ ID NO: 96275 - protein, 36 aa, Artificial Sequence; identical to SEQ ID NO: 9266
  Cyclic GFR-binding peptide
  MOD_RES (6)..(7): Xaa is C or S

SEQ ID NO: 96276 - protein, 20 aa, Artificial Sequence
  Cyclic GFR-binding peptide
SPINILYFVGRTPKVYGKIP

SEQ ID NO: 96277 - protein, 29 aa, Artificial Sequence
  Cyclic GFR-binding peptide
PEKMSATSILYYDENKNVVLRKHRNMTVE

SEQ ID NO: 96278 - protein, 26 aa, Artificial Sequence
  Cyclic GFR-binding peptide
QDLEPISILYLVGRTPKVKFKYEMVV

SEQ ID NO: 96279 - protein, 25 aa, Artificial Sequence
  Cyclic GFR-binding peptide
LSPINILYFVGRTPKVYGKIPMVVK

SEQ ID NO: 96280 - protein, 22 aa, Artificial Sequence
  Cyclic GFR-binding peptide
KLSATSVLYYDDMGVPTLRKHR

SEQ ID NO: 96281 - protein, 26 aa, Artificial Sequence
  Cyclic GFR-binding peptide
NAISVLYFDDMGVPTLKKYREGMSVA

SEQ ID NO: 96282 - protein, 26 aa, Artificial Sequence
  Cyclic GFR-binding peptide
  MOD_RES (1)..(1): Xaa is C or S
XAPTKLSATSVLYYDDSSNVILRKHR

SEQ ID NO: 96283 - protein, 33 aa, Artificial Sequence; identical to SEQ ID NO: 42423
  Cyclic GFR-binding peptide
  MOD_RES (2)..(3): Xaa is C or S

SEQ ID NO: 96284 - protein, 35 aa, Artificial Sequence; identical to SEQ ID NO: 9275
  Cyclic GFR-binding peptide
  MOD_RES (4)..(5): Xaa is C or S

SEQ ID NO: 96285 - protein, 36 aa, Artificial Sequence; identical to SEQ ID NO: 42424
  Cyclic GFR-binding peptide
  MOD_RES (6)..(7): Xaa is C or S

SEQ ID NO: 96286 - protein, 36 aa, Artificial Sequence; identical to SEQ ID NO: 38056
  Cyclic GFR-binding peptide
  MOD_RES (5)..(6): Xaa is C or S

SEQ ID NO: 96287 - protein, 38 aa, Artificial Sequence; identical to SEQ ID NO: 38059
  Cyclic GFR-binding peptide
  MOD_RES (5)..(6)..(38): Xaa is C or S

SEQ ID NO: 96288 - protein, 40 aa, Artificial Sequence
  Cyclic GFR-binding peptide
  MOD_RES (4)..(5)..(37)..(39): Xaa is C or S
PEPXXVPEKMNAISILYFDENKNVVLKKYRNMTVESXAXR

SEQ ID NO: 96289 - protein, 27 aa, Artificial Sequence
  Cyclic GFR-binding peptide
  MOD_RES (1)..(1): Xaa is C or S
XAPTQLSPINVLYFDDSSNVIYGKIPN

SEQ ID NO: 96290 - protein, 29 aa, Artificial Sequence
  Cyclic GFR-binding peptide
PTKMEPISMLYLNDKQQIIKFKYEGMVVD

SEQ ID NO: 96291 - protein, 32 aa, Artificial Sequence
  Cyclic GFR-binding peptide
  MOD_RES (5)..(6): Xaa is C or S
SAGPXXTPTKMSATSMLYYNDKQQIILRKHRG

SEQ ID NO: 96292 - protein, 27 aa, Artificial Sequence
  Cyclic GFR-binding peptide
KLEPISVLYLDSSNNVIKFKYENMVVK

SEQ ID NO: 96293 - protein, 41 aa, Artificial Sequence; identical to SEQ ID NO: 38066
  Cyclic GFR-binding peptide
  MOD_RES (5)..(6)..(38)..(40): Xaa is C or S

SEQ ID NO: 96294 - protein, 28 aa, Artificial Sequence
  Cyclic GFR-binding peptide
PEKMSPINILYFDENKNVVYGKIPNMTV

SEQ ID NO: 96295 - protein, 30 aa, Artificial Sequence
  Cyclic GFR-binding peptide
  MOD_RES (30)..(30): Xaa is C or S
EKMSPINILYFDENKNVVYGKIPNMTVESX

SEQ ID NO: 96296 - protein, 33 aa, Artificial Sequence; identical to SEQ ID NO: 42433
  Cyclic GFR-binding peptide
  MOD_RES (3)..(4): Xaa is C or S

SEQ ID NO: 96297 - protein, 36 aa, Artificial Sequence; identical to SEQ ID NO: 9281
  Cyclic GFR-binding peptide
  MOD_RES (6)..(7): Xaa is C or S

SEQ ID NO: 96298 - protein, 31 aa, Artificial Sequence; identical to SEQ ID NO: 9282
  Cyclic GFR-binding peptide
  MOD_RES (4)..(5): Xaa is C or S

SEQ ID NO: 96299 - protein, 28 aa, Artificial Sequence
  Cyclic GFR-binding peptide
  MOD_RES (1)..(1): Xaa is C or S
XVPTELSPISMLYKDENEKVVLKYHYDM

SEQ ID NO: 96300 - protein, 34 aa, Artificial Sequence; identical to SEQ ID NO: 9287
  Cyclic GFR-binding peptide
  MOD_RES (6)..(6): Xaa is C or S

SEQ ID NO: 96301 - protein, 32 aa, Artificial Sequence; identical to SEQ ID NO: 38076
  Cyclic GFR-binding peptide
  MOD_RES (4)..(5): Xaa is C or S

SEQ ID NO: 96302 - protein, 32 aa, Artificial Sequence; identical to SEQ ID NO: 38078
  Cyclic GFR-binding peptide
  MOD_RES (31)..(31): Xaa is C or S

SEQ ID NO: 96303 - protein, 21 aa, Artificial Sequence
  Cyclic GFR-binding peptide
NAISVLYFDDMGVPTLKKYRE

SEQ ID NO: 96304 - protein, 27 aa, Artificial Sequence
  Cyclic GFR-binding peptide
PTKLSATSVLYYDDMGVPTLRKHREGM

SEQ ID NO: 96305 - protein, 38 aa, Artificial Sequence
  Cyclic GFR-binding peptide
  MOD_RES (5)..(6)..(38): Xaa is C or S
SAGPXXTPTKMEPISMLYLNDKQQIIKFKYEGMVVDRX

SEQ ID NO: 96306 - protein, 35 aa, Artificial Sequence
  Cyclic GFR-binding peptide
  MOD_RES (3)..(4)..(35): Xaa is C or S
SPXXVSQDLSPINILYFIGKTPKIYGKIPMIVKSX

SEQ ID NO: 96307 - protein, 26 aa, Artificial Sequence
  Cyclic GFR-binding peptide
VPEKMSPISILYKDENKNVVLKYHYN

SEQ ID NO: 96308 - protein, 28 aa, Artificial Sequence
  Cyclic GFR-binding peptide
APTQLSPISVLYKDDSSNVILKYHYNMV

SEQ ID NO: 96309 - protein, 33 aa, Artificial Sequence; identical to SEQ ID NO: 9303
  Cyclic GFR-binding peptide
  MOD_RES (5)..(5): Xaa is C or S

SEQ ID NO: 96310 - protein, 36 aa, Artificial Sequence; identical to SEQ ID NO: 42455
  Cyclic GFR-binding peptide
  MOD_RES (1)..(33)..(35): Xaa is C or S

SEQ ID NO: 96311 - protein, 35 aa, Artificial Sequence
  Cyclic GFR-binding peptide
  MOD_RES (3)..(4): Xaa is C or S
GPXXTPTKMSATSMLYYNDKQQIILRKHRGMVVDR

SEQ ID NO: 96312 - protein, 27 aa, Artificial Sequence
  Cyclic GFR-binding peptide
  MOD_RES (1)..(1): Xaa is C or S
XVPARLEPISILYLDAANNVVKFKYED

SEQ ID NO: 96313 - protein, 31 aa, Artificial Sequence; identical to SEQ ID NO: 9309
  Cyclic GFR-binding peptide
  MOD_RES (3)..(4): Xaa is C or S

SEQ ID NO: 96314 - protein, 31 aa, Artificial Sequence
  Cyclic GFR-binding peptide
  MOD_RES (4)..(5): Xaa is C or S
PEPXXVPEKMSATSILYYDENKNVVLRKHRN

SEQ ID NO: 96315 - protein, 21 aa, Artificial Sequence
  Cyclic GFR-binding peptide
LSPISILYKVGRKPKVLKYHY

SEQ ID NO: 96316 - protein, 28 aa, Artificial Sequence
  Cyclic GFR-binding peptide
  MOD_RES (3)..(3): Xaa is C or S
PTXAPTKLSATSVLYYDDSSNVILRKHR

SEQ ID NO: 96317 - protein, 25 aa, Artificial Sequence
  Cyclic GFR-binding peptide
KTSPISMLYKDNGRVLLLKYHYMIV

SEQ ID NO: 96318 - protein, 27 aa, Artificial Sequence
  Cyclic GFR-binding peptide
  MOD_RES (1)..(1): Xaa is C or S
XAPVKTSPISMLYKDNGRVLLLKYHYM

SEQ ID NO: 96319 - protein, 22 aa, Artificial Sequence
  Cyclic GFR-binding peptide
SPISMLYKDENEKVVLKYHYDM

SEQ ID NO: 96320 - protein, 36 aa, Artificial Sequence; identical to SEQ ID NO: 9317
  Cyclic GFR-binding peptide
  MOD_RES (1)..(2)..(33)..(35): Xaa is C or S

SEQ ID NO: 96321 - protein, 29 aa, Artificial Sequence
  Cyclic GFR-binding peptide
  MOD_RES (2)..(3): Xaa is C or S
PXXVPEKMEPISILYLDENKNVVKFKYEN

SEQ ID NO: 96322 - protein, 22 aa, Artificial Sequence
  Cyclic GFR-binding peptide
KLSPINILYFDKGVVTYYGKIP

SEQ ID NO: 96323 - protein, 23 aa, Artificial Sequence
  Cyclic GFR-binding peptide
SPISVLYKDDSSNVILKYHYNMV

SEQ ID NO: 96324 - protein, 29 aa, Artificial Sequence
  Cyclic GFR-binding peptide
  MOD_RES (2)..(3): Xaa is C or S
AXXVPTELEPISMLYLDENEKVVKFKYED

SEQ ID NO: 96325 - protein, 34 aa, Artificial Sequence; identical to SEQ ID NO: 9319
  Cyclic GFR-binding peptide
  MOD_RES (3)..(4): Xaa is C or S

SEQ ID NO: 96326 - protein, 35 aa, Artificial Sequence; identical to SEQ ID NO: 38109
  Cyclic GFR-binding peptide
  MOD_RES (1)..(2)..(34): Xaa is C or S

SEQ ID NO: 96327 - protein, 40 aa, Artificial Sequence; identical to SEQ ID NO: 9325
  Cyclic GFR-binding peptide
  MOD_RES (6)..(38)..(40): Xaa is C or S

SEQ ID NO: 96328 - protein, 23 aa, Artificial Sequence
  Cyclic GFR-binding peptide
NAISILYFDSANNVVLKKYRDMV

SEQ ID NO: 96329 - protein, 31 aa, Artificial Sequence; identical to SEQ ID NO: 9330
  Cyclic GFR-binding peptide
  MOD_RES (4)..(5): Xaa is C or S

SEQ ID NO: 96330 - protein, 32 aa, Artificial Sequence; identical to SEQ ID NO: 42473
  Cyclic GFR-binding peptide
  MOD_RES (6)..(7): Xaa is C or S

SEQ ID NO: 96331 - protein, 25 aa, Artificial Sequence
  Cyclic GFR-binding peptide
VPQDLEPISILYLVGRTPKVKFKYE

SEQ ID NO: 96332 - protein, 33 aa, Artificial Sequence; identical to SEQ ID NO: 9331
  Cyclic GFR-binding peptide
  MOD_RES (1)..(33): Xaa is C or S

SEQ ID NO: 96333 - protein, 31 aa, Artificial Sequence; identical to SEQ ID NO: 9338
  Cyclic GFR-binding peptide
  MOD_RES (31)..(31): Xaa is C or S

SEQ ID NO: 96334 - protein, 41 aa, Artificial Sequence
  Cyclic GFR-binding peptide
  MOD_RES (6)..(7)..(39)..(41): Xaa is C or S
GIPEPXXVPEKMSPINILYFDENKNVVYGKIPNMTVESXAX

SEQ ID NO: 96335 - protein, 26 aa, Artificial Sequence
  Cyclic GFR-binding peptide
ARLNAISILYFDAANNVVLKKYRDMV

SEQ ID NO: 96336 - protein, 29 aa, Artificial Sequence
  Cyclic GFR-binding peptide
  MOD_RES (1)..(2): Xaa is C or S
XXVPTELEPISMLYLDENEKVVKFKYEDM

SEQ ID NO: 96337 - protein, 25 aa, Artificial Sequence
  Cyclic GFR-binding peptide
PEKMNAISILYFDENKNVVLKKYRN

SEQ ID NO: 96338 - protein, 38 aa, Artificial Sequence; identical to SEQ ID NO: 42480
  Cyclic GFR-binding peptide
  MOD_RES (5)..(6): Xaa is C or S

SEQ ID NO: 96339 - protein, 30 aa, Artificial Sequence; identical to SEQ ID NO: 19560
  Cyclic GFR-binding peptide
  MOD_RES (4)..(5): Xaa is C or S

SEQ ID NO: 96340 - protein, 29 aa, Artificial Sequence
  Cyclic GFR-binding peptide
  MOD_RES (1)..(2): Xaa is C or S
XXVSQDLSPINILYFIGKTPKIYGKIPMI

SEQ ID NO: 96341 - protein, 35 aa, Artificial Sequence; identical to SEQ ID NO: 38129
  Cyclic GFR-binding peptide
  MOD_RES (6)..(7): Xaa is C or S

SEQ ID NO: 96342 - protein, 33 aa, Artificial Sequence; identical to SEQ ID NO: 9343
  Cyclic GFR-binding peptide
  MOD_RES (31)..(33): Xaa is C or S

SEQ ID NO: 96343 - protein, 29 aa, Artificial Sequence
  Cyclic GFR-binding peptide
  MOD_RES (29)..(29): Xaa is C or S
ELNAISMLYFDEYDKVVLKKYREMVVEGX

SEQ ID NO: 96344 - protein, 33 aa, Artificial Sequence
  Cyclic GFR-binding peptide
  MOD_RES (1)..(33): Xaa is C or S
XTPTKMSATSMLYYNDKQQIILRKHRGMVVDRX

SEQ ID NO: 96345 - protein, 32 aa, Artificial Sequence; identical to SEQ ID NO: 9346
  Cyclic GFR-binding peptide
  MOD_RES (32)..(32): Xaa is C or S

SEQ ID NO: 96346 - protein, 37 aa, Artificial Sequence
  Cyclic GFR-binding peptide
  MOD_RES (3)..(4)..(36): Xaa is C or S
KAXXVPTKLSATSILYYDKGVVTYLRKHRGMAVSEXG

SEQ ID NO: 96347 - protein, 32 aa, Artificial Sequence; identical to SEQ ID NO: 42490
  Cyclic GFR-binding peptide
  MOD_RES (4)..(5): Xaa is C or S

SEQ ID NO: 96348 - protein, 27 aa, Artificial Sequence
  Cyclic GFR-binding peptide
PVKTSPISMLYKDNGRVLLLKYHYMIV

SEQ ID NO: 96349 - protein, 38 aa, Artificial Sequence
  Cyclic GFR-binding peptide
  MOD_RES (6)..(7)..(38): Xaa is C or S
ASAAPXXVPQALSPINILYFVGRKPKVYGKIPMIVRSX

SEQ ID NO: 96350 - protein, 33 aa, Artificial Sequence; identical to SEQ ID NO: 42497
  Cyclic GFR-binding peptide
  MOD_RES (32)..(32): Xaa is C or S

SEQ ID NO: 96351 - protein, 41 aa, Artificial Sequence
  Cyclic GFR-binding peptide
  MOD_RES (6)..(7)..(39)..(41): Xaa is C or S
GSAGPXXTPTKMSATSMLYYNDKQQIILRKHRGMVVDRXGX

SEQ ID NO: 96352 - protein, 26 aa, Artificial Sequence
  Cyclic GFR-binding peptide
TPTKMNAISMLYFNDKQQIILKKYRG

SEQ ID NO: 96353 - protein, 23 aa, Artificial Sequence
  Cyclic GFR-binding peptide
LNAISILYFIGKTPKILKKYRMI

SEQ ID NO: 96354 - protein, 35 aa, Artificial Sequence; identical to SEQ ID NO: 9358
  Cyclic GFR-binding peptide
  MOD_RES (3)..(4): Xaa is C or S

SEQ ID NO: 96355 - protein, 39 aa, Artificial Sequence
  Cyclic GFR-binding peptide
  MOD_RES (3)..(4)..(36)..(38): Xaa is C or S
GPXXTPTKMSATSMLYYNDKQQIILRKHRGMVVDRXGXS

SEQ ID NO: 96356 - protein, 23 aa, Artificial Sequence
  Cyclic GFR-binding peptide
LEPISILYLVGRTPKVKFKYEMV

SEQ ID NO: 96357 - protein, 27 aa, Artificial Sequence
  Cyclic GFR-binding peptide
VPTELSATSMLYYDEYDKVVLRKHREM

SEQ ID NO: 96358 - protein, 30 aa, Artificial Sequence
  Cyclic GFR-binding peptide
  MOD_RES (30)..(30): Xaa is C or S
EKMEPISILYLDENKNVVKFKYENMTVESX

SEQ ID NO: 96359 - protein, 29 aa, Artificial Sequence
  Cyclic GFR-binding peptide
  MOD_RES (29)..(29): Xaa is C or S
KLSATSVLYYDDSSNVILRKHRNMVVRSX

SEQ ID NO: 96360 - protein, 25 aa, Artificial Sequence
  Cyclic GFR-binding peptide
TKMSPISMLYKNDKQQIILKYHYGM

SEQ ID NO: 96361 - protein, 41 aa, Artificial Sequence
  Cyclic GFR-binding peptide
  MOD_RES (6)..(7)..(39)..(41): Xaa is C or S
HVPKPXXAPTKLSATSVLYYDDSSNVILRKHRNMVVRSXGX

SEQ ID NO: 96362 - protein, 29 aa, Artificial Sequence
  Cyclic GFR-binding peptide
  MOD_RES (1)..(1): Xaa is C or S
XTPTKMSPISMLYKNDKQQIILKYHYGMV

SEQ ID NO: 96363 - protein, 33 aa, Artificial Sequence; identical to SEQ ID NO: 38142
  Cyclic GFR-binding peptide
  MOD_RES (5)..(6): Xaa is C or S

SEQ ID NO: 96364 - protein, 41 aa, Artificial Sequence; identical to SEQ ID NO: 9364
  Cyclic GFR-binding peptide
  MOD_RES (5)..(6)..(38)..(40): Xaa is C or S

SEQ ID NO: 96365 - protein, 21 aa, Artificial Sequence
  Cyclic GFR-binding peptide
SATSILYYIGKTPKILRKHRM

SEQ ID NO: 96366 - protein, 33 aa, Artificial Sequence; identical to SEQ ID NO: 9366
  Cyclic GFR-binding peptide
  MOD_RES (32)..(32): Xaa is C or S

SEQ ID NO: 96367 - protein, 35 aa, Artificial Sequence; identical to SEQ ID NO: 42520
  Cyclic GFR-binding peptide
  MOD_RES (4)..(5): Xaa is C or S

SEQ ID NO: 96368 - protein, 38 aa, Artificial Sequence; identical to SEQ ID NO: 9368
  Cyclic GFR-binding peptide
  MOD_RES (4)..(5)..(36)..(38): Xaa is C or S

SEQ ID NO: 96369 - protein, 22 aa, Artificial Sequence
  Cyclic GFR-binding peptide
SATSVLYYDDMGVPTLRKHREG

SEQ ID NO: 96370 - protein, 41 aa, Artificial Sequence; identical to SEQ ID NO: 42524
  Cyclic GFR-binding peptide
  MOD_RES (6)..(7)..(39)..(41): Xaa is C or S

SEQ ID NO: 96371 - protein, 38 aa, Artificial Sequence; identical to SEQ ID NO: 77051
  Cyclic GFR-binding peptide
  MOD_RES (5)..(6)..(37): Xaa is C or S

SEQ ID NO: 96372 - protein, 34 aa, Artificial Sequence
  Cyclic GFR-binding peptide
  MOD_RES (1)..(2)..(34): Xaa is C or S
XXTPTKMSATSMLYYNDKQQIILRKHRGMVVDRX

SEQ ID NO: 96373 - protein, 29 aa, Artificial Sequence
  Cyclic GFR-binding peptide
TKLSPINVLYFDDMGVPTYGKIPEGMSVA

SEQ ID NO: 96374 - protein, 34 aa, Artificial Sequence; identical to SEQ ID NO: 38153
  Cyclic GFR-binding peptide
  MOD_RES (3)..(4): Xaa is C or S

SEQ ID NO: 96375 - protein, 40 aa, Artificial Sequence; identical to SEQ ID NO: 9373
  Cyclic GFR-binding peptide
  MOD_RES (5)..(6)..(38)..(40): Xaa is C or S

SEQ ID NO: 96376 - protein, 33 aa, Artificial Sequence; identical to SEQ ID NO: 38155
  Cyclic GFR-binding peptide
  MOD_RES (1)..(32): Xaa is C or S

SEQ ID NO: 96377 - protein, 37 aa, Artificial Sequence; identical to SEQ ID NO: 38156
  Cyclic GFR-binding peptide
  MOD_RES (4)..(5): Xaa is C or S

SEQ ID NO: 96378 - protein, 33 aa, Artificial Sequence; identical to SEQ ID NO: 38157
  Cyclic GFR-binding peptide
  MOD_RES (1)..(33): Xaa is C or S

SEQ ID NO: 96379 - protein, 31 aa, Artificial Sequence; identical to SEQ ID NO: 9375
  Cyclic GFR-binding peptide
  MOD_RES (4)..(5): Xaa is C or S

SEQ ID NO: 96380 - protein, 31 aa, Artificial Sequence
  Cyclic GFR-binding peptide
  MOD_RES (1)..(1): Xaa is C or S
XVPEKMEPISILYLDENKNVVKFKYENMTVE

SEQ ID NO: 96381 - protein, 36 aa, Artificial Sequence; identical to SEQ ID NO: 9377
  Cyclic GFR-binding peptide
  MOD_RES (3)..(4)..(36): Xaa is C or S

SEQ ID NO: 96382 - protein, 32 aa, Artificial Sequence; identical to SEQ ID NO: 9378
  Cyclic GFR-binding peptide
  MOD_RES (2)..(3): Xaa is C or S

SEQ ID NO: 96383 - protein, 31 aa, Artificial Sequence
  Cyclic GFR-binding peptide
  MOD_RES (2)..(3): Xaa is C or S
PXXTPTKMEPISMLYLNDKQQIIKFKYEGMV

SEQ ID NO: 96384 - protein, 32 aa, Artificial Sequence; identical to SEQ ID NO: 9379
  Cyclic GFR-binding peptide
  MOD_RES (4)..(5): Xaa is C or S

SEQ ID NO: 96385 - protein, 32 aa, Artificial Sequence; identical to SEQ ID NO: 9381
  Cyclic GFR-binding peptide
  MOD_RES (30)..(32): Xaa is C or S

SEQ ID NO: 96386 - protein, 34 aa, Artificial Sequence; identical to SEQ ID NO: 9382
  Cyclic GFR-binding peptide
  MOD_RES (5)..(6): Xaa is C or S

SEQ ID NO: 96387 - protein, 37 aa, Artificial Sequence; identical to SEQ ID NO: 9386
  Cyclic GFR-binding peptide
  MOD_RES (6)..(6): Xaa is C or S

SEQ ID NO: 96388 - protein, 37 aa, Artificial Sequence; identical to SEQ ID NO: 9388
  Cyclic GFR-binding peptide
  MOD_RES (4)..(5)..(36): Xaa is C or S

SEQ ID NO: 96389 - protein, 23 aa, Artificial Sequence
  Cyclic GFR-binding peptide
TKLSPISVLYKDDSSNVILKYHY

SEQ ID NO: 96390 - protein, 37 aa, Artificial Sequence; identical to SEQ ID NO: 9390
  Cyclic GFR-binding peptide
  MOD_RES (3)..(35)..(37): Xaa is C or S

SEQ ID NO: 96391 - protein, 39 aa, Artificial Sequence; identical to SEQ ID NO: 9391
  Cyclic GFR-binding peptide
  MOD_RES (5)..(6)..(37)..(39): Xaa is C or S

SEQ ID NO: 96392 - protein, 33 aa, Artificial Sequence; identical to SEQ ID NO: 38171
  Cyclic GFR-binding peptide
  MOD_RES (3)..(4): Xaa is C or S

SEQ ID NO: 96393 - protein, 28 aa, Artificial Sequence
  Cyclic GFR-binding peptide
  MOD_RES (2)..(3): Xaa is C or S
PXXAPTKLSPINVLYFDDSSNVIYGKIP

SEQ ID NO: 96394 - protein, 29 aa, Artificial Sequence
  Cyclic GFR-binding peptide
  MOD_RES (27)..(29): Xaa is C or S
SPINILYFDENKNVVYGKIPNMTVESXAX

SEQ ID NO: 96395 - protein, 29 aa, Artificial Sequence
  Cyclic GFR-binding peptide
  MOD_RES (28)..(28): Xaa is C or S
MNAISILYFDENKNVVLKKYRNMTVESXA

SEQ ID NO: 96396 - protein, 29 aa, Artificial Sequence
  Cyclic GFR-binding peptide
  MOD_RES (1)..(2): Xaa is C or S
XXVPQDLSPINILYFVGRTPKVYGKIPMV

SEQ ID NO: 96397 - protein, 27 aa, Artificial Sequence
  Cyclic GFR-binding peptide
ELSPINMLYFDEYDKVVYGKIPEMVVE

SEQ ID NO: 96398 - protein, 34 aa, Artificial Sequence; identical to SEQ ID NO: 9396
  Cyclic GFR-binding peptide
  MOD_RES (5)..(6): Xaa is C or S

SEQ ID NO: 96399 - protein, 33 aa, Artificial Sequence; identical to SEQ ID NO: 42546
  Cyclic GFR-binding peptide
  MOD_RES (5)..(6): Xaa is C or S

SEQ ID NO: 96400 - protein, 32 aa, Artificial Sequence
  Cyclic GFR-binding peptide
  MOD_RES (32)..(32): Xaa is C or S
TPTKMEPISMLYLNDKQQIIKFKYEGMVVDRX

SEQ ID NO: 96401 - protein, 31 aa, Artificial Sequence; identical to SEQ ID NO: 9404
  Cyclic GFR-binding peptide
  MOD_RES (4)..(5): Xaa is C or S

SEQ ID NO: 96402 - protein, 31 aa, Artificial Sequence; identical to SEQ ID NO: 38185
  Cyclic GFR-binding peptide
  MOD_RES (6)..(6): Xaa is C or S

SEQ ID NO: 96403 - protein, 24 aa, Artificial Sequence
  Cyclic GFR-binding peptide
LSATSMLYYDEYDKVVLRKHREMV

SEQ ID NO: 96404 - protein, 36 aa, Artificial Sequence
  Cyclic GFR-binding peptide
  MOD_RES (5)..(6): Xaa is C or S
TPPTXXVPTRLSPISILYKDSANNVVLKYHYDMVVE

SEQ ID NO: 96405 - protein, 34 aa, Artificial Sequence
  Cyclic GFR-binding peptide
  MOD_RES (3)..(4): Xaa is C or S
EPXXVPEKMSPINILYFDENKNVVYGKIPNMTVE

SEQ ID NO: 96406 - protein, 34 aa, Artificial Sequence; identical to SEQ ID NO: 38189
  Cyclic GFR-binding peptide
  MOD_RES (1)..(2)..(33): Xaa is C or S

SEQ ID NO: 96407 - protein, 33 aa, Artificial Sequence; identical to SEQ ID NO: 42555
  Cyclic GFR-binding peptide
  MOD_RES (31)..(33): Xaa is C or S

SEQ ID NO: 96408 - protein, 30 aa, Artificial Sequence; identical to SEQ ID NO: 9416
  Cyclic GFR-binding peptide
  MOD_RES (28)..(30): Xaa is C or S

SEQ ID NO: 96409 - protein, 35 aa, Artificial Sequence
  Cyclic GFR-binding peptide
  MOD_RES (1)..(33)..(35): Xaa is C or S
XVPTKLSATSILYYDKGVVTYLRKHRGMAVSEXGX

SEQ ID NO: 96410 - protein, 32 aa, Artificial Sequence; identical to SEQ ID NO: 9417
  Cyclic GFR-binding peptide
  MOD_RES (30)..(32): Xaa is C or S

SEQ ID NO: 96411 - protein, 36 aa, Artificial Sequence; identical to SEQ ID NO: 38196
  Cyclic GFR-binding peptide
  MOD_RES (3)..(4)..(36): Xaa is C or S

SEQ ID NO: 96412 - protein, 25 aa, Artificial Sequence
  Cyclic GFR-binding peptide
KLSATSVLYYDDMGVPTLRKHREGM

SEQ ID NO: 96413 - protein, 25 aa, Artificial Sequence
  Cyclic GFR-binding peptide
QDLSPINILYFIGKTPKIYGKIPMI

SEQ ID NO: 96414 - protein, 25 aa, Artificial Sequence
  Cyclic GFR-binding peptide
PTKLSPISVLYKDSSNNVILKYHYN

SEQ ID NO: 96415 - protein, 35 aa, Artificial Sequence; identical to SEQ ID NO: 38200
  Cyclic GFR-binding peptide
  MOD_RES (5)..(6): Xaa is C or S

SEQ ID NO: 96416 - protein, 29 aa, Artificial Sequence
  Cyclic GFR-binding peptide
  MOD_RES (2)..(3): Xaa is C or S
PXXAPTQLSATSVLYYDDSSNVILRKHRN

SEQ ID NO: 96417 - protein, 31 aa, Artificial Sequence; identical to SEQ ID NO: 42570
  Cyclic GFR-binding peptide
  MOD_RES (31)..(31): Xaa is C or S

SEQ ID NO: 96418 - protein, 38 aa, Artificial Sequence; identical to SEQ ID NO: 42571
  Cyclic GFR-binding peptide
  MOD_RES (5)..(6)..(38): Xaa is C or S

SEQ ID NO: 96419 - protein, 30 aa, Artificial Sequence
  Cyclic GFR-binding peptide
  MOD_RES (3)..(4): Xaa is C or S
GPXXTPTKMEPISMLYLNDKQQIIKFKYEG

SEQ ID NO: 96420 - protein, 32 aa, Artificial Sequence
  Cyclic GFR-binding peptide
  MOD_RES (29)..(31): Xaa is C or S
RLSPISILYKDSANNVVLKYHYDMVVESXGXR

SEQ ID NO: 96421 - protein, 30 aa, Artificial Sequence; identical to SEQ ID NO: 9432
  Cyclic GFR-binding peptide
  MOD_RES (27)..(29): Xaa is C or S

SEQ ID NO: 96422 - protein, 35 aa, Artificial Sequence; identical to SEQ ID NO: 42577
  Cyclic GFR-binding peptide
  MOD_RES (2)..(3)..(35): Xaa is C or S

SEQ ID NO: 96423 - protein, 29 aa, Artificial Sequence
  Cyclic GFR-binding peptide
  MOD_RES (1)..(1): Xaa is C or S
XVPTKLSPINVLYFDDMGVPTYGKIPEGM

SEQ ID NO: 96424 - protein, 27 aa, Artificial Sequence
  Cyclic GFR-binding peptide
  MOD_RES (1)..(2): Xaa is C or S
XXVPTKLSPINVLYFDDMGVPTYGKIP

SEQ ID NO: 96425 - protein, 31 aa, Artificial Sequence; identical to SEQ ID NO: 42581
  Cyclic GFR-binding peptide
  MOD_RES (31)..(31): Xaa is C or S

SEQ ID NO: 96426 - protein, 27 aa, Artificial Sequence
  Cyclic GFR-binding peptide
  MOD_RES (1)..(1): Xaa is C or S
XVPTKLSATSVLYYDDMGVPTLRKHRE

SEQ ID NO: 96427 - protein, 27 aa, Artificial Sequence
  Cyclic GFR-binding peptide
VPTELSPISMLYKDEYDKVVLKYHYEM

SEQ ID NO: 96428 - protein, 32 aa, Artificial Sequence; identical to SEQ ID NO: 9438
  Cyclic GFR-binding peptide
  MOD_RES (29)..(31): Xaa is C or S

SEQ ID NO: 96429 - protein, 24 aa, Artificial Sequence
  Cyclic GFR-binding peptide
LSPISMLYKDEYDKVVLKYHYEMV

SEQ ID NO: 96430 - protein, 30 aa, Artificial Sequence
  Cyclic GFR-binding peptide
  MOD_RES (1)..(2): Xaa is C or S
XXAPVKTEPISMLYLDNGRVLLKFKYEMIV

SEQ ID NO: 96431 - protein, 28 aa, Artificial Sequence
  Cyclic GFR-binding peptide
  MOD_RES (28)..(28): Xaa is C or S
LSPISMLYKDENEKVVLKYHYDMVVEGX

SEQ ID NO: 96432 - protein, 42 aa, Artificial Sequence
  Cyclic GFR-binding peptide
  MOD_RES (6)..(7)..(39)..(41): Xaa is C or S
GIPEPXXVPEKMEPISILYLDENKNVVKFKYENMTVESXAXR

SEQ ID NO: 96433 - protein, 31 aa, Artificial Sequence; identical to SEQ ID NO: 9443
  Cyclic GFR-binding peptide
  MOD_RES (28)..(30): Xaa is C or S

SEQ ID NO: 96434 - protein, 31 aa, Artificial Sequence; identical to SEQ ID NO: 9444
  Cyclic GFR-binding peptide
  MOD_RES (31)..(31): Xaa is C or S

SEQ ID NO: 96435 - protein, 40 aa, Artificial Sequence; identical to SEQ ID NO: 42592
  Cyclic GFR-binding peptide
  MOD_RES (4)..(5)..(37)..(39): Xaa is C or S

SEQ ID NO: 96436 - protein, 24 aa, Artificial Sequence
  Cyclic GFR-binding peptide
QALSATSILYYVGRKPKVLRKHRM

SEQ ID NO: 96437 - protein, 33 aa, Artificial Sequence; identical to SEQ ID NO: 38223
  Cyclic GFR-binding peptide
  MOD_RES (4)..(5): Xaa is C or S

SEQ ID NO: 96438 - protein, 34 aa, Artificial Sequence; identical to SEQ ID NO: 38224
  Cyclic GFR-binding peptide
  MOD_RES (7)..(7): Xaa is C or S

SEQ ID NO: 96439 - protein, 32 aa, Artificial Sequence; identical to SEQ ID NO: 42596
  Cyclic GFR-binding peptide
  MOD_RES (3)..(4): Xaa is C or S

SEQ ID NO: 96440 - protein, 28 aa, Artificial Sequence
  Cyclic GFR-binding peptide
  MOD_RES (1)..(2): Xaa is C or S
XXVPQALSPINILYFVGRKPKVYGKIPM

SEQ ID NO: 96441 - protein, 36 aa, Artificial Sequence
  Cyclic GFR-binding peptide
  MOD_RES (1)..(2)..(33)..(35): Xaa is C or S
XXVPQDLSPINILYFVGRTPKVYGKIPMVVKSXKXS

SEQ ID NO: 96442 - protein, 31 aa, Artificial Sequence; identical to SEQ ID NO: 9448
  Cyclic GFR-binding peptide
  MOD_RES (6)..(6): Xaa is C or S

SEQ ID NO: 96443 - protein, 39 aa, Artificial Sequence; identical to SEQ ID NO: 9449
  Cyclic GFR-binding peptide
  MOD_RES (6)..(7)..(39): Xaa is C or S

SEQ ID NO: 96444 - protein, 36 aa, Artificial Sequence
  Cyclic GFR-binding peptide
  MOD_RES (1)..(33)..(35): Xaa is C or S
XVPTKLSATSILYYDKGVVTYLRKHRGMAVSEXGXR

SEQ ID NO: 96445 - protein, 23 aa, Artificial Sequence
  Cyclic GFR-binding peptide
SPISILYKDENKNVVLKYHYNMT

SEQ ID NO: 96446 - protein, 37 aa, Artificial Sequence
  Cyclic GFR-binding peptide
  MOD_RES (6)..(7): Xaa is C or S
RVPSTXXAPVKTSATSMLYYDNGRVLLLRKHRMIVEE

SEQ ID NO: 96447 - protein, 24 aa, Artificial Sequence
  Cyclic GFR-binding peptide
KLEPISVLYLDDMGVPTKFKYEEG

SEQ ID NO: 96448 - protein, 33 aa, Artificial Sequence; identical to SEQ ID NO: 38235
  Cyclic GFR-binding peptide
  MOD_RES (3)..(4): Xaa is C or S

SEQ ID NO: 96449 - protein, 30 aa, Artificial Sequence
  Cyclic GFR-binding peptide
  MOD_RES (4)..(5): Xaa is C or S
PPTXXVPTRLEPISILYLDSANNVVKFKYE

SEQ ID NO: 96450 - protein, 38 aa, Artificial Sequence
  Cyclic GFR-binding peptide
  MOD_RES (5)..(6)..(38): Xaa is C or S
IPEPXXVPEKMSPINILYFDENKNVVYGKIPNMTVESX

SEQ ID NO: 96451 - protein, 38 aa, Artificial Sequence; identical to SEQ ID NO: 9459
  Cyclic GFR-binding peptide
  MOD_RES (3)..(4)..(35)..(37): Xaa is C or S

SEQ ID NO: 96452 - protein, 27 aa, Artificial Sequence
  Cyclic GFR-binding peptide
APVKTSPINMLYFDNGRVLLYGKIPMI

SEQ ID NO: 96453 - protein, 36 aa, Artificial Sequence; identical to SEQ ID NO: 42620
  Cyclic GFR-binding peptide
  MOD_RES (5)..(6): Xaa is C or S

SEQ ID NO: 96454 - protein, 31 aa, Artificial Sequence; identical to SEQ ID NO: 77085
  Cyclic GFR-binding peptide
  MOD_RES (1)..(1): Xaa is C or S

SEQ ID NO: 96455 - protein, 29 aa, Artificial Sequence
  Cyclic GFR-binding peptide
  MOD_RES (1)..(1): Xaa is C or S
XVSQDLSPINILYFIGKTPKIYGKIPMIV

SEQ ID NO: 96456 - protein, 26 aa, Artificial Sequence
  Cyclic GFR-binding peptide
KLEPISVLYLDDSSNVIKFKYENMVV

SEQ ID NO: 96457 - protein, 28 aa, Artificial Sequence
  Cyclic GFR-binding peptide
  MOD_RES (26)..(28): Xaa is C or S
SPINILYFVGRTPKVYGKIPMVVKSXKX

SEQ ID NO: 96458 - protein, 27 aa, Artificial Sequence
  Cyclic GFR-binding peptide
LNAISILYFDKGVVTYLKKYRGMAVSE

SEQ ID NO: 96459 - protein, 32 aa, Artificial Sequence
  Cyclic GFR-binding peptide
  MOD_RES (32)..(32): Xaa is C or S
TPTKMSATSMLYYNDKQQIILRKHRGMVVDRX

SEQ ID NO: 96460 - protein, 37 aa, Artificial Sequence; identical to SEQ ID NO: 38250
  Cyclic GFR-binding peptide
  MOD_RES (6)..(7): Xaa is C or S

SEQ ID NO: 96461 - protein, 30 aa, Artificial Sequence
  Cyclic GFR-binding peptide
  MOD_RES (1)..(2): Xaa is C or S
XXVPARLSATSILYYDAANNVVLRKHRDMV

SEQ ID NO: 96462 - protein, 25 aa, Artificial Sequence
  Cyclic GFR-binding peptide
PQALNAISILYFVGRKPKVLKKYRM

SEQ ID NO: 96463 - protein, 39 aa, Artificial Sequence; identical to SEQ ID NO: 9472
  Cyclic GFR-binding peptide
  MOD_RES (4)..(5)..(37)..(39): Xaa is C or S

SEQ ID NO: 96464 - protein, 24 aa, Artificial Sequence
  Cyclic GFR-binding peptide
LNAISMLYFDEYDKVVLKKYREMV

SEQ ID NO: 96465 - protein, 25 aa, Artificial Sequence
  Cyclic GFR-binding peptide
TQLSPINVLYFDDSSNVIYGKIPNM

SEQ ID NO: 96466 - protein, 35 aa, Artificial Sequence; identical to SEQ ID NO: 9475
  Cyclic GFR-binding peptide
  MOD_RES (6)..(6): Xaa is C or S

SEQ ID NO: 96467 - protein, 34 aa, Artificial Sequence; identical to SEQ ID NO: 38262
  Cyclic GFR-binding peptide
  MOD_RES (32)..(34): Xaa is C or S

SEQ ID NO: 96468 - protein, 24 aa, Artificial Sequence
  Cyclic GFR-binding peptide
PTKLSPISVLYKDSSNNVILKYHY

SEQ ID NO: 96469 - protein, 25 aa, Artificial Sequence
  Cyclic GFR-binding peptide
ARLNAISILYFDAANNVVLKKYRDM

SEQ ID NO: 96470 - protein, 28 aa, Artificial Sequence
  Cyclic GFR-binding peptide
  MOD_RES (1)..(2): Xaa is C or S
XXVPTKLSPINVLYFDDMGVPTYGKIPE

SEQ ID NO: 96471 - protein, 26 aa, Artificial Sequence
  Cyclic GFR-binding peptide
VKTSPINMLYFDNGRVLLYGKIPMIV

SEQ ID NO: 96472 - protein, 33 aa, Artificial Sequence; identical to SEQ ID NO: 38265
  Cyclic GFR-binding peptide
  MOD_RES (1)..(2): Xaa is C or S

SEQ ID NO: 96473 - protein, 23 aa, Artificial Sequence
  Cyclic GFR-binding peptide
SPINILYFDKGVVTYYGKIPGMA

SEQ ID NO: 96474 - protein, 33 aa, Artificial Sequence; identical to SEQ ID NO: 9479
  Cyclic GFR-binding peptide
  MOD_RES (2)..(3): Xaa is C or S

SEQ ID NO: 96475 - protein, 34 aa, Artificial Sequence
  Cyclic GFR-binding peptide
  MOD_RES (1)..(2)..(34): Xaa is C or S
XXVPEKMSPISILYKDENKNVVLKYHYNMTVESX

SEQ ID NO: 96476 - protein, 35 aa, Artificial Sequence; identical to SEQ ID NO: 9483
  Cyclic GFR-binding peptide
  MOD_RES (33)..(35): Xaa is C or S

SEQ ID NO: 96477 - protein, 41 aa, Artificial Sequence
  Cyclic GFR-binding peptide
  MOD_RES (5)..(6)..(38)..(40): Xaa is C or S
APASXXVPARLSATSILYYDAANNVVLRKHRDMVVEAXGXR

SEQ ID NO: 96478 - protein, 26 aa, Artificial Sequence
  Cyclic GFR-binding peptide
VPARLEPISILYLDAANNVVKFKYED

SEQ ID NO: 96479 - protein, 31 aa, Artificial Sequence
  Cyclic GFR-binding peptide
  MOD_RES (1)..(1): Xaa is C or S
XAPVKTSATSMLYYDNGRVLLLRKHRMIVEE

SEQ ID NO: 96480 - protein, 28 aa, Artificial Sequence
  Cyclic GFR-binding peptide
VPQDLEPISILYLVGRTPKVKFKYEMVV

SEQ ID NO: 96481 - protein, 28 aa, Artificial Sequence
  Cyclic GFR-binding peptide
  MOD_RES (1)..(2): Xaa is C or S
XXVSQDLEPISILYLIGKTPKIKFKYEM

SEQ ID NO: 96482 - protein, 33 aa, Artificial Sequence
  Cyclic GFR-binding peptide
  MOD_RES (1)..(2): Xaa is C or S
XXVPEKMSPINILYFDENKNVVYGKIPNMTVES

SEQ ID NO: 96483 - protein, 24 aa, Artificial Sequence
  Cyclic GFR-binding peptide
LSATSILYYDSANNVVLRKHRDMV

SEQ ID NO: 96484 - protein, 25 aa, Artificial Sequence
  Cyclic GFR-binding peptide
SATSMLYYDENEKVVLRKHRDMVVE

SEQ ID NO: 96485 - protein, 32 aa, Artificial Sequence; identical to SEQ ID NO: 42656
  Cyclic GFR-binding peptide
  MOD_RES (2)..(3): Xaa is C or S

SEQ ID NO: 96486 - protein, 37 aa, Artificial Sequence
  Cyclic GFR-binding peptide
  MOD_RES (3)..(4)..(36): Xaa is C or S
EPXXVPEKMEPISILYLDENKNVVKFKYENMTVESXA

SEQ ID NO: 96487 - protein, 35 aa, Artificial Sequence; identical to SEQ ID NO: 38285
  Cyclic GFR-binding peptide
  MOD_RES (1)..(32)..(34): Xaa is C or S

SEQ ID NO: 96488 - protein, 33 aa, Artificial Sequence; identical to SEQ ID NO: 42659
  Cyclic GFR-binding peptide
  MOD_RES (4)..(5): Xaa is C or S

SEQ ID NO: 96489 - protein, 30 aa, Artificial Sequence
  Cyclic GFR-binding peptide
  MOD_RES (1)..(1): Xaa is C or S
XVPEKMEPISILYLDENKNVVKFKYENMTV

SEQ ID NO: 96490 - protein, 33 aa, Artificial Sequence
  Cyclic GFR-binding peptide
  MOD_RES (4)..(5): Xaa is C or S
AGPXXTPTKMSATSMLYYNDKQQIILRKHRGMV

SEQ ID NO: 96491 - protein, 30 aa, Artificial Sequence; identical to SEQ ID NO: 38289
  Cyclic GFR-binding peptide
  MOD_RES (29)..(29): Xaa is C or S

SEQ ID NO: 96492 - protein, 35 aa, Artificial Sequence
  Cyclic GFR-binding peptide
  MOD_RES (5)..(6): Xaa is C or S
TPPTXXVPTRLSATSILYYDSANNVVLRKHRDMVV

SEQ ID NO: 96493 - protein, 29 aa, Artificial Sequence
  Cyclic GFR-binding peptide
  MOD_RES (1)..(2): Xaa is C or S
XXVPARLEPISILYLDAANNVVKFKYEDM

SEQ ID NO: 96494 - protein, 28 aa, Artificial Sequence
  Cyclic GFR-binding peptide
EKMEPISILYLDENKNVVKFKYENMTVE

SEQ ID NO: 96495 - protein, 32 aa, Artificial Sequence; identical to SEQ ID NO: 9500
  Cyclic GFR-binding peptide
  MOD_RES (2)..(3): Xaa is C or S

SEQ ID NO: 96496 - protein, 33 aa, Artificial Sequence; identical to SEQ ID NO: 9501
  Cyclic GFR-binding peptide
  MOD_RES (4)..(5): Xaa is C or S

SEQ ID NO: 96497 - protein, 39 aa, Artificial Sequence; identical to SEQ ID NO: 38297
  Cyclic GFR-binding peptide
  MOD_RES (6)..(7)..(38): Xaa is C or S

SEQ ID NO: 96498 - protein, 33 aa, Artificial Sequence
  Cyclic GFR-binding peptide
  MOD_RES (6)..(7): Xaa is C or S
AAPASXXVPARLSATSILYYDAANNVVLRKHRD

SEQ ID NO: 96499 - protein, 34 aa, Artificial Sequence
  Cyclic GFR-binding peptide
  MOD_RES (2)..(3)..(34): Xaa is C or S
PXXVPQALSPINILYFVGRKPKVYGKIPMIVRSX

SEQ ID NO: 96500 - protein, 32 aa, Artificial Sequence
  Cyclic GFR-binding peptide
  MOD_RES (5)..(6): Xaa is C or S
IPEPXXVPEKMSPINILYFDENKNVVYGKIPN

SEQ ID NO: 96501 - protein, 25 aa, Artificial Sequence
  Cyclic GFR-binding peptide
ALSPISILYKVGRKPKVLKYHYMIV

SEQ ID NO: 96502 - protein, 33 aa, Artificial Sequence; identical to SEQ ID NO: 9506
  Cyclic GFR-binding peptide
  MOD_RES (2)..(3): Xaa is C or S

SEQ ID NO: 96503 - protein, 41 aa, Artificial Sequence
  Cyclic GFR-binding peptide
  MOD_RES (6)..(7)..(39)..(41): Xaa is C or S
STPPTXXVPTRLEPISILYLDSANNVVKFKYEDMVVESXGX

SEQ ID NO: 96504 - protein, 22 aa, Artificial Sequence
  Cyclic GFR-binding peptide
MSATSILYYDENKNVVLRKHRN

SEQ ID NO: 96505 - protein, 24 aa, Artificial Sequence
  Cyclic GFR-binding peptide
KLSPINILYFDKGVVTYYGKIPGM

SEQ ID NO: 96506 - protein, 33 aa, Artificial Sequence; identical to SEQ ID NO: 77114
  Cyclic GFR-binding peptide
  MOD_RES (30)..(32): Xaa is C or S

SEQ ID NO: 96507 - protein, 31 aa, Artificial Sequence; identical to SEQ ID NO: 38306
  Cyclic GFR-binding peptide
  MOD_RES (4)..(5): Xaa is C or S

SEQ ID NO: 96508 - protein, 30 aa, Artificial Sequence; identical to SEQ ID NO: 38308
  Cyclic GFR-binding peptide

SEQ ID NO: 96509 - protein, 27 aa, Artificial Sequence
  Cyclic GFR-binding peptide
TRLEPISILYLDSANNVVKFKYEDMVV

SEQ ID NO: 96510 - protein, 29 aa, Artificial Sequence
  Cyclic GFR-binding peptide
  MOD_RES (1)..(2): Xaa is C or S
XXVPTKLSPINVLYFDDMGVPTYGKIPEG

SEQ ID NO: 96511 - protein, 26 aa, Artificial Sequence
  Cyclic GFR-binding peptide
LSATSMLYYDENEKVVLRKHRDMVVE

SEQ ID NO: 96512 - protein, 38 aa, Artificial Sequence
  Cyclic GFR-binding peptide
  MOD_RES (5)..(6)..(38): Xaa is C or S
IPEPXXVPEKMEPISILYLDENKNVVKFKYENMTVESX

SEQ ID NO: 96513 - protein, 32 aa, Artificial Sequence; identical to SEQ ID NO: 42686
  Cyclic GFR-binding peptide
  MOD_RES (6)..(7): Xaa is C or S

SEQ ID NO: 96514 - protein, 34 aa, Artificial Sequence; identical to SEQ ID NO: 9517
  Cyclic GFR-binding peptide
  MOD_RES (3)..(4): Xaa is C or S

SEQ ID NO: 96515 - protein, 28 aa, Artificial Sequence
  Cyclic GFR-binding peptide
  MOD_RES (1)..(2): Xaa is C or S
XXVPTELEPISMLYLDEYDKVVKFKYEE

SEQ ID NO: 96516 - protein, 29 aa, Artificial Sequence
  Cyclic GFR-binding peptide
  MOD_RES (2)..(3): Xaa is C or S
TXXAPVKTSPINMLYFDNGRVLLYGKIPM

SEQ ID NO: 96517 - protein, 27 aa, Artificial Sequence
  Cyclic GFR-binding peptide
KMSPISMLYKNDKQQIILKYHYGMVVD

SEQ ID NO: 96518 - protein, 23 aa, Artificial Sequence
  Cyclic GFR-binding peptide
VKTNAISMLYFDNGRVLLLKKYR

SEQ ID NO: 96519 - protein, 38 aa, Artificial Sequence; identical to SEQ ID NO: 9518
  Cyclic GFR-binding peptide
  MOD_RES (3)..(4)..(36)..(38): Xaa is C or S

SEQ ID NO: 96520 - protein, 23 aa, Artificial Sequence
  Cyclic GFR-binding peptide
SPINILYFVGRKPKVYGKIPMIV

SEQ ID NO: 96521 - protein, 38 aa, Artificial Sequence; identical to SEQ ID NO: 9527
  Cyclic GFR-binding peptide
  MOD_RES (6)..(7): Xaa is C or S

SEQ ID NO: 96522 - protein, 28 aa, Artificial Sequence
  Cyclic GFR-binding peptide
  MOD_RES (28)..(28): Xaa is C or S
MNAISMLYFNDKQQIILKKYRGMVVDRX

SEQ ID NO: 96523 - protein, 28 aa, Artificial Sequence
  Cyclic GFR-binding peptide
  MOD_RES (1)..(1): Xaa is C or S
XVPQDLSPINILYFVGRTPKVYGKIPMV

SEQ ID NO: 96524 - protein, 33 aa, Artificial Sequence; identical to SEQ ID NO: 9529
  Cyclic GFR-binding peptide
  MOD_RES (6)..(7): Xaa is C or S

SEQ ID NO: 96525 - protein, 33 aa, Artificial Sequence; identical to SEQ ID NO: 38324
  Cyclic GFR-binding peptide
  MOD_RES (32)..(32): Xaa is C or S

SEQ ID NO: 96526 - protein, 31 aa, Artificial Sequence; identical to SEQ ID NO: 9531
  Cyclic GFR-binding peptide
  MOD_RES (2)..(3): Xaa is C or S

SEQ ID NO: 96527 - protein, 34 aa, Artificial Sequence
  Cyclic GFR-binding peptide
  MOD_RES (6)..(7): Xaa is C or S
AAPASXXVPARLSATSILYYDAANNVVLRKHRDM

SEQ ID NO: 96528 - protein, 36 aa, Artificial Sequence
  Cyclic GFR-binding peptide
  MOD_RES (3)..(4)..(36): Xaa is C or S
PTXXVPTRLSATSILYYDSANNVVLRKHRDMVVESX

SEQ ID NO: 96529 - protein, 21 aa, Artificial Sequence
  Cyclic GFR-binding peptide
LNAISILYFIGKTPKILKKYR

SEQ ID NO: 96530 - protein, 28 aa, Artificial Sequence
  Cyclic GFR-binding peptide
PTELSPINMLYFDEYDKVVYGKIPEMVV

SEQ ID NO: 96531 - protein, 33 aa, Artificial Sequence; identical to SEQ ID NO: 9537
  Cyclic GFR-binding peptide
  MOD_RES (31)..(33): Xaa is C or S

SEQ ID NO: 96532 - protein, 41 aa, Artificial Sequence; identical to SEQ ID NO: 9538
  Cyclic GFR-binding peptide
  MOD_RES (6)..(7)..(39)..(41): Xaa is C or S

SEQ ID NO: 96533 - protein, 26 aa, Artificial Sequence
  Cyclic GFR-binding peptide
  MOD_RES (1)..(1): Xaa is C or S
XAPTKLSPISVLYKDDSSNVILKYHY

SEQ ID NO: 96534 - protein, 30 aa, Artificial Sequence
  Cyclic GFR-binding peptide
  MOD_RES (28)..(30): Xaa is C or S
MSPISILYKDENKNVVLKYHYNMTVESXAX

SEQ ID NO: 96535 - protein, 40 aa, Artificial Sequence; identical to SEQ ID NO: 9541
  Cyclic GFR-binding peptide
  MOD_RES (5)..(6)..(37)..(39): Xaa is C or S

SEQ ID NO: 96536 - protein, 30 aa, Artificial Sequence; identical to SEQ ID NO: 9542
  Cyclic GFR-binding peptide
  MOD_RES (1)..(2): Xaa is C or S

SEQ ID NO: 96537 - protein, 29 aa, Artificial Sequence
  Cyclic GFR-binding peptide
  MOD_RES (27)..(29): Xaa is C or S
LSPISILYKVGRTPKVLKYHYMVVKSXKX

SEQ ID NO: 96538 - protein, 26 aa, Artificial Sequence
  Cyclic GFR-binding peptide
LEPISVLYLDDSSNVIKFKYENMVVR

SEQ ID NO: 96539 - protein, 33 aa, Artificial Sequence; identical to SEQ ID NO: 9544
  Cyclic GFR-binding peptide
  MOD_RES (30)..(32): Xaa is C or S

SEQ ID NO: 96540 - protein, 41 aa, Artificial Sequence
  Cyclic GFR-binding peptide
  MOD_RES (6)..(7)..(39)..(41): Xaa is C or S
GIPEPXXVPEKMSATSILYYDENKNVVLRKHRNMTVESXAX

SEQ ID NO: 96541 - protein, 29 aa, Artificial Sequence
  Cyclic GFR-binding peptide
TKLNAISILYFDKGVVTYLKKYRGMAVSE

SEQ ID NO: 96542 - protein, 27 aa, Artificial Sequence
  Cyclic GFR-binding peptide
  MOD_RES (27)..(27): Xaa is C or S
SATSILYYDENKNVVLRKHRNMTVESX

SEQ ID NO: 96543 - protein, 27 aa, Artificial Sequence
  Cyclic GFR-binding peptide
  MOD_RES (1)..(2): Xaa is C or S
XXVSQDLSPINILYFIGKTPKIYGKIP

SEQ ID NO: 96544 - protein, 28 aa, Artificial Sequence
  Cyclic GFR-binding peptide
QDLNAISILYFVGRTPKVLKKYRMVVKS

SEQ ID NO: 96545 - protein, 38 aa, Artificial Sequence; identical to SEQ ID NO: 9557
  Cyclic GFR-binding peptide
  MOD_RES (5)..(6)..(38): Xaa is C or S

SEQ ID NO: 96546 - protein, 26 aa, Artificial Sequence
  Cyclic GFR-binding peptide
  MOD_RES (1)..(1): Xaa is C or S
XAPVKTNAISMLYFDNGRVLLLKKYR

SEQ ID NO: 96547 - protein, 31 aa, Artificial Sequence; identical to SEQ ID NO: 38353
  Cyclic GFR-binding peptide
  MOD_RES (28)..(30): Xaa is C or S

SEQ ID NO: 96548 - protein, 34 aa, Artificial Sequence; identical to SEQ ID NO: 38354
  Cyclic GFR-binding peptide
  MOD_RES (32)..(34): Xaa is C or S

SEQ ID NO: 96549 - protein, 30 aa, Artificial Sequence; identical to SEQ ID NO: 9558
  Cyclic GFR-binding peptide

SEQ ID NO: 96550 - protein, 32 aa, Artificial Sequence; identical to SEQ ID NO: 42728
  Cyclic GFR-binding peptide
  MOD_RES (2)..(3): Xaa is C or S

SEQ ID NO: 96551 - protein, 33 aa, Artificial Sequence; identical to SEQ ID NO: 9559
  Cyclic GFR-binding peptide
  MOD_RES (30)..(32): Xaa is C or S

SEQ ID NO: 96552 - protein, 35 aa, Artificial Sequence
  Cyclic GFR-binding peptide
  MOD_RES (3)..(4): Xaa is C or S
EPXXVPEKMSPINILYFDENKNVVYGKIPNMTVES

SEQ ID NO: 96553 - protein, 30 aa, Artificial Sequence; identical to SEQ ID NO: 38357
  Cyclic GFR-binding peptide

SEQ ID NO: 96554 - protein, 40 aa, Artificial Sequence
  Cyclic GFR-binding peptide
  MOD_RES (6)..(7)..(39): Xaa is C or S
GIPEPXXVPEKMSPISILYKDENKNVVLKYHYNMTVESXA

SEQ ID NO: 96555 - protein, 27 aa, Artificial Sequence
  Cyclic GFR-binding peptide
  MOD_RES (1)..(1): Xaa is C or S
XAPTKLSATSVLYYDDSSNVILRKHRN

SEQ ID NO: 96556 - protein, 30 aa, Artificial Sequence
  Cyclic GFR-binding peptide
  MOD_RES (3)..(4): Xaa is C or S
KAXXVPTKLSATSILYYDKGVVTYLRKHRG

SEQ ID NO: 96557 - protein, 31 aa, Artificial Sequence; identical to SEQ ID NO: 9568
  Cyclic GFR-binding peptide
  MOD_RES (3)..(4): Xaa is C or S

SEQ ID NO: 96558 - protein, 30 aa, Artificial Sequence
  Cyclic GFR-binding peptide
  MOD_RES (4)..(5): Xaa is C or S
PPTXXVPTRLSATSILYYDSANNVVLRKHR

SEQ ID NO: 96559 - protein, 33 aa, Artificial Sequence; identical to SEQ ID NO: 77139
  Cyclic GFR-binding peptide
  MOD_RES (30)..(32): Xaa is C or S

SEQ ID NO: 96560 - protein, 36 aa, Artificial Sequence; identical to SEQ ID NO: 42740
  Cyclic GFR-binding peptide
  MOD_RES (3)..(4)..(36): Xaa is C or S

SEQ ID NO: 96561 - protein, 33 aa, Artificial Sequence; identical to SEQ ID NO: 9575
  Cyclic GFR-binding peptide
  MOD_RES (31)..(33): Xaa is C or S

SEQ ID NO: 96562 - protein, 28 aa, Artificial Sequence
  Cyclic GFR-binding peptide
VPTELSPINMLYFDEYDKVVYGKIPEMV

SEQ ID NO: 96563 - protein, 24 aa, Artificial Sequence
  Cyclic GFR-binding peptide
SPISILYKDSANNVVLKYHYDMVV

SEQ ID NO: 96564 - protein, 36 aa, Artificial Sequence
  Cyclic GFR-binding peptide
  MOD_RES (5)..(6): Xaa is C or S
SASPXXVSQDLSPINILYFIGKTPKIYGKIPMIVKS

SEQ ID NO: 96565 - protein, 22 aa, Artificial Sequence
  Cyclic GFR-binding peptide
SATSILYYVGRTPKVLRKHRMV

SEQ ID NO: 96566 - protein, 34 aa, Artificial Sequence
  Cyclic GFR-binding peptide
  MOD_RES (1)..(33): Xaa is C or S
XVPTRLSATSILYYDSANNVVLRKHRDMVVESXG

SEQ ID NO: 96567 - protein, 29 aa, Artificial Sequence
  Cyclic GFR-binding peptide
  MOD_RES (1)..(1): Xaa is C or S
XVPEKMNAISILYFDENKNVVLKKYRNMT

SEQ ID NO: 96568 - protein, 31 aa, Artificial Sequence; identical to SEQ ID NO: 42762
  Cyclic GFR-binding peptide
  MOD_RES (29)..(31): Xaa is C or S

SEQ ID NO: 96569 - protein, 28 aa, Artificial Sequence
  Cyclic GFR-binding peptide
TPTKMSATSMLYYNDKQQIILRKHRGMV

SEQ ID NO: 96570 - protein, 33 aa, Artificial Sequence
  Cyclic GFR-binding peptide
  MOD_RES (2)..(3): Xaa is C or S
AXXVPTKLSATSILYYDKGVVTYLRKHRGMAVS

SEQ ID NO: 96571 - protein, 25 aa, Artificial Sequence
  Cyclic GFR-binding peptide
PEKMSATSILYYDENKNVVLRKHRN

SEQ ID NO: 96572 - protein, 27 aa, Artificial Sequence
  Cyclic GFR-binding peptide
DLSPINILYFVGRTPKVYGKIPMVVKS

SEQ ID NO: 96573 - protein, 31 aa, Artificial Sequence; identical to SEQ ID NO: 9592
  Cyclic GFR-binding peptide
  MOD_RES (2)..(3): Xaa is C or S

SEQ ID NO: 96574 - protein, 29 aa, Artificial Sequence
  Cyclic GFR-binding peptide
  MOD_RES (27)..(29): Xaa is C or S
EPISVLYLDDSSNVIKFKYENMVVRSXGX

SEQ ID NO: 96575 - protein, 24 aa, Artificial Sequence
  Cyclic GFR-binding peptide
KMEPISILYLDENKNVVKFKYENM

SEQ ID NO: 96576 - protein, 22 aa, Artificial Sequence
  Cyclic GFR-binding peptide
TSPISMLYKDNGRVLLLKYHYM

SEQ ID NO: 96577 - protein, 32 aa, Artificial Sequence
  Cyclic GFR-binding peptide
  MOD_RES (3)..(4): Xaa is C or S
EPXXVPEKMNAISILYFDENKNVVLKKYRNMT

SEQ ID NO: 96578 - protein, 37 aa, Artificial Sequence
  Cyclic GFR-binding peptide
  MOD_RES (2)..(3)..(34)..(36): Xaa is C or S
TXXAPVKTSATSMLYYDNGRVLLLRKHRMIVEEXGXL

SEQ ID NO: 96579 - protein, 29 aa, Artificial Sequence
  Cyclic GFR-binding peptide
  MOD_RES (29)..(29): Xaa is C or S
KLSPINVLYFDSSNNVIYGKIPNMVVKAX

SEQ ID NO: 96580 - protein, 30 aa, Artificial Sequence; identical to SEQ ID NO: 9594
  Cyclic GFR-binding peptide
  MOD_RES (1)..(1): Xaa is C or S

SEQ ID NO: 96581 - protein, 30 aa, Artificial Sequence; identical to SEQ ID NO: 42777
  Cyclic GFR-binding peptide
  MOD_RES (3)..(4): Xaa is C or S

SEQ ID NO: 96582 - protein, 33 aa, Artificial Sequence; identical to SEQ ID NO: 9598
  Cyclic GFR-binding peptide
  MOD_RES (31)..(33): Xaa is C or S

SEQ ID NO: 96583 - protein, 31 aa, Artificial Sequence
  Cyclic GFR-binding peptide
  MOD_RES (3)..(4): Xaa is C or S
EPXXVPEKMEPISILYLDENKNVVKFKYENM

SEQ ID NO: 96584 - protein, 31 aa, Artificial Sequence
  Cyclic GFR-binding peptide
  MOD_RES (2)..(3): Xaa is C or S
SXXVPARLSATSILYYDAANNVVLRKHRDMV

SEQ ID NO: 96585 - protein, 29 aa, Artificial Sequence
  Cyclic GFR-binding peptide
  MOD_RES (28)..(28): Xaa is C or S
LEPISVLYLDDSSNVIKFKYENMVVRAXG

SEQ ID NO: 96586 - protein, 33 aa, Artificial Sequence; identical to SEQ ID NO: 9605
  Cyclic GFR-binding peptide
  MOD_RES (1)..(2)..(33): Xaa is C or S

SEQ ID NO: 96587 - protein, 30 aa, Artificial Sequence; identical to SEQ ID NO: 77150
  Cyclic GFR-binding peptide
  MOD_RES (2)..(3): Xaa is C or S

SEQ ID NO: 96588 - protein, 28 aa, Artificial Sequence
  Cyclic GFR-binding peptide
KLSPINILYFDKGVVTYYGKIPGMAVSE

SEQ ID NO: 96589 - protein, 39 aa, Artificial Sequence
  Cyclic GFR-binding peptide
  MOD_RES (6)..(7)..(38): Xaa is C or S
ASAAPXXVPQALSPINILYFVGRKPKVYGKIPMIVRSXK

SEQ ID NO: 96590 - protein, 35 aa, Artificial Sequence; identical to SEQ ID NO: 9611
  Cyclic GFR-binding peptide
  MOD_RES (1)..(2)..(33)..(35): Xaa is C or S

SEQ ID NO: 96591 - protein, 22 aa, Artificial Sequence
  Cyclic GFR-binding peptide
KMNAISMLYFNDKQQIILKKYR

SEQ ID NO: 96592 - protein, 36 aa, Artificial Sequence
  Cyclic GFR-binding peptide
  MOD_RES (1)..(2)..(34)..(36): Xaa is C or S
XXTPTKMSPISMLYKNDKQQIILKYHYGMVVDRXGX

SEQ ID NO: 96593 - protein, 38 aa, Artificial Sequence; identical to SEQ ID NO: 38406
  Cyclic GFR-binding peptide
  MOD_RES (5)..(6)..(38): Xaa is C or S

SEQ ID NO: 96594 - protein, 23 aa, Artificial Sequence
  Cyclic GFR-binding peptide
KLSATSVLYYDDMGVPTLRKHRE

SEQ ID NO: 96595 - protein, 24 aa, Artificial Sequence
  Cyclic GFR-binding peptide
NAISVLYFDDMGVPTLKKYREGMS

SEQ ID NO: 96596 - protein, 38 aa, Artificial Sequence; identical to SEQ ID NO: 9624
  Cyclic GFR-binding peptide
  MOD_RES (2)..(3)..(35)..(37): Xaa is C or S

SEQ ID NO: 96597 - protein, 35 aa, Artificial Sequence; identical to SEQ ID NO: 38419
  Cyclic GFR-binding peptide
  MOD_RES (32)..(34): Xaa is C or S

SEQ ID NO: 96598 - protein, 32 aa, Artificial Sequence
  Cyclic GFR-binding peptide
  MOD_RES (31)..(31): Xaa is C or S
APVKTSATSMLYYDNGRVLLLRKHRMIVEEXG

SEQ ID NO: 96599 - protein, 32 aa, Artificial Sequence
  Cyclic GFR-binding peptide
  MOD_RES (3)..(4): Xaa is C or S
PTXXVPTRLSATSILYYDSANNVVLRKHRDMV

SEQ ID NO: 96600 - protein, 28 aa, Artificial Sequence
  Cyclic GFR-binding peptide
  MOD_RES (2)..(3): Xaa is C or S
PXXVPEKMEPISILYLDENKNVVKFKYE

SEQ ID NO: 96601 - protein, 29 aa, Artificial Sequence
  Cyclic GFR-binding peptide
  MOD_RES (27)..(29): Xaa is C or S
LNAISILYFVGRKPKVLKKYRMIVRSXKX

SEQ ID NO: 96602 - protein, 38 aa, Artificial Sequence
  Cyclic GFR-binding peptide
  MOD_RES (2)..(3)..(35)..(37): Xaa is C or S
PXXTPTKMSATSMLYYNDKQQIILRKHRGMVVDRXGXS

SEQ ID NO: 96603 - protein, 29 aa, Artificial Sequence
  Cyclic GFR-binding peptide
  MOD_RES (1)..(2): Xaa is C or S
XXAPVKTSPINMLYFDNGRVLLYGKIPMI

SEQ ID NO: 96604 - protein, 34 aa, Artificial Sequence
  Cyclic GFR-binding peptide
  MOD_RES (31)..(33): Xaa is C or S
PTRLEPISILYLDSANNVVKFKYEDMVVESXGXR

SEQ ID NO: 96605 - protein, 35 aa, Artificial Sequence
  Cyclic GFR-binding peptide
  MOD_RES (6)..(7): Xaa is C or S
ASASPXXVSQDLSPINILYFIGKTPKIYGKIPMIV

SEQ ID NO: 96606 - protein, 28 aa, Artificial Sequence
  Cyclic GFR-binding peptide
  MOD_RES (2)..(3): Xaa is C or S
PXXVPEKMSPISILYKDENKNVVLKYHY

SEQ ID NO: 96607 - protein, 38 aa, Artificial Sequence; identical to SEQ ID NO: 38427
  Cyclic GFR-binding peptide
  MOD_RES (5)..(6)..(38): Xaa is C or S

SEQ ID NO: 96608 - protein, 32 aa, Artificial Sequence; identical to SEQ ID NO: 42812
  Cyclic GFR-binding peptide
  MOD_RES (32)..(32): Xaa is C or S

SEQ ID NO: 96609 - protein, 31 aa, Artificial Sequence; identical to SEQ ID NO: 38428
  Cyclic GFR-binding peptide
  MOD_RES (3)..(4): Xaa is C or S

SEQ ID NO: 96610 - protein, 28 aa, Artificial Sequence
  Cyclic GFR-binding peptide
  MOD_RES (1)..(1): Xaa is C or S
XVPARLEPISILYLDAANNVVKFKYEDM

SEQ ID NO: 96611 - protein, 28 aa, Artificial Sequence
  Cyclic GFR-binding peptide
APTKLEPISVLYLDSSNNVIKFKYENMV

SEQ ID NO: 96612 - protein, 29 aa, Artificial Sequence
  Cyclic GFR-binding peptide
  MOD_RES (29)..(29): Xaa is C or S
QALSATSILYYVGRKPKVLRKHRMIVRSX

SEQ ID NO: 96613 - protein, 24 aa, Artificial Sequence
  Cyclic GFR-binding peptide
TKLSATSVLYYDDSSNVILRKHRN

SEQ ID NO: 96614 - protein, 34 aa, Artificial Sequence; identical to SEQ ID NO: 38436
  Cyclic GFR-binding peptide
  MOD_RES (6)..(7): Xaa is C or S

SEQ ID NO: 96615 - protein, 29 aa, Artificial Sequence
  Cyclic GFR-binding peptide
  MOD_RES (2)..(3): Xaa is C or S
AXXVPTELSPINMLYFDEYDKVVYGKIPE

SEQ ID NO: 96616 - protein, 36 aa, Artificial Sequence; identical to SEQ ID NO: 38441
  Cyclic GFR-binding peptide
  MOD_RES (2)..(34)..(36): Xaa is C or S

SEQ ID NO: 96617 - protein, 36 aa, Artificial Sequence; identical to SEQ ID NO: 9646
  Cyclic GFR-binding peptide
  MOD_RES (1)..(34)..(36): Xaa is C or S

SEQ ID NO: 96618 - protein, 26 aa, Artificial Sequence
  Cyclic GFR-binding peptide
LSATSVLYYDDSSNVILRKHRNMVVR

SEQ ID NO: 96619 - protein, 27 aa, Artificial Sequence
  Cyclic GFR-binding peptide
VPTKLSPISILYKDKGVVTYLKYHYGM

SEQ ID NO: 96620 - protein, 36 aa, Artificial Sequence; identical to SEQ ID NO: 9650
  Cyclic GFR-binding peptide
  MOD_RES (6)..(7): Xaa is C or S

SEQ ID NO: 96621 - protein, 34 aa, Artificial Sequence; identical to SEQ ID NO: 42831
  Cyclic GFR-binding peptide
  MOD_RES (2)..(3): Xaa is C or S

SEQ ID NO: 96622 - protein, 30 aa, Artificial Sequence; identical to SEQ ID NO: 38454
  Cyclic GFR-binding peptide
  MOD_RES (2)..(3): Xaa is C or S

SEQ ID NO: 96623 - protein, 34 aa, Artificial Sequence
  Cyclic GFR-binding peptide
  MOD_RES (3)..(4): Xaa is C or S
EPXXVPEKMNAISILYFDENKNVVLKKYRNMTVE

SEQ ID NO: 96624 - protein, 41 aa, Artificial Sequence; identical to SEQ ID NO: 38455
  Cyclic GFR-binding peptide
  MOD_RES (5)..(6)..(38)..(40): Xaa is C or S

SEQ ID NO: 96625 - protein, 26 aa, Artificial Sequence
  Cyclic GFR-binding peptide
LEPISMLYLDENEKVVKFKYEDMVVE

SEQ ID NO: 96626 - protein, 26 aa, Artificial Sequence
  Cyclic GFR-binding peptide
VPTKLSPISILYKDKGVVTYLKYHYG

SEQ ID NO: 96627 - protein, 29 aa, Artificial Sequence
  Cyclic GFR-binding peptide
  MOD_RES (28)..(28): Xaa is C or S
LSPINVLYFDSSNNVIYGKIPNMVVKAXG

SEQ ID NO: 96628 - protein, 29 aa, Artificial Sequence
  Cyclic GFR-binding peptide
  MOD_RES (29)..(29): Xaa is C or S
VKTSPISMLYKDNGRVLLLKYHYMIVEEX

SEQ ID NO: 96629 - protein, 31 aa, Artificial Sequence; identical to SEQ ID NO: 9657
  Cyclic GFR-binding peptide
  MOD_RES (1)..(2): Xaa is C or S

SEQ ID NO: 96630 - protein, 32 aa, Artificial Sequence
  Cyclic GFR-binding peptide
  MOD_RES (2)..(3): Xaa is C or S
PXXVPQALSPINILYFVGRKPKVYGKIPMIVR

SEQ ID NO: 96631 - protein, 36 aa, Artificial Sequence; identical to SEQ ID NO: 38465
  Cyclic GFR-binding peptide
  MOD_RES (3)..(4)..(35): Xaa is C or S

SEQ ID NO: 96632 - protein, 33 aa, Artificial Sequence; identical to SEQ ID NO: 38466
  Cyclic GFR-binding peptide
  MOD_RES (4)..(5): Xaa is C or S

SEQ ID NO: 96633 - protein, 27 aa, Artificial Sequence
  Cyclic GFR-binding peptide
QDLSPISILYKVGRTPKVLKYHYMVVK

SEQ ID NO: 96634 - protein, 31 aa, Artificial Sequence; identical to SEQ ID NO: 9662
  Cyclic GFR-binding peptide
  MOD_RES (2)..(3): Xaa is C or S

SEQ ID NO: 96635 - protein, 39 aa, Artificial Sequence; identical to SEQ ID NO: 42854
  Cyclic GFR-binding peptide
  MOD_RES (4)..(5)..(38): Xaa is C or S

SEQ ID NO: 96636 - protein, 25 aa, Artificial Sequence
  Cyclic GFR-binding peptide
LSPISVLYKDDSSNVILKYHYNMVV

SEQ ID NO: 96637 - protein, 37 aa, Artificial Sequence
  Cyclic GFR-binding peptide
  MOD_RES (3)..(4)..(36): Xaa is C or S
ASXXVPARLSATSILYYDAANNVVLRKHRDMVVEAXG

SEQ ID NO: 96638 - protein, 24 aa, Artificial Sequence
  Cyclic GFR-binding peptide
MNAISMLYFNDKQQIILKKYRGMV

SEQ ID NO: 96639 - protein, 41 aa, Artificial Sequence; identical to SEQ ID NO: 9668
  Cyclic GFR-binding peptide
  MOD_RES (6)..(7)..(39)..(41): Xaa is C or S

SEQ ID NO: 96640 - protein, 24 aa, Artificial Sequence
  Cyclic GFR-binding peptide
TRLSATSILYYDSANNVVLRKHRD

SEQ ID NO: 96641 - protein, 36 aa, Artificial Sequence; identical to SEQ ID NO: 9670
  Cyclic GFR-binding peptide
  MOD_RES (5)..(6): Xaa is C or S

SEQ ID NO: 96642 - protein, 40 aa, Artificial Sequence; identical to SEQ ID NO: 9672
  Cyclic GFR-binding peptide
  MOD_RES (4)..(5)..(37)..(39): Xaa is C or S

SEQ ID NO: 96643 - protein, 28 aa, Artificial Sequence
  Cyclic GFR-binding peptide
QALSATSILYYVGRKPKVLRKHRMIVRS

SEQ ID NO: 96644 - protein, 32 aa, Artificial Sequence; identical to SEQ ID NO: 38477
  Cyclic GFR-binding peptide
  MOD_RES (2)..(3): Xaa is C or S

SEQ ID NO: 96645 - protein, 30 aa, Artificial Sequence; identical to SEQ ID NO: 42867
  Cyclic GFR-binding peptide
  MOD_RES (4)..(5): Xaa is C or S

SEQ ID NO: 96646 - protein, 31 aa, Artificial Sequence; identical to SEQ ID NO: 77188
  Cyclic GFR-binding peptide
  MOD_RES (30)..(30): Xaa is C or S

SEQ ID NO: 96647 - protein, 25 aa, Artificial Sequence
  Cyclic GFR-binding peptide
TKLSPINVLYFDSSNNVIYGKIPNM

SEQ ID NO: 96648 - protein, 29 aa, Artificial Sequence
  Cyclic GFR-binding peptide
  MOD_RES (2)..(3): Xaa is C or S
PXXVSQDLSATSILYYIGKTPKILRKHRM

SEQ ID NO: 96649 - protein, 34 aa, Artificial Sequence; identical to SEQ ID NO: 9681
  Cyclic GFR-binding peptide
  MOD_RES (2)..(3): Xaa is C or S

SEQ ID NO: 96650 - protein, 38 aa, Artificial Sequence; identical to SEQ ID NO: 42878
  Cyclic GFR-binding peptide
  MOD_RES (5)..(6)..(38): Xaa is C or S

SEQ ID NO: 96651 - protein, 34 aa, Artificial Sequence; identical to SEQ ID NO: 42879
  Cyclic GFR-binding peptide
  MOD_RES (32)..(34): Xaa is C or S

SEQ ID NO: 96652 - protein, 25 aa, Artificial Sequence
  Cyclic GFR-binding peptide
SPISILYKDKGVVTYLKYHYGMAVS

SEQ ID NO: 96653 - protein, 22 aa, Artificial Sequence
  Cyclic GFR-binding peptide
LSPINILYFIGKTPKIYGKIPM

SEQ ID NO: 96654 - protein, 38 aa, Artificial Sequence; identical to SEQ ID NO: 38488
  Cyclic GFR-binding peptide
  MOD_RES (6)..(7): Xaa is C or S

SEQ ID NO: 96655 - protein, 24 aa, Artificial Sequence
  Cyclic GFR-binding peptide
PTELNAISMLYFDEYDKVVLKKYR

SEQ ID NO: 96656 - protein, 29 aa, Artificial Sequence
  Cyclic GFR-binding peptide
  MOD_RES (29)..(29): Xaa is C or S
KLEPISVLYLDSSNNVIKFKYENMVVKAX

SEQ ID NO: 96657 - protein, 32 aa, Artificial Sequence; identical to SEQ ID NO: 9685
  Cyclic GFR-binding peptide

SEQ ID NO: 96658 - protein, 22 aa, Artificial Sequence
  Cyclic GFR-binding peptide
MNAISMLYFNDKQQIILKKYRG

SEQ ID NO: 96659 - protein, 31 aa, Artificial Sequence; identical to SEQ ID NO: 9686
  Cyclic GFR-binding peptide
  MOD_RES (1)..(1): Xaa is C or S

SEQ ID NO: 96660 - protein, 41 aa, Artificial Sequence; identical to SEQ ID NO: 42889
  Cyclic GFR-binding peptide
  MOD_RES (6)..(7)..(39)..(41): Xaa is C or S

SEQ ID NO: 96661 - protein, 26 aa, Artificial Sequence
  Cyclic GFR-binding peptide
PTRLSATSILYYDSANNVVLRKHRDM

SEQ ID NO: 96662 - protein, 37 aa, Artificial Sequence; identical to SEQ ID NO: 9687
  Cyclic GFR-binding peptide
  MOD_RES (3)..(4)..(35)..(37): Xaa is C or S

SEQ ID NO: 96663 - protein, 30 aa, Artificial Sequence
  Cyclic GFR-binding peptide
  MOD_RES (2)..(3): Xaa is C or S
TXXAPVKTEPISMLYLDNGRVLLKFKYEMI

SEQ ID NO: 96664 - protein, 29 aa, Artificial Sequence
  Cyclic GFR-binding peptide
VPEKMEPISILYLDENKNVVKFKYENMTV

SEQ ID NO: 96665 - protein, 27 aa, Artificial Sequence
  Cyclic GFR-binding peptide
  MOD_RES (1)..(2): Xaa is C or S
XXAPTKLSPISVLYKDDSSNVILKYHY

SEQ ID NO: 96666 - protein, 25 aa, Artificial Sequence
  Cyclic GFR-binding peptide
KLNAISVLYFDDMGVPTLKKYREGM

SEQ ID NO: 96667 - protein, 33 aa, Artificial Sequence; identical to SEQ ID NO: 9691
  Cyclic GFR-binding peptide
  MOD_RES (5)..(6): Xaa is C or S

SEQ ID NO: 96668 - protein, 30 aa, Artificial Sequence; identical to SEQ ID NO: 9692
  Cyclic GFR-binding peptide
  MOD_RES (28)..(30): Xaa is C or S

SEQ ID NO: 96669 - protein, 26 aa, Artificial Sequence
  Cyclic GFR-binding peptide
QLEPISVLYLDDSSNVIKFKYENMVV

SEQ ID NO: 96670 - protein, 34 aa, Artificial Sequence
  Cyclic GFR-binding peptide
  MOD_RES (1)..(33): Xaa is C or S
XTPTKMEPISMLYLNDKQQIIKFKYEGMVVDRXG

SEQ ID NO: 96671 - protein, 29 aa, Artificial Sequence
  Cyclic GFR-binding peptide
PEKMSPINILYFDENKNVVYGKIPNMTVE

SEQ ID NO: 96672 - protein, 30 aa, Artificial Sequence
  Cyclic GFR-binding peptide
VPTRLSPISILYKDSANNVVLKYHYDMVVE

SEQ ID NO: 96673 - protein, 23 aa, Artificial Sequence
  Cyclic GFR-binding peptide
KTEPISMLYLDNGRVLLKFKYEM

SEQ ID NO: 96674 - protein, 31 aa, Artificial Sequence
  Cyclic GFR-binding peptide
  MOD_RES (29)..(31): Xaa is C or S
QALSPINILYFVGRKPKVYGKIPMIVRSXKX

SEQ ID NO: 96675 - protein, 22 aa, Artificial Sequence
  Cyclic GFR-binding peptide
MSATSMLYYNDKQQIILRKHRG

SEQ ID NO: 96676 - protein, 27 aa, Artificial Sequence
  Cyclic GFR-binding peptide
  MOD_RES (27)..(27): Xaa is C or S
EPISVLYLDDSSNVIKFKYENMVVRSX

SEQ ID NO: 96677 - protein, 42 aa, Artificial Sequence; identical to SEQ ID NO: 42916
  Cyclic GFR-binding peptide
  MOD_RES (6)..(7)..(39)..(41): Xaa is C or S

SEQ ID NO: 96678 - protein, 30 aa, Artificial Sequence; identical to SEQ ID NO: 9705
  Cyclic GFR-binding peptide
  MOD_RES (2)..(3): Xaa is C or S

SEQ ID NO: 96679 - protein, 29 aa, Artificial Sequence
  Cyclic GFR-binding peptide
PQDLNAISILYFVGRTPKVLKKYRMVVKS

SEQ ID NO: 96680 - protein, 26 aa, Artificial Sequence
  Cyclic GFR-binding peptide
MSPISMLYKNDKQQIILKYHYGMVVD

SEQ ID NO: 96681 - protein, 29 aa, Artificial Sequence
  Cyclic GFR-binding peptide
VPQDLSATSILYYVGRTPKVLRKHRMVVK

SEQ ID NO: 96682 - protein, 30 aa, Artificial Sequence
  Cyclic GFR-binding peptide
  MOD_RES (2)..(3): Xaa is C or S
SXXVPARLSATSILYYDAANNVVLRKHRDM

SEQ ID NO: 96683 - protein, 23 aa, Artificial Sequence
  Cyclic GFR-binding peptide
SPISILYKDSANNVVLKYHYDMV

SEQ ID NO: 96684 - protein, 39 aa, Artificial Sequence; identical to SEQ ID NO: 9716
  Cyclic GFR-binding peptide
  MOD_RES (6)..(7)..(38): Xaa is C or S

SEQ ID NO: 96685 - protein, 32 aa, Artificial Sequence; identical to SEQ ID NO: 38532
  Cyclic GFR-binding peptide
  MOD_RES (5)..(6): Xaa is C or S

SEQ ID NO: 96686 - protein, 42 aa, Artificial Sequence
  Cyclic GFR-binding peptide
  MOD_RES (6)..(7)..(39)..(41): Xaa is C or S
GSAGPXXTPTKMSPISMLYKNDKQQIILKYHYGMVVDRXGXS

SEQ ID NO: 96687 - protein, 32 aa, Artificial Sequence
  Cyclic GFR-binding peptide
  MOD_RES (31)..(31): Xaa is C or S
PEKMEPISILYLDENKNVVKFKYENMTVESXA

SEQ ID NO: 96688 - protein, 36 aa, Artificial Sequence; identical to SEQ ID NO: 9721
  Cyclic GFR-binding peptide
  MOD_RES (3)..(4)..(36): Xaa is C or S

SEQ ID NO: 96689 - protein, 38 aa, Artificial Sequence; identical to SEQ ID NO: 38536
  Cyclic GFR-binding peptide
  MOD_RES (5)..(6)..(38): Xaa is C or S

SEQ ID NO: 96690 - protein, 36 aa, Artificial Sequence; identical to SEQ ID NO: 9723
  Cyclic GFR-binding peptide
  MOD_RES (5)..(6): Xaa is C or S

SEQ ID NO: 96691 - protein, 32 aa, Artificial Sequence; identical to SEQ ID NO: 42934
  Cyclic GFR-binding peptide
  MOD_RES (5)..(6): Xaa is C or S

SEQ ID NO: 96692 - protein, 32 aa, Artificial Sequence; identical to SEQ ID NO: 38540
  Cyclic GFR-binding peptide
  MOD_RES (1)..(1): Xaa is C or S

SEQ ID NO: 96693 - protein, 22 aa, Artificial Sequence
  Cyclic GFR-binding peptide
SPINILYFDSANNVVYGKIPDM

SEQ ID NO: 96694 - protein, 26 aa, Artificial Sequence
  Cyclic GFR-binding peptide
VPTKLSATSVLYYDDMGVPTLRKHRE

SEQ ID NO: 96695 - protein, 26 aa, Artificial Sequence
  Cyclic GFR-binding peptide
  MOD_RES (1)..(1): Xaa is C or S
XAPTQLSPINVLYFDDSSNVIYGKIP

SEQ ID NO: 96696 - protein, 32 aa, Artificial Sequence; identical to SEQ ID NO: 9731
  Cyclic GFR-binding peptide
  MOD_RES (6)..(7): Xaa is C or S

SEQ ID NO: 96697 - protein, 25 aa, Artificial Sequence
  Cyclic GFR-binding peptide
QLEPISVLYLDDSSNVIKFKYENMV

SEQ ID NO: 96698 - protein, 34 aa, Artificial Sequence; identical to SEQ ID NO: 9733
  Cyclic GFR-binding peptide
  MOD_RES (1)..(2)..(33): Xaa is C or S

SEQ ID NO: 96699 - protein, 31 aa, Artificial Sequence; identical to SEQ ID NO: 42942
  Cyclic GFR-binding peptide
  MOD_RES (1)..(1): Xaa is C or S

SEQ ID NO: 96700 - protein, 30 aa, Artificial Sequence; identical to SEQ ID NO: 9738
  Cyclic GFR-binding peptide
  MOD_RES (2)..(3): Xaa is C or S

SEQ ID NO: 96701 - protein, 33 aa, Artificial Sequence; identical to SEQ ID NO: 42947
  Cyclic GFR-binding peptide
  MOD_RES (1)..(2): Xaa is C or S

SEQ ID NO: 96702 - protein, 37 aa, Artificial Sequence
  Cyclic GFR-binding peptide
  MOD_RES (3)..(4)..(36): Xaa is C or S
EPXXVPEKMNAISILYFDENKNVVLKKYRNMTVESXA

SEQ ID NO: 96703 - protein, 34 aa, Artificial Sequence
  Cyclic GFR-binding peptide
  MOD_RES (6)..(7): Xaa is C or S
GSAGPXXTPTKMSATSMLYYNDKQQIILRKHRGM

SEQ ID NO: 96704 - protein, 36 aa, Artificial Sequence; identical to SEQ ID NO: 38553
  Cyclic GFR-binding peptide
  MOD_RES (3)..(4)..(36): Xaa is C or S

SEQ ID NO: 96705 - protein, 21 aa, Artificial Sequence
  Cyclic GFR-binding peptide
NAISMLYFDEYDKVVLKKYRE

SEQ ID NO: 96706 - protein, 36 aa, Artificial Sequence; identical to SEQ ID NO: 38556
  Cyclic GFR-binding peptide
  MOD_RES (6)..(7): Xaa is C or S

SEQ ID NO: 96707 - protein, 36 aa, Artificial Sequence; identical to SEQ ID NO: 42963
  Cyclic GFR-binding peptide
  MOD_RES (1)..(2)..(34)..(36): Xaa is C or S

SEQ ID NO: 96708 - protein, 36 aa, Artificial Sequence; identical to SEQ ID NO: 42964
  Cyclic GFR-binding peptide
  MOD_RES (1)..(33)..(35): Xaa is C or S

SEQ ID NO: 96709 - protein, 35 aa, Artificial Sequence; identical to SEQ ID NO: 9749
  Cyclic GFR-binding peptide
  MOD_RES (2)..(3)..(35): Xaa is C or S

SEQ ID NO: 96710 - protein, 23 aa, Artificial Sequence
  Cyclic GFR-binding peptide
SATSILYYDSANNVVLRKHRDMV

SEQ ID NO: 96711 - protein, 33 aa, Artificial Sequence
  Cyclic GFR-binding peptide
  MOD_RES (31)..(33): Xaa is C or S
PEKMSATSILYYDENKNVVLRKHRNMTVESXAX

SEQ ID NO: 96712 - protein, 25 aa, Artificial Sequence
  Cyclic GFR-binding peptide
TRLEPISILYLDSANNVVKFKYEDM

SEQ ID NO: 96713 - protein, 32 aa, Artificial Sequence; identical to SEQ ID NO: 38561
  Cyclic GFR-binding peptide
  MOD_RES (31)..(31): Xaa is C or S

SEQ ID NO: 96714 - protein, 36 aa, Artificial Sequence
  Cyclic GFR-binding peptide
  MOD_RES (3)..(4)..(36): Xaa is C or S
EPXXVPEKMSPISILYKDENKNVVLKYHYNMTVESX

SEQ ID NO: 96715 - protein, 31 aa, Artificial Sequence; identical to SEQ ID NO: 38566
  Cyclic GFR-binding peptide
  MOD_RES (4)..(4): Xaa is C or S

SEQ ID NO: 96716 - protein, 30 aa, Artificial Sequence
  Cyclic GFR-binding peptide
  MOD_RES (30)..(30): Xaa is C or S
EKMSATSILYYDENKNVVLRKHRNMTVESX

SEQ ID NO: 96717 - protein, 33 aa, Artificial Sequence; identical to SEQ ID NO: 38567
  Cyclic GFR-binding peptide
  MOD_RES (1)..(2)..(33): Xaa is C or S

SEQ ID NO: 96718 - protein, 21 aa, Artificial Sequence
  Cyclic GFR-binding peptide
SPINILYFVGRKPKVYGKIPM

SEQ ID NO: 96719 - protein, 33 aa, Artificial Sequence; identical to SEQ ID NO: 38570
  Cyclic GFR-binding peptide
  MOD_RES (30)..(32): Xaa is C or S

SEQ ID NO: 96720 - protein, 21 aa, Artificial Sequence
  Cyclic GFR-binding peptide
LNAISMLYFDENEKVVLKKYR

SEQ ID NO: 96721 - protein, 24 aa, Artificial Sequence
  Cyclic GFR-binding peptide
KTSPISMLYKDNGRVLLLKYHYMI

SEQ ID NO: 96722 - protein, 30 aa, Artificial Sequence; identical to SEQ ID NO: 9756
  Cyclic GFR-binding peptide
  MOD_RES (2)..(3): Xaa is C or S

SEQ ID NO: 96723 - protein, 31 aa, Artificial Sequence; identical to SEQ ID NO: 9757
  Cyclic GFR-binding peptide

SEQ ID NO: 96724 - protein, 28 aa, Artificial Sequence
  Cyclic GFR-binding peptide
  MOD_RES (2)..(3): Xaa is C or S
AXXVPTELNAISMLYFDEYDKVVLKKYR

SEQ ID NO: 96725 - protein, 35 aa, Artificial Sequence; identical to SEQ ID NO: 9760
  Cyclic GFR-binding peptide
  MOD_RES (5)..(6): Xaa is C or S

SEQ ID NO: 96726 - protein, 33 aa, Artificial Sequence; identical to SEQ ID NO: 9762
  Cyclic GFR-binding peptide
  MOD_RES (1)..(32): Xaa is C or S

SEQ ID NO: 96727 - protein, 29 aa, Artificial Sequence
  Cyclic GFR-binding peptide
  MOD_RES (3)..(4): Xaa is C or S
PTXXVPTRLNAISILYFDSANNVVLKKYR

SEQ ID NO: 96728 - protein, 23 aa, Artificial Sequence
  Cyclic GFR-binding peptide
LSATSMLYYDEYDKVVLRKHREM

SEQ ID NO: 96729 - protein, 33 aa, Artificial Sequence; identical to SEQ ID NO: 9767
  Cyclic GFR-binding peptide
  MOD_RES (1)..(2): Xaa is C or S

SEQ ID NO: 96730 - protein, 31 aa, Artificial Sequence
  Cyclic GFR-binding peptide
  MOD_RES (29)..(31): Xaa is C or S
KMEPISILYLDENKNVVKFKYENMTVESXAX

SEQ ID NO: 96731 - protein, 29 aa, Artificial Sequence
  Cyclic GFR-binding peptide
  MOD_RES (1)..(1): Xaa is C or S
XVPQDLSATSILYYVGRTPKVLRKHRMVV

SEQ ID NO: 96732 - protein, 37 aa, Artificial Sequence; identical to SEQ ID NO: 9772
  Cyclic GFR-binding peptide
  MOD_RES (3)..(4)..(36): Xaa is C or S

SEQ ID NO: 96733 - protein, 36 aa, Artificial Sequence; identical to SEQ ID NO: 9773
  Cyclic GFR-binding peptide
  MOD_RES (2)..(3)..(35): Xaa is C or S

SEQ ID NO: 96734 - protein, 26 aa, Artificial Sequence
  Cyclic GFR-binding peptide
KMSATSMLYYNDKQQIILRKHRGMVV

SEQ ID NO: 96735 - protein, 27 aa, Artificial Sequence
  Cyclic GFR-binding peptide
APTKLEPISVLYLDDSSNVIKFKYENM

SEQ ID NO: 96736 - protein, 35 aa, Artificial Sequence; identical to SEQ ID NO: 19977
  Cyclic GFR-binding peptide
  MOD_RES (1)..(2)..(34): Xaa is C or S

SEQ ID NO: 96737 - protein, 34 aa, Artificial Sequence
  Cyclic GFR-binding peptide
  MOD_RES (32)..(34): Xaa is C or S
VPEKMSATSILYYDENKNVVLRKHRNMTVESXAX

SEQ ID NO: 96738 - protein, 25 aa, Artificial Sequence
  Cyclic GFR-binding peptide
APVKTEPISMLYLDNGRVLLKFKYE

SEQ ID NO: 96739 - protein, 30 aa, Artificial Sequence; identical to SEQ ID NO: 38592
  Cyclic GFR-binding peptide
  MOD_RES (30)..(30): Xaa is C or S

SEQ ID NO: 96740 - protein, 38 aa, Artificial Sequence; identical to SEQ ID NO: 9776
  Cyclic GFR-binding peptide
  MOD_RES (6)..(7)..(38): Xaa is C or S

SEQ ID NO: 96741 - protein, 31 aa, Artificial Sequence; identical to SEQ ID NO: 9778
  Cyclic GFR-binding peptide
  MOD_RES (2)..(3): Xaa is C or S

SEQ ID NO: 96742 - protein, 38 aa, Artificial Sequence; identical to SEQ ID NO: 42991
  Cyclic GFR-binding peptide
  MOD_RES (3)..(4)..(36)..(38): Xaa is C or S

SEQ ID NO: 96743 - protein, 31 aa, Artificial Sequence; identical to SEQ ID NO: 42993
  Cyclic GFR-binding peptide

SEQ ID NO: 96744 - protein, 31 aa, Artificial Sequence; identical to SEQ ID NO: 9783
  Cyclic GFR-binding peptide
  MOD_RES (5)..(6): Xaa is C or S

SEQ ID NO: 96745 - protein, 32 aa, Artificial Sequence; identical to SEQ ID NO: 38602
  Cyclic GFR-binding peptide
  MOD_RES (5)..(6): Xaa is C or S

SEQ ID NO: 96746 - protein, 33 aa, Artificial Sequence; identical to SEQ ID NO: 42994
  Cyclic GFR-binding peptide
  MOD_RES (3)..(4): Xaa is C or S

SEQ ID NO: 96747 - protein, 36 aa, Artificial Sequence; identical to SEQ ID NO: 9785
  Cyclic GFR-binding peptide
  MOD_RES (1)..(2)..(33)..(35): Xaa is C or S

SEQ ID NO: 96748 - protein, 32 aa, Artificial Sequence; identical to SEQ ID NO: 42995
  Cyclic GFR-binding peptide
  MOD_RES (29)..(31): Xaa is C or S

SEQ ID NO: 96749 - protein, 28 aa, Artificial Sequence
  Cyclic GFR-binding peptide
  MOD_RES (27)..(27): Xaa is C or S
NAISILYFDKGVVTYLKKYRGMAVSEXG

SEQ ID NO: 96750 - protein, 30 aa, Artificial Sequence; identical to SEQ ID NO: 9787
  Cyclic GFR-binding peptide
  MOD_RES (29)..(29): Xaa is C or S

SEQ ID NO: 96751 - protein, 36 aa, Artificial Sequence; identical to SEQ ID NO: 9789
  Cyclic GFR-binding peptide
  MOD_RES (4)..(5): Xaa is C or S

SEQ ID NO: 96752 - protein, 37 aa, Artificial Sequence; identical to SEQ ID NO: 38612
  Cyclic GFR-binding peptide
  MOD_RES (3)..(4)..(36): Xaa is C or S

SEQ ID NO: 96753 - protein, 30 aa, Artificial Sequence; identical to SEQ ID NO: 9795
  Cyclic GFR-binding peptide
  MOD_RES (1)..(1): Xaa is C or S

SEQ ID NO: 96754 - protein, 30 aa, Artificial Sequence; identical to SEQ ID NO: 38613
  Cyclic GFR-binding peptide
  MOD_RES (1)..(1): Xaa is C or S

SEQ ID NO: 96755 - protein, 35 aa, Artificial Sequence; identical to SEQ ID NO: 77248
  Cyclic GFR-binding peptide
  MOD_RES (2)..(3)..(34): Xaa is C or S

SEQ ID NO: 96756 - protein, 29 aa, Artificial Sequence
  Cyclic GFR-binding peptide
VPTKLSATSILYYDKGVVTYLRKHRGMAV

SEQ ID NO: 96757 - protein, 29 aa, Artificial Sequence
  Cyclic GFR-binding peptide
TKMSPISMLYKNDKQQIILKYHYGMVVDR

SEQ ID NO: 96758 - protein, 30 aa, Artificial Sequence; identical to SEQ ID NO: 38618
  Cyclic GFR-binding peptide
  MOD_RES (1)..(2): Xaa is C or S

SEQ ID NO: 96759 - protein, 30 aa, Artificial Sequence; identical to SEQ ID NO: 43015
  Cyclic GFR-binding peptide
  MOD_RES (30)..(30): Xaa is C or S

SEQ ID NO: 96760 - protein, 33 aa, Artificial Sequence; identical to SEQ ID NO: 9801
  Cyclic GFR-binding peptide
  MOD_RES (30)..(32): Xaa is C or S

SEQ ID NO: 96761 - protein, 37 aa, Artificial Sequence
  Cyclic GFR-binding peptide
  MOD_RES (1)..(2)..(34)..(36): Xaa is C or S
XXVPEKMSATSILYYDENKNVVLRKHRNMTVESXAXR

SEQ ID NO: 96762 - protein, 38 aa, Artificial Sequence; identical to SEQ ID NO: 9803
  Cyclic GFR-binding peptide
  MOD_RES (3)..(4)..(35)..(37): Xaa is C or S

SEQ ID NO: 96763 - protein, 36 aa, Artificial Sequence; identical to SEQ ID NO: 43019
  Cyclic GFR-binding peptide
  MOD_RES (4)..(5): Xaa is C or S

SEQ ID NO: 96764 - protein, 32 aa, Artificial Sequence; identical to SEQ ID NO: 38622
  Cyclic GFR-binding peptide
  MOD_RES (30)..(32): Xaa is C or S

SEQ ID NO: 96765 - protein, 23 aa, Artificial Sequence
  Cyclic GFR-binding peptide
RLSATSILYYDAANNVVLRKHRD

SEQ ID NO: 96766 - protein, 31 aa, Artificial Sequence
  Cyclic GFR-binding peptide
  MOD_RES (4)..(5): Xaa is C or S
PPTXXVPTRLEPISILYLDSANNVVKFKYED

SEQ ID NO: 96767 - protein, 27 aa, Artificial Sequence
  Cyclic GFR-binding peptide
PVKTEPISMLYLDNGRVLLKFKYEMIV

SEQ ID NO: 96768 - protein, 33 aa, Artificial Sequence; identical to SEQ ID NO: 9805
  Cyclic GFR-binding peptide
  MOD_RES (4)..(5): Xaa is C or S

SEQ ID NO: 96769 - protein, 31 aa, Artificial Sequence
  Cyclic GFR-binding peptide
  MOD_RES (30)..(30): Xaa is C or S
EKMSATSILYYDENKNVVLRKHRNMTVESXA

SEQ ID NO: 96770 - protein, 25 aa, Artificial Sequence
  Cyclic GFR-binding peptide
KMSPISILYKDENKNVVLKYHYNMT

SEQ ID NO: 96771 - protein, 36 aa, Artificial Sequence
  Cyclic GFR-binding peptide
  MOD_RES (5)..(6): Xaa is C or S
SAAPXXVPQALSPINILYFVGRKPKVYGKIPMIVRS

SEQ ID NO: 96772 - protein, 30 aa, Artificial Sequence; identical to SEQ ID NO: 43027
  Cyclic GFR-binding peptide
  MOD_RES (29)..(29): Xaa is C or S

SEQ ID NO: 96773 - protein, 27 aa, Artificial Sequence
  Cyclic GFR-binding peptide
PTKMEPISMLYLNDKQQIIKFKYEGMV

SEQ ID NO: 96774 - protein, 31 aa, Artificial Sequence; identical to SEQ ID NO: 20012
  Cyclic GFR-binding peptide
  MOD_RES (5)..(6): Xaa is C or S

SEQ ID NO: 96775 - protein, 25 aa, Artificial Sequence
  Cyclic GFR-binding peptide
NAISVLYFDDMGVPTLKKYREGMSV

SEQ ID NO: 96776 - protein, 30 aa, Artificial Sequence
  Cyclic GFR-binding peptide
PTKMEPISMLYLNDKQQIIKFKYEGMVVDR

SEQ ID NO: 96777 - protein, 27 aa, Artificial Sequence
  Cyclic GFR-binding peptide
LSATSVLYYDDSSNVILRKHRNMVVRA

SEQ ID NO: 96778 - protein, 26 aa, Artificial Sequence
  Cyclic GFR-binding peptide
DLSPISILYKIGKTPKILKYHYMIVK

SEQ ID NO: 96779 - protein, 39 aa, Artificial Sequence; identical to SEQ ID NO: 20016
  Cyclic GFR-binding peptide
  MOD_RES (4)..(5)..(37)..(39): Xaa is C or S

SEQ ID NO: 96780 - protein, 30 aa, Artificial Sequence; identical to SEQ ID NO: 43039
  Cyclic GFR-binding peptide
  MOD_RES (2)..(3): Xaa is C or S

SEQ ID NO: 96781 - protein, 24 aa, Artificial Sequence
  Cyclic GFR-binding peptide
QDLSPISILYKVGRTPKVLKYHYM

SEQ ID NO: 96782 - protein, 25 aa, Artificial Sequence
  Cyclic GFR-binding peptide
ELEPISMLYLDEYDKVVKFKYEEMV

SEQ ID NO: 96783 - protein, 33 aa, Artificial Sequence
  Cyclic GFR-binding peptide
  MOD_RES (4)..(5): Xaa is C or S
AGPXXTPTKMSPISMLYKNDKQQIILKYHYGMV

SEQ ID NO: 96784 - protein, 39 aa, Artificial Sequence; identical to SEQ ID NO: 43043
  Cyclic GFR-binding peptide
  MOD_RES (5)..(6)..(38): Xaa is C or S

SEQ ID NO: 96785 - protein, 33 aa, Artificial Sequence; identical to SEQ ID NO: 9819
  Cyclic GFR-binding peptide
  MOD_RES (5)..(6): Xaa is C or S

SEQ ID NO: 96786 - protein, 27 aa, Artificial Sequence
  Cyclic GFR-binding peptide
  MOD_RES (1)..(1): Xaa is C or S
XTPTKMNAISMLYFNDKQQIILKKYRG

SEQ ID NO: 96787 - protein, 29 aa, Artificial Sequence
  Cyclic GFR-binding peptide
TRLEPISILYLDSANNVVKFKYEDMVVES

SEQ ID NO: 96788 - protein, 35 aa, Artificial Sequence; identical to SEQ ID NO: 9821
  Cyclic GFR-binding peptide
  MOD_RES (1)..(2)..(34): Xaa is C or S

SEQ ID NO: 96789 - protein, 32 aa, Artificial Sequence; identical to SEQ ID NO: 9822
  Cyclic GFR-binding peptide
  MOD_RES (2)..(3): Xaa is C or S

SEQ ID NO: 96790 - protein, 27 aa, Artificial Sequence
  Cyclic GFR-binding peptide
LSATSVLYYDDSSNVILRKHRNMVVRS

SEQ ID NO: 96791 - protein, 39 aa, Artificial Sequence; identical to SEQ ID NO: 9824
  Cyclic GFR-binding peptide
  MOD_RES (3)..(4)..(36)..(38): Xaa is C or S

SEQ ID NO: 96792 - protein, 31 aa, Artificial Sequence; identical to SEQ ID NO: 9829
  Cyclic GFR-binding peptide
  MOD_RES (30)..(30): Xaa is C or S

SEQ ID NO: 96793 - protein, 27 aa, Artificial Sequence
  Cyclic GFR-binding peptide
  MOD_RES (27)..(27): Xaa is C or S
SATSMLYYDENEKVVLRKHRDMVVEGX

SEQ ID NO: 96794 - protein, 23 aa, Artificial Sequence
  Cyclic GFR-binding peptide
DLSPISILYKVGRTPKVLKYHYM

SEQ ID NO: 96795 - protein, 31 aa, Artificial Sequence; identical to SEQ ID NO: 38652
  Cyclic GFR-binding peptide
  MOD_RES (4)..(5): Xaa is C or S

SEQ ID NO: 96796 - protein, 23 aa, Artificial Sequence
  Cyclic GFR-binding peptide
LEPISVLYLDDSSNVIKFKYENM

SEQ ID NO: 96797 - protein, 27 aa, Artificial Sequence
  Cyclic GFR-binding peptide
ALEPISILYLVGRKPKVKFKYEMIVRS

SEQ ID NO: 96798 - protein, 33 aa, Artificial Sequence; identical to SEQ ID NO: 43054
  Cyclic GFR-binding peptide
  MOD_RES (1)..(2): Xaa is C or S

SEQ ID NO: 96799 - protein, 27 aa, Artificial Sequence
  Cyclic GFR-binding peptide
  MOD_RES (1)..(2): Xaa is C or S
XXVPTELNAISMLYFDEYDKVVLKKYR

SEQ ID NO: 96800 - protein, 35 aa, Artificial Sequence; identical to SEQ ID NO: 38658
  Cyclic GFR-binding peptide
  MOD_RES (5)..(6): Xaa is C or S

SEQ ID NO: 96801 - protein, 31 aa, Artificial Sequence; identical to SEQ ID NO: 43057
  Cyclic GFR-binding peptide
  MOD_RES (30)..(30): Xaa is C or S

SEQ ID NO: 96802 - protein, 33 aa, Artificial Sequence; identical to SEQ ID NO: 38660
  Cyclic GFR-binding peptide
  MOD_RES (4)..(5): Xaa is C or S

SEQ ID NO: 96803 - protein, 35 aa, Artificial Sequence; identical to SEQ ID NO: 38661
  Cyclic GFR-binding peptide
  MOD_RES (5)..(6): Xaa is C or S

SEQ ID NO: 96804 - protein, 36 aa, Artificial Sequence; identical to SEQ ID NO: 38664
  Cyclic GFR-binding peptide
  MOD_RES (3)..(35): Xaa is C or S

SEQ ID NO: 96805 - protein, 27 aa, Artificial Sequence
  Cyclic GFR-binding peptide
ALSPISILYKVGRKPKVLKYHYMIVRS

SEQ ID NO: 96806 - protein, 30 aa, Artificial Sequence
  Cyclic GFR-binding peptide
  MOD_RES (27)..(29): Xaa is C or S
SPISILYKDENKNVVLKYHYNMTVESXAXR

SEQ ID NO: 96807 - protein, 30 aa, Artificial Sequence; identical to SEQ ID NO: 43065
  Cyclic GFR-binding peptide
  MOD_RES (30)..(30): Xaa is C or S

SEQ ID NO: 96808 - protein, 21 aa, Artificial Sequence
  Cyclic GFR-binding peptide
EPISMLYLDNGRVLLKFKYEM

SEQ ID NO: 96809 - protein, 37 aa, Artificial Sequence; identical to SEQ ID NO: 9844
  Cyclic GFR-binding peptide
  MOD_RES (5)..(6)..(37): Xaa is C or S

SEQ ID NO: 96810 - protein, 22 aa, Artificial Sequence
  Cyclic GFR-binding peptide
ALSPISILYKVGRKPKVLKYHY

SEQ ID NO: 96811 - protein, 39 aa, Artificial Sequence; identical to SEQ ID NO: 38670
  Cyclic GFR-binding peptide
  MOD_RES (7)..(39): Xaa is C or S

SEQ ID NO: 96812 - protein, 36 aa, Artificial Sequence
  Cyclic GFR-binding peptide
  MOD_RES (6)..(7): Xaa is C or S
GSAGPXXTPTKMSPISMLYKNDKQQIILKYHYGMVV

SEQ ID NO: 96813 - protein, 34 aa, Artificial Sequence
  Cyclic GFR-binding peptide
  MOD_RES (2)..(3): Xaa is C or S
TXXVPTRLSPISILYKDSANNVVLKYHYDMVVES

SEQ ID NO: 96814 - protein, 31 aa, Artificial Sequence
  Cyclic GFR-binding peptide
  MOD_RES (28)..(30): Xaa is C or S
LSATSILYYDKGVVTYLRKHRGMAVSEXGXR

SEQ ID NO: 96815 - protein, 29 aa, Artificial Sequence
  Cyclic GFR-binding peptide
  MOD_RES (28)..(28): Xaa is C or S
LSPINMLYFDENEKVVYGKIPDMVVEGXG

SEQ ID NO: 96816 - protein, 26 aa, Artificial Sequence
  Cyclic GFR-binding peptide
PVKTNAISMLYFDNGRVLLLKKYRMI

SEQ ID NO: 96817 - protein, 31 aa, Artificial Sequence; identical to SEQ ID NO: 43074
  Cyclic GFR-binding peptide
  MOD_RES (1)..(1): Xaa is C or S

SEQ ID NO: 96818 - protein, 33 aa, Artificial Sequence; identical to SEQ ID NO: 43078
  Cyclic GFR-binding peptide
  MOD_RES (30)..(32): Xaa is C or S

SEQ ID NO: 96819 - protein, 30 aa, Artificial Sequence; identical to SEQ ID NO: 43079
  Cyclic GFR-binding peptide
  MOD_RES (3)..(4): Xaa is C or S

SEQ ID NO: 96820 - protein, 34 aa, Artificial Sequence; identical to SEQ ID NO: 43082
  Cyclic GFR-binding peptide
  MOD_RES (3)..(4): Xaa is C or S

SEQ ID NO: 96821 - protein, 30 aa, Artificial Sequence; identical to SEQ ID NO: 43083
  Cyclic GFR-binding peptide
  MOD_RES (30)..(30): Xaa is C or S

SEQ ID NO: 96822 - protein, 27 aa, Artificial Sequence
  Cyclic GFR-binding peptide
DLSATSILYYIGKTPKILRKHRMIVKS

SEQ ID NO: 96823 - protein, 34 aa, Artificial Sequence; identical to SEQ ID NO: 9858
  Cyclic GFR-binding peptide
  MOD_RES (2)..(34): Xaa is C or S

SEQ ID NO: 96824 - protein, 28 aa, Artificial Sequence
  Cyclic GFR-binding peptide
PTKLNAISILYFDKGVVTYLKKYRGMAV

SEQ ID NO: 96825 - protein, 32 aa, Artificial Sequence
  Cyclic GFR-binding peptide
  MOD_RES (30)..(32): Xaa is C or S
PVKTSPISMLYKDNGRVLLLKYHYMIVEEXGX

SEQ ID NO: 96826 - protein, 32 aa, Artificial Sequence; identical to SEQ ID NO: 38682
  Cyclic GFR-binding peptide
  MOD_RES (6)..(6): Xaa is C or S

SEQ ID NO: 96827 - protein, 32 aa, Artificial Sequence; identical to SEQ ID NO: 38683
  Cyclic GFR-binding peptide
  MOD_RES (1)..(1): Xaa is C or S

SEQ ID NO: 96828 - protein, 33 aa, Artificial Sequence; identical to SEQ ID NO: 9860
  Cyclic GFR-binding peptide
  MOD_RES (2)..(2): Xaa is C or S

SEQ ID NO: 96829 - protein, 31 aa, Artificial Sequence
  Cyclic GFR-binding peptide
VPTRLSATSILYYDSANNVVLRKHRDMVVES

SEQ ID NO: 96830 - protein, 29 aa, Artificial Sequence
  Cyclic GFR-binding peptide
  MOD_RES (29)..(29): Xaa is C or S
KMSPISILYKDENKNVVLKYHYNMTVESX

SEQ ID NO: 96831 - protein, 33 aa, Artificial Sequence
  Cyclic GFR-binding peptide
  MOD_RES (31)..(33): Xaa is C or S
PEKMSPINILYFDENKNVVYGKIPNMTVESXAX

SEQ ID NO: 96832 - protein, 36 aa, Artificial Sequence; identical to SEQ ID NO: 9865
  Cyclic GFR-binding peptide
  MOD_RES (5)..(5): Xaa is C or S

SEQ ID NO: 96833 - protein, 26 aa, Artificial Sequence
  Cyclic GFR-binding peptide
SPINMLYFDEYDKVVYGKIPEMVVEG

SEQ ID NO: 96834 - protein, 29 aa, Artificial Sequence
  Cyclic GFR-binding peptide
  MOD_RES (28)..(28): Xaa is C or S
LNAISILYFDSANNVVLKKYRDMVVESXG

SEQ ID NO: 96835 - protein, 28 aa, Artificial Sequence
  Cyclic GFR-binding peptide
  MOD_RES (26)..(28): Xaa is C or S
SPISMLYKDNGRVLLLKYHYMIVEEXGX

SEQ ID NO: 96836 - protein, 28 aa, Artificial Sequence
  Cyclic GFR-binding peptide
TPTKMNAISMLYFNDKQQIILKKYRGMV

SEQ ID NO: 96837 - protein, 30 aa, Artificial Sequence; identical to SEQ ID NO: 38697
  Cyclic GFR-binding peptide
  MOD_RES (3)..(4): Xaa is C or S

SEQ ID NO: 96838 - protein, 29 aa, Artificial Sequence
  Cyclic GFR-binding peptide
PTKMSATSMLYYNDKQQIILRKHRGMVVD

SEQ ID NO: 96839 - protein, 28 aa, Artificial Sequence
  Cyclic GFR-binding peptide
PQALSATSILYYVGRKPKVLRKHRMIVR

SEQ ID NO: 96840 - protein, 27 aa, Artificial Sequence
  Cyclic GFR-binding peptide
PTRLSPINILYFDSANNVVYGKIPDMV

SEQ ID NO: 96841 - protein, 27 aa, Artificial Sequence
  Cyclic GFR-binding peptide
TELNAISMLYFDEYDKVVLKKYREMVV

SEQ ID NO: 96842 - protein, 29 aa, Artificial Sequence
  Cyclic GFR-binding peptide
  MOD_RES (28)..(28): Xaa is C or S
LEPISILYLDAANNVVKFKYEDMVVEAXG

SEQ ID NO: 96843 - protein, 34 aa, Artificial Sequence
  Cyclic GFR-binding peptide
  MOD_RES (6)..(7): Xaa is C or S
RVPSTXXAPVKTSPISMLYKDNGRVLLLKYHYMI

SEQ ID NO: 96844 - protein, 35 aa, Artificial Sequence; identical to SEQ ID NO: 9872
  Cyclic GFR-binding peptide
  MOD_RES (1)..(33)..(35): Xaa is C or S

SEQ ID NO: 96845 - protein, 36 aa, Artificial Sequence; identical to SEQ ID NO: 38706
  Cyclic GFR-binding peptide
  MOD_RES (1)..(33)..(35): Xaa is C or S

SEQ ID NO: 96846 - protein, 30 aa, Artificial Sequence; identical to SEQ ID NO: 9879
  Cyclic GFR-binding peptide
  MOD_RES (1)..(2): Xaa is C or S

SEQ ID NO: 96847 - protein, 29 aa, Artificial Sequence
  Cyclic GFR-binding peptide
  MOD_RES (2)..(3): Xaa is C or S
SXXVPARLEPISILYLDAANNVVKFKYED

SEQ ID NO: 96848 - protein, 32 aa, Artificial Sequence; identical to SEQ ID NO: 20074
  Cyclic GFR-binding peptide
  MOD_RES (30)..(32): Xaa is C or S

SEQ ID NO: 96849 - protein, 41 aa, Artificial Sequence; identical to SEQ ID NO: 43111
  Cyclic GFR-binding peptide
  MOD_RES (5)..(6)..(38)..(40): Xaa is C or S

SEQ ID NO: 96850 - protein, 25 aa, Artificial Sequence
  Cyclic GFR-binding peptide
VPTRLSPINILYFDSANNVVYGKIP

SEQ ID NO: 96851 - protein, 39 aa, Artificial Sequence; identical to SEQ ID NO: 38712
  Cyclic GFR-binding peptide
  MOD_RES (4)..(5)..(37)..(39): Xaa is C or S

SEQ ID NO: 96852 - protein, 33 aa, Artificial Sequence; identical to SEQ ID NO: 9884
  Cyclic GFR-binding peptide
  MOD_RES (31)..(33): Xaa is C or S

SEQ ID NO: 96853 - protein, 23 aa, Artificial Sequence
  Cyclic GFR-binding peptide
TELSPISMLYKDEYDKVVLKYHY

SEQ ID NO: 96854 - protein, 28 aa, Artificial Sequence
  Cyclic GFR-binding peptide
  MOD_RES (1)..(1): Xaa is C or S
XAPTQLEPISVLYLDDSSNVIKFKYENM

SEQ ID NO: 96855 - protein, 31 aa, Artificial Sequence; identical to SEQ ID NO: 9888
  Cyclic GFR-binding peptide
  MOD_RES (30)..(30): Xaa is C or S

SEQ ID NO: 96856 - protein, 30 aa, Artificial Sequence; identical to SEQ ID NO: 9889
  Cyclic GFR-binding peptide
  MOD_RES (27)..(29): Xaa is C or S

SEQ ID NO: 96857 - protein, 27 aa, Artificial Sequence
  Cyclic GFR-binding peptide
PTELSPINMLYFDENEKVVYGKIPDMV

SEQ ID NO: 96858 - protein, 31 aa, Artificial Sequence; identical to SEQ ID NO: 43124
  Cyclic GFR-binding peptide
  MOD_RES (4)..(5): Xaa is C or S

SEQ ID NO: 96859 - protein, 34 aa, Artificial Sequence; identical to SEQ ID NO: 38725
  Cyclic GFR-binding peptide
  MOD_RES (3)..(4): Xaa is C or S

SEQ ID NO: 96860 - protein, 42 aa, Artificial Sequence; identical to SEQ ID NO: 9892
  Cyclic GFR-binding peptide
  MOD_RES (6)..(7)..(39)..(41): Xaa is C or S

SEQ ID NO: 96861 - protein, 23 aa, Artificial Sequence
  Cyclic GFR-binding peptide
ARLSPISILYKDAANNVVLKYHY

SEQ ID NO: 96862 - protein, 23 aa, Artificial Sequence
  Cyclic GFR-binding peptide
DLSPINILYFVGRTPKVYGKIPM

SEQ ID NO: 96863 - protein, 25 aa, Artificial Sequence
  Cyclic GFR-binding peptide
VSQDLEPISILYLIGKTPKIKFKYE

SEQ ID NO: 96864 - protein, 34 aa, Artificial Sequence; identical to SEQ ID NO: 43131
  Cyclic GFR-binding peptide
  MOD_RES (5)..(6): Xaa is C or S

SEQ ID NO: 96865 - protein, 28 aa, Artificial Sequence
  Cyclic GFR-binding peptide
RLEPISILYLDAANNVVKFKYEDMVVEA

SEQ ID NO: 96866 - protein, 38 aa, Artificial Sequence; identical to SEQ ID NO: 43135
  Cyclic GFR-binding peptide
  MOD_RES (6)..(7): Xaa is C or S

SEQ ID NO: 96867 - protein, 33 aa, Artificial Sequence; identical to SEQ ID NO: 9900
  Cyclic GFR-binding peptide
  MOD_RES (30)..(32): Xaa is C or S

SEQ ID NO: 96868 - protein, 22 aa, Artificial Sequence
  Cyclic GFR-binding peptide
LSATSILYYDSANNVVLRKHRD

SEQ ID NO: 96869 - protein, 33 aa, Artificial Sequence; identical to SEQ ID NO: 43136
  Cyclic GFR-binding peptide
  MOD_RES (32)..(32): Xaa is C or S

SEQ ID NO: 96870 - protein, 40 aa, Artificial Sequence; identical to SEQ ID NO: 20093
  Cyclic GFR-binding peptide
  MOD_RES (4)..(5)..(37)..(39): Xaa is C or S

SEQ ID NO: 96871 - protein, 29 aa, Artificial Sequence
  Cyclic GFR-binding peptide
APTQLSPISVLYKDDSSNVILKYHYNMVV

SEQ ID NO: 96872 - protein, 36 aa, Artificial Sequence; identical to SEQ ID NO: 9908
  Cyclic GFR-binding peptide
  MOD_RES (5)..(6): Xaa is C or S

SEQ ID NO: 96873 - protein, 40 aa, Artificial Sequence; identical to SEQ ID NO: 9909
  Cyclic GFR-binding peptide
  MOD_RES (6)..(7)..(40): Xaa is C or S

SEQ ID NO: 96874 - protein, 20 aa, Artificial Sequence
  Cyclic GFR-binding peptide
SPISVLYKDSSNNVILKYHY

SEQ ID NO: 96875 - protein, 27 aa, Artificial Sequence
  Cyclic GFR-binding peptide
  MOD_RES (27)..(27): Xaa is C or S
SPINILYFDAANNVVYGKIPDMVVEAX

SEQ ID NO: 96876 - protein, 35 aa, Artificial Sequence; identical to SEQ ID NO: 38750
  Cyclic GFR-binding peptide
  MOD_RES (3)..(35): Xaa is C or S

SEQ ID NO: 96877 - protein, 24 aa, Artificial Sequence
  Cyclic GFR-binding peptide
LSPISVLYKDDSSNVILKYHYNMV

SEQ ID NO: 96878 - protein, 25 aa, Artificial Sequence
  Cyclic GFR-binding peptide
TKLNAISILYFDKGVVTYLKKYRGM

SEQ ID NO: 96879 - protein, 39 aa, Artificial Sequence
  Cyclic GFR-binding peptide
  MOD_RES (6)..(7)..(38): Xaa is C or S
RVPSTXXAPVKTEPISMLYLDNGRVLLKFKYEMIVEEXG

SEQ ID NO: 96880 - protein, 28 aa, Artificial Sequence
  Cyclic GFR-binding peptide
TELSPISMLYKDEYDKVVLKYHYEMVVE

SEQ ID NO: 96881 - protein, 38 aa, Artificial Sequence
  Cyclic GFR-binding peptide
  MOD_RES (5)..(6)..(38): Xaa is C or S
IPEPXXVPEKMSATSILYYDENKNVVLRKHRNMTVESX

SEQ ID NO: 96882 - protein, 36 aa, Artificial Sequence; identical to SEQ ID NO: 77315
  Cyclic GFR-binding peptide
  MOD_RES (1)..(33)..(35): Xaa is C or S

SEQ ID NO: 96883 - protein, 36 aa, Artificial Sequence
  Cyclic GFR-binding peptide
  MOD_RES (6)..(7): Xaa is C or S
ASASPXXVPQDLSPINILYFVGRTPKVYGKIPMVVK

SEQ ID NO: 96884 - protein, 31 aa, Artificial Sequence
  Cyclic GFR-binding peptide
  MOD_RES (28)..(30): Xaa is C or S
LEPISILYLDSANNVVKFKYEDMVVESXGXR

SEQ ID NO: 96885 - protein, 34 aa, Artificial Sequence; identical to SEQ ID NO: 20109
  Cyclic GFR-binding peptide
  MOD_RES (1)..(2)..(34): Xaa is C or S

SEQ ID NO: 96886 - protein, 31 aa, Artificial Sequence; identical to SEQ ID NO: 43157
  Cyclic GFR-binding peptide
  MOD_RES (5)..(6): Xaa is C or S

SEQ ID NO: 96887 - protein, 23 aa, Artificial Sequence
  Cyclic GFR-binding peptide
KLEPISVLYLDDSSNVIKFKYEN

SEQ ID NO: 96888 - protein, 29 aa, Artificial Sequence
  Cyclic GFR-binding peptide
VPTELEPISMLYLDENEKVVKFKYEDMVV

SEQ ID NO: 96889 - protein, 26 aa, Artificial Sequence
  Cyclic GFR-binding peptide
PTKLSPINVLYFDSSNNVIYGKIPNM

SEQ ID NO: 96890 - protein, 30 aa, Artificial Sequence
  Cyclic GFR-binding peptide
VPTRLEPISILYLDSANNVVKFKYEDMVVE

SEQ ID NO: 96891 - protein, 35 aa, Artificial Sequence; identical to SEQ ID NO: 43160
  Cyclic GFR-binding peptide
  MOD_RES (6)..(7): Xaa is C or S

SEQ ID NO: 96892 - protein, 38 aa, Artificial Sequence
  Cyclic GFR-binding peptide
  MOD_RES (2)..(3)..(35)..(37): Xaa is C or S
PXXVPEKMEPISILYLDENKNVVKFKYENMTVESXAXR

SEQ ID NO: 96893 - protein, 31 aa, Artificial Sequence; identical to SEQ ID NO: 9926
  Cyclic GFR-binding peptide
  MOD_RES (1)..(1): Xaa is C or S

SEQ ID NO: 96894 - protein, 33 aa, Artificial Sequence; identical to SEQ ID NO: 43169
  Cyclic GFR-binding peptide
  MOD_RES (4)..(5): Xaa is C or S

SEQ ID NO: 96895 - protein, 32 aa, Artificial Sequence
  Cyclic GFR-binding peptide
  MOD_RES (6)..(7): Xaa is C or S
GSAGPXXTPTKMSPISMLYKNDKQQIILKYHY

SEQ ID NO: 96896 - protein, 29 aa, Artificial Sequence
  Cyclic GFR-binding peptide
  MOD_RES (28)..(28): Xaa is C or S
DLSPISILYKVGRTPKVLKYHYMVVKSXK

SEQ ID NO: 96897 - protein, 38 aa, Artificial Sequence; identical to SEQ ID NO: 38781
  Cyclic GFR-binding peptide
  MOD_RES (4)..(5)..(38): Xaa is C or S

SEQ ID NO: 96898 - protein, 38 aa, Artificial Sequence; identical to SEQ ID NO: 9936
  Cyclic GFR-binding peptide
  MOD_RES (6)..(7): Xaa is C or S

SEQ ID NO: 96899 - protein, 37 aa, Artificial Sequence; identical to SEQ ID NO: 9939
  Cyclic GFR-binding peptide
  MOD_RES (6)..(7): Xaa is C or S

SEQ ID NO: 96900 - protein, 26 aa, Artificial Sequence
  Cyclic GFR-binding peptide
SPINMLYFDENEKVVYGKIPDMVVEG

SEQ ID NO: 96901 - protein, 31 aa, Artificial Sequence
  Cyclic GFR-binding peptide
  MOD_RES (29)..(31): Xaa is C or S
KMSPISMLYKNDKQQIILKYHYGMVVDRXGX

SEQ ID NO: 96902 - protein, 20 aa, Artificial Sequence
  Cyclic GFR-binding peptide
SPISMLYKDEYDKVVLKYHY

SEQ ID NO: 96903 - protein, 26 aa, Artificial Sequence
  Cyclic GFR-binding peptide
PTELEPISMLYLDEYDKVVKFKYEEM

SEQ ID NO: 96904 - protein, 26 aa, Artificial Sequence
  Cyclic GFR-binding peptide
  MOD_RES (1)..(1): Xaa is C or S
XVPTKLNAISVLYFDDMGVPTLKKYR

SEQ ID NO: 96905 - protein, 20 aa, Artificial Sequence
  Cyclic GFR-binding peptide
EPISMLYLNDKQQIIKFKYE

SEQ ID NO: 96906 - protein, 36 aa, Artificial Sequence; identical to SEQ ID NO: 9955
  Cyclic GFR-binding peptide
  MOD_RES (4)..(5)..(36): Xaa is C or S

SEQ ID NO: 96907 - protein, 32 aa, Artificial Sequence; identical to SEQ ID NO: 43187
  Cyclic GFR-binding peptide
  MOD_RES (1)..(2): Xaa is C or S

SEQ ID NO: 96908 - protein, 38 aa, Artificial Sequence
  Cyclic GFR-binding peptide
  MOD_RES (4)..(5)..(37): Xaa is C or S
PPTXXVPTRLEPISILYLDSANNVVKFKYEDMVVESXG

SEQ ID NO: 96909 - protein, 34 aa, Artificial Sequence
  Cyclic GFR-binding peptide
  MOD_RES (4)..(5): Xaa is C or S
AGPXXTPTKMSATSMLYYNDKQQIILRKHRGMVV

SEQ ID NO: 96910 - protein, 29 aa, Artificial Sequence
  Cyclic GFR-binding peptide
APTQLSATSVLYYDDSSNVILRKHRNMVV

SEQ ID NO: 96911 - protein, 31 aa, Artificial Sequence; identical to SEQ ID NO: 9959
  Cyclic GFR-binding peptide

SEQ ID NO: 96912 - protein, 35 aa, Artificial Sequence; identical to SEQ ID NO: 77334
  Cyclic GFR-binding peptide
  MOD_RES (1)..(33)..(35): Xaa is C or S

SEQ ID NO: 96913 - protein, 25 aa, Artificial Sequence
  Cyclic GFR-binding peptide
RLSPISILYKDAANNVVLKYHYDMV

SEQ ID NO: 96914 - protein, 27 aa, Artificial Sequence
  Cyclic GFR-binding peptide
TKLSATSVLYYDDSSNVILRKHRNMVV

SEQ ID NO: 96915 - protein, 29 aa, Artificial Sequence
  Cyclic GFR-binding peptide
PEKMEPISILYLDENKNVVKFKYENMTVE

SEQ ID NO: 96916 - protein, 24 aa, Artificial Sequence
  Cyclic GFR-binding peptide
SPINVLYFDDMGVPTYGKIPEGMS

SEQ ID NO: 96917 - protein, 35 aa, Artificial Sequence
  Cyclic GFR-binding peptide
  MOD_RES (1)..(2)..(34): Xaa is C or S
XXVPEKMEPISILYLDENKNVVKFKYENMTVESXA

SEQ ID NO: 96918 - protein, 40 aa, Artificial Sequence; identical to SEQ ID NO: 77338
  Cyclic GFR-binding peptide
  MOD_RES (6)..(7)..(38)..(40): Xaa is C or S

SEQ ID NO: 96919 - protein, 28 aa, Artificial Sequence
  Cyclic GFR-binding peptide
APVKTSPISMLYKDNGRVLLLKYHYMIV

SEQ ID NO: 96920 - protein, 34 aa, Artificial Sequence; identical to SEQ ID NO: 38812
  Cyclic GFR-binding peptide
  MOD_RES (4)..(5): Xaa is C or S

SEQ ID NO: 96921 - protein, 32 aa, Artificial Sequence
  Cyclic GFR-binding peptide
  MOD_RES (1)..(1): Xaa is C or S
XTPTKMEPISMLYLNDKQQIIKFKYEGMVVDR

SEQ ID NO: 96922 - protein, 33 aa, Artificial Sequence; identical to SEQ ID NO: 9968
  Cyclic GFR-binding peptide
  MOD_RES (3)..(4): Xaa is C or S

SEQ ID NO: 96923 - protein, 25 aa, Artificial Sequence
  Cyclic GFR-binding peptide
LEPISILYLDAANNVVKFKYEDMVV

SEQ ID NO: 96924 - protein, 39 aa, Artificial Sequence; identical to SEQ ID NO: 38819
  Cyclic GFR-binding peptide
  MOD_RES (4)..(5)..(37)..(39): Xaa is C or S

SEQ ID NO: 96925 - protein, 35 aa, Artificial Sequence; identical to SEQ ID NO: 9973
  Cyclic GFR-binding peptide
  MOD_RES (3)..(4)..(35): Xaa is C or S

SEQ ID NO: 96926 - protein, 36 aa, Artificial Sequence; identical to SEQ ID NO: 38825
  Cyclic GFR-binding peptide
  MOD_RES (2)..(3)..(35): Xaa is C or S

SEQ ID NO: 96927 - protein, 35 aa, Artificial Sequence; identical to SEQ ID NO: 9977
  Cyclic GFR-binding peptide
  MOD_RES (33)..(35): Xaa is C or S

SEQ ID NO: 96928 - protein, 32 aa, Artificial Sequence; identical to SEQ ID NO: 38829
  Cyclic GFR-binding peptide
  MOD_RES (30)..(32): Xaa is C or S

SEQ ID NO: 96929 - protein, 31 aa, Artificial Sequence; identical to SEQ ID NO: 38831
  Cyclic GFR-binding peptide
  MOD_RES (1)..(1): Xaa is C or S

SEQ ID NO: 96930 - protein, 30 aa, Artificial Sequence; identical to SEQ ID NO: 9980
  Cyclic GFR-binding peptide
  MOD_RES (1)..(2): Xaa is C or S

SEQ ID NO: 96931 - protein, 27 aa, Artificial Sequence
  Cyclic GFR-binding peptide
LSPISILYKDSANNVVLKYHYDMVVES

SEQ ID NO: 96932 - protein, 24 aa, Artificial Sequence
  Cyclic GFR-binding peptide
LNAISILYFDKGVVTYLKKYRGMA

SEQ ID NO: 96933 - protein, 28 aa, Artificial Sequence
  Cyclic GFR-binding peptide
KLEPISVLYLDSSNNVIKFKYENMVVKA

SEQ ID NO: 96934 - protein, 25 aa, Artificial Sequence
  Cyclic GFR-binding peptide
ALEPISILYLVGRKPKVKFKYEMIV

SEQ ID NO: 96935 - protein, 26 aa, Artificial Sequence
  Cyclic GFR-binding peptide
DLEPISILYLVGRTPKVKFKYEMVVK

SEQ ID NO: 96936 - protein, 25 aa, Artificial Sequence
  Cyclic GFR-binding peptide
SPINILYFDKGVVTYYGKIPGMAVS

SEQ ID NO: 96937 - protein, 30 aa, Artificial Sequence; identical to SEQ ID NO: 38839
  Cyclic GFR-binding peptide
  MOD_RES (3)..(4): Xaa is C or S

SEQ ID NO: 96938 - protein, 30 aa, Artificial Sequence
  Cyclic GFR-binding peptide
  MOD_RES (3)..(4): Xaa is C or S
EPXXVPEKMEPISILYLDENKNVVKFKYEN

SEQ ID NO: 96939 - protein, 41 aa, Artificial Sequence; identical to SEQ ID NO: 9989
  Cyclic GFR-binding peptide
  MOD_RES (5)..(6)..(38)..(40): Xaa is C or S

SEQ ID NO: 96940 - protein, 32 aa, Artificial Sequence; identical to SEQ ID NO: 38848
  Cyclic GFR-binding peptide
  MOD_RES (3)..(4): Xaa is C or S

SEQ ID NO: 96941 - protein, 39 aa, Artificial Sequence; identical to SEQ ID NO: 38850
  Cyclic GFR-binding peptide
  MOD_RES (3)..(4)..(36)..(38): Xaa is C or S

SEQ ID NO: 96942 - protein, 32 aa, Artificial Sequence
  Cyclic GFR-binding peptide
  MOD_RES (29)..(31): Xaa is C or S
KMEPISMLYLNDKQQIIKFKYEGMVVDRXGXS

SEQ ID NO: 96943 - protein, 34 aa, Artificial Sequence
  Cyclic GFR-binding peptide
  MOD_RES (2)..(3)..(34): Xaa is C or S
PXXVSQDLSPINILYFIGKTPKIYGKIPMIVKSX

SEQ ID NO: 96944 - protein, 37 aa, Artificial Sequence; identical to SEQ ID NO: 9996
  Cyclic GFR-binding peptide
  MOD_RES (3)..(4)..(36): Xaa is C or S

SEQ ID NO: 96945 - protein, 34 aa, Artificial Sequence; identical to SEQ ID NO: 9997
  Cyclic GFR-binding peptide
  MOD_RES (1)..(2): Xaa is C or S

SEQ ID NO: 96946 - protein, 38 aa, Artificial Sequence
  Cyclic GFR-binding peptide
  MOD_RES (6)..(7): Xaa is C or S
GIPEPXXVPEKMSPISILYKDENKNVVLKYHYNMTVES

SEQ ID NO: 96947 - protein, 29 aa, Artificial Sequence
  Cyclic GFR-binding peptide
  MOD_RES (1)..(2): Xaa is C or S
XXAPTKLEPISVLYLDDSSNVIKFKYENM

SEQ ID NO: 96948 - protein, 21 aa, Artificial Sequence
  Cyclic GFR-binding peptide
SPINILYFVGRTPKVYGKIPM

SEQ ID NO: 96949 - protein, 33 aa, Artificial Sequence
  Cyclic GFR-binding peptide
  MOD_RES (1)..(33): Xaa is C or S
XVPEKMSPISILYKDENKNVVLKYHYNMTVESX

SEQ ID NO: 96950 - protein, 30 aa, Artificial Sequence; identical to SEQ ID NO: 10001
  Cyclic GFR-binding peptide
  MOD_RES (4)..(5): Xaa is C or S

SEQ ID NO: 96951 - protein, 22 aa, Artificial Sequence
  Cyclic GFR-binding peptide
RLEPISILYLDAANNVVKFKYE

SEQ ID NO: 96952 - protein, 25 aa, Artificial Sequence
  Cyclic GFR-binding peptide
VPTKLEPISVLYLDDMGVPTKFKYE

SEQ ID NO: 96953 - protein, 26 aa, Artificial Sequence
  Cyclic GFR-binding peptide
ELEPISMLYLDENEKVVKFKYEDMVV

SEQ ID NO: 96954 - protein, 24 aa, Artificial Sequence
  Cyclic GFR-binding peptide
PTRLSPISILYKDSANNVVLKYHY

SEQ ID NO: 96955 - protein, 32 aa, Artificial Sequence; identical to SEQ ID NO: 10005
  Cyclic GFR-binding peptide
  MOD_RES (31)..(31): Xaa is C or S

SEQ ID NO: 96956 - protein, 32 aa, Artificial Sequence; identical to SEQ ID NO: 77365
  Cyclic GFR-binding peptide
  MOD_RES (2)..(3): Xaa is C or S

SEQ ID NO: 96957 - protein, 33 aa, Artificial Sequence; identical to SEQ ID NO: 10006
  Cyclic GFR-binding peptide
  MOD_RES (3)..(4): Xaa is C or S

SEQ ID NO: 96958 - protein, 40 aa, Artificial Sequence
  Cyclic GFR-binding peptide
  MOD_RES (6)..(7)..(39): Xaa is C or S
KASKAXXVPTKLSATSILYYDKGVVTYLRKHRGMAVSEXG

SEQ ID NO: 96959 - protein, 31 aa, Artificial Sequence
  Cyclic GFR-binding peptide
VPEKMSATSILYYDENKNVVLRKHRNMTVES

SEQ ID NO: 96960 - protein, 36 aa, Artificial Sequence
  Cyclic GFR-binding peptide
  MOD_RES (4)..(5): Xaa is C or S
PEPXXVPEKMNAISILYFDENKNVVLKKYRNMTVES

SEQ ID NO: 96961 - protein, 31 aa, Artificial Sequence; identical to SEQ ID NO: 10011
  Cyclic GFR-binding peptide
  MOD_RES (1)..(2): Xaa is C or S

SEQ ID NO: 96962 - protein, 34 aa, Artificial Sequence; identical to SEQ ID NO: 38874
  Cyclic GFR-binding peptide
  MOD_RES (6)..(7): Xaa is C or S

SEQ ID NO: 96963 - protein, 33 aa, Artificial Sequence; identical to SEQ ID NO: 43247
  Cyclic GFR-binding peptide
  MOD_RES (1)..(2): Xaa is C or S

SEQ ID NO: 96964 - protein, 29 aa, Artificial Sequence
  Cyclic GFR-binding peptide
  MOD_RES (1)..(1): Xaa is C or S
XAPTKLNAISVLYFDSSNNVILKKYRNMV

SEQ ID NO: 96965 - protein, 29 aa, Artificial Sequence
  Cyclic GFR-binding peptide
  MOD_RES (2)..(3): Xaa is C or S
PXXVPQDLNAISILYFVGRTPKVLKKYRM

SEQ ID NO: 96966 - protein, 30 aa, Artificial Sequence; identical to SEQ ID NO: 10020
  Cyclic GFR-binding peptide
  MOD_RES (1)..(1): Xaa is C or S

SEQ ID NO: 96967 - protein, 34 aa, Artificial Sequence; identical to SEQ ID NO: 10022
  Cyclic GFR-binding peptide
  MOD_RES (6)..(7): Xaa is C or S

SEQ ID NO: 96968 - protein, 26 aa, Artificial Sequence
  Cyclic GFR-binding peptide
SATSMLYYNDKQQIILRKHRGMVVDR

SEQ ID NO: 96969 - protein, 25 aa, Artificial Sequence
  Cyclic GFR-binding peptide
KMSATSILYYDENKNVVLRKHRNMT

SEQ ID NO: 96970 - protein, 31 aa, Artificial Sequence
  Cyclic GFR-binding peptide
  MOD_RES (28)..(30): Xaa is C or S
MSPINILYFDENKNVVYGKIPNMTVESXAXR

SEQ ID NO: 96971 - protein, 36 aa, Artificial Sequence; identical to SEQ ID NO: 10024
  Cyclic GFR-binding peptide
  MOD_RES (1)..(2)..(33)..(35): Xaa is C or S

SEQ ID NO: 96972 - protein, 36 aa, Artificial Sequence; identical to SEQ ID NO: 38888
  Cyclic GFR-binding peptide
  MOD_RES (1)..(33)..(35): Xaa is C or S

SEQ ID NO: 96973 - protein, 39 aa, Artificial Sequence
  Cyclic GFR-binding peptide
  MOD_RES (6)..(7)..(39): Xaa is C or S
HVPKPXXAPTKLSATSVLYYDDSSNVILRKHRNMVVRSX

SEQ ID NO: 96974 - protein, 30 aa, Artificial Sequence; identical to SEQ ID NO: 10025
  Cyclic GFR-binding peptide
  MOD_RES (1)..(1): Xaa is C or S

SEQ ID NO: 96975 - protein, 21 aa, Artificial Sequence
  Cyclic GFR-binding peptide
NAISILYFIGKTPKILKKYRM

SEQ ID NO: 96976 - protein, 30 aa, Artificial Sequence; identical to SEQ ID NO: 10029
  Cyclic GFR-binding peptide

SEQ ID NO: 96977 - protein, 21 aa, Artificial Sequence
  Cyclic GFR-binding peptide
SPISILYKDAANNVVLKYHYD

SEQ ID NO: 96978 - protein, 22 aa, Artificial Sequence
  Cyclic GFR-binding peptide
RLNAISILYFDSANNVVLKKYR

SEQ ID NO: 96979 - protein, 30 aa, Artificial Sequence
  Cyclic GFR-binding peptide
  MOD_RES (28)..(30): Xaa is C or S
ALSPINILYFVGRKPKVYGKIPMIVRSXKX

SEQ ID NO: 96980 - protein, 36 aa, Artificial Sequence; identical to SEQ ID NO: 10034
  Cyclic GFR-binding peptide
  MOD_RES (2)..(3)..(35): Xaa is C or S

SEQ ID NO: 96981 - protein, 36 aa, Artificial Sequence; identical to SEQ ID NO: 10036
  Cyclic GFR-binding peptide
  MOD_RES (3)..(4)..(36): Xaa is C or S

SEQ ID NO: 96982 - protein, 35 aa, Artificial Sequence; identical to SEQ ID NO: 43268
  Cyclic GFR-binding peptide
  MOD_RES (3)..(35): Xaa is C or S

SEQ ID NO: 96983 - protein, 28 aa, Artificial Sequence
  Cyclic GFR-binding peptide
  MOD_RES (27)..(27): Xaa is C or S
SATSMLYYDENEKVVLRKHRDMVVEGXG

SEQ ID NO: 96984 - protein, 35 aa, Artificial Sequence; identical to SEQ ID NO: 10038
  Cyclic GFR-binding peptide
  MOD_RES (1)..(33)..(35): Xaa is C or S

SEQ ID NO: 96985 - protein, 30 aa, Artificial Sequence; identical to SEQ ID NO: 43269
  Cyclic GFR-binding peptide
  MOD_RES (1)..(1): Xaa is C or S

SEQ ID NO: 96986 - protein, 35 aa, Artificial Sequence; identical to SEQ ID NO: 10040
  Cyclic GFR-binding peptide
  MOD_RES (32)..(34): Xaa is C or S

SEQ ID NO: 96987 - protein, 36 aa, Artificial Sequence; identical to SEQ ID NO: 38901
  Cyclic GFR-binding peptide
  MOD_RES (1)..(2)..(34)..(36): Xaa is C or S

SEQ ID NO: 96988 - protein, 27 aa, Artificial Sequence
  Cyclic GFR-binding peptide
  MOD_RES (27)..(27): Xaa is C or S
LNAISILYFVGRKPKVLKKYRMIVRSX

SEQ ID NO: 96989 - protein, 36 aa, Artificial Sequence
  Cyclic GFR-binding peptide
  MOD_RES (1)..(33)..(35): Xaa is C or S
XVPEKMSPINILYFDENKNVVYGKIPNMTVESXAXR

SEQ ID NO: 96990 - protein, 39 aa, Artificial Sequence; identical to SEQ ID NO: 38906
  Cyclic GFR-binding peptide
  MOD_RES (5)..(6)..(38): Xaa is C or S

SEQ ID NO: 96991 - protein, 22 aa, Artificial Sequence
  Cyclic GFR-binding peptide
NAISVLYFDDMGVPTLKKYREG

SEQ ID NO: 96992 - protein, 30 aa, Artificial Sequence; identical to SEQ ID NO: 10046
  Cyclic GFR-binding peptide
  MOD_RES (3)..(3): Xaa is C or S

SEQ ID NO: 96993 - protein, 37 aa, Artificial Sequence; identical to SEQ ID NO: 38910
  Cyclic GFR-binding peptide
  MOD_RES (3)..(4)..(36): Xaa is C or S

SEQ ID NO: 96994 - protein, 26 aa, Artificial Sequence
  Cyclic GFR-binding peptide
MEPISMLYLNDKQQIIKFKYEGMVVD

SEQ ID NO: 96995 - protein, 39 aa, Artificial Sequence
  Cyclic GFR-binding peptide
  MOD_RES (4)..(5)..(37)..(39): Xaa is C or S
AGPXXTPTKMEPISMLYLNDKQQIIKFKYEGMVVDRXGX

SEQ ID NO: 96996 - protein, 32 aa, Artificial Sequence; identical to SEQ ID NO: 10051
  Cyclic GFR-binding peptide
  MOD_RES (4)..(5): Xaa is C or S

SEQ ID NO: 96997 - protein, 34 aa, Artificial Sequence; identical to SEQ ID NO: 43278
  Cyclic GFR-binding peptide
  MOD_RES (6)..(7): Xaa is C or S

SEQ ID NO: 96998 - protein, 38 aa, Artificial Sequence; identical to SEQ ID NO: 77386
  Cyclic GFR-binding peptide
  MOD_RES (2)..(3)..(35)..(37): Xaa is C or S

SEQ ID NO: 96999 - protein, 27 aa, Artificial Sequence
  Cyclic GFR-binding peptide
  MOD_RES (27)..(27): Xaa is C or S
EPISMLYLNDKQQIIKFKYEGMVVDRX

SEQ ID NO: 97000 - protein, 37 aa, Artificial Sequence; identical to SEQ ID NO: 10055
  Cyclic GFR-binding peptide
  MOD_RES (5)..(6)..(37): Xaa is C or S

SEQ ID NO: 97001 - protein, 32 aa, Artificial Sequence; identical to SEQ ID NO: 10057
  Cyclic GFR-binding peptide
  MOD_RES (1)..(2): Xaa is C or S

SEQ ID NO: 97002 - protein, 33 aa, Artificial Sequence; identical to SEQ ID NO: 38916
  Cyclic GFR-binding peptide
  MOD_RES (31)..(33): Xaa is C or S

SEQ ID NO: 97003 - protein, 31 aa, Artificial Sequence; identical to SEQ ID NO: 43283
  Cyclic GFR-binding peptide
  MOD_RES (30)..(30): Xaa is C or S

SEQ ID NO: 97004 - protein, 32 aa, Artificial Sequence; identical to SEQ ID NO: 10058
  Cyclic GFR-binding peptide
  MOD_RES (30)..(32): Xaa is C or S

SEQ ID NO: 97005 - protein, 32 aa, Artificial Sequence; identical to SEQ ID NO: 38919
  Cyclic GFR-binding peptide
  MOD_RES (2)..(3): Xaa is C or S

SEQ ID NO: 97006 - protein, 35 aa, Artificial Sequence; identical to SEQ ID NO: 10060
  Cyclic GFR-binding peptide
  MOD_RES (1)..(2)..(34): Xaa is C or S

SEQ ID NO: 97007 - protein, 32 aa, Artificial Sequence; identical to SEQ ID NO: 38924
  Cyclic GFR-binding peptide
  MOD_RES (30)..(32): Xaa is C or S

SEQ ID NO: 97008 - protein, 31 aa, Artificial Sequence
  Cyclic GFR-binding peptide
  MOD_RES (29)..(31): Xaa is C or S
RLSPISILYKDSANNVVLKYHYDMVVESXGX

SEQ ID NO: 97009 - protein, 24 aa, Artificial Sequence
  Cyclic GFR-binding peptide
ARLNAISILYFDAANNVVLKKYRD

SEQ ID NO: 97010 - protein, 35 aa, Artificial Sequence; identical to SEQ ID NO: 10062
  Cyclic GFR-binding peptide
  MOD_RES (6)..(6): Xaa is C or S

SEQ ID NO: 97011 - protein, 34 aa, Artificial Sequence; identical to SEQ ID NO: 10063
  Cyclic GFR-binding peptide
  MOD_RES (6)..(7): Xaa is C or S

SEQ ID NO: 97012 - protein, 38 aa, Artificial Sequence; identical to SEQ ID NO: 10065
  Cyclic GFR-binding peptide
  MOD_RES (4)..(5)..(38): Xaa is C or S

SEQ ID NO: 97013 - protein, 29 aa, Artificial Sequence
  Cyclic GFR-binding peptide
  MOD_RES (29)..(29): Xaa is C or S
LSPINVLYFDDMGVPTYGKIPEGMSVAEX

SEQ ID NO: 97014 - protein, 24 aa, Artificial Sequence
  Cyclic GFR-binding peptide
EPISMLYLNDKQQIIKFKYEGMVV

SEQ ID NO: 97015 - protein, 22 aa, Artificial Sequence
  Cyclic GFR-binding peptide
NAISMLYFDEYDKVVLKKYREM

SEQ ID NO: 97016 - protein, 40 aa, Artificial Sequence
  Cyclic GFR-binding peptide
  MOD_RES (5)..(6)..(37)..(39): Xaa is C or S
SAAPXXVPQALSPINILYFVGRKPKVYGKIPMIVRSXKXS

SEQ ID NO: 97017 - protein, 23 aa, Artificial Sequence
  Cyclic GFR-binding peptide
ARLEPISILYLDAANNVVKFKYE

SEQ ID NO: 97018 - protein, 30 aa, Artificial Sequence; identical to SEQ ID NO: 38937
  Cyclic GFR-binding peptide
  MOD_RES (27)..(29): Xaa is C or S

SEQ ID NO: 97019 - protein, 29 aa, Artificial Sequence
  Cyclic GFR-binding peptide
  MOD_RES (27)..(29): Xaa is C or S
SPISMLYKDEYDKVVLKYHYEMVVEGXGX

SEQ ID NO: 97020 - protein, 38 aa, Artificial Sequence; identical to SEQ ID NO: 10077
  Cyclic GFR-binding peptide
  MOD_RES (6)..(7)..(38): Xaa is C or S

SEQ ID NO: 97021 - protein, 26 aa, Artificial Sequence
  Cyclic GFR-binding peptide
QALSATSILYYVGRKPKVLRKHRMIV

SEQ ID NO: 97022 - protein, 32 aa, Artificial Sequence; identical to SEQ ID NO: 43303
  Cyclic GFR-binding peptide
  MOD_RES (1)..(1): Xaa is C or S

SEQ ID NO: 97023 - protein, 23 aa, Artificial Sequence
  Cyclic GFR-binding peptide
KMEPISILYLDENKNVVKFKYEN

SEQ ID NO: 97024 - protein, 31 aa, Artificial Sequence; identical to SEQ ID NO: 10085
  Cyclic GFR-binding peptide
  MOD_RES (28)..(30): Xaa is C or S

SEQ ID NO: 97025 - protein, 28 aa, Artificial Sequence
  Cyclic GFR-binding peptide
RLSPISILYKDSANNVVLKYHYDMVVES

SEQ ID NO: 97026 - protein, 37 aa, Artificial Sequence; identical to SEQ ID NO: 43312
  Cyclic GFR-binding peptide
  MOD_RES (1)..(2)..(35)..(37): Xaa is C or S

SEQ ID NO: 97027 - protein, 24 aa, Artificial Sequence
  Cyclic GFR-binding peptide
LSATSILYYVGRKPKVLRKHRMIV

SEQ ID NO: 97028 - protein, 37 aa, Artificial Sequence
  Cyclic GFR-binding peptide
  MOD_RES (3)..(4)..(35)..(37): Xaa is C or S
SPXXVPQDLSPINILYFVGRTPKVYGKIPMVVKSXKX

SEQ ID NO: 97029 - protein, 36 aa, Artificial Sequence
  Cyclic GFR-binding peptide
  MOD_RES (5)..(6): Xaa is C or S
ASKAXXVPTKLSATSILYYDKGVVTYLRKHRGMAVS

SEQ ID NO: 97030 - protein, 38 aa, Artificial Sequence; identical to SEQ ID NO: 10092
  Cyclic GFR-binding peptide
  MOD_RES (3)..(4)..(36)..(38): Xaa is C or S

SEQ ID NO: 97031 - protein, 33 aa, Artificial Sequence; identical to SEQ ID NO: 38954
  Cyclic GFR-binding peptide
  MOD_RES (2)..(3): Xaa is C or S

SEQ ID NO: 97032 - protein, 32 aa, Artificial Sequence; identical to SEQ ID NO: 38956
  Cyclic GFR-binding peptide
  MOD_RES (2)..(3): Xaa is C or S

SEQ ID NO: 97033 - protein, 26 aa, Artificial Sequence
  Cyclic GFR-binding peptide
RLNAISILYFDAANNVVLKKYRDMVV

SEQ ID NO: 97034 - protein, 22 aa, Artificial Sequence
  Cyclic GFR-binding peptide
SPISILYKDAANNVVLKYHYDM

SEQ ID NO: 97035 - protein, 26 aa, Artificial Sequence
  Cyclic GFR-binding peptide
  MOD_RES (1)..(1): Xaa is C or S
XVPQDLSATSILYYVGRTPKVLRKHR

SEQ ID NO: 97036 - protein, 36 aa, Artificial Sequence; identical to SEQ ID NO: 10099
  Cyclic GFR-binding peptide
  MOD_RES (3)..(4): Xaa is C or S

SEQ ID NO: 97037 - protein, 27 aa, Artificial Sequence
  Cyclic GFR-binding peptide
TELSPINMLYFDEYDKVVYGKIPEMVV

SEQ ID NO: 97038 - protein, 28 aa, Artificial Sequence
  Cyclic GFR-binding peptide
  MOD_RES (26)..(28): Xaa is C or S
SPINILYFVGRKPKVYGKIPMIVRSXKX

SEQ ID NO: 97039 - protein, 25 aa, Artificial Sequence
  Cyclic GFR-binding peptide
VPTKLSPINVLYFDDMGVPTYGKIP

SEQ ID NO: 97040 - protein, 31 aa, Artificial Sequence; identical to SEQ ID NO: 10104
  Cyclic GFR-binding peptide
  MOD_RES (31)..(31): Xaa is C or S

SEQ ID NO: 97041 - protein, 24 aa, Artificial Sequence
  Cyclic GFR-binding peptide
SATSILYYDAANNVVLRKHRDMVV

SEQ ID NO: 97042 - protein, 29 aa, Artificial Sequence
  Cyclic GFR-binding peptide
VPARLSPINILYFDAANNVVYGKIPDMVV

SEQ ID NO: 97043 - protein, 21 aa, Artificial Sequence
  Cyclic GFR-binding peptide
LSPISVLYKDDSSNVILKYHY

SEQ ID NO: 97044 - protein, 26 aa, Artificial Sequence
  Cyclic GFR-binding peptide
LSPISVLYKDDSSNVILKYHYNMVVR

SEQ ID NO: 97045 - protein, 26 aa, Artificial Sequence
  Cyclic GFR-binding peptide
  MOD_RES (1)..(1): Xaa is C or S
XVSQDLNAISILYFIGKTPKILKKYR

SEQ ID NO: 97046 - protein, 23 aa, Artificial Sequence
  Cyclic GFR-binding peptide
MSATSMLYYNDKQQIILRKHRGM

SEQ ID NO: 97047 - protein, 30 aa, Artificial Sequence; identical to SEQ ID NO: 41841
  Cyclic GFR-binding peptide

SEQ ID NO: 97048 - protein, 36 aa, Artificial Sequence
  Cyclic GFR-binding peptide
  MOD_RES (4)..(5): Xaa is C or S
PEPXXVPEKMSATSILYYDENKNVVLRKHRNMTVES

SEQ ID NO: 97049 - protein, 26 aa, Artificial Sequence
  Cyclic GFR-binding peptide
KMSATSILYYDENKNVVLRKHRNMTV

SEQ ID NO: 97050 - protein, 36 aa, Artificial Sequence; identical to SEQ ID NO: 41854
  Cyclic GFR-binding peptide
  MOD_RES (5)..(6): Xaa is C or S

SEQ ID NO: 97051 - protein, 34 aa, Artificial Sequence
  Cyclic GFR-binding peptide
  MOD_RES (32)..(34): Xaa is C or S
VPTRLSPISILYKDSANNVVLKYHYDMVVESXGX

SEQ ID NO: 97052 - protein, 27 aa, Artificial Sequence
  Cyclic GFR-binding peptide
PEKMSPINILYFDENKNVVYGKIPNMT

SEQ ID NO: 97053 - protein, 29 aa, Artificial Sequence
  Cyclic GFR-binding peptide
  MOD_RES (3)..(4): Xaa is C or S
KAXXVPTELEPISMLYLDEYDKVVKFKYE

SEQ ID NO: 97054 - protein, 32 aa, Artificial Sequence; identical to SEQ ID NO: 41856
  Cyclic GFR-binding peptide
  MOD_RES (3)..(4): Xaa is C or S

SEQ ID NO: 97055 - protein, 28 aa, Artificial Sequence
  Cyclic GFR-binding peptide
APTKLSATSVLYYDDSSNVILRKHRNMV

SEQ ID NO: 97056 - protein, 27 aa, Artificial Sequence
  Cyclic GFR-binding peptide
VSQDLSPINILYFIGKTPKIYGKIPMI

SEQ ID NO: 97057 - protein, 29 aa, Artificial Sequence
  Cyclic GFR-binding peptide
  MOD_RES (1)..(1): Xaa is C or S
XVPTRLSATSILYYDSANNVVLRKHRDMV

SEQ ID NO: 97058 - protein, 30 aa, Artificial Sequence; identical to SEQ ID NO: 10125
  Cyclic GFR-binding peptide
  MOD_RES (29)..(29): Xaa is C or S

SEQ ID NO: 97059 - protein, 36 aa, Artificial Sequence; identical to SEQ ID NO: 41860
  Cyclic GFR-binding peptide
  MOD_RES (2)..(3)..(35): Xaa is C or S

SEQ ID NO: 97060 - protein, 37 aa, Artificial Sequence; identical to SEQ ID NO: 10127
  Cyclic GFR-binding peptide
  MOD_RES (6)..(7): Xaa is C or S

SEQ ID NO: 97061 - protein, 34 aa, Artificial Sequence; identical to SEQ ID NO: 38995
  Cyclic GFR-binding peptide
  MOD_RES (31)..(33): Xaa is C or S

SEQ ID NO: 97062 - protein, 23 aa, Artificial Sequence
  Cyclic GFR-binding peptide
KTSATSMLYYDNGRVLLLRKHRM

SEQ ID NO: 97063 - protein, 36 aa, Artificial Sequence; identical to SEQ ID NO: 38996
  Cyclic GFR-binding peptide
  MOD_RES (2)..(3)..(35): Xaa is C or S

SEQ ID NO: 97064 - protein, 29 aa, Artificial Sequence
  Cyclic GFR-binding peptide
  MOD_RES (1)..(2): Xaa is C or S
XXAPTQLEPISVLYLDDSSNVIKFKYENM

SEQ ID NO: 97065 - protein, 21 aa, Artificial Sequence
  Cyclic GFR-binding peptide
LSPINVLYFDDSSNVIYGKIP

SEQ ID NO: 97066 - protein, 26 aa, Artificial Sequence
  Cyclic GFR-binding peptide
LNAISILYFVGRTPKVLKKYRMVVKS

SEQ ID NO: 97067 - protein, 30 aa, Artificial Sequence; identical to SEQ ID NO: 10133
  Cyclic GFR-binding peptide
  MOD_RES (29)..(29): Xaa is C or S

SEQ ID NO: 97068 - protein, 36 aa, Artificial Sequence
  Cyclic GFR-binding peptide
  MOD_RES (4)..(5)..(36): Xaa is C or S
ASPXXVPQDLSPINILYFVGRTPKVYGKIPMVVKSX

SEQ ID NO: 97069 - protein, 30 aa, Artificial Sequence
  Cyclic GFR-binding peptide
  MOD_RES (28)..(30): Xaa is C or S
KTSATSMLYYDNGRVLLLRKHRMIVEEXGX

SEQ ID NO: 97070 - protein, 28 aa, Artificial Sequence
  Cyclic GFR-binding peptide
KMSPISILYKDENKNVVLKYHYNMTVES

SEQ ID NO: 97071 - protein, 25 aa, Artificial Sequence
  Cyclic GFR-binding peptide
TELSPISMLYKDEYDKVVLKYHYEM

SEQ ID NO: 97072 - protein, 32 aa, Artificial Sequence; identical to SEQ ID NO: 10137
  Cyclic GFR-binding peptide
  MOD_RES (29)..(31): Xaa is C or S

SEQ ID NO: 97073 - protein, 36 aa, Artificial Sequence
  Cyclic GFR-binding peptide
  MOD_RES (1)..(2)..(34)..(36): Xaa is C or S
XXVPEKMNAISILYFDENKNVVLKKYRNMTVESXAX

SEQ ID NO: 97074 - protein, 34 aa, Artificial Sequence; identical to SEQ ID NO: 41889
  Cyclic GFR-binding peptide
  MOD_RES (2)..(3): Xaa is C or S

SEQ ID NO: 97075 - protein, 22 aa, Artificial Sequence
  Cyclic GFR-binding peptide
KMEPISMLYLNDKQQIIKFKYE

SEQ ID NO: 97076 - protein, 24 aa, Artificial Sequence
  Cyclic GFR-binding peptide
TKLSPINVLYFDDMGVPTYGKIPE

SEQ ID NO: 97077 - protein, 33 aa, Artificial Sequence
  Cyclic GFR-binding peptide
  MOD_RES (3)..(4): Xaa is C or S
APXXVPQALSPINILYFVGRKPKVYGKIPMIVR

SEQ ID NO: 97078 - protein, 31 aa, Artificial Sequence; identical to SEQ ID NO: 41894
  Cyclic GFR-binding peptide
  MOD_RES (29)..(31): Xaa is C or S

SEQ ID NO: 97079 - protein, 36 aa, Artificial Sequence; identical to SEQ ID NO: 39016
  Cyclic GFR-binding peptide
  MOD_RES (5)..(6): Xaa is C or S

SEQ ID NO: 97080 - protein, 37 aa, Artificial Sequence
  Cyclic GFR-binding peptide
  MOD_RES (6)..(7): Xaa is C or S
HVPKPXXAPTKLSPISVLYKDDSSNVILKYHYNMVVR

SEQ ID NO: 97081 - protein, 34 aa, Artificial Sequence
  Cyclic GFR-binding peptide
  MOD_RES (32)..(34): Xaa is C or S
VPTRLEPISILYLDSANNVVKFKYEDMVVESXGX

SEQ ID NO: 97082 - protein, 39 aa, Artificial Sequence; identical to SEQ ID NO: 41895
  Cyclic GFR-binding peptide
  MOD_RES (3)..(4)..(36)..(38): Xaa is C or S

SEQ ID NO: 97083 - protein, 33 aa, Artificial Sequence; identical to SEQ ID NO: 39018
  Cyclic GFR-binding peptide
  MOD_RES (6)..(7): Xaa is C or S

SEQ ID NO: 97084 - protein, 35 aa, Artificial Sequence; identical to SEQ ID NO: 39019
  Cyclic GFR-binding peptide
  MOD_RES (1)..(33)..(35): Xaa is C or S

SEQ ID NO: 97085 - protein, 25 aa, Artificial Sequence
  Cyclic GFR-binding peptide
APTKLEPISVLYLDDSSNVIKFKYE

SEQ ID NO: 97086 - protein, 27 aa, Artificial Sequence
  Cyclic GFR-binding peptide
ALSPINILYFVGRKPKVYGKIPMIVRS

SEQ ID NO: 97087 - protein, 36 aa, Artificial Sequence; identical to SEQ ID NO: 39023
  Cyclic GFR-binding peptide
  MOD_RES (6)..(7): Xaa is C or S

SEQ ID NO: 97088 - protein, 36 aa, Artificial Sequence; identical to SEQ ID NO: 39025
  Cyclic GFR-binding peptide
  MOD_RES (1)..(33)..(35): Xaa is C or S

SEQ ID NO: 97089 - protein, 29 aa, Artificial Sequence
  Cyclic GFR-binding peptide
  MOD_RES (27)..(29): Xaa is C or S
SPISVLYKDSSNNVILKYHYNMVVKAXGX

SEQ ID NO: 97090 - protein, 34 aa, Artificial Sequence; identical to SEQ ID NO: 10151
  Cyclic GFR-binding peptide
  MOD_RES (1)..(32)..(34): Xaa is C or S

SEQ ID NO: 97091 - protein, 29 aa, Artificial Sequence
  Cyclic GFR-binding peptide
  MOD_RES (2)..(3): Xaa is C or S
PXXVPQDLEPISILYLVGRTPKVKFKYEM

SEQ ID NO: 97092 - protein, 30 aa, Artificial Sequence
  Cyclic GFR-binding peptide
VPEKMNAISILYFDENKNVVLKKYRNMTVE

SEQ ID NO: 97093 - protein, 32 aa, Artificial Sequence
  Cyclic GFR-binding peptide
  MOD_RES (29)..(31): Xaa is C or S
VKTSATSMLYYDNGRVLLLRKHRMIVEEXGXL

SEQ ID NO: 97094 - protein, 30 aa, Artificial Sequence
  Cyclic GFR-binding peptide
  MOD_RES (28)..(30): Xaa is C or S
LSPISILYKDSANNVVLKYHYDMVVESXGX

SEQ ID NO: 97095 - protein, 36 aa, Artificial Sequence; identical to SEQ ID NO: 10154
  Cyclic GFR-binding peptide
  MOD_RES (3)..(4)..(35): Xaa is C or S

SEQ ID NO: 97096 - protein, 35 aa, Artificial Sequence; identical to SEQ ID NO: 41912
  Cyclic GFR-binding peptide
  MOD_RES (1)..(33)..(35): Xaa is C or S

SEQ ID NO: 97097 - protein, 33 aa, Artificial Sequence; identical to SEQ ID NO: 20330
  Cyclic GFR-binding peptide
  MOD_RES (32)..(32): Xaa is C or S

SEQ ID NO: 97098 - protein, 39 aa, Artificial Sequence; identical to SEQ ID NO: 10159
  Cyclic GFR-binding peptide
  MOD_RES (2)..(3)..(36)..(38): Xaa is C or S

SEQ ID NO: 97099 - protein, 31 aa, Artificial Sequence
  Cyclic GFR-binding peptide
  MOD_RES (31)..(31): Xaa is C or S
PTRLSPISILYKDSANNVVLKYHYDMVVESX

SEQ ID NO: 97100 - protein, 35 aa, Artificial Sequence
  Cyclic GFR-binding peptide
  MOD_RES (2)..(3)..(34): Xaa is C or S
PXXVSQDLSPINILYFIGKTPKIYGKIPMIVKSXK

SEQ ID NO: 97101 - protein, 38 aa, Artificial Sequence; identical to SEQ ID NO: 10161
  Cyclic GFR-binding peptide
  MOD_RES (3)..(4)..(36)..(38): Xaa is C or S

SEQ ID NO: 97102 - protein, 29 aa, Artificial Sequence
  Cyclic GFR-binding peptide
  MOD_RES (2)..(3): Xaa is C or S
PXXVPQALEPISILYLVGRKPKVKFKYEM

SEQ ID NO: 97103 - protein, 26 aa, Artificial Sequence
  Cyclic GFR-binding peptide
VPQDLEPISILYLVGRTPKVKFKYEM

SEQ ID NO: 97104 - protein, 32 aa, Artificial Sequence; identical to SEQ ID NO: 41925
  Cyclic GFR-binding peptide
  MOD_RES (4)..(5): Xaa is C or S

SEQ ID NO: 97105 - protein, 36 aa, Artificial Sequence; identical to SEQ ID NO: 10165
  Cyclic GFR-binding peptide
  MOD_RES (1)..(33)..(35): Xaa is C or S

SEQ ID NO: 97106 - protein, 40 aa, Artificial Sequence; identical to SEQ ID NO: 10166
  Cyclic GFR-binding peptide
  MOD_RES (5)..(6)..(38)..(40): Xaa is C or S

SEQ ID NO: 97107 - protein, 26 aa, Artificial Sequence
  Cyclic GFR-binding peptide
  MOD_RES (26)..(26): Xaa is C or S
SPINILYFIGKTPKIYGKIPMIVKSX

SEQ ID NO: 97108 - protein, 39 aa, Artificial Sequence; identical to SEQ ID NO: 39049
  Cyclic GFR-binding peptide
  MOD_RES (6)..(7)..(39): Xaa is C or S

SEQ ID NO: 97109 - protein, 34 aa, Artificial Sequence; identical to SEQ ID NO: 41945
  Cyclic GFR-binding peptide
  MOD_RES (1)..(33): Xaa is C or S

SEQ ID NO: 97110 - protein, 31 aa, Artificial Sequence
  Cyclic GFR-binding peptide
  MOD_RES (1)..(1): Xaa is C or S
XVSQDLSPINILYFIGKTPKIYGKIPMIVKS

SEQ ID NO: 97111 - protein, 20 aa, Artificial Sequence
  Cyclic GFR-binding peptide
EPISILYLVGRTPKVKFKYE

SEQ ID NO: 97112 - protein, 41 aa, Artificial Sequence; identical to SEQ ID NO: 41952
  Cyclic GFR-binding peptide
  MOD_RES (7)..(39)..(41): Xaa is C or S

SEQ ID NO: 97113 - protein, 20 aa, Artificial Sequence
  Cyclic GFR-binding peptide
SPINMLYFDNGRVLLYGKIP

SEQ ID NO: 97114 - protein, 33 aa, Artificial Sequence
  Cyclic GFR-binding peptide
  MOD_RES (32)..(32): Xaa is C or S
VPTRLEPISILYLDSANNVVKFKYEDMVVESXG

SEQ ID NO: 97115 - protein, 38 aa, Artificial Sequence; identical to SEQ ID NO: 10174
  Cyclic GFR-binding peptide
  MOD_RES (6)..(7): Xaa is C or S

SEQ ID NO: 97116 - protein, 34 aa, Artificial Sequence
  Cyclic GFR-binding peptide
  MOD_RES (1)..(2)..(34): Xaa is C or S
XXVPTKLSATSILYYDKGVVTYLRKHRGMAVSEX

SEQ ID NO: 97117 - protein, 31 aa, Artificial Sequence; identical to SEQ ID NO: 39055
  Cyclic GFR-binding peptide
  MOD_RES (5)..(6): Xaa is C or S

SEQ ID NO: 97118 - protein, 23 aa, Artificial Sequence
  Cyclic GFR-binding peptide
NAISMLYFNDKQQIILKKYRGMV

SEQ ID NO: 97119 - protein, 37 aa, Artificial Sequence; identical to SEQ ID NO: 39057
  Cyclic GFR-binding peptide
  MOD_RES (5)..(6)..(37): Xaa is C or S

SEQ ID NO: 97120 - protein, 27 aa, Artificial Sequence
  Cyclic GFR-binding peptide
  MOD_RES (1)..(2): Xaa is C or S
XXVPTKLEPISVLYLDDMGVPTKFKYE

SEQ ID NO: 97121 - protein, 29 aa, Artificial Sequence
  Cyclic GFR-binding peptide
  MOD_RES (1)..(2): Xaa is C or S
XXVPQDLSATSILYYVGRTPKVLRKHRMV

SEQ ID NO: 97122 - protein, 32 aa, Artificial Sequence; identical to SEQ ID NO: 41974
  Cyclic GFR-binding peptide
  MOD_RES (29)..(31): Xaa is C or S

SEQ ID NO: 97123 - protein, 23 aa, Artificial Sequence
  Cyclic GFR-binding peptide
SPISILYKDAANNVVLKYHYDMV

SEQ ID NO: 97124 - protein, 29 aa, Artificial Sequence
  Cyclic GFR-binding peptide
  MOD_RES (1)..(1): Xaa is C or S
XVPTELEPISMLYLDEYDKVVKFKYEEMV

SEQ ID NO: 97125 - protein, 38 aa, Artificial Sequence
  Cyclic GFR-binding peptide
  MOD_RES (5)..(6)..(38): Xaa is C or S
TPPTXXVPTRLSATSILYYDSANNVVLRKHRDMVVESX

SEQ ID NO: 97126 - protein, 27 aa, Artificial Sequence
  Cyclic GFR-binding peptide
QDLSATSILYYIGKTPKILRKHRMIVK

SEQ ID NO: 97127 - protein, 35 aa, Artificial Sequence
  Cyclic GFR-binding peptide
  MOD_RES (32)..(34): Xaa is C or S
TPTKMEPISMLYLNDKQQIIKFKYEGMVVDRXGXS

SEQ ID NO: 97128 - protein, 33 aa, Artificial Sequence; identical to SEQ ID NO: 41977
  Cyclic GFR-binding peptide
  MOD_RES (6)..(7): Xaa is C or S

SEQ ID NO: 97129 - protein, 41 aa, Artificial Sequence; identical to SEQ ID NO: 10185
  Cyclic GFR-binding peptide
  MOD_RES (5)..(6)..(38)..(40): Xaa is C or S

SEQ ID NO: 97130 - protein, 28 aa, Artificial Sequence
  Cyclic GFR-binding peptide
  MOD_RES (1)..(2): Xaa is C or S
XXVPTRLSATSILYYDSANNVVLRKHRD

SEQ ID NO: 97131 - protein, 39 aa, Artificial Sequence; identical to SEQ ID NO: 10190
  Cyclic GFR-binding peptide
  MOD_RES (5)..(6)..(38): Xaa is C or S

SEQ ID NO: 97132 - protein, 23 aa, Artificial Sequence
  Cyclic GFR-binding peptide
QDLSPISILYKIGKTPKILKYHY

SEQ ID NO: 97133 - protein, 27 aa, Artificial Sequence
  Cyclic GFR-binding peptide
PTRLNAISILYFDSANNVVLKKYRDMV

SEQ ID NO: 97134 - protein, 26 aa, Artificial Sequence
  Cyclic GFR-binding peptide
VSQDLSPISILYKIGKTPKILKYHYM

SEQ ID NO: 97135 - protein, 31 aa, Artificial Sequence; identical to SEQ ID NO: 10196
  Cyclic GFR-binding peptide
  MOD_RES (1)..(1): Xaa is C or S

SEQ ID NO: 97136 - protein, 34 aa, Artificial Sequence; identical to SEQ ID NO: 39077
  Cyclic GFR-binding peptide
  MOD_RES (2)..(3): Xaa is C or S

SEQ ID NO: 97137 - protein, 31 aa, Artificial Sequence
  Cyclic GFR-binding peptide
  MOD_RES (1)..(2): Xaa is C or S
XXTPTKMSPISMLYKNDKQQIILKYHYGMVV

SEQ ID NO: 97138 - protein, 29 aa, Artificial Sequence
  Cyclic GFR-binding peptide
  MOD_RES (1)..(2): Xaa is C or S
XXTPTKMEPISMLYLNDKQQIIKFKYEGM

SEQ ID NO: 97139 - protein, 25 aa, Artificial Sequence
  Cyclic GFR-binding peptide
SPISVLYKDDSSNVILKYHYNMVVR

SEQ ID NO: 97140 - protein, 34 aa, Artificial Sequence; identical to SEQ ID NO: 10207
  Cyclic GFR-binding peptide
  MOD_RES (6)..(7): Xaa is C or S

SEQ ID NO: 97141 - protein, 37 aa, Artificial Sequence; identical to SEQ ID NO: 10208
  Cyclic GFR-binding peptide
  MOD_RES (5)..(6): Xaa is C or S

SEQ ID NO: 97142 - protein, 33 aa, Artificial Sequence; identical to SEQ ID NO: 10209
  Cyclic GFR-binding peptide
  MOD_RES (31)..(33): Xaa is C or S

SEQ ID NO: 97143 - protein, 34 aa, Artificial Sequence; identical to SEQ ID NO: 39091
  Cyclic GFR-binding peptide
  MOD_RES (6)..(7): Xaa is C or S

SEQ ID NO: 97144 - protein, 41 aa, Artificial Sequence
  Cyclic GFR-binding peptide
  MOD_RES (5)..(6)..(38)..(40): Xaa is C or S
TPPTXXVPTRLSATSILYYDSANNVVLRKHRDMVVESXGXR

SEQ ID NO: 97145 - protein, 29 aa, Artificial Sequence
  Cyclic GFR-binding peptide
APTKLSPISVLYKDDSSNVILKYHYNMVV

SEQ ID NO: 97146 - protein, 32 aa, Artificial Sequence; identical to SEQ ID NO: 10217
  Cyclic GFR-binding peptide
  MOD_RES (29)..(31): Xaa is C or S

SEQ ID NO: 97147 - protein, 33 aa, Artificial Sequence; identical to SEQ ID NO: 42015
  Cyclic GFR-binding peptide
  MOD_RES (30)..(32): Xaa is C or S

SEQ ID NO: 97148 - protein, 35 aa, Artificial Sequence
  Cyclic GFR-binding peptide
  MOD_RES (32)..(34): Xaa is C or S
TPTKMSPISMLYKNDKQQIILKYHYGMVVDRXGXS

SEQ ID NO: 97149 - protein, 25 aa, Artificial Sequence
  Cyclic GFR-binding peptide
EPISMLYLNDKQQIIKFKYEGMVVD

SEQ ID NO: 97150 - protein, 31 aa, Artificial Sequence; identical to SEQ ID NO: 10221
  Cyclic GFR-binding peptide
  MOD_RES (1)..(1): Xaa is C or S

SEQ ID NO: 97151 - protein, 35 aa, Artificial Sequence; identical to SEQ ID NO: 39101
  Cyclic GFR-binding peptide
  MOD_RES (1)..(33)..(35): Xaa is C or S

SEQ ID NO: 97152 - protein, 34 aa, Artificial Sequence; identical to SEQ ID NO: 39104
  Cyclic GFR-binding peptide
  MOD_RES (3)..(4): Xaa is C or S

SEQ ID NO: 97153 - protein, 21 aa, Artificial Sequence
  Cyclic GFR-binding peptide
NAISILYFDENKNVVLKKYRN

SEQ ID NO: 97154 - protein, 39 aa, Artificial Sequence
  Cyclic GFR-binding peptide
  MOD_RES (5)..(6)..(37)..(39): Xaa is C or S
VPSTXXAPVKTSPISMLYKDNGRVLLLKYHYMIVEEXGX

SEQ ID NO: 97155 - protein, 23 aa, Artificial Sequence
  Cyclic GFR-binding peptide
LNAISILYFVGRTPKVLKKYRMV

SEQ ID NO: 97156 - protein, 31 aa, Artificial Sequence
  Cyclic GFR-binding peptide
  MOD_RES (1)..(1): Xaa is C or S
XVPARLSATSILYYDAANNVVLRKHRDMVVE

SEQ ID NO: 97157 - protein, 35 aa, Artificial Sequence; identical to SEQ ID NO: 42020
  Cyclic GFR-binding peptide
  MOD_RES (5)..(6): Xaa is C or S

SEQ ID NO: 97158 - protein, 37 aa, Artificial Sequence; identical to SEQ ID NO: 42022
  Cyclic GFR-binding peptide
  MOD_RES (3)..(4)..(36): Xaa is C or S

SEQ ID NO: 97159 - protein, 36 aa, Artificial Sequence; identical to SEQ ID NO: 39109
  Cyclic GFR-binding peptide
  MOD_RES (1)..(2)..(33)..(35): Xaa is C or S

SEQ ID NO: 97160 - protein, 25 aa, Artificial Sequence
  Cyclic GFR-binding peptide
LSATSILYYIGKTPKILRKHRMIVK

SEQ ID NO: 97161 - protein, 31 aa, Artificial Sequence; identical to SEQ ID NO: 20401
  Cyclic GFR-binding peptide
  MOD_RES (31)..(31): Xaa is C or S

SEQ ID NO: 97162 - protein, 38 aa, Artificial Sequence
  Cyclic GFR-binding peptide
  MOD_RES (3)..(4)..(36)..(38): Xaa is C or S
PTXXVPTRLEPISILYLDSANNVVKFKYEDMVVESXGX

SEQ ID NO: 97163 - protein, 28 aa, Artificial Sequence
  Cyclic GFR-binding peptide
  MOD_RES (26)..(28): Xaa is C or S
EPISILYLVGRTPKVKFKYEMVVKSXKX

SEQ ID NO: 97164 - protein, 36 aa, Artificial Sequence; identical to SEQ ID NO: 42032
  Cyclic GFR-binding peptide
  MOD_RES (5)..(6): Xaa is C or S

SEQ ID NO: 97165 - protein, 30 aa, Artificial Sequence; identical to SEQ ID NO: 39119
  Cyclic GFR-binding peptide
  MOD_RES (1)..(1): Xaa is C or S

SEQ ID NO: 97166 - protein, 30 aa, Artificial Sequence
  Cyclic GFR-binding peptide
  MOD_RES (2)..(3): Xaa is C or S
PXXVPQDLSPINILYFVGRTPKVYGKIPMV

SEQ ID NO: 97167 - protein, 30 aa, Artificial Sequence; identical to SEQ ID NO: 10238
  Cyclic GFR-binding peptide
  MOD_RES (28)..(30): Xaa is C or S

SEQ ID NO: 97168 - protein, 28 aa, Artificial Sequence
  Cyclic GFR-binding peptide
  MOD_RES (2)..(3): Xaa is C or S
PXXVPQALEPISILYLVGRKPKVKFKYE

SEQ ID NO: 97169 - protein, 31 aa, Artificial Sequence; identical to SEQ ID NO: 10242
  Cyclic GFR-binding peptide
  MOD_RES (29)..(31): Xaa is C or S

SEQ ID NO: 97170 - protein, 26 aa, Artificial Sequence
  Cyclic GFR-binding peptide
ALSPINILYFVGRKPKVYGKIPMIVR

SEQ ID NO: 97171 - protein, 28 aa, Artificial Sequence
  Cyclic GFR-binding peptide
PQDLSPISILYKVGRTPKVLKYHYMVVK

SEQ ID NO: 97172 - protein, 33 aa, Artificial Sequence; identical to SEQ ID NO: 10249
  Cyclic GFR-binding peptide
  MOD_RES (1)..(33): Xaa is C or S

SEQ ID NO: 97173 - protein, 26 aa, Artificial Sequence
  Cyclic GFR-binding peptide
APTKLSATSVLYYDDSSNVILRKHRN

SEQ ID NO: 97174 - protein, 32 aa, Artificial Sequence; identical to SEQ ID NO: 10253
  Cyclic GFR-binding peptide
  MOD_RES (29)..(31): Xaa is C or S

SEQ ID NO: 97175 - protein, 22 aa, Artificial Sequence
  Cyclic GFR-binding peptide
EPISILYLVGRTPKVKFKYEMV

SEQ ID NO: 97176 - protein, 31 aa, Artificial Sequence
  Cyclic GFR-binding peptide
  MOD_RES (4)..(5): Xaa is C or S
PSTXXAPVKTEPISMLYLDNGRVLLKFKYEM

SEQ ID NO: 97177 - protein, 35 aa, Artificial Sequence; identical to SEQ ID NO: 10254
  Cyclic GFR-binding peptide
  MOD_RES (6)..(7): Xaa is C or S

SEQ ID NO: 97178 - protein, 29 aa, Artificial Sequence
  Cyclic GFR-binding peptide
TKLEPISVLYLDSSNNVIKFKYENMVVKA

SEQ ID NO: 97179 - protein, 32 aa, Artificial Sequence; identical to SEQ ID NO: 39137
  Cyclic GFR-binding peptide
  MOD_RES (1)..(32): Xaa is C or S

SEQ ID NO: 97180 - protein, 22 aa, Artificial Sequence
  Cyclic GFR-binding peptide
KTSPINMLYFDNGRVLLYGKIP

SEQ ID NO: 97181 - protein, 40 aa, Artificial Sequence; identical to SEQ ID NO: 10258
  Cyclic GFR-binding peptide
  MOD_RES (6)..(7)..(38)..(40): Xaa is C or S

SEQ ID NO: 97182 - protein, 39 aa, Artificial Sequence; identical to SEQ ID NO: 10259
  Cyclic GFR-binding peptide
  MOD_RES (7)..(39): Xaa is C or S

SEQ ID NO: 97183 - protein, 23 aa, Artificial Sequence
  Cyclic GFR-binding peptide
SATSMLYYDEYDKVVLRKHREMV

SEQ ID NO: 97184 - protein, 33 aa, Artificial Sequence; identical to SEQ ID NO: 42055
  Cyclic GFR-binding peptide
  MOD_RES (31)..(33): Xaa is C or S

SEQ ID NO: 97185 - protein, 28 aa, Artificial Sequence
  Cyclic GFR-binding peptide
  MOD_RES (1)..(1): Xaa is C or S
XTPTKMEPISMLYLNDKQQIIKFKYEGM

SEQ ID NO: 97186 - protein, 29 aa, Artificial Sequence
  Cyclic GFR-binding peptide
  MOD_RES (26)..(28): Xaa is C or S
SPINILYFVGRKPKVYGKIPMIVRSXKXS

SEQ ID NO: 97187 - protein, 35 aa, Artificial Sequence
  Cyclic GFR-binding peptide
  MOD_RES (2)..(3)..(35): Xaa is C or S
AXXVPTKLSATSILYYDKGVVTYLRKHRGMAVSEX

SEQ ID NO: 97188 - protein, 28 aa, Artificial Sequence
  Cyclic GFR-binding peptide
  MOD_RES (28)..(28): Xaa is C or S
LSPINILYFDSANNVVYGKIPDMVVESX

SEQ ID NO: 97189 - protein, 30 aa, Artificial Sequence; identical to SEQ ID NO: 10264
  Cyclic GFR-binding peptide
  MOD_RES (30)..(30): Xaa is C or S

SEQ ID NO: 97190 - protein, 30 aa, Artificial Sequence; identical to SEQ ID NO: 10265
  Cyclic GFR-binding peptide
  MOD_RES (3)..(4): Xaa is C or S

SEQ ID NO: 97191 - protein, 24 aa, Artificial Sequence
  Cyclic GFR-binding peptide
NAISILYFDSANNVVLKKYRDMVV

SEQ ID NO: 97192 - protein, 21 aa, Artificial Sequence
  Cyclic GFR-binding peptide
NAISILYFDSANNVVLKKYRD

SEQ ID NO: 97193 - protein, 31 aa, Artificial Sequence; identical to SEQ ID NO: 10268
  Cyclic GFR-binding peptide
  MOD_RES (1)..(1): Xaa is C or S

SEQ ID NO: 97194 - protein, 37 aa, Artificial Sequence
  Cyclic GFR-binding peptide
  MOD_RES (2)..(3)..(34)..(36): Xaa is C or S
PXXVPQALSPINILYFVGRKPKVYGKIPMIVRSXKXS

SEQ ID NO: 97195 - protein, 25 aa, Artificial Sequence
  Cyclic GFR-binding peptide
APTQLSPISVLYKDDSSNVILKYHY

SEQ ID NO: 97196 - protein, 29 aa, Artificial Sequence
  Cyclic GFR-binding peptide
  MOD_RES (28)..(28): Xaa is C or S
LSATSVLYYDDSSNVILRKHRNMVVRAXG

SEQ ID NO: 97197 - protein, 29 aa, Artificial Sequence
  Cyclic GFR-binding peptide
  MOD_RES (1)..(1): Xaa is C or S
XVPQDLNAISILYFVGRTPKVLKKYRMVV

SEQ ID NO: 97198 - protein, 30 aa, Artificial Sequence; identical to SEQ ID NO: 10279
  Cyclic GFR-binding peptide
  MOD_RES (27)..(29): Xaa is C or S

SEQ ID NO: 97199 - protein, 29 aa, Artificial Sequence
  Cyclic GFR-binding peptide
  MOD_RES (28)..(28): Xaa is C or S
LEPISILYLDSANNVVKFKYEDMVVESXG

SEQ ID NO: 97200 - protein, 27 aa, Artificial Sequence
  Cyclic GFR-binding peptide
  MOD_RES (27)..(27): Xaa is C or S
EPISILYLDENKNVVKFKYENMTVESX

SEQ ID NO: 97201 - protein, 32 aa, Artificial Sequence; identical to SEQ ID NO: 10281
  Cyclic GFR-binding peptide
  MOD_RES (1)..(2): Xaa is C or S

SEQ ID NO: 97202 - protein, 31 aa, Artificial Sequence; identical to SEQ ID NO: 20439
  Cyclic GFR-binding peptide

SEQ ID NO: 97203 - protein, 34 aa, Artificial Sequence; identical to SEQ ID NO: 39162
  Cyclic GFR-binding peptide
  MOD_RES (4)..(5): Xaa is C or S

SEQ ID NO: 97204 - protein, 35 aa, Artificial Sequence; identical to SEQ ID NO: 42076
  Cyclic GFR-binding peptide
  MOD_RES (6)..(7): Xaa is C or S

SEQ ID NO: 97205 - protein, 34 aa, Artificial Sequence
  Cyclic GFR-binding peptide
  MOD_RES (31)..(33): Xaa is C or S
APVKTSPISMLYKDNGRVLLLKYHYMIVEEXGXL

SEQ ID NO: 97206 - protein, 33 aa, Artificial Sequence; identical to SEQ ID NO: 10283
  Cyclic GFR-binding peptide
  MOD_RES (1)..(2): Xaa is C or S

SEQ ID NO: 97207 - protein, 32 aa, Artificial Sequence; identical to SEQ ID NO: 10284
  Cyclic GFR-binding peptide
  MOD_RES (1)..(2): Xaa is C or S

SEQ ID NO: 97208 - protein, 30 aa, Artificial Sequence
  Cyclic GFR-binding peptide
  MOD_RES (2)..(3): Xaa is C or S
PXXVSQDLSPINILYFIGKTPKIYGKIPMI

SEQ ID NO: 97209 - protein, 24 aa, Artificial Sequence
  Cyclic GFR-binding peptide
SQDLSPINILYFIGKTPKIYGKIP

SEQ ID NO: 97210 - protein, 32 aa, Artificial Sequence; identical to SEQ ID NO: 39167
  Cyclic GFR-binding peptide
  MOD_RES (1)..(2): Xaa is C or S

SEQ ID NO: 97211 - protein, 35 aa, Artificial Sequence; identical to SEQ ID NO: 10287
  Cyclic GFR-binding peptide
  MOD_RES (5)..(6): Xaa is C or S

SEQ ID NO: 97212 - protein, 39 aa, Artificial Sequence
  Cyclic GFR-binding peptide
  MOD_RES (4)..(5)..(37)..(39): Xaa is C or S
PEPXXVPEKMSPINILYFDENKNVVYGKIPNMTVESXAX

SEQ ID NO: 97213 - protein, 20 aa, Artificial Sequence
  Cyclic GFR-binding peptide
SPISILYKDAANNVVLKYHY

SEQ ID NO: 97214 - protein, 32 aa, Artificial Sequence
  Cyclic GFR-binding peptide
  MOD_RES (3)..(4): Xaa is C or S
PTXXVPTRLSPISILYKDSANNVVLKYHYDMV

SEQ ID NO: 97215 - protein, 27 aa, Artificial Sequence
  Cyclic GFR-binding peptide
TKMSATSMLYYNDKQQIILRKHRGMVV

SEQ ID NO: 97216 - protein, 38 aa, Artificial Sequence
  Cyclic GFR-binding peptide
  MOD_RES (3)..(4)..(36)..(38): Xaa is C or S
EPXXVPEKMSATSILYYDENKNVVLRKHRNMTVESXAX

SEQ ID NO: 97217 - protein, 23 aa, Artificial Sequence
  Cyclic GFR-binding peptide
ELSPINMLYFDEYDKVVYGKIPE

SEQ ID NO: 97218 - protein, 32 aa, Artificial Sequence; identical to SEQ ID NO: 10297
  Cyclic GFR-binding peptide
  MOD_RES (29)..(31): Xaa is C or S

SEQ ID NO: 97219 - protein, 31 aa, Artificial Sequence
  Cyclic GFR-binding peptide
  MOD_RES (2)..(3): Xaa is C or S
PXXVPEKMSPISILYKDENKNVVLKYHYNMT

SEQ ID NO: 97220 - protein, 32 aa, Artificial Sequence; identical to SEQ ID NO: 39178
  Cyclic GFR-binding peptide
  MOD_RES (29)..(31): Xaa is C or S

SEQ ID NO: 97221 - protein, 35 aa, Artificial Sequence
  Cyclic GFR-binding peptide
  MOD_RES (5)..(6): Xaa is C or S
VPSTXXAPVKTEPISMLYLDNGRVLLKFKYEMIVE

SEQ ID NO: 97222 - protein, 26 aa, Artificial Sequence
  Cyclic GFR-binding peptide
MNAISILYFDENKNVVLKKYRNMTVE

SEQ ID NO: 97223 - protein, 37 aa, Artificial Sequence
  Cyclic GFR-binding peptide
  MOD_RES (6)..(7): Xaa is C or S
RVPSTXXAPVKTSPISMLYKDNGRVLLLKYHYMIVEE

SEQ ID NO: 97224 - protein, 31 aa, Artificial Sequence
  Cyclic GFR-binding peptide
  MOD_RES (3)..(4): Xaa is C or S
GPXXTPTKMSATSMLYYNDKQQIILRKHRGM

SEQ ID NO: 97225 - protein, 32 aa, Artificial Sequence
  Cyclic GFR-binding peptide
  MOD_RES (30)..(32): Xaa is C or S
ARLSATSILYYDAANNVVLRKHRDMVVEAXGX

SEQ ID NO: 97226 - protein, 25 aa, Artificial Sequence
  Cyclic GFR-binding peptide
KMNAISILYFDENKNVVLKKYRNMT

SEQ ID NO: 97227 - protein, 38 aa, Artificial Sequence; identical to SEQ ID NO: 39179
  Cyclic GFR-binding peptide
  MOD_RES (4)..(5)..(36)..(38): Xaa is C or S

SEQ ID NO: 97228 - protein, 37 aa, Artificial Sequence; identical to SEQ ID NO: 10301
  Cyclic GFR-binding peptide
  MOD_RES (2)..(3)..(35)..(37): Xaa is C or S

SEQ ID NO: 97229 - protein, 31 aa, Artificial Sequence
  Cyclic GFR-binding peptide
  MOD_RES (31)..(31): Xaa is C or S
PTKMSATSMLYYNDKQQIILRKHRGMVVDRX

SEQ ID NO: 97230 - protein, 34 aa, Artificial Sequence; identical to SEQ ID NO: 42103
  Cyclic GFR-binding peptide
  MOD_RES (31)..(33): Xaa is C or S

SEQ ID NO: 97231 - protein, 33 aa, Artificial Sequence
  Cyclic GFR-binding peptide
  MOD_RES (1)..(33): Xaa is C or S
XTPTKMEPISMLYLNDKQQIIKFKYEGMVVDRX

SEQ ID NO: 97232 - protein, 33 aa, Artificial Sequence; identical to SEQ ID NO: 42104
  Cyclic GFR-binding peptide
  MOD_RES (32)..(32): Xaa is C or S

SEQ ID NO: 97233 - protein, 32 aa, Artificial Sequence; identical to SEQ ID NO: 42105
  Cyclic GFR-binding peptide
  MOD_RES (4)..(5): Xaa is C or S

SEQ ID NO: 97234 - protein, 23 aa, Artificial Sequence
  Cyclic GFR-binding peptide
LSPINMLYFDEYDKVVYGKIPEM

SEQ ID NO: 97235 - protein, 29 aa, Artificial Sequence
  Cyclic GFR-binding peptide
  MOD_RES (29)..(29): Xaa is C or S
KMSPISMLYKNDKQQIILKYHYGMVVDRX

SEQ ID NO: 97236 - protein, 28 aa, Artificial Sequence
  Cyclic GFR-binding peptide
KLSPISVLYKDSSNNVILKYHYNMVVKA

SEQ ID NO: 97237 - protein, 20 aa, Artificial Sequence
  Cyclic GFR-binding peptide
SPISMLYKDNGRVLLLKYHY

SEQ ID NO: 97238 - protein, 32 aa, Artificial Sequence; identical to SEQ ID NO: 39187
  Cyclic GFR-binding peptide
  MOD_RES (30)..(32): Xaa is C or S

SEQ ID NO: 97239 - protein, 32 aa, Artificial Sequence
  Cyclic GFR-binding peptide
  MOD_RES (32)..(32): Xaa is C or S
VPEKMSPISILYKDENKNVVLKYHYNMTVESX

SEQ ID NO: 97240 - protein, 33 aa, Artificial Sequence; identical to SEQ ID NO: 39190
  Cyclic GFR-binding peptide
  MOD_RES (1)..(33): Xaa is C or S

SEQ ID NO: 97241 - protein, 32 aa, Artificial Sequence; identical to SEQ ID NO: 42114
  Cyclic GFR-binding peptide
  MOD_RES (6)..(7): Xaa is C or S

SEQ ID NO: 97242 - protein, 35 aa, Artificial Sequence
  Cyclic GFR-binding peptide
  MOD_RES (4)..(5): Xaa is C or S
PPTXXVPTRLEPISILYLDSANNVVKFKYEDMVVE

SEQ ID NO: 97243 - protein, 26 aa, Artificial Sequence
  Cyclic GFR-binding peptide
TELNAISMLYFDEYDKVVLKKYREMV

SEQ ID NO: 97244 - protein, 28 aa, Artificial Sequence
  Cyclic GFR-binding peptide
  MOD_RES (1)..(1): Xaa is C or S
XAPVKTNAISMLYFDNGRVLLLKKYRMI

SEQ ID NO: 97245 - protein, 28 aa, Artificial Sequence
  Cyclic GFR-binding peptide
VPEKMEPISILYLDENKNVVKFKYENMT

SEQ ID NO: 97246 - protein, 30 aa, Artificial Sequence; identical to SEQ ID NO: 42126
  Cyclic GFR-binding peptide
  MOD_RES (3)..(4): Xaa is C or S

SEQ ID NO: 97247 - protein, 26 aa, Artificial Sequence
  Cyclic GFR-binding peptide
VPQALEPISILYLVGRKPKVKFKYEM

SEQ ID NO: 97248 - protein, 29 aa, Artificial Sequence
  Cyclic GFR-binding peptide
  MOD_RES (29)..(29): Xaa is C or S
RLSATSILYYDAANNVVLRKHRDMVVEAX

SEQ ID NO: 97249 - protein, 33 aa, Artificial Sequence; identical to SEQ ID NO: 10316
  Cyclic GFR-binding peptide
  MOD_RES (6)..(7): Xaa is C or S

SEQ ID NO: 97250 - protein, 41 aa, Artificial Sequence
  Cyclic GFR-binding peptide
  MOD_RES (5)..(6)..(38)..(40): Xaa is C or S
IPEPXXVPEKMSATSILYYDENKNVVLRKHRNMTVESXAXR

SEQ ID NO: 97251 - protein, 29 aa, Artificial Sequence
  Cyclic GFR-binding peptide
  MOD_RES (29)..(29): Xaa is C or S
QALSPISILYKVGRKPKVLKYHYMIVRSX

SEQ ID NO: 97252 - protein, 28 aa, Artificial Sequence
  Cyclic GFR-binding peptide
VPARLNAISILYFDAANNVVLKKYRDMV

SEQ ID NO: 97253 - protein, 26 aa, Artificial Sequence
  Cyclic GFR-binding peptide
VPTELSPINMLYFDEYDKVVYGKIPE

SEQ ID NO: 97254 - protein, 24 aa, Artificial Sequence
  Cyclic GFR-binding peptide
TELNAISMLYFDENEKVVLKKYRD

SEQ ID NO: 97255 - protein, 24 aa, Artificial Sequence
  Cyclic GFR-binding peptide
TKLSPINVLYFDDSSNVIYGKIPN

SEQ ID NO: 97256 - protein, 30 aa, Artificial Sequence
  Cyclic GFR-binding peptide
  MOD_RES (28)..(30): Xaa is C or S
LEPISILYLDSANNVVKFKYEDMVVESXGX

SEQ ID NO: 97257 - protein, 31 aa, Artificial Sequence
  Cyclic GFR-binding peptide
  MOD_RES (29)..(31): Xaa is C or S
QDLSPINILYFIGKTPKIYGKIPMIVKSXKX

SEQ ID NO: 97258 - protein, 32 aa, Artificial Sequence
  Cyclic GFR-binding peptide
  MOD_RES (3)..(4): Xaa is C or S
SPXXVPQDLSPINILYFVGRTPKVYGKIPMVV

SEQ ID NO: 97259 - protein, 34 aa, Artificial Sequence
  Cyclic GFR-binding peptide
  MOD_RES (31)..(33): Xaa is C or S
PEKMSATSILYYDENKNVVLRKHRNMTVESXAXR

SEQ ID NO: 97260 - protein, 36 aa, Artificial Sequence; identical to SEQ ID NO: 10325
  Cyclic GFR-binding peptide
  MOD_RES (6)..(7): Xaa is C or S

SEQ ID NO: 97261 - protein, 38 aa, Artificial Sequence
  Cyclic GFR-binding peptide
  MOD_RES (6)..(7): Xaa is C or S
AAPASXXVPARLSATSILYYDAANNVVLRKHRDMVVEA

SEQ ID NO: 97262 - protein, 27 aa, Artificial Sequence
  Cyclic GFR-binding peptide
VPQDLSPINILYFVGRTPKVYGKIPMV

SEQ ID NO: 97263 - protein, 36 aa, Artificial Sequence; identical to SEQ ID NO: 10332
  Cyclic GFR-binding peptide
  MOD_RES (5)..(6): Xaa is C or S

SEQ ID NO: 97264 - protein, 22 aa, Artificial Sequence
  Cyclic GFR-binding peptide
MSPINILYFDENKNVVYGKIPN

SEQ ID NO: 97265 - protein, 35 aa, Artificial Sequence; identical to SEQ ID NO: 77530
  Cyclic GFR-binding peptide
  MOD_RES (32)..(34): Xaa is C or S

SEQ ID NO: 97266 - protein, 30 aa, Artificial Sequence; identical to SEQ ID NO: 10335
  Cyclic GFR-binding peptide
  MOD_RES (4)..(5): Xaa is C or S

SEQ ID NO: 97267 - protein, 29 aa, Artificial Sequence
  Cyclic GFR-binding peptide
  MOD_RES (1)..(1): Xaa is C or S
XTPTKMEPISMLYLNDKQQIIKFKYEGMV

SEQ ID NO: 97268 - protein, 21 aa, Artificial Sequence
  Cyclic GFR-binding peptide
SPINILYFDAANNVVYGKIPD

SEQ ID NO: 97269 - protein, 30 aa, Artificial Sequence; identical to SEQ ID NO: 10338
  Cyclic GFR-binding peptide
  MOD_RES (2)..(3): Xaa is C or S

SEQ ID NO: 97270 - protein, 32 aa, Artificial Sequence; identical to SEQ ID NO: 42170
  Cyclic GFR-binding peptide
  MOD_RES (1)..(1): Xaa is C or S

SEQ ID NO: 97271 - protein, 28 aa, Artificial Sequence
  Cyclic GFR-binding peptide
  MOD_RES (26)..(28): Xaa is C or S
SATSILYYVGRKPKVLRKHRMIVRSXKX

SEQ ID NO: 97272 - protein, 26 aa, Artificial Sequence
  Cyclic GFR-binding peptide
  MOD_RES (1)..(1): Xaa is C or S
XVSQDLSPINILYFIGKTPKIYGKIP

SEQ ID NO: 97273 - protein, 28 aa, Artificial Sequence
  Cyclic GFR-binding peptide
SQDLSATSILYYIGKTPKILRKHRMIVK

SEQ ID NO: 97274 - protein, 24 aa, Artificial Sequence
  Cyclic GFR-binding peptide
MSPISILYKDENKNVVLKYHYNMT

SEQ ID NO: 97275 - protein, 30 aa, Artificial Sequence; identical to SEQ ID NO: 77537
  Cyclic GFR-binding peptide

SEQ ID NO: 97276 - protein, 31 aa, Artificial Sequence; identical to SEQ ID NO: 39224
  Cyclic GFR-binding peptide
  MOD_RES (3)..(4): Xaa is C or S

SEQ ID NO: 97277 - protein, 33 aa, Artificial Sequence; identical to SEQ ID NO: 77540
  Cyclic GFR-binding peptide
  MOD_RES (6)..(7): Xaa is C or S

SEQ ID NO: 97278 - protein, 35 aa, Artificial Sequence; identical to SEQ ID NO: 10345
  Cyclic GFR-binding peptide
  MOD_RES (3)..(4): Xaa is C or S

SEQ ID NO: 97279 - protein, 25 aa, Artificial Sequence
  Cyclic GFR-binding peptide
SATSILYYDKGVVTYLRKHRGMAVS

SEQ ID NO: 97280 - protein, 28 aa, Artificial Sequence
  Cyclic GFR-binding peptide
  MOD_RES (2)..(3): Xaa is C or S
TXXAPVKTSATSMLYYDNGRVLLLRKHR

SEQ ID NO: 97281 - protein, 32 aa, Artificial Sequence; identical to SEQ ID NO: 42180
  Cyclic GFR-binding peptide
  MOD_RES (3)..(4): Xaa is C or S

SEQ ID NO: 97282 - protein, 25 aa, Artificial Sequence
  Cyclic GFR-binding peptide
PQALEPISILYLVGRKPKVKFKYEM

SEQ ID NO: 97283 - protein, 28 aa, Artificial Sequence
  Cyclic GFR-binding peptide
TRLSPINILYFDSANNVVYGKIPDMVVE

SEQ ID NO: 97284 - protein, 36 aa, Artificial Sequence; identical to SEQ ID NO: 42190
  Cyclic GFR-binding peptide
  MOD_RES (4)..(5): Xaa is C or S

SEQ ID NO: 97285 - protein, 32 aa, Artificial Sequence; identical to SEQ ID NO: 10350
  Cyclic GFR-binding peptide
  MOD_RES (4)..(5): Xaa is C or S

SEQ ID NO: 97286 - protein, 39 aa, Artificial Sequence; identical to SEQ ID NO: 10351
  Cyclic GFR-binding peptide
  MOD_RES (4)..(5)..(36)..(38): Xaa is C or S

SEQ ID NO: 97287 - protein, 32 aa, Artificial Sequence
  Cyclic GFR-binding peptide
  MOD_RES (3)..(4): Xaa is C or S
KAXXVPTKLSATSILYYDKGVVTYLRKHRGMA

SEQ ID NO: 97288 - protein, 24 aa, Artificial Sequence
  Cyclic GFR-binding peptide
ELEPISMLYLDEYDKVVKFKYEEM

SEQ ID NO: 97289 - protein, 39 aa, Artificial Sequence
  Cyclic GFR-binding peptide
  MOD_RES (6)..(7)..(39): Xaa is C or S
KASKAXXVPTKLSATSILYYDKGVVTYLRKHRGMAVSEX

SEQ ID NO: 97290 - protein, 30 aa, Artificial Sequence; identical to SEQ ID NO: 39234
  Cyclic GFR-binding peptide
  MOD_RES (28)..(30): Xaa is C or S

SEQ ID NO: 97291 - protein, 28 aa, Artificial Sequence
  Cyclic GFR-binding peptide
  MOD_RES (28)..(28): Xaa is C or S
DLEPISILYLIGKTPKIKFKYEMIVKSX

SEQ ID NO: 97292 - protein, 33 aa, Artificial Sequence; identical to SEQ ID NO: 10355
  Cyclic GFR-binding peptide
  MOD_RES (5)..(6): Xaa is C or S

SEQ ID NO: 97293 - protein, 31 aa, Artificial Sequence; identical to SEQ ID NO: 10357
  Cyclic GFR-binding peptide
  MOD_RES (1)..(1): Xaa is C or S

SEQ ID NO: 97294 - protein, 28 aa, Artificial Sequence
  Cyclic GFR-binding peptide
  MOD_RES (1)..(1): Xaa is C or S
XAPVKTSPINMLYFDNGRVLLYGKIPMI

SEQ ID NO: 97295 - protein, 28 aa, Artificial Sequence
  Cyclic GFR-binding peptide
  MOD_RES (28)..(28): Xaa is C or S
DLNAISILYFVGRTPKVLKKYRMVVKSX

SEQ ID NO: 97296 - protein, 30 aa, Artificial Sequence; identical to SEQ ID NO: 42196
  Cyclic GFR-binding peptide
  MOD_RES (1)..(1): Xaa is C or S

SEQ ID NO: 97297 - protein, 34 aa, Artificial Sequence; identical to SEQ ID NO: 10361
  Cyclic GFR-binding peptide
  MOD_RES (31)..(33): Xaa is C or S

SEQ ID NO: 97298 - protein, 29 aa, Artificial Sequence
  Cyclic GFR-binding peptide
  MOD_RES (26)..(28): Xaa is C or S
SPISILYKIGKTPKILKYHYMIVKSXKXS

SEQ ID NO: 97299 - protein, 33 aa, Artificial Sequence; identical to SEQ ID NO: 10365
  Cyclic GFR-binding peptide
  MOD_RES (30)..(32): Xaa is C or S

SEQ ID NO: 97300 - protein, 27 aa, Artificial Sequence
  Cyclic GFR-binding peptide
  MOD_RES (26)..(26): Xaa is C or S
EPISILYLVGRTPKVKFKYEMVVKSXK

SEQ ID NO: 97301 - protein, 39 aa, Artificial Sequence; identical to SEQ ID NO: 10367
  Cyclic GFR-binding peptide
  MOD_RES (4)..(5)..(37)..(39): Xaa is C or S

SEQ ID NO: 97302 - protein, 42 aa, Artificial Sequence; identical to SEQ ID NO: 42202
  Cyclic GFR-binding peptide
  MOD_RES (6)..(7)..(39)..(41): Xaa is C or S

SEQ ID NO: 97303 - protein, 22 aa, Artificial Sequence
  Cyclic GFR-binding peptide
SPISILYKDSANNVVLKYHYDM

SEQ ID NO: 97304 - protein, 35 aa, Artificial Sequence
  Cyclic GFR-binding peptide
  MOD_RES (6)..(7): Xaa is C or S
STPPTXXVPTRLEPISILYLDSANNVVKFKYEDMV

SEQ ID NO: 97305 - protein, 24 aa, Artificial Sequence
  Cyclic GFR-binding peptide
SQDLSATSILYYIGKTPKILRKHR

SEQ ID NO: 97306 - protein, 28 aa, Artificial Sequence
  Cyclic GFR-binding peptide
PTELNAISMLYFDEYDKVVLKKYREMVV

SEQ ID NO: 97307 - protein, 39 aa, Artificial Sequence
  Cyclic GFR-binding peptide
  MOD_RES (4)..(5)..(36)..(38): Xaa is C or S
PSTXXAPVKTEPISMLYLDNGRVLLKFKYEMIVEEXGXL

SEQ ID NO: 97308 - protein, 24 aa, Artificial Sequence
  Cyclic GFR-binding peptide
TSPISMLYKDNGRVLLLKYHYMIV

SEQ ID NO: 97309 - protein, 40 aa, Artificial Sequence
  Cyclic GFR-binding peptide
  MOD_RES (4)..(5)..(37)..(39): Xaa is C or S
PPTXXVPTRLEPISILYLDSANNVVKFKYEDMVVESXGXR

SEQ ID NO: 97310 - protein, 26 aa, Artificial Sequence
  Cyclic GFR-binding peptide
TRLEPISILYLDSANNVVKFKYEDMV

SEQ ID NO: 97311 - protein, 33 aa, Artificial Sequence; identical to SEQ ID NO: 10377
  Cyclic GFR-binding peptide
  MOD_RES (6)..(7): Xaa is C or S

SEQ ID NO: 97312 - protein, 32 aa, Artificial Sequence; identical to SEQ ID NO: 42216
  Cyclic GFR-binding peptide
  MOD_RES (6)..(7): Xaa is C or S

SEQ ID NO: 97313 - protein, 27 aa, Artificial Sequence
  Cyclic GFR-binding peptide
  MOD_RES (1)..(2): Xaa is C or S
XXAPTQLEPISVLYLDDSSNVIKFKYE

SEQ ID NO: 97314 - protein, 29 aa, Artificial Sequence
  Cyclic GFR-binding peptide
  MOD_RES (28)..(28): Xaa is C or S
DLSATSILYYIGKTPKILRKHRMIVKSXK

SEQ ID NO: 97315 - protein, 31 aa, Artificial Sequence
  Cyclic GFR-binding peptide
  MOD_RES (4)..(5): Xaa is C or S
AGPXXTPTKMSPISMLYKNDKQQIILKYHYG

SEQ ID NO: 97316 - protein, 30 aa, Artificial Sequence; identical to SEQ ID NO: 10384
  Cyclic GFR-binding peptide
  MOD_RES (1)..(1): Xaa is C or S

SEQ ID NO: 97317 - protein, 32 aa, Artificial Sequence
  Cyclic GFR-binding peptide
  MOD_RES (32)..(32): Xaa is C or S
VPEKMNAISILYFDENKNVVLKKYRNMTVESX

SEQ ID NO: 97318 - protein, 25 aa, Artificial Sequence
  Cyclic GFR-binding peptide
TSPISMLYKDNGRVLLLKYHYMIVE

SEQ ID NO: 97319 - protein, 30 aa, Artificial Sequence; identical to SEQ ID NO: 39266
  Cyclic GFR-binding peptide
  MOD_RES (30)..(30): Xaa is C or S

SEQ ID NO: 97320 - protein, 29 aa, Artificial Sequence
  Cyclic GFR-binding peptide
  MOD_RES (1)..(2): Xaa is C or S
XXAPVKTSATSMLYYDNGRVLLLRKHRMI

SEQ ID NO: 97321 - protein, 24 aa, Artificial Sequence
  Cyclic GFR-binding peptide
MSATSMLYYNDKQQIILRKHRGMV

SEQ ID NO: 97322 - protein, 20 aa, Artificial Sequence
  Cyclic GFR-binding peptide
EPISILYLDSANNVVKFKYE

SEQ ID NO: 97323 - protein, 27 aa, Artificial Sequence
  Cyclic GFR-binding peptide
PARLEPISILYLDAANNVVKFKYEDMV

SEQ ID NO: 97324 - protein, 32 aa, Artificial Sequence; identical to SEQ ID NO: 10392
  Cyclic GFR-binding peptide
  MOD_RES (30)..(32): Xaa is C or S

SEQ ID NO: 97325 - protein, 24 aa, Artificial Sequence
  Cyclic GFR-binding peptide
TKLNAISILYFDKGVVTYLKKYRG

SEQ ID NO: 97326 - protein, 34 aa, Artificial Sequence
  Cyclic GFR-binding peptide
  MOD_RES (1)..(32)..(34): Xaa is C or S
XVPQDLSPINILYFVGRTPKVYGKIPMVVKSXKX

SEQ ID NO: 97327 - protein, 31 aa, Artificial Sequence; identical to SEQ ID NO: 10394
  Cyclic GFR-binding peptide
  MOD_RES (31)..(31): Xaa is C or S

SEQ ID NO: 97328 - protein, 25 aa, Artificial Sequence
  Cyclic GFR-binding peptide
MEPISILYLDENKNVVKFKYENMTV

SEQ ID NO: 97329 - protein, 23 aa, Artificial Sequence
  Cyclic GFR-binding peptide
TELSPINMLYFDEYDKVVYGKIP

SEQ ID NO: 97330 - protein, 37 aa, Artificial Sequence; identical to SEQ ID NO: 39278
  Cyclic GFR-binding peptide
  MOD_RES (2)..(34)..(36): Xaa is C or S

SEQ ID NO: 97331 - protein, 29 aa, Artificial Sequence
  Cyclic GFR-binding peptide
  MOD_RES (2)..(3): Xaa is C or S
PXXVPQALNAISILYFVGRKPKVLKKYRM

SEQ ID NO: 97332 - protein, 39 aa, Artificial Sequence
  Cyclic GFR-binding peptide
  MOD_RES (6)..(7)..(38): Xaa is C or S
ASASPXXVSQDLSPINILYFIGKTPKIYGKIPMIVKSXK

SEQ ID NO: 97333 - protein, 28 aa, Artificial Sequence
  Cyclic GFR-binding peptide
APTQLEPISVLYLDDSSNVIKFKYENMV

SEQ ID NO: 97334 - protein, 26 aa, Artificial Sequence
  Cyclic GFR-binding peptide
EPISVLYLDSSNNVIKFKYENMVVKA

SEQ ID NO: 97335 - protein, 22 aa, Artificial Sequence
  Cyclic GFR-binding peptide
LSPINILYFDSANNVVYGKIPD

SEQ ID NO: 97336 - protein, 35 aa, Artificial Sequence; identical to SEQ ID NO: 39286
  Cyclic GFR-binding peptide
  MOD_RES (3)..(4): Xaa is C or S

SEQ ID NO: 97337 - protein, 38 aa, Artificial Sequence; identical to SEQ ID NO: 77571
  Cyclic GFR-binding peptide
  MOD_RES (3)..(4)..(35)..(37): Xaa is C or S

SEQ ID NO: 97338 - protein, 33 aa, Artificial Sequence
  Cyclic GFR-binding peptide
  MOD_RES (3)..(4): Xaa is C or S
GPXXTPTKMEPISMLYLNDKQQIIKFKYEGMVV

SEQ ID NO: 97339 - protein, 34 aa, Artificial Sequence; identical to SEQ ID NO: 39288
  Cyclic GFR-binding peptide
  MOD_RES (1)..(2)..(34): Xaa is C or S

SEQ ID NO: 97340 - protein, 29 aa, Artificial Sequence
  Cyclic GFR-binding peptide
  MOD_RES (2)..(3): Xaa is C or S
TXXVPTRLSPINILYFDSANNVVYGKIPD

SEQ ID NO: 97341 - protein, 27 aa, Artificial Sequence
  Cyclic GFR-binding peptide
SQDLNAISILYFIGKTPKILKKYRMIV

SEQ ID NO: 97342 - protein, 25 aa, Artificial Sequence
  Cyclic GFR-binding peptide
NAISILYFIGKTPKILKKYRMIVKS

SEQ ID NO: 97343 - protein, 31 aa, Artificial Sequence
  Cyclic GFR-binding peptide
  MOD_RES (1)..(2): Xaa is C or S
XXVPARLSATSILYYDAANNVVLRKHRDMVV

SEQ ID NO: 97344 - protein, 32 aa, Artificial Sequence; identical to SEQ ID NO: 39292
  Cyclic GFR-binding peptide
  MOD_RES (31)..(31): Xaa is C or S

SEQ ID NO: 97345 - protein, 27 aa, Artificial Sequence
  Cyclic GFR-binding peptide
QALSATSILYYVGRKPKVLRKHRMIVR

SEQ ID NO: 97346 - protein, 34 aa, Artificial Sequence
  Cyclic GFR-binding peptide
  MOD_RES (6)..(7): Xaa is C or S
GIPEPXXVPEKMEPISILYLDENKNVVKFKYENM

SEQ ID NO: 97347 - protein, 37 aa, Artificial Sequence; identical to SEQ ID NO: 10407
  Cyclic GFR-binding peptide
  MOD_RES (6)..(7): Xaa is C or S

SEQ ID NO: 97348 - protein, 37 aa, Artificial Sequence
  Cyclic GFR-binding peptide
  MOD_RES (1)..(2)..(34)..(36): Xaa is C or S
XXVPTRLSATSILYYDSANNVVLRKHRDMVVESXGXR

SEQ ID NO: 97349 - protein, 25 aa, Artificial Sequence
  Cyclic GFR-binding peptide
LSPISILYKDAANNVVLKYHYDMVV

SEQ ID NO: 97350 - protein, 33 aa, Artificial Sequence; identical to SEQ ID NO: 42251
  Cyclic GFR-binding peptide
  MOD_RES (2)..(3): Xaa is C or S

SEQ ID NO: 97351 - protein, 37 aa, Artificial Sequence; identical to SEQ ID NO: 39295
  Cyclic GFR-binding peptide
  MOD_RES (6)..(6): Xaa is C or S

SEQ ID NO: 97352 - protein, 23 aa, Artificial Sequence
  Cyclic GFR-binding peptide
TKLEPISVLYLDDSSNVIKFKYE

SEQ ID NO: 97353 - protein, 38 aa, Artificial Sequence
  Cyclic GFR-binding peptide
  MOD_RES (2)..(3)..(35)..(37): Xaa is C or S
PXXVPEKMSPISILYKDENKNVVLKYHYNMTVESXAXR

SEQ ID NO: 97354 - protein, 35 aa, Artificial Sequence; identical to SEQ ID NO: 39300
  Cyclic GFR-binding peptide
  MOD_RES (3)..(4): Xaa is C or S

SEQ ID NO: 97355 - protein, 38 aa, Artificial Sequence; identical to SEQ ID NO: 42256
  Cyclic GFR-binding peptide
  MOD_RES (3)..(35)..(37): Xaa is C or S

SEQ ID NO: 97356 - protein, 32 aa, Artificial Sequence; identical to SEQ ID NO: 10413
  Cyclic GFR-binding peptide
  MOD_RES (1)..(2): Xaa is C or S

SEQ ID NO: 97357 - protein, 31 aa, Artificial Sequence; identical to SEQ ID NO: 10414
  Cyclic GFR-binding peptide
  MOD_RES (5)..(6): Xaa is C or S

SEQ ID NO: 97358 - protein, 29 aa, Artificial Sequence
  Cyclic GFR-binding peptide
  MOD_RES (29)..(29): Xaa is C or S
VKTSATSMLYYDNGRVLLLRKHRMIVEEX

SEQ ID NO: 97359 - protein, 26 aa, Artificial Sequence
  Cyclic GFR-binding peptide
APTQLSPINVLYFDDSSNVIYGKIPN

SEQ ID NO: 97360 - protein, 31 aa, Artificial Sequence; identical to SEQ ID NO: 42261
  Cyclic GFR-binding peptide
  MOD_RES (29)..(31): Xaa is C or S

SEQ ID NO: 97361 - protein, 34 aa, Artificial Sequence; identical to SEQ ID NO: 42267
  Cyclic GFR-binding peptide
  MOD_RES (31)..(33): Xaa is C or S

SEQ ID NO: 97362 - protein, 26 aa, Artificial Sequence
  Cyclic GFR-binding peptide
  MOD_RES (1)..(1): Xaa is C or S
XVPTKLSATSVLYYDDMGVPTLRKHR

SEQ ID NO: 97363 - protein, 33 aa, Artificial Sequence; identical to SEQ ID NO: 39310
  Cyclic GFR-binding peptide
  MOD_RES (4)..(5): Xaa is C or S

SEQ ID NO: 97364 - protein, 36 aa, Artificial Sequence; identical to SEQ ID NO: 10426
  Cyclic GFR-binding peptide
  MOD_RES (5)..(6): Xaa is C or S

SEQ ID NO: 97365 - protein, 38 aa, Artificial Sequence; identical to SEQ ID NO: 10427
  Cyclic GFR-binding peptide
  MOD_RES (4)..(5)..(37): Xaa is C or S

SEQ ID NO: 97366 - protein, 33 aa, Artificial Sequence
  Cyclic GFR-binding peptide
  MOD_RES (32)..(32): Xaa is C or S
VPEKMSPINILYFDENKNVVYGKIPNMTVESXA

SEQ ID NO: 97367 - protein, 26 aa, Artificial Sequence
  Cyclic GFR-binding peptide
ARLSATSILYYDAANNVVLRKHRDMV

SEQ ID NO: 97368 - protein, 32 aa, Artificial Sequence; identical to SEQ ID NO: 39318
  Cyclic GFR-binding peptide
  MOD_RES (32)..(32): Xaa is C or S

SEQ ID NO: 97369 - protein, 25 aa, Artificial Sequence
  Cyclic GFR-binding peptide
EPISILYLDAANNVVKFKYEDMVVE

SEQ ID NO: 97370 - protein, 36 aa, Artificial Sequence; identical to SEQ ID NO: 10429
  Cyclic GFR-binding peptide
  MOD_RES (4)..(5): Xaa is C or S

SEQ ID NO: 97371 - protein, 37 aa, Artificial Sequence
  Cyclic GFR-binding peptide
  MOD_RES (5)..(6)..(37): Xaa is C or S
VPSTXXAPVKTEPISMLYLDNGRVLLKFKYEMIVEEX

SEQ ID NO: 97372 - protein, 33 aa, Artificial Sequence; identical to SEQ ID NO: 10431
  Cyclic GFR-binding peptide
  MOD_RES (6)..(6): Xaa is C or S

SEQ ID NO: 97373 - protein, 32 aa, Artificial Sequence; identical to SEQ ID NO: 10433
  Cyclic GFR-binding peptide
  MOD_RES (31)..(31): Xaa is C or S

SEQ ID NO: 97374 - protein, 25 aa, Artificial Sequence
  Cyclic GFR-binding peptide
VPQDLSPINILYFVGRTPKVYGKIP

SEQ ID NO: 97375 - protein, 32 aa, Artificial Sequence; identical to SEQ ID NO: 10437
  Cyclic GFR-binding peptide
  MOD_RES (6)..(7): Xaa is C or S

SEQ ID NO: 97376 - protein, 31 aa, Artificial Sequence; identical to SEQ ID NO: 10438
  Cyclic GFR-binding peptide
  MOD_RES (30)..(30): Xaa is C or S

SEQ ID NO: 97377 - protein, 36 aa, Artificial Sequence
  Cyclic GFR-binding peptide
  MOD_RES (6)..(7): Xaa is C or S
ASAAPXXVPQALSPINILYFVGRKPKVYGKIPMIVR

SEQ ID NO: 97378 - protein, 30 aa, Artificial Sequence; identical to SEQ ID NO: 10441
  Cyclic GFR-binding peptide
  MOD_RES (1)..(2): Xaa is C or S

SEQ ID NO: 97379 - protein, 34 aa, Artificial Sequence; identical to SEQ ID NO: 10442
  Cyclic GFR-binding peptide
  MOD_RES (3)..(4): Xaa is C or S

SEQ ID NO: 97380 - protein, 31 aa, Artificial Sequence; identical to SEQ ID NO: 42289
  Cyclic GFR-binding peptide
  MOD_RES (2)..(3): Xaa is C or S

SEQ ID NO: 97381 - protein, 33 aa, Artificial Sequence
  Cyclic GFR-binding peptide
  MOD_RES (6)..(7): Xaa is C or S
GIPEPXXVPEKMSPISILYKDENKNVVLKYHYN

SEQ ID NO: 97382 - protein, 31 aa, Artificial Sequence; identical to SEQ ID NO: 10444
  Cyclic GFR-binding peptide
  MOD_RES (1)..(2): Xaa is C or S

SEQ ID NO: 97383 - protein, 31 aa, Artificial Sequence; identical to SEQ ID NO: 10446
  Cyclic GFR-binding peptide
  MOD_RES (5)..(5): Xaa is C or S

SEQ ID NO: 97384 - protein, 33 aa, Artificial Sequence; identical to SEQ ID NO: 39334
  Cyclic GFR-binding peptide
  MOD_RES (31)..(33): Xaa is C or S

SEQ ID NO: 97385 - protein, 26 aa, Artificial Sequence
  Cyclic GFR-binding peptide
TSPISMLYKDNGRVLLLKYHYMIVEE

SEQ ID NO: 97386 - protein, 34 aa, Artificial Sequence; identical to SEQ ID NO: 39336
  Cyclic GFR-binding peptide
  MOD_RES (1)..(33): Xaa is C or S

SEQ ID NO: 97387 - protein, 26 aa, Artificial Sequence
  Cyclic GFR-binding peptide
  MOD_RES (1)..(1): Xaa is C or S
XAPTQLSATSVLYYDDSSNVILRKHR

SEQ ID NO: 97388 - protein, 33 aa, Artificial Sequence; identical to SEQ ID NO: 42302
  Cyclic GFR-binding peptide
  MOD_RES (1)..(33): Xaa is C or S

SEQ ID NO: 97389 - protein, 23 aa, Artificial Sequence
  Cyclic GFR-binding peptide
EPISMLYLDENEKVVKFKYEDMV

SEQ ID NO: 97390 - protein, 35 aa, Artificial Sequence; identical to SEQ ID NO: 42305
  Cyclic GFR-binding peptide
  MOD_RES (2)..(3)..(35): Xaa is C or S

SEQ ID NO: 97391 - protein, 25 aa, Artificial Sequence
  Cyclic GFR-binding peptide
APVKTSATSMLYYDNGRVLLLRKHR

SEQ ID NO: 97392 - protein, 34 aa, Artificial Sequence; identical to SEQ ID NO: 39341
  Cyclic GFR-binding peptide
  MOD_RES (2)..(3)..(34): Xaa is C or S

SEQ ID NO: 97393 - protein, 25 aa, Artificial Sequence
  Cyclic GFR-binding peptide
PTELSPISMLYKDENEKVVLKYHYD

SEQ ID NO: 97394 - protein, 28 aa, Artificial Sequence
  Cyclic GFR-binding peptide
  MOD_RES (27)..(27): Xaa is C or S
SATSILYYDKGVVTYLRKHRGMAVSEXG

SEQ ID NO: 97395 - protein, 30 aa, Artificial Sequence
  Cyclic GFR-binding peptide
  MOD_RES (3)..(4): Xaa is C or S
PTXXVPTRLSPISILYKDSANNVVLKYHYD

SEQ ID NO: 97396 - protein, 34 aa, Artificial Sequence; identical to SEQ ID NO: 10461
  Cyclic GFR-binding peptide
  MOD_RES (2)..(3): Xaa is C or S

SEQ ID NO: 97397 - protein, 22 aa, Artificial Sequence
  Cyclic GFR-binding peptide
KLSPISVLYKDSSNNVILKYHY

SEQ ID NO: 97398 - protein, 33 aa, Artificial Sequence; identical to SEQ ID NO: 39351
  Cyclic GFR-binding peptide
  MOD_RES (2)..(3): Xaa is C or S

SEQ ID NO: 97399 - protein, 32 aa, Artificial Sequence
  Cyclic GFR-binding peptide
  MOD_RES (6)..(7): Xaa is C or S
ASAAPXXVPQALSPINILYFVGRKPKVYGKIP

SEQ ID NO: 97400 - protein, 29 aa, Artificial Sequence
  Cyclic GFR-binding peptide
PTELEPISMLYLDENEKVVKFKYEDMVVE

SEQ ID NO: 97401 - protein, 32 aa, Artificial Sequence
  Cyclic GFR-binding peptide
  MOD_RES (6)..(7): Xaa is C or S
GSAGPXXTPTKMSATSMLYYNDKQQIILRKHR

SEQ ID NO: 97402 - protein, 32 aa, Artificial Sequence
  Cyclic GFR-binding peptide
  MOD_RES (1)..(2): Xaa is C or S
XXVPARLSATSILYYDAANNVVLRKHRDMVVE

SEQ ID NO: 97403 - protein, 32 aa, Artificial Sequence; identical to SEQ ID NO: 77596
  Cyclic GFR-binding peptide
  MOD_RES (1)..(2): Xaa is C or S

SEQ ID NO: 97404 - protein, 31 aa, Artificial Sequence
  Cyclic GFR-binding peptide
  MOD_RES (1)..(1): Xaa is C or S
XAPVKTSPISMLYKDNGRVLLLKYHYMIVEE

SEQ ID NO: 97405 - protein, 25 aa, Artificial Sequence
  Cyclic GFR-binding peptide
LSATSILYYVGRTPKVLRKHRMVVK

SEQ ID NO: 97406 - protein, 37 aa, Artificial Sequence
  Cyclic GFR-binding peptide
  MOD_RES (3)..(4)..(36): Xaa is C or S
EPXXVPEKMSPINILYFDENKNVVYGKIPNMTVESXA

SEQ ID NO: 97407 - protein, 39 aa, Artificial Sequence; identical to SEQ ID NO: 77597
  Cyclic GFR-binding peptide
  MOD_RES (4)..(5)..(37)..(39): Xaa is C or S

SEQ ID NO: 97408 - protein, 41 aa, Artificial Sequence; identical to SEQ ID NO: 10472
  Cyclic GFR-binding peptide
  MOD_RES (5)..(6)..(38)..(40): Xaa is C or S

SEQ ID NO: 97409 - protein, 41 aa, Artificial Sequence; identical to SEQ ID NO: 42324
  Cyclic GFR-binding peptide
  MOD_RES (5)..(6)..(39)..(41): Xaa is C or S

SEQ ID NO: 97410 - protein, 26 aa, Artificial Sequence
  Cyclic GFR-binding peptide
VPQALNAISILYFVGRKPKVLKKYRM

SEQ ID NO: 97411 - protein, 21 aa, Artificial Sequence
  Cyclic GFR-binding peptide
SPISILYKVGRTPKVLKYHYM

SEQ ID NO: 97412 - protein, 22 aa, Artificial Sequence
  Cyclic GFR-binding peptide
SPINVLYFDDMGVPTYGKIPEG

SEQ ID NO: 97413 - protein, 32 aa, Artificial Sequence; identical to SEQ ID NO: 39366
  Cyclic GFR-binding peptide
  MOD_RES (2)..(3): Xaa is C or S

SEQ ID NO: 97414 - protein, 22 aa, Artificial Sequence
  Cyclic GFR-binding peptide
LSPISILYKIGKTPKILKYHYM

SEQ ID NO: 97415 - protein, 36 aa, Artificial Sequence; identical to SEQ ID NO: 39369
  Cyclic GFR-binding peptide
  MOD_RES (2)..(3)..(34)..(36): Xaa is C or S

SEQ ID NO: 97416 - protein, 31 aa, Artificial Sequence; identical to SEQ ID NO: 42336
  Cyclic GFR-binding peptide
  MOD_RES (1)..(2): Xaa is C or S

SEQ ID NO: 97417 - protein, 27 aa, Artificial Sequence
  Cyclic GFR-binding peptide
MSPISMLYKNDKQQIILKYHYGMVVDR

SEQ ID NO: 97418 - protein, 32 aa, Artificial Sequence; identical to SEQ ID NO: 10485
  Cyclic GFR-binding peptide
  MOD_RES (6)..(7): Xaa is C or S

SEQ ID NO: 97419 - protein, 28 aa, Artificial Sequence
  Cyclic GFR-binding peptide
  MOD_RES (1)..(2): Xaa is C or S
XXVPTKLNAISILYFDKGVVTYLKKYRG

SEQ ID NO: 97420 - protein, 38 aa, Artificial Sequence; identical to SEQ ID NO: 20632
  Cyclic GFR-binding peptide
  MOD_RES (4)..(5)..(37): Xaa is C or S

SEQ ID NO: 97421 - protein, 26 aa, Artificial Sequence
  Cyclic GFR-binding peptide
  MOD_RES (1)..(1): Xaa is C or S
XVPQDLSPISILYKVGRTPKVLKYHY

SEQ ID NO: 97422 - protein, 23 aa, Artificial Sequence
  Cyclic GFR-binding peptide
TQLSATSVLYYDDSSNVILRKHR

SEQ ID NO: 97423 - protein, 25 aa, Artificial Sequence
  Cyclic GFR-binding peptide
LSPINVLYFDDSSNVIYGKIPNMVV

SEQ ID NO: 97424 - protein, 26 aa, Artificial Sequence
  Cyclic GFR-binding peptide
NAISILYFDKGVVTYLKKYRGMAVSE

SEQ ID NO: 97425 - protein, 32 aa, Artificial Sequence; identical to SEQ ID NO: 42347
  Cyclic GFR-binding peptide
  MOD_RES (5)..(6): Xaa is C or S

SEQ ID NO: 97426 - protein, 31 aa, Artificial Sequence; identical to SEQ ID NO: 39377
  Cyclic GFR-binding peptide
  MOD_RES (31)..(31): Xaa is C or S

SEQ ID NO: 97427 - protein, 28 aa, Artificial Sequence
  Cyclic GFR-binding peptide
  MOD_RES (2)..(3): Xaa is C or S
AXXVPTKLSPINVLYFDDMGVPTYGKIP

SEQ ID NO: 97428 - protein, 24 aa, Artificial Sequence
  Cyclic GFR-binding peptide
PTKLEPISVLYLDSSNNVIKFKYE

SEQ ID NO: 97429 - protein, 23 aa, Artificial Sequence
  Cyclic GFR-binding peptide
QDLSATSILYYIGKTPKILRKHR

SEQ ID NO: 97430 - protein, 32 aa, Artificial Sequence; identical to SEQ ID NO: 10490
  Cyclic GFR-binding peptide
  MOD_RES (1)..(2): Xaa is C or S

SEQ ID NO: 97431 - protein, 33 aa, Artificial Sequence; identical to SEQ ID NO: 39381
  Cyclic GFR-binding peptide
  MOD_RES (1)..(2)..(33): Xaa is C or S

SEQ ID NO: 97432 - protein, 32 aa, Artificial Sequence; identical to SEQ ID NO: 10492
  Cyclic GFR-binding peptide
  MOD_RES (5)..(6): Xaa is C or S

SEQ ID NO: 97433 - protein, 32 aa, Artificial Sequence; identical to SEQ ID NO: 10495
  Cyclic GFR-binding peptide
  MOD_RES (1)..(32): Xaa is C or S

SEQ ID NO: 97434 - protein, 38 aa, Artificial Sequence
  Cyclic GFR-binding peptide
  MOD_RES (3)..(4)..(36)..(38): Xaa is C or S
PTXXVPTRLSPISILYKDSANNVVLKYHYDMVVESXGX

SEQ ID NO: 97435 - protein, 20 aa, Artificial Sequence
  Cyclic GFR-binding peptide
SATSMLYYDEYDKVVLRKHR

SEQ ID NO: 97436 - protein, 32 aa, Artificial Sequence; identical to SEQ ID NO: 42352
  Cyclic GFR-binding peptide
  MOD_RES (1)..(1): Xaa is C or S

SEQ ID NO: 97437 - protein, 26 aa, Artificial Sequence
  Cyclic GFR-binding peptide
PQALSATSILYYVGRKPKVLRKHRMI

SEQ ID NO: 97438 - protein, 35 aa, Artificial Sequence
  Cyclic GFR-binding peptide
  MOD_RES (6)..(7): Xaa is C or S
GIPEPXXVPEKMSPISILYKDENKNVVLKYHYNMT

SEQ ID NO: 97439 - protein, 31 aa, Artificial Sequence; identical to SEQ ID NO: 42366
  Cyclic GFR-binding peptide
  MOD_RES (28)..(30): Xaa is C or S

SEQ ID NO: 97440 - protein, 29 aa, Artificial Sequence
  Cyclic GFR-binding peptide
  MOD_RES (1)..(1): Xaa is C or S
XVSQDLNAISILYFIGKTPKILKKYRMIV

SEQ ID NO: 97441 - protein, 26 aa, Artificial Sequence
  Cyclic GFR-binding peptide
RLSPINILYFDAANNVVYGKIPDMVV

SEQ ID NO: 97442 - protein, 28 aa, Artificial Sequence
  Cyclic GFR-binding peptide
PTQLSPINVLYFDDSSNVIYGKIPNMVV

SEQ ID NO: 97443 - protein, 35 aa, Artificial Sequence; identical to SEQ ID NO: 10504
  Cyclic GFR-binding peptide
  MOD_RES (4)..(5): Xaa is C or S

SEQ ID NO: 97444 - protein, 28 aa, Artificial Sequence
  Cyclic GFR-binding peptide
  MOD_RES (27)..(27): Xaa is C or S
SATSMLYYNDKQQIILRKHRGMVVDRXG

SEQ ID NO: 97445 - protein, 32 aa, Artificial Sequence; identical to SEQ ID NO: 39398
  Cyclic GFR-binding peptide
  MOD_RES (30)..(32): Xaa is C or S

SEQ ID NO: 97446 - protein, 30 aa, Artificial Sequence; identical to SEQ ID NO: 10505
  Cyclic GFR-binding peptide

SEQ ID NO: 97447 - protein, 30 aa, Artificial Sequence; identical to SEQ ID NO: 10511
  Cyclic GFR-binding peptide
  MOD_RES (2)..(2): Xaa is C or S

SEQ ID NO: 97448 - protein, 34 aa, Artificial Sequence; identical to SEQ ID NO: 39403
  Cyclic GFR-binding peptide
  MOD_RES (5)..(6): Xaa is C or S

SEQ ID NO: 97449 - protein, 27 aa, Artificial Sequence
  Cyclic GFR-binding peptide
VPQALSPISILYKVGRKPKVLKYHYMI

SEQ ID NO: 97450 - protein, 28 aa, Artificial Sequence
  Cyclic GFR-binding peptide
ELEPISMLYLDEYDKVVKFKYEEMVVEG

SEQ ID NO: 97451 - protein, 32 aa, Artificial Sequence
  Cyclic GFR-binding peptide
  MOD_RES (2)..(3): Xaa is C or S
TXXAPVKTSATSMLYYDNGRVLLLRKHRMIVE

SEQ ID NO: 97452 - protein, 33 aa, Artificial Sequence
  Cyclic GFR-binding peptide
  MOD_RES (30)..(32): Xaa is C or S
EKMSPINILYFDENKNVVYGKIPNMTVESXAXR

SEQ ID NO: 97453 - protein, 29 aa, Artificial Sequence
  Cyclic GFR-binding peptide
  MOD_RES (1)..(2): Xaa is C or S
XXVPEKMSPINILYFDENKNVVYGKIPNM

SEQ ID NO: 97454 - protein, 29 aa, Artificial Sequence
  Cyclic GFR-binding peptide
PARLSPISILYKDAANNVVLKYHYDMVVE

SEQ ID NO: 97455 - protein, 29 aa, Artificial Sequence
  Cyclic GFR-binding peptide
  MOD_RES (27)..(29): Xaa is C or S
SPINILYFDAANNVVYGKIPDMVVEAXGX

SEQ ID NO: 97456 - protein, 24 aa, Artificial Sequence
  Cyclic GFR-binding peptide
SPINILYFDSANNVVYGKIPDMVV

SEQ ID NO: 97457 - protein, 34 aa, Artificial Sequence; identical to SEQ ID NO: 42386
  Cyclic GFR-binding peptide
  MOD_RES (1)..(2)..(34): Xaa is C or S

SEQ ID NO: 97458 - protein, 33 aa, Artificial Sequence; identical to SEQ ID NO: 42388
  Cyclic GFR-binding peptide
  MOD_RES (6)..(7): Xaa is C or S

SEQ ID NO: 97459 - protein, 31 aa, Artificial Sequence; identical to SEQ ID NO: 39422
  Cyclic GFR-binding peptide
  MOD_RES (2)..(3): Xaa is C or S

SEQ ID NO: 97460 - protein, 37 aa, Artificial Sequence; identical to SEQ ID NO: 10523
  Cyclic GFR-binding peptide
  MOD_RES (4)..(5)..(37): Xaa is C or S

SEQ ID NO: 97461 - protein, 25 aa, Artificial Sequence
  Cyclic GFR-binding peptide
QDLSPISILYKVGRTPKVLKYHYMV

SEQ ID NO: 97462 - protein, 36 aa, Artificial Sequence; identical to SEQ ID NO: 39425
  Cyclic GFR-binding peptide
  MOD_RES (3)..(4)..(35): Xaa is C or S

SEQ ID NO: 97463 - protein, 24 aa, Artificial Sequence
  Cyclic GFR-binding peptide
ALSATSILYYVGRKPKVLRKHRMI

SEQ ID NO: 97464 - protein, 37 aa, Artificial Sequence; identical to SEQ ID NO: 39426
  Cyclic GFR-binding peptide
  MOD_RES (4)..(5)..(37): Xaa is C or S

SEQ ID NO: 97465 - protein, 29 aa, Artificial Sequence
  Cyclic GFR-binding peptide
PTKLSPINVLYFDDMGVPTYGKIPEGMSV

SEQ ID NO: 97466 - protein, 40 aa, Artificial Sequence; identical to SEQ ID NO: 10528
  Cyclic GFR-binding peptide
  MOD_RES (5)..(6)..(38)..(40): Xaa is C or S

SEQ ID NO: 97467 - protein, 27 aa, Artificial Sequence
  Cyclic GFR-binding peptide
PTKLNAISVLYFDDMGVPTLKKYREGM

SEQ ID NO: 97468 - protein, 23 aa, Artificial Sequence
  Cyclic GFR-binding peptide
DLSATSILYYIGKTPKILRKHRM

SEQ ID NO: 97469 - protein, 37 aa, Artificial Sequence; identical to SEQ ID NO: 42398
  Cyclic GFR-binding peptide
  MOD_RES (1)..(2)..(34)..(36): Xaa is C or S

SEQ ID NO: 97470 - protein, 26 aa, Artificial Sequence
  Cyclic GFR-binding peptide
LNAISILYFIGKTPKILKKYRMIVKS

SEQ ID NO: 97471 - protein, 32 aa, Artificial Sequence
  Cyclic GFR-binding peptide
  MOD_RES (1)..(2): Xaa is C or S
XXVSQDLSPINILYFIGKTPKIYGKIPMIVKS

SEQ ID NO: 97472 - protein, 31 aa, Artificial Sequence; identical to SEQ ID NO: 42404
  Cyclic GFR-binding peptide
  MOD_RES (3)..(4): Xaa is C or S

SEQ ID NO: 97473 - protein, 29 aa, Artificial Sequence
  Cyclic GFR-binding peptide
  MOD_RES (1)..(2): Xaa is C or S
XXVSQDLSATSILYYIGKTPKILRKHRMI

SEQ ID NO: 97474 - protein, 38 aa, Artificial Sequence; identical to SEQ ID NO: 42413
  Cyclic GFR-binding peptide
  MOD_RES (7)..(7): Xaa is C or S

SEQ ID NO: 97475 - protein, 34 aa, Artificial Sequence; identical to SEQ ID NO: 42416
  Cyclic GFR-binding peptide
  MOD_RES (32)..(34): Xaa is C or S

SEQ ID NO: 97476 - protein, 27 aa, Artificial Sequence
  Cyclic GFR-binding peptide
KMEPISMLYLNDKQQIIKFKYEGMVVD

SEQ ID NO: 97477 - protein, 28 aa, Artificial Sequence
  Cyclic GFR-binding peptide
  MOD_RES (27)..(27): Xaa is C or S
LSPINILYFVGRKPKVYGKIPMIVRSXK

SEQ ID NO: 97478 - protein, 36 aa, Artificial Sequence; identical to SEQ ID NO: 10538
  Cyclic GFR-binding peptide
  MOD_RES (7)..(7): Xaa is C or S

SEQ ID NO: 97479 - protein, 28 aa, Artificial Sequence
  Cyclic GFR-binding peptide
  MOD_RES (1)..(1): Xaa is C or S
XVSQDLSATSILYYIGKTPKILRKHRMI

SEQ ID NO: 97480 - protein, 31 aa, Artificial Sequence; identical to SEQ ID NO: 10540
  Cyclic GFR-binding peptide
  MOD_RES (2)..(3): Xaa is C or S

SEQ ID NO: 97481 - protein, 34 aa, Artificial Sequence
  Cyclic GFR-binding peptide
  MOD_RES (3)..(4): Xaa is C or S
SPXXVSQDLSPINILYFIGKTPKIYGKIPMIVKS

SEQ ID NO: 97482 - protein, 33 aa, Artificial Sequence; identical to SEQ ID NO: 10541
  Cyclic GFR-binding peptide
  MOD_RES (3)..(4): Xaa is C or S

SEQ ID NO: 97483 - protein, 29 aa, Artificial Sequence
  Cyclic GFR-binding peptide
  MOD_RES (28)..(28): Xaa is C or S
EPISVLYLDDMGVPTKFKYEEGMSVAEXG

SEQ ID NO: 97484 - protein, 32 aa, Artificial Sequence
  Cyclic GFR-binding peptide
  MOD_RES (32)..(32): Xaa is C or S
VPTKLSATSILYYDKGVVTYLRKHRGMAVSEX

SEQ ID NO: 97485 - protein, 30 aa, Artificial Sequence
  Cyclic GFR-binding peptide
  MOD_RES (3)..(4): Xaa is C or S
ASXXVPARLSATSILYYDAANNVVLRKHRD

SEQ ID NO: 97486 - protein, 30 aa, Artificial Sequence
  Cyclic GFR-binding peptide
TPTKMSPISMLYKNDKQQIILKYHYGMVVD

SEQ ID NO: 97487 - protein, 32 aa, Artificial Sequence; identical to SEQ ID NO: 10545
  Cyclic GFR-binding peptide
  MOD_RES (30)..(32): Xaa is C or S

SEQ ID NO: 97488 - protein, 22 aa, Artificial Sequence
  Cyclic GFR-binding peptide
DLSPINILYFIGKTPKIYGKIP

SEQ ID NO: 97489 - protein, 32 aa, Artificial Sequence; identical to SEQ ID NO: 39447
  Cyclic GFR-binding peptide
  MOD_RES (3)..(4): Xaa is C or S

SEQ ID NO: 97490 - protein, 34 aa, Artificial Sequence; identical to SEQ ID NO: 10547
  Cyclic GFR-binding peptide
  MOD_RES (2)..(3)..(34): Xaa is C or S

SEQ ID NO: 97491 - protein, 32 aa, Artificial Sequence; identical to SEQ ID NO: 10548
  Cyclic GFR-binding peptide
  MOD_RES (6)..(7): Xaa is C or S

SEQ ID NO: 97492 - protein, 25 aa, Artificial Sequence
  Cyclic GFR-binding peptide
QALEPISILYLVGRKPKVKFKYEMI

SEQ ID NO: 97493 - protein, 35 aa, Artificial Sequence
  Cyclic GFR-binding peptide
  MOD_RES (3)..(4): Xaa is C or S
PTXXVPTRLEPISILYLDSANNVVKFKYEDMVVES

SEQ ID NO: 97494 - protein, 28 aa, Artificial Sequence
  Cyclic GFR-binding peptide
  MOD_RES (3)..(3): Xaa is C or S
PTXAPTKLEPISVLYLDDSSNVIKFKYE

SEQ ID NO: 97495 - protein, 33 aa, Artificial Sequence; identical to SEQ ID NO: 10555
  Cyclic GFR-binding peptide
  MOD_RES (1)..(33): Xaa is C or S

SEQ ID NO: 97496 - protein, 32 aa, Artificial Sequence; identical to SEQ ID NO: 10556
  Cyclic GFR-binding peptide
  MOD_RES (5)..(6): Xaa is C or S

SEQ ID NO: 97497 - protein, 34 aa, Artificial Sequence; identical to SEQ ID NO: 77641
  Cyclic GFR-binding peptide
  MOD_RES (1)..(33): Xaa is C or S

SEQ ID NO: 97498 - protein, 27 aa, Artificial Sequence
  Cyclic GFR-binding peptide
  MOD_RES (1)..(1): Xaa is C or S
XVSQDLSPISILYKIGKTPKILKYHYM

SEQ ID NO: 97499 - protein, 22 aa, Artificial Sequence
  Cyclic GFR-binding peptide
SPINMLYFDNGRVLLYGKIPMI

SEQ ID NO: 97500 - protein, 22 aa, Artificial Sequence
  Cyclic GFR-binding peptide
RLSATSILYYDSANNVVLRKHR

SEQ ID NO: 97501 - protein, 27 aa, Artificial Sequence
  Cyclic GFR-binding peptide
  MOD_RES (1)..(2): Xaa is C or S
XXAPTKLSATSVLYYDDSSNVILRKHR

SEQ ID NO: 97502 - protein, 33 aa, Artificial Sequence
  Cyclic GFR-binding peptide
  MOD_RES (32)..(32): Xaa is C or S
TPTKMEPISMLYLNDKQQIIKFKYEGMVVDRXG

SEQ ID NO: 97503 - protein, 29 aa, Artificial Sequence
  Cyclic GFR-binding peptide
  MOD_RES (1)..(1): Xaa is C or S
XVPQALSPISILYKVGRKPKVLKYHYMIV

SEQ ID NO: 97504 - protein, 26 aa, Artificial Sequence
  Cyclic GFR-binding peptide
PARLSPINILYFDAANNVVYGKIPDM

SEQ ID NO: 97505 - protein, 21 aa, Artificial Sequence
  Cyclic GFR-binding peptide
NAISMLYFDNGRVLLLKKYRM

SEQ ID NO: 97506 - protein, 34 aa, Artificial Sequence; identical to SEQ ID NO: 39469
  Cyclic GFR-binding peptide
  MOD_RES (4)..(5): Xaa is C or S

SEQ ID NO: 97507 - protein, 42 aa, Artificial Sequence; identical to SEQ ID NO: 39470
  Cyclic GFR-binding peptide
  MOD_RES (7)..(39)..(41): Xaa is C or S

SEQ ID NO: 97508 - protein, 34 aa, Artificial Sequence
  Cyclic GFR-binding peptide
  MOD_RES (4)..(5): Xaa is C or S
ASPXXVSQDLSPINILYFIGKTPKIYGKIPMIVK

SEQ ID NO: 97509 - protein, 31 aa, Artificial Sequence; identical to SEQ ID NO: 10563
  Cyclic GFR-binding peptide
  MOD_RES (29)..(31): Xaa is C or S

SEQ ID NO: 97510 - protein, 27 aa, Artificial Sequence
  Cyclic GFR-binding peptide
  MOD_RES (27)..(27): Xaa is C or S
LSPINILYFVGRKPKVYGKIPMIVRSX

SEQ ID NO: 97511 - protein, 32 aa, Artificial Sequence; identical to SEQ ID NO: 10564
  Cyclic GFR-binding peptide
  MOD_RES (3)..(4): Xaa is C or S

SEQ ID NO: 97512 - protein, 34 aa, Artificial Sequence; identical to SEQ ID NO: 20699
  Cyclic GFR-binding peptide
  MOD_RES (1)..(33): Xaa is C or S

SEQ ID NO: 97513 - protein, 31 aa, Artificial Sequence; identical to SEQ ID NO: 39476
  Cyclic GFR-binding peptide
  MOD_RES (31)..(31): Xaa is C or S

SEQ ID NO: 97514 - protein, 40 aa, Artificial Sequence; identical to SEQ ID NO: 10568
  Cyclic GFR-binding peptide
  MOD_RES (4)..(5)..(37)..(39): Xaa is C or S

SEQ ID NO: 97515 - protein, 35 aa, Artificial Sequence; identical to SEQ ID NO: 10569
  Cyclic GFR-binding peptide
  MOD_RES (6)..(7): Xaa is C or S

SEQ ID NO: 97516 - protein, 28 aa, Artificial Sequence
  Cyclic GFR-binding peptide
KMNAISMLYFNDKQQIILKKYRGMVVDR

SEQ ID NO: 97517 - protein, 39 aa, Artificial Sequence; identical to SEQ ID NO: 10570
  Cyclic GFR-binding peptide
  MOD_RES (3)..(4)..(36)..(38): Xaa is C or S

SEQ ID NO: 97518 - protein, 31 aa, Artificial Sequence; identical to SEQ ID NO: 39479
  Cyclic GFR-binding peptide
  MOD_RES (31)..(31): Xaa is C or S

SEQ ID NO: 97519 - protein, 33 aa, Artificial Sequence; identical to SEQ ID NO: 77648
  Cyclic GFR-binding peptide
  MOD_RES (3)..(4): Xaa is C or S

SEQ ID NO: 97520 - protein, 30 aa, Artificial Sequence; identical to SEQ ID NO: 39487
  Cyclic GFR-binding peptide

SEQ ID NO: 97521 - protein, 32 aa, Artificial Sequence; identical to SEQ ID NO: 39488
  Cyclic GFR-binding peptide
  MOD_RES (31)..(31): Xaa is C or S

SEQ ID NO: 97522 - protein, 30 aa, Artificial Sequence; identical to SEQ ID NO: 39493
  Cyclic GFR-binding peptide
  MOD_RES (1)..(2): Xaa is C or S

SEQ ID NO: 97523 - protein, 39 aa, Artificial Sequence; identical to SEQ ID NO: 39494
  Cyclic GFR-binding peptide
  MOD_RES (4)..(5)..(36)..(38): Xaa is C or S

SEQ ID NO: 97524 - protein, 33 aa, Artificial Sequence
  Cyclic GFR-binding peptide
  MOD_RES (30)..(32): Xaa is C or S
PQALSPINILYFVGRKPKVYGKIPMIVRSXKXS

SEQ ID NO: 97525 - protein, 29 aa, Artificial Sequence
  Cyclic GFR-binding peptide
  MOD_RES (28)..(28): Xaa is C or S
LSPINVLYFDDSSNVIYGKIPNMVVRSXG

SEQ ID NO: 97526 - protein, 38 aa, Artificial Sequence; identical to SEQ ID NO: 39497
  Cyclic GFR-binding peptide
  MOD_RES (5)..(6): Xaa is C or S

SEQ ID NO: 97527 - protein, 27 aa, Artificial Sequence
  Cyclic GFR-binding peptide
LSATSVLYYDDMGVPTLRKHREGMSVA

SEQ ID NO: 97528 - protein, 26 aa, Artificial Sequence
  Cyclic GFR-binding peptide
  MOD_RES (26)..(26): Xaa is C or S
EPISILYLVGRKPKVKFKYEMIVRSX

SEQ ID NO: 97529 - protein, 36 aa, Artificial Sequence; identical to SEQ ID NO: 10590
  Cyclic GFR-binding peptide
  MOD_RES (1)..(33)..(35): Xaa is C or S

SEQ ID NO: 97530 - protein, 31 aa, Artificial Sequence; identical to SEQ ID NO: 10591
  Cyclic GFR-binding peptide
  MOD_RES (29)..(31): Xaa is C or S

SEQ ID NO: 97531 - protein, 36 aa, Artificial Sequence; identical to SEQ ID NO: 10592
  Cyclic GFR-binding peptide
  MOD_RES (6)..(6): Xaa is C or S

SEQ ID NO: 97532 - protein, 32 aa, Artificial Sequence; identical to SEQ ID NO: 39505
  Cyclic GFR-binding peptide
  MOD_RES (31)..(31): Xaa is C or S

SEQ ID NO: 97533 - protein, 29 aa, Artificial Sequence
  Cyclic GFR-binding peptide
  MOD_RES (26)..(28): Xaa is C or S
EPISILYLIGKTPKIKFKYEMIVKSXKXS

SEQ ID NO: 97534 - protein, 30 aa, Artificial Sequence; identical to SEQ ID NO: 10596
  Cyclic GFR-binding peptide
  MOD_RES (29)..(29): Xaa is C or S

SEQ ID NO: 97535 - protein, 27 aa, Artificial Sequence
  Cyclic GFR-binding peptide
  MOD_RES (1)..(2): Xaa is C or S
XXVPTRLSPINILYFDSANNVVYGKIP

SEQ ID NO: 97536 - protein, 23 aa, Artificial Sequence
  Cyclic GFR-binding peptide
EKMSATSILYYDENKNVVLRKHR

SEQ ID NO: 97537 - protein, 32 aa, Artificial Sequence
  Cyclic GFR-binding peptide
  MOD_RES (29)..(31): Xaa is C or S
QDLSPINILYFIGKTPKIYGKIPMIVKSXKXS

SEQ ID NO: 97538 - protein, 27 aa, Artificial Sequence
  Cyclic GFR-binding peptide
  MOD_RES (1)..(2): Xaa is C or S
XXVSQDLSATSILYYIGKTPKILRKHR

SEQ ID NO: 97539 - protein, 28 aa, Artificial Sequence
  Cyclic GFR-binding peptide
  MOD_RES (2)..(3): Xaa is C or S
TXXAPVKTSPISMLYKDNGRVLLLKYHY

SEQ ID NO: 97540 - protein, 28 aa, Artificial Sequence
  Cyclic GFR-binding peptide
TELSPINMLYFDEYDKVVYGKIPEMVVE

SEQ ID NO: 97541 - protein, 24 aa, Artificial Sequence
  Cyclic GFR-binding peptide
QALSPISILYKVGRKPKVLKYHYM

SEQ ID NO: 97542 - protein, 41 aa, Artificial Sequence
  Cyclic GFR-binding peptide
  MOD_RES (5)..(6)..(38)..(40): Xaa is C or S
SAGPXXTPTKMEPISMLYLNDKQQIIKFKYEGMVVDRXGXS

SEQ ID NO: 97543 - protein, 21 aa, Artificial Sequence
  Cyclic GFR-binding peptide
EPISMLYLDEYDKVVKFKYEE

SEQ ID NO: 97544 - protein, 33 aa, Artificial Sequence; identical to SEQ ID NO: 10604
  Cyclic GFR-binding peptide
  MOD_RES (3)..(4): Xaa is C or S

SEQ ID NO: 97545 - protein, 26 aa, Artificial Sequence
  Cyclic GFR-binding peptide
PTQLSPISVLYKDDSSNVILKYHYNM

SEQ ID NO: 97546 - protein, 30 aa, Artificial Sequence; identical to SEQ ID NO: 10606
  Cyclic GFR-binding peptide
  MOD_RES (3)..(4): Xaa is C or S

SEQ ID NO: 97547 - protein, 30 aa, Artificial Sequence; identical to SEQ ID NO: 42491
  Cyclic GFR-binding peptide
  MOD_RES (27)..(29): Xaa is C or S

SEQ ID NO: 97548 - protein, 36 aa, Artificial Sequence; identical to SEQ ID NO: 39525
  Cyclic GFR-binding peptide
  MOD_RES (4)..(5)..(36): Xaa is C or S

SEQ ID NO: 97549 - protein, 37 aa, Artificial Sequence; identical to SEQ ID NO: 42492
  Cyclic GFR-binding peptide
  MOD_RES (2)..(3)..(35)..(37): Xaa is C or S

SEQ ID NO: 97550 - protein, 35 aa, Artificial Sequence
  Cyclic GFR-binding peptide
  MOD_RES (2)..(3)..(34): Xaa is C or S
PXXVPQDLSPINILYFVGRTPKVYGKIPMVVKSXK

SEQ ID NO: 97551 - protein, 33 aa, Artificial Sequence
  Cyclic GFR-binding peptide
  MOD_RES (32)..(32): Xaa is C or S
TPTKMSATSMLYYNDKQQIILRKHRGMVVDRXG

SEQ ID NO: 97552 - protein, 28 aa, Artificial Sequence
  Cyclic GFR-binding peptide
  MOD_RES (28)..(28): Xaa is C or S
MSPISILYKDENKNVVLKYHYNMTVESX

SEQ ID NO: 97553 - protein, 23 aa, Artificial Sequence
  Cyclic GFR-binding peptide
TQLSPINVLYFDDSSNVIYGKIP

SEQ ID NO: 97554 - protein, 25 aa, Artificial Sequence
  Cyclic GFR-binding peptide
TKLSPINVLYFDDSSNVIYGKIPNM

SEQ ID NO: 97555 - protein, 30 aa, Artificial Sequence; identical to SEQ ID NO: 39528
  Cyclic GFR-binding peptide
  MOD_RES (1)..(1): Xaa is C or S

SEQ ID NO: 97556 - protein, 34 aa, Artificial Sequence
  Cyclic GFR-binding peptide
  MOD_RES (6)..(7): Xaa is C or S
GSAGPXXTPTKMEPISMLYLNDKQQIIKFKYEGM

SEQ ID NO: 97557 - protein, 38 aa, Artificial Sequence; identical to SEQ ID NO: 39533
  Cyclic GFR-binding peptide
  MOD_RES (6)..(7)..(38): Xaa is C or S

SEQ ID NO: 97558 - protein, 30 aa, Artificial Sequence; identical to SEQ ID NO: 10617
  Cyclic GFR-binding peptide
  MOD_RES (28)..(30): Xaa is C or S

SEQ ID NO: 97559 - protein, 36 aa, Artificial Sequence; identical to SEQ ID NO: 39537
  Cyclic GFR-binding peptide
  MOD_RES (1)..(33)..(35): Xaa is C or S

SEQ ID NO: 97560 - protein, 21 aa, Artificial Sequence
  Cyclic GFR-binding peptide
SATSILYYVGRKPKVLRKHRM

SEQ ID NO: 97561 - protein, 34 aa, Artificial Sequence; identical to SEQ ID NO: 39541
  Cyclic GFR-binding peptide
  MOD_RES (2)..(3): Xaa is C or S

SEQ ID NO: 97562 - protein, 22 aa, Artificial Sequence
  Cyclic GFR-binding peptide
DLSATSILYYIGKTPKILRKHR

SEQ ID NO: 97563 - protein, 24 aa, Artificial Sequence
  Cyclic GFR-binding peptide
ARLSATSILYYDAANNVVLRKHRD

SEQ ID NO: 97564 - protein, 28 aa, Artificial Sequence
  Cyclic GFR-binding peptide
TKLEPISVLYLDSSNNVIKFKYENMVVK

SEQ ID NO: 97565 - protein, 40 aa, Artificial Sequence
  Cyclic GFR-binding peptide
  MOD_RES (4)..(5)..(37)..(39): Xaa is C or S
PPTXXVPTRLSPISILYKDSANNVVLKYHYDMVVESXGXR

SEQ ID NO: 97566 - protein, 33 aa, Artificial Sequence; identical to SEQ ID NO: 10624
  Cyclic GFR-binding peptide
  MOD_RES (6)..(7): Xaa is C or S

SEQ ID NO: 97567 - protein, 37 aa, Artificial Sequence
  Cyclic GFR-binding peptide
  MOD_RES (6)..(7): Xaa is C or S
HVPKPXXAPTKLSATSVLYYDDSSNVILRKHRNMVVR

SEQ ID NO: 97568 - protein, 27 aa, Artificial Sequence
  Cyclic GFR-binding peptide
KLSATSVLYYDDMGVPTLRKHREGMSV

SEQ ID NO: 97569 - protein, 37 aa, Artificial Sequence; identical to SEQ ID NO: 77674
  Cyclic GFR-binding peptide
  MOD_RES (6)..(7): Xaa is C or S

SEQ ID NO: 97570 - protein, 34 aa, Artificial Sequence
  Cyclic GFR-binding peptide
  MOD_RES (31)..(33): Xaa is C or S
PARLSATSILYYDAANNVVLRKHRDMVVEAXGXR

SEQ ID NO: 97571 - protein, 29 aa, Artificial Sequence
  Cyclic GFR-binding peptide
VSQDLEPISILYLIGKTPKIKFKYEMIVK

SEQ ID NO: 97572 - protein, 33 aa, Artificial Sequence; identical to SEQ ID NO: 10628
  Cyclic GFR-binding peptide
  MOD_RES (3)..(4): Xaa is C or S

SEQ ID NO: 97573 - protein, 21 aa, Artificial Sequence
  Cyclic GFR-binding peptide
LNAISILYFDKGVVTYLKKYR

SEQ ID NO: 97574 - protein, 30 aa, Artificial Sequence
  Cyclic GFR-binding peptide
  MOD_RES (30)..(30): Xaa is C or S
TKMEPISMLYLNDKQQIIKFKYEGMVVDRX

SEQ ID NO: 97575 - protein, 30 aa, Artificial Sequence; identical to SEQ ID NO: 39552
  Cyclic GFR-binding peptide
  MOD_RES (27)..(29): Xaa is C or S

SEQ ID NO: 97576 - protein, 27 aa, Artificial Sequence
  Cyclic GFR-binding peptide
VPTELSPINMLYFDEYDKVVYGKIPEM

SEQ ID NO: 97577 - protein, 34 aa, Artificial Sequence
  Cyclic GFR-binding peptide
  MOD_RES (4)..(5): Xaa is C or S
SKAXXVPTKLSATSILYYDKGVVTYLRKHRGMAV

SEQ ID NO: 97578 - protein, 32 aa, Artificial Sequence; identical to SEQ ID NO: 10631
  Cyclic GFR-binding peptide
  MOD_RES (4)..(5): Xaa is C or S

SEQ ID NO: 97579 - protein, 28 aa, Artificial Sequence
  Cyclic GFR-binding peptide
  MOD_RES (2)..(3): Xaa is C or S
PXXTPTKMNAISMLYFNDKQQIILKKYR

SEQ ID NO: 97580 - protein, 31 aa, Artificial Sequence
  Cyclic GFR-binding peptide
  MOD_RES (4)..(5): Xaa is C or S
SKAXXVPTKLSATSILYYDKGVVTYLRKHRG

SEQ ID NO: 97581 - protein, 27 aa, Artificial Sequence
  Cyclic GFR-binding peptide
ELSATSMLYYDENEKVVLRKHRDMVVE

SEQ ID NO: 97582 - protein, 39 aa, Artificial Sequence
  Cyclic GFR-binding peptide
  MOD_RES (4)..(5)..(36)..(38): Xaa is C or S
PSTXXAPVKTSPISMLYKDNGRVLLLKYHYMIVEEXGXL

SEQ ID NO: 97583 - protein, 27 aa, Artificial Sequence
  Cyclic GFR-binding peptide
  MOD_RES (1)..(1): Xaa is C or S
XTPTKMEPISMLYLNDKQQIIKFKYEG

SEQ ID NO: 97584 - protein, 40 aa, Artificial Sequence; identical to SEQ ID NO: 42538
  Cyclic GFR-binding peptide
  MOD_RES (6)..(38)..(40): Xaa is C or S

SEQ ID NO: 97585 - protein, 30 aa, Artificial Sequence; identical to SEQ ID NO: 42539
  Cyclic GFR-binding peptide
  MOD_RES (27)..(29): Xaa is C or S

SEQ ID NO: 97586 - protein, 28 aa, Artificial Sequence
  Cyclic GFR-binding peptide
PEKMSATSILYYDENKNVVLRKHRNMTV

SEQ ID NO: 97587 - protein, 25 aa, Artificial Sequence
  Cyclic GFR-binding peptide
SATSVLYYDDSSNVILRKHRNMVVR

SEQ ID NO: 97588 - protein, 35 aa, Artificial Sequence; identical to SEQ ID NO: 39568
  Cyclic GFR-binding peptide
  MOD_RES (3)..(4)..(35): Xaa is C or S

SEQ ID NO: 97589 - protein, 32 aa, Artificial Sequence; identical to SEQ ID NO: 10644
  Cyclic GFR-binding peptide
  MOD_RES (3)..(4): Xaa is C or S

SEQ ID NO: 97590 - protein, 27 aa, Artificial Sequence
  Cyclic GFR-binding peptide
PEKMSATSILYYDENKNVVLRKHRNMT

SEQ ID NO: 97591 - protein, 31 aa, Artificial Sequence
  Cyclic GFR-binding peptide
  MOD_RES (1)..(2): Xaa is C or S
XXAPVKTEPISMLYLDNGRVLLKFKYEMIVE

SEQ ID NO: 97592 - protein, 31 aa, Artificial Sequence; identical to SEQ ID NO: 42549
  Cyclic GFR-binding peptide
  MOD_RES (31)..(31): Xaa is C or S

SEQ ID NO: 97593 - protein, 28 aa, Artificial Sequence
  Cyclic GFR-binding peptide
  MOD_RES (2)..(3): Xaa is C or S
PXXVPEKMSATSILYYDENKNVVLRKHR

SEQ ID NO: 97594 - protein, 28 aa, Artificial Sequence
  Cyclic GFR-binding peptide
  MOD_RES (2)..(3): Xaa is C or S
AXXVPTKLSATSVLYYDDMGVPTLRKHR

SEQ ID NO: 97595 - protein, 40 aa, Artificial Sequence; identical to SEQ ID NO: 39575
  Cyclic GFR-binding peptide
  MOD_RES (5)..(6)..(38)..(40): Xaa is C or S

SEQ ID NO: 97596 - protein, 34 aa, Artificial Sequence
  Cyclic GFR-binding peptide
  MOD_RES (31)..(33): Xaa is C or S
APVKTEPISMLYLDNGRVLLKFKYEMIVEEXGXL

SEQ ID NO: 97597 - protein, 29 aa, Artificial Sequence
  Cyclic GFR-binding peptide
TKMNAISMLYFNDKQQIILKKYRGMVVDR

SEQ ID NO: 97598 - protein, 29 aa, Artificial Sequence
  Cyclic GFR-binding peptide
VPARLNAISILYFDAANNVVLKKYRDMVV

SEQ ID NO: 97599 - protein, 26 aa, Artificial Sequence
  Cyclic GFR-binding peptide
TELEPISMLYLDENEKVVKFKYEDMV

SEQ ID NO: 97600 - protein, 28 aa, Artificial Sequence
  Cyclic GFR-binding peptide
PTKMSPISMLYKNDKQQIILKYHYGMVV

SEQ ID NO: 97601 - protein, 24 aa, Artificial Sequence
  Cyclic GFR-binding peptide
TELEPISMLYLDENEKVVKFKYED

SEQ ID NO: 97602 - protein, 39 aa, Artificial Sequence; identical to SEQ ID NO: 39581
  Cyclic GFR-binding peptide
  MOD_RES (3)..(4)..(36)..(38): Xaa is C or S

SEQ ID NO: 97603 - protein, 29 aa, Artificial Sequence
  Cyclic GFR-binding peptide
  MOD_RES (1)..(1): Xaa is C or S
XVPTKLNAISVLYFDDMGVPTLKKYREGM

SEQ ID NO: 97604 - protein, 29 aa, Artificial Sequence
  Cyclic GFR-binding peptide
  MOD_RES (28)..(28): Xaa is C or S
LSPISMLYKDENEKVVLKYHYDMVVEGXG

SEQ ID NO: 97605 - protein, 36 aa, Artificial Sequence; identical to SEQ ID NO: 42559
  Cyclic GFR-binding peptide
  MOD_RES (6)..(7): Xaa is C or S

SEQ ID NO: 97606 - protein, 30 aa, Artificial Sequence; identical to SEQ ID NO: 10656
  Cyclic GFR-binding peptide
  MOD_RES (29)..(29): Xaa is C or S

SEQ ID NO: 97607 - protein, 28 aa, Artificial Sequence
  Cyclic GFR-binding peptide
  MOD_RES (1)..(1): Xaa is C or S
XVPQDLSATSILYYVGRTPKVLRKHRMV

SEQ ID NO: 97608 - protein, 33 aa, Artificial Sequence; identical to SEQ ID NO: 39586
  Cyclic GFR-binding peptide
  MOD_RES (6)..(7): Xaa is C or S

SEQ ID NO: 97609 - protein, 33 aa, Artificial Sequence; identical to SEQ ID NO: 42562
  Cyclic GFR-binding peptide
  MOD_RES (3)..(4): Xaa is C or S

SEQ ID NO: 97610 - protein, 36 aa, Artificial Sequence; identical to SEQ ID NO: 39588
  Cyclic GFR-binding peptide
  MOD_RES (3)..(4)..(36): Xaa is C or S

SEQ ID NO: 97611 - protein, 29 aa, Artificial Sequence
  Cyclic GFR-binding peptide
  MOD_RES (1)..(1): Xaa is C or S
XAPTQLSPINVLYFDDSSNVIYGKIPNMV

SEQ ID NO: 97612 - protein, 37 aa, Artificial Sequence; identical to SEQ ID NO: 39594
  Cyclic GFR-binding peptide
  MOD_RES (2)..(3)..(35)..(37): Xaa is C or S

SEQ ID NO: 97613 - protein, 27 aa, Artificial Sequence
  Cyclic GFR-binding peptide
  MOD_RES (1)..(1): Xaa is C or S
XVPQDLNAISILYFVGRTPKVLKKYRM

SEQ ID NO: 97614 - protein, 38 aa, Artificial Sequence; identical to SEQ ID NO: 39596
  Cyclic GFR-binding peptide
  MOD_RES (3)..(4)..(36)..(38): Xaa is C or S

SEQ ID NO: 97615 - protein, 35 aa, Artificial Sequence
  Cyclic GFR-binding peptide
  MOD_RES (6)..(7): Xaa is C or S
ASASPXXVPQDLSPINILYFVGRTPKVYGKIPMVV

SEQ ID NO: 97616 - protein, 34 aa, Artificial Sequence; identical to SEQ ID NO: 10665
  Cyclic GFR-binding peptide
  MOD_RES (6)..(7): Xaa is C or S

SEQ ID NO: 97617 - protein, 20 aa, Artificial Sequence
  Cyclic GFR-binding peptide
SATSILYYDAANNVVLRKHR

SEQ ID NO: 97618 - protein, 24 aa, Artificial Sequence
  Cyclic GFR-binding peptide
RLSPISILYKDSANNVVLKYHYDM

SEQ ID NO: 97619 - protein, 31 aa, Artificial Sequence; identical to SEQ ID NO: 42573
  Cyclic GFR-binding peptide
  MOD_RES (3)..(4): Xaa is C or S

SEQ ID NO: 97620 - protein, 30 aa, Artificial Sequence
  Cyclic GFR-binding peptide
  MOD_RES (27)..(29): Xaa is C or S
SATSMLYYNDKQQIILRKHRGMVVDRXGXS

SEQ ID NO: 97621 - protein, 35 aa, Artificial Sequence
  Cyclic GFR-binding peptide
  MOD_RES (1)..(32)..(34): Xaa is C or S
XVPQDLSPINILYFVGRTPKVYGKIPMVVKSXKXS

SEQ ID NO: 97622 - protein, 22 aa, Artificial Sequence
  Cyclic GFR-binding peptide
SATSMLYYDEYDKVVLRKHREM

SEQ ID NO: 97623 - protein, 28 aa, Artificial Sequence
  Cyclic GFR-binding peptide
  MOD_RES (2)..(3): Xaa is C or S
SXXVPARLEPISILYLDAANNVVKFKYE

SEQ ID NO: 97624 - protein, 37 aa, Artificial Sequence
  Cyclic GFR-binding peptide
  MOD_RES (1)..(2)..(34)..(36): Xaa is C or S
XXVPARLSATSILYYDAANNVVLRKHRDMVVEAXGXR

SEQ ID NO: 97625 - protein, 38 aa, Artificial Sequence; identical to SEQ ID NO: 10675
  Cyclic GFR-binding peptide
  MOD_RES (5)..(6)..(38): Xaa is C or S

SEQ ID NO: 97626 - protein, 31 aa, Artificial Sequence
  Cyclic GFR-binding peptide
  MOD_RES (29)..(31): Xaa is C or S
KMNAISILYFDENKNVVLKKYRNMTVESXAX

SEQ ID NO: 97627 - protein, 28 aa, Artificial Sequence
  Cyclic GFR-binding peptide
  MOD_RES (1)..(1): Xaa is C or S
XVPEKMSPINILYFDENKNVVYGKIPNM

SEQ ID NO: 97628 - protein, 36 aa, Artificial Sequence; identical to SEQ ID NO: 39607
  Cyclic GFR-binding peptide
  MOD_RES (6)..(7): Xaa is C or S

SEQ ID NO: 97629 - protein, 26 aa, Artificial Sequence
  Cyclic GFR-binding peptide
LSATSILYYDKGVVTYLRKHRGMAVS

SEQ ID NO: 97630 - protein, 33 aa, Artificial Sequence; identical to SEQ ID NO: 39612
  Cyclic GFR-binding peptide
  MOD_RES (4)..(5): Xaa is C or S

SEQ ID NO: 97631 - protein, 35 aa, Artificial Sequence; identical to SEQ ID NO: 10685
  Cyclic GFR-binding peptide
  MOD_RES (1)..(33)..(35): Xaa is C or S

SEQ ID NO: 97632 - protein, 34 aa, Artificial Sequence
  Cyclic GFR-binding peptide
  MOD_RES (3)..(4): Xaa is C or S
PTXXVPTRLSPISILYKDSANNVVLKYHYDMVVE

SEQ ID NO: 97633 - protein, 37 aa, Artificial Sequence; identical to SEQ ID NO: 39616
  Cyclic GFR-binding peptide
  MOD_RES (5)..(6): Xaa is C or S

SEQ ID NO: 97634 - protein, 24 aa, Artificial Sequence
  Cyclic GFR-binding peptide
LSPINILYFIGKTPKIYGKIPMIV

SEQ ID NO: 97635 - protein, 28 aa, Artificial Sequence
  Cyclic GFR-binding peptide
  MOD_RES (28)..(28): Xaa is C or S
MNAISILYFDENKNVVLKKYRNMTVESX

SEQ ID NO: 97636 - protein, 26 aa, Artificial Sequence
  Cyclic GFR-binding peptide
  MOD_RES (1)..(1): Xaa is C or S
XAPTQLSPISVLYKDDSSNVILKYHY

SEQ ID NO: 97637 - protein, 24 aa, Artificial Sequence
  Cyclic GFR-binding peptide
KMEPISMLYLNDKQQIIKFKYEGM

SEQ ID NO: 97638 - protein, 27 aa, Artificial Sequence
  Cyclic GFR-binding peptide
  MOD_RES (1)..(1): Xaa is C or S
XAPTQLSPISVLYKDDSSNVILKYHYN

SEQ ID NO: 97639 - protein, 27 aa, Artificial Sequence
  Cyclic GFR-binding peptide
PTELNAISMLYFDENEKVVLKKYRDMV

SEQ ID NO: 97640 - protein, 37 aa, Artificial Sequence; identical to SEQ ID NO: 42597
  Cyclic GFR-binding peptide
  MOD_RES (5)..(37): Xaa is C or S

SEQ ID NO: 97641 - protein, 24 aa, Artificial Sequence
  Cyclic GFR-binding peptide
TRLNAISILYFDSANNVVLKKYRD

SEQ ID NO: 97642 - protein, 33 aa, Artificial Sequence; identical to SEQ ID NO: 39628
  Cyclic GFR-binding peptide
  MOD_RES (4)..(5): Xaa is C or S

SEQ ID NO: 97643 - protein, 35 aa, Artificial Sequence; identical to SEQ ID NO: 10700
  Cyclic GFR-binding peptide
  MOD_RES (3)..(4)..(35): Xaa is C or S

SEQ ID NO: 97644 - protein, 35 aa, Artificial Sequence; identical to SEQ ID NO: 10702
  Cyclic GFR-binding peptide
  MOD_RES (2)..(3)..(34): Xaa is C or S

SEQ ID NO: 97645 - protein, 32 aa, Artificial Sequence; identical to SEQ ID NO: 10704
  Cyclic GFR-binding peptide
  MOD_RES (3)..(3): Xaa is C or S

SEQ ID NO: 97646 - protein, 37 aa, Artificial Sequence; identical to SEQ ID NO: 20823
  Cyclic GFR-binding peptide
  MOD_RES (6)..(7): Xaa is C or S

SEQ ID NO: 97647 - protein, 28 aa, Artificial Sequence
  Cyclic GFR-binding peptide
  MOD_RES (27)..(27): Xaa is C or S
SPISMLYKDEYDKVVLKYHYEMVVEGXG

SEQ ID NO: 97648 - protein, 32 aa, Artificial Sequence; identical to SEQ ID NO: 39636
  Cyclic GFR-binding peptide
  MOD_RES (6)..(7): Xaa is C or S

SEQ ID NO: 97649 - protein, 31 aa, Artificial Sequence; identical to SEQ ID NO: 39637
  Cyclic GFR-binding peptide

SEQ ID NO: 97650 - protein, 28 aa, Artificial Sequence
  Cyclic GFR-binding peptide
KMEPISILYLDENKNVVKFKYENMTVES

SEQ ID NO: 97651 - protein, 29 aa, Artificial Sequence
  Cyclic GFR-binding peptide
TKLSATSILYYDKGVVTYLRKHRGMAVSE

SEQ ID NO: 97652 - protein, 28 aa, Artificial Sequence
  Cyclic GFR-binding peptide
  MOD_RES (1)..(2): Xaa is C or S
XXVPARLSATSILYYDAANNVVLRKHRD

SEQ ID NO: 97653 - protein, 24 aa, Artificial Sequence
  Cyclic GFR-binding peptide
PTKLSPINVLYFDSSNNVIYGKIP

SEQ ID NO: 97654 - protein, 26 aa, Artificial Sequence
  Cyclic GFR-binding peptide
  MOD_RES (26)..(26): Xaa is C or S
SPISILYKIGKTPKILKYHYMIVKSX

SEQ ID NO: 97655 - protein, 23 aa, Artificial Sequence
  Cyclic GFR-binding peptide
MSPINILYFDENKNVVYGKIPNM

SEQ ID NO: 97656 - protein, 28 aa, Artificial Sequence
  Cyclic GFR-binding peptide
  MOD_RES (2)..(3): Xaa is C or S
SXXVPARLNAISILYFDAANNVVLKKYR

SEQ ID NO: 97657 - protein, 31 aa, Artificial Sequence; identical to SEQ ID NO: 10712
  Cyclic GFR-binding peptide

SEQ ID NO: 97658 - protein, 28 aa, Artificial Sequence
  Cyclic GFR-binding peptide
PTKLSPISILYKDKGVVTYLKYHYGMAV

SEQ ID NO: 97659 - protein, 32 aa, Artificial Sequence; identical to SEQ ID NO: 10714
  Cyclic GFR-binding peptide
  MOD_RES (2)..(3): Xaa is C or S

SEQ ID NO: 97660 - protein, 33 aa, Artificial Sequence; identical to SEQ ID NO: 42627
  Cyclic GFR-binding peptide
  MOD_RES (5)..(6): Xaa is C or S

SEQ ID NO: 97661 - protein, 28 aa, Artificial Sequence
  Cyclic GFR-binding peptide
  MOD_RES (2)..(3): Xaa is C or S
PXXTPTKMSPISMLYKNDKQQIILKYHY

SEQ ID NO: 97662 - protein, 35 aa, Artificial Sequence; identical to SEQ ID NO: 39646
  Cyclic GFR-binding peptide
  MOD_RES (32)..(34): Xaa is C or S

SEQ ID NO: 97663 - protein, 25 aa, Artificial Sequence
  Cyclic GFR-binding peptide
QDLSPISILYKIGKTPKILKYHYMI

SEQ ID NO: 97664 - protein, 38 aa, Artificial Sequence; identical to SEQ ID NO: 10721
  Cyclic GFR-binding peptide
  MOD_RES (3)..(4)..(35)..(37): Xaa is C or S

SEQ ID NO: 97665 - protein, 34 aa, Artificial Sequence; identical to SEQ ID NO: 39652
  Cyclic GFR-binding peptide
  MOD_RES (1)..(33): Xaa is C or S

SEQ ID NO: 97666 - protein, 27 aa, Artificial Sequence
  Cyclic GFR-binding peptide
  MOD_RES (1)..(1): Xaa is C or S
XVSQDLSPINILYFIGKTPKIYGKIPM

SEQ ID NO: 97667 - protein, 37 aa, Artificial Sequence; identical to SEQ ID NO: 10722
  Cyclic GFR-binding peptide
  MOD_RES (5)..(6): Xaa is C or S

SEQ ID NO: 97668 - protein, 32 aa, Artificial Sequence; identical to SEQ ID NO: 10723
  Cyclic GFR-binding peptide
  MOD_RES (1)..(1): Xaa is C or S

SEQ ID NO: 97669 - protein, 35 aa, Artificial Sequence; identical to SEQ ID NO: 39655
  Cyclic GFR-binding peptide
  MOD_RES (3)..(4): Xaa is C or S

SEQ ID NO: 97670 - protein, 39 aa, Artificial Sequence; identical to SEQ ID NO: 10725
  Cyclic GFR-binding peptide
  MOD_RES (5)..(6)..(38): Xaa is C or S

SEQ ID NO: 97671 - protein, 32 aa, Artificial Sequence; identical to SEQ ID NO: 10726
  Cyclic GFR-binding peptide
  MOD_RES (5)..(6): Xaa is C or S

SEQ ID NO: 97672 - protein, 30 aa, Artificial Sequence; identical to SEQ ID NO: 39660
  Cyclic GFR-binding peptide
  MOD_RES (30)..(30): Xaa is C or S

SEQ ID NO: 97673 - protein, 38 aa, Artificial Sequence
  Cyclic GFR-binding peptide
  MOD_RES (2)..(3)..(35)..(37): Xaa is C or S
PXXVPEKMNAISILYFDENKNVVLKKYRNMTVESXAXR

SEQ ID NO: 97674 - protein, 30 aa, Artificial Sequence; identical to SEQ ID NO: 39661
  Cyclic GFR-binding peptide
  MOD_RES (1)..(2): Xaa is C or S

SEQ ID NO: 97675 - protein, 33 aa, Artificial Sequence
  Cyclic GFR-binding peptide
  MOD_RES (1)..(33): Xaa is C or S
XVPTKLSATSILYYDKGVVTYLRKHRGMAVSEX

SEQ ID NO: 97676 - protein, 33 aa, Artificial Sequence; identical to SEQ ID NO: 10730
  Cyclic GFR-binding peptide
  MOD_RES (5)..(6): Xaa is C or S

SEQ ID NO: 97677 - protein, 29 aa, Artificial Sequence
  Cyclic GFR-binding peptide
  MOD_RES (1)..(1): Xaa is C or S
XVPTELSATSMLYYDENEKVVLRKHRDMV

SEQ ID NO: 97678 - protein, 32 aa, Artificial Sequence; identical to SEQ ID NO: 10732
  Cyclic GFR-binding peptide
  MOD_RES (4)..(5): Xaa is C or S

SEQ ID NO: 97679 - protein, 38 aa, Artificial Sequence; identical to SEQ ID NO: 39666
  Cyclic GFR-binding peptide
  MOD_RES (6)..(7)..(38): Xaa is C or S

SEQ ID NO: 97680 - protein, 25 aa, Artificial Sequence
  Cyclic GFR-binding peptide
DLEPISILYLIGKTPKIKFKYEMIV

SEQ ID NO: 97681 - protein, 28 aa, Artificial Sequence
  Cyclic GFR-binding peptide
  MOD_RES (1)..(2): Xaa is C or S
XXTPTKMSPISMLYKNDKQQIILKYHYG

SEQ ID NO: 97682 - protein, 33 aa, Artificial Sequence; identical to SEQ ID NO: 10734
  Cyclic GFR-binding peptide
  MOD_RES (1)..(1): Xaa is C or S

SEQ ID NO: 97683 - protein, 35 aa, Artificial Sequence; identical to SEQ ID NO: 10735
  Cyclic GFR-binding peptide
  MOD_RES (4)..(5): Xaa is C or S

SEQ ID NO: 97684 - protein, 36 aa, Artificial Sequence; identical to SEQ ID NO: 10737
  Cyclic GFR-binding peptide
  MOD_RES (1)..(33)..(35): Xaa is C or S

SEQ ID NO: 97685 - protein, 24 aa, Artificial Sequence
  Cyclic GFR-binding peptide
PTRLSPINILYFDSANNVVYGKIP

SEQ ID NO: 97686 - protein, 31 aa, Artificial Sequence; identical to SEQ ID NO: 10739
  Cyclic GFR-binding peptide
  MOD_RES (28)..(30): Xaa is C or S

SEQ ID NO: 97687 - protein, 41 aa, Artificial Sequence
  Cyclic GFR-binding peptide
  MOD_RES (5)..(6)..(38)..(40): Xaa is C or S
SAGPXXTPTKMSPISMLYKNDKQQIILKYHYGMVVDRXGXS

SEQ ID NO: 97688 - protein, 35 aa, Artificial Sequence; identical to SEQ ID NO: 10743
  Cyclic GFR-binding peptide
  MOD_RES (6)..(7): Xaa is C or S

SEQ ID NO: 97689 - protein, 32 aa, Artificial Sequence; identical to SEQ ID NO: 39680
  Cyclic GFR-binding peptide
  MOD_RES (2)..(2): Xaa is C or S

SEQ ID NO: 97690 - protein, 35 aa, Artificial Sequence
  Cyclic GFR-binding peptide
  MOD_RES (4)..(5): Xaa is C or S
SKAXXVPTKLSATSILYYDKGVVTYLRKHRGMAVS

SEQ ID NO: 97691 - protein, 26 aa, Artificial Sequence
  Cyclic GFR-binding peptide
TKMSPISMLYKNDKQQIILKYHYGMV

SEQ ID NO: 97692 - protein, 31 aa, Artificial Sequence; identical to SEQ ID NO: 10747
  Cyclic GFR-binding peptide
  MOD_RES (1)..(1): Xaa is C or S

SEQ ID NO: 97693 - protein, 33 aa, Artificial Sequence
  Cyclic GFR-binding peptide
  MOD_RES (6)..(7): Xaa is C or S
HVPKPXXAPTKLEPISVLYLDDSSNVIKFKYEN

SEQ ID NO: 97694 - protein, 34 aa, Artificial Sequence; identical to SEQ ID NO: 39684
  Cyclic GFR-binding peptide
  MOD_RES (6)..(7): Xaa is C or S

SEQ ID NO: 97695 - protein, 22 aa, Artificial Sequence
  Cyclic GFR-binding peptide
EPISILYLVGRKPKVKFKYEMI

SEQ ID NO: 97696 - protein, 34 aa, Artificial Sequence; identical to SEQ ID NO: 10749
  Cyclic GFR-binding peptide
  MOD_RES (1)..(2)..(34): Xaa is C or S

SEQ ID NO: 97697 - protein, 27 aa, Artificial Sequence
  Cyclic GFR-binding peptide
  MOD_RES (1)..(1): Xaa is C or S
XVPQALEPISILYLVGRKPKVKFKYEM

SEQ ID NO: 97698 - protein, 31 aa, Artificial Sequence; identical to SEQ ID NO: 39693
  Cyclic GFR-binding peptide
  MOD_RES (1)..(1): Xaa is C or S

SEQ ID NO: 97699 - protein, 43 aa, Artificial Sequence; identical to SEQ ID NO: 10751
  Cyclic GFR-binding peptide
  MOD_RES (6)..(7)..(40)..(42): Xaa is C or S

SEQ ID NO: 97700 - protein, 27 aa, Artificial Sequence
  Cyclic GFR-binding peptide
ELEPISMLYLDENEKVVKFKYEDMVVE

SEQ ID NO: 97701 - protein, 38 aa, Artificial Sequence
  Cyclic GFR-binding peptide
  MOD_RES (6)..(7): Xaa is C or S
GIPEPXXVPEKMNAISILYFDENKNVVLKKYRNMTVES

SEQ ID NO: 97702 - protein, 26 aa, Artificial Sequence
  Cyclic GFR-binding peptide
LSPISILYKDKGVVTYLKYHYGMAVS

SEQ ID NO: 97703 - protein, 22 aa, Artificial Sequence
  Cyclic GFR-binding peptide
KLNAISVLYFDSSNNVILKKYR

SEQ ID NO: 97704 - protein, 27 aa, Artificial Sequence
  Cyclic GFR-binding peptide
PTELEPISMLYLDEYDKVVKFKYEEMV

SEQ ID NO: 97705 - protein, 35 aa, Artificial Sequence; identical to SEQ ID NO: 39701
  Cyclic GFR-binding peptide
  MOD_RES (32)..(34): Xaa is C or S

SEQ ID NO: 97706 - protein, 38 aa, Artificial Sequence
  Cyclic GFR-binding peptide
  MOD_RES (5)..(6)..(38): Xaa is C or S
ASKAXXVPTKLSATSILYYDKGVVTYLRKHRGMAVSEX

SEQ ID NO: 97707 - protein, 28 aa, Artificial Sequence
  Cyclic GFR-binding peptide
  MOD_RES (1)..(2): Xaa is C or S
XXAPVKTEPISMLYLDNGRVLLKFKYEM

SEQ ID NO: 97708 - protein, 31 aa, Artificial Sequence
  Cyclic GFR-binding peptide
  MOD_RES (29)..(31): Xaa is C or S
KLSATSILYYDKGVVTYLRKHRGMAVSEXGX

SEQ ID NO: 97709 - protein, 28 aa, Artificial Sequence
  Cyclic GFR-binding peptide
VPARLSATSILYYDAANNVVLRKHRDMV

SEQ ID NO: 97710 - protein, 27 aa, Artificial Sequence
  Cyclic GFR-binding peptide
  MOD_RES (1)..(2): Xaa is C or S
XXVSQDLSPISILYKIGKTPKILKYHY

SEQ ID NO: 97711 - protein, 36 aa, Artificial Sequence; identical to SEQ ID NO: 10768
  Cyclic GFR-binding peptide
  MOD_RES (5)..(6): Xaa is C or S

SEQ ID NO: 97712 - protein, 29 aa, Artificial Sequence
  Cyclic GFR-binding peptide
PARLSATSILYYDAANNVVLRKHRDMVVE

SEQ ID NO: 97713 - protein, 36 aa, Artificial Sequence; identical to SEQ ID NO: 39713
  Cyclic GFR-binding peptide
  MOD_RES (2)..(3)..(36): Xaa is C or S

SEQ ID NO: 97714 - protein, 32 aa, Artificial Sequence; identical to SEQ ID NO: 42688
  Cyclic GFR-binding peptide
  MOD_RES (5)..(6): Xaa is C or S

SEQ ID NO: 97715 - protein, 32 aa, Artificial Sequence; identical to SEQ ID NO: 42696
  Cyclic GFR-binding peptide
  MOD_RES (29)..(31): Xaa is C or S

SEQ ID NO: 97716 - protein, 25 aa, Artificial Sequence
  Cyclic GFR-binding peptide
TRLNAISILYFDSANNVVLKKYRDM

SEQ ID NO: 97717 - protein, 25 aa, Artificial Sequence
  Cyclic GFR-binding peptide
PTELSATSMLYYDEYDKVVLRKHRE

SEQ ID NO: 97718 - protein, 29 aa, Artificial Sequence
  Cyclic GFR-binding peptide
  MOD_RES (1)..(1): Xaa is C or S
XVPEKMSPINILYFDENKNVVYGKIPNMT

SEQ ID NO: 97719 - protein, 33 aa, Artificial Sequence; identical to SEQ ID NO: 10776
  Cyclic GFR-binding peptide
  MOD_RES (6)..(7): Xaa is C or S

SEQ ID NO: 97720 - protein, 42 aa, Artificial Sequence; identical to SEQ ID NO: 77761
  Cyclic GFR-binding peptide
  MOD_RES (6)..(7)..(39)..(41): Xaa is C or S

SEQ ID NO: 97721 - protein, 32 aa, Artificial Sequence; identical to SEQ ID NO: 39718
  Cyclic GFR-binding peptide
  MOD_RES (4)..(5): Xaa is C or S

SEQ ID NO: 97722 - protein, 34 aa, Artificial Sequence; identical to SEQ ID NO: 10778
  Cyclic GFR-binding peptide
  MOD_RES (3)..(4): Xaa is C or S

SEQ ID NO: 97723 - protein, 38 aa, Artificial Sequence
  Cyclic GFR-binding peptide
  MOD_RES (6)..(7): Xaa is C or S
STPPTXXVPTRLEPISILYLDSANNVVKFKYEDMVVES

SEQ ID NO: 97724 - protein, 31 aa, Artificial Sequence
  Cyclic GFR-binding peptide
  MOD_RES (31)..(31): Xaa is C or S
VSQDLSPINILYFIGKTPKIYGKIPMIVKSX

SEQ ID NO: 97725 - protein, 34 aa, Artificial Sequence; identical to SEQ ID NO: 39721
  Cyclic GFR-binding peptide
  MOD_RES (4)..(5): Xaa is C or S

SEQ ID NO: 97726 - protein, 30 aa, Artificial Sequence; identical to SEQ ID NO: 39726
  Cyclic GFR-binding peptide
  MOD_RES (29)..(29): Xaa is C or S

SEQ ID NO: 97727 - protein, 39 aa, Artificial Sequence; identical to SEQ ID NO: 39733
  Cyclic GFR-binding peptide
  MOD_RES (5)..(6)..(38): Xaa is C or S

SEQ ID NO: 97728 - protein, 21 aa, Artificial Sequence
  Cyclic GFR-binding peptide
LSATSILYYVGRKPKVLRKHR

SEQ ID NO: 97729 - protein, 31 aa, Artificial Sequence; identical to SEQ ID NO: 39735
  Cyclic GFR-binding peptide
  MOD_RES (1)..(2): Xaa is C or S

SEQ ID NO: 97730 - protein, 29 aa, Artificial Sequence
  Cyclic GFR-binding peptide
  MOD_RES (29)..(29): Xaa is C or S
QDLEPISILYLVGRTPKVKFKYEMVVKSX

SEQ ID NO: 97731 - protein, 35 aa, Artificial Sequence; identical to SEQ ID NO: 39738
  Cyclic GFR-binding peptide
  MOD_RES (2)..(3)..(35): Xaa is C or S

SEQ ID NO: 97732 - protein, 34 aa, Artificial Sequence
  Cyclic GFR-binding peptide
  MOD_RES (5)..(6): Xaa is C or S
SAGPXXTPTKMSPISMLYKNDKQQIILKYHYGMV

SEQ ID NO: 97733 - protein, 29 aa, Artificial Sequence
  Cyclic GFR-binding peptide
PTELSATSMLYYDENEKVVLRKHRDMVVE

SEQ ID NO: 97734 - protein, 25 aa, Artificial Sequence
  Cyclic GFR-binding peptide
VPTELNAISMLYFDEYDKVVLKKYR

SEQ ID NO: 97735 - protein, 24 aa, Artificial Sequence
  Cyclic GFR-binding peptide
PQDLSPINILYFVGRTPKVYGKIP

SEQ ID NO: 97736 - protein, 27 aa, Artificial Sequence
  Cyclic GFR-binding peptide
LSATSILYYDKGVVTYLRKHRGMAVSE

SEQ ID NO: 97737 - protein, 30 aa, Artificial Sequence; identical to SEQ ID NO: 39742
  Cyclic GFR-binding peptide

SEQ ID NO: 97738 - protein, 29 aa, Artificial Sequence
  Cyclic GFR-binding peptide
VPARLSPISILYKDAANNVVLKYHYDMVV

SEQ ID NO: 97739 - protein, 36 aa, Artificial Sequence; identical to SEQ ID NO: 39745
  Cyclic GFR-binding peptide
  MOD_RES (3)..(4)..(35): Xaa is C or S

SEQ ID NO: 97740 - protein, 34 aa, Artificial Sequence; identical to SEQ ID NO: 10796
  Cyclic GFR-binding peptide
  MOD_RES (1)..(2)..(34): Xaa is C or S

SEQ ID NO: 97741 - protein, 36 aa, Artificial Sequence; identical to SEQ ID NO: 10797
  Cyclic GFR-binding peptide
  MOD_RES (4)..(5)..(36): Xaa is C or S

SEQ ID NO: 97742 - protein, 28 aa, Artificial Sequence
  Cyclic GFR-binding peptide
  MOD_RES (1)..(2): Xaa is C or S
XXVPTELSATSMLYYDENEKVVLRKHRD

SEQ ID NO: 97743 - protein, 25 aa, Artificial Sequence
  Cyclic GFR-binding peptide
LSPISMLYKDEYDKVVLKYHYEMVV

SEQ ID NO: 97744 - protein, 26 aa, Artificial Sequence
  Cyclic GFR-binding peptide
  MOD_RES (1)..(1): Xaa is C or S
XVSQDLEPISILYLIGKTPKIKFKYE

SEQ ID NO: 97745 - protein, 27 aa, Artificial Sequence
  Cyclic GFR-binding peptide
TKLSATSILYYDKGVVTYLRKHRGMAV

SEQ ID NO: 97746 - protein, 36 aa, Artificial Sequence; identical to SEQ ID NO: 42735
  Cyclic GFR-binding peptide
  MOD_RES (7)..(7): Xaa is C or S

SEQ ID NO: 97747 - protein, 30 aa, Artificial Sequence
  Cyclic GFR-binding peptide
  MOD_RES (1)..(1): Xaa is C or S
XTPTKMEPISMLYLNDKQQIIKFKYEGMVV

SEQ ID NO: 97748 - protein, 35 aa, Artificial Sequence; identical to SEQ ID NO: 39753
  Cyclic GFR-binding peptide
  MOD_RES (5)..(6): Xaa is C or S

SEQ ID NO: 97749 - protein, 36 aa, Artificial Sequence; identical to SEQ ID NO: 10805
  Cyclic GFR-binding peptide
  MOD_RES (1)..(2)..(35): Xaa is C or S

SEQ ID NO: 97750 - protein, 28 aa, Artificial Sequence
  Cyclic GFR-binding peptide
  MOD_RES (26)..(28): Xaa is C or S
NAISMLYFDNGRVLLLKKYRMIVEEXGX

SEQ ID NO: 97751 - protein, 41 aa, Artificial Sequence; identical to SEQ ID NO: 10808
  Cyclic GFR-binding peptide
  MOD_RES (4)..(5)..(38)..(40): Xaa is C or S

SEQ ID NO: 97752 - protein, 33 aa, Artificial Sequence; identical to SEQ ID NO: 39760
  Cyclic GFR-binding peptide
  MOD_RES (5)..(6): Xaa is C or S

SEQ ID NO: 97753 - protein, 23 aa, Artificial Sequence
  Cyclic GFR-binding peptide
EKMNAISILYFDENKNVVLKKYR

SEQ ID NO: 97754 - protein, 33 aa, Artificial Sequence
  Cyclic GFR-binding peptide
  MOD_RES (32)..(32): Xaa is C or S
VPTRLSATSILYYDSANNVVLRKHRDMVVESXG

SEQ ID NO: 97755 - protein, 35 aa, Artificial Sequence; identical to SEQ ID NO: 10814
  Cyclic GFR-binding peptide
  MOD_RES (2)..(3)..(34): Xaa is C or S

SEQ ID NO: 97756 - protein, 35 aa, Artificial Sequence
  Cyclic GFR-binding peptide
  MOD_RES (32)..(34): Xaa is C or S
VPTKLSPINILYFDKGVVTYYGKIPGMAVSEXGXR

SEQ ID NO: 97757 - protein, 27 aa, Artificial Sequence
  Cyclic GFR-binding peptide
  MOD_RES (1)..(1): Xaa is C or S
XVPTKLEPISVLYLDDMGVPTKFKYEE

SEQ ID NO: 97758 - protein, 32 aa, Artificial Sequence; identical to SEQ ID NO: 10816
  Cyclic GFR-binding peptide
  MOD_RES (1)..(32): Xaa is C or S

SEQ ID NO: 97759 - protein, 30 aa, Artificial Sequence
  Cyclic GFR-binding peptide
VPQDLSPINILYFVGRTPKVYGKIPMVVKS

SEQ ID NO: 97760 - protein, 36 aa, Artificial Sequence; identical to SEQ ID NO: 77780
  Cyclic GFR-binding peptide
  MOD_RES (1)..(2)..(34)..(36): Xaa is C or S

SEQ ID NO: 97761 - protein, 28 aa, Artificial Sequence
  Cyclic GFR-binding peptide
PTKLSPINVLYFDDSSNVIYGKIPNMVV

SEQ ID NO: 97762 - protein, 36 aa, Artificial Sequence; identical to SEQ ID NO: 39766
  Cyclic GFR-binding peptide
  MOD_RES (1)..(2)..(34)..(36): Xaa is C or S

SEQ ID NO: 97763 - protein, 36 aa, Artificial Sequence; identical to SEQ ID NO: 10818
  Cyclic GFR-binding peptide
  MOD_RES (2)..(3)..(35): Xaa is C or S

SEQ ID NO: 97764 - protein, 30 aa, Artificial Sequence; identical to SEQ ID NO: 39774
  Cyclic GFR-binding peptide
  MOD_RES (30)..(30): Xaa is C or S

SEQ ID NO: 97765 - protein, 23 aa, Artificial Sequence
  Cyclic GFR-binding peptide
LSATSILYYVGRTPKVLRKHRMV

SEQ ID NO: 97766 - protein, 25 aa, Artificial Sequence
  Cyclic GFR-binding peptide
SQDLSATSILYYIGKTPKILRKHRM

SEQ ID NO: 97767 - protein, 31 aa, Artificial Sequence; identical to SEQ ID NO: 42771
  Cyclic GFR-binding peptide
  MOD_RES (28)..(30): Xaa is C or S

SEQ ID NO: 97768 - protein, 31 aa, Artificial Sequence; identical to SEQ ID NO: 10825
  Cyclic GFR-binding peptide
  MOD_RES (28)..(30): Xaa is C or S

SEQ ID NO: 97769 - protein, 38 aa, Artificial Sequence; identical to SEQ ID NO: 39779
  Cyclic GFR-binding peptide
  MOD_RES (3)..(4)..(35)..(37): Xaa is C or S

SEQ ID NO: 97770 - protein, 39 aa, Artificial Sequence; identical to SEQ ID NO: 10831
  Cyclic GFR-binding peptide
  MOD_RES (6)..(7)..(39): Xaa is C or S

SEQ ID NO: 97771 - protein, 39 aa, Artificial Sequence
  Cyclic GFR-binding peptide
  MOD_RES (3)..(4)..(36)..(38): Xaa is C or S
EPXXVPEKMSPINILYFDENKNVVYGKIPNMTVESXAXR

SEQ ID NO: 97772 - protein, 24 aa, Artificial Sequence
  Cyclic GFR-binding peptide
EPISVLYLDSSNNVIKFKYENMVV

SEQ ID NO: 97773 - protein, 28 aa, Artificial Sequence
  Cyclic GFR-binding peptide
LEPISVLYLDDMGVPTKFKYEEGMSVAE

SEQ ID NO: 97774 - protein, 29 aa, Artificial Sequence
  Cyclic GFR-binding peptide
  MOD_RES (1)..(1): Xaa is C or S
XVPTRLNAISILYFDSANNVVLKKYRDMV

SEQ ID NO: 97775 - protein, 23 aa, Artificial Sequence
  Cyclic GFR-binding peptide
TQLSPISVLYKDDSSNVILKYHY

SEQ ID NO: 97776 - protein, 30 aa, Artificial Sequence; identical to SEQ ID NO: 10837
  Cyclic GFR-binding peptide
  MOD_RES (30)..(30): Xaa is C or S

SEQ ID NO: 97777 - protein, 23 aa, Artificial Sequence
  Cyclic GFR-binding peptide
LSPINVLYFDDMGVPTYGKIPEG

SEQ ID NO: 97778 - protein, 33 aa, Artificial Sequence; identical to SEQ ID NO: 10842
  Cyclic GFR-binding peptide
  MOD_RES (3)..(4): Xaa is C or S

SEQ ID NO: 97779 - protein, 26 aa, Artificial Sequence
  Cyclic GFR-binding peptide
MSATSMLYYNDKQQIILRKHRGMVVD

SEQ ID NO: 97780 - protein, 26 aa, Artificial Sequence
  Cyclic GFR-binding peptide
  MOD_RES (1)..(1): Xaa is C or S
XVSQDLSATSILYYIGKTPKILRKHR

SEQ ID NO: 97781 - protein, 35 aa, Artificial Sequence; identical to SEQ ID NO: 10851
  Cyclic GFR-binding peptide
  MOD_RES (5)..(6): Xaa is C or S

SEQ ID NO: 97782 - protein, 34 aa, Artificial Sequence; identical to SEQ ID NO: 42791
  Cyclic GFR-binding peptide
  MOD_RES (32)..(34): Xaa is C or S

SEQ ID NO: 97783 - protein, 41 aa, Artificial Sequence; identical to SEQ ID NO: 20962
  Cyclic GFR-binding peptide
  MOD_RES (6)..(7)..(39)..(41): Xaa is C or S

SEQ ID NO: 97784 - protein, 34 aa, Artificial Sequence; identical to SEQ ID NO: 10852
  Cyclic GFR-binding peptide
  MOD_RES (32)..(34): Xaa is C or S

SEQ ID NO: 97785 - protein, 39 aa, Artificial Sequence
  Cyclic GFR-binding peptide
  MOD_RES (6)..(7)..(39): Xaa is C or S
AAPASXXVPARLSATSILYYDAANNVVLRKHRDMVVEAX

SEQ ID NO: 97786 - protein, 36 aa, Artificial Sequence
  Cyclic GFR-binding peptide
  MOD_RES (6)..(7): Xaa is C or S
STPPTXXVPTRLEPISILYLDSANNVVKFKYEDMVV

SEQ ID NO: 97787 - protein, 34 aa, Artificial Sequence; identical to SEQ ID NO: 10853
  Cyclic GFR-binding peptide
  MOD_RES (6)..(7): Xaa is C or S

SEQ ID NO: 97788 - protein, 30 aa, Artificial Sequence
  Cyclic GFR-binding peptide
VPTRLSATSILYYDSANNVVLRKHRDMVVE

SEQ ID NO: 97789 - protein, 29 aa, Artificial Sequence
  Cyclic GFR-binding peptide
  MOD_RES (1)..(1): Xaa is C or S
XAPTKLEPISVLYLDDSSNVIKFKYENMV

SEQ ID NO: 97790 - protein, 39 aa, Artificial Sequence; identical to SEQ ID NO: 10858
  Cyclic GFR-binding peptide
  MOD_RES (6)..(7)..(39): Xaa is C or S

SEQ ID NO: 97791 - protein, 30 aa, Artificial Sequence; identical to SEQ ID NO: 10859
  Cyclic GFR-binding peptide
  MOD_RES (3)..(4): Xaa is C or S

SEQ ID NO: 97792 - protein, 31 aa, Artificial Sequence
  Cyclic GFR-binding peptide
  MOD_RES (30)..(30): Xaa is C or S
TRLSATSILYYDSANNVVLRKHRDMVVESXG

SEQ ID NO: 97793 - protein, 23 aa, Artificial Sequence
  Cyclic GFR-binding peptide
QALEPISILYLVGRKPKVKFKYE

SEQ ID NO: 97794 - protein, 21 aa, Artificial Sequence
  Cyclic GFR-binding peptide
EPISILYLDENKNVVKFKYEN

SEQ ID NO: 97795 - protein, 32 aa, Artificial Sequence; identical to SEQ ID NO: 39809
  Cyclic GFR-binding peptide
  MOD_RES (5)..(6): Xaa is C or S

SEQ ID NO: 97796 - protein, 25 aa, Artificial Sequence
  Cyclic GFR-binding peptide
PTKLSPINILYFDKGVVTYYGKIPG

SEQ ID NO: 97797 - protein, 23 aa, Artificial Sequence
  Cyclic GFR-binding peptide
ARLNAISILYFDAANNVVLKKYR

SEQ ID NO: 97798 - protein, 39 aa, Artificial Sequence
  Cyclic GFR-binding peptide
  MOD_RES (6)..(7)..(39): Xaa is C or S
GSAGPXXTPTKMSATSMLYYNDKQQIILRKHRGMVVDRX

SEQ ID NO: 97799 - protein, 33 aa, Artificial Sequence; identical to SEQ ID NO: 10867
  Cyclic GFR-binding peptide
  MOD_RES (30)..(32): Xaa is C or S

SEQ ID NO: 97800 - protein, 29 aa, Artificial Sequence
  Cyclic GFR-binding peptide
  MOD_RES (29)..(29): Xaa is C or S
QALSPINILYFVGRKPKVYGKIPMIVRSX

SEQ ID NO: 97801 - protein, 21 aa, Artificial Sequence
  Cyclic GFR-binding peptide
LEPISILYLVGRKPKVKFKYE

SEQ ID NO: 97802 - protein, 30 aa, Artificial Sequence; identical to SEQ ID NO: 39821
  Cyclic GFR-binding peptide
  MOD_RES (3)..(4): Xaa is C or S

SEQ ID NO: 97803 - protein, 42 aa, Artificial Sequence
  Cyclic GFR-binding peptide
  MOD_RES (6)..(7)..(39)..(41): Xaa is C or S
GIPEPXXVPEKMNAISILYFDENKNVVLKKYRNMTVESXAXR

SEQ ID NO: 97804 - protein, 35 aa, Artificial Sequence
  Cyclic GFR-binding peptide
  MOD_RES (6)..(7): Xaa is C or S
RVPSTXXAPVKTEPISMLYLDNGRVLLKFKYEMIV

SEQ ID NO: 97805 - protein, 28 aa, Artificial Sequence
  Cyclic GFR-binding peptide
  MOD_RES (1)..(2): Xaa is C or S
XXAPTQLEPISVLYLDDSSNVIKFKYEN

SEQ ID NO: 97806 - protein, 34 aa, Artificial Sequence
  Cyclic GFR-binding peptide
  MOD_RES (3)..(4): Xaa is C or S
PTXXVPTRLEPISILYLDSANNVVKFKYEDMVVE

SEQ ID NO: 97807 - protein, 21 aa, Artificial Sequence
  Cyclic GFR-binding peptide
LSATSMLYYDENEKVVLRKHR

SEQ ID NO: 97808 - protein, 29 aa, Artificial Sequence
  Cyclic GFR-binding peptide
SQDLSPINILYFIGKTPKIYGKIPMIVKS

SEQ ID NO: 97809 - protein, 31 aa, Artificial Sequence; identical to SEQ ID NO: 10873
  Cyclic GFR-binding peptide
  MOD_RES (5)..(6): Xaa is C or S

SEQ ID NO: 97810 - protein, 33 aa, Artificial Sequence
  Cyclic GFR-binding peptide
  MOD_RES (31)..(33): Xaa is C or S
PTRLEPISILYLDSANNVVKFKYEDMVVESXGX

SEQ ID NO: 97811 - protein, 25 aa, Artificial Sequence
  Cyclic GFR-binding peptide
MSPISMLYKNDKQQIILKYHYGMVV

SEQ ID NO: 97812 - protein, 32 aa, Artificial Sequence; identical to SEQ ID NO: 42819
  Cyclic GFR-binding peptide
  MOD_RES (6)..(7): Xaa is C or S

SEQ ID NO: 97813 - protein, 40 aa, Artificial Sequence; identical to SEQ ID NO: 10874
  Cyclic GFR-binding peptide
  MOD_RES (4)..(5)..(37)..(39): Xaa is C or S

SEQ ID NO: 97814 - protein, 33 aa, Artificial Sequence; identical to SEQ ID NO: 77808
  Cyclic GFR-binding peptide
  MOD_RES (2)..(3): Xaa is C or S

SEQ ID NO: 97815 - protein, 30 aa, Artificial Sequence
  Cyclic GFR-binding peptide
  MOD_RES (1)..(2): Xaa is C or S
XXTPTKMSATSMLYYNDKQQIILRKHRGMV

SEQ ID NO: 97816 - protein, 36 aa, Artificial Sequence; identical to SEQ ID NO: 42823
  Cyclic GFR-binding peptide
  MOD_RES (5)..(6): Xaa is C or S

SEQ ID NO: 97817 - protein, 32 aa, Artificial Sequence
  Cyclic GFR-binding peptide
  MOD_RES (1)..(2): Xaa is C or S
XXVPEKMSPISILYKDENKNVVLKYHYNMTVE

SEQ ID NO: 97818 - protein, 38 aa, Artificial Sequence
  Cyclic GFR-binding peptide
  MOD_RES (4)..(5)..(37): Xaa is C or S
AGPXXTPTKMSPISMLYKNDKQQIILKYHYGMVVDRXG

SEQ ID NO: 97819 - protein, 36 aa, Artificial Sequence; identical to SEQ ID NO: 42827
  Cyclic GFR-binding peptide
  MOD_RES (2)..(3)..(34)..(36): Xaa is C or S

SEQ ID NO: 97820 - protein, 33 aa, Artificial Sequence; identical to SEQ ID NO: 42828
  Cyclic GFR-binding peptide
  MOD_RES (2)..(3): Xaa is C or S

SEQ ID NO: 97821 - protein, 34 aa, Artificial Sequence; identical to SEQ ID NO: 10880
  Cyclic GFR-binding peptide
  MOD_RES (1)..(33): Xaa is C or S

SEQ ID NO: 97822 - protein, 35 aa, Artificial Sequence; identical to SEQ ID NO: 39835
  Cyclic GFR-binding peptide
  MOD_RES (3)..(4): Xaa is C or S

SEQ ID NO: 97823 - protein, 30 aa, Artificial Sequence; identical to SEQ ID NO: 42836
  Cyclic GFR-binding peptide

SEQ ID NO: 97824 - protein, 24 aa, Artificial Sequence
  Cyclic GFR-binding peptide
KLNAISVLYFDDMGVPTLKKYREG

SEQ ID NO: 97825 - protein, 37 aa, Artificial Sequence; identical to SEQ ID NO: 10893
  Cyclic GFR-binding peptide
  MOD_RES (1)..(2)..(34)..(36): Xaa is C or S

SEQ ID NO: 97826 - protein, 27 aa, Artificial Sequence
  Cyclic GFR-binding peptide
  MOD_RES (1)..(1): Xaa is C or S
XVPTELSPISMLYKDEYDKVVLKYHYE

SEQ ID NO: 97827 - protein, 39 aa, Artificial Sequence; identical to SEQ ID NO: 21000
  Cyclic GFR-binding peptide
  MOD_RES (6)..(7)..(39): Xaa is C or S

SEQ ID NO: 97828 - protein, 24 aa, Artificial Sequence
  Cyclic GFR-binding peptide
TKLEPISVLYLDSSNNVIKFKYEN

SEQ ID NO: 97829 - protein, 40 aa, Artificial Sequence; identical to SEQ ID NO: 42850
  Cyclic GFR-binding peptide
  MOD_RES (6)..(7)..(40): Xaa is C or S

SEQ ID NO: 97830 - protein, 36 aa, Artificial Sequence; identical to SEQ ID NO: 39850
  Cyclic GFR-binding peptide
  MOD_RES (1)..(2)..(34)..(36): Xaa is C or S

SEQ ID NO: 97831 - protein, 30 aa, Artificial Sequence; identical to SEQ ID NO: 10896
  Cyclic GFR-binding peptide
  MOD_RES (30)..(30): Xaa is C or S

SEQ ID NO: 97832 - protein, 29 aa, Artificial Sequence
  Cyclic GFR-binding peptide
PTRLNAISILYFDSANNVVLKKYRDMVVE

SEQ ID NO: 97833 - protein, 36 aa, Artificial Sequence; identical to SEQ ID NO: 10898
  Cyclic GFR-binding peptide
  MOD_RES (1)..(2)..(34)..(36): Xaa is C or S

SEQ ID NO: 97834 - protein, 31 aa, Artificial Sequence
  Cyclic GFR-binding peptide
  MOD_RES (1)..(1): Xaa is C or S
XVPEKMSPISILYKDENKNVVLKYHYNMTVE

SEQ ID NO: 97835 - protein, 22 aa, Artificial Sequence
  Cyclic GFR-binding peptide
DLSPISILYKIGKTPKILKYHY

SEQ ID NO: 97836 - protein, 35 aa, Artificial Sequence; identical to SEQ ID NO: 10900
  Cyclic GFR-binding peptide
  MOD_RES (2)..(3)..(34): Xaa is C or S

SEQ ID NO: 97837 - protein, 39 aa, Artificial Sequence; identical to SEQ ID NO: 10902
  Cyclic GFR-binding peptide
  MOD_RES (5)..(6)..(38): Xaa is C or S

SEQ ID NO: 97838 - protein, 28 aa, Artificial Sequence
  Cyclic GFR-binding peptide
  MOD_RES (2)..(3): Xaa is C or S
TXXAPVKTNAISMLYFDNGRVLLLKKYR

SEQ ID NO: 97839 - protein, 35 aa, Artificial Sequence
  Cyclic GFR-binding peptide
  MOD_RES (32)..(34): Xaa is C or S
VPEKMNAISILYFDENKNVVLKKYRNMTVESXAXR

SEQ ID NO: 97840 - protein, 41 aa, Artificial Sequence
  Cyclic GFR-binding peptide
  MOD_RES (5)..(6)..(38)..(40): Xaa is C or S
IPEPXXVPEKMEPISILYLDENKNVVKFKYENMTVESXAXR

SEQ ID NO: 97841 - protein, 37 aa, Artificial Sequence; identical to SEQ ID NO: 10906
  Cyclic GFR-binding peptide
  MOD_RES (5)..(6): Xaa is C or S

SEQ ID NO: 97842 - protein, 33 aa, Artificial Sequence
  Cyclic GFR-binding peptide
  MOD_RES (31)..(33): Xaa is C or S
VPQDLSPINILYFVGRTPKVYGKIPMVVKSXKX

SEQ ID NO: 97843 - protein, 20 aa, Artificial Sequence
  Cyclic GFR-binding peptide
SPINVLYFDDMGVPTYGKIP

SEQ ID NO: 97844 - protein, 39 aa, Artificial Sequence; identical to SEQ ID NO: 10907
  Cyclic GFR-binding peptide
  MOD_RES (6)..(7)..(38): Xaa is C or S

SEQ ID NO: 97845 - protein, 37 aa, Artificial Sequence; identical to SEQ ID NO: 39863
  Cyclic GFR-binding peptide
  MOD_RES (5)..(6): Xaa is C or S

SEQ ID NO: 97846 - protein, 28 aa, Artificial Sequence
  Cyclic GFR-binding peptide
  MOD_RES (26)..(28): Xaa is C or S
NAISILYFIGKTPKILKKYRMIVKSXKX

SEQ ID NO: 97847 - protein, 27 aa, Artificial Sequence
  Cyclic GFR-binding peptide
  MOD_RES (1)..(1): Xaa is C or S
XVPQDLEPISILYLVGRTPKVKFKYEM

SEQ ID NO: 97848 - protein, 30 aa, Artificial Sequence; identical to SEQ ID NO: 39867
  Cyclic GFR-binding peptide
  MOD_RES (1)..(2): Xaa is C or S

SEQ ID NO: 97849 - protein, 31 aa, Artificial Sequence; identical to SEQ ID NO: 10912
  Cyclic GFR-binding peptide
  MOD_RES (31)..(31): Xaa is C or S

SEQ ID NO: 97850 - protein, 34 aa, Artificial Sequence
  Cyclic GFR-binding peptide
  MOD_RES (2)..(3)..(34): Xaa is C or S
TXXAPVKTSPISMLYKDNGRVLLLKYHYMIVEEX

SEQ ID NO: 97851 - protein, 37 aa, Artificial Sequence; identical to SEQ ID NO: 10913
  Cyclic GFR-binding peptide
  MOD_RES (6)..(7): Xaa is C or S

SEQ ID NO: 97852 - protein, 37 aa, Artificial Sequence; identical to SEQ ID NO: 10915
  Cyclic GFR-binding peptide
  MOD_RES (2)..(3)..(34)..(36): Xaa is C or S

SEQ ID NO: 97853 - protein, 24 aa, Artificial Sequence
  Cyclic GFR-binding peptide
RLSPISILYKDAANNVVLKYHYDM

SEQ ID NO: 97854 - protein, 29 aa, Artificial Sequence
  Cyclic GFR-binding peptide
TPTKMEPISMLYLNDKQQIIKFKYEGMVV

SEQ ID NO: 97855 - protein, 32 aa, Artificial Sequence; identical to SEQ ID NO: 42880
  Cyclic GFR-binding peptide
  MOD_RES (4)..(5): Xaa is C or S

SEQ ID NO: 97856 - protein, 33 aa, Artificial Sequence; identical to SEQ ID NO: 77834
  Cyclic GFR-binding peptide
  MOD_RES (32)..(32): Xaa is C or S

SEQ ID NO: 97857 - protein, 34 aa, Artificial Sequence; identical to SEQ ID NO: 42883
  Cyclic GFR-binding peptide
  MOD_RES (5)..(5): Xaa is C or S

SEQ ID NO: 97858 - protein, 29 aa, Artificial Sequence
  Cyclic GFR-binding peptide
  MOD_RES (28)..(28): Xaa is C or S
LSATSILYYDSANNVVLRKHRDMVVESXG

SEQ ID NO: 97859 - protein, 33 aa, Artificial Sequence; identical to SEQ ID NO: 39879
  Cyclic GFR-binding peptide
  MOD_RES (2)..(3): Xaa is C or S

SEQ ID NO: 97860 - protein, 33 aa, Artificial Sequence; identical to SEQ ID NO: 42885
  Cyclic GFR-binding peptide
  MOD_RES (3)..(4): Xaa is C or S

SEQ ID NO: 97861 - protein, 25 aa, Artificial Sequence
  Cyclic GFR-binding peptide
TELEPISMLYLDENEKVVKFKYEDM

SEQ ID NO: 97862 - protein, 27 aa, Artificial Sequence
  Cyclic GFR-binding peptide
PTRLSATSILYYDSANNVVLRKHRDMV

SEQ ID NO: 97863 - protein, 32 aa, Artificial Sequence; identical to SEQ ID NO: 10923
  Cyclic GFR-binding peptide
  MOD_RES (1)..(2): Xaa is C or S

SEQ ID NO: 97864 - protein, 37 aa, Artificial Sequence
  Cyclic GFR-binding peptide
  MOD_RES (5)..(6): Xaa is C or S
APASXXVPARLSATSILYYDAANNVVLRKHRDMVVEA

SEQ ID NO: 97865 - protein, 26 aa, Artificial Sequence
  Cyclic GFR-binding peptide
QDLSATSILYYIGKTPKILRKHRMIV

SEQ ID NO: 97866 - protein, 28 aa, Artificial Sequence
  Cyclic GFR-binding peptide
VPTELSATSMLYYDEYDKVVLRKHREMV

SEQ ID NO: 97867 - protein, 32 aa, Artificial Sequence; identical to SEQ ID NO: 39886
  Cyclic GFR-binding peptide
  MOD_RES (1)..(1): Xaa is C or S

SEQ ID NO: 97868 - protein, 32 aa, Artificial Sequence; identical to SEQ ID NO: 39890
  Cyclic GFR-binding peptide
  MOD_RES (4)..(5): Xaa is C or S

SEQ ID NO: 97869 - protein, 31 aa, Artificial Sequence; identical to SEQ ID NO: 42900
  Cyclic GFR-binding peptide
  MOD_RES (31)..(31): Xaa is C or S

SEQ ID NO: 97870 - protein, 28 aa, Artificial Sequence
  Cyclic GFR-binding peptide
  MOD_RES (2)..(3): Xaa is C or S
PXXTPTKMEPISMLYLNDKQQIIKFKYE

SEQ ID NO: 97871 - protein, 24 aa, Artificial Sequence
  Cyclic GFR-binding peptide
PTKLEPISVLYLDDMGVPTKFKYE

SEQ ID NO: 97872 - protein, 25 aa, Artificial Sequence
  Cyclic GFR-binding peptide
SPINMLYFDENEKVVYGKIPDMVVE

SEQ ID NO: 97873 - protein, 36 aa, Artificial Sequence; identical to SEQ ID NO: 10935
  Cyclic GFR-binding peptide
  MOD_RES (1)..(33)..(35): Xaa is C or S

SEQ ID NO: 97874 - protein, 29 aa, Artificial Sequence
  Cyclic GFR-binding peptide
  MOD_RES (1)..(1): Xaa is C or S
XAPTQLSATSVLYYDDSSNVILRKHRNMV

SEQ ID NO: 97875 - protein, 35 aa, Artificial Sequence
  Cyclic GFR-binding peptide
  MOD_RES (5)..(6): Xaa is C or S
IPEPXXVPEKMSATSILYYDENKNVVLRKHRNMTV

SEQ ID NO: 97876 - protein, 26 aa, Artificial Sequence
  Cyclic GFR-binding peptide
PTKLSPISVLYKDDSSNVILKYHYNM

SEQ ID NO: 97877 - protein, 24 aa, Artificial Sequence
  Cyclic GFR-binding peptide
KMNAISILYFDENKNVVLKKYRNM

SEQ ID NO: 97878 - protein, 28 aa, Artificial Sequence
  Cyclic GFR-binding peptide
  MOD_RES (1)..(1): Xaa is C or S
XAPVKTSATSMLYYDNGRVLLLRKHRMI

SEQ ID NO: 97879 - protein, 26 aa, Artificial Sequence
  Cyclic GFR-binding peptide
EPISILYLDSANNVVKFKYEDMVVES

SEQ ID NO: 97880 - protein, 29 aa, Artificial Sequence
  Cyclic GFR-binding peptide
  MOD_RES (29)..(29): Xaa is C or S
QALNAISILYFVGRKPKVLKKYRMIVRSX

SEQ ID NO: 97881 - protein, 23 aa, Artificial Sequence
  Cyclic GFR-binding peptide
LNAISILYFVGRKPKVLKKYRMI

SEQ ID NO: 97882 - protein, 25 aa, Artificial Sequence
  Cyclic GFR-binding peptide
PTKMSPISMLYKNDKQQIILKYHYG

SEQ ID NO: 97883 - protein, 31 aa, Artificial Sequence; identical to SEQ ID NO: 10951
  Cyclic GFR-binding peptide
  MOD_RES (6)..(6): Xaa is C or S

SEQ ID NO: 97884 - protein, 35 aa, Artificial Sequence; identical to SEQ ID NO: 10952
  Cyclic GFR-binding peptide
  MOD_RES (5)..(6): Xaa is C or S

SEQ ID NO: 97885 - protein, 31 aa, Artificial Sequence
  Cyclic GFR-binding peptide
  MOD_RES (31)..(31): Xaa is C or S
PEKMSATSILYYDENKNVVLRKHRNMTVESX

SEQ ID NO: 97886 - protein, 37 aa, Artificial Sequence; identical to SEQ ID NO: 10954
  Cyclic GFR-binding peptide
  MOD_RES (4)..(5)..(36): Xaa is C or S

SEQ ID NO: 97887 - protein, 30 aa, Artificial Sequence; identical to SEQ ID NO: 39910
  Cyclic GFR-binding peptide
  MOD_RES (29)..(29): Xaa is C or S

SEQ ID NO: 97888 - protein, 33 aa, Artificial Sequence; identical to SEQ ID NO: 10955
  Cyclic GFR-binding peptide
  MOD_RES (1)..(2)..(33): Xaa is C or S

SEQ ID NO: 97889 - protein, 35 aa, Artificial Sequence; identical to SEQ ID NO: 10956
  Cyclic GFR-binding peptide
  MOD_RES (5)..(6): Xaa is C or S

SEQ ID NO: 97890 - protein, 28 aa, Artificial Sequence
  Cyclic GFR-binding peptide
  MOD_RES (28)..(28): Xaa is C or S
ALSPINILYFVGRKPKVYGKIPMIVRSX

SEQ ID NO: 97891 - protein, 34 aa, Artificial Sequence
  Cyclic GFR-binding peptide
  MOD_RES (31)..(33): Xaa is C or S
PTRLSATSILYYDSANNVVLRKHRDMVVESXGXR

SEQ ID NO: 97892 - protein, 29 aa, Artificial Sequence
  Cyclic GFR-binding peptide
PTKLSPINVLYFDSSNNVIYGKIPNMVVK

SEQ ID NO: 97893 - protein, 33 aa, Artificial Sequence
  Cyclic GFR-binding peptide
  MOD_RES (1)..(33): Xaa is C or S
XVPEKMSPINILYFDENKNVVYGKIPNMTVESX

SEQ ID NO: 97894 - protein, 22 aa, Artificial Sequence
  Cyclic GFR-binding peptide
RLNAISILYFDAANNVVLKKYR

SEQ ID NO: 97895 - protein, 32 aa, Artificial Sequence; identical to SEQ ID NO: 39920
  Cyclic GFR-binding peptide
  MOD_RES (1)..(2): Xaa is C or S

SEQ ID NO: 97896 - protein, 31 aa, Artificial Sequence; identical to SEQ ID NO: 42931
  Cyclic GFR-binding peptide
  MOD_RES (2)..(3): Xaa is C or S

SEQ ID NO: 97897 - protein, 28 aa, Artificial Sequence
  Cyclic GFR-binding peptide
  MOD_RES (1)..(2): Xaa is C or S
XXVPQDLSPINILYFVGRTPKVYGKIPM

SEQ ID NO: 97898 - protein, 27 aa, Artificial Sequence
  Cyclic GFR-binding peptide
  MOD_RES (1)..(2): Xaa is C or S
XXVSQDLEPISILYLIGKTPKIKFKYE

SEQ ID NO: 97899 - protein, 25 aa, Artificial Sequence
  Cyclic GFR-binding peptide
KLEPISVLYLDSSNNVIKFKYENMV

SEQ ID NO: 97900 - protein, 32 aa, Artificial Sequence; identical to SEQ ID NO: 42933
  Cyclic GFR-binding peptide
  MOD_RES (4)..(5): Xaa is C or S

SEQ ID NO: 97901 - protein, 29 aa, Artificial Sequence
  Cyclic GFR-binding peptide
  MOD_RES (27)..(29): Xaa is C or S
SATSMLYYNDKQQIILRKHRGMVVDRXGX

SEQ ID NO: 97902 - protein, 36 aa, Artificial Sequence
  Cyclic GFR-binding peptide
  MOD_RES (3)..(4)..(36): Xaa is C or S
ASXXVPARLSATSILYYDAANNVVLRKHRDMVVEAX

SEQ ID NO: 97903 - protein, 38 aa, Artificial Sequence
  Cyclic GFR-binding peptide
  MOD_RES (6)..(7): Xaa is C or S
HVPKPXXAPTKLSATSVLYYDDSSNVILRKHRNMVVRS

SEQ ID NO: 97904 - protein, 37 aa, Artificial Sequence; identical to SEQ ID NO: 39927
  Cyclic GFR-binding peptide
  MOD_RES (1)..(2)..(34)..(36): Xaa is C or S

SEQ ID NO: 97905 - protein, 32 aa, Artificial Sequence; identical to SEQ ID NO: 42938
  Cyclic GFR-binding peptide
  MOD_RES (3)..(4): Xaa is C or S

SEQ ID NO: 97906 - protein, 36 aa, Artificial Sequence; identical to SEQ ID NO: 39929
  Cyclic GFR-binding peptide
  MOD_RES (6)..(6): Xaa is C or S

SEQ ID NO: 97907 - protein, 28 aa, Artificial Sequence
  Cyclic GFR-binding peptide
  MOD_RES (26)..(28): Xaa is C or S
SPISILYKIGKTPKILKYHYMIVKSXKX

SEQ ID NO: 97908 - protein, 39 aa, Artificial Sequence; identical to SEQ ID NO: 39937
  Cyclic GFR-binding peptide
  MOD_RES (5)..(6)..(38): Xaa is C or S

SEQ ID NO: 97909 - protein, 29 aa, Artificial Sequence
  Cyclic GFR-binding peptide
  MOD_RES (3)..(4): Xaa is C or S
KAXXVPTELNAISMLYFDEYDKVVLKKYR

SEQ ID NO: 97910 - protein, 38 aa, Artificial Sequence; identical to SEQ ID NO: 10969
  Cyclic GFR-binding peptide
  MOD_RES (6)..(7): Xaa is C or S

SEQ ID NO: 97911 - protein, 28 aa, Artificial Sequence
  Cyclic GFR-binding peptide
  MOD_RES (27)..(27): Xaa is C or S
SPISILYKDENKNVVLKYHYNMTVESXA

SEQ ID NO: 97912 - protein, 33 aa, Artificial Sequence
  Cyclic GFR-binding peptide
  MOD_RES (4)..(5): Xaa is C or S
SKAXXVPTKLSATSILYYDKGVVTYLRKHRGMA

SEQ ID NO: 97913 - protein, 34 aa, Artificial Sequence
  Cyclic GFR-binding peptide
  MOD_RES (1)..(2)..(34): Xaa is C or S
XXTPTKMEPISMLYLNDKQQIIKFKYEGMVVDRX

SEQ ID NO: 97914 - protein, 40 aa, Artificial Sequence; identical to SEQ ID NO: 10971
  Cyclic GFR-binding peptide
  MOD_RES (5)..(6)..(37)..(39): Xaa is C or S

SEQ ID NO: 97915 - protein, 29 aa, Artificial Sequence
  Cyclic GFR-binding peptide
ARLSPISILYKDAANNVVLKYHYDMVVEA

SEQ ID NO: 97916 - protein, 39 aa, Artificial Sequence; identical to SEQ ID NO: 42956
  Cyclic GFR-binding peptide
  MOD_RES (5)..(6)..(38): Xaa is C or S

SEQ ID NO: 97917 - protein, 28 aa, Artificial Sequence
  Cyclic GFR-binding peptide
  MOD_RES (27)..(27): Xaa is C or S
LNAISILYFVGRKPKVLKKYRMIVRSXK

SEQ ID NO: 97918 - protein, 24 aa, Artificial Sequence
  Cyclic GFR-binding peptide
EPISILYLVGRKPKVKFKYEMIVR

SEQ ID NO: 97919 - protein, 26 aa, Artificial Sequence
  Cyclic GFR-binding peptide
PTELSATSMLYYDENEKVVLRKHRDM

SEQ ID NO: 97920 - protein, 30 aa, Artificial Sequence; identical to SEQ ID NO: 10978
  Cyclic GFR-binding peptide
  MOD_RES (27)..(29): Xaa is C or S

SEQ ID NO: 97921 - protein, 33 aa, Artificial Sequence; identical to SEQ ID NO: 39953
  Cyclic GFR-binding peptide
  MOD_RES (6)..(7): Xaa is C or S

SEQ ID NO: 97922 - protein, 38 aa, Artificial Sequence
  Cyclic GFR-binding peptide
  MOD_RES (3)..(4)..(36)..(38): Xaa is C or S
GPXXTPTKMSATSMLYYNDKQQIILRKHRGMVVDRXGX

SEQ ID NO: 97923 - protein, 37 aa, Artificial Sequence; identical to SEQ ID NO: 42965
  Cyclic GFR-binding peptide
  MOD_RES (5)..(6): Xaa is C or S

SEQ ID NO: 97924 - protein, 35 aa, Artificial Sequence; identical to SEQ ID NO: 42968
  Cyclic GFR-binding peptide
  MOD_RES (5)..(6): Xaa is C or S

SEQ ID NO: 97925 - protein, 28 aa, Artificial Sequence
  Cyclic GFR-binding peptide
  MOD_RES (26)..(28): Xaa is C or S
SATSILYYVGRTPKVLRKHRMVVKSXKX

SEQ ID NO: 97926 - protein, 34 aa, Artificial Sequence; identical to SEQ ID NO: 10984
  Cyclic GFR-binding peptide
  MOD_RES (1)..(33): Xaa is C or S

SEQ ID NO: 97927 - protein, 32 aa, Artificial Sequence; identical to SEQ ID NO: 10985
  Cyclic GFR-binding peptide
  MOD_RES (6)..(7): Xaa is C or S

SEQ ID NO: 97928 - protein, 39 aa, Artificial Sequence; identical to SEQ ID NO: 10986
  Cyclic GFR-binding peptide
  MOD_RES (6)..(7)..(38): Xaa is C or S

SEQ ID NO: 97929 - protein, 37 aa, Artificial Sequence; identical to SEQ ID NO: 42970
  Cyclic GFR-binding peptide
  MOD_RES (3)..(4)..(36): Xaa is C or S

SEQ ID NO: 97930 - protein, 31 aa, Artificial Sequence; identical to SEQ ID NO: 39962
  Cyclic GFR-binding peptide

SEQ ID NO: 97931 - protein, 32 aa, Artificial Sequence; identical to SEQ ID NO: 10989
  Cyclic GFR-binding peptide
  MOD_RES (29)..(31): Xaa is C or S

SEQ ID NO: 97932 - protein, 33 aa, Artificial Sequence
  Cyclic GFR-binding peptide
  MOD_RES (6)..(7): Xaa is C or S
GSAGPXXTPTKMEPISMLYLNDKQQIIKFKYEG

SEQ ID NO: 97933 - protein, 35 aa, Artificial Sequence
  Cyclic GFR-binding peptide
  MOD_RES (1)..(2)..(34): Xaa is C or S
XXVPTRLSATSILYYDSANNVVLRKHRDMVVESXG

SEQ ID NO: 97934 - protein, 31 aa, Artificial Sequence; identical to SEQ ID NO: 42979
  Cyclic GFR-binding peptide
  MOD_RES (29)..(31): Xaa is C or S

SEQ ID NO: 97935 - protein, 26 aa, Artificial Sequence
  Cyclic GFR-binding peptide
VKTSATSMLYYDNGRVLLLRKHRMIV

SEQ ID NO: 97936 - protein, 30 aa, Artificial Sequence; identical to SEQ ID NO: 39971
  Cyclic GFR-binding peptide
  MOD_RES (2)..(3): Xaa is C or S

SEQ ID NO: 97937 - protein, 40 aa, Artificial Sequence; identical to SEQ ID NO: 10994
  Cyclic GFR-binding peptide
  MOD_RES (6)..(7)..(40): Xaa is C or S

SEQ ID NO: 97938 - protein, 32 aa, Artificial Sequence; identical to SEQ ID NO: 10997
  Cyclic GFR-binding peptide
  MOD_RES (1)..(1): Xaa is C or S

SEQ ID NO: 97939 - protein, 36 aa, Artificial Sequence; identical to SEQ ID NO: 39976
  Cyclic GFR-binding peptide
  MOD_RES (6)..(7): Xaa is C or S

SEQ ID NO: 97940 - protein, 39 aa, Artificial Sequence; identical to SEQ ID NO: 42984
  Cyclic GFR-binding peptide
  MOD_RES (5)..(6)..(38): Xaa is C or S

SEQ ID NO: 97941 - protein, 27 aa, Artificial Sequence
  Cyclic GFR-binding peptide
QDLSPINILYFVGRTPKVYGKIPMVVK

SEQ ID NO: 97942 - protein, 34 aa, Artificial Sequence; identical to SEQ ID NO: 11003
  Cyclic GFR-binding peptide
  MOD_RES (1)..(32)..(34): Xaa is C or S

SEQ ID NO: 97943 - protein, 37 aa, Artificial Sequence
  Cyclic GFR-binding peptide
  MOD_RES (3)..(4)..(35)..(37): Xaa is C or S
STXXAPVKTSATSMLYYDNGRVLLLRKHRMIVEEXGX

SEQ ID NO: 97944 - protein, 32 aa, Artificial Sequence; identical to SEQ ID NO: 11005
  Cyclic GFR-binding peptide
  MOD_RES (2)..(2): Xaa is C or S

SEQ ID NO: 97945 - protein, 21 aa, Artificial Sequence
  Cyclic GFR-binding peptide
SATSVLYYDDMGVPTLRKHRE

SEQ ID NO: 97946 - protein, 36 aa, Artificial Sequence; identical to SEQ ID NO: 11008
  Cyclic GFR-binding peptide
  MOD_RES (1)..(33)..(35): Xaa is C or S

SEQ ID NO: 97947 - protein, 29 aa, Artificial Sequence
  Cyclic GFR-binding peptide
  MOD_RES (1)..(1): Xaa is C or S
XVSQDLSATSILYYIGKTPKILRKHRMIV

SEQ ID NO: 97948 - protein, 26 aa, Artificial Sequence
  Cyclic GFR-binding peptide
KLEPISVLYLDSSNNVIKFKYENMVV

SEQ ID NO: 97949 - protein, 32 aa, Artificial Sequence; identical to SEQ ID NO: 42989
  Cyclic GFR-binding peptide
  MOD_RES (31)..(31): Xaa is C or S

SEQ ID NO: 97950 - protein, 26 aa, Artificial Sequence
  Cyclic GFR-binding peptide
TKLSPISILYKDKGVVTYLKYHYGMA

SEQ ID NO: 97951 - protein, 37 aa, Artificial Sequence; identical to SEQ ID NO: 11011
  Cyclic GFR-binding peptide
  MOD_RES (3)..(4)..(36): Xaa is C or S

SEQ ID NO: 97952 - protein, 36 aa, Artificial Sequence; identical to SEQ ID NO: 11012
  Cyclic GFR-binding peptide
  MOD_RES (4)..(5)..(36): Xaa is C or S

SEQ ID NO: 97953 - protein, 29 aa, Artificial Sequence
  Cyclic GFR-binding peptide
  MOD_RES (28)..(28): Xaa is C or S
ALNAISILYFVGRKPKVLKKYRMIVRSXK

SEQ ID NO: 97954 - protein, 28 aa, Artificial Sequence
  Cyclic GFR-binding peptide
  MOD_RES (1)..(2): Xaa is C or S
XXAPVKTNAISMLYFDNGRVLLLKKYRM

SEQ ID NO: 97955 - protein, 25 aa, Artificial Sequence
  Cyclic GFR-binding peptide
KLSPISVLYKDDSSNVILKYHYNMV

SEQ ID NO: 97956 - protein, 26 aa, Artificial Sequence
  Cyclic GFR-binding peptide
VPQDLNAISILYFVGRTPKVLKKYRM

SEQ ID NO: 97957 - protein, 35 aa, Artificial Sequence
  Cyclic GFR-binding peptide
  MOD_RES (4)..(5): Xaa is C or S
AGPXXTPTKMSPISMLYKNDKQQIILKYHYGMVVD

SEQ ID NO: 97958 - protein, 32 aa, Artificial Sequence; identical to SEQ ID NO: 11016
  Cyclic GFR-binding peptide
  MOD_RES (2)..(3): Xaa is C or S

SEQ ID NO: 97959 - protein, 28 aa, Artificial Sequence
  Cyclic GFR-binding peptide
VPTELEPISMLYLDENEKVVKFKYEDMV

SEQ ID NO: 97960 - protein, 22 aa, Artificial Sequence
  Cyclic GFR-binding peptide
KLNAISVLYFDDMGVPTLKKYR

SEQ ID NO: 97961 - protein, 25 aa, Artificial Sequence
  Cyclic GFR-binding peptide
EPISILYLVGRKPKVKFKYEMIVRS

SEQ ID NO: 97962 - protein, 38 aa, Artificial Sequence; identical to SEQ ID NO: 40003
  Cyclic GFR-binding peptide
  MOD_RES (5)..(6)..(38): Xaa is C or S

SEQ ID NO: 97963 - protein, 35 aa, Artificial Sequence; identical to SEQ ID NO: 42997
  Cyclic GFR-binding peptide
  MOD_RES (4)..(4): Xaa is C or S

SEQ ID NO: 97964 - protein, 33 aa, Artificial Sequence; identical to SEQ ID NO: 40005
  Cyclic GFR-binding peptide
  MOD_RES (4)..(4): Xaa is C or S

SEQ ID NO: 97965 - protein, 23 aa, Artificial Sequence
  Cyclic GFR-binding peptide
TKLSATSVLYYDDSSNVILRKHR

SEQ ID NO: 97966 - protein, 34 aa, Artificial Sequence; identical to SEQ ID NO: 43009
  Cyclic GFR-binding peptide
  MOD_RES (31)..(33): Xaa is C or S

SEQ ID NO: 97967 - protein, 25 aa, Artificial Sequence
  Cyclic GFR-binding peptide
PTKLSPISILYKDKGVVTYLKYHYG

SEQ ID NO: 97968 - protein, 34 aa, Artificial Sequence; identical to SEQ ID NO: 40016
  Cyclic GFR-binding peptide
  MOD_RES (4)..(5): Xaa is C or S

SEQ ID NO: 97969 - protein, 28 aa, Artificial Sequence
  Cyclic GFR-binding peptide
PQALSPINILYFVGRKPKVYGKIPMIVR

SEQ ID NO: 97970 - protein, 29 aa, Artificial Sequence
  Cyclic GFR-binding peptide
  MOD_RES (28)..(28): Xaa is C or S
LSPISILYKDKGVVTYLKYHYGMAVSEXG

SEQ ID NO: 97971 - protein, 30 aa, Artificial Sequence
  Cyclic GFR-binding peptide
TPTKMSATSMLYYNDKQQIILRKHRGMVVD

SEQ ID NO: 97972 - protein, 38 aa, Artificial Sequence; identical to SEQ ID NO: 11029
  Cyclic GFR-binding peptide
  MOD_RES (4)..(5)..(37): Xaa is C or S

SEQ ID NO: 97973 - protein, 25 aa, Artificial Sequence
  Cyclic GFR-binding peptide
SPINILYFDENKNVVYGKIPNMTVE

SEQ ID NO: 97974 - protein, 30 aa, Artificial Sequence; identical to SEQ ID NO: 40022
  Cyclic GFR-binding peptide
  MOD_RES (1)..(2): Xaa is C or S

SEQ ID NO: 97975 - protein, 29 aa, Artificial Sequence
  Cyclic GFR-binding peptide
  MOD_RES (28)..(28): Xaa is C or S
ALSPISILYKVGRKPKVLKYHYMIVRSXK

SEQ ID NO: 97976 - protein, 26 aa, Artificial Sequence
  Cyclic GFR-binding peptide
LNAISMLYFDEYDKVVLKKYREMVVE

SEQ ID NO: 97977 - protein, 30 aa, Artificial Sequence
  Cyclic GFR-binding peptide
  MOD_RES (28)..(30): Xaa is C or S
KTEPISMLYLDNGRVLLKFKYEMIVEEXGX

SEQ ID NO: 97978 - protein, 38 aa, Artificial Sequence; identical to SEQ ID NO: 11037
  Cyclic GFR-binding peptide
  MOD_RES (6)..(7): Xaa is C or S

SEQ ID NO: 97979 - protein, 31 aa, Artificial Sequence; identical to SEQ ID NO: 11040
  Cyclic GFR-binding peptide
  MOD_RES (29)..(31): Xaa is C or S

SEQ ID NO: 97980 - protein, 31 aa, Artificial Sequence; identical to SEQ ID NO: 11043
  Cyclic GFR-binding peptide
  MOD_RES (1)..(1): Xaa is C or S

SEQ ID NO: 97981 - protein, 42 aa, Artificial Sequence
  Cyclic GFR-binding peptide
  MOD_RES (6)..(7)..(39)..(41): Xaa is C or S
AAPASXXVPARLSATSILYYDAANNVVLRKHRDMVVEAXGXR

SEQ ID NO: 97982 - protein, 30 aa, Artificial Sequence; identical to SEQ ID NO: 11047
  Cyclic GFR-binding peptide

SEQ ID NO: 97983 - protein, 29 aa, Artificial Sequence
  Cyclic GFR-binding peptide
  MOD_RES (27)..(29): Xaa is C or S
NAISMLYFDEYDKVVLKKYREMVVEGXGX

SEQ ID NO: 97984 - protein, 35 aa, Artificial Sequence
  Cyclic GFR-binding peptide
  MOD_RES (1)..(2)..(34): Xaa is C or S
XXVPTRLEPISILYLDSANNVVKFKYEDMVVESXG

SEQ ID NO: 97985 - protein, 28 aa, Artificial Sequence
  Cyclic GFR-binding peptide
  MOD_RES (1)..(2): Xaa is C or S
XXVPQDLSPISILYKVGRTPKVLKYHYM

SEQ ID NO: 97986 - protein, 37 aa, Artificial Sequence; identical to SEQ ID NO: 11050
  Cyclic GFR-binding peptide
  MOD_RES (2)..(3)..(35)..(37): Xaa is C or S

SEQ ID NO: 97987 - protein, 32 aa, Artificial Sequence; identical to SEQ ID NO: 11053
  Cyclic GFR-binding peptide
  MOD_RES (30)..(32): Xaa is C or S

SEQ ID NO: 97988 - protein, 26 aa, Artificial Sequence
  Cyclic GFR-binding peptide
TEPISMLYLDNGRVLLKFKYEMIVEE

SEQ ID NO: 97989 - protein, 26 aa, Artificial Sequence
  Cyclic GFR-binding peptide
QALSPINILYFVGRKPKVYGKIPMIV

SEQ ID NO: 97990 - protein, 37 aa, Artificial Sequence
  Cyclic GFR-binding peptide
  MOD_RES (6)..(7): Xaa is C or S
RVPSTXXAPVKTEPISMLYLDNGRVLLKFKYEMIVEE

SEQ ID NO: 97991 - protein, 25 aa, Artificial Sequence
  Cyclic GFR-binding peptide
SPISILYKVGRKPKVLKYHYMIVRS

SEQ ID NO: 97992 - protein, 27 aa, Artificial Sequence
  Cyclic GFR-binding peptide
  MOD_RES (1)..(1): Xaa is C or S
XVPTKLNAISVLYFDDMGVPTLKKYRE

SEQ ID NO: 97993 - protein, 33 aa, Artificial Sequence; identical to SEQ ID NO: 11060
  Cyclic GFR-binding peptide
  MOD_RES (3)..(4): Xaa is C or S

SEQ ID NO: 97994 - protein, 37 aa, Artificial Sequence; identical to SEQ ID NO: 11066
  Cyclic GFR-binding peptide
  MOD_RES (4)..(5)..(37): Xaa is C or S

SEQ ID NO: 97995 - protein, 32 aa, Artificial Sequence; identical to SEQ ID NO: 11069
  Cyclic GFR-binding peptide
  MOD_RES (30)..(32): Xaa is C or S

SEQ ID NO: 97996 - protein, 35 aa, Artificial Sequence
  Cyclic GFR-binding peptide
  MOD_RES (4)..(5): Xaa is C or S
AGPXXTPTKMEPISMLYLNDKQQIIKFKYEGMVVD

SEQ ID NO: 97997 - protein, 29 aa, Artificial Sequence
  Cyclic GFR-binding peptide
PVKTNAISMLYFDNGRVLLLKKYRMIVEE

SEQ ID NO: 97998 - protein, 22 aa, Artificial Sequence
  Cyclic GFR-binding peptide
NAISILYFIGKTPKILKKYRMI

SEQ ID NO: 97999 - protein, 22 aa, Artificial Sequence
  Cyclic GFR-binding peptide
ALSPINILYFVGRKPKVYGKIP

SEQ ID NO: 98000 - protein, 31 aa, Artificial Sequence; identical to SEQ ID NO: 43044
  Cyclic GFR-binding peptide
  MOD_RES (1)..(2): Xaa is C or S

SEQ ID NO: 98001 - protein, 32 aa, Artificial Sequence; identical to SEQ ID NO: 43046
  Cyclic GFR-binding peptide
  MOD_RES (4)..(5): Xaa is C or S

SEQ ID NO: 98002 - protein, 35 aa, Artificial Sequence; identical to SEQ ID NO: 40063
  Cyclic GFR-binding peptide
  MOD_RES (33)..(35): Xaa is C or S

SEQ ID NO: 98003 - protein, 36 aa, Artificial Sequence; identical to SEQ ID NO: 11074
  Cyclic GFR-binding peptide
  MOD_RES (3)..(4)..(36): Xaa is C or S

SEQ ID NO: 98004 - protein, 35 aa, Artificial Sequence; identical to SEQ ID NO: 11075
  Cyclic GFR-binding peptide
  MOD_RES (32)..(34): Xaa is C or S

SEQ ID NO: 98005 - protein, 42 aa, Artificial Sequence; identical to SEQ ID NO: 43049
  Cyclic GFR-binding peptide
  MOD_RES (6)..(7)..(39)..(41): Xaa is C or S

SEQ ID NO: 98006 - protein, 31 aa, Artificial Sequence; identical to SEQ ID NO: 11076
  Cyclic GFR-binding peptide
  MOD_RES (28)..(30): Xaa is C or S

SEQ ID NO: 98007 - protein, 24 aa, Artificial Sequence
  Cyclic GFR-binding peptide
LSPINILYFVGRKPKVYGKIPMIV

SEQ ID NO: 98008 - protein, 23 aa, Artificial Sequence
  Cyclic GFR-binding peptide
QLSPISVLYKDDSSNVILKYHYN

SEQ ID NO: 98009 - protein, 39 aa, Artificial Sequence
  Cyclic GFR-binding peptide
  MOD_RES (6)..(7)..(39): Xaa is C or S
GIPEPXXVPEKMSATSILYYDENKNVVLRKHRNMTVESX

SEQ ID NO: 98010 - protein, 35 aa, Artificial Sequence; identical to SEQ ID NO: 11081
  Cyclic GFR-binding peptide
  MOD_RES (4)..(5): Xaa is C or S

SEQ ID NO: 98011 - protein, 42 aa, Artificial Sequence
  Cyclic GFR-binding peptide
  MOD_RES (6)..(7)..(39)..(41): Xaa is C or S
KASKAXXVPTKLSATSILYYDKGVVTYLRKHRGMAVSEXGXR

SEQ ID NO: 98012 - protein, 34 aa, Artificial Sequence
  Cyclic GFR-binding peptide
  MOD_RES (31)..(33): Xaa is C or S
VPQALSPINILYFVGRKPKVYGKIPMIVRSXKXS

SEQ ID NO: 98013 - protein, 20 aa, Artificial Sequence
  Cyclic GFR-binding peptide
SPINVLYFDSSNNVIYGKIP

SEQ ID NO: 98014 - protein, 31 aa, Artificial Sequence
  Cyclic GFR-binding peptide
  MOD_RES (2)..(3): Xaa is C or S
TXXAPVKTEPISMLYLDNGRVLLKFKYEMIV

SEQ ID NO: 98015 - protein, 37 aa, Artificial Sequence; identical to SEQ ID NO: 43063
  Cyclic GFR-binding peptide
  MOD_RES (3)..(4)..(36): Xaa is C or S

SEQ ID NO: 98016 - protein, 39 aa, Artificial Sequence; identical to SEQ ID NO: 40077
  Cyclic GFR-binding peptide
  MOD_RES (5)..(6)..(37)..(39): Xaa is C or S

SEQ ID NO: 98017 - protein, 29 aa, Artificial Sequence
  Cyclic GFR-binding peptide
  MOD_RES (29)..(29): Xaa is C or S
KMNAISMLYFNDKQQIILKKYRGMVVDRX

SEQ ID NO: 98018 - protein, 38 aa, Artificial Sequence
  Cyclic GFR-binding peptide
  MOD_RES (2)..(3)..(35)..(37): Xaa is C or S
PXXTPTKMEPISMLYLNDKQQIIKFKYEGMVVDRXGXS

SEQ ID NO: 98019 - protein, 32 aa, Artificial Sequence; identical to SEQ ID NO: 40080
  Cyclic GFR-binding peptide
  MOD_RES (32)..(32): Xaa is C or S

SEQ ID NO: 98020 - protein, 31 aa, Artificial Sequence; identical to SEQ ID NO: 11087
  Cyclic GFR-binding peptide
  MOD_RES (29)..(31): Xaa is C or S

SEQ ID NO: 98021 - protein, 35 aa, Artificial Sequence; identical to SEQ ID NO: 40084
  Cyclic GFR-binding peptide
  MOD_RES (4)..(5): Xaa is C or S

SEQ ID NO: 98022 - protein, 37 aa, Artificial Sequence; identical to SEQ ID NO: 40085
  Cyclic GFR-binding peptide
  MOD_RES (3)..(4)..(36): Xaa is C or S

SEQ ID NO: 98023 - protein, 25 aa, Artificial Sequence
  Cyclic GFR-binding peptide
LEPISILYLDSANNVVKFKYEDMVV

SEQ ID NO: 98024 - protein, 22 aa, Artificial Sequence
  Cyclic GFR-binding peptide
SPISILYKDKGVVTYLKYHYGM

SEQ ID NO: 98025 - protein, 25 aa, Artificial Sequence
  Cyclic GFR-binding peptide
APTKLSPISVLYKDDSSNVILKYHY

SEQ ID NO: 98026 - protein, 33 aa, Artificial Sequence; identical to SEQ ID NO: 11092
  Cyclic GFR-binding peptide
  MOD_RES (3)..(4): Xaa is C or S

SEQ ID NO: 98027 - protein, 36 aa, Artificial Sequence; identical to SEQ ID NO: 40093
  Cyclic GFR-binding peptide
  MOD_RES (2)..(3)..(34)..(36): Xaa is C or S

SEQ ID NO: 98028 - protein, 36 aa, Artificial Sequence; identical to SEQ ID NO: 11096
  Cyclic GFR-binding peptide
  MOD_RES (1)..(2)..(33)..(35): Xaa is C or S

SEQ ID NO: 98029 - protein, 31 aa, Artificial Sequence
  Cyclic GFR-binding peptide
  MOD_RES (1)..(1): Xaa is C or S
XVPEKMSATSILYYDENKNVVLRKHRNMTVE

SEQ ID NO: 98030 - protein, 23 aa, Artificial Sequence
  Cyclic GFR-binding peptide
SATSMLYYNDKQQIILRKHRGMV

SEQ ID NO: 98031 - protein, 25 aa, Artificial Sequence
  Cyclic GFR-binding peptide
PTQLSATSVLYYDDSSNVILRKHRN

SEQ ID NO: 98032 - protein, 32 aa, Artificial Sequence; identical to SEQ ID NO: 43090
  Cyclic GFR-binding peptide
  MOD_RES (4)..(5): Xaa is C or S

SEQ ID NO: 98033 - protein, 29 aa, Artificial Sequence
  Cyclic GFR-binding peptide
  MOD_RES (26)..(28): Xaa is C or S
SATSILYYVGRTPKVLRKHRMVVKSXKXS

SEQ ID NO: 98034 - protein, 29 aa, Artificial Sequence
  Cyclic GFR-binding peptide
  MOD_RES (28)..(28): Xaa is C or S
LEPISVLYLDSSNNVIKFKYENMVVKAXG

SEQ ID NO: 98035 - protein, 24 aa, Artificial Sequence
  Cyclic GFR-binding peptide
ALNAISILYFVGRKPKVLKKYRMI

SEQ ID NO: 98036 - protein, 26 aa, Artificial Sequence
  Cyclic GFR-binding peptide
SATSVLYYDDMGVPTLRKHREGMSVA

SEQ ID NO: 98037 - protein, 29 aa, Artificial Sequence
  Cyclic GFR-binding peptide
PTELSPISMLYKDENEKVVLKYHYDMVVE

SEQ ID NO: 98038 - protein, 33 aa, Artificial Sequence; identical to SEQ ID NO: 11110
  Cyclic GFR-binding peptide
  MOD_RES (5)..(6): Xaa is C or S

SEQ ID NO: 98039 - protein, 28 aa, Artificial Sequence
  Cyclic GFR-binding peptide
VPTELNAISMLYFDEYDKVVLKKYREMV

SEQ ID NO: 98040 - protein, 28 aa, Artificial Sequence
  Cyclic GFR-binding peptide
  MOD_RES (28)..(28): Xaa is C or S
ALSATSILYYVGRKPKVLRKHRMIVRSX

SEQ ID NO: 98041 - protein, 32 aa, Artificial Sequence
  Cyclic GFR-binding peptide
  MOD_RES (5)..(6): Xaa is C or S
TPPTXXVPTRLSPISILYKDSANNVVLKYHYD

SEQ ID NO: 98042 - protein, 29 aa, Artificial Sequence
  Cyclic GFR-binding peptide
  MOD_RES (27)..(29): Xaa is C or S
LEPISILYLIGKTPKIKFKYEMIVKSXKX

SEQ ID NO: 98043 - protein, 29 aa, Artificial Sequence
  Cyclic GFR-binding peptide
  MOD_RES (2)..(3): Xaa is C or S
PXXAPTQLSPINVLYFDDSSNVIYGKIPN

SEQ ID NO: 98044 - protein, 24 aa, Artificial Sequence
  Cyclic GFR-binding peptide
LEPISILYLVGRTPKVKFKYEMVV

SEQ ID NO: 98045 - protein, 35 aa, Artificial Sequence; identical to SEQ ID NO: 21188
  Cyclic GFR-binding peptide
  MOD_RES (5)..(6): Xaa is C or S

SEQ ID NO: 98046 - protein, 28 aa, Artificial Sequence
  Cyclic GFR-binding peptide
  MOD_RES (28)..(28): Xaa is C or S
LSPISILYKDSANNVVLKYHYDMVVESX

SEQ ID NO: 98047 - protein, 28 aa, Artificial Sequence
  Cyclic GFR-binding peptide
  MOD_RES (2)..(3): Xaa is C or S
PXXTPTKMSATSMLYYNDKQQIILRKHR

SEQ ID NO: 98048 - protein, 36 aa, Artificial Sequence; identical to SEQ ID NO: 40113
  Cyclic GFR-binding peptide
  MOD_RES (4)..(5): Xaa is C or S

SEQ ID NO: 98049 - protein, 36 aa, Artificial Sequence; identical to SEQ ID NO: 11116
  Cyclic GFR-binding peptide
  MOD_RES (4)..(5): Xaa is C or S

SEQ ID NO: 98050 - protein, 39 aa, Artificial Sequence
  Cyclic GFR-binding peptide
  MOD_RES (6)..(7)..(39): Xaa is C or S
STPPTXXVPTRLSPISILYKDSANNVVLKYHYDMVVESX

SEQ ID NO: 98051 - protein, 29 aa, Artificial Sequence
  Cyclic GFR-binding peptide
  MOD_RES (28)..(28): Xaa is C or S
MSATSILYYDENKNVVLRKHRNMTVESXA

SEQ ID NO: 98052 - protein, 20 aa, Artificial Sequence
  Cyclic GFR-binding peptide
NAISILYFVGRTPKVLKKYR

SEQ ID NO: 98053 - protein, 21 aa, Artificial Sequence
  Cyclic GFR-binding peptide
LEPISMLYLDENEKVVKFKYE

SEQ ID NO: 98054 - protein, 23 aa, Artificial Sequence
  Cyclic GFR-binding peptide
QLSPINVLYFDDSSNVIYGKIPN

SEQ ID NO: 98055 - protein, 29 aa, Artificial Sequence
  Cyclic GFR-binding peptide
APTQLSPINVLYFDDSSNVIYGKIPNMVV

SEQ ID NO: 98056 - protein, 30 aa, Artificial Sequence; identical to SEQ ID NO: 11126
  Cyclic GFR-binding peptide
  MOD_RES (29)..(29): Xaa is C or S

SEQ ID NO: 98057 - protein, 33 aa, Artificial Sequence; identical to SEQ ID NO: 40122
  Cyclic GFR-binding peptide
  MOD_RES (3)..(4): Xaa is C or S

SEQ ID NO: 98058 - protein, 31 aa, Artificial Sequence; identical to SEQ ID NO: 43115
  Cyclic GFR-binding peptide
  MOD_RES (31)..(31): Xaa is C or S

SEQ ID NO: 98059 - protein, 27 aa, Artificial Sequence
  Cyclic GFR-binding peptide
  MOD_RES (1)..(1): Xaa is C or S
XVPQALNAISILYFVGRKPKVLKKYRM

SEQ ID NO: 98060 - protein, 31 aa, Artificial Sequence; identical to SEQ ID NO: 11129
  Cyclic GFR-binding peptide
  MOD_RES (2)..(3): Xaa is C or S

SEQ ID NO: 98061 - protein, 26 aa, Artificial Sequence
  Cyclic GFR-binding peptide
ALNAISILYFVGRKPKVLKKYRMIVR

SEQ ID NO: 98062 - protein, 41 aa, Artificial Sequence; identical to SEQ ID NO: 11131
  Cyclic GFR-binding peptide
  MOD_RES (5)..(6)..(38)..(40): Xaa is C or S

SEQ ID NO: 98063 - protein, 37 aa, Artificial Sequence
  Cyclic GFR-binding peptide
  MOD_RES (4)..(5)..(37): Xaa is C or S
PASXXVPARLSATSILYYDAANNVVLRKHRDMVVEAX

SEQ ID NO: 98064 - protein, 32 aa, Artificial Sequence; identical to SEQ ID NO: 40127
  Cyclic GFR-binding peptide
  MOD_RES (7)..(7): Xaa is C or S

SEQ ID NO: 98065 - protein, 33 aa, Artificial Sequence; identical to SEQ ID NO: 11133
  Cyclic GFR-binding peptide
  MOD_RES (30)..(32): Xaa is C or S

SEQ ID NO: 98066 - protein, 32 aa, Artificial Sequence; identical to SEQ ID NO: 40131
  Cyclic GFR-binding peptide
  MOD_RES (6)..(7): Xaa is C or S

SEQ ID NO: 98067 - protein, 34 aa, Artificial Sequence
  Cyclic GFR-binding peptide
  MOD_RES (2)..(3)..(34): Xaa is C or S
TXXAPVKTSATSMLYYDNGRVLLLRKHRMIVEEX

SEQ ID NO: 98068 - protein, 32 aa, Artificial Sequence
  Cyclic GFR-binding peptide
  MOD_RES (1)..(32): Xaa is C or S
XVSQDLSPINILYFIGKTPKIYGKIPMIVKSX

SEQ ID NO: 98069 - protein, 26 aa, Artificial Sequence
  Cyclic GFR-binding peptide
  MOD_RES (1)..(1): Xaa is C or S
XVPQDLSPINILYFVGRTPKVYGKIP

SEQ ID NO: 98070 - protein, 35 aa, Artificial Sequence; identical to SEQ ID NO: 11147
  Cyclic GFR-binding peptide
  MOD_RES (4)..(5): Xaa is C or S

SEQ ID NO: 98071 - protein, 39 aa, Artificial Sequence; identical to SEQ ID NO: 40143
  Cyclic GFR-binding peptide
  MOD_RES (5)..(6)..(38): Xaa is C or S

SEQ ID NO: 98072 - protein, 36 aa, Artificial Sequence; identical to SEQ ID NO: 11148
  Cyclic GFR-binding peptide
  MOD_RES (3)..(4)..(36): Xaa is C or S

SEQ ID NO: 98073 - protein, 33 aa, Artificial Sequence
  Cyclic GFR-binding peptide
  MOD_RES (2)..(3): Xaa is C or S
SXXVPARLSATSILYYDAANNVVLRKHRDMVVE

SEQ ID NO: 98074 - protein, 30 aa, Artificial Sequence; identical to SEQ ID NO: 40146
  Cyclic GFR-binding peptide
  MOD_RES (29)..(29): Xaa is C or S

SEQ ID NO: 98075 - protein, 34 aa, Artificial Sequence; identical to SEQ ID NO: 11151
  Cyclic GFR-binding peptide
  MOD_RES (4)..(5): Xaa is C or S

SEQ ID NO: 98076 - protein, 28 aa, Artificial Sequence
  Cyclic GFR-binding peptide
RLEPISILYLDSANNVVKFKYEDMVVES

SEQ ID NO: 98077 - protein, 37 aa, Artificial Sequence; identical to SEQ ID NO: 40150
  Cyclic GFR-binding peptide
  MOD_RES (1)..(2)..(34)..(36): Xaa is C or S

SEQ ID NO: 98078 - protein, 21 aa, Artificial Sequence
  Cyclic GFR-binding peptide
EPISILYLDSANNVVKFKYED

SEQ ID NO: 98079 - protein, 25 aa, Artificial Sequence
  Cyclic GFR-binding peptide
EPISVLYLDDSSNVIKFKYENMVVR

SEQ ID NO: 98080 - protein, 26 aa, Artificial Sequence
  Cyclic GFR-binding peptide
  MOD_RES (1)..(1): Xaa is C or S
XAPTQLEPISVLYLDDSSNVIKFKYE

SEQ ID NO: 98081 - protein, 26 aa, Artificial Sequence
  Cyclic GFR-binding peptide
TKLNAISVLYFDSSNNVILKKYRNMV

SEQ ID NO: 98082 - protein, 27 aa, Artificial Sequence
  Cyclic GFR-binding peptide
  MOD_RES (1)..(2): Xaa is C or S
XXAPTQLSPISVLYKDDSSNVILKYHY

SEQ ID NO: 98083 - protein, 25 aa, Artificial Sequence
  Cyclic GFR-binding peptide
APVKTNAISMLYFDNGRVLLLKKYR

SEQ ID NO: 98084 - protein, 29 aa, Artificial Sequence
  Cyclic GFR-binding peptide
APTKLSPINVLYFDDSSNVIYGKIPNMVV

SEQ ID NO: 98085 - protein, 29 aa, Artificial Sequence
  Cyclic GFR-binding peptide
  MOD_RES (29)..(29): Xaa is C or S
RLEPISILYLDAANNVVKFKYEDMVVEAX

SEQ ID NO: 98086 - protein, 32 aa, Artificial Sequence; identical to SEQ ID NO: 11156
  Cyclic GFR-binding peptide
  MOD_RES (30)..(32): Xaa is C or S

SEQ ID NO: 98087 - protein, 35 aa, Artificial Sequence; identical to SEQ ID NO: 11157
  Cyclic GFR-binding peptide
  MOD_RES (2)..(3)..(34): Xaa is C or S

SEQ ID NO: 98088 - protein, 32 aa, Artificial Sequence; identical to SEQ ID NO: 40161
  Cyclic GFR-binding peptide
  MOD_RES (6)..(7): Xaa is C or S

SEQ ID NO: 98089 - protein, 22 aa, Artificial Sequence
  Cyclic GFR-binding peptide
EPISVLYLDDSSNVIKFKYENM

SEQ ID NO: 98090 - protein, 40 aa, Artificial Sequence; identical to SEQ ID NO: 11161
  Cyclic GFR-binding peptide
  MOD_RES (6)..(7)..(39): Xaa is C or S

SEQ ID NO: 98091 - protein, 31 aa, Artificial Sequence; identical to SEQ ID NO: 40170
  Cyclic GFR-binding peptide
  MOD_RES (1)..(1): Xaa is C or S

SEQ ID NO: 98092 - protein, 27 aa, Artificial Sequence
  Cyclic GFR-binding peptide
  MOD_RES (1)..(1): Xaa is C or S
XVPEKMSATSILYYDENKNVVLRKHRN

SEQ ID NO: 98093 - protein, 33 aa, Artificial Sequence; identical to SEQ ID NO: 11163
  Cyclic GFR-binding peptide
  MOD_RES (1)..(2)..(33): Xaa is C or S

SEQ ID NO: 98094 - protein, 28 aa, Artificial Sequence
  Cyclic GFR-binding peptide
  MOD_RES (27)..(27): Xaa is C or S
LEPISILYLIGKTPKIKFKYEMIVKSXK

SEQ ID NO: 98095 - protein, 23 aa, Artificial Sequence
  Cyclic GFR-binding peptide
LSATSILYYIGKTPKILRKHRMI

SEQ ID NO: 98096 - protein, 37 aa, Artificial Sequence; identical to SEQ ID NO: 11165
  Cyclic GFR-binding peptide
  MOD_RES (6)..(7): Xaa is C or S

SEQ ID NO: 98097 - protein, 31 aa, Artificial Sequence; identical to SEQ ID NO: 11166
  Cyclic GFR-binding peptide
  MOD_RES (1)..(1): Xaa is C or S

SEQ ID NO: 98098 - protein, 30 aa, Artificial Sequence; identical to SEQ ID NO: 43162
  Cyclic GFR-binding peptide
  MOD_RES (1)..(1): Xaa is C or S

SEQ ID NO: 98099 - protein, 38 aa, Artificial Sequence; identical to SEQ ID NO: 43165
  Cyclic GFR-binding peptide
  MOD_RES (4)..(5)..(37): Xaa is C or S

SEQ ID NO: 98100 - protein, 34 aa, Artificial Sequence; identical to SEQ ID NO: 40177
  Cyclic GFR-binding peptide
  MOD_RES (5)..(6): Xaa is C or S

SEQ ID NO: 98101 - protein, 29 aa, Artificial Sequence
  Cyclic GFR-binding peptide
  MOD_RES (28)..(28): Xaa is C or S
LSPINILYFDAANNVVYGKIPDMVVEAXG

SEQ ID NO: 98102 - protein, 30 aa, Artificial Sequence; identical to SEQ ID NO: 11167
  Cyclic GFR-binding peptide
  MOD_RES (4)..(5): Xaa is C or S

SEQ ID NO: 98103 - protein, 23 aa, Artificial Sequence
  Cyclic GFR-binding peptide
QALSATSILYYVGRKPKVLRKHR

SEQ ID NO: 98104 - protein, 33 aa, Artificial Sequence
  Cyclic GFR-binding peptide
  MOD_RES (6)..(7): Xaa is C or S
GIPEPXXVPEKMSPINILYFDENKNVVYGKIPN

SEQ ID NO: 98105 - protein, 36 aa, Artificial Sequence; identical to SEQ ID NO: 11172
  Cyclic GFR-binding peptide
  MOD_RES (1)..(2)..(34)..(36): Xaa is C or S

SEQ ID NO: 98106 - protein, 28 aa, Artificial Sequence
  Cyclic GFR-binding peptide
PTELSPISMLYKDEYDKVVLKYHYEMVV

SEQ ID NO: 98107 - protein, 42 aa, Artificial Sequence
  Cyclic GFR-binding peptide
  MOD_RES (6)..(7)..(39)..(41): Xaa is C or S
GIPEPXXVPEKMSPISILYKDENKNVVLKYHYNMTVESXAXR

SEQ ID NO: 98108 - protein, 26 aa, Artificial Sequence
  Cyclic GFR-binding peptide
PVKTEPISMLYLDNGRVLLKFKYEMI

SEQ ID NO: 98109 - protein, 32 aa, Artificial Sequence; identical to SEQ ID NO: 11176
  Cyclic GFR-binding peptide
  MOD_RES (31)..(31): Xaa is C or S

SEQ ID NO: 98110 - protein, 31 aa, Artificial Sequence
  Cyclic GFR-binding peptide
  MOD_RES (31)..(31): Xaa is C or S
PEKMEPISILYLDENKNVVKFKYENMTVESX

SEQ ID NO: 98111 - protein, 24 aa, Artificial Sequence
  Cyclic GFR-binding peptide
TKLNAISVLYFDSSNNVILKKYRN

SEQ ID NO: 98112 - protein, 34 aa, Artificial Sequence; identical to SEQ ID NO: 40189
  Cyclic GFR-binding peptide
  MOD_RES (31)..(33): Xaa is C or S

SEQ ID NO: 98113 - protein, 29 aa, Artificial Sequence
  Cyclic GFR-binding peptide
  MOD_RES (2)..(3): Xaa is C or S
TXXVPTRLSPISILYKDSANNVVLKYHYD

SEQ ID NO: 98114 - protein, 35 aa, Artificial Sequence
  Cyclic GFR-binding peptide
  MOD_RES (1)..(33)..(35): Xaa is C or S
XVPEKMSPINILYFDENKNVVYGKIPNMTVESXAX

SEQ ID NO: 98115 - protein, 32 aa, Artificial Sequence
  Cyclic GFR-binding peptide
  MOD_RES (3)..(4): Xaa is C or S
EPXXVPEKMSPINILYFDENKNVVYGKIPNMT

SEQ ID NO: 98116 - protein, 40 aa, Artificial Sequence; identical to SEQ ID NO: 40191
  Cyclic GFR-binding peptide
  MOD_RES (5)..(6)..(38)..(40): Xaa is C or S

SEQ ID NO: 98117 - protein, 30 aa, Artificial Sequence
  Cyclic GFR-binding peptide
  MOD_RES (1)..(2): Xaa is C or S
XXVPEKMEPISILYLDENKNVVKFKYENMT

SEQ ID NO: 98118 - protein, 25 aa, Artificial Sequence
  Cyclic GFR-binding peptide
DLSPISILYKVGRTPKVLKYHYMVV

SEQ ID NO: 98119 - protein, 26 aa, Artificial Sequence
  Cyclic GFR-binding peptide
PTKLSATSILYYDKGVVTYLRKHRGM

SEQ ID NO: 98120 - protein, 27 aa, Artificial Sequence
  Cyclic GFR-binding peptide
  MOD_RES (27)..(27): Xaa is C or S
LSATSILYYVGRKPKVLRKHRMIVRSX

SEQ ID NO: 98121 - protein, 36 aa, Artificial Sequence; identical to SEQ ID NO: 43188
  Cyclic GFR-binding peptide
  MOD_RES (5)..(6): Xaa is C or S

SEQ ID NO: 98122 - protein, 30 aa, Artificial Sequence; identical to SEQ ID NO: 40201
  Cyclic GFR-binding peptide
  MOD_RES (4)..(5): Xaa is C or S

SEQ ID NO: 98123 - protein, 37 aa, Artificial Sequence
  Cyclic GFR-binding peptide
  MOD_RES (5)..(6): Xaa is C or S
IPEPXXVPEKMSPISILYKDENKNVVLKYHYNMTVES

SEQ ID NO: 98124 - protein, 27 aa, Artificial Sequence
  Cyclic GFR-binding peptide
DLSPINILYFIGKTPKIYGKIPMIVKS

SEQ ID NO: 98125 - protein, 33 aa, Artificial Sequence; identical to SEQ ID NO: 40202
  Cyclic GFR-binding peptide
  MOD_RES (5)..(6): Xaa is C or S

SEQ ID NO: 98126 - protein, 28 aa, Artificial Sequence
  Cyclic GFR-binding peptide
QLSATSVLYYDDSSNVILRKHRNMVVRA

SEQ ID NO: 98127 - protein, 26 aa, Artificial Sequence
  Cyclic GFR-binding peptide
EKMEPISILYLDENKNVVKFKYENMT

SEQ ID NO: 98128 - protein, 42 aa, Artificial Sequence; identical to SEQ ID NO: 11193
  Cyclic GFR-binding peptide
  MOD_RES (6)..(7)..(40)..(42): Xaa is C or S

SEQ ID NO: 98129 - protein, 32 aa, Artificial Sequence; identical to SEQ ID NO: 11194
  Cyclic GFR-binding peptide
  MOD_RES (6)..(7): Xaa is C or S

SEQ ID NO: 98130 - protein, 35 aa, Artificial Sequence; identical to SEQ ID NO: 43196
  Cyclic GFR-binding peptide
  MOD_RES (6)..(6): Xaa is C or S

SEQ ID NO: 98131 - protein, 29 aa, Artificial Sequence
  Cyclic GFR-binding peptide
  MOD_RES (1)..(1): Xaa is C or S
XAPTKLSPINVLYFDSSNNVIYGKIPNMV

SEQ ID NO: 98132 - protein, 30 aa, Artificial Sequence
  Cyclic GFR-binding peptide
  MOD_RES (1)..(2): Xaa is C or S
XXVPQALSPINILYFVGRKPKVYGKIPMIV

SEQ ID NO: 98133 - protein, 39 aa, Artificial Sequence
  Cyclic GFR-binding peptide
  MOD_RES (4)..(5)..(37)..(39): Xaa is C or S
PEPXXVPEKMSATSILYYDENKNVVLRKHRNMTVESXAX

SEQ ID NO: 98134 - protein, 29 aa, Artificial Sequence
  Cyclic GFR-binding peptide
  MOD_RES (29)..(29): Xaa is C or S
LEPISVLYLDDMGVPTKFKYEEGMSVAEX

SEQ ID NO: 98135 - protein, 27 aa, Artificial Sequence
  Cyclic GFR-binding peptide
RLNAISILYFDSANNVVLKKYRDMVVE

SEQ ID NO: 98136 - protein, 32 aa, Artificial Sequence; identical to SEQ ID NO: 43202
  Cyclic GFR-binding peptide
  MOD_RES (31)..(31): Xaa is C or S

SEQ ID NO: 98137 - protein, 28 aa, Artificial Sequence
  Cyclic GFR-binding peptide
QALSPINILYFVGRKPKVYGKIPMIVRS

SEQ ID NO: 98138 - protein, 31 aa, Artificial Sequence; identical to SEQ ID NO: 77970
  Cyclic GFR-binding peptide
  MOD_RES (28)..(30): Xaa is C or S

SEQ ID NO: 98139 - protein, 31 aa, Artificial Sequence; identical to SEQ ID NO: 11200
  Cyclic GFR-binding peptide
  MOD_RES (30)..(30): Xaa is C or S

SEQ ID NO: 98140 - protein, 22 aa, Artificial Sequence
  Cyclic GFR-binding peptide
RLSPISILYKDSANNVVLKYHY

SEQ ID NO: 98141 - protein, 30 aa, Artificial Sequence; identical to SEQ ID NO: 11203
  Cyclic GFR-binding peptide

SEQ ID NO: 98142 - protein, 37 aa, Artificial Sequence; identical to SEQ ID NO: 21279
  Cyclic GFR-binding peptide
  MOD_RES (5)..(6): Xaa is C or S

SEQ ID NO: 98143 - protein, 32 aa, Artificial Sequence; identical to SEQ ID NO: 40209
  Cyclic GFR-binding peptide
  MOD_RES (1)..(2): Xaa is C or S

SEQ ID NO: 98144 - protein, 31 aa, Artificial Sequence
  Cyclic GFR-binding peptide
  MOD_RES (31)..(31): Xaa is C or S
PTKMEPISMLYLNDKQQIIKFKYEGMVVDRX

SEQ ID NO: 98145 - protein, 20 aa, Artificial Sequence
  Cyclic GFR-binding peptide
NAISILYFDAANNVVLKKYR

SEQ ID NO: 98146 - protein, 26 aa, Artificial Sequence
  Cyclic GFR-binding peptide
PQALNAISILYFVGRKPKVLKKYRMI

SEQ ID NO: 98147 - protein, 34 aa, Artificial Sequence; identical to SEQ ID NO: 11209
  Cyclic GFR-binding peptide
  MOD_RES (3)..(4): Xaa is C or S

SEQ ID NO: 98148 - protein, 39 aa, Artificial Sequence; identical to SEQ ID NO: 40217
  Cyclic GFR-binding peptide
  MOD_RES (3)..(4)..(36)..(38): Xaa is C or S

SEQ ID NO: 98149 - protein, 27 aa, Artificial Sequence
  Cyclic GFR-binding peptide
PTELSATSMLYYDENEKVVLRKHRDMV

SEQ ID NO: 98150 - protein, 21 aa, Artificial Sequence
  Cyclic GFR-binding peptide
SATSVLYYDDSSNVILRKHRN

SEQ ID NO: 98151 - protein, 29 aa, Artificial Sequence
  Cyclic GFR-binding peptide
  MOD_RES (1)..(1): Xaa is C or S
XVPTELNAISMLYFDENEKVVLKKYRDMV

SEQ ID NO: 98152 - protein, 33 aa, Artificial Sequence; identical to SEQ ID NO: 11216
  Cyclic GFR-binding peptide
  MOD_RES (31)..(33): Xaa is C or S

SEQ ID NO: 98153 - protein, 31 aa, Artificial Sequence; identical to SEQ ID NO: 77981
  Cyclic GFR-binding peptide
  MOD_RES (4)..(5): Xaa is C or S

SEQ ID NO: 98154 - protein, 39 aa, Artificial Sequence; identical to SEQ ID NO: 40224
  Cyclic GFR-binding peptide
  MOD_RES (6)..(7)..(39): Xaa is C or S

SEQ ID NO: 98155 - protein, 39 aa, Artificial Sequence; identical to SEQ ID NO: 43222
  Cyclic GFR-binding peptide
  MOD_RES (4)..(36)..(38): Xaa is C or S

SEQ ID NO: 98156 - protein, 34 aa, Artificial Sequence; identical to SEQ ID NO: 11217
  Cyclic GFR-binding peptide
  MOD_RES (6)..(7): Xaa is C or S

SEQ ID NO: 98157 - protein, 34 aa, Artificial Sequence; identical to SEQ ID NO: 11218
  Cyclic GFR-binding peptide
  MOD_RES (5)..(6): Xaa is C or S

SEQ ID NO: 98158 - protein, 32 aa, Artificial Sequence; identical to SEQ ID NO: 43225
  Cyclic GFR-binding peptide
  MOD_RES (5)..(6): Xaa is C or S

SEQ ID NO: 98159 - protein, 32 aa, Artificial Sequence
  Cyclic GFR-binding peptide
  MOD_RES (29)..(31): Xaa is C or S
KMSATSMLYYNDKQQIILRKHRGMVVDRXGXS

SEQ ID NO: 98160 - protein, 26 aa, Artificial Sequence
  Cyclic GFR-binding peptide
VKTNAISMLYFDNGRVLLLKKYRMIV

SEQ ID NO: 98161 - protein, 28 aa, Artificial Sequence
  Cyclic GFR-binding peptide
  MOD_RES (2)..(3): Xaa is C or S
PXXVPQALSATSILYYVGRKPKVLRKHR

SEQ ID NO: 98162 - protein, 33 aa, Artificial Sequence
  Cyclic GFR-binding peptide
  MOD_RES (31)..(33): Xaa is C or S
PTRLSPISILYKDSANNVVLKYHYDMVVESXGX

SEQ ID NO: 98163 - protein, 27 aa, Artificial Sequence
  Cyclic GFR-binding peptide
LSPISILYKDAANNVVLKYHYDMVVEA

SEQ ID NO: 98164 - protein, 30 aa, Artificial Sequence; identical to SEQ ID NO: 43229
  Cyclic GFR-binding peptide
  MOD_RES (5)..(5): Xaa is C or S

SEQ ID NO: 98165 - protein, 28 aa, Artificial Sequence
  Cyclic GFR-binding peptide
  MOD_RES (28)..(28): Xaa is C or S
LNAISILYFDSANNVVLKKYRDMVVESX

SEQ ID NO: 98166 - protein, 24 aa, Artificial Sequence
  Cyclic GFR-binding peptide
LSPINILYFDKGVVTYYGKIPGMA

SEQ ID NO: 98167 - protein, 35 aa, Artificial Sequence; identical to SEQ ID NO: 11228
  Cyclic GFR-binding peptide
  MOD_RES (6)..(7): Xaa is C or S

SEQ ID NO: 98168 - protein, 29 aa, Artificial Sequence
  Cyclic GFR-binding peptide
EKMSPISILYKDENKNVVLKYHYNMTVES

SEQ ID NO: 98169 - protein, 31 aa, Artificial Sequence
  Cyclic GFR-binding peptide
  MOD_RES (28)..(30): Xaa is C or S
DLSPINILYFVGRTPKVYGKIPMVVKSXKXS

SEQ ID NO: 98170 - protein, 24 aa, Artificial Sequence
  Cyclic GFR-binding peptide
SQDLSPISILYKIGKTPKILKYHY

SEQ ID NO: 98171 - protein, 34 aa, Artificial Sequence; identical to SEQ ID NO: 11231
  Cyclic GFR-binding peptide
  MOD_RES (2)..(3): Xaa is C or S

SEQ ID NO: 98172 - protein, 31 aa, Artificial Sequence; identical to SEQ ID NO: 11232
  Cyclic GFR-binding peptide
  MOD_RES (2)..(3): Xaa is C or S

SEQ ID NO: 98173 - protein, 30 aa, Artificial Sequence; identical to SEQ ID NO: 40241
  Cyclic GFR-binding peptide
  MOD_RES (1)..(1): Xaa is C or S

SEQ ID NO: 98174 - protein, 28 aa, Artificial Sequence
  Cyclic GFR-binding peptide
TKLNAISILYFDKGVVTYLKKYRGMAVS

SEQ ID NO: 98175 - protein, 21 aa, Artificial Sequence
  Cyclic GFR-binding peptide
LSPISMLYKDENEKVVLKYHY

SEQ ID NO: 98176 - protein, 29 aa, Artificial Sequence
  Cyclic GFR-binding peptide
  MOD_RES (29)..(29): Xaa is C or S
LSATSVLYYDDMGVPTLRKHREGMSVAEX

SEQ ID NO: 98177 - protein, 37 aa, Artificial Sequence; identical to SEQ ID NO: 11236
  Cyclic GFR-binding peptide
  MOD_RES (4)..(5)..(37): Xaa is C or S

SEQ ID NO: 98178 - protein, 32 aa, Artificial Sequence; identical to SEQ ID NO: 11237
  Cyclic GFR-binding peptide
  MOD_RES (1)..(2): Xaa is C or S

SEQ ID NO: 98179 - protein, 28 aa, Artificial Sequence
  Cyclic GFR-binding peptide
VPTRLEPISILYLDSANNVVKFKYEDMV

SEQ ID NO: 98180 - protein, 27 aa, Artificial Sequence
  Cyclic GFR-binding peptide
LEPISILYLDSANNVVKFKYEDMVVES

SEQ ID NO: 98181 - protein, 26 aa, Artificial Sequence
  Cyclic GFR-binding peptide
  MOD_RES (1)..(1): Xaa is C or S
XVSQDLSPISILYKIGKTPKILKYHY

SEQ ID NO: 98182 - protein, 23 aa, Artificial Sequence
  Cyclic GFR-binding peptide
LSPISILYKDSANNVVLKYHYDM

SEQ ID NO: 98183 - protein, 38 aa, Artificial Sequence; identical to SEQ ID NO: 11242
  Cyclic GFR-binding peptide
  MOD_RES (5)..(37): Xaa is C or S

SEQ ID NO: 98184 - protein, 32 aa, Artificial Sequence; identical to SEQ ID NO: 11243
  Cyclic GFR-binding peptide
  MOD_RES (7)..(7): Xaa is C or S

SEQ ID NO: 98185 - protein, 32 aa, Artificial Sequence
  Cyclic GFR-binding peptide
  MOD_RES (32)..(32): Xaa is C or S
VPEKMSPINILYFDENKNVVYGKIPNMTVESX

SEQ ID NO: 98186 - protein, 26 aa, Artificial Sequence
  Cyclic GFR-binding peptide
QDLNAISILYFIGKTPKILKKYRMIV

SEQ ID NO: 98187 - protein, 31 aa, Artificial Sequence; identical to SEQ ID NO: 11249
  Cyclic GFR-binding peptide
  MOD_RES (30)..(30): Xaa is C or S

SEQ ID NO: 98188 - protein, 26 aa, Artificial Sequence
  Cyclic GFR-binding peptide
VPTELSPISMLYKDEYDKVVLKYHYE

SEQ ID NO: 98189 - protein, 31 aa, Artificial Sequence
  Cyclic GFR-binding peptide
  MOD_RES (28)..(30): Xaa is C or S
LSATSILYYDSANNVVLRKHRDMVVESXGXR

SEQ ID NO: 98190 - protein, 27 aa, Artificial Sequence
  Cyclic GFR-binding peptide
ELSPISMLYKDENEKVVLKYHYDMVVE

SEQ ID NO: 98191 - protein, 37 aa, Artificial Sequence; identical to SEQ ID NO: 43249
  Cyclic GFR-binding peptide
  MOD_RES (1)..(2)..(34)..(36): Xaa is C or S

SEQ ID NO: 98192 - protein, 36 aa, Artificial Sequence; identical to SEQ ID NO: 40262
  Cyclic GFR-binding peptide
  MOD_RES (1)..(2)..(34)..(36): Xaa is C or S

SEQ ID NO: 98193 - protein, 35 aa, Artificial Sequence
  Cyclic GFR-binding peptide
  MOD_RES (1)..(2)..(34): Xaa is C or S
XXTPTKMSATSMLYYNDKQQIILRKHRGMVVDRXG

SEQ ID NO: 98194 - protein, 25 aa, Artificial Sequence
  Cyclic GFR-binding peptide
APTQLSPINVLYFDDSSNVIYGKIP

SEQ ID NO: 98195 - protein, 31 aa, Artificial Sequence; identical to SEQ ID NO: 11265
  Cyclic GFR-binding peptide
  MOD_RES (1)..(2): Xaa is C or S

SEQ ID NO: 98196 - protein, 32 aa, Artificial Sequence; identical to SEQ ID NO: 11267
  Cyclic GFR-binding peptide
  MOD_RES (1)..(2): Xaa is C or S

SEQ ID NO: 98197 - protein, 20 aa, Artificial Sequence
  Cyclic GFR-binding peptide
NAISMLYFDEYDKVVLKKYR

SEQ ID NO: 98198 - protein, 32 aa, Artificial Sequence; identical to SEQ ID NO: 40273
  Cyclic GFR-binding peptide
  MOD_RES (3)..(4): Xaa is C or S

SEQ ID NO: 98199 - protein, 28 aa, Artificial Sequence
  Cyclic GFR-binding peptide
  MOD_RES (2)..(3): Xaa is C or S
PXXVPEKMNAISILYFDENKNVVLKKYR

SEQ ID NO: 98200 - protein, 33 aa, Artificial Sequence
  Cyclic GFR-binding peptide
  MOD_RES (3)..(4): Xaa is C or S
PTXXVPTRLSATSILYYDSANNVVLRKHRDMVV

SEQ ID NO: 98201 - protein, 38 aa, Artificial Sequence; identical to SEQ ID NO: 11269
  Cyclic GFR-binding peptide
  MOD_RES (2)..(3)..(35)..(37): Xaa is C or S

SEQ ID NO: 98202 - protein, 27 aa, Artificial Sequence
  Cyclic GFR-binding peptide
TKLEPISVLYLDDMGVPTKFKYEEGMS

SEQ ID NO: 98203 - protein, 36 aa, Artificial Sequence; identical to SEQ ID NO: 11281
  Cyclic GFR-binding peptide
  MOD_RES (6)..(7): Xaa is C or S

SEQ ID NO: 98204 - protein, 33 aa, Artificial Sequence; identical to SEQ ID NO: 40287
  Cyclic GFR-binding peptide
  MOD_RES (1)..(2): Xaa is C or S

SEQ ID NO: 98205 - protein, 38 aa, Artificial Sequence; identical to SEQ ID NO: 40289
  Cyclic GFR-binding peptide
  MOD_RES (2)..(3)..(35)..(37): Xaa is C or S

SEQ ID NO: 98206 - protein, 23 aa, Artificial Sequence
  Cyclic GFR-binding peptide
QDLNAISILYFIGKTPKILKKYR

SEQ ID NO: 98207 - protein, 31 aa, Artificial Sequence; identical to SEQ ID NO: 11287
  Cyclic GFR-binding peptide
  MOD_RES (28)..(30): Xaa is C or S

SEQ ID NO: 98208 - protein, 31 aa, Artificial Sequence
  Cyclic GFR-binding peptide
  MOD_RES (30)..(30): Xaa is C or S
TKMSATSMLYYNDKQQIILRKHRGMVVDRXG

SEQ ID NO: 98209 - protein, 31 aa, Artificial Sequence; identical to SEQ ID NO: 78014
  Cyclic GFR-binding peptide
  MOD_RES (1)..(2): Xaa is C or S

SEQ ID NO: 98210 - protein, 26 aa, Artificial Sequence
  Cyclic GFR-binding peptide
VSQDLSPINILYFIGKTPKIYGKIPM

SEQ ID NO: 98211 - protein, 27 aa, Artificial Sequence
  Cyclic GFR-binding peptide
  MOD_RES (1)..(1): Xaa is C or S
XVPTELSPINMLYFDEYDKVVYGKIPE

SEQ ID NO: 98212 - protein, 34 aa, Artificial Sequence; identical to SEQ ID NO: 11292
  Cyclic GFR-binding peptide
  MOD_RES (4)..(5): Xaa is C or S

SEQ ID NO: 98213 - protein, 26 aa, Artificial Sequence
  Cyclic GFR-binding peptide
EPISILYLDENKNVVKFKYENMTVES

SEQ ID NO: 98214 - protein, 34 aa, Artificial Sequence; identical to SEQ ID NO: 40299
  Cyclic GFR-binding peptide
  MOD_RES (32)..(34): Xaa is C or S

SEQ ID NO: 98215 - protein, 28 aa, Artificial Sequence
  Cyclic GFR-binding peptide
RLSPISILYKDAANNVVLKYHYDMVVEA

SEQ ID NO: 98216 - protein, 40 aa, Artificial Sequence; identical to SEQ ID NO: 40305
  Cyclic GFR-binding peptide
  MOD_RES (6)..(7)..(39): Xaa is C or S

SEQ ID NO: 98217 - protein, 36 aa, Artificial Sequence; identical to SEQ ID NO: 11295
  Cyclic GFR-binding peptide
  MOD_RES (6)..(6): Xaa is C or S

SEQ ID NO: 98218 - protein, 30 aa, Artificial Sequence; identical to SEQ ID NO: 78023
  Cyclic GFR-binding peptide
  MOD_RES (1)..(2): Xaa is C or S

SEQ ID NO: 98219 - protein, 34 aa, Artificial Sequence; identical to SEQ ID NO: 40309
  Cyclic GFR-binding peptide
  MOD_RES (3)..(3): Xaa is C or S

SEQ ID NO: 98220 - protein, 25 aa, Artificial Sequence
  Cyclic GFR-binding peptide
LSPISILYKDKGVVTYLKYHYGMAV

SEQ ID NO: 98221 - protein, 39 aa, Artificial Sequence
  Cyclic GFR-binding peptide
  MOD_RES (6)..(7)..(38): Xaa is C or S
ASASPXXVPQDLSPINILYFVGRTPKVYGKIPMVVKSXK

SEQ ID NO: 98222 - protein, 32 aa, Artificial Sequence; identical to SEQ ID NO: 11303
  Cyclic GFR-binding peptide
  MOD_RES (6)..(7): Xaa is C or S

SEQ ID NO: 98223 - protein, 27 aa, Artificial Sequence
  Cyclic GFR-binding peptide
  MOD_RES (1)..(2): Xaa is C or S
XXVPQDLSPINILYFVGRTPKVYGKIP

SEQ ID NO: 98224 - protein, 32 aa, Artificial Sequence; identical to SEQ ID NO: 78026
  Cyclic GFR-binding peptide
  MOD_RES (6)..(7): Xaa is C or S

SEQ ID NO: 98225 - protein, 36 aa, Artificial Sequence; identical to SEQ ID NO: 11305
  Cyclic GFR-binding peptide
  MOD_RES (2)..(3)..(35): Xaa is C or S

SEQ ID NO: 98226 - protein, 27 aa, Artificial Sequence
  Cyclic GFR-binding peptide
  MOD_RES (27)..(27): Xaa is C or S
LSPISILYKVGRKPKVLKYHYMIVRSX

SEQ ID NO: 98227 - protein, 27 aa, Artificial Sequence
  Cyclic GFR-binding peptide
  MOD_RES (26)..(26): Xaa is C or S
SATSILYYVGRTPKVLRKHRMVVKSXK

SEQ ID NO: 98228 - protein, 34 aa, Artificial Sequence; identical to SEQ ID NO: 11309
  Cyclic GFR-binding peptide
  MOD_RES (5)..(6): Xaa is C or S

SEQ ID NO: 98229 - protein, 35 aa, Artificial Sequence; identical to SEQ ID NO: 11312
  Cyclic GFR-binding peptide
  MOD_RES (1)..(32)..(34): Xaa is C or S

SEQ ID NO: 98230 - protein, 35 aa, Artificial Sequence
  Cyclic GFR-binding peptide
  MOD_RES (1)..(2)..(34): Xaa is C or S
XXTPTKMEPISMLYLNDKQQIIKFKYEGMVVDRXG

SEQ ID NO: 98231 - protein, 36 aa, Artificial Sequence; identical to SEQ ID NO: 43304
  Cyclic GFR-binding peptide
  MOD_RES (3)..(35): Xaa is C or S

SEQ ID NO: 98232 - protein, 31 aa, Artificial Sequence
  Cyclic GFR-binding peptide
  MOD_RES (30)..(30): Xaa is C or S
TKMEPISMLYLNDKQQIIKFKYEGMVVDRXG

SEQ ID NO: 98233 - protein, 28 aa, Artificial Sequence
  Cyclic GFR-binding peptide
KLSPINVLYFDDSSNVIYGKIPNMVVRS

SEQ ID NO: 98234 - protein, 28 aa, Artificial Sequence
  Cyclic GFR-binding peptide
ELNAISMLYFDENEKVVLKKYRDMVVEG

SEQ ID NO: 98235 - protein, 36 aa, Artificial Sequence
  Cyclic GFR-binding peptide
  MOD_RES (5)..(6): Xaa is C or S
IPEPXXVPEKMSPISILYKDENKNVVLKYHYNMTVE

SEQ ID NO: 98236 - protein, 25 aa, Artificial Sequence
  Cyclic GFR-binding peptide
VSQDLSPINILYFIGKTPKIYGKIP

SEQ ID NO: 98237 - protein, 33 aa, Artificial Sequence; identical to SEQ ID NO: 11316
  Cyclic GFR-binding peptide
  MOD_RES (2)..(3): Xaa is C or S

SEQ ID NO: 98238 - protein, 28 aa, Artificial Sequence
  Cyclic GFR-binding peptide
  MOD_RES (28)..(28): Xaa is C or S
LEPISVLYLDSSNNVIKFKYENMVVKAX

SEQ ID NO: 98239 - protein, 37 aa, Artificial Sequence; identical to SEQ ID NO: 40334
  Cyclic GFR-binding peptide
  MOD_RES (3)..(4)..(36): Xaa is C or S

SEQ ID NO: 98240 - protein, 31 aa, Artificial Sequence; identical to SEQ ID NO: 11319
  Cyclic GFR-binding peptide
  MOD_RES (1)..(2): Xaa is C or S

SEQ ID NO: 98241 - protein, 32 aa, Artificial Sequence
  Cyclic GFR-binding peptide
  MOD_RES (1)..(3): Xaa is C or S
XGXEEVIMSMEGILLVRGNDMIQMTINSTKVP

SEQ ID NO: 98242 - protein, 27 aa, Artificial Sequence
  Cyclic GFR-binding peptide
RDVVMGSMEGIIIQQKDNMIQMTINSM

SEQ ID NO: 98243 - protein, 35 aa, Artificial Sequence
  Cyclic GFR-binding peptide
  MOD_RES (31)..(32): Xaa is C or S
EVVMDSMEGIVVNNASDMIQITINSLRTPVXXTPP

SEQ ID NO: 98244 - protein, 31 aa, Artificial Sequence; identical to SEQ ID NO: 21373
  Cyclic GFR-binding peptide
  MOD_RES (30)..(30): Xaa is C or S

SEQ ID NO: 98245 - protein, 37 aa, Artificial Sequence
  Cyclic GFR-binding peptide
  MOD_RES (32)..(33): Xaa is C or S
AEVVMDSMEGLVVNNAADMIQITINSLRAPVXXSAPA

SEQ ID NO: 98246 - protein, 36 aa, Artificial Sequence; identical to SEQ ID NO: 21375
  Cyclic GFR-binding peptide
  MOD_RES (1)..(3): Xaa is C or S

SEQ ID NO: 98247 - protein, 34 aa, Artificial Sequence; identical to SEQ ID NO: 21376
  Cyclic GFR-binding peptide
  MOD_RES (34)..(34): Xaa is C or S

SEQ ID NO: 98248 - protein, 20 aa, Artificial Sequence
  Cyclic GFR-binding peptide
SMEGILLVRGNDMIQMTINS

SEQ ID NO: 98249 - protein, 24 aa, Artificial Sequence
  Cyclic GFR-binding peptide
VVMDSMEGIVVNNAADMIQITINS

SEQ ID NO: 98250 - protein, 34 aa, Artificial Sequence
  Cyclic GFR-binding peptide
  MOD_RES (31)..(32): Xaa is C or S
EEVIMSMEGLLLVRGNDMIQMTINSTKVPAXXTS

SEQ ID NO: 98251 - protein, 34 aa, Artificial Sequence
  Cyclic GFR-binding peptide
  MOD_RES (29)..(30): Xaa is C or S
VMDSMEGIVVNNASDMIQITINSLRTPVXXTPPT

SEQ ID NO: 98252 - protein, 27 aa, Artificial Sequence
  Cyclic GFR-binding peptide
  MOD_RES (26)..(27): Xaa is C or S
SMEGLVVNNAADMIQITINSLRAPVXX

SEQ ID NO: 98253 - protein, 28 aa, Artificial Sequence
  Cyclic GFR-binding peptide
VMNSMEGIIVNSSDDMIQVTINSLKTPA

SEQ ID NO: 98254 - protein, 21 aa, Artificial Sequence
  Cyclic GFR-binding peptide
DSMEGIVVNNAADMIQITINS

SEQ ID NO: 98255 - protein, 26 aa, Artificial Sequence
  Cyclic GFR-binding peptide
ELRSMEGILKPKKRVYEMIQVTINSH

SEQ ID NO: 98256 - protein, 23 aa, Artificial Sequence
  Cyclic GFR-binding peptide
MDSMEGLVVNNASDMIQITINSL

SEQ ID NO: 98257 - protein, 31 aa, Artificial Sequence; identical to SEQ ID NO: 21389
  Cyclic GFR-binding peptide
  MOD_RES (2)..(2): Xaa is C or S

SEQ ID NO: 98258 - protein, 32 aa, Artificial Sequence; identical to SEQ ID NO: 21390
  Cyclic GFR-binding peptide
  MOD_RES (31)..(31): Xaa is C or S

SEQ ID NO: 98259 - protein, 31 aa, Artificial Sequence
  Cyclic GFR-binding peptide
AEVVMDSMEGLVVNNAADMIQITINSLRAPV

SEQ ID NO: 98260 - protein, 35 aa, Artificial Sequence
  Cyclic GFR-binding peptide
  MOD_RES (32)..(33): Xaa is C or S
AEVVMDSMEGIVVNNAADMIQITINSLRAPVXXSA

SEQ ID NO: 98261 - protein, 29 aa, Artificial Sequence
  Cyclic GFR-binding peptide
  MOD_RES (29)..(29): Xaa is C or S
FSMEGLHQGQHPKIRMIQMTINSEETPVX

SEQ ID NO: 98262 - protein, 36 aa, Artificial Sequence; identical to SEQ ID NO: 21397
  Cyclic GFR-binding peptide
  MOD_RES (1)..(3): Xaa is C or S

SEQ ID NO: 98263 - protein, 39 aa, Artificial Sequence; identical to SEQ ID NO: 21398
  Cyclic GFR-binding peptide
  MOD_RES (1)..(38): Xaa is C or S

SEQ ID NO: 98264 - protein, 26 aa, Artificial Sequence
  Cyclic GFR-binding peptide
SRVVMNSMEGLIVNSSDDMIQVTINS

SEQ ID NO: 98265 - protein, 25 aa, Artificial Sequence
  Cyclic GFR-binding peptide
KVIMSMEGLIKPTKGIMIQITINSL

SEQ ID NO: 98266 - protein, 39 aa, Artificial Sequence
  Cyclic GFR-binding peptide
  MOD_RES (2)..(4)..(35)..(36): Xaa is C or S
SXKXSKVVMSMEGLVKPTRGVMIQITINSLDQPVXXPSA

SEQ ID NO: 98267 - protein, 34 aa, Artificial Sequence; identical to SEQ ID NO: 21401
  Cyclic GFR-binding peptide
  MOD_RES (2)..(4): Xaa is C or S

SEQ ID NO: 98268 - protein, 28 aa, Artificial Sequence
  Cyclic GFR-binding peptide
  MOD_RES (27)..(28): Xaa is C or S
MSMEGLIKPTKGIMIQITINSLDQSVXX

SEQ ID NO: 98269 - protein, 39 aa, Artificial Sequence; identical to SEQ ID NO: 65274
  Cyclic GFR-binding peptide
  MOD_RES (2)..(4)..(36)..(37): Xaa is C or S

SEQ ID NO: 98270 - protein, 32 aa, Artificial Sequence; identical to SEQ ID NO: 61852
  Cyclic GFR-binding peptide
  MOD_RES (29)..(30): Xaa is C or S

SEQ ID NO: 98271 - protein, 33 aa, Artificial Sequence
  Cyclic GFR-binding peptide
  MOD_RES (2)..(4): Xaa is C or S
SXKXSRVIMSMEGLVKPKRGVMIQITINSLAQP

SEQ ID NO: 98272 - protein, 33 aa, Artificial Sequence; identical to SEQ ID NO: 65279
  Cyclic GFR-binding peptide
  MOD_RES (1)..(33): Xaa is C or S

SEQ ID NO: 98273 - protein, 31 aa, Artificial Sequence; identical to SEQ ID NO: 65282
  Cyclic GFR-binding peptide
  MOD_RES (30)..(31): Xaa is C or S

SEQ ID NO: 98274 - protein, 34 aa, Artificial Sequence
  Cyclic GFR-binding peptide
  MOD_RES (1)..(3): Xaa is C or S
XGXRDVVMGSMEGIIIQQKDNMIQMTINSMKTPT

SEQ ID NO: 98275 - protein, 29 aa, Artificial Sequence
  Cyclic GFR-binding peptide
EELRSMEGILKPKKRVYEMIQVTINSHHV

SEQ ID NO: 98276 - protein, 35 aa, Artificial Sequence; identical to SEQ ID NO: 21409
  Cyclic GFR-binding peptide
  MOD_RES (35)..(35): Xaa is C or S

SEQ ID NO: 98277 - protein, 23 aa, Artificial Sequence
  Cyclic GFR-binding peptide
SMEGLVKPKRGVMIQITINSLAQ

SEQ ID NO: 98278 - protein, 30 aa, Artificial Sequence
  Cyclic GFR-binding peptide
  MOD_RES (27)..(28): Xaa is C or S
GSMEGIIIQQKDNMIQMTINSMKTPTXXPG

SEQ ID NO: 98279 - protein, 31 aa, Artificial Sequence
  Cyclic GFR-binding peptide
  MOD_RES (26)..(27): Xaa is C or S
SMEGIVVNNASDMIQITINSLRTPVXXTPPT

SEQ ID NO: 98280 - protein, 30 aa, Artificial Sequence
  Cyclic GFR-binding peptide
  MOD_RES (30)..(30): Xaa is C or S
RVIMSMEGLVKPKRGVMIQITINSLAQPVX

SEQ ID NO: 98281 - protein, 33 aa, Artificial Sequence
  Cyclic GFR-binding peptide
  MOD_RES (27)..(28): Xaa is C or S
MSMEGLLLVRGNDMIQMTINSTKVPAXXTSPVR

SEQ ID NO: 98282 - protein, 32 aa, Artificial Sequence
  Cyclic GFR-binding peptide
  MOD_RES (1)..(3): Xaa is C or S
XGXSRVVMNSMEGLIVNSSDDMIQVTINSLKT

SEQ ID NO: 98283 - protein, 26 aa, Artificial Sequence
  Cyclic GFR-binding peptide
DSMEGIVVNNASDMIQITINSLRTPV

SEQ ID NO: 98284 - protein, 35 aa, Artificial Sequence
  Cyclic GFR-binding peptide
  MOD_RES (1)..(3)..(34)..(35): Xaa is C or S
XGXEEVIMSMEGLLLVRGNDMIQMTINSTKVPAXX

SEQ ID NO: 98285 - protein, 30 aa, Artificial Sequence
  Cyclic GFR-binding peptide
  MOD_RES (27)..(28): Xaa is C or S
MSMEGLVKPKRGVMIQITINSLAQPVXXPA

SEQ ID NO: 98286 - protein, 28 aa, Artificial Sequence
  Cyclic GFR-binding peptide
KVIMSMEGIIKPTKGIMIQITINSLDQS

SEQ ID NO: 98287 - protein, 41 aa, Artificial Sequence
  Cyclic GFR-binding peptide
  MOD_RES (1)..(3)..(35)..(36): Xaa is C or S
XGXRDVVMGSMEGLIIQQKDNMIQMTINSMKTPTXXPGASG

SEQ ID NO: 98288 - protein, 22 aa, Artificial Sequence
  Cyclic GFR-binding peptide
VMSMEGIVKPTRGVMIQITINS

SEQ ID NO: 98289 - protein, 38 aa, Artificial Sequence; identical to SEQ ID NO: 61873
  Cyclic GFR-binding peptide
  MOD_RES (1)..(3)..(34)..(35): Xaa is C or S

SEQ ID NO: 98290 - protein, 40 aa, Artificial Sequence; identical to SEQ ID NO: 21421
  Cyclic GFR-binding peptide
  MOD_RES (1)..(35): Xaa is C or S

SEQ ID NO: 98291 - protein, 28 aa, Artificial Sequence
  Cyclic GFR-binding peptide
RSMEGLLKPKKRVYEMIQVTINSHHVRS

SEQ ID NO: 98292 - protein, 33 aa, Artificial Sequence
  Cyclic GFR-binding peptide
  MOD_RES (27)..(28): Xaa is C or S
DSMEGIVVNNASDMIQITINSLRTPVXXTPPTS

SEQ ID NO: 98293 - protein, 37 aa, Artificial Sequence; identical to SEQ ID NO: 21424
  Cyclic GFR-binding peptide
  MOD_RES (35)..(35): Xaa is C or S

SEQ ID NO: 98294 - protein, 26 aa, Artificial Sequence
  Cyclic GFR-binding peptide
EEVIMSMEGLLLVRGNDMIQMTINST

SEQ ID NO: 98295 - protein, 38 aa, Artificial Sequence
  Cyclic GFR-binding peptide
  MOD_RES (2)..(33)..(34): Xaa is C or S
KXSKVIMSMEGLIKPTKGIMIQITINSLDQSVXXPSAS

SEQ ID NO: 98296 - protein, 30 aa, Artificial Sequence
  Cyclic GFR-binding peptide
  MOD_RES (1)..(3): Xaa is C or S
XGXEEVIMSMEGLLLVRGNDMIQMTINSTK

SEQ ID NO: 98297 - protein, 32 aa, Artificial Sequence
  Cyclic GFR-binding peptide
  MOD_RES (28)..(29): Xaa is C or S
MDSMEGLVVNNASDMIQITINSLRTPVXXTPP

SEQ ID NO: 98298 - protein, 32 aa, Artificial Sequence; identical to SEQ ID NO: 21439
  Cyclic GFR-binding peptide

SEQ ID NO: 98299 - protein, 40 aa, Artificial Sequence; identical to SEQ ID NO: 21440
  Cyclic GFR-binding peptide
  MOD_RES (37)..(37): Xaa is C or S

SEQ ID NO: 98300 - protein, 37 aa, Artificial Sequence; identical to SEQ ID NO: 21442
  Cyclic GFR-binding peptide
  MOD_RES (31)..(31): Xaa is C or S

SEQ ID NO: 98301 - protein, 34 aa, Artificial Sequence; identical to SEQ ID NO: 21443
  Cyclic GFR-binding peptide
  MOD_RES (1)..(3): Xaa is C or S

SEQ ID NO: 98302 - protein, 24 aa, Artificial Sequence
  Cyclic GFR-binding peptide
KVVMSMEGIVKPTRGVMIQITINS

SEQ ID NO: 98303 - protein, 36 aa, Artificial Sequence
  Cyclic GFR-binding peptide
  MOD_RES (31)..(32): Xaa is C or S
EEVIMSMEGLLLVRGNDMIQMTINSTKVPAXXTSPV

SEQ ID NO: 98304 - protein, 35 aa, Artificial Sequence
  Cyclic GFR-binding peptide
  MOD_RES (1)..(32)..(33): Xaa is C or S
XEEVIMSMEGLLLVRGNDMIQMTINSTKVPAXXTS

SEQ ID NO: 98305 - protein, 39 aa, Artificial Sequence; identical to SEQ ID NO: 21448
  Cyclic GFR-binding peptide
  MOD_RES (1)..(3)..(37): Xaa is C or S

SEQ ID NO: 98306 - protein, 31 aa, Artificial Sequence; identical to SEQ ID NO: 21450
  Cyclic GFR-binding peptide
  MOD_RES (30)..(30): Xaa is C or S

SEQ ID NO: 98307 - protein, 45 aa, Artificial Sequence; identical to SEQ ID NO: 21451
  Cyclic GFR-binding peptide
  MOD_RES (2)..(4)..(41): Xaa is C or S

SEQ ID NO: 98308 - protein, 34 aa, Artificial Sequence; identical to SEQ ID NO: 21452
  Cyclic GFR-binding peptide
  MOD_RES (30)..(30): Xaa is C or S

SEQ ID NO: 98309 - protein, 28 aa, Artificial Sequence
  Cyclic GFR-binding peptide
  MOD_RES (1)..(1): Xaa is C or S
XEEVIMSMEGILLVRGNDMIQMTINSTK

SEQ ID NO: 98310 - protein, 23 aa, Artificial Sequence
  Cyclic GFR-binding peptide
DSMEGIVVNNASDMIQITINSLR

SEQ ID NO: 98311 - protein, 38 aa, Artificial Sequence; identical to SEQ ID NO: 21458
  Cyclic GFR-binding peptide
  MOD_RES (34)..(34): Xaa is C or S

SEQ ID NO: 98312 - protein, 31 aa, Artificial Sequence; identical to SEQ ID NO: 21460
  Cyclic GFR-binding peptide

SEQ ID NO: 98313 - protein, 27 aa, Artificial Sequence
  Cyclic GFR-binding peptide
KVIMSMEGLIKPTKGIMIQITINSLDQ

SEQ ID NO: 98314 - protein, 27 aa, Artificial Sequence
  Cyclic GFR-binding peptide
SMEGIFIPKKRVIEMIQVTINSLQVQT

SEQ ID NO: 98315 - protein, 27 aa, Artificial Sequence
  Cyclic GFR-binding peptide
SKVVMSMEGLVKPTRGVMIQITINSLD

SEQ ID NO: 98316 - protein, 27 aa, Artificial Sequence
  Cyclic GFR-binding peptide
  MOD_RES (27)..(27): Xaa is C or S
MSMEGLLLVRGNDMIQMTINSTKVPAX

SEQ ID NO: 98317 - protein, 34 aa, Artificial Sequence; identical to SEQ ID NO: 21466
  Cyclic GFR-binding peptide
  MOD_RES (33)..(33): Xaa is C or S

SEQ ID NO: 98318 - protein, 33 aa, Artificial Sequence
  Cyclic GFR-binding peptide
  MOD_RES (27)..(28): Xaa is C or S
MSMEGLVKPKRGVMIQITINSLAQPVXXPAASA

SEQ ID NO: 98319 - protein, 40 aa, Artificial Sequence; identical to SEQ ID NO: 21469
  Cyclic GFR-binding peptide
  MOD_RES (36)..(36): Xaa is C or S

SEQ ID NO: 98320 - protein, 22 aa, Artificial Sequence
  Cyclic GFR-binding peptide
MGSMEGLIIQQKDNMIQMTINS

SEQ ID NO: 98321 - protein, 31 aa, Artificial Sequence; identical to SEQ ID NO: 65331
  Cyclic GFR-binding peptide
  MOD_RES (28)..(29): Xaa is C or S

SEQ ID NO: 98322 - protein, 35 aa, Artificial Sequence; identical to SEQ ID NO: 65332
  Cyclic GFR-binding peptide
  MOD_RES (2)..(4)..(35): Xaa is C or S

SEQ ID NO: 98323 - protein, 23 aa, Artificial Sequence
  Cyclic GFR-binding peptide
MSMEGIVKPTRGVMIQITINSLD

SEQ ID NO: 98324 - protein, 28 aa, Artificial Sequence
  Cyclic GFR-binding peptide
  MOD_RES (28)..(28): Xaa is C or S
SMEGIHQGQHPKIRMIQMTINSEETPVX

SEQ ID NO: 98325 - protein, 37 aa, Artificial Sequence; identical to SEQ ID NO: 65341
  Cyclic GFR-binding peptide
  MOD_RES (2)..(33)..(34): Xaa is C or S

SEQ ID NO: 98326 - protein, 32 aa, Artificial Sequence; identical to SEQ ID NO: 21476
  Cyclic GFR-binding peptide
  MOD_RES (31)..(31): Xaa is C or S

SEQ ID NO: 98327 - protein, 36 aa, Artificial Sequence
  Cyclic GFR-binding peptide
  MOD_RES (2)..(34)..(35): Xaa is C or S
GXRDVVMGSMEGLIIQQKDNMIQMTINSMKTPTXXP

SEQ ID NO: 98328 - protein, 35 aa, Artificial Sequence; identical to SEQ ID NO: 21477
  Cyclic GFR-binding peptide
  MOD_RES (33)..(33): Xaa is C or S

SEQ ID NO: 98329 - protein, 33 aa, Artificial Sequence
  Cyclic GFR-binding peptide
  MOD_RES (31)..(32): Xaa is C or S
EVVMDSMEGIVVNNAADMIQITINSLRAPVXXS

SEQ ID NO: 98330 - protein, 31 aa, Artificial Sequence; identical to SEQ ID NO: 21483
  Cyclic GFR-binding peptide
  MOD_RES (2)..(2): Xaa is C or S

SEQ ID NO: 98331 - protein, 33 aa, Artificial Sequence
  Cyclic GFR-binding peptide
  MOD_RES (28)..(29): Xaa is C or S
MDSMEGLVVNNAADMIQITINSLRAPVXXSAPA

SEQ ID NO: 98332 - protein, 40 aa, Artificial Sequence
  Cyclic GFR-binding peptide
  MOD_RES (1)..(3)..(35)..(36): Xaa is C or S
XGXAEVVMDSMEGIVVNNAADMIQITINSLRAPVXXSAPA

SEQ ID NO: 98333 - protein, 29 aa, Artificial Sequence
  Cyclic GFR-binding peptide
  MOD_RES (26)..(27): Xaa is C or S
SMEGLVKPTRGVMIQITINSLDQPVXXPS

SEQ ID NO: 98334 - protein, 29 aa, Artificial Sequence
  Cyclic GFR-binding peptide
  MOD_RES (1)..(1): Xaa is C or S
XSRVIMSMEGIVKPKRGVMIQITINSLAQ

SEQ ID NO: 98335 - protein, 41 aa, Artificial Sequence; identical to SEQ ID NO: 21488
  Cyclic GFR-binding peptide
  MOD_RES (1)..(38): Xaa is C or S

SEQ ID NO: 98336 - protein, 34 aa, Artificial Sequence; identical to SEQ ID NO: 61933
  Cyclic GFR-binding peptide
  MOD_RES (1)..(3)..(34): Xaa is C or S

SEQ ID NO: 98337 - protein, 32 aa, Artificial Sequence
  Cyclic GFR-binding peptide
  MOD_RES (31)..(32): Xaa is C or S
SRVIMSMEGLVKPKRGVMIQITINSLAQPVXX

SEQ ID NO: 98338 - protein, 38 aa, Artificial Sequence
  Cyclic GFR-binding peptide
  MOD_RES (32)..(33): Xaa is C or S
SEVVMDSMEGLVVNNASDMIQITINSLRTPVXXTPPTS

SEQ ID NO: 98339 - protein, 37 aa, Artificial Sequence; identical to SEQ ID NO: 21493
  Cyclic GFR-binding peptide
  MOD_RES (33)..(33): Xaa is C or S

SEQ ID NO: 98340 - protein, 29 aa, Artificial Sequence
  Cyclic GFR-binding peptide
  MOD_RES (1)..(3): Xaa is C or S
XGXSRVVMNSMEGIIVNSSDDMIQVTINS

SEQ ID NO: 98341 - protein, 35 aa, Artificial Sequence; identical to SEQ ID NO: 65362
  Cyclic GFR-binding peptide
  MOD_RES (29)..(30): Xaa is C or S

SEQ ID NO: 98342 - protein, 28 aa, Artificial Sequence
  Cyclic GFR-binding peptide
SKVIMSMEGIIKPTKGIMIQITINSLDQ

SEQ ID NO: 98343 - protein, 41 aa, Artificial Sequence
  Cyclic GFR-binding peptide
  MOD_RES (1)..(3)..(35)..(36): Xaa is C or S
XGXSRVVMNSMEGLIVNSSDDMIQVTINSLKTPAXXPKPVH

SEQ ID NO: 98344 - protein, 27 aa, Artificial Sequence
  Cyclic GFR-binding peptide
IMSMEGLLLVRGNDMIQMTINSTKVPA

SEQ ID NO: 98345 - protein, 26 aa, Artificial Sequence
  Cyclic GFR-binding peptide
  MOD_RES (26)..(26): Xaa is C or S
SMEGIVKPTRGVMIQITINSLDQPVX

SEQ ID NO: 98346 - protein, 31 aa, Artificial Sequence; identical to SEQ ID NO: 65366
  Cyclic GFR-binding peptide
  MOD_RES (1)..(3): Xaa is C or S

SEQ ID NO: 98347 - protein, 25 aa, Artificial Sequence
  Cyclic GFR-binding peptide
SMEGLFIPKKRVIEMIQVTINSLQV

SEQ ID NO: 98348 - protein, 29 aa, Artificial Sequence
  Cyclic GFR-binding peptide
  MOD_RES (1)..(1): Xaa is C or S
XSKVIMSMEGLIKPTKGIMIQITINSLDQ

SEQ ID NO: 98349 - protein, 37 aa, Artificial Sequence; identical to SEQ ID NO: 21501
  Cyclic GFR-binding peptide
  MOD_RES (37)..(37): Xaa is C or S

SEQ ID NO: 98350 - protein, 30 aa, Artificial Sequence
  Cyclic GFR-binding peptide
  MOD_RES (2)..(2): Xaa is C or S
GXAEVVMDSMEGLVVNNAADMIQITINSLR

SEQ ID NO: 98351 - protein, 34 aa, Artificial Sequence
  Cyclic GFR-binding peptide
  MOD_RES (1)..(3)..(34): Xaa is C or S
XGXEEVIMSMEGLLLVRGNDMIQMTINSTKVPAX

SEQ ID NO: 98352 - protein, 36 aa, Artificial Sequence; identical to SEQ ID NO: 21507
  Cyclic GFR-binding peptide
  MOD_RES (1)..(35): Xaa is C or S

SEQ ID NO: 98353 - protein, 34 aa, Artificial Sequence; identical to SEQ ID NO: 65373
  Cyclic GFR-binding peptide
  MOD_RES (31)..(32): Xaa is C or S

SEQ ID NO: 98354 - protein, 27 aa, Artificial Sequence
  Cyclic GFR-binding peptide
SHEELSMEGIHQGQHPKIRMIQMTINS

SEQ ID NO: 98355 - protein, 34 aa, Artificial Sequence
  Cyclic GFR-binding peptide
  MOD_RES (1)..(3): Xaa is C or S
XGXSEVVMDSMEGLVVNNASDMIQITINSLRTPV

SEQ ID NO: 98356 - protein, 32 aa, Artificial Sequence
  Cyclic GFR-binding peptide
  MOD_RES (1)..(1): Xaa is C or S
XSRVVMNSMEGLIVNSSDDMIQVTINSLKTPA

SEQ ID NO: 98357 - protein, 31 aa, Artificial Sequence; identical to SEQ ID NO: 61951
  Cyclic GFR-binding peptide
  MOD_RES (2)..(4): Xaa is C or S

SEQ ID NO: 98358 - protein, 36 aa, Artificial Sequence
  Cyclic GFR-binding peptide
  MOD_RES (1)..(33)..(34): Xaa is C or S
XSEVVMDSMEGLVVNNASDMIQITINSLRTPVXXTP

SEQ ID NO: 98359 - protein, 32 aa, Artificial Sequence
  Cyclic GFR-binding peptide
  MOD_RES (1)..(3): Xaa is C or S
XGXSEVVMDSMEGIVVNNASDMIQITINSLRT

SEQ ID NO: 98360 - protein, 34 aa, Artificial Sequence
  Cyclic GFR-binding peptide
  MOD_RES (2)..(4): Xaa is C or S
HXGXSRVVMNSMEGLIVNSSDDMIQVTINSLKTP

SEQ ID NO: 98361 - protein, 29 aa, Artificial Sequence
  Cyclic GFR-binding peptide
EVIMSMEGLLLVRGNDMIQMTINSTKVPA

SEQ ID NO: 98362 - protein, 22 aa, Artificial Sequence
  Cyclic GFR-binding peptide
MSMEGLLLVRGNDMIQMTINST

SEQ ID NO: 98363 - protein, 25 aa, Artificial Sequence
  Cyclic GFR-binding peptide
EELSMEGIHQGQHPKIRMIQMTINS

SEQ ID NO: 98364 - protein, 29 aa, Artificial Sequence
  Cyclic GFR-binding peptide
  MOD_RES (28)..(29): Xaa is C or S
MGSMEGIIIQQKDNMIQMTINSMKTPTXX

SEQ ID NO: 98365 - protein, 35 aa, Artificial Sequence; identical to SEQ ID NO: 21527
  Cyclic GFR-binding peptide

SEQ ID NO: 98366 - protein, 32 aa, Artificial Sequence; identical to SEQ ID NO: 21528
  Cyclic GFR-binding peptide
  MOD_RES (32)..(32): Xaa is C or S

SEQ ID NO: 98367 - protein, 23 aa, Artificial Sequence
  Cyclic GFR-binding peptide
IMSMEGLVKPKRGVMIQITINSL

SEQ ID NO: 98368 - protein, 36 aa, Artificial Sequence
  Cyclic GFR-binding peptide
  MOD_RES (2)..(4)..(36): Xaa is C or S
RXGXSEVVMDSMEGLVVNNASDMIQITINSLRTPVX

SEQ ID NO: 98369 - protein, 30 aa, Artificial Sequence
  Cyclic GFR-binding peptide
  MOD_RES (29)..(30): Xaa is C or S
VIMSMEGILLVRGNDMIQMTINSTKVPAXX

SEQ ID NO: 98370 - protein, 35 aa, Artificial Sequence
  Cyclic GFR-binding peptide
  MOD_RES (2)..(4): Xaa is C or S
RXGXAEVVMDSMEGIVVNNAADMIQITINSLRAPV

SEQ ID NO: 98371 - protein, 24 aa, Artificial Sequence
  Cyclic GFR-binding peptide
VIMSMEGILLVRGNDMIQMTINST

SEQ ID NO: 98372 - protein, 26 aa, Artificial Sequence
  Cyclic GFR-binding peptide
EELRSMEGLLKPKKRVYEMIQVTINS

SEQ ID NO: 98373 - protein, 29 aa, Artificial Sequence
  Cyclic GFR-binding peptide
  MOD_RES (29)..(29): Xaa is C or S
VMDSMEGLVVNNASDMIQITINSLRTPVX

SEQ ID NO: 98374 - protein, 41 aa, Artificial Sequence
  Cyclic GFR-binding peptide
  MOD_RES (1)..(3)..(35)..(36): Xaa is C or S
XGXAEVVMDSMEGIVVNNAADMIQITINSLRAPVXXSAPAA

SEQ ID NO: 98375 - protein, 30 aa, Artificial Sequence; identical to SEQ ID NO: 21540
  Cyclic GFR-binding peptide
  MOD_RES (2)..(2): Xaa is C or S

SEQ ID NO: 98376 - protein, 24 aa, Artificial Sequence
  Cyclic GFR-binding peptide
TSMEGIFIPKKRVIEMIQVTINSL

SEQ ID NO: 98377 - protein, 34 aa, Artificial Sequence
  Cyclic GFR-binding peptide
  MOD_RES (2)..(4): Xaa is C or S
SXGXRDVVMGSMEGIIIQQKDNMIQMTINSMKTP

SEQ ID NO: 98378 - protein, 23 aa, Artificial Sequence
  Cyclic GFR-binding peptide
FSMEGLHQGQHPKIRMIQMTINS

SEQ ID NO: 98379 - protein, 22 aa, Artificial Sequence
  Cyclic GFR-binding peptide
MSMEGIVKPTRGVMIQITINSL

SEQ ID NO: 98380 - protein, 28 aa, Artificial Sequence
  Cyclic GFR-binding peptide
RVVMNSMEGIIVNSSDDMIQVTINSLKT

SEQ ID NO: 98381 - protein, 31 aa, Artificial Sequence; identical to SEQ ID NO: 21548
  Cyclic GFR-binding peptide
  MOD_RES (31)..(31): Xaa is C or S

SEQ ID NO: 98382 - protein, 25 aa, Artificial Sequence
  Cyclic GFR-binding peptide
IMSMEGIVKPKRGVMIQITINSLAQ

SEQ ID NO: 98383 - protein, 32 aa, Artificial Sequence; identical to SEQ ID NO: 21549
  Cyclic GFR-binding peptide
  MOD_RES (28)..(28): Xaa is C or S

SEQ ID NO: 98384 - protein, 28 aa, Artificial Sequence
  Cyclic GFR-binding peptide
  MOD_RES (28)..(28): Xaa is C or S
MDSMEGLVVNNASDMIQITINSLRTPVX

SEQ ID NO: 98385 - protein, 30 aa, Artificial Sequence
  Cyclic GFR-binding peptide
  MOD_RES (27)..(28): Xaa is C or S
MSMEGLLLVRGNDMIQMTINSTKVPAXXTS

SEQ ID NO: 98386 - protein, 37 aa, Artificial Sequence
  Cyclic GFR-binding peptide
  MOD_RES (1)..(32)..(33): Xaa is C or S
XEEVIMSMEGILLVRGNDMIQMTINSTKVPAXXTSPV

SEQ ID NO: 98387 - protein, 40 aa, Artificial Sequence; identical to SEQ ID NO: 21551
  Cyclic GFR-binding peptide
  MOD_RES (34)..(34): Xaa is C or S

SEQ ID NO: 98388 - protein, 33 aa, Artificial Sequence
  Cyclic GFR-binding peptide
  MOD_RES (29)..(30): Xaa is C or S
VIMSMEGLLLVRGNDMIQMTINSTKVPAXXTSP

SEQ ID NO: 98389 - protein, 37 aa, Artificial Sequence
  Cyclic GFR-binding peptide
  MOD_RES (31)..(32): Xaa is C or S
RVVMNSMEGLIVNSSDDMIQVTINSLKTPAXXPKPVH

SEQ ID NO: 98390 - protein, 25 aa, Artificial Sequence
  Cyclic GFR-binding peptide
LFSMEGIHQGQHPKIRMIQMTINSE

SEQ ID NO: 98391 - protein, 28 aa, Artificial Sequence
  Cyclic GFR-binding peptide
  MOD_RES (2)..(2): Xaa is C or S
GXSRVVMNSMEGLIVNSSDDMIQVTINS

SEQ ID NO: 98392 - protein, 36 aa, Artificial Sequence
  Cyclic GFR-binding peptide
  MOD_RES (30)..(31): Xaa is C or S
EVIMSMEGLLLVRGNDMIQMTINSTKVPAXXTSPVR

SEQ ID NO: 98393 - protein, 34 aa, Artificial Sequence; identical to SEQ ID NO: 21559
  Cyclic GFR-binding peptide
  MOD_RES (32)..(32): Xaa is C or S

SEQ ID NO: 98394 - protein, 26 aa, Artificial Sequence
  Cyclic GFR-binding peptide
VIMSMEGLVKPKRGVMIQITINSLAQ

SEQ ID NO: 98395 - protein, 32 aa, Artificial Sequence; identical to SEQ ID NO: 21561
  Cyclic GFR-binding peptide
  MOD_RES (2)..(2): Xaa is C or S

SEQ ID NO: 98396 - protein, 34 aa, Artificial Sequence; identical to SEQ ID NO: 61984
  Cyclic GFR-binding peptide
  MOD_RES (1)..(3): Xaa is C or S

SEQ ID NO: 98397 - protein, 25 aa, Artificial Sequence
  Cyclic GFR-binding peptide
DVVMGSMEGIIIQQKDNMIQMTINS

SEQ ID NO: 98398 - protein, 26 aa, Artificial Sequence
  Cyclic GFR-binding peptide
VMDSMEGLVVNNASDMIQITINSLRT

SEQ ID NO: 98399 - protein, 32 aa, Artificial Sequence
  Cyclic GFR-binding peptide
  MOD_RES (27)..(28): Xaa is C or S
MSMEGILLVRGNDMIQMTINSTKVPAXXTSPV

SEQ ID NO: 98400 - protein, 24 aa, Artificial Sequence
  Cyclic GFR-binding peptide
IMSMEGILLVRGNDMIQMTINSTK

SEQ ID NO: 98401 - protein, 30 aa, Artificial Sequence
  Cyclic GFR-binding peptide
  MOD_RES (2)..(4): Xaa is C or S
RXGXSEVVMDSMEGIVVNNASDMIQITINS

SEQ ID NO: 98402 - protein, 27 aa, Artificial Sequence
  Cyclic GFR-binding peptide
DELTSMEGLFIPKKRVIEMIQVTINSL

SEQ ID NO: 98403 - protein, 28 aa, Artificial Sequence
  Cyclic GFR-binding peptide
QSHEELSMEGIHQGQHPKIRMIQMTINS

SEQ ID NO: 98404 - protein, 39 aa, Artificial Sequence
  Cyclic GFR-binding peptide
  MOD_RES (2)..(4)..(36)..(37): Xaa is C or S
SXGXRDVVMGSMEGIIIQQKDNMIQMTINSMKTPTXXPG

SEQ ID NO: 98405 - protein, 40 aa, Artificial Sequence
  Cyclic GFR-binding peptide
  MOD_RES (2)..(34)..(35): Xaa is C or S
GXAEVVMDSMEGLVVNNAADMIQITINSLRAPVXXSAPAA

SEQ ID NO: 98406 - protein, 31 aa, Artificial Sequence; identical to SEQ ID NO: 21574
  Cyclic GFR-binding peptide
  MOD_RES (29)..(29): Xaa is C or S

SEQ ID NO: 98407 - protein, 32 aa, Artificial Sequence
  Cyclic GFR-binding peptide
  MOD_RES (2)..(2): Xaa is C or S
GXRDVVMGSMEGIIIQQKDNMIQMTINSMKTP

SEQ ID NO: 98408 - protein, 43 aa, Artificial Sequence; identical to SEQ ID NO: 21580
  Cyclic GFR-binding peptide
  MOD_RES (2)..(39): Xaa is C or S

SEQ ID NO: 98409 - protein, 23 aa, Artificial Sequence
  Cyclic GFR-binding peptide
VVMSMEGLVKPTRGVMIQITINS

SEQ ID NO: 98410 - protein, 37 aa, Artificial Sequence; identical to SEQ ID NO: 21586
  Cyclic GFR-binding peptide
  MOD_RES (34)..(34): Xaa is C or S

SEQ ID NO: 98411 - protein, 31 aa, Artificial Sequence; identical to SEQ ID NO: 65427
  Cyclic GFR-binding peptide
  MOD_RES (1)..(3): Xaa is C or S

SEQ ID NO: 98412 - protein, 37 aa, Artificial Sequence
  Cyclic GFR-binding peptide
  MOD_RES (1)..(3)..(35)..(36): Xaa is C or S
XGXAEVVMDSMEGLVVNNAADMIQITINSLRAPVXXS

SEQ ID NO: 98413 - protein, 38 aa, Artificial Sequence; identical to SEQ ID NO: 21591
  Cyclic GFR-binding peptide
  MOD_RES (37)..(37): Xaa is C or S

SEQ ID NO: 98414 - protein, 37 aa, Artificial Sequence; identical to SEQ ID NO: 21592
  Cyclic GFR-binding peptide
  MOD_RES (36)..(36): Xaa is C or S

SEQ ID NO: 98415 - protein, 35 aa, Artificial Sequence
  Cyclic GFR-binding peptide
  MOD_RES (31)..(32): Xaa is C or S
EVVMDSMEGIVVNNAADMIQITINSLRAPVXXSAP

SEQ ID NO: 98416 - protein, 38 aa, Artificial Sequence
  Cyclic GFR-binding peptide
  MOD_RES (2)..(4)..(36)..(37): Xaa is C or S
HXGXSRVVMNSMEGLIVNSSDDMIQVTINSLKTPAXXP

SEQ ID NO: 98417 - protein, 38 aa, Artificial Sequence
  Cyclic GFR-binding peptide
  MOD_RES (1)..(32)..(33): Xaa is C or S
XSKVVMSMEGLVKPTRGVMIQITINSLDQPVXXPSASA

SEQ ID NO: 98418 - protein, 27 aa, Artificial Sequence
  Cyclic GFR-binding peptide
  MOD_RES (26)..(27): Xaa is C or S
SMEGIIVNSSDDMIQVTINSLKTPAXX

SEQ ID NO: 98419 - protein, 27 aa, Artificial Sequence
  Cyclic GFR-binding peptide
VMDSMEGLVVNNAADMIQITINSLRAP

SEQ ID NO: 98420 - protein, 32 aa, Artificial Sequence
  Cyclic GFR-binding peptide
  MOD_RES (30)..(31): Xaa is C or S
VVMNSMEGLIVNSSDDMIQVTINSLKTPAXXP

SEQ ID NO: 98421 - protein, 30 aa, Artificial Sequence
  Cyclic GFR-binding peptide
  MOD_RES (28)..(29): Xaa is C or S
MDSMEGIVVNNAADMIQITINSLRAPVXXS

SEQ ID NO: 98422 - protein, 41 aa, Artificial Sequence
  Cyclic GFR-binding peptide
  MOD_RES (1)..(3)..(35)..(36): Xaa is C or S
XGXSEVVMDSMEGIVVNNASDMIQITINSLRTPVXXTPPTS

SEQ ID NO: 98423 - protein, 42 aa, Artificial Sequence; identical to SEQ ID NO: 21605
  Cyclic GFR-binding peptide
  MOD_RES (1)..(3)..(40): Xaa is C or S

SEQ ID NO: 98424 - protein, 40 aa, Artificial Sequence; identical to SEQ ID NO: 21607
  Cyclic GFR-binding peptide
  MOD_RES (2)..(4): Xaa is C or S

SEQ ID NO: 98425 - protein, 32 aa, Artificial Sequence; identical to SEQ ID NO: 62023
  Cyclic GFR-binding peptide
  MOD_RES (27)..(28): Xaa is C or S

SEQ ID NO: 98426 - protein, 27 aa, Artificial Sequence
  Cyclic GFR-binding peptide
VVMGSMEGIIIQQKDNMIQMTINSMKT

SEQ ID NO: 98427 - protein, 32 aa, Artificial Sequence; identical to SEQ ID NO: 21610
  Cyclic GFR-binding peptide
  MOD_RES (32)..(32): Xaa is C or S

SEQ ID NO: 98428 - protein, 34 aa, Artificial Sequence; identical to SEQ ID NO: 62029
  Cyclic GFR-binding peptide
  MOD_RES (1)..(3)..(34): Xaa is C or S

SEQ ID NO: 98429 - protein, 33 aa, Artificial Sequence; identical to SEQ ID NO: 65448
  Cyclic GFR-binding peptide
  MOD_RES (1)..(32)..(33): Xaa is C or S

SEQ ID NO: 98430 - protein, 34 aa, Artificial Sequence
  Cyclic GFR-binding peptide
  MOD_RES (2)..(4): Xaa is C or S
LXGXEEVIMSMEGLLLVRGNDMIQMTINSTKVPA

SEQ ID NO: 98431 - protein, 37 aa, Artificial Sequence
  Cyclic GFR-binding peptide
  MOD_RES (32)..(33): Xaa is C or S
RDVVMGSMEGLIIQQKDNMIQMTINSMKTPTXXPGAS

SEQ ID NO: 98432 - protein, 28 aa, Artificial Sequence
  Cyclic GFR-binding peptide
  MOD_RES (28)..(28): Xaa is C or S
MNSMEGIIVNSSDDMIQVTINSLKTPAX

SEQ ID NO: 98433 - protein, 25 aa, Artificial Sequence
  Cyclic GFR-binding peptide
RSMEGLLKPKKRVYEMIQVTINSHH

SEQ ID NO: 98434 - protein, 34 aa, Artificial Sequence
  Cyclic GFR-binding peptide
  MOD_RES (30)..(31): Xaa is C or S
VVMDSMEGLVVNNAADMIQITINSLRAPVXXSAP

SEQ ID NO: 98435 - protein, 24 aa, Artificial Sequence
  Cyclic GFR-binding peptide
VMGSMEGIIIQQKDNMIQMTINSM

SEQ ID NO: 98436 - protein, 37 aa, Artificial Sequence; identical to SEQ ID NO: 21622
  Cyclic GFR-binding peptide
  MOD_RES (34)..(34): Xaa is C or S

SEQ ID NO: 98437 - protein, 35 aa, Artificial Sequence
  Cyclic GFR-binding peptide
  MOD_RES (30)..(31): Xaa is C or S
EVIMSMEGLLLVRGNDMIQMTINSTKVPAXXTSPV

SEQ ID NO: 98438 - protein, 36 aa, Artificial Sequence; identical to SEQ ID NO: 21623
  Cyclic GFR-binding peptide
  MOD_RES (30)..(30): Xaa is C or S

SEQ ID NO: 98439 - protein, 32 aa, Artificial Sequence
  Cyclic GFR-binding peptide
  MOD_RES (31)..(32): Xaa is C or S
RVVMNSMEGLIVNSSDDMIQVTINSLKTPAXX

SEQ ID NO: 98440 - protein, 37 aa, Artificial Sequence
  Cyclic GFR-binding peptide
  MOD_RES (1)..(3)..(35)..(36): Xaa is C or S
XGXSRVVMNSMEGLIVNSSDDMIQVTINSLKTPAXXP

SEQ ID NO: 98441 - protein, 32 aa, Artificial Sequence
  Cyclic GFR-binding peptide
  MOD_RES (28)..(29): Xaa is C or S
MNSMEGLIVNSSDDMIQVTINSLKTPAXXPKP

SEQ ID NO: 98442 - protein, 35 aa, Artificial Sequence; identical to SEQ ID NO: 21624
  Cyclic GFR-binding peptide
  MOD_RES (33)..(33): Xaa is C or S

SEQ ID NO: 98443 - protein, 37 aa, Artificial Sequence
  Cyclic GFR-binding peptide
  MOD_RES (1)..(32)..(33): Xaa is C or S
XSKVIMSMEGLIKPTKGIMIQITINSLDQSVXXPSAS

SEQ ID NO: 98444 - protein, 22 aa, Artificial Sequence
  Cyclic GFR-binding peptide
SMEGIVVNNASDMIQITINSLR

SEQ ID NO: 98445 - protein, 29 aa, Artificial Sequence
  Cyclic GFR-binding peptide
  MOD_RES (27)..(28): Xaa is C or S
DSMEGIVVNNAADMIQITINSLRAPVXXS

SEQ ID NO: 98446 - protein, 29 aa, Artificial Sequence
  Cyclic GFR-binding peptide
  MOD_RES (29)..(29): Xaa is C or S
VIMSMEGLVKPKRGVMIQITINSLAQPVX

SEQ ID NO: 98447 - protein, 37 aa, Artificial Sequence; identical to SEQ ID NO: 62040
  Cyclic GFR-binding peptide
  MOD_RES (2)..(33)..(34): Xaa is C or S

SEQ ID NO: 98448 - protein, 22 aa, Artificial Sequence
  Cyclic GFR-binding peptide
MSMEGLVKPKRGVMIQITINSL

SEQ ID NO: 98449 - protein, 30 aa, Artificial Sequence; identical to SEQ ID NO: 21628
  Cyclic GFR-binding peptide

SEQ ID NO: 98450 - protein, 27 aa, Artificial Sequence
  Cyclic GFR-binding peptide
  MOD_RES (1)..(1): Xaa is C or S
XEEVIMSMEGLLLVRGNDMIQMTINST

SEQ ID NO: 98451 - protein, 30 aa, Artificial Sequence; identical to SEQ ID NO: 21632
  Cyclic GFR-binding peptide

SEQ ID NO: 98452 - protein, 41 aa, Artificial Sequence
  Cyclic GFR-binding peptide
  MOD_RES (2)..(4)..(36)..(37): Xaa is C or S
RXGXAEVVMDSMEGIVVNNAADMIQITINSLRAPVXXSAPA

SEQ ID NO: 98453 - protein, 31 aa, Artificial Sequence
  Cyclic GFR-binding peptide
  MOD_RES (27)..(28): Xaa is C or S
MSMEGLIKPTKGIMIQITINSLDQSVXXPSA

SEQ ID NO: 98454 - protein, 30 aa, Artificial Sequence; identical to SEQ ID NO: 62048
  Cyclic GFR-binding peptide
  MOD_RES (26)..(27): Xaa is C or S

SEQ ID NO: 98455 - protein, 34 aa, Artificial Sequence; identical to SEQ ID NO: 21634
  Cyclic GFR-binding peptide
  MOD_RES (32)..(32): Xaa is C or S

SEQ ID NO: 98456 - protein, 39 aa, Artificial Sequence
  Cyclic GFR-binding peptide
  MOD_RES (1)..(3)..(35)..(36): Xaa is C or S
XGXAEVVMDSMEGIVVNNAADMIQITINSLRAPVXXSAP

SEQ ID NO: 98457 - protein, 34 aa, Artificial Sequence; identical to SEQ ID NO: 21636
  Cyclic GFR-binding peptide
  MOD_RES (1)..(3): Xaa is C or S

SEQ ID NO: 98458 - protein, 40 aa, Artificial Sequence
  Cyclic GFR-binding peptide
  MOD_RES (2)..(4)..(36)..(37): Xaa is C or S
RXGXAEVVMDSMEGIVVNNAADMIQITINSLRAPVXXSAP

SEQ ID NO: 98459 - protein, 32 aa, Artificial Sequence
  Cyclic GFR-binding peptide
  MOD_RES (32)..(32): Xaa is C or S
SEVVMDSMEGIVVNNASDMIQITINSLRTPVX

SEQ ID NO: 98460 - protein, 24 aa, Artificial Sequence
  Cyclic GFR-binding peptide
KVIMSMEGLIKPTKGIMIQITINS

SEQ ID NO: 98461 - protein, 37 aa, Artificial Sequence
  Cyclic GFR-binding peptide
  MOD_RES (1)..(33)..(34): Xaa is C or S
XAEVVMDSMEGLVVNNAADMIQITINSLRAPVXXSAP

SEQ ID NO: 98462 - protein, 29 aa, Artificial Sequence
  Cyclic GFR-binding peptide
  MOD_RES (1)..(3): Xaa is C or S
XKXSKVVMSMEGIVKPTRGVMIQITINSL

SEQ ID NO: 98463 - protein, 26 aa, Artificial Sequence
  Cyclic GFR-binding peptide
  MOD_RES (26)..(26): Xaa is C or S
SMEGIIKPTKGIMIQITINSLDQSVX

SEQ ID NO: 98464 - protein, 27 aa, Artificial Sequence
  Cyclic GFR-binding peptide
RVIMSMEGIVKPKRGVMIQITINSLAQ

SEQ ID NO: 98465 - protein, 31 aa, Artificial Sequence; identical to SEQ ID NO: 65470
  Cyclic GFR-binding peptide
  MOD_RES (31)..(31): Xaa is C or S

SEQ ID NO: 98466 - protein, 25 aa, Artificial Sequence
  Cyclic GFR-binding peptide
MSMEGLIKPTKGIMIQITINSLDQS

SEQ ID NO: 98467 - protein, 30 aa, Artificial Sequence
  Cyclic GFR-binding peptide
  MOD_RES (26)..(27): Xaa is C or S
SMEGLIVNSSDDMIQVTINSLKTPAXXPKP

SEQ ID NO: 98468 - protein, 37 aa, Artificial Sequence
  Cyclic GFR-binding peptide
  MOD_RES (1)..(3)..(35)..(36): Xaa is C or S
XGXRDVVMGSMEGLIIQQKDNMIQMTINSMKTPTXXP

SEQ ID NO: 98469 - protein, 32 aa, Artificial Sequence
  Cyclic GFR-binding peptide
  MOD_RES (29)..(30): Xaa is C or S
VMDSMEGIVVNNAADMIQITINSLRAPVXXSA

SEQ ID NO: 98470 - protein, 35 aa, Artificial Sequence
  Cyclic GFR-binding peptide
  MOD_RES (2)..(34)..(35): Xaa is C or S
GXAEVVMDSMEGIVVNNAADMIQITINSLRAPVXX

SEQ ID NO: 98471 - protein, 33 aa, Artificial Sequence
  Cyclic GFR-binding peptide
  MOD_RES (1)..(3): Xaa is C or S
XGXAEVVMDSMEGIVVNNAADMIQITINSLRAP

SEQ ID NO: 98472 - protein, 25 aa, Artificial Sequence
  Cyclic GFR-binding peptide
SKVIMSMEGIIKPTKGIMIQITINS

SEQ ID NO: 98473 - protein, 35 aa, Artificial Sequence
  Cyclic GFR-binding peptide
  MOD_RES (2)..(4)..(35): Xaa is C or S
SXKXSRVIMSMEGLVKPKRGVMIQITINSLAQPVX

SEQ ID NO: 98474 - protein, 34 aa, Artificial Sequence; identical to SEQ ID NO: 62067
  Cyclic GFR-binding peptide
  MOD_RES (30)..(31): Xaa is C or S

SEQ ID NO: 98475 - protein, 26 aa, Artificial Sequence
  Cyclic GFR-binding peptide
  MOD_RES (26)..(26): Xaa is C or S
SMEGILLVRGNDMIQMTINSTKVPAX

SEQ ID NO: 98476 - protein, 33 aa, Artificial Sequence
  Cyclic GFR-binding peptide
  MOD_RES (32)..(33): Xaa is C or S
SEVVMDSMEGLVVNNASDMIQITINSLRTPVXX

SEQ ID NO: 98477 - protein, 32 aa, Artificial Sequence; identical to SEQ ID NO: 65477
  Cyclic GFR-binding peptide
  MOD_RES (30)..(31): Xaa is C or S

SEQ ID NO: 98478 - protein, 39 aa, Artificial Sequence; identical to SEQ ID NO: 21657
  Cyclic GFR-binding peptide
  MOD_RES (1)..(38): Xaa is C or S

SEQ ID NO: 98479 - protein, 21 aa, Artificial Sequence
  Cyclic GFR-binding peptide
MSMEGILLVRGNDMIQMTINS

SEQ ID NO: 98480 - protein, 30 aa, Artificial Sequence; identical to SEQ ID NO: 21660
  Cyclic GFR-binding peptide

SEQ ID NO: 98481 - protein, 28 aa, Artificial Sequence
  Cyclic GFR-binding peptide
RVIMSMEGLVKPKRGVMIQITINSLAQP

SEQ ID NO: 98482 - protein, 34 aa, Artificial Sequence
  Cyclic GFR-binding peptide
  MOD_RES (31)..(32): Xaa is C or S
EVVMDSMEGLVVNNAADMIQITINSLRAPVXXSA

SEQ ID NO: 98483 - protein, 39 aa, Artificial Sequence
  Cyclic GFR-binding peptide
  MOD_RES (2)..(4)..(35)..(36): Xaa is C or S
LXGXEEVIMSMEGILLVRGNDMIQMTINSTKVPAXXTSP

SEQ ID NO: 98484 - protein, 30 aa, Artificial Sequence
  Cyclic GFR-binding peptide
  MOD_RES (1)..(3): Xaa is C or S
XGXSRVVMNSMEGLIVNSSDDMIQVTINSL

SEQ ID NO: 98485 - protein, 34 aa, Artificial Sequence
  Cyclic GFR-binding peptide
  MOD_RES (28)..(29): Xaa is C or S
MDSMEGLVVNNASDMIQITINSLRTPVXXTPPTS

SEQ ID NO: 98486 - protein, 29 aa, Artificial Sequence
  Cyclic GFR-binding peptide
SKVVMSMEGLVKPTRGVMIQITINSLDQP

SEQ ID NO: 98487 - protein, 29 aa, Artificial Sequence
  Cyclic GFR-binding peptide
  MOD_RES (1)..(3): Xaa is C or S
XGXEEVIMSMEGILLVRGNDMIQMTINST

SEQ ID NO: 98488 - protein, 42 aa, Artificial Sequence; identical to SEQ ID NO: 21663
  Cyclic GFR-binding peptide
  MOD_RES (2)..(39): Xaa is C or S

SEQ ID NO: 98489 - protein, 26 aa, Artificial Sequence
  Cyclic GFR-binding peptide
SMEGLHQGQHPKIRMIQMTINSEETP

SEQ ID NO: 98490 - protein, 38 aa, Artificial Sequence; identical to SEQ ID NO: 62088
  Cyclic GFR-binding peptide
  MOD_RES (2)..(4)..(35)..(36): Xaa is C or S

SEQ ID NO: 98491 - protein, 34 aa, Artificial Sequence; identical to SEQ ID NO: 21672
  Cyclic GFR-binding peptide
  MOD_RES (30)..(30): Xaa is C or S

SEQ ID NO: 98492 - protein, 29 aa, Artificial Sequence
  Cyclic GFR-binding peptide
  MOD_RES (28)..(29): Xaa is C or S
IMSMEGLVKPKRGVMIQITINSLAQPVXX

SEQ ID NO: 98493 - protein, 26 aa, Artificial Sequence
  Cyclic GFR-binding peptide
AEVVMDSMEGLVVNNAADMIQITINS

SEQ ID NO: 98494 - protein, 34 aa, Artificial Sequence; identical to SEQ ID NO: 21673
  Cyclic GFR-binding peptide
  MOD_RES (34)..(34): Xaa is C or S

SEQ ID NO: 98495 - protein, 32 aa, Artificial Sequence; identical to SEQ ID NO: 65491
  Cyclic GFR-binding peptide
  MOD_RES (2)..(2): Xaa is C or S

SEQ ID NO: 98496 - protein, 31 aa, Artificial Sequence
  Cyclic GFR-binding peptide
  MOD_RES (27)..(28): Xaa is C or S
DSMEGIVVNNASDMIQITINSLRTPVXXTPP

SEQ ID NO: 98497 - protein, 30 aa, Artificial Sequence
  Cyclic GFR-binding peptide
  MOD_RES (29)..(30): Xaa is C or S
VMNSMEGLIVNSSDDMIQVTINSLKTPAXX

SEQ ID NO: 98498 - protein, 30 aa, Artificial Sequence
  Cyclic GFR-binding peptide
  MOD_RES (1)..(3): Xaa is C or S
XKXSKVVMSMEGLVKPTRGVMIQITINSLD

SEQ ID NO: 98499 - protein, 35 aa, Artificial Sequence; identical to SEQ ID NO: 21684
  Cyclic GFR-binding peptide
  MOD_RES (1)..(35): Xaa is C or S

SEQ ID NO: 98500 - protein, 36 aa, Artificial Sequence
  Cyclic GFR-binding peptide
  MOD_RES (2)..(4)..(36): Xaa is C or S
RXGXAEVVMDSMEGIVVNNAADMIQITINSLRAPVX

SEQ ID NO: 98501 - protein, 32 aa, Artificial Sequence
  Cyclic GFR-binding peptide
  MOD_RES (31)..(32): Xaa is C or S
EVVMDSMEGLVVNNAADMIQITINSLRAPVXX

SEQ ID NO: 98502 - protein, 37 aa, Artificial Sequence
  Cyclic GFR-binding peptide
  MOD_RES (31)..(32): Xaa is C or S
EVVMDSMEGLVVNNAADMIQITINSLRAPVXXSAPAA

SEQ ID NO: 98503 - protein, 30 aa, Artificial Sequence; identical to SEQ ID NO: 62104
  Cyclic GFR-binding peptide
  MOD_RES (2)..(2): Xaa is C or S

SEQ ID NO: 98504 - protein, 32 aa, Artificial Sequence
  Cyclic GFR-binding peptide
  MOD_RES (26)..(27): Xaa is C or S
SMEGIIIQQKDNMIQMTINSMKTPTXXPGASG

SEQ ID NO: 98505 - protein, 21 aa, Artificial Sequence
  Cyclic GFR-binding peptide
NSMEGIIVNSSDDMIQVTINS

SEQ ID NO: 98506 - protein, 36 aa, Artificial Sequence
  Cyclic GFR-binding peptide
  MOD_RES (32)..(33): Xaa is C or S
AEVVMDSMEGLVVNNAADMIQITINSLRAPVXXSAP

SEQ ID NO: 98507 - protein, 33 aa, Artificial Sequence
  Cyclic GFR-binding peptide
  MOD_RES (2)..(2): Xaa is C or S
GXRDVVMGSMEGLIIQQKDNMIQMTINSMKTPT

SEQ ID NO: 98508 - protein, 39 aa, Artificial Sequence; identical to SEQ ID NO: 21699
  Cyclic GFR-binding peptide
  MOD_RES (33)..(33): Xaa is C or S

SEQ ID NO: 98509 - protein, 32 aa, Artificial Sequence
  Cyclic GFR-binding peptide
  MOD_RES (2)..(2): Xaa is C or S
GXEEVIMSMEGLLLVRGNDMIQMTINSTKVPA

SEQ ID NO: 98510 - protein, 34 aa, Artificial Sequence
  Cyclic GFR-binding peptide
  MOD_RES (31)..(32): Xaa is C or S
EVVMDSMEGLVVNNASDMIQITINSLRTPVXXTP

SEQ ID NO: 98511 - protein, 25 aa, Artificial Sequence
  Cyclic GFR-binding peptide
VVMGSMEGIIIQQKDNMIQMTINSM

SEQ ID NO: 98512 - protein, 30 aa, Artificial Sequence; identical to SEQ ID NO: 21703
  Cyclic GFR-binding peptide
  MOD_RES (2)..(2): Xaa is C or S

SEQ ID NO: 98513 - protein, 38 aa, Artificial Sequence
  Cyclic GFR-binding peptide
  MOD_RES (2)..(4)..(36)..(37): Xaa is C or S
SXGXRDVVMGSMEGIIIQQKDNMIQMTINSMKTPTXXP

SEQ ID NO: 98514 - protein, 24 aa, Artificial Sequence
  Cyclic GFR-binding peptide
VMNSMEGLIVNSSDDMIQVTINSL

SEQ ID NO: 98515 - protein, 26 aa, Artificial Sequence
  Cyclic GFR-binding peptide
VMSMEGLVKPTRGVMIQITINSLDQP

SEQ ID NO: 98516 - protein, 39 aa, Artificial Sequence; identical to SEQ ID NO: 65512
  Cyclic GFR-binding peptide
  MOD_RES (2)..(4)..(35)..(36): Xaa is C or S

SEQ ID NO: 98517 - protein, 31 aa, Artificial Sequence; identical to SEQ ID NO: 21708
  Cyclic GFR-binding peptide
  MOD_RES (28)..(28): Xaa is C or S

SEQ ID NO: 98518 - protein, 26 aa, Artificial Sequence
  Cyclic GFR-binding peptide
  MOD_RES (1)..(1): Xaa is C or S
XEEVIMSMEGILLVRGNDMIQMTINS

SEQ ID NO: 98519 - protein, 31 aa, Artificial Sequence
  Cyclic GFR-binding peptide
  MOD_RES (30)..(31): Xaa is C or S
KVVMSMEGLVKPTRGVMIQITINSLDQPVXX

SEQ ID NO: 98520 - protein, 23 aa, Artificial Sequence
  Cyclic GFR-binding peptide
VIMSMEGIVKPKRGVMIQITINS

SEQ ID NO: 98521 - protein, 28 aa, Artificial Sequence
  Cyclic GFR-binding peptide
  MOD_RES (26)..(27): Xaa is C or S
SMEGLIKPTKGIMIQITINSLDQSVXXP

SEQ ID NO: 98522 - protein, 36 aa, Artificial Sequence
  Cyclic GFR-binding peptide
  MOD_RES (32)..(33): Xaa is C or S
SEVVMDSMEGIVVNNASDMIQITINSLRTPVXXTPP

SEQ ID NO: 98523 - protein, 24 aa, Artificial Sequence
  Cyclic GFR-binding peptide
RSMEGILKPKKRVYEMIQVTINSH

SEQ ID NO: 98524 - protein, 25 aa, Artificial Sequence
  Cyclic GFR-binding peptide
SRVIMSMEGIVKPKRGVMIQITINS

SEQ ID NO: 98525 - protein, 36 aa, Artificial Sequence; identical to SEQ ID NO: 62138
  Cyclic GFR-binding peptide
  MOD_RES (1)..(32)..(33): Xaa is C or S

SEQ ID NO: 98526 - protein, 31 aa, Artificial Sequence
  Cyclic GFR-binding peptide
  MOD_RES (31)..(31): Xaa is C or S
EVVMDSMEGIVVNNAADMIQITINSLRAPVX

SEQ ID NO: 98527 - protein, 37 aa, Artificial Sequence
  Cyclic GFR-binding peptide
  MOD_RES (31)..(32): Xaa is C or S
DVVMGSMEGIIIQQKDNMIQMTINSMKTPTXXPGASG

SEQ ID NO: 98528 - protein, 28 aa, Artificial Sequence
  Cyclic GFR-binding peptide
SHEELSMEGIHQGQHPKIRMIQMTINSQ

SEQ ID NO: 98529 - protein, 33 aa, Artificial Sequence; identical to SEQ ID NO: 62142
  Cyclic GFR-binding peptide
  MOD_RES (1)..(32)..(33): Xaa is C or S

SEQ ID NO: 98530 - protein, 27 aa, Artificial Sequence
  Cyclic GFR-binding peptide
  MOD_RES (1)..(1): Xaa is C or S
XSRVIMSMEGIVKPKRGVMIQITINSL

SEQ ID NO: 98531 - protein, 33 aa, Artificial Sequence; identical to SEQ ID NO: 21733
  Cyclic GFR-binding peptide
  MOD_RES (32)..(32): Xaa is C or S

SEQ ID NO: 98532 - protein, 33 aa, Artificial Sequence; identical to SEQ ID NO: 62144
  Cyclic GFR-binding peptide
  MOD_RES (29)..(30): Xaa is C or S

SEQ ID NO: 98533 - protein, 29 aa, Artificial Sequence
  Cyclic GFR-binding peptide
  MOD_RES (2)..(2): Xaa is C or S
KXSKVVMSMEGIVKPTRGVMIQITINSLD

SEQ ID NO: 98534 - protein, 29 aa, Artificial Sequence
  Cyclic GFR-binding peptide
EELSMEGIHQGQHPKIRMIQMTINSQGTP

SEQ ID NO: 98535 - protein, 32 aa, Artificial Sequence; identical to SEQ ID NO: 21742
  Cyclic GFR-binding peptide

SEQ ID NO: 98536 - protein, 29 aa, Artificial Sequence
  Cyclic GFR-binding peptide
KVIMSMEGIIKPTKGIMIQITINSLDQSV

SEQ ID NO: 98537 - protein, 30 aa, Artificial Sequence
  Cyclic GFR-binding peptide
  MOD_RES (28)..(29): Xaa is C or S
MDSMEGLVVNNASDMIQITINSLRTPVXXT

SEQ ID NO: 98538 - protein, 32 aa, Artificial Sequence; identical to SEQ ID NO: 62152
  Cyclic GFR-binding peptide
  MOD_RES (27)..(28): Xaa is C or S

SEQ ID NO: 98539 - protein, 21 aa, Artificial Sequence
  Cyclic GFR-binding peptide
GSMEGLIIQQKDNMIQMTINS

SEQ ID NO: 98540 - protein, 33 aa, Artificial Sequence; identical to SEQ ID NO: 21750
  Cyclic GFR-binding peptide
  MOD_RES (30)..(30): Xaa is C or S

SEQ ID NO: 98541 - protein, 29 aa, Artificial Sequence
  Cyclic GFR-binding peptide
HEELSMEGIHQGQHPKIRMIQMTINSQGT

SEQ ID NO: 98542 - protein, 34 aa, Artificial Sequence; identical to SEQ ID NO: 65538
  Cyclic GFR-binding peptide
  MOD_RES (2)..(4): Xaa is C or S

SEQ ID NO: 98543 - protein, 28 aa, Artificial Sequence
  Cyclic GFR-binding peptide
  MOD_RES (1)..(3): Xaa is C or S
XKXSKVIMSMEGLIKPTKGIMIQITINS

SEQ ID NO: 98544 - protein, 27 aa, Artificial Sequence
  Cyclic GFR-binding peptide
  MOD_RES (2)..(2): Xaa is C or S
KXSRVIMSMEGIVKPKRGVMIQITINS

SEQ ID NO: 98545 - protein, 30 aa, Artificial Sequence; identical to SEQ ID NO: 65540
  Cyclic GFR-binding peptide
  MOD_RES (26)..(27): Xaa is C or S

SEQ ID NO: 98546 - protein, 29 aa, Artificial Sequence
  Cyclic GFR-binding peptide
  MOD_RES (2)..(2): Xaa is C or S
KXSRVIMSMEGLVKPKRGVMIQITINSLA

SEQ ID NO: 98547 - protein, 38 aa, Artificial Sequence; identical to SEQ ID NO: 21758
  Cyclic GFR-binding peptide
  MOD_RES (1)..(38): Xaa is C or S

SEQ ID NO: 98548 - protein, 25 aa, Artificial Sequence
  Cyclic GFR-binding peptide
SMEGILLVRGNDMIQMTINSTKVPA

SEQ ID NO: 98549 - protein, 22 aa, Artificial Sequence
  Cyclic GFR-binding peptide
SMEGIVKPTRGVMIQITINSLD

SEQ ID NO: 98550 - protein, 29 aa, Artificial Sequence
  Cyclic GFR-binding peptide
VVMDSMEGLVVNNASDMIQITINSLRTPV

SEQ ID NO: 98551 - protein, 34 aa, Artificial Sequence; identical to SEQ ID NO: 21762
  Cyclic GFR-binding peptide
  MOD_RES (31)..(31): Xaa is C or S

SEQ ID NO: 98552 - protein, 28 aa, Artificial Sequence
  Cyclic GFR-binding peptide
EELSMEGIHQGQHPKIRMIQMTINSQGT

SEQ ID NO: 98553 - protein, 37 aa, Artificial Sequence
  Cyclic GFR-binding peptide
  MOD_RES (1)..(33)..(34): Xaa is C or S
XRDVVMGSMEGLIIQQKDNMIQMTINSMKTPTXXPGA

SEQ ID NO: 98554 - protein, 34 aa, Artificial Sequence
  Cyclic GFR-binding peptide
  MOD_RES (2)..(34): Xaa is C or S
GXSEVVMDSMEGIVVNNASDMIQITINSLRTPVX

SEQ ID NO: 98555 - protein, 36 aa, Artificial Sequence; identical to SEQ ID NO: 21764
  Cyclic GFR-binding peptide

SEQ ID NO: 98556 - protein, 31 aa, Artificial Sequence; identical to SEQ ID NO: 62169
  Cyclic GFR-binding peptide
  MOD_RES (1)..(1): Xaa is C or S

SEQ ID NO: 98557 - protein, 28 aa, Artificial Sequence
  Cyclic GFR-binding peptide
  MOD_RES (1)..(1): Xaa is C or S
XSRVIMSMEGLVKPKRGVMIQITINSLA

SEQ ID NO: 98558 - protein, 44 aa, Artificial Sequence; identical to SEQ ID NO: 21770
  Cyclic GFR-binding peptide
  MOD_RES (1)..(3)..(40): Xaa is C or S

SEQ ID NO: 98559 - protein, 37 aa, Artificial Sequence; identical to SEQ ID NO: 21773
  Cyclic GFR-binding peptide
  MOD_RES (32)..(32): Xaa is C or S

SEQ ID NO: 98560 - protein, 35 aa, Artificial Sequence
  Cyclic GFR-binding peptide
  MOD_RES (1)..(33)..(34): Xaa is C or S
XRDVVMGSMEGLIIQQKDNMIQMTINSMKTPTXXP

SEQ ID NO: 98561 - protein, 32 aa, Artificial Sequence; identical to SEQ ID NO: 21775
  Cyclic GFR-binding peptide
  MOD_RES (30)..(30): Xaa is C or S

SEQ ID NO: 98562 - protein, 34 aa, Artificial Sequence
  Cyclic GFR-binding peptide
  MOD_RES (30)..(31): Xaa is C or S
VVMDSMEGLVVNNASDMIQITINSLRTPVXXTPP

SEQ ID NO: 98563 - protein, 33 aa, Artificial Sequence
  Cyclic GFR-binding peptide
  MOD_RES (29)..(30): Xaa is C or S
VMNSMEGLIVNSSDDMIQVTINSLKTPAXXPKP

SEQ ID NO: 98564 - protein, 24 aa, Artificial Sequence
  Cyclic GFR-binding peptide
MSMEGLLLVRGNDMIQMTINSTKV

SEQ ID NO: 98565 - protein, 33 aa, Artificial Sequence; identical to SEQ ID NO: 21779
  Cyclic GFR-binding peptide
  MOD_RES (1)..(1): Xaa is C or S

SEQ ID NO: 98566 - protein, 34 aa, Artificial Sequence; identical to SEQ ID NO: 21780
  Cyclic GFR-binding peptide
  MOD_RES (1)..(1): Xaa is C or S

SEQ ID NO: 98567 - protein, 31 aa, Artificial Sequence; identical to SEQ ID NO: 62185
  Cyclic GFR-binding peptide
  MOD_RES (26)..(27): Xaa is C or S

SEQ ID NO: 98568 - protein, 36 aa, Artificial Sequence
  Cyclic GFR-binding peptide
  MOD_RES (32)..(33): Xaa is C or S
RDVVMGSMEGLIIQQKDNMIQMTINSMKTPTXXPGA

SEQ ID NO: 98569 - protein, 38 aa, Artificial Sequence
  Cyclic GFR-binding peptide
  MOD_RES (2)..(33)..(34): Xaa is C or S
KXSKVVMSMEGLVKPTRGVMIQITINSLDQPVXXPSAS

SEQ ID NO: 98570 - protein, 32 aa, Artificial Sequence; identical to SEQ ID NO: 65572
  Cyclic GFR-binding peptide
  MOD_RES (32)..(32): Xaa is C or S

SEQ ID NO: 98571 - protein, 29 aa, Artificial Sequence
  Cyclic GFR-binding peptide
KVVMSMEGLVKPTRGVMIQITINSLDQPV

SEQ ID NO: 98572 - protein, 31 aa, Artificial Sequence
  Cyclic GFR-binding peptide
  MOD_RES (26)..(27): Xaa is C or S
SMEGIVVNNAADMIQITINSLRAPVXXSAPA

SEQ ID NO: 98573 - protein, 27 aa, Artificial Sequence
  Cyclic GFR-binding peptide
SMEGLHQGQHPKIRMIQMTINSEETPV

SEQ ID NO: 98574 - protein, 30 aa, Artificial Sequence; identical to SEQ ID NO: 62196
  Cyclic GFR-binding peptide
  MOD_RES (1)..(3): Xaa is C or S

SEQ ID NO: 98575 - protein, 36 aa, Artificial Sequence; identical to SEQ ID NO: 21794
  Cyclic GFR-binding peptide
  MOD_RES (2)..(4): Xaa is C or S

SEQ ID NO: 98576 - protein, 36 aa, Artificial Sequence; identical to SEQ ID NO: 21796
  Cyclic GFR-binding peptide
  MOD_RES (31)..(31): Xaa is C or S

SEQ ID NO: 98577 - protein, 24 aa, Artificial Sequence
  Cyclic GFR-binding peptide
SMEGLIVNSSDDMIQVTINSLKTP

SEQ ID NO: 98578 - protein, 35 aa, Artificial Sequence; identical to SEQ ID NO: 65582
  Cyclic GFR-binding peptide
  MOD_RES (31)..(32): Xaa is C or S

SEQ ID NO: 98579 - protein, 33 aa, Artificial Sequence
  Cyclic GFR-binding peptide
  MOD_RES (2)..(4): Xaa is C or S
LXGXEEVIMSMEGILLVRGNDMIQMTINSTKVP

SEQ ID NO: 98580 - protein, 35 aa, Artificial Sequence; identical to SEQ ID NO: 62204
  Cyclic GFR-binding peptide
  MOD_RES (1)..(3)..(34)..(35): Xaa is C or S

SEQ ID NO: 98581 - protein, 34 aa, Artificial Sequence
  Cyclic GFR-binding peptide
  MOD_RES (29)..(30): Xaa is C or S
VMGSMEGLIIQQKDNMIQMTINSMKTPTXXPGAS

SEQ ID NO: 98582 - protein, 33 aa, Artificial Sequence; identical to SEQ ID NO: 21802
  Cyclic GFR-binding peptide
  MOD_RES (30)..(30): Xaa is C or S

SEQ ID NO: 98583 - protein, 28 aa, Artificial Sequence
  Cyclic GFR-binding peptide
  MOD_RES (28)..(28): Xaa is C or S
MGSMEGIIIQQKDNMIQMTINSMKTPTX

SEQ ID NO: 98584 - protein, 40 aa, Artificial Sequence; identical to SEQ ID NO: 65588
  Cyclic GFR-binding peptide
  MOD_RES (2)..(4)..(35)..(36): Xaa is C or S

SEQ ID NO: 98585 - protein, 31 aa, Artificial Sequence
  Cyclic GFR-binding peptide
  MOD_RES (26)..(27): Xaa is C or S
SMEGLVKPKRGVMIQITINSLAQPVXXPAAS

SEQ ID NO: 98586 - protein, 27 aa, Artificial Sequence
  Cyclic GFR-binding peptide
MDSMEGLVVNNAADMIQITINSLRAPV

SEQ ID NO: 98587 - protein, 37 aa, Artificial Sequence
  Cyclic GFR-binding peptide
  MOD_RES (2)..(4)..(36)..(37): Xaa is C or S
RXGXSEVVMDSMEGLVVNNASDMIQITINSLRTPVXX

SEQ ID NO: 98588 - protein, 25 aa, Artificial Sequence
  Cyclic GFR-binding peptide
MSMEGLLLVRGNDMIQMTINSTKVP

SEQ ID NO: 98589 - protein, 25 aa, Artificial Sequence
  Cyclic GFR-binding peptide
MDSMEGIVVNNASDMIQITINSLRT

SEQ ID NO: 98590 - protein, 29 aa, Artificial Sequence
  Cyclic GFR-binding peptide
  MOD_RES (2)..(2): Xaa is C or S
GXSRVVMNSMEGLIVNSSDDMIQVTINSL

SEQ ID NO: 98591 - protein, 35 aa, Artificial Sequence; identical to SEQ ID NO: 62214
  Cyclic GFR-binding peptide
  MOD_RES (1)..(3)..(34)..(35): Xaa is C or S

SEQ ID NO: 98592 - protein, 24 aa, Artificial Sequence
  Cyclic GFR-binding peptide
SMEGIFIPKKRVIEMIQVTINSLQ

SEQ ID NO: 98593 - protein, 36 aa, Artificial Sequence
  Cyclic GFR-binding peptide
  MOD_RES (31)..(32): Xaa is C or S
RVVMNSMEGLIVNSSDDMIQVTINSLKTPAXXPKPV

SEQ ID NO: 98594 - protein, 27 aa, Artificial Sequence
  Cyclic GFR-binding peptide
LSMEGIHQGQHPKIRMIQMTINSQGTP

SEQ ID NO: 98595 - protein, 35 aa, Artificial Sequence; identical to SEQ ID NO: 62219
  Cyclic GFR-binding peptide
  MOD_RES (1)..(32)..(33): Xaa is C or S

SEQ ID NO: 98596 - protein, 32 aa, Artificial Sequence
  Cyclic GFR-binding peptide
  MOD_RES (30)..(31): Xaa is C or S
EVIMSMEGILLVRGNDMIQMTINSTKVPAXXT

SEQ ID NO: 98597 - protein, 33 aa, Artificial Sequence
  Cyclic GFR-binding peptide
  MOD_RES (32)..(33): Xaa is C or S
SRVVMNSMEGLIVNSSDDMIQVTINSLKTPAXX

SEQ ID NO: 98598 - protein, 40 aa, Artificial Sequence
  Cyclic GFR-binding peptide
  MOD_RES (1)..(3)..(34)..(35): Xaa is C or S
XKXSRVIMSMEGLVKPKRGVMIQITINSLAQPVXXPAASA

SEQ ID NO: 98599 - protein, 31 aa, Artificial Sequence
  Cyclic GFR-binding peptide
  MOD_RES (1)..(3): Xaa is C or S
XGXEEVIMSMEGLLLVRGNDMIQMTINSTKV

SEQ ID NO: 98600 - protein, 30 aa, Artificial Sequence
  Cyclic GFR-binding peptide
AEVVMDSMEGLVVNNAADMIQITINSLRAP

SEQ ID NO: 98601 - protein, 30 aa, Artificial Sequence; identical to SEQ ID NO: 21821
  Cyclic GFR-binding peptide

SEQ ID NO: 98602 - protein, 33 aa, Artificial Sequence; identical to SEQ ID NO: 21822
  Cyclic GFR-binding peptide
  MOD_RES (31)..(31): Xaa is C or S

SEQ ID NO: 98603 - protein, 29 aa, Artificial Sequence
  Cyclic GFR-binding peptide
RVVMNSMEGIIVNSSDDMIQVTINSLKTP

SEQ ID NO: 98604 - protein, 35 aa, Artificial Sequence
  Cyclic GFR-binding peptide
  MOD_RES (2)..(4): Xaa is C or S
RXGXSEVVMDSMEGLVVNNASDMIQITINSLRTPV

SEQ ID NO: 98605 - protein, 23 aa, Artificial Sequence
  Cyclic GFR-binding peptide
IMSMEGIIKPTKGIMIQITINSL

SEQ ID NO: 98606 - protein, 41 aa, Artificial Sequence; identical to SEQ ID NO: 21823
  Cyclic GFR-binding peptide
  MOD_RES (37)..(37): Xaa is C or S

SEQ ID NO: 98607 - protein, 37 aa, Artificial Sequence; identical to SEQ ID NO: 21824
  Cyclic GFR-binding peptide
  MOD_RES (2)..(36): Xaa is C or S

SEQ ID NO: 98608 - protein, 23 aa, Artificial Sequence
  Cyclic GFR-binding peptide
NSMEGIIVNSSDDMIQVTINSLK

SEQ ID NO: 98609 - protein, 31 aa, Artificial Sequence
  Cyclic GFR-binding peptide
  MOD_RES (30)..(31): Xaa is C or S
VVMGSMEGIIIQQKDNMIQMTINSMKTPTXX

SEQ ID NO: 98610 - protein, 34 aa, Artificial Sequence
  Cyclic GFR-binding peptide
  MOD_RES (31)..(32): Xaa is C or S
DVVMGSMEGIIIQQKDNMIQMTINSMKTPTXXPG

SEQ ID NO: 98611 - protein, 27 aa, Artificial Sequence
  Cyclic GFR-binding peptide
HDELTSMEGLFIPKKRVIEMIQVTINS

SEQ ID NO: 98612 - protein, 27 aa, Artificial Sequence
  Cyclic GFR-binding peptide
EVIMSMEGILLVRGNDMIQMTINSTKV

SEQ ID NO: 98613 - protein, 43 aa, Artificial Sequence; identical to SEQ ID NO: 21839
  Cyclic GFR-binding peptide
  MOD_RES (2)..(4)..(41): Xaa is C or S

SEQ ID NO: 98614 - protein, 37 aa, Artificial Sequence; identical to SEQ ID NO: 21841
  Cyclic GFR-binding peptide
  MOD_RES (2)..(2): Xaa is C or S

SEQ ID NO: 98615 - protein, 31 aa, Artificial Sequence; identical to SEQ ID NO: 62241
  Cyclic GFR-binding peptide
  MOD_RES (27)..(28): Xaa is C or S

SEQ ID NO: 98616 - protein, 40 aa, Artificial Sequence; identical to SEQ ID NO: 21847
  Cyclic GFR-binding peptide
  MOD_RES (1)..(38): Xaa is C or S

SEQ ID NO: 98617 - protein, 34 aa, Artificial Sequence; identical to SEQ ID NO: 21850
  Cyclic GFR-binding peptide
  MOD_RES (1)..(3): Xaa is C or S

SEQ ID NO: 98618 - protein, 30 aa, Artificial Sequence; identical to SEQ ID NO: 62245
  Cyclic GFR-binding peptide
  MOD_RES (30)..(30): Xaa is C or S

SEQ ID NO: 98619 - protein, 29 aa, Artificial Sequence
  Cyclic GFR-binding peptide
RDVVMGSMEGLIIQQKDNMIQMTINSMKT

SEQ ID NO: 98620 - protein, 31 aa, Artificial Sequence; identical to SEQ ID NO: 62249
  Cyclic GFR-binding peptide
  MOD_RES (2)..(2): Xaa is C or S

SEQ ID NO: 98621 - protein, 34 aa, Artificial Sequence; identical to SEQ ID NO: 21855
  Cyclic GFR-binding peptide
  MOD_RES (2)..(4): Xaa is C or S

SEQ ID NO: 98622 - protein, 27 aa, Artificial Sequence
  Cyclic GFR-binding peptide
EVVMDSMEGIVVNNAADMIQITINSLR

SEQ ID NO: 98623 - protein, 33 aa, Artificial Sequence
  Cyclic GFR-binding peptide
  MOD_RES (2)..(4): Xaa is C or S
SXGXRDVVMGSMEGLIIQQKDNMIQMTINSMKT

SEQ ID NO: 98624 - protein, 38 aa, Artificial Sequence; identical to SEQ ID NO: 21858
  Cyclic GFR-binding peptide
  MOD_RES (33)..(33): Xaa is C or S

SEQ ID NO: 98625 - protein, 31 aa, Artificial Sequence; identical to SEQ ID NO: 21859
  Cyclic GFR-binding peptide
  MOD_RES (28)..(28): Xaa is C or S

SEQ ID NO: 98626 - protein, 31 aa, Artificial Sequence
  Cyclic GFR-binding peptide
  MOD_RES (31)..(31): Xaa is C or S
DVVMGSMEGIIIQQKDNMIQMTINSMKTPTX

SEQ ID NO: 98627 - protein, 35 aa, Artificial Sequence; identical to SEQ ID NO: 21863
  Cyclic GFR-binding peptide
  MOD_RES (33)..(33): Xaa is C or S

SEQ ID NO: 98628 - protein, 27 aa, Artificial Sequence
  Cyclic GFR-binding peptide
MDSMEGIVVNNASDMIQITINSLRTPV

SEQ ID NO: 98629 - protein, 33 aa, Artificial Sequence; identical to SEQ ID NO: 21867
  Cyclic GFR-binding peptide
  MOD_RES (2)..(4): Xaa is C or S

SEQ ID NO: 98630 - protein, 37 aa, Artificial Sequence; identical to SEQ ID NO: 21869
  Cyclic GFR-binding peptide
  MOD_RES (37)..(37): Xaa is C or S

SEQ ID NO: 98631 - protein, 30 aa, Artificial Sequence
  Cyclic GFR-binding peptide
  MOD_RES (28)..(29): Xaa is C or S
IMSMEGILLVRGNDMIQMTINSTKVPAXXT

SEQ ID NO: 98632 - protein, 29 aa, Artificial Sequence
  Cyclic GFR-binding peptide
LHDELTSMEGIFIPKKRVIEMIQVTINSL

SEQ ID NO: 98633 - protein, 40 aa, Artificial Sequence; identical to SEQ ID NO: 65646
  Cyclic GFR-binding peptide
  MOD_RES (2)..(4)..(36)..(37): Xaa is C or S

SEQ ID NO: 98634 - protein, 36 aa, Artificial Sequence
  Cyclic GFR-binding peptide
  MOD_RES (2)..(4)..(36): Xaa is C or S
SXGXRDVVMGSMEGLIIQQKDNMIQMTINSMKTPTX

SEQ ID NO: 98635 - protein, 33 aa, Artificial Sequence
  Cyclic GFR-binding peptide
  MOD_RES (28)..(29): Xaa is C or S
MNSMEGLIVNSSDDMIQVTINSLKTPAXXPKPV

SEQ ID NO: 98636 - protein, 41 aa, Artificial Sequence; identical to SEQ ID NO: 21876
  Cyclic GFR-binding peptide
  MOD_RES (2)..(39): Xaa is C or S

SEQ ID NO: 98637 - protein, 36 aa, Artificial Sequence
  Cyclic GFR-binding peptide
  MOD_RES (1)..(3)..(35)..(36): Xaa is C or S
XGXRDVVMGSMEGLIIQQKDNMIQMTINSMKTPTXX

SEQ ID NO: 98638 - protein, 34 aa, Artificial Sequence
  Cyclic GFR-binding peptide
  MOD_RES (29)..(30): Xaa is C or S
VIMSMEGLIKPTKGIMIQITINSLDQSVXXPSAS

SEQ ID NO: 98639 - protein, 40 aa, Artificial Sequence; identical to SEQ ID NO: 21878
  Cyclic GFR-binding peptide
  MOD_RES (2)..(4): Xaa is C or S

SEQ ID NO: 98640 - protein, 30 aa, Artificial Sequence; identical to SEQ ID NO: 21880
  Cyclic GFR-binding peptide

SEQ ID NO: 98641 - protein, 37 aa, Artificial Sequence; identical to SEQ ID NO: 21881
  Cyclic GFR-binding peptide
  MOD_RES (1)..(1): Xaa is C or S

SEQ ID NO: 98642 - protein, 30 aa, Artificial Sequence; identical to SEQ ID NO: 21885
  Cyclic GFR-binding peptide

SEQ ID NO: 98643 - protein, 30 aa, Artificial Sequence
  Cyclic GFR-binding peptide
  MOD_RES (30)..(30): Xaa is C or S
KVVMSMEGLVKPTRGVMIQITINSLDQPVX

SEQ ID NO: 98644 - protein, 27 aa, Artificial Sequence
  Cyclic GFR-binding peptide
ELSMEGIHQGQHPKIRMIQMTINSQGT

SEQ ID NO: 98645 - protein, 35 aa, Artificial Sequence
  Cyclic GFR-binding peptide
  MOD_RES (1)..(3)..(35): Xaa is C or S
XGXSEVVMDSMEGLVVNNASDMIQITINSLRTPVX

SEQ ID NO: 98646 - protein, 36 aa, Artificial Sequence; identical to SEQ ID NO: 21888
  Cyclic GFR-binding peptide
  MOD_RES (2)..(4): Xaa is C or S

SEQ ID NO: 98647 - protein, 36 aa, Artificial Sequence
  Cyclic GFR-binding peptide
  MOD_RES (1)..(3)..(34)..(35): Xaa is C or S
XKXSKVIMSMEGLIKPTKGIMIQITINSLDQSVXXP

SEQ ID NO: 98648 - protein, 38 aa, Artificial Sequence
  Cyclic GFR-binding peptide
  MOD_RES (2)..(34)..(35): Xaa is C or S
GXAEVVMDSMEGLVVNNAADMIQITINSLRAPVXXSAP

SEQ ID NO: 98649 - protein, 31 aa, Artificial Sequence; identical to SEQ ID NO: 62271
  Cyclic GFR-binding peptide
  MOD_RES (26)..(27): Xaa is C or S

SEQ ID NO: 98650 - protein, 33 aa, Artificial Sequence
  Cyclic GFR-binding peptide
  MOD_RES (1)..(3): Xaa is C or S
XGXEEVIMSMEGLLLVRGNDMIQMTINSTKVPA

SEQ ID NO: 98651 - protein, 42 aa, Artificial Sequence; identical to SEQ ID NO: 21891
  Cyclic GFR-binding peptide
  MOD_RES (1)..(3)..(40): Xaa is C or S

SEQ ID NO: 98652 - protein, 36 aa, Artificial Sequence
  Cyclic GFR-binding peptide
  MOD_RES (31)..(32): Xaa is C or S
SKVVMSMEGLVKPTRGVMIQITINSLDQPVXXPSAS

SEQ ID NO: 98653 - protein, 29 aa, Artificial Sequence
  Cyclic GFR-binding peptide
  MOD_RES (27)..(28): Xaa is C or S
MSMEGLVKPKRGVMIQITINSLAQPVXXP

SEQ ID NO: 98654 - protein, 27 aa, Artificial Sequence
  Cyclic GFR-binding peptide
SKVIMSMEGIIKPTKGIMIQITINSLD

SEQ ID NO: 98655 - protein, 29 aa, Artificial Sequence
  Cyclic GFR-binding peptide
  MOD_RES (26)..(27): Xaa is C or S
SMEGLIKPTKGIMIQITINSLDQSVXXPS

SEQ ID NO: 98656 - protein, 39 aa, Artificial Sequence; identical to SEQ ID NO: 21896
  Cyclic GFR-binding peptide
  MOD_RES (36)..(36): Xaa is C or S

SEQ ID NO: 98657 - protein, 23 aa, Artificial Sequence
  Cyclic GFR-binding peptide
MNSMEGLIVNSSDDMIQVTINSL

SEQ ID NO: 98658 - protein, 35 aa, Artificial Sequence; identical to SEQ ID NO: 62277
  Cyclic GFR-binding peptide
  MOD_RES (2)..(4)..(35): Xaa is C or S

SEQ ID NO: 98659 - protein, 23 aa, Artificial Sequence
  Cyclic GFR-binding peptide
SMEGILKPKKRVYEMIQVTINSH

SEQ ID NO: 98660 - protein, 34 aa, Artificial Sequence; identical to SEQ ID NO: 62280
  Cyclic GFR-binding peptide
  MOD_RES (28)..(29): Xaa is C or S

SEQ ID NO: 98661 - protein, 36 aa, Artificial Sequence
  Cyclic GFR-binding peptide
  MOD_RES (30)..(31): Xaa is C or S
VVMDSMEGLVVNNAADMIQITINSLRAPVXXSAPAA

SEQ ID NO: 98662 - protein, 40 aa, Artificial Sequence
  Cyclic GFR-binding peptide
  MOD_RES (2)..(34)..(35): Xaa is C or S
GXSEVVMDSMEGLVVNNASDMIQITINSLRTPVXXTPPTS

SEQ ID NO: 98663 - protein, 37 aa, Artificial Sequence; identical to SEQ ID NO: 21905
  Cyclic GFR-binding peptide
  MOD_RES (1)..(1): Xaa is C or S

SEQ ID NO: 98664 - protein, 33 aa, Artificial Sequence; identical to SEQ ID NO: 21907
  Cyclic GFR-binding peptide
  MOD_RES (33)..(33): Xaa is C or S

SEQ ID NO: 98665 - protein, 27 aa, Artificial Sequence
  Cyclic GFR-binding peptide
  MOD_RES (27)..(27): Xaa is C or S
MSMEGIIKPTKGIMIQITINSLDQSVX

SEQ ID NO: 98666 - protein, 38 aa, Artificial Sequence; identical to SEQ ID NO: 21911
  Cyclic GFR-binding peptide
  MOD_RES (33)..(33): Xaa is C or S

SEQ ID NO: 98667 - protein, 30 aa, Artificial Sequence
  Cyclic GFR-binding peptide
SEVVMDSMEGIVVNNASDMIQITINSLRTP

SEQ ID NO: 98668 - protein, 20 aa, Artificial Sequence
  Cyclic GFR-binding peptide
SMEGIIVNSSDDMIQVTINS

SEQ ID NO: 98669 - protein, 39 aa, Artificial Sequence
  Cyclic GFR-binding peptide
  MOD_RES (2)..(33)..(34): Xaa is C or S
GXEEVIMSMEGLLLVRGNDMIQMTINSTKVPAXXTSPVR

SEQ ID NO: 98670 - protein, 25 aa, Artificial Sequence
  Cyclic GFR-binding peptide
ELTSMEGLFIPKKRVIEMIQVTINS

SEQ ID NO: 98671 - protein, 32 aa, Artificial Sequence; identical to SEQ ID NO: 65683
  Cyclic GFR-binding peptide
  MOD_RES (1)..(3): Xaa is C or S

SEQ ID NO: 98672 - protein, 37 aa, Artificial Sequence
  Cyclic GFR-binding peptide
  MOD_RES (31)..(32): Xaa is C or S
SRVIMSMEGLVKPKRGVMIQITINSLAQPVXXPAASA

SEQ ID NO: 98673 - protein, 28 aa, Artificial Sequence
  Cyclic GFR-binding peptide
  MOD_RES (1)..(3): Xaa is C or S
XKXSKVVMSMEGIVKPTRGVMIQITINS

SEQ ID NO: 98674 - protein, 33 aa, Artificial Sequence; identical to SEQ ID NO: 65687
  Cyclic GFR-binding peptide
  MOD_RES (28)..(29): Xaa is C or S

SEQ ID NO: 98675 - protein, 29 aa, Artificial Sequence
  Cyclic GFR-binding peptide
DELTSMEGLFIPKKRVIEMIQVTINSLQV

SEQ ID NO: 98676 - protein, 36 aa, Artificial Sequence
  Cyclic GFR-binding peptide
  MOD_RES (1)..(3)..(35)..(36): Xaa is C or S
XGXSEVVMDSMEGIVVNNASDMIQITINSLRTPVXX

SEQ ID NO: 98677 - protein, 37 aa, Artificial Sequence; identical to SEQ ID NO: 21919
  Cyclic GFR-binding peptide
  MOD_RES (1)..(35): Xaa is C or S

SEQ ID NO: 98678 - protein, 42 aa, Artificial Sequence
  Cyclic GFR-binding peptide
  MOD_RES (2)..(4)..(36)..(37): Xaa is C or S
RXGXAEVVMDSMEGIVVNNAADMIQITINSLRAPVXXSAPAA

SEQ ID NO: 98679 - protein, 28 aa, Artificial Sequence
  Cyclic GFR-binding peptide
VMGSMEGIIIQQKDNMIQMTINSMKTPT

SEQ ID NO: 98680 - protein, 32 aa, Artificial Sequence; identical to SEQ ID NO: 21924
  Cyclic GFR-binding peptide
  MOD_RES (29)..(29): Xaa is C or S

SEQ ID NO: 98681 - protein, 38 aa, Artificial Sequence; identical to SEQ ID NO: 21927
  Cyclic GFR-binding peptide
  MOD_RES (2)..(4)..(38): Xaa is C or S

SEQ ID NO: 98682 - protein, 23 aa, Artificial Sequence
  Cyclic GFR-binding peptide
FSMEGIHQGQHPKIRMIQMTINS

SEQ ID NO: 98683 - protein, 29 aa, Artificial Sequence
  Cyclic GFR-binding peptide
ALHDELTSMEGIFIPKKRVIEMIQVTINS

SEQ ID NO: 98684 - protein, 28 aa, Artificial Sequence
  Cyclic GFR-binding peptide
HQLFSMEGLHQGQHPKIRMIQMTINSEE

SEQ ID NO: 98685 - protein, 35 aa, Artificial Sequence; identical to SEQ ID NO: 21935
  Cyclic GFR-binding peptide
  MOD_RES (32)..(32): Xaa is C or S

SEQ ID NO: 98686 - protein, 37 aa, Artificial Sequence; identical to SEQ ID NO: 21936
  Cyclic GFR-binding peptide
  MOD_RES (33)..(33): Xaa is C or S

SEQ ID NO: 98687 - protein, 23 aa, Artificial Sequence
  Cyclic GFR-binding peptide
LSMEGIHQGQHPKIRMIQMTINS

SEQ ID NO: 98688 - protein, 36 aa, Artificial Sequence; identical to SEQ ID NO: 21939
  Cyclic GFR-binding peptide
  MOD_RES (32)..(32): Xaa is C or S

SEQ ID NO: 98689 - protein, 25 aa, Artificial Sequence
  Cyclic GFR-binding peptide
MNSMEGIIVNSSDDMIQVTINSLKT

SEQ ID NO: 98690 - protein, 22 aa, Artificial Sequence
  Cyclic GFR-binding peptide
SMEGIVVNNAADMIQITINSLR

SEQ ID NO: 98691 - protein, 36 aa, Artificial Sequence; identical to SEQ ID NO: 21947
  Cyclic GFR-binding peptide
  MOD_RES (2)..(4): Xaa is C or S

SEQ ID NO: 98692 - protein, 27 aa, Artificial Sequence
  Cyclic GFR-binding peptide
QLFSMEGIHQGQHPKIRMIQMTINSEE

SEQ ID NO: 98693 - protein, 31 aa, Artificial Sequence; identical to SEQ ID NO: 21952
  Cyclic GFR-binding peptide
  MOD_RES (31)..(31): Xaa is C or S

SEQ ID NO: 98694 - protein, 29 aa, Artificial Sequence
  Cyclic GFR-binding peptide
  MOD_RES (2)..(4): Xaa is C or S
SXKXSRVIMSMEGIVKPKRGVMIQITINS

SEQ ID NO: 98695 - protein, 28 aa, Artificial Sequence
  Cyclic GFR-binding peptide
  MOD_RES (27)..(28): Xaa is C or S
MSMEGIIKPTKGIMIQITINSLDQSVXX

SEQ ID NO: 98696 - protein, 25 aa, Artificial Sequence
  Cyclic GFR-binding peptide
ELRSMEGILKPKKRVYEMIQVTINS

SEQ ID NO: 98697 - protein, 41 aa, Artificial Sequence; identical to SEQ ID NO: 21955
  Cyclic GFR-binding peptide
  MOD_RES (2)..(39): Xaa is C or S

SEQ ID NO: 98698 - protein, 35 aa, Artificial Sequence; identical to SEQ ID NO: 65716
  Cyclic GFR-binding peptide
  MOD_RES (1)..(33)..(34): Xaa is C or S

SEQ ID NO: 98699 - protein, 30 aa, Artificial Sequence; identical to SEQ ID NO: 65717
  Cyclic GFR-binding peptide
  MOD_RES (2)..(4): Xaa is C or S

SEQ ID NO: 98700 - protein, 29 aa, Artificial Sequence
  Cyclic GFR-binding peptide
  MOD_RES (1)..(1): Xaa is C or S
XKNHQLFSMEGLHQGQHPKIRMIQMTINS

SEQ ID NO: 98701 - protein, 31 aa, Artificial Sequence
  Cyclic GFR-binding peptide
  MOD_RES (28)..(29): Xaa is C or S
IMSMEGILLVRGNDMIQMTINSTKVPAXXTS

SEQ ID NO: 98702 - protein, 31 aa, Artificial Sequence; identical to SEQ ID NO: 62329
  Cyclic GFR-binding peptide
  MOD_RES (29)..(30): Xaa is C or S

SEQ ID NO: 98703 - protein, 33 aa, Artificial Sequence; identical to SEQ ID NO: 21960
  Cyclic GFR-binding peptide
  MOD_RES (32)..(32): Xaa is C or S

SEQ ID NO: 98704 - protein, 43 aa, Artificial Sequence; identical to SEQ ID NO: 21961
  Cyclic GFR-binding peptide
  MOD_RES (1)..(3)..(40): Xaa is C or S

SEQ ID NO: 98705 - protein, 32 aa, Artificial Sequence
  Cyclic GFR-binding peptide
  MOD_RES (30)..(31): Xaa is C or S
VVMGSMEGLIIQQKDNMIQMTINSMKTPTXXP

SEQ ID NO: 98706 - protein, 44 aa, Artificial Sequence; identical to SEQ ID NO: 21963
  Cyclic GFR-binding peptide
  MOD_RES (1)..(3)..(40): Xaa is C or S

SEQ ID NO: 98707 - protein, 29 aa, Artificial Sequence
  Cyclic GFR-binding peptide
  MOD_RES (2)..(2): Xaa is C or S
KXSKVIMSMEGIIKPTKGIMIQITINSLD

SEQ ID NO: 98708 - protein, 38 aa, Artificial Sequence; identical to SEQ ID NO: 21965
  Cyclic GFR-binding peptide
  MOD_RES (2)..(4): Xaa is C or S

SEQ ID NO: 98709 - protein, 38 aa, Artificial Sequence
  Cyclic GFR-binding peptide
  MOD_RES (1)..(33)..(34): Xaa is C or S
XSEVVMDSMEGLVVNNASDMIQITINSLRTPVXXTPPT

SEQ ID NO: 98710 - protein, 29 aa, Artificial Sequence
  Cyclic GFR-binding peptide
SRVVMNSMEGIIVNSSDDMIQVTINSLKT

SEQ ID NO: 98711 - protein, 39 aa, Artificial Sequence
  Cyclic GFR-binding peptide
  MOD_RES (2)..(4)..(35)..(36): Xaa is C or S
SXKXSKVIMSMEGLIKPTKGIMIQITINSLDQSVXXPSA

SEQ ID NO: 98712 - protein, 34 aa, Artificial Sequence
  Cyclic GFR-binding peptide
  MOD_RES (28)..(29): Xaa is C or S
IMSMEGILLVRGNDMIQMTINSTKVPAXXTSPVR

SEQ ID NO: 98713 - protein, 27 aa, Artificial Sequence
  Cyclic GFR-binding peptide
  MOD_RES (26)..(27): Xaa is C or S
SMEGLIVNSSDDMIQVTINSLKTPAXX

SEQ ID NO: 98714 - protein, 33 aa, Artificial Sequence; identical to SEQ ID NO: 21967
  Cyclic GFR-binding peptide

SEQ ID NO: 98715 - protein, 22 aa, Artificial Sequence
  Cyclic GFR-binding peptide
SMEGLVVNNASDMIQITINSLR

SEQ ID NO: 98716 - protein, 30 aa, Artificial Sequence
  Cyclic GFR-binding peptide
RVVMNSMEGLIVNSSDDMIQVTINSLKTPA

SEQ ID NO: 98717 - protein, 31 aa, Artificial Sequence
  Cyclic GFR-binding peptide
  MOD_RES (26)..(27): Xaa is C or S
SMEGLIVNSSDDMIQVTINSLKTPAXXPKPV

SEQ ID NO: 98718 - protein, 37 aa, Artificial Sequence
  Cyclic GFR-binding peptide
  MOD_RES (1)..(33)..(34): Xaa is C or S
XSEVVMDSMEGIVVNNASDMIQITINSLRTPVXXTPP

SEQ ID NO: 98719 - protein, 41 aa, Artificial Sequence
  Cyclic GFR-binding peptide
  MOD_RES (2)..(4)..(35)..(36): Xaa is C or S
SXKXSKVIMSMEGLIKPTKGIMIQITINSLDQSVXXPSASA

SEQ ID NO: 98720 - protein, 33 aa, Artificial Sequence; identical to SEQ ID NO: 21970
  Cyclic GFR-binding peptide
  MOD_RES (2)..(2): Xaa is C or S

SEQ ID NO: 98721 - protein, 27 aa, Artificial Sequence
  Cyclic GFR-binding peptide
  MOD_RES (26)..(27): Xaa is C or S
SMEGIVKPKRGVMIQITINSLAQPVXX

SEQ ID NO: 98722 - protein, 37 aa, Artificial Sequence; identical to SEQ ID NO: 21973
  Cyclic GFR-binding peptide
  MOD_RES (2)..(36): Xaa is C or S

SEQ ID NO: 98723 - protein, 30 aa, Artificial Sequence; identical to SEQ ID NO: 21975
  Cyclic GFR-binding peptide

SEQ ID NO: 98724 - protein, 35 aa, Artificial Sequence
  Cyclic GFR-binding peptide
  MOD_RES (1)..(33)..(34): Xaa is C or S
XSEVVMDSMEGIVVNNASDMIQITINSLRTPVXXT

SEQ ID NO: 98725 - protein, 39 aa, Artificial Sequence
  Cyclic GFR-binding peptide
  MOD_RES (1)..(3)..(34)..(35): Xaa is C or S
XKXSRVIMSMEGLVKPKRGVMIQITINSLAQPVXXPAAS

SEQ ID NO: 98726 - protein, 25 aa, Artificial Sequence
  Cyclic GFR-binding peptide
SMEGLVKPKRGVMIQITINSLAQPV

SEQ ID NO: 98727 - protein, 35 aa, Artificial Sequence
  Cyclic GFR-binding peptide
  MOD_RES (30)..(31): Xaa is C or S
VVMDSMEGIVVNNASDMIQITINSLRTPVXXTPPT

SEQ ID NO: 98728 - protein, 40 aa, Artificial Sequence
  Cyclic GFR-binding peptide
  MOD_RES (2)..(4)..(35)..(36): Xaa is C or S
SXKXSKVIMSMEGLIKPTKGIMIQITINSLDQSVXXPSAS

SEQ ID NO: 98729 - protein, 33 aa, Artificial Sequence; identical to SEQ ID NO: 21979
  Cyclic GFR-binding peptide
  MOD_RES (33)..(33): Xaa is C or S

SEQ ID NO: 98730 - protein, 27 aa, Artificial Sequence
  Cyclic GFR-binding peptide
  MOD_RES (27)..(27): Xaa is C or S
MSMEGIVKPTRGVMIQITINSLDQPVX

SEQ ID NO: 98731 - protein, 38 aa, Artificial Sequence; identical to SEQ ID NO: 21981
  Cyclic GFR-binding peptide
  MOD_RES (2)..(4): Xaa is C or S

SEQ ID NO: 98732 - protein, 28 aa, Artificial Sequence
  Cyclic GFR-binding peptide
SEVVMDSMEGIVVNNASDMIQITINSLR

SEQ ID NO: 98733 - protein, 29 aa, Artificial Sequence
  Cyclic GFR-binding peptide
KNHQLFSMEGLHQGQHPKIRMIQMTINSE

SEQ ID NO: 98734 - protein, 29 aa, Artificial Sequence
  Cyclic GFR-binding peptide
  MOD_RES (1)..(3): Xaa is C or S
XGXRDVVMGSMEGIIIQQKDNMIQMTINS

SEQ ID NO: 98735 - protein, 30 aa, Artificial Sequence
  Cyclic GFR-binding peptide
  MOD_RES (26)..(27): Xaa is C or S
SMEGLVKPTRGVMIQITINSLDQPVXXPSA

SEQ ID NO: 98736 - protein, 32 aa, Artificial Sequence; identical to SEQ ID NO: 21985
  Cyclic GFR-binding peptide

SEQ ID NO: 98737 - protein, 38 aa, Artificial Sequence; identical to SEQ ID NO: 21986
  Cyclic GFR-binding peptide
  MOD_RES (1)..(3)..(37): Xaa is C or S

SEQ ID NO: 98738 - protein, 39 aa, Artificial Sequence; identical to SEQ ID NO: 21988
  Cyclic GFR-binding peptide
  MOD_RES (37)..(37): Xaa is C or S

SEQ ID NO: 98739 - protein, 32 aa, Artificial Sequence
  Cyclic GFR-binding peptide
  MOD_RES (26)..(27): Xaa is C or S
SMEGLIVNSSDDMIQVTINSLKTPAXXPKPVH

SEQ ID NO: 98740 - protein, 33 aa, Artificial Sequence
  Cyclic GFR-binding peptide
  MOD_RES (29)..(30): Xaa is C or S
VMGSMEGIIIQQKDNMIQMTINSMKTPTXXPGA

SEQ ID NO: 98741 - protein, 34 aa, Artificial Sequence
  Cyclic GFR-binding peptide
  MOD_RES (32)..(33): Xaa is C or S
RDVVMGSMEGIIIQQKDNMIQMTINSMKTPTXXP

SEQ ID NO: 98742 - protein, 35 aa, Artificial Sequence
  Cyclic GFR-binding peptide
  MOD_RES (2)..(4): Xaa is C or S
SXGXRDVVMGSMEGLIIQQKDNMIQMTINSMKTPT

SEQ ID NO: 98743 - protein, 34 aa, Artificial Sequence
  Cyclic GFR-binding peptide
  MOD_RES (1)..(33)..(34): Xaa is C or S
XSRVVMNSMEGLIVNSSDDMIQVTINSLKTPAXX

SEQ ID NO: 98744 - protein, 33 aa, Artificial Sequence; identical to SEQ ID NO: 65742
  Cyclic GFR-binding peptide
  MOD_RES (30)..(31): Xaa is C or S

SEQ ID NO: 98745 - protein, 30 aa, Artificial Sequence
  Cyclic GFR-binding peptide
  MOD_RES (26)..(27): Xaa is C or S
SMEGLVKPKRGVMIQITINSLAQPVXXPAA

SEQ ID NO: 98746 - protein, 38 aa, Artificial Sequence; identical to SEQ ID NO: 21995
  Cyclic GFR-binding peptide
  MOD_RES (32)..(32): Xaa is C or S

SEQ ID NO: 98747 - protein, 29 aa, Artificial Sequence
  Cyclic GFR-binding peptide
  MOD_RES (1)..(3): Xaa is C or S
XKXSKVIMSMEGLIKPTKGIMIQITINSL

SEQ ID NO: 98748 - protein, 35 aa, Artificial Sequence
  Cyclic GFR-binding peptide
  MOD_RES (30)..(31): Xaa is C or S
KVIMSMEGLIKPTKGIMIQITINSLDQSVXXPSAS

SEQ ID NO: 98749 - protein, 38 aa, Artificial Sequence
  Cyclic GFR-binding peptide
  MOD_RES (1)..(3)..(35)..(36): Xaa is C or S
XGXRDVVMGSMEGIIIQQKDNMIQMTINSMKTPTXXPG

SEQ ID NO: 98750 - protein, 28 aa, Artificial Sequence
  Cyclic GFR-binding peptide
  MOD_RES (1)..(1): Xaa is C or S
XSRVVMNSMEGIIVNSSDDMIQVTINSL

SEQ ID NO: 98751 - protein, 31 aa, Artificial Sequence
  Cyclic GFR-binding peptide
  MOD_RES (1)..(3): Xaa is C or S
XGXAEVVMDSMEGLVVNNAADMIQITINSLR

SEQ ID NO: 98752 - protein, 29 aa, Artificial Sequence
  Cyclic GFR-binding peptide
VVMNSMEGIIVNSSDDMIQVTINSLKTPA

SEQ ID NO: 98753 - protein, 41 aa, Artificial Sequence; identical to SEQ ID NO: 22000
  Cyclic GFR-binding peptide
  MOD_RES (1)..(35): Xaa is C or S

SEQ ID NO: 98754 - protein, 28 aa, Artificial Sequence
  Cyclic GFR-binding peptide
  MOD_RES (28)..(28): Xaa is C or S
IMSMEGLVKPKRGVMIQITINSLAQPVX

SEQ ID NO: 98755 - protein, 29 aa, Artificial Sequence
  Cyclic GFR-binding peptide
  MOD_RES (29)..(29): Xaa is C or S
VVMSMEGLVKPTRGVMIQITINSLDQPVX

SEQ ID NO: 98756 - protein, 34 aa, Artificial Sequence
  Cyclic GFR-binding peptide
  MOD_RES (32)..(33): Xaa is C or S
SEVVMDSMEGIVVNNASDMIQITINSLRTPVXXT

SEQ ID NO: 98757 - protein, 32 aa, Artificial Sequence; identical to SEQ ID NO: 62387
  Cyclic GFR-binding peptide
  MOD_RES (26)..(27): Xaa is C or S

SEQ ID NO: 98758 - protein, 26 aa, Artificial Sequence
  Cyclic GFR-binding peptide
AEVVMDSMEGIVVNNAADMIQITINS

SEQ ID NO: 98759 - protein, 34 aa, Artificial Sequence
  Cyclic GFR-binding peptide
  MOD_RES (28)..(29): Xaa is C or S
MNSMEGLIVNSSDDMIQVTINSLKTPAXXPKPVH

SEQ ID NO: 98760 - protein, 31 aa, Artificial Sequence; identical to SEQ ID NO: 22008
  Cyclic GFR-binding peptide

SEQ ID NO: 98761 - protein, 35 aa, Artificial Sequence; identical to SEQ ID NO: 22009
  Cyclic GFR-binding peptide
  MOD_RES (2)..(4): Xaa is C or S

SEQ ID NO: 98762 - protein, 29 aa, Artificial Sequence
  Cyclic GFR-binding peptide
AEVVMDSMEGIVVNNAADMIQITINSLRA

SEQ ID NO: 98763 - protein, 35 aa, Artificial Sequence; identical to SEQ ID NO: 22012
  Cyclic GFR-binding peptide
  MOD_RES (1)..(3): Xaa is C or S

SEQ ID NO: 98764 - protein, 32 aa, Artificial Sequence
  Cyclic GFR-binding peptide
  MOD_RES (29)..(30): Xaa is C or S
VMDSMEGIVVNNASDMIQITINSLRTPVXXTP

SEQ ID NO: 98765 - protein, 38 aa, Artificial Sequence; identical to SEQ ID NO: 22018
  Cyclic GFR-binding peptide
  MOD_RES (2)..(2): Xaa is C or S

SEQ ID NO: 98766 - protein, 39 aa, Artificial Sequence; identical to SEQ ID NO: 22021
  Cyclic GFR-binding peptide
  MOD_RES (2)..(4): Xaa is C or S

SEQ ID NO: 98767 - protein, 32 aa, Artificial Sequence
  Cyclic GFR-binding peptide
  MOD_RES (26)..(27): Xaa is C or S
SMEGIVVNNASDMIQITINSLRTPVXXTPPTS

SEQ ID NO: 98768 - protein, 33 aa, Artificial Sequence; identical to SEQ ID NO: 22024
  Cyclic GFR-binding peptide
  MOD_RES (33)..(33): Xaa is C or S

SEQ ID NO: 98769 - protein, 41 aa, Artificial Sequence; identical to SEQ ID NO: 22026
  Cyclic GFR-binding peptide
  MOD_RES (2)..(4)..(38): Xaa is C or S

SEQ ID NO: 98770 - protein, 35 aa, Artificial Sequence; identical to SEQ ID NO: 22031
  Cyclic GFR-binding peptide
  MOD_RES (32)..(32): Xaa is C or S

SEQ ID NO: 98771 - protein, 26 aa, Artificial Sequence
  Cyclic GFR-binding peptide
EVIMSMEGILLVRGNDMIQMTINSTK

SEQ ID NO: 98772 - protein, 27 aa, Artificial Sequence
  Cyclic GFR-binding peptide
  MOD_RES (27)..(27): Xaa is C or S
DSMEGIVVNNASDMIQITINSLRTPVX

SEQ ID NO: 98773 - protein, 28 aa, Artificial Sequence
  Cyclic GFR-binding peptide
SKVVMSMEGLVKPTRGVMIQITINSLDQ

SEQ ID NO: 98774 - protein, 32 aa, Artificial Sequence
  Cyclic GFR-binding peptide
  MOD_RES (27)..(28): Xaa is C or S
MSMEGLLLVRGNDMIQMTINSTKVPAXXTSPV

SEQ ID NO: 98775 - protein, 33 aa, Artificial Sequence; identical to SEQ ID NO: 22035
  Cyclic GFR-binding peptide
  MOD_RES (31)..(31): Xaa is C or S

SEQ ID NO: 98776 - protein, 33 aa, Artificial Sequence; identical to SEQ ID NO: 62418
  Cyclic GFR-binding peptide
  MOD_RES (1)..(3): Xaa is C or S

SEQ ID NO: 98777 - protein, 33 aa, Artificial Sequence
  Cyclic GFR-binding peptide
  MOD_RES (2)..(2): Xaa is C or S
GXSEVVMDSMEGLVVNNASDMIQITINSLRTPV

SEQ ID NO: 98778 - protein, 24 aa, Artificial Sequence
  Cyclic GFR-binding peptide
MDSMEGLVVNNAADMIQITINSLR

SEQ ID NO: 98779 - protein, 27 aa, Artificial Sequence
  Cyclic GFR-binding peptide
  MOD_RES (1)..(1): Xaa is C or S
XSKVVMSMEGIVKPTRGVMIQITINSL

SEQ ID NO: 98780 - protein, 32 aa, Artificial Sequence; identical to SEQ ID NO: 22041
  Cyclic GFR-binding peptide
  MOD_RES (2)..(2): Xaa is C or S

SEQ ID NO: 98781 - protein, 31 aa, Artificial Sequence; identical to SEQ ID NO: 62425
  Cyclic GFR-binding peptide
  MOD_RES (31)..(31): Xaa is C or S

SEQ ID NO: 98782 - protein, 43 aa, Artificial Sequence; identical to SEQ ID NO: 22043
  Cyclic GFR-binding peptide
  MOD_RES (1)..(3)..(37): Xaa is C or S

SEQ ID NO: 98783 - protein, 32 aa, Artificial Sequence
  Cyclic GFR-binding peptide
  MOD_RES (31)..(32): Xaa is C or S
EEVIMSMEGLLLVRGNDMIQMTINSTKVPAXX

SEQ ID NO: 98784 - protein, 29 aa, Artificial Sequence
  Cyclic GFR-binding peptide
  MOD_RES (2)..(4): Xaa is C or S
SXKXSKVIMSMEGLIKPTKGIMIQITINS

SEQ ID NO: 98785 - protein, 34 aa, Artificial Sequence
  Cyclic GFR-binding peptide
  MOD_RES (2)..(4): Xaa is C or S
SXKXSRVIMSMEGLVKPKRGVMIQITINSLAQPV

SEQ ID NO: 98786 - protein, 35 aa, Artificial Sequence; identical to SEQ ID NO: 22055
  Cyclic GFR-binding peptide
  MOD_RES (30)..(30): Xaa is C or S

SEQ ID NO: 98787 - protein, 26 aa, Artificial Sequence
  Cyclic GFR-binding peptide
DSMEGLVVNNASDMIQITINSLRTPV

SEQ ID NO: 98788 - protein, 33 aa, Artificial Sequence
  Cyclic GFR-binding peptide
  MOD_RES (2)..(4): Xaa is C or S
RXGXSEVVMDSMEGIVVNNASDMIQITINSLRT

SEQ ID NO: 98789 - protein, 33 aa, Artificial Sequence
  Cyclic GFR-binding peptide
  MOD_RES (29)..(30): Xaa is C or S
VIMSMEGLVKPKRGVMIQITINSLAQPVXXPAA

SEQ ID NO: 98790 - protein, 41 aa, Artificial Sequence; identical to SEQ ID NO: 22058
  Cyclic GFR-binding peptide
  MOD_RES (37)..(37): Xaa is C or S

SEQ ID NO: 98791 - protein, 40 aa, Artificial Sequence
  Cyclic GFR-binding peptide
  MOD_RES (2)..(34)..(35): Xaa is C or S
GXSRVVMNSMEGIIVNSSDDMIQVTINSLKTPAXXPKPVH

SEQ ID NO: 98792 - protein, 32 aa, Artificial Sequence; identical to SEQ ID NO: 22061
  Cyclic GFR-binding peptide

SEQ ID NO: 98793 - protein, 31 aa, Artificial Sequence
  Cyclic GFR-binding peptide
  MOD_RES (29)..(30): Xaa is C or S
VMDSMEGIVVNNAADMIQITINSLRAPVXXS

SEQ ID NO: 98794 - protein, 35 aa, Artificial Sequence
  Cyclic GFR-binding peptide
  MOD_RES (29)..(30): Xaa is C or S
VMDSMEGLVVNNASDMIQITINSLRTPVXXTPPTS

SEQ ID NO: 98795 - protein, 29 aa, Artificial Sequence
  Cyclic GFR-binding peptide
  MOD_RES (26)..(27): Xaa is C or S
SMEGIVKPTRGVMIQITINSLDQPVXXPS

SEQ ID NO: 98796 - protein, 23 aa, Artificial Sequence
  Cyclic GFR-binding peptide
SMEGLIVNSSDDMIQVTINSLKT

SEQ ID NO: 98797 - protein, 38 aa, Artificial Sequence; identical to SEQ ID NO: 22066
  Cyclic GFR-binding peptide
  MOD_RES (35)..(35): Xaa is C or S

SEQ ID NO: 98798 - protein, 28 aa, Artificial Sequence
  Cyclic GFR-binding peptide
  MOD_RES (27)..(28): Xaa is C or S
MSMEGIVKPTRGVMIQITINSLDQPVXX

SEQ ID NO: 98799 - protein, 34 aa, Artificial Sequence; identical to SEQ ID NO: 22069
  Cyclic GFR-binding peptide
  MOD_RES (1)..(3): Xaa is C or S

SEQ ID NO: 98800 - protein, 42 aa, Artificial Sequence
  Cyclic GFR-binding peptide
  MOD_RES (2)..(4)..(36)..(37): Xaa is C or S
HXGXSRVVMNSMEGLIVNSSDDMIQVTINSLKTPAXXPKPVH

SEQ ID NO: 98801 - protein, 29 aa, Artificial Sequence
  Cyclic GFR-binding peptide
  MOD_RES (2)..(2): Xaa is C or S
KXSKVIMSMEGLIKPTKGIMIQITINSLD

SEQ ID NO: 98802 - protein, 25 aa, Artificial Sequence
  Cyclic GFR-binding peptide
KVVMSMEGIVKPTRGVMIQITINSL

SEQ ID NO: 98803 - protein, 34 aa, Artificial Sequence; identical to SEQ ID NO: 65819
  Cyclic GFR-binding peptide
  MOD_RES (1)..(33)..(34): Xaa is C or S

SEQ ID NO: 98804 - protein, 32 aa, Artificial Sequence; identical to SEQ ID NO: 22077
  Cyclic GFR-binding peptide

SEQ ID NO: 98805 - protein, 30 aa, Artificial Sequence; identical to SEQ ID NO: 65820
  Cyclic GFR-binding peptide
  MOD_RES (26)..(27): Xaa is C or S

SEQ ID NO: 98806 - protein, 29 aa, Artificial Sequence
  Cyclic GFR-binding peptide
  MOD_RES (28)..(29): Xaa is C or S
MDSMEGLVVNNASDMIQITINSLRTPVXX

SEQ ID NO: 98807 - protein, 26 aa, Artificial Sequence
  Cyclic GFR-binding peptide
FSMEGIHQGQHPKIRMIQMTINSEET

SEQ ID NO: 98808 - protein, 29 aa, Artificial Sequence
  Cyclic GFR-binding peptide
  MOD_RES (2)..(2): Xaa is C or S
GXRDVVMGSMEGIIIQQKDNMIQMTINSM

SEQ ID NO: 98809 - protein, 34 aa, Artificial Sequence
  Cyclic GFR-binding peptide
  MOD_RES (32)..(33): Xaa is C or S
AEVVMDSMEGLVVNNAADMIQITINSLRAPVXXS

SEQ ID NO: 98810 - protein, 29 aa, Artificial Sequence
  Cyclic GFR-binding peptide
LRSMEGILKPKKRVYEMIQVTINSHHVRS

SEQ ID NO: 98811 - protein, 39 aa, Artificial Sequence
  Cyclic GFR-binding peptide
  MOD_RES (2)..(4)..(36)..(37): Xaa is C or S
RXGXAEVVMDSMEGLVVNNAADMIQITINSLRAPVXXSA

SEQ ID NO: 98812 - protein, 40 aa, Artificial Sequence
  Cyclic GFR-binding peptide
  MOD_RES (2)..(34)..(35): Xaa is C or S
GXSEVVMDSMEGIVVNNASDMIQITINSLRTPVXXTPPTS

SEQ ID NO: 98813 - protein, 37 aa, Artificial Sequence; identical to SEQ ID NO: 22086
  Cyclic GFR-binding peptide
  MOD_RES (33)..(33): Xaa is C or S

SEQ ID NO: 98814 - protein, 21 aa, Artificial Sequence
  Cyclic GFR-binding peptide
NSMEGLIVNSSDDMIQVTINS

SEQ ID NO: 98815 - protein, 31 aa, Artificial Sequence; identical to SEQ ID NO: 22093
  Cyclic GFR-binding peptide
  MOD_RES (2)..(2): Xaa is C or S

SEQ ID NO: 98816 - protein, 36 aa, Artificial Sequence
  Cyclic GFR-binding peptide
  MOD_RES (1)..(3)..(34)..(35): Xaa is C or S
XGXEEVIMSMEGILLVRGNDMIQMTINSTKVPAXXT

SEQ ID NO: 98817 - protein, 41 aa, Artificial Sequence; identical to SEQ ID NO: 22095
  Cyclic GFR-binding peptide
  MOD_RES (1)..(35): Xaa is C or S

SEQ ID NO: 98818 - protein, 29 aa, Artificial Sequence
  Cyclic GFR-binding peptide
  MOD_RES (26)..(27): Xaa is C or S
SMEGLVVNNASDMIQITINSLRTPVXXTP

SEQ ID NO: 98819 - protein, 37 aa, Artificial Sequence
  Cyclic GFR-binding peptide
  MOD_RES (2)..(4)..(36)..(37): Xaa is C or S
RXGXAEVVMDSMEGIVVNNAADMIQITINSLRAPVXX

SEQ ID NO: 98820 - protein, 37 aa, Artificial Sequence; identical to SEQ ID NO: 22098
  Cyclic GFR-binding peptide
  MOD_RES (1)..(3): Xaa is C or S

SEQ ID NO: 98821 - protein, 27 aa, Artificial Sequence
  Cyclic GFR-binding peptide
  MOD_RES (1)..(1): Xaa is C or S
XSRVIMSMEGLVKPKRGVMIQITINSL

SEQ ID NO: 98822 - protein, 26 aa, Artificial Sequence
  Cyclic GFR-binding peptide
VMDSMEGIVVNNAADMIQITINSLRA

SEQ ID NO: 98823 - protein, 37 aa, Artificial Sequence
  Cyclic GFR-binding peptide
  MOD_RES (2)..(4)..(36)..(37): Xaa is C or S
RXGXAEVVMDSMEGLVVNNAADMIQITINSLRAPVXX

SEQ ID NO: 98824 - protein, 30 aa, Artificial Sequence; identical to SEQ ID NO: 22101
  Cyclic GFR-binding peptide

SEQ ID NO: 98825 - protein, 28 aa, Artificial Sequence
  Cyclic GFR-binding peptide
  MOD_RES (26)..(27): Xaa is C or S
SMEGLLLVRGNDMIQMTINSTKVPAXXT

SEQ ID NO: 98826 - protein, 24 aa, Artificial Sequence
  Cyclic GFR-binding peptide
SMEGIIVNSSDDMIQVTINSLKTP

SEQ ID NO: 98827 - protein, 22 aa, Artificial Sequence
  Cyclic GFR-binding peptide
MSMEGIVKPKRGVMIQITINSL

SEQ ID NO: 98828 - protein, 36 aa, Artificial Sequence; identical to SEQ ID NO: 22105
  Cyclic GFR-binding peptide
  MOD_RES (2)..(2): Xaa is C or S

SEQ ID NO: 98829 - protein, 30 aa, Artificial Sequence; identical to SEQ ID NO: 22109
  Cyclic GFR-binding peptide

SEQ ID NO: 98830 - protein, 32 aa, Artificial Sequence; identical to SEQ ID NO: 22111
  Cyclic GFR-binding peptide

SEQ ID NO: 98831 - protein, 37 aa, Artificial Sequence
  Cyclic GFR-binding peptide
  MOD_RES (31)..(32): Xaa is C or S
SKVVMSMEGLVKPTRGVMIQITINSLDQPVXXPSASA

SEQ ID NO: 98832 - protein, 25 aa, Artificial Sequence
  Cyclic GFR-binding peptide
SMEGIIKPTKGIMIQITINSLDQSV

SEQ ID NO: 98833 - protein, 35 aa, Artificial Sequence
  Cyclic GFR-binding peptide
  MOD_RES (29)..(30): Xaa is C or S
VIMSMEGLIKPTKGIMIQITINSLDQSVXXPSASA

SEQ ID NO: 98834 - protein, 39 aa, Artificial Sequence; identical to SEQ ID NO: 22115
  Cyclic GFR-binding peptide
  MOD_RES (1)..(35): Xaa is C or S

SEQ ID NO: 98835 - protein, 38 aa, Artificial Sequence; identical to SEQ ID NO: 22117
  Cyclic GFR-binding peptide
  MOD_RES (34)..(34): Xaa is C or S

SEQ ID NO: 98836 - protein, 34 aa, Artificial Sequence; identical to SEQ ID NO: 22118
  Cyclic GFR-binding peptide
  MOD_RES (30)..(30): Xaa is C or S

SEQ ID NO: 98837 - protein, 39 aa, Artificial Sequence
  Cyclic GFR-binding peptide
  MOD_RES (1)..(3)..(35)..(36): Xaa is C or S
XGXRDVVMGSMEGLIIQQKDNMIQMTINSMKTPTXXPGA

SEQ ID NO: 98838 - protein, 28 aa, Artificial Sequence
  Cyclic GFR-binding peptide
  MOD_RES (1)..(1): Xaa is C or S
XSRVVMNSMEGLIVNSSDDMIQVTINSL

SEQ ID NO: 98839 - protein, 25 aa, Artificial Sequence
  Cyclic GFR-binding peptide
SMEGLIVNSSDDMIQVTINSLKTPA

SEQ ID NO: 98840 - protein, 23 aa, Artificial Sequence
  Cyclic GFR-binding peptide
MDSMEGIVVNNAADMIQITINSL

SEQ ID NO: 98841 - protein, 44 aa, Artificial Sequence; identical to SEQ ID NO: 22123
  Cyclic GFR-binding peptide
  MOD_RES (2)..(4)..(38): Xaa is C or S

SEQ ID NO: 98842 - protein, 29 aa, Artificial Sequence
  Cyclic GFR-binding peptide
  MOD_RES (28)..(28): Xaa is C or S
SMEGLHQGQHPKIRMIQMTINSEETPVXE

SEQ ID NO: 98843 - protein, 23 aa, Artificial Sequence
  Cyclic GFR-binding peptide
VIMSMEGLLLVRGNDMIQMTINS

SEQ ID NO: 98844 - protein, 23 aa, Artificial Sequence
  Cyclic GFR-binding peptide
MSMEGILLVRGNDMIQMTINSTK

SEQ ID NO: 98845 - protein, 35 aa, Artificial Sequence; identical to SEQ ID NO: 22125
  Cyclic GFR-binding peptide
  MOD_RES (31)..(31): Xaa is C or S

SEQ ID NO: 98846 - protein, 34 aa, Artificial Sequence; identical to SEQ ID NO: 22126
  Cyclic GFR-binding peptide
  MOD_RES (31)..(31): Xaa is C or S

SEQ ID NO: 98847 - protein, 30 aa, Artificial Sequence
  Cyclic GFR-binding peptide
  MOD_RES (30)..(30): Xaa is C or S
VVMGSMEGLIIQQKDNMIQMTINSMKTPTX

SEQ ID NO: 98848 - protein, 35 aa, Artificial Sequence; identical to SEQ ID NO: 22127
  Cyclic GFR-binding peptide
  MOD_RES (29)..(29): Xaa is C or S

SEQ ID NO: 98849 - protein, 31 aa, Artificial Sequence
  Cyclic GFR-binding peptide
  MOD_RES (30)..(31): Xaa is C or S
VVMDSMEGLVVNNAADMIQITINSLRAPVXX

SEQ ID NO: 98850 - protein, 31 aa, Artificial Sequence; identical to SEQ ID NO: 22130
  Cyclic GFR-binding peptide

SEQ ID NO: 98851 - protein, 38 aa, Artificial Sequence; identical to SEQ ID NO: 22132
  Cyclic GFR-binding peptide
  MOD_RES (1)..(3)..(37): Xaa is C or S

SEQ ID NO: 98852 - protein, 33 aa, Artificial Sequence
  Cyclic GFR-binding peptide
  MOD_RES (31)..(32): Xaa is C or S
SKVIMSMEGLIKPTKGIMIQITINSLDQSVXXP

SEQ ID NO: 98853 - protein, 29 aa, Artificial Sequence
  Cyclic GFR-binding peptide
  MOD_RES (1)..(3): Xaa is C or S
XKXSRVIMSMEGIVKPKRGVMIQITINSL

SEQ ID NO: 98854 - protein, 27 aa, Artificial Sequence
  Cyclic GFR-binding peptide
  MOD_RES (27)..(27): Xaa is C or S
DSMEGLVVNNASDMIQITINSLRTPVX

SEQ ID NO: 98855 - protein, 30 aa, Artificial Sequence
  Cyclic GFR-binding peptide
  MOD_RES (2)..(2): Xaa is C or S
KXSRVIMSMEGLVKPKRGVMIQITINSLAQ

SEQ ID NO: 98856 - protein, 33 aa, Artificial Sequence
  Cyclic GFR-binding peptide
  MOD_RES (2)..(4): Xaa is C or S
RXGXAEVVMDSMEGIVVNNAADMIQITINSLRA

SEQ ID NO: 98857 - protein, 22 aa, Artificial Sequence
  Cyclic GFR-binding peptide
IMSMEGLIKPTKGIMIQITINS

SEQ ID NO: 98858 - protein, 26 aa, Artificial Sequence
  Cyclic GFR-binding peptide
KVIMSMEGIIKPTKGIMIQITINSLD

SEQ ID NO: 98859 - protein, 28 aa, Artificial Sequence
  Cyclic GFR-binding peptide
VIMSMEGLLLVRGNDMIQMTINSTKVPA

SEQ ID NO: 98860 - protein, 31 aa, Artificial Sequence; identical to SEQ ID NO: 62502
  Cyclic GFR-binding peptide
  MOD_RES (28)..(29): Xaa is C or S

SEQ ID NO: 98861 - protein, 32 aa, Artificial Sequence; identical to SEQ ID NO: 22137
  Cyclic GFR-binding peptide

SEQ ID NO: 98862 - protein, 37 aa, Artificial Sequence
  Cyclic GFR-binding peptide
  MOD_RES (2)..(33)..(34): Xaa is C or S
GXEEVIMSMEGLLLVRGNDMIQMTINSTKVPAXXTSP

SEQ ID NO: 98863 - protein, 32 aa, Artificial Sequence; identical to SEQ ID NO: 22142
  Cyclic GFR-binding peptide

SEQ ID NO: 98864 - protein, 35 aa, Artificial Sequence; identical to SEQ ID NO: 22143
  Cyclic GFR-binding peptide

SEQ ID NO: 98865 - protein, 21 aa, Artificial Sequence
  Cyclic GFR-binding peptide
SMEGLVKPKRGVMIQITINSL

SEQ ID NO: 98866 - protein, 25 aa, Artificial Sequence
  Cyclic GFR-binding peptide
VVMDSMEGIVVNNAADMIQITINSL

SEQ ID NO: 98867 - protein, 28 aa, Artificial Sequence
  Cyclic GFR-binding peptide
EELRSMEGILKPKKRVYEMIQVTINSHH

SEQ ID NO: 98868 - protein, 27 aa, Artificial Sequence
  Cyclic GFR-binding peptide
IMSMEGIVKPKRGVMIQITINSLAQPV

SEQ ID NO: 98869 - protein, 41 aa, Artificial Sequence
  Cyclic GFR-binding peptide
  MOD_RES (2)..(4)..(36)..(37): Xaa is C or S
RXGXAEVVMDSMEGLVVNNAADMIQITINSLRAPVXXSAPA

SEQ ID NO: 98870 - protein, 40 aa, Artificial Sequence; identical to SEQ ID NO: 22148
  Cyclic GFR-binding peptide
  MOD_RES (2)..(39): Xaa is C or S

SEQ ID NO: 98871 - protein, 26 aa, Artificial Sequence
  Cyclic GFR-binding peptide
SRVIMSMEGIVKPKRGVMIQITINSL

SEQ ID NO: 98872 - protein, 35 aa, Artificial Sequence
  Cyclic GFR-binding peptide
  MOD_RES (32)..(33): Xaa is C or S
AEVVMDSMEGLVVNNAADMIQITINSLRAPVXXSA

SEQ ID NO: 98873 - protein, 27 aa, Artificial Sequence
  Cyclic GFR-binding peptide
EELRSMEGILKPKKRVYEMIQVTINSH

SEQ ID NO: 98874 - protein, 25 aa, Artificial Sequence
  Cyclic GFR-binding peptide
EEVIMSMEGILLVRGNDMIQMTINS

SEQ ID NO: 98875 - protein, 29 aa, Artificial Sequence
  Cyclic GFR-binding peptide
  MOD_RES (26)..(27): Xaa is C or S
SMEGIIIQQKDNMIQMTINSMKTPTXXPG

SEQ ID NO: 98876 - protein, 37 aa, Artificial Sequence; identical to SEQ ID NO: 22153
  Cyclic GFR-binding peptide
  MOD_RES (2)..(4): Xaa is C or S

SEQ ID NO: 98877 - protein, 26 aa, Artificial Sequence
  Cyclic GFR-binding peptide
SKVVMSMEGLVKPTRGVMIQITINSL

SEQ ID NO: 98878 - protein, 24 aa, Artificial Sequence
  Cyclic GFR-binding peptide
VIMSMEGLIKPTKGIMIQITINSL

SEQ ID NO: 98879 - protein, 24 aa, Artificial Sequence
  Cyclic GFR-binding peptide
GSMEGIIIQQKDNMIQMTINSMKT

SEQ ID NO: 98880 - protein, 24 aa, Artificial Sequence
  Cyclic GFR-binding peptide
MSMEGLIKPTKGIMIQITINSLDQ

SEQ ID NO: 98881 - protein, 31 aa, Artificial Sequence
  Cyclic GFR-binding peptide
  MOD_RES (2)..(4): Xaa is C or S
SXGXRDVVMGSMEGIIIQQKDNMIQMTINSM

SEQ ID NO: 98882 - protein, 33 aa, Artificial Sequence
  Cyclic GFR-binding peptide
  MOD_RES (29)..(30): Xaa is C or S
VMDSMEGLVVNNAADMIQITINSLRAPVXXSAP

SEQ ID NO: 98883 - protein, 27 aa, Artificial Sequence
  Cyclic GFR-binding peptide
VVMDSMEGIVVNNASDMIQITINSLRT

SEQ ID NO: 98884 - protein, 33 aa, Artificial Sequence; identical to SEQ ID NO: 62526
  Cyclic GFR-binding peptide
  MOD_RES (1)..(3): Xaa is C or S

SEQ ID NO: 98885 - protein, 30 aa, Artificial Sequence; identical to SEQ ID NO: 65896
  Cyclic GFR-binding peptide
  MOD_RES (2)..(2): Xaa is C or S

SEQ ID NO: 98886 - protein, 26 aa, Artificial Sequence
  Cyclic GFR-binding peptide
MNSMEGIIVNSSDDMIQVTINSLKTP

SEQ ID NO: 98887 - protein, 36 aa, Artificial Sequence
  Cyclic GFR-binding peptide
  MOD_RES (30)..(31): Xaa is C or S
VVMGSMEGIIIQQKDNMIQMTINSMKTPTXXPGASG

SEQ ID NO: 98888 - protein, 32 aa, Artificial Sequence
  Cyclic GFR-binding peptide
  MOD_RES (28)..(29): Xaa is C or S
IMSMEGLIKPTKGIMIQITINSLDQSVXXPSA

SEQ ID NO: 98889 - protein, 33 aa, Artificial Sequence; identical to SEQ ID NO: 22158
  Cyclic GFR-binding peptide
  MOD_RES (1)..(1): Xaa is C or S

SEQ ID NO: 98890 - protein, 28 aa, Artificial Sequence
  Cyclic GFR-binding peptide
  MOD_RES (27)..(28): Xaa is C or S
DSMEGLVVNNASDMIQITINSLRTPVXX

SEQ ID NO: 98891 - protein, 35 aa, Artificial Sequence; identical to SEQ ID NO: 65901
  Cyclic GFR-binding peptide
  MOD_RES (1)..(3)..(35): Xaa is C or S

SEQ ID NO: 98892 - protein, 31 aa, Artificial Sequence
  Cyclic GFR-binding peptide
  MOD_RES (1)..(3): Xaa is C or S
XGXRDVVMGSMEGLIIQQKDNMIQMTINSMK

SEQ ID NO: 98893 - protein, 31 aa, Artificial Sequence; identical to SEQ ID NO: 22161
  Cyclic GFR-binding peptide

SEQ ID NO: 98894 - protein, 32 aa, Artificial Sequence
  Cyclic GFR-binding peptide
  MOD_RES (28)..(29): Xaa is C or S
IMSMEGLLLVRGNDMIQMTINSTKVPAXXTSP

SEQ ID NO: 98895 - protein, 35 aa, Artificial Sequence
  Cyclic GFR-binding peptide
  MOD_RES (32)..(33): Xaa is C or S
SRVVMNSMEGLIVNSSDDMIQVTINSLKTPAXXPK

SEQ ID NO: 98896 - protein, 31 aa, Artificial Sequence
  Cyclic GFR-binding peptide
  MOD_RES (2)..(2): Xaa is C or S
GXSEVVMDSMEGLVVNNASDMIQITINSLRT

SEQ ID NO: 98897 - protein, 34 aa, Artificial Sequence; identical to SEQ ID NO: 22169
  Cyclic GFR-binding peptide
  MOD_RES (28)..(28): Xaa is C or S

SEQ ID NO: 98898 - protein, 27 aa, Artificial Sequence
  Cyclic GFR-binding peptide
KVVMSMEGIVKPTRGVMIQITINSLDQ

SEQ ID NO: 98899 - protein, 39 aa, Artificial Sequence; identical to SEQ ID NO: 22177
  Cyclic GFR-binding peptide
  MOD_RES (2)..(4): Xaa is C or S

SEQ ID NO: 98900 - protein, 33 aa, Artificial Sequence; identical to SEQ ID NO: 22178
  Cyclic GFR-binding peptide
  MOD_RES (2)..(4): Xaa is C or S

SEQ ID NO: 98901 - protein, 27 aa, Artificial Sequence
  Cyclic GFR-binding peptide
VMNSMEGIIVNSSDDMIQVTINSLKTP

SEQ ID NO: 98902 - protein, 22 aa, Artificial Sequence
  Cyclic GFR-binding peptide
IMSMEGLLLVRGNDMIQMTINS

SEQ ID NO: 98903 - protein, 23 aa, Artificial Sequence
  Cyclic GFR-binding peptide
VMDSMEGIVVNNASDMIQITINS

SEQ ID NO: 98904 - protein, 35 aa, Artificial Sequence
  Cyclic GFR-binding peptide
  MOD_RES (2)..(33)..(34): Xaa is C or S
KXSKVIMSMEGLIKPTKGIMIQITINSLDQSVXXP

SEQ ID NO: 98905 - protein, 29 aa, Artificial Sequence
  Cyclic GFR-binding peptide
  MOD_RES (29)..(29): Xaa is C or S
VMNSMEGLIVNSSDDMIQVTINSLKTPAX

SEQ ID NO: 98906 - protein, 31 aa, Artificial Sequence
  Cyclic GFR-binding peptide
AEVVMDSMEGIVVNNAADMIQITINSLRAPV

SEQ ID NO: 98907 - protein, 30 aa, Artificial Sequence; identical to SEQ ID NO: 22183
  Cyclic GFR-binding peptide

SEQ ID NO: 98908 - protein, 36 aa, Artificial Sequence
  Cyclic GFR-binding peptide
  MOD_RES (2)..(34)..(35): Xaa is C or S
GXSRVVMNSMEGLIVNSSDDMIQVTINSLKTPAXXP

SEQ ID NO: 98909 - protein, 32 aa, Artificial Sequence; identical to SEQ ID NO: 22186
  Cyclic GFR-binding peptide
  MOD_RES (1)..(3): Xaa is C or S

SEQ ID NO: 98910 - protein, 29 aa, Artificial Sequence
  Cyclic GFR-binding peptide
  MOD_RES (28)..(29): Xaa is C or S
MNSMEGIIVNSSDDMIQVTINSLKTPAXX

SEQ ID NO: 98911 - protein, 30 aa, Artificial Sequence; identical to SEQ ID NO: 62560
  Cyclic GFR-binding peptide
  MOD_RES (2)..(4): Xaa is C or S

SEQ ID NO: 98912 - protein, 41 aa, Artificial Sequence; identical to SEQ ID NO: 62561
  Cyclic GFR-binding peptide
  MOD_RES (2)..(4)..(35)..(36): Xaa is C or S

SEQ ID NO: 98913 - protein, 36 aa, Artificial Sequence; identical to SEQ ID NO: 22189
  Cyclic GFR-binding peptide
  MOD_RES (36)..(36): Xaa is C or S

SEQ ID NO: 98914 - protein, 33 aa, Artificial Sequence
  Cyclic GFR-binding peptide
  MOD_RES (31)..(32): Xaa is C or S
SKVVMSMEGLVKPTRGVMIQITINSLDQPVXXP

SEQ ID NO: 98915 - protein, 38 aa, Artificial Sequence; identical to SEQ ID NO: 22192
  Cyclic GFR-binding peptide
  MOD_RES (2)..(4): Xaa is C or S

SEQ ID NO: 98916 - protein, 32 aa, Artificial Sequence; identical to SEQ ID NO: 65939
  Cyclic GFR-binding peptide
  MOD_RES (1)..(32): Xaa is C or S

SEQ ID NO: 98917 - protein, 27 aa, Artificial Sequence
  Cyclic GFR-binding peptide
  MOD_RES (2)..(2): Xaa is C or S
KXSKVIMSMEGIIKPTKGIMIQITINS

SEQ ID NO: 98918 - protein, 30 aa, Artificial Sequence; identical to SEQ ID NO: 22193
  Cyclic GFR-binding peptide
  MOD_RES (1)..(1): Xaa is C or S

SEQ ID NO: 98919 - protein, 37 aa, Artificial Sequence
  Cyclic GFR-binding peptide
  MOD_RES (1)..(33)..(34): Xaa is C or S
XSRVVMNSMEGLIVNSSDDMIQVTINSLKTPAXXPKP

SEQ ID NO: 98920 - protein, 24 aa, Artificial Sequence
  Cyclic GFR-binding peptide
MSMEGIIKPTKGIMIQITINSLDQ

SEQ ID NO: 98921 - protein, 33 aa, Artificial Sequence
  Cyclic GFR-binding peptide
  MOD_RES (27)..(28): Xaa is C or S
MSMEGLVKPTRGVMIQITINSLDQPVXXPSASA

SEQ ID NO: 98922 - protein, 26 aa, Artificial Sequence
  Cyclic GFR-binding peptide
FSMEGLHQGQHPKIRMIQMTINSEET

SEQ ID NO: 98923 - protein, 33 aa, Artificial Sequence; identical to SEQ ID NO: 22196
  Cyclic GFR-binding peptide

SEQ ID NO: 98924 - protein, 40 aa, Artificial Sequence
  Cyclic GFR-binding peptide
  MOD_RES (2)..(4)..(36)..(37): Xaa is C or S
SXGXRDVVMGSMEGIIIQQKDNMIQMTINSMKTPTXXPGA

SEQ ID NO: 98925 - protein, 28 aa, Artificial Sequence
  Cyclic GFR-binding peptide
  MOD_RES (27)..(28): Xaa is C or S
MSMEGLVKPTRGVMIQITINSLDQPVXX

SEQ ID NO: 98926 - protein, 31 aa, Artificial Sequence; identical to SEQ ID NO: 22197
  Cyclic GFR-binding peptide

SEQ ID NO: 98927 - protein, 20 aa, Artificial Sequence
  Cyclic GFR-binding peptide
SMEGLVKPKRGVMIQITINS

SEQ ID NO: 98928 - protein, 31 aa, Artificial Sequence; identical to SEQ ID NO: 22199
  Cyclic GFR-binding peptide

SEQ ID NO: 98929 - protein, 29 aa, Artificial Sequence
  Cyclic GFR-binding peptide
  MOD_RES (29)..(29): Xaa is C or S
VIMSMEGILLVRGNDMIQMTINSTKVPAX

SEQ ID NO: 98930 - protein, 40 aa, Artificial Sequence; identical to SEQ ID NO: 62589
  Cyclic GFR-binding peptide
  MOD_RES (2)..(4)..(35)..(36): Xaa is C or S

SEQ ID NO: 98931 - protein, 33 aa, Artificial Sequence
  Cyclic GFR-binding peptide
  MOD_RES (31)..(32): Xaa is C or S
EVVMDSMEGIVVNNASDMIQITINSLRTPVXXT

SEQ ID NO: 98932 - protein, 32 aa, Artificial Sequence; identical to SEQ ID NO: 22208
  Cyclic GFR-binding peptide
  MOD_RES (30)..(30): Xaa is C or S

SEQ ID NO: 98933 - protein, 26 aa, Artificial Sequence
  Cyclic GFR-binding peptide
IMSMEGIVKPKRGVMIQITINSLAQP

SEQ ID NO: 98934 - protein, 34 aa, Artificial Sequence
  Cyclic GFR-binding peptide
  MOD_RES (30)..(31): Xaa is C or S
EVIMSMEGILLVRGNDMIQMTINSTKVPAXXTSP

SEQ ID NO: 98935 - protein, 22 aa, Artificial Sequence
  Cyclic GFR-binding peptide
SMEGLIIQQKDNMIQMTINSMK

SEQ ID NO: 98936 - protein, 29 aa, Artificial Sequence
  Cyclic GFR-binding peptide
QSHEELSMEGIHQGQHPKIRMIQMTINSQ

SEQ ID NO: 98937 - protein, 23 aa, Artificial Sequence
  Cyclic GFR-binding peptide
VMDSMEGLVVNNAADMIQITINS

SEQ ID NO: 98938 - protein, 32 aa, Artificial Sequence; identical to SEQ ID NO: 65965
  Cyclic GFR-binding peptide
  MOD_RES (31)..(32): Xaa is C or S

SEQ ID NO: 98939 - protein, 38 aa, Artificial Sequence
  Cyclic GFR-binding peptide
  MOD_RES (1)..(33)..(34): Xaa is C or S
XSRVVMNSMEGLIVNSSDDMIQVTINSLKTPAXXPKPV

SEQ ID NO: 98940 - protein, 32 aa, Artificial Sequence
  Cyclic GFR-binding peptide
  MOD_RES (31)..(32): Xaa is C or S
SKVIMSMEGLIKPTKGIMIQITINSLDQSVXX

SEQ ID NO: 98941 - protein, 38 aa, Artificial Sequence
  Cyclic GFR-binding peptide
  MOD_RES (2)..(4)..(36)..(37): Xaa is C or S
SXGXRDVVMGSMEGLIIQQKDNMIQMTINSMKTPTXXP

SEQ ID NO: 98942 - protein, 30 aa, Artificial Sequence
  Cyclic GFR-binding peptide
  MOD_RES (1)..(3): Xaa is C or S
XKXSKVIMSMEGLIKPTKGIMIQITINSLD

SEQ ID NO: 98943 - protein, 25 aa, Artificial Sequence
  Cyclic GFR-binding peptide
QLFSMEGLHQGQHPKIRMIQMTINS

SEQ ID NO: 98944 - protein, 22 aa, Artificial Sequence
  Cyclic GFR-binding peptide
IMSMEGILLVRGNDMIQMTINS

SEQ ID NO: 98945 - protein, 24 aa, Artificial Sequence
  Cyclic GFR-binding peptide
ELSMEGIHQGQHPKIRMIQMTINS

SEQ ID NO: 98946 - protein, 35 aa, Artificial Sequence
  Cyclic GFR-binding peptide
  MOD_RES (1)..(3)..(35): Xaa is C or S
XGXSEVVMDSMEGIVVNNASDMIQITINSLRTPVX

SEQ ID NO: 98947 - protein, 32 aa, Artificial Sequence; identical to SEQ ID NO: 22229
  Cyclic GFR-binding peptide
  MOD_RES (1)..(1): Xaa is C or S

SEQ ID NO: 98948 - protein, 25 aa, Artificial Sequence
  Cyclic GFR-binding peptide
VMDSMEGIVVNNAADMIQITINSLR

SEQ ID NO: 98949 - protein, 32 aa, Artificial Sequence; identical to SEQ ID NO: 62609
  Cyclic GFR-binding peptide
  MOD_RES (31)..(32): Xaa is C or S

SEQ ID NO: 98950 - protein, 34 aa, Artificial Sequence
  Cyclic GFR-binding peptide
  MOD_RES (2)..(34): Xaa is C or S
GXAEVVMDSMEGIVVNNAADMIQITINSLRAPVX

SEQ ID NO: 98951 - protein, 36 aa, Artificial Sequence; identical to SEQ ID NO: 22234
  Cyclic GFR-binding peptide
  MOD_RES (33)..(33): Xaa is C or S

SEQ ID NO: 98952 - protein, 30 aa, Artificial Sequence
  Cyclic GFR-binding peptide
  MOD_RES (2)..(4): Xaa is C or S
RXGXAEVVMDSMEGIVVNNAADMIQITINS

SEQ ID NO: 98953 - protein, 34 aa, Artificial Sequence
  Cyclic GFR-binding peptide
  MOD_RES (1)..(3): Xaa is C or S
XGXAEVVMDSMEGIVVNNAADMIQITINSLRAPV

SEQ ID NO: 98954 - protein, 33 aa, Artificial Sequence
  Cyclic GFR-binding peptide
  MOD_RES (27)..(28): Xaa is C or S
MSMEGILLVRGNDMIQMTINSTKVPAXXTSPVR

SEQ ID NO: 98955 - protein, 28 aa, Artificial Sequence
  Cyclic GFR-binding peptide
  MOD_RES (27)..(28): Xaa is C or S
GSMEGIIIQQKDNMIQMTINSMKTPTXX

SEQ ID NO: 98956 - protein, 24 aa, Artificial Sequence
  Cyclic GFR-binding peptide
SMEGLVVNNAADMIQITINSLRAP

SEQ ID NO: 98957 - protein, 38 aa, Artificial Sequence
  Cyclic GFR-binding peptide
  MOD_RES (1)..(3)..(34)..(35): Xaa is C or S
XKXSRVIMSMEGLVKPKRGVMIQITINSLAQPVXXPAA

SEQ ID NO: 98958 - protein, 39 aa, Artificial Sequence; identical to SEQ ID NO: 22241
  Cyclic GFR-binding peptide
  MOD_RES (37)..(37): Xaa is C or S

SEQ ID NO: 98959 - protein, 24 aa, Artificial Sequence
  Cyclic GFR-binding peptide
RVIMSMEGLVKPKRGVMIQITINS

SEQ ID NO: 98960 - protein, 29 aa, Artificial Sequence
  Cyclic GFR-binding peptide
RVIMSMEGLVKPKRGVMIQITINSLAQPV

SEQ ID NO: 98961 - protein, 30 aa, Artificial Sequence
  Cyclic GFR-binding peptide
  MOD_RES (26)..(27): Xaa is C or S
SMEGIVVNNASDMIQITINSLRTPVXXTPP

SEQ ID NO: 98962 - protein, 40 aa, Artificial Sequence
  Cyclic GFR-binding peptide
  MOD_RES (2)..(4)..(36)..(37): Xaa is C or S
RXGXSEVVMDSMEGLVVNNASDMIQITINSLRTPVXXTPP

SEQ ID NO: 98963 - protein, 31 aa, Artificial Sequence
  Cyclic GFR-binding peptide
  MOD_RES (2)..(4): Xaa is C or S
LXGXEEVIMSMEGILLVRGNDMIQMTINSTK

SEQ ID NO: 98964 - protein, 29 aa, Artificial Sequence
  Cyclic GFR-binding peptide
  MOD_RES (26)..(27): Xaa is C or S
SMEGLIVNSSDDMIQVTINSLKTPAXXPK

SEQ ID NO: 98965 - protein, 32 aa, Artificial Sequence; identical to SEQ ID NO: 62621
  Cyclic GFR-binding peptide
  MOD_RES (1)..(1): Xaa is C or S

SEQ ID NO: 98966 - protein, 24 aa, Artificial Sequence
  Cyclic GFR-binding peptide
GSMEGLIIQQKDNMIQMTINSMKT

SEQ ID NO: 98967 - protein, 30 aa, Artificial Sequence; identical to SEQ ID NO: 22248
  Cyclic GFR-binding peptide

SEQ ID NO: 98968 - protein, 36 aa, Artificial Sequence
  Cyclic GFR-binding peptide
  MOD_RES (1)..(3)..(34)..(35): Xaa is C or S
XKXSKVVMSMEGLVKPTRGVMIQITINSLDQPVXXP

SEQ ID NO: 98969 - protein, 31 aa, Artificial Sequence; identical to SEQ ID NO: 62628
  Cyclic GFR-binding peptide
  MOD_RES (27)..(28): Xaa is C or S

SEQ ID NO: 98970 - protein, 36 aa, Artificial Sequence
  Cyclic GFR-binding peptide
  MOD_RES (1)..(33)..(34): Xaa is C or S
XSRVVMNSMEGLIVNSSDDMIQVTINSLKTPAXXPK

SEQ ID NO: 98971 - protein, 32 aa, Artificial Sequence
  Cyclic GFR-binding peptide
  MOD_RES (1)..(32): Xaa is C or S
XEEVIMSMEGLLLVRGNDMIQMTINSTKVPAX

SEQ ID NO: 98972 - protein, 30 aa, Artificial Sequence; identical to SEQ ID NO: 62632
  Cyclic GFR-binding peptide
  MOD_RES (27)..(28): Xaa is C or S

SEQ ID NO: 98973 - protein, 31 aa, Artificial Sequence
  Cyclic GFR-binding peptide
  MOD_RES (29)..(30): Xaa is C or S
VIMSMEGLVKPKRGVMIQITINSLAQPVXXP

SEQ ID NO: 98974 - protein, 33 aa, Artificial Sequence
  Cyclic GFR-binding peptide
  MOD_RES (1)..(32)..(33): Xaa is C or S
XSKVVMSMEGLVKPTRGVMIQITINSLDQPVXX

SEQ ID NO: 98975 - protein, 28 aa, Artificial Sequence
  Cyclic GFR-binding peptide
  MOD_RES (26)..(27): Xaa is C or S
SMEGLVKPTRGVMIQITINSLDQPVXXP

SEQ ID NO: 98976 - protein, 25 aa, Artificial Sequence
  Cyclic GFR-binding peptide
GSMEGIIIQQKDNMIQMTINSMKTP

SEQ ID NO: 98977 - protein, 31 aa, Artificial Sequence
  Cyclic GFR-binding peptide
SEVVMDSMEGIVVNNASDMIQITINSLRTPV

SEQ ID NO: 98978 - protein, 33 aa, Artificial Sequence; identical to SEQ ID NO: 22264
  Cyclic GFR-binding peptide

SEQ ID NO: 98979 - protein, 32 aa, Artificial Sequence; identical to SEQ ID NO: 22265
  Cyclic GFR-binding peptide

SEQ ID NO: 98980 - protein, 34 aa, Artificial Sequence; identical to SEQ ID NO: 22267
  Cyclic GFR-binding peptide
  MOD_RES (2)..(2): Xaa is C or S

SEQ ID NO: 98981 - protein, 39 aa, Artificial Sequence
  Cyclic GFR-binding peptide
  MOD_RES (1)..(33)..(34): Xaa is C or S
XRDVVMGSMEGIIIQQKDNMIQMTINSMKTPTXXPGASG

SEQ ID NO: 98982 - protein, 26 aa, Artificial Sequence
  Cyclic GFR-binding peptide
IMSMEGLVKPKRGVMIQITINSLAQP

SEQ ID NO: 98983 - protein, 26 aa, Artificial Sequence
  Cyclic GFR-binding peptide
RVVMNSMEGIIVNSSDDMIQVTINSL

SEQ ID NO: 98984 - protein, 25 aa, Artificial Sequence
  Cyclic GFR-binding peptide
EVVMDSMEGIVVNNAADMIQITINS

SEQ ID NO: 98985 - protein, 36 aa, Artificial Sequence; identical to SEQ ID NO: 22278
  Cyclic GFR-binding peptide
  MOD_RES (2)..(4): Xaa is C or S

SEQ ID NO: 98986 - protein, 31 aa, Artificial Sequence
  Cyclic GFR-binding peptide
  MOD_RES (2)..(4): Xaa is C or S
SXKXSRVIMSMEGLVKPKRGVMIQITINSLA

SEQ ID NO: 98987 - protein, 24 aa, Artificial Sequence
  Cyclic GFR-binding peptide
VIMSMEGIVKPKRGVMIQITINSL

SEQ ID NO: 98988 - protein, 30 aa, Artificial Sequence
  Cyclic GFR-binding peptide
  MOD_RES (30)..(30): Xaa is C or S
EVIMSMEGLLLVRGNDMIQMTINSTKVPAX

SEQ ID NO: 98989 - protein, 30 aa, Artificial Sequence
  Cyclic GFR-binding peptide
  MOD_RES (29)..(30): Xaa is C or S
VMDSMEGLVVNNAADMIQITINSLRAPVXX

SEQ ID NO: 98990 - protein, 30 aa, Artificial Sequence
  Cyclic GFR-binding peptide
  MOD_RES (1)..(3): Xaa is C or S
XGXRDVVMGSMEGIIIQQKDNMIQMTINSM

SEQ ID NO: 98991 - protein, 37 aa, Artificial Sequence
  Cyclic GFR-binding peptide
  MOD_RES (31)..(32): Xaa is C or S
SKVIMSMEGLIKPTKGIMIQITINSLDQSVXXPSASA

SEQ ID NO: 98992 - protein, 26 aa, Artificial Sequence
  Cyclic GFR-binding peptide
MSMEGIIKPTKGIMIQITINSLDQSV

SEQ ID NO: 98993 - protein, 32 aa, Artificial Sequence
  Cyclic GFR-binding peptide
  MOD_RES (2)..(4): Xaa is C or S
RXGXSEVVMDSMEGLVVNNASDMIQITINSLR

SEQ ID NO: 98994 - protein, 35 aa, Artificial Sequence; identical to SEQ ID NO: 22282
  Cyclic GFR-binding peptide
  MOD_RES (2)..(4): Xaa is C or S

SEQ ID NO: 98995 - protein, 37 aa, Artificial Sequence
  Cyclic GFR-binding peptide
  MOD_RES (2)..(4)..(36)..(37): Xaa is C or S
RXGXSEVVMDSMEGIVVNNASDMIQITINSLRTPVXX

SEQ ID NO: 98996 - protein, 34 aa, Artificial Sequence; identical to SEQ ID NO: 66026
  Cyclic GFR-binding peptide
  MOD_RES (2)..(34): Xaa is C or S

SEQ ID NO: 98997 - protein, 43 aa, Artificial Sequence; identical to SEQ ID NO: 22285
  Cyclic GFR-binding peptide
  MOD_RES (2)..(4)..(41): Xaa is C or S

SEQ ID NO: 98998 - protein, 36 aa, Artificial Sequence
  Cyclic GFR-binding peptide
  MOD_RES (2)..(34)..(35): Xaa is C or S
GXAEVVMDSMEGIVVNNAADMIQITINSLRAPVXXS

SEQ ID NO: 98999 - protein, 34 aa, Artificial Sequence; identical to SEQ ID NO: 22287
  Cyclic GFR-binding peptide

SEQ ID NO: 99000 - protein, 31 aa, Artificial Sequence; identical to SEQ ID NO: 22288
  Cyclic GFR-binding peptide

SEQ ID NO: 99001 - protein, 25 aa, Artificial Sequence
  Cyclic GFR-binding peptide
LTSMEGIFIPKKRVIEMIQVTINSL

SEQ ID NO: 99002 - protein, 31 aa, Artificial Sequence; identical to SEQ ID NO: 66029
  Cyclic GFR-binding peptide
  MOD_RES (1)..(1): Xaa is C or S

SEQ ID NO: 99003 - protein, 29 aa, Artificial Sequence
  Cyclic GFR-binding peptide
  MOD_RES (2)..(2): Xaa is C or S
GXRDVVMGSMEGLIIQQKDNMIQMTINSM

SEQ ID NO: 99004 - protein, 33 aa, Artificial Sequence; identical to SEQ ID NO: 22294
  Cyclic GFR-binding peptide
  MOD_RES (2)..(4): Xaa is C or S

SEQ ID NO: 99005 - protein, 21 aa, Artificial Sequence
  Cyclic GFR-binding peptide
SMEGIIVNSSDDMIQVTINSL

SEQ ID NO: 99006 - protein, 33 aa, Artificial Sequence
  Cyclic GFR-binding peptide
  MOD_RES (29)..(30): Xaa is C or S
VVMSMEGLVKPTRGVMIQITINSLDQPVXXPSA

SEQ ID NO: 99007 - protein, 35 aa, Artificial Sequence; identical to SEQ ID NO: 22301
  Cyclic GFR-binding peptide
  MOD_RES (35)..(35): Xaa is C or S

SEQ ID NO: 99008 - protein, 34 aa, Artificial Sequence; identical to SEQ ID NO: 22302
  Cyclic GFR-binding peptide
  MOD_RES (2)..(4): Xaa is C or S

SEQ ID NO: 99009 - protein, 36 aa, Artificial Sequence; identical to SEQ ID NO: 22304
  Cyclic GFR-binding peptide
  MOD_RES (34)..(34): Xaa is C or S

SEQ ID NO: 99010 - protein, 23 aa, Artificial Sequence
  Cyclic GFR-binding peptide
MSMEGIIKPTKGIMIQITINSLD

SEQ ID NO: 99011 - protein, 37 aa, Artificial Sequence; identical to SEQ ID NO: 62696
  Cyclic GFR-binding peptide
  MOD_RES (1)..(33)..(34): Xaa is C or S

SEQ ID NO: 99012 - protein, 35 aa, Artificial Sequence
  Cyclic GFR-binding peptide
  MOD_RES (31)..(32): Xaa is C or S
EEVIMSMEGILLVRGNDMIQMTINSTKVPAXXTSP

SEQ ID NO: 99013 - protein, 34 aa, Artificial Sequence; identical to SEQ ID NO: 22316
  Cyclic GFR-binding peptide
  MOD_RES (31)..(31): Xaa is C or S

SEQ ID NO: 99014 - protein, 23 aa, Artificial Sequence
  Cyclic GFR-binding peptide
SMEGILLVRGNDMIQMTINSTKV

SEQ ID NO: 99015 - protein, 24 aa, Artificial Sequence
  Cyclic GFR-binding peptide
SMEGIVKPKRGVMIQITINSLAQP

SEQ ID NO: 99016 - protein, 39 aa, Artificial Sequence; identical to SEQ ID NO: 22321
  Cyclic GFR-binding peptide
  MOD_RES (2)..(39): Xaa is C or S

SEQ ID NO: 99017 - protein, 32 aa, Artificial Sequence; identical to SEQ ID NO: 66049
  Cyclic GFR-binding peptide
  MOD_RES (28)..(29): Xaa is C or S

SEQ ID NO: 99018 - protein, 34 aa, Artificial Sequence
  Cyclic GFR-binding peptide
  MOD_RES (30)..(31): Xaa is C or S
VVMGSMEGIIIQQKDNMIQMTINSMKTPTXXPGA

SEQ ID NO: 99019 - protein, 33 aa, Artificial Sequence; identical to SEQ ID NO: 22323
  Cyclic GFR-binding peptide

SEQ ID NO: 99020 - protein, 31 aa, Artificial Sequence; identical to SEQ ID NO: 22324
  Cyclic GFR-binding peptide
  MOD_RES (1)..(1): Xaa is C or S

SEQ ID NO: 99021 - protein, 27 aa, Artificial Sequence
  Cyclic GFR-binding peptide
DVVMGSMEGLIIQQKDNMIQMTINSMK

SEQ ID NO: 99022 - protein, 26 aa, Artificial Sequence
  Cyclic GFR-binding peptide
EVVMDSMEGIVVNNASDMIQITINSL

SEQ ID NO: 99023 - protein, 37 aa, Artificial Sequence; identical to SEQ ID NO: 22328
  Cyclic GFR-binding peptide
  MOD_RES (1)..(1): Xaa is C or S

SEQ ID NO: 99024 - protein, 27 aa, Artificial Sequence
  Cyclic GFR-binding peptide
SRVVMNSMEGIIVNSSDDMIQVTINSL

SEQ ID NO: 99025 - protein, 36 aa, Artificial Sequence; identical to SEQ ID NO: 22329
  Cyclic GFR-binding peptide
  MOD_RES (32)..(32): Xaa is C or S

SEQ ID NO: 99026 - protein, 34 aa, Artificial Sequence
  Cyclic GFR-binding peptide
  MOD_RES (2)..(4): Xaa is C or S
RXGXSEVVMDSMEGIVVNNASDMIQITINSLRTP

SEQ ID NO: 99027 - protein, 37 aa, Artificial Sequence
  Cyclic GFR-binding peptide
  MOD_RES (2)..(33)..(34): Xaa is C or S
GXEEVIMSMEGILLVRGNDMIQMTINSTKVPAXXTSP

SEQ ID NO: 99028 - protein, 28 aa, Artificial Sequence
  Cyclic GFR-binding peptide
VVMSMEGIVKPTRGVMIQITINSLDQPV

SEQ ID NO: 99029 - protein, 40 aa, Artificial Sequence
  Cyclic GFR-binding peptide
  MOD_RES (1)..(3)..(35)..(36): Xaa is C or S
XGXRDVVMGSMEGIIIQQKDNMIQMTINSMKTPTXXPGAS

SEQ ID NO: 99030 - protein, 22 aa, Artificial Sequence
  Cyclic GFR-binding peptide
DSMEGLVVNNAADMIQITINSL

SEQ ID NO: 99031 - protein, 41 aa, Artificial Sequence; identical to SEQ ID NO: 22333
  Cyclic GFR-binding peptide
  MOD_RES (1)..(3)..(40): Xaa is C or S

SEQ ID NO: 99032 - protein, 35 aa, Artificial Sequence; identical to SEQ ID NO: 22334
  Cyclic GFR-binding peptide
  MOD_RES (31)..(31): Xaa is C or S

SEQ ID NO: 99033 - protein, 34 aa, Artificial Sequence
  Cyclic GFR-binding peptide
  MOD_RES (31)..(32): Xaa is C or S
RVVMNSMEGLIVNSSDDMIQVTINSLKTPAXXPK

SEQ ID NO: 99034 - protein, 24 aa, Artificial Sequence
  Cyclic GFR-binding peptide
LFSMEGIHQGQHPKIRMIQMTINS

SEQ ID NO: 99035 - protein, 34 aa, Artificial Sequence; identical to SEQ ID NO: 22336
  Cyclic GFR-binding peptide
  MOD_RES (2)..(4): Xaa is C or S

SEQ ID NO: 99036 - protein, 32 aa, Artificial Sequence
  Cyclic GFR-binding peptide
  MOD_RES (28)..(29): Xaa is C or S
VMSMEGLVKPTRGVMIQITINSLDQPVXXPSA

SEQ ID NO: 99037 - protein, 26 aa, Artificial Sequence
  Cyclic GFR-binding peptide
  MOD_RES (1)..(1): Xaa is C or S
XSKVIMSMEGLIKPTKGIMIQITINS

SEQ ID NO: 99038 - protein, 33 aa, Artificial Sequence
  Cyclic GFR-binding peptide
  MOD_RES (27)..(28): Xaa is C or S
DSMEGIVVNNAADMIQITINSLRAPVXXSAPAA

SEQ ID NO: 99039 - protein, 32 aa, Artificial Sequence; identical to SEQ ID NO: 62728
  Cyclic GFR-binding peptide
  MOD_RES (27)..(28): Xaa is C or S

SEQ ID NO: 99040 - protein, 27 aa, Artificial Sequence
  Cyclic GFR-binding peptide
HQLFSMEGLHQGQHPKIRMIQMTINSE

SEQ ID NO: 99041 - protein, 24 aa, Artificial Sequence
  Cyclic GFR-binding peptide
MNSMEGIIVNSSDDMIQVTINSLK

SEQ ID NO: 99042 - protein, 32 aa, Artificial Sequence; identical to SEQ ID NO: 22341
  Cyclic GFR-binding peptide
  MOD_RES (30)..(30): Xaa is C or S

SEQ ID NO: 99043 - protein, 31 aa, Artificial Sequence; identical to SEQ ID NO: 22343
  Cyclic GFR-binding peptide

SEQ ID NO: 99044 - protein, 38 aa, Artificial Sequence; identical to SEQ ID NO: 22344
  Cyclic GFR-binding peptide
  MOD_RES (34)..(34): Xaa is C or S

SEQ ID NO: 99045 - protein, 25 aa, Artificial Sequence
  Cyclic GFR-binding peptide
GSMEGLIIQQKDNMIQMTINSMKTP

SEQ ID NO: 99046 - protein, 28 aa, Artificial Sequence
  Cyclic GFR-binding peptide
  MOD_RES (26)..(27): Xaa is C or S
SMEGIIKPTKGIMIQITINSLDQSVXXP

SEQ ID NO: 99047 - protein, 28 aa, Artificial Sequence
  Cyclic GFR-binding peptide
  MOD_RES (28)..(28): Xaa is C or S
IMSMEGILLVRGNDMIQMTINSTKVPAX

SEQ ID NO: 99048 - protein, 32 aa, Artificial Sequence
  Cyclic GFR-binding peptide
  MOD_RES (29)..(30): Xaa is C or S
VIMSMEGLLLVRGNDMIQMTINSTKVPAXXTS

SEQ ID NO: 99049 - protein, 29 aa, Artificial Sequence
  Cyclic GFR-binding peptide
ELHEELRSMEGLLKPKKRVYEMIQVTINS

SEQ ID NO: 99050 - protein, 28 aa, Artificial Sequence
  Cyclic GFR-binding peptide
  MOD_RES (26)..(27): Xaa is C or S
SMEGIVKPKRGVMIQITINSLAQPVXXP

SEQ ID NO: 99051 - protein, 30 aa, Artificial Sequence; identical to SEQ ID NO: 66078
  Cyclic GFR-binding peptide
  MOD_RES (1)..(1): Xaa is C or S

SEQ ID NO: 99052 - protein, 22 aa, Artificial Sequence
  Cyclic GFR-binding peptide
SMEGLFIPKKRVIEMIQVTINS

SEQ ID NO: 99053 - protein, 24 aa, Artificial Sequence
  Cyclic GFR-binding peptide
VVMGSMEGLIIQQKDNMIQMTINS

SEQ ID NO: 99054 - protein, 32 aa, Artificial Sequence
  Cyclic GFR-binding peptide
  MOD_RES (29)..(30): Xaa is C or S
VMNSMEGLIVNSSDDMIQVTINSLKTPAXXPK

SEQ ID NO: 99055 - protein, 28 aa, Artificial Sequence
  Cyclic GFR-binding peptide
VMDSMEGIVVNNASDMIQITINSLRTPV

SEQ ID NO: 99056 - protein, 31 aa, Artificial Sequence; identical to SEQ ID NO: 22361
  Cyclic GFR-binding peptide

SEQ ID NO: 99057 - protein, 35 aa, Artificial Sequence; identical to SEQ ID NO: 22362
  Cyclic GFR-binding peptide
  MOD_RES (34)..(34): Xaa is C or S

SEQ ID NO: 99058 - protein, 29 aa, Artificial Sequence
  Cyclic GFR-binding peptide
HQLFSMEGIHQGQHPKIRMIQMTINSEET

SEQ ID NO: 99059 - protein, 35 aa, Artificial Sequence; identical to SEQ ID NO: 62748
  Cyclic GFR-binding peptide
  MOD_RES (30)..(31): Xaa is C or S

SEQ ID NO: 99060 - protein, 37 aa, Artificial Sequence
  Cyclic GFR-binding peptide
  MOD_RES (2)..(4)..(35)..(36): Xaa is C or S
SXKXSKVIMSMEGLIKPTKGIMIQITINSLDQSVXXP

SEQ ID NO: 99061 - protein, 31 aa, Artificial Sequence
  Cyclic GFR-binding peptide
  MOD_RES (27)..(28): Xaa is C or S
MSMEGLVKPKRGVMIQITINSLAQPVXXPAA

SEQ ID NO: 99062 - protein, 39 aa, Artificial Sequence
  Cyclic GFR-binding peptide
  MOD_RES (2)..(34)..(35): Xaa is C or S
GXRDVVMGSMEGIIIQQKDNMIQMTINSMKTPTXXPGAS

SEQ ID NO: 99063 - protein, 33 aa, Artificial Sequence
  Cyclic GFR-binding peptide
  MOD_RES (1)..(3): Xaa is C or S
XGXSRVVMNSMEGLIVNSSDDMIQVTINSLKTP

SEQ ID NO: 99064 - protein, 33 aa, Artificial Sequence; identical to SEQ ID NO: 22369
  Cyclic GFR-binding peptide

SEQ ID NO: 99065 - protein, 32 aa, Artificial Sequence
  Cyclic GFR-binding peptide
  MOD_RES (1)..(1): Xaa is C or S
XRDVVMGSMEGLIIQQKDNMIQMTINSMKTPT

SEQ ID NO: 99066 - protein, 31 aa, Artificial Sequence
  Cyclic GFR-binding peptide
  MOD_RES (31)..(31): Xaa is C or S
EVVMDSMEGIVVNNASDMIQITINSLRTPVX

SEQ ID NO: 99067 - protein, 40 aa, Artificial Sequence
  Cyclic GFR-binding peptide
  MOD_RES (1)..(3)..(35)..(36): Xaa is C or S
XGXSEVVMDSMEGLVVNNASDMIQITINSLRTPVXXTPPT

SEQ ID NO: 99068 - protein, 23 aa, Artificial Sequence
  Cyclic GFR-binding peptide
SMEGLIKPTKGIMIQITINSLDQ

SEQ ID NO: 99069 - protein, 38 aa, Artificial Sequence; identical to SEQ ID NO: 62759
  Cyclic GFR-binding peptide
  MOD_RES (2)..(4)..(35)..(36): Xaa is C or S

SEQ ID NO: 99070 - protein, 39 aa, Artificial Sequence
  Cyclic GFR-binding peptide
  MOD_RES (2)..(4)..(36)..(37): Xaa is C or S
SXGXRDVVMGSMEGLIIQQKDNMIQMTINSMKTPTXXPG

SEQ ID NO: 99071 - protein, 30 aa, Artificial Sequence; identical to SEQ ID NO: 22381
  Cyclic GFR-binding peptide
  MOD_RES (30)..(30): Xaa is C or S

SEQ ID NO: 99072 - protein, 34 aa, Artificial Sequence
  Cyclic GFR-binding peptide
  MOD_RES (31)..(32): Xaa is C or S
SKVIMSMEGLIKPTKGIMIQITINSLDQSVXXPS

SEQ ID NO: 99073 - protein, 33 aa, Artificial Sequence; identical to SEQ ID NO: 62763
  Cyclic GFR-binding peptide
  MOD_RES (28)..(29): Xaa is C or S

SEQ ID NO: 99074 - protein, 26 aa, Artificial Sequence
  Cyclic GFR-binding peptide
DSMEGLVVNNAADMIQITINSLRAPV

SEQ ID NO: 99075 - protein, 20 aa, Artificial Sequence
  Cyclic GFR-binding peptide
SMEGLIKPTKGIMIQITINS

SEQ ID NO: 99076 - protein, 24 aa, Artificial Sequence
  Cyclic GFR-binding peptide
VMDSMEGIVVNNAADMIQITINSL

SEQ ID NO: 99077 - protein, 28 aa, Artificial Sequence
  Cyclic GFR-binding peptide
  MOD_RES (27)..(28): Xaa is C or S
NSMEGIIVNSSDDMIQVTINSLKTPAXX

SEQ ID NO: 99078 - protein, 33 aa, Artificial Sequence; identical to SEQ ID NO: 22386
  Cyclic GFR-binding peptide

SEQ ID NO: 99079 - protein, 33 aa, Artificial Sequence
  Cyclic GFR-binding peptide
  MOD_RES (1)..(33): Xaa is C or S
XSRVVMNSMEGLIVNSSDDMIQVTINSLKTPAX

SEQ ID NO: 99080 - protein, 22 aa, Artificial Sequence
  Cyclic GFR-binding peptide
MDSMEGLVVNNAADMIQITINS

SEQ ID NO: 99081 - protein, 36 aa, Artificial Sequence; identical to SEQ ID NO: 22394
  Cyclic GFR-binding peptide
  MOD_RES (1)..(3): Xaa is C or S

SEQ ID NO: 99082 - protein, 22 aa, Artificial Sequence
  Cyclic GFR-binding peptide
SMEGILKPKKRVYEMIQVTINS

SEQ ID NO: 99083 - protein, 30 aa, Artificial Sequence
  Cyclic GFR-binding peptide
  MOD_RES (2)..(4): Xaa is C or S
SXKXSRVIMSMEGLVKPKRGVMIQITINSL

SEQ ID NO: 99084 - protein, 37 aa, Artificial Sequence; identical to SEQ ID NO: 22399
  Cyclic GFR-binding peptide
  MOD_RES (37)..(37): Xaa is C or S

SEQ ID NO: 99085 - protein, 35 aa, Artificial Sequence; identical to SEQ ID NO: 22401
  Cyclic GFR-binding peptide
  MOD_RES (2)..(2): Xaa is C or S

SEQ ID NO: 99086 - protein, 35 aa, Artificial Sequence; identical to SEQ ID NO: 22402
  Cyclic GFR-binding peptide
  MOD_RES (30)..(30): Xaa is C or S

SEQ ID NO: 99087 - protein, 35 aa, Artificial Sequence; identical to SEQ ID NO: 66120
  Cyclic GFR-binding peptide
  MOD_RES (31)..(32): Xaa is C or S

SEQ ID NO: 99088 - protein, 25 aa, Artificial Sequence
  Cyclic GFR-binding peptide
VIMSMEGLVKPKRGVMIQITINSLA

SEQ ID NO: 99089 - protein, 29 aa, Artificial Sequence
  Cyclic GFR-binding peptide
  MOD_RES (29)..(29): Xaa is C or S
VMNSMEGIIVNSSDDMIQVTINSLKTPAX

SEQ ID NO: 99090 - protein, 37 aa, Artificial Sequence
  Cyclic GFR-binding peptide
  MOD_RES (1)..(3)..(34)..(35): Xaa is C or S
XKXSKVVMSMEGLVKPTRGVMIQITINSLDQPVXXPS

SEQ ID NO: 99091 - protein, 34 aa, Artificial Sequence; identical to SEQ ID NO: 66129
  Cyclic GFR-binding peptide
  MOD_RES (30)..(31): Xaa is C or S

SEQ ID NO: 99092 - protein, 38 aa, Artificial Sequence
  Cyclic GFR-binding peptide
  MOD_RES (1)..(3)..(35)..(36): Xaa is C or S
XGXSRVVMNSMEGLIVNSSDDMIQVTINSLKTPAXXPK

SEQ ID NO: 99093 - protein, 22 aa, Artificial Sequence
  Cyclic GFR-binding peptide
MDSMEGLVVNNASDMIQITINS

SEQ ID NO: 99094 - protein, 26 aa, Artificial Sequence
  Cyclic GFR-binding peptide
MSMEGIVKPTRGVMIQITINSLDQPV

SEQ ID NO: 99095 - protein, 30 aa, Artificial Sequence; identical to SEQ ID NO: 22416
  Cyclic GFR-binding peptide
  MOD_RES (30)..(30): Xaa is C or S

SEQ ID NO: 99096 - protein, 27 aa, Artificial Sequence
  Cyclic GFR-binding peptide
  MOD_RES (27)..(27): Xaa is C or S
MSMEGLIKPTKGIMIQITINSLDQSVX

SEQ ID NO: 99097 - protein, 27 aa, Artificial Sequence
  Cyclic GFR-binding peptide
  MOD_RES (2)..(2): Xaa is C or S
KXSKVVMSMEGIVKPTRGVMIQITINS

SEQ ID NO: 99098 - protein, 30 aa, Artificial Sequence
  Cyclic GFR-binding peptide
  MOD_RES (2)..(2): Xaa is C or S
GXEEVIMSMEGILLVRGNDMIQMTINSTKV

SEQ ID NO: 99099 - protein, 34 aa, Artificial Sequence; identical to SEQ ID NO: 22417
  Cyclic GFR-binding peptide
  MOD_RES (28)..(28): Xaa is C or S

SEQ ID NO: 99100 - protein, 30 aa, Artificial Sequence; identical to SEQ ID NO: 22423
  Cyclic GFR-binding peptide

SEQ ID NO: 99101 - protein, 31 aa, Artificial Sequence; identical to SEQ ID NO: 62808
  Cyclic GFR-binding peptide
  MOD_RES (30)..(31): Xaa is C or S

SEQ ID NO: 99102 - protein, 33 aa, Artificial Sequence
  Cyclic GFR-binding peptide
  MOD_RES (31)..(32): Xaa is C or S
EVVMDSMEGLVVNNASDMIQITINSLRTPVXXT

SEQ ID NO: 99103 - protein, 35 aa, Artificial Sequence; identical to SEQ ID NO: 62809
  Cyclic GFR-binding peptide
  MOD_RES (1)..(32)..(33): Xaa is C or S

SEQ ID NO: 99104 - protein, 27 aa, Artificial Sequence
  Cyclic GFR-binding peptide
TSMEGLFIPKKRVIEMIQVTINSLQVQ

SEQ ID NO: 99105 - protein, 26 aa, Artificial Sequence
  Cyclic GFR-binding peptide
RVIMSMEGLVKPKRGVMIQITINSLA

SEQ ID NO: 99106 - protein, 31 aa, Artificial Sequence
  Cyclic GFR-binding peptide
  MOD_RES (1)..(1): Xaa is C or S
XSRVVMNSMEGLIVNSSDDMIQVTINSLKTP

SEQ ID NO: 99107 - protein, 34 aa, Artificial Sequence
  Cyclic GFR-binding peptide
  MOD_RES (30)..(31): Xaa is C or S
KVIMSMEGLIKPTKGIMIQITINSLDQSVXXPSA

SEQ ID NO: 99108 - protein, 34 aa, Artificial Sequence; identical to SEQ ID NO: 22429
  Cyclic GFR-binding peptide
  MOD_RES (29)..(29): Xaa is C or S

SEQ ID NO: 99109 - protein, 39 aa, Artificial Sequence
  Cyclic GFR-binding peptide
  MOD_RES (1)..(33)..(34): Xaa is C or S
XAEVVMDSMEGIVVNNAADMIQITINSLRAPVXXSAPAA

SEQ ID NO: 99110 - protein, 38 aa, Artificial Sequence
  Cyclic GFR-binding peptide
  MOD_RES (2)..(33)..(34): Xaa is C or S
KXSRVIMSMEGLVKPKRGVMIQITINSLAQPVXXPAAS

SEQ ID NO: 99111 - protein, 33 aa, Artificial Sequence
  Cyclic GFR-binding peptide
  MOD_RES (1)..(32)..(33): Xaa is C or S
XSKVIMSMEGLIKPTKGIMIQITINSLDQSVXX

SEQ ID NO: 99112 - protein, 36 aa, Artificial Sequence
  Cyclic GFR-binding peptide
  MOD_RES (31)..(32): Xaa is C or S
SKVIMSMEGLIKPTKGIMIQITINSLDQSVXXPSAS

SEQ ID NO: 99113 - protein, 23 aa, Artificial Sequence
  Cyclic GFR-binding peptide
RSMEGLLKPKKRVYEMIQVTINS

SEQ ID NO: 99114 - protein, 33 aa, Artificial Sequence; identical to SEQ ID NO: 62822
  Cyclic GFR-binding peptide
  MOD_RES (30)..(31): Xaa is C or S

SEQ ID NO: 99115 - protein, 26 aa, Artificial Sequence
  Cyclic GFR-binding peptide
SRVIMSMEGLVKPKRGVMIQITINSL

SEQ ID NO: 99116 - protein, 35 aa, Artificial Sequence; identical to SEQ ID NO: 22450
  Cyclic GFR-binding peptide
  MOD_RES (31)..(31): Xaa is C or S

SEQ ID NO: 99117 - protein, 38 aa, Artificial Sequence; identical to SEQ ID NO: 22451
  Cyclic GFR-binding peptide
  MOD_RES (37)..(37): Xaa is C or S

SEQ ID NO: 99118 - protein, 24 aa, Artificial Sequence
  Cyclic GFR-binding peptide
VVMSMEGLVKPTRGVMIQITINSL

SEQ ID NO: 99119 - protein, 23 aa, Artificial Sequence
  Cyclic GFR-binding peptide
SMEGIVVNNAADMIQITINSLRA

SEQ ID NO: 99120 - protein, 27 aa, Artificial Sequence
  Cyclic GFR-binding peptide
  MOD_RES (1)..(1): Xaa is C or S
XSKVIMSMEGIIKPTKGIMIQITINSL

SEQ ID NO: 99121 - protein, 22 aa, Artificial Sequence
  Cyclic GFR-binding peptide
GSMEGIIIQQKDNMIQMTINSM

SEQ ID NO: 99122 - protein, 40 aa, Artificial Sequence
  Cyclic GFR-binding peptide
  MOD_RES (2)..(4)..(35)..(36): Xaa is C or S
LXGXEEVIMSMEGILLVRGNDMIQMTINSTKVPAXXTSPV

SEQ ID NO: 99123 - protein, 32 aa, Artificial Sequence; identical to SEQ ID NO: 62830
  Cyclic GFR-binding peptide
  MOD_RES (30)..(31): Xaa is C or S

SEQ ID NO: 99124 - protein, 30 aa, Artificial Sequence
  Cyclic GFR-binding peptide
  MOD_RES (30)..(30): Xaa is C or S
VVMDSMEGIVVNNAADMIQITINSLRAPVX

SEQ ID NO: 99125 - protein, 36 aa, Artificial Sequence
  Cyclic GFR-binding peptide
  MOD_RES (31)..(32): Xaa is C or S
EEVIMSMEGILLVRGNDMIQMTINSTKVPAXXTSPV

SEQ ID NO: 99126 - protein, 35 aa, Artificial Sequence; identical to SEQ ID NO: 22459
  Cyclic GFR-binding peptide
  MOD_RES (31)..(31): Xaa is C or S

SEQ ID NO: 99127 - protein, 27 aa, Artificial Sequence
  Cyclic GFR-binding peptide
  MOD_RES (1)..(1): Xaa is C or S
XAEVVMDSMEGIVVNNAADMIQITINS

SEQ ID NO: 99128 - protein, 30 aa, Artificial Sequence; identical to SEQ ID NO: 22462
  Cyclic GFR-binding peptide

SEQ ID NO: 99129 - protein, 33 aa, Artificial Sequence; identical to SEQ ID NO: 22465
  Cyclic GFR-binding peptide
  MOD_RES (30)..(30): Xaa is C or S

SEQ ID NO: 99130 - protein, 26 aa, Artificial Sequence
  Cyclic GFR-binding peptide
RVIMSMEGIVKPKRGVMIQITINSLA

SEQ ID NO: 99131 - protein, 23 aa, Artificial Sequence
  Cyclic GFR-binding peptide
SMEGIVKPTRGVMIQITINSLDQ

SEQ ID NO: 99132 - protein, 39 aa, Artificial Sequence
  Cyclic GFR-binding peptide
  MOD_RES (1)..(3)..(34)..(35): Xaa is C or S
XKXSKVVMSMEGLVKPTRGVMIQITINSLDQPVXXPSAS

SEQ ID NO: 99133 - protein, 25 aa, Artificial Sequence
  Cyclic GFR-binding peptide
ELSMEGIHQGQHPKIRMIQMTINSQ

SEQ ID NO: 99134 - protein, 26 aa, Artificial Sequence
  Cyclic GFR-binding peptide
DELTSMEGIFIPKKRVIEMIQVTINS

SEQ ID NO: 99135 - protein, 29 aa, Artificial Sequence
  Cyclic GFR-binding peptide
LFSMEGLHQGQHPKIRMIQMTINSEETPV

SEQ ID NO: 99136 - protein, 34 aa, Artificial Sequence; identical to SEQ ID NO: 62842
  Cyclic GFR-binding peptide
  MOD_RES (1)..(3)..(34): Xaa is C or S

SEQ ID NO: 99137 - protein, 38 aa, Artificial Sequence
  Cyclic GFR-binding peptide
  MOD_RES (2)..(4)..(36)..(37): Xaa is C or S
RXGXAEVVMDSMEGLVVNNAADMIQITINSLRAPVXXS

SEQ ID NO: 99138 - protein, 35 aa, Artificial Sequence
  Cyclic GFR-binding peptide
  MOD_RES (2)..(33)..(34): Xaa is C or S
GXEEVIMSMEGLLLVRGNDMIQMTINSTKVPAXXT

SEQ ID NO: 99139 - protein, 30 aa, Artificial Sequence
  Cyclic GFR-binding peptide
  MOD_RES (28)..(29): Xaa is C or S
MGSMEGLIIQQKDNMIQMTINSMKTPTXXP

SEQ ID NO: 99140 - protein, 29 aa, Artificial Sequence
  Cyclic GFR-binding peptide
EVVMDSMEGIVVNNAADMIQITINSLRAP

SEQ ID NO: 99141 - protein, 37 aa, Artificial Sequence
  Cyclic GFR-binding peptide
  MOD_RES (2)..(33)..(34): Xaa is C or S
KXSKVIMSMEGLIKPTKGIMIQITINSLDQSVXXPSA

SEQ ID NO: 99142 - protein, 30 aa, Artificial Sequence; identical to SEQ ID NO: 22480
  Cyclic GFR-binding peptide

SEQ ID NO: 99143 - protein, 39 aa, Artificial Sequence; identical to SEQ ID NO: 22481
  Cyclic GFR-binding peptide
  MOD_RES (1)..(38): Xaa is C or S

SEQ ID NO: 99144 - protein, 33 aa, Artificial Sequence; identical to SEQ ID NO: 66190
  Cyclic GFR-binding peptide
  MOD_RES (28)..(29): Xaa is C or S

SEQ ID NO: 99145 - protein, 32 aa, Artificial Sequence
  Cyclic GFR-binding peptide
  MOD_RES (32)..(32): Xaa is C or S
SRVVMNSMEGLIVNSSDDMIQVTINSLKTPAX

SEQ ID NO: 99146 - protein, 39 aa, Artificial Sequence
  Cyclic GFR-binding peptide
  MOD_RES (1)..(3)..(34)..(35): Xaa is C or S
XGXEEVIMSMEGILLVRGNDMIQMTINSTKVPAXXTSPV

SEQ ID NO: 99147 - protein, 33 aa, Artificial Sequence
  Cyclic GFR-binding peptide
  MOD_RES (30)..(31): Xaa is C or S
RVIMSMEGLVKPKRGVMIQITINSLAQPVXXPA

SEQ ID NO: 99148 - protein, 30 aa, Artificial Sequence
  Cyclic GFR-binding peptide
  MOD_RES (29)..(30): Xaa is C or S
VIMSMEGLIKPTKGIMIQITINSLDQSVXX

SEQ ID NO: 99149 - protein, 30 aa, Artificial Sequence; identical to SEQ ID NO: 62849
  Cyclic GFR-binding peptide
  MOD_RES (28)..(29): Xaa is C or S

SEQ ID NO: 99150 - protein, 36 aa, Artificial Sequence; identical to SEQ ID NO: 22488
  Cyclic GFR-binding peptide
  MOD_RES (1)..(35): Xaa is C or S

SEQ ID NO: 99151 - protein, 30 aa, Artificial Sequence
  Cyclic GFR-binding peptide
SRVVMNSMEGLIVNSSDDMIQVTINSLKTP

SEQ ID NO: 99152 - protein, 26 aa, Artificial Sequence
  Cyclic GFR-binding peptide
MSMEGIVKPKRGVMIQITINSLAQPV

SEQ ID NO: 99153 - protein, 33 aa, Artificial Sequence; identical to SEQ ID NO: 22492
  Cyclic GFR-binding peptide
  MOD_RES (28)..(28): Xaa is C or S

SEQ ID NO: 99154 - protein, 28 aa, Artificial Sequence
  Cyclic GFR-binding peptide
EVIMSMEGILLVRGNDMIQMTINSTKVP

SEQ ID NO: 99155 - protein, 39 aa, Artificial Sequence
  Cyclic GFR-binding peptide
  MOD_RES (1)..(33)..(34): Xaa is C or S
XRDVVMGSMEGLIIQQKDNMIQMTINSMKTPTXXPGASG

SEQ ID NO: 99156 - protein, 23 aa, Artificial Sequence
  Cyclic GFR-binding peptide
VMSMEGIVKPTRGVMIQITINSL

SEQ ID NO: 99157 - protein, 38 aa, Artificial Sequence; identical to SEQ ID NO: 22497
  Cyclic GFR-binding peptide
  MOD_RES (32)..(32): Xaa is C or S

SEQ ID NO: 99158 - protein, 35 aa, Artificial Sequence; identical to SEQ ID NO: 22501
  Cyclic GFR-binding peptide
  MOD_RES (29)..(29): Xaa is C or S

SEQ ID NO: 99159 - protein, 31 aa, Artificial Sequence
  Cyclic GFR-binding peptide
  MOD_RES (31)..(31): Xaa is C or S
EEVIMSMEGILLVRGNDMIQMTINSTKVPAX

SEQ ID NO: 99160 - protein, 35 aa, Artificial Sequence; identical to SEQ ID NO: 62863
  Cyclic GFR-binding peptide
  MOD_RES (2)..(34)..(35): Xaa is C or S

SEQ ID NO: 99161 - protein, 28 aa, Artificial Sequence
  Cyclic GFR-binding peptide
  MOD_RES (1)..(1): Xaa is C or S
XEEVIMSMEGLLLVRGNDMIQMTINSTK

SEQ ID NO: 99162 - protein, 22 aa, Artificial Sequence
  Cyclic GFR-binding peptide
SMEGIIIQQKDNMIQMTINSMK

SEQ ID NO: 99163 - protein, 30 aa, Artificial Sequence; identical to SEQ ID NO: 22505
  Cyclic GFR-binding peptide
  MOD_RES (1)..(1): Xaa is C or S

SEQ ID NO: 99164 - protein, 24 aa, Artificial Sequence
  Cyclic GFR-binding peptide
VVMNSMEGLIVNSSDDMIQVTINS

SEQ ID NO: 99165 - protein, 28 aa, Artificial Sequence
  Cyclic GFR-binding peptide
  MOD_RES (28)..(28): Xaa is C or S
SMEGLHQGQHPKIRMIQMTINSEETPVX

SEQ ID NO: 99166 - protein, 35 aa, Artificial Sequence
  Cyclic GFR-binding peptide
  MOD_RES (29)..(30): Xaa is C or S
VIMSMEGLLLVRGNDMIQMTINSTKVPAXXTSPVR

SEQ ID NO: 99167 - protein, 30 aa, Artificial Sequence; identical to SEQ ID NO: 22513
  Cyclic GFR-binding peptide
  MOD_RES (28)..(28): Xaa is C or S

SEQ ID NO: 99168 - protein, 40 aa, Artificial Sequence
  Cyclic GFR-binding peptide
  MOD_RES (1)..(3)..(34)..(35): Xaa is C or S
XKXSKVIMSMEGLIKPTKGIMIQITINSLDQSVXXPSASA

SEQ ID NO: 99169 - protein, 24 aa, Artificial Sequence
  Cyclic GFR-binding peptide
VVMSMEGIVKPTRGVMIQITINSL

SEQ ID NO: 99170 - protein, 32 aa, Artificial Sequence
  Cyclic GFR-binding peptide
  MOD_RES (31)..(32): Xaa is C or S
EEVIMSMEGILLVRGNDMIQMTINSTKVPAXX

SEQ ID NO: 99171 - protein, 36 aa, Artificial Sequence; identical to SEQ ID NO: 62875
  Cyclic GFR-binding peptide
  MOD_RES (30)..(31): Xaa is C or S

SEQ ID NO: 99172 - protein, 40 aa, Artificial Sequence
  Cyclic GFR-binding peptide
  MOD_RES (1)..(3)..(34)..(35): Xaa is C or S
XGXEEVIMSMEGLLLVRGNDMIQMTINSTKVPAXXTSPVR

SEQ ID NO: 99173 - protein, 28 aa, Artificial Sequence
  Cyclic GFR-binding peptide
  MOD_RES (2)..(2): Xaa is C or S
GXAEVVMDSMEGIVVNNAADMIQITINS

SEQ ID NO: 99174 - protein, 30 aa, Artificial Sequence; identical to SEQ ID NO: 66234
  Cyclic GFR-binding peptide
  MOD_RES (29)..(30): Xaa is C or S

SEQ ID NO: 99175 - protein, 33 aa, Artificial Sequence
  Cyclic GFR-binding peptide
  MOD_RES (1)..(33): Xaa is C or S
XSEVVMDSMEGLVVNNASDMIQITINSLRTPVX

SEQ ID NO: 99176 - protein, 25 aa, Artificial Sequence
  Cyclic GFR-binding peptide
SMEGLLLVRGNDMIQMTINSTKVPA

SEQ ID NO: 99177 - protein, 34 aa, Artificial Sequence
  Cyclic GFR-binding peptide
  MOD_RES (2)..(4): Xaa is C or S
SXGXRDVVMGSMEGLIIQQKDNMIQMTINSMKTP

SEQ ID NO: 99178 - protein, 27 aa, Artificial Sequence
  Cyclic GFR-binding peptide
VIMSMEGIIKPTKGIMIQITINSLDQS

SEQ ID NO: 99179 - protein, 34 aa, Artificial Sequence; identical to SEQ ID NO: 22532
  Cyclic GFR-binding peptide
  MOD_RES (32)..(32): Xaa is C or S

SEQ ID NO: 99180 - protein, 33 aa, Artificial Sequence
  Cyclic GFR-binding peptide
  MOD_RES (1)..(3): Xaa is C or S
XGXSEVVMDSMEGIVVNNASDMIQITINSLRTP

SEQ ID NO: 99181 - protein, 28 aa, Artificial Sequence
  Cyclic GFR-binding peptide
TSMEGIFIPKKRVIEMIQVTINSLQVQT

SEQ ID NO: 99182 - protein, 20 aa, Artificial Sequence
  Cyclic GFR-binding peptide
SMEGIVKPTRGVMIQITINS

SEQ ID NO: 99183 - protein, 26 aa, Artificial Sequence
  Cyclic GFR-binding peptide
TSMEGIFIPKKRVIEMIQVTINSLQV

SEQ ID NO: 99184 - protein, 35 aa, Artificial Sequence; identical to SEQ ID NO: 22544
  Cyclic GFR-binding peptide
  MOD_RES (2)..(2): Xaa is C or S

SEQ ID NO: 99185 - protein, 40 aa, Artificial Sequence; identical to SEQ ID NO: 22545
  Cyclic GFR-binding peptide
  MOD_RES (2)..(4): Xaa is C or S

SEQ ID NO: 99186 - protein, 45 aa, Artificial Sequence; identical to SEQ ID NO: 22547
  Cyclic GFR-binding peptide
  MOD_RES (2)..(4)..(41): Xaa is C or S

SEQ ID NO: 99187 - protein, 29 aa, Artificial Sequence
  Cyclic GFR-binding peptide
SMEGLLKPKKRVYEMIQVTINSHHVRSPQ

SEQ ID NO: 99188 - protein, 29 aa, Artificial Sequence
  Cyclic GFR-binding peptide
  MOD_RES (2)..(2): Xaa is C or S
GXSEVVMDSMEGLVVNNASDMIQITINSL

SEQ ID NO: 99189 - protein, 31 aa, Artificial Sequence; identical to SEQ ID NO: 62897
  Cyclic GFR-binding peptide
  MOD_RES (1)..(3): Xaa is C or S

SEQ ID NO: 99190 - protein, 34 aa, Artificial Sequence; identical to SEQ ID NO: 22559
  Cyclic GFR-binding peptide
  MOD_RES (1)..(1): Xaa is C or S

SEQ ID NO: 99191 - protein, 34 aa, Artificial Sequence; identical to SEQ ID NO: 22560
  Cyclic GFR-binding peptide
  MOD_RES (2)..(4): Xaa is C or S

SEQ ID NO: 99192 - protein, 30 aa, Artificial Sequence
  Cyclic GFR-binding peptide
  MOD_RES (27)..(28): Xaa is C or S
MSMEGLIKPTKGIMIQITINSLDQSVXXPS

SEQ ID NO: 99193 - protein, 32 aa, Artificial Sequence; identical to SEQ ID NO: 22563
  Cyclic GFR-binding peptide
  MOD_RES (30)..(30): Xaa is C or S

SEQ ID NO: 99194 - protein, 24 aa, Artificial Sequence
  Cyclic GFR-binding peptide
LTSMEGLFIPKKRVIEMIQVTINS

SEQ ID NO: 99195 - protein, 26 aa, Artificial Sequence
  Cyclic GFR-binding peptide
LFSMEGLHQGQHPKIRMIQMTINSEE

SEQ ID NO: 99196 - protein, 33 aa, Artificial Sequence
  Cyclic GFR-binding peptide
  MOD_RES (31)..(32): Xaa is C or S
SRVIMSMEGLVKPKRGVMIQITINSLAQPVXXP

SEQ ID NO: 99197 - protein, 36 aa, Artificial Sequence
  Cyclic GFR-binding peptide
  MOD_RES (2)..(4)..(36): Xaa is C or S
HXGXSRVVMNSMEGLIVNSSDDMIQVTINSLKTPAX

SEQ ID NO: 99198 - protein, 32 aa, Artificial Sequence; identical to SEQ ID NO: 22576
  Cyclic GFR-binding peptide

SEQ ID NO: 99199 - protein, 29 aa, Artificial Sequence
  Cyclic GFR-binding peptide
NHQLFSMEGIHQGQHPKIRMIQMTINSEE

SEQ ID NO: 99200 - protein, 29 aa, Artificial Sequence
  Cyclic GFR-binding peptide
SMEGLFIPKKRVIEMIQVTINSLQVQTPR

SEQ ID NO: 99201 - protein, 29 aa, Artificial Sequence
  Cyclic GFR-binding peptide
SRVIMSMEGIVKPKRGVMIQITINSLAQP

SEQ ID NO: 99202 - protein, 38 aa, Artificial Sequence; identical to SEQ ID NO: 66274
  Cyclic GFR-binding peptide
  MOD_RES (2)..(4)..(35)..(36): Xaa is C or S

SEQ ID NO: 99203 - protein, 35 aa, Artificial Sequence; identical to SEQ ID NO: 22586
  Cyclic GFR-binding peptide

SEQ ID NO: 99204 - protein, 35 aa, Artificial Sequence
  Cyclic GFR-binding peptide
  MOD_RES (30)..(31): Xaa is C or S
VVMNSMEGLIVNSSDDMIQVTINSLKTPAXXPKPV

SEQ ID NO: 99205 - protein, 32 aa, Artificial Sequence
  Cyclic GFR-binding peptide
  MOD_RES (27)..(28): Xaa is C or S
MSMEGLVKPTRGVMIQITINSLDQPVXXPSAS

SEQ ID NO: 99206 - protein, 28 aa, Artificial Sequence
  Cyclic GFR-binding peptide
  MOD_RES (27)..(28): Xaa is C or S
GSMEGLIIQQKDNMIQMTINSMKTPTXX

SEQ ID NO: 99207 - protein, 31 aa, Artificial Sequence; identical to SEQ ID NO: 62919
  Cyclic GFR-binding peptide
  MOD_RES (26)..(27): Xaa is C or S

SEQ ID NO: 99208 - protein, 27 aa, Artificial Sequence
  Cyclic GFR-binding peptide
SMEGIHQGQHPKIRMIQMTINSEETPV

SEQ ID NO: 99209 - protein, 30 aa, Artificial Sequence
  Cyclic GFR-binding peptide
  MOD_RES (2)..(4): Xaa is C or S
LXGXEEVIMSMEGILLVRGNDMIQMTINST

SEQ ID NO: 99210 - protein, 33 aa, Artificial Sequence
  Cyclic GFR-binding peptide
  MOD_RES (30)..(31): Xaa is C or S
VVMDSMEGLVVNNASDMIQITINSLRTPVXXTP

SEQ ID NO: 99211 - protein, 31 aa, Artificial Sequence
  Cyclic GFR-binding peptide
  MOD_RES (26)..(27): Xaa is C or S
SMEGLVVNNASDMIQITINSLRTPVXXTPPT

SEQ ID NO: 99212 - protein, 38 aa, Artificial Sequence; identical to SEQ ID NO: 66288
  Cyclic GFR-binding peptide
  MOD_RES (2)..(4)..(36)..(37): Xaa is C or S

SEQ ID NO: 99213 - protein, 40 aa, Artificial Sequence
  Cyclic GFR-binding peptide
  MOD_RES (2)..(4)..(35)..(36): Xaa is C or S
SXKXSKVVMSMEGLVKPTRGVMIQITINSLDQPVXXPSAS

SEQ ID NO: 99214 - protein, 33 aa, Artificial Sequence
  Cyclic GFR-binding peptide
  MOD_RES (1)..(3): Xaa is C or S
XKXSKVVMSMEGLVKPTRGVMIQITINSLDQPV

SEQ ID NO: 99215 - protein, 31 aa, Artificial Sequence; identical to SEQ ID NO: 62925
  Cyclic GFR-binding peptide
  MOD_RES (2)..(2): Xaa is C or S

SEQ ID NO: 99216 - protein, 40 aa, Artificial Sequence; identical to SEQ ID NO: 22598
  Cyclic GFR-binding peptide
  MOD_RES (1)..(35): Xaa is C or S

SEQ ID NO: 99217 - protein, 33 aa, Artificial Sequence
  Cyclic GFR-binding peptide
  MOD_RES (27)..(28): Xaa is C or S
MSMEGLIKPTKGIMIQITINSLDQSVXXPSASA

SEQ ID NO: 99218 - protein, 29 aa, Artificial Sequence
  Cyclic GFR-binding peptide
  MOD_RES (26)..(27): Xaa is C or S
SMEGLIIQQKDNMIQMTINSMKTPTXXPG

SEQ ID NO: 99219 - protein, 31 aa, Artificial Sequence; identical to SEQ ID NO: 62926
  Cyclic GFR-binding peptide
  MOD_RES (2)..(2): Xaa is C or S

SEQ ID NO: 99220 - protein, 32 aa, Artificial Sequence; identical to SEQ ID NO: 62932
  Cyclic GFR-binding peptide
  MOD_RES (29)..(30): Xaa is C or S

SEQ ID NO: 99221 - protein, 29 aa, Artificial Sequence
  Cyclic GFR-binding peptide
  MOD_RES (2)..(4): Xaa is C or S
SXKXSKVVMSMEGLVKPTRGVMIQITINS

SEQ ID NO: 99222 - protein, 32 aa, Artificial Sequence; identical to SEQ ID NO: 66301
  Cyclic GFR-binding peptide
  MOD_RES (1)..(3): Xaa is C or S

SEQ ID NO: 99223 - protein, 31 aa, Artificial Sequence; identical to SEQ ID NO: 66305
  Cyclic GFR-binding peptide
  MOD_RES (2)..(2): Xaa is C or S

SEQ ID NO: 99224 - protein, 42 aa, Artificial Sequence
  Cyclic GFR-binding peptide
  MOD_RES (2)..(4)..(36)..(37): Xaa is C or S
SXGXRDVVMGSMEGIIIQQKDNMIQMTINSMKTPTXXPGASG

SEQ ID NO: 99225 - protein, 30 aa, Artificial Sequence
  Cyclic GFR-binding peptide
  MOD_RES (27)..(28): Xaa is C or S
DSMEGLVVNNAADMIQITINSLRAPVXXSA

SEQ ID NO: 99226 - protein, 37 aa, Artificial Sequence
  Cyclic GFR-binding peptide
  MOD_RES (32)..(33): Xaa is C or S
RDVVMGSMEGIIIQQKDNMIQMTINSMKTPTXXPGAS

SEQ ID NO: 99227 - protein, 25 aa, Artificial Sequence
  Cyclic GFR-binding peptide
VMDSMEGLVVNNAADMIQITINSLR

SEQ ID NO: 99228 - protein, 33 aa, Artificial Sequence; identical to SEQ ID NO: 62940
  Cyclic GFR-binding peptide
  MOD_RES (32)..(33): Xaa is C or S

SEQ ID NO: 99229 - protein, 32 aa, Artificial Sequence
  Cyclic GFR-binding peptide
  MOD_RES (1)..(1): Xaa is C or S
XAEVVMDSMEGLVVNNAADMIQITINSLRAPV

SEQ ID NO: 99230 - protein, 38 aa, Artificial Sequence
  Cyclic GFR-binding peptide
  MOD_RES (32)..(33): Xaa is C or S
AEVVMDSMEGLVVNNAADMIQITINSLRAPVXXSAPAA

SEQ ID NO: 99231 - protein, 26 aa, Artificial Sequence
  Cyclic GFR-binding peptide
IMSMEGIIKPTKGIMIQITINSLDQS

SEQ ID NO: 99232 - protein, 30 aa, Artificial Sequence
  Cyclic GFR-binding peptide
  MOD_RES (30)..(30): Xaa is C or S
VVMNSMEGLIVNSSDDMIQVTINSLKTPAX

SEQ ID NO: 99233 - protein, 35 aa, Artificial Sequence; identical to SEQ ID NO: 22613
  Cyclic GFR-binding peptide
  MOD_RES (34)..(34): Xaa is C or S

SEQ ID NO: 99234 - protein, 28 aa, Artificial Sequence
  Cyclic GFR-binding peptide
QLFSMEGLHQGQHPKIRMIQMTINSEET

SEQ ID NO: 99235 - protein, 26 aa, Artificial Sequence
  Cyclic GFR-binding peptide
SMEGLFIPKKRVIEMIQVTINSLQVQ

SEQ ID NO: 99236 - protein, 30 aa, Artificial Sequence; identical to SEQ ID NO: 22619
  Cyclic GFR-binding peptide

SEQ ID NO: 99237 - protein, 28 aa, Artificial Sequence
  Cyclic GFR-binding peptide
VVMDSMEGIVVNNAADMIQITINSLRAP

SEQ ID NO: 99238 - protein, 30 aa, Artificial Sequence; identical to SEQ ID NO: 62952
  Cyclic GFR-binding peptide
  MOD_RES (1)..(1): Xaa is C or S

SEQ ID NO: 99239 - protein, 36 aa, Artificial Sequence
  Cyclic GFR-binding peptide
  MOD_RES (32)..(33): Xaa is C or S
SRVVMNSMEGLIVNSSDDMIQVTINSLKTPAXXPKP

SEQ ID NO: 99240 - protein, 30 aa, Artificial Sequence; identical to SEQ ID NO: 62956
  Cyclic GFR-binding peptide
  MOD_RES (29)..(30): Xaa is C or S

SEQ ID NO: 99241 - protein, 30 aa, Artificial Sequence
  Cyclic GFR-binding peptide
  MOD_RES (29)..(30): Xaa is C or S
VIMSMEGLVKPKRGVMIQITINSLAQPVXX

SEQ ID NO: 99242 - protein, 31 aa, Artificial Sequence
  Cyclic GFR-binding peptide
  MOD_RES (29)..(30): Xaa is C or S
VVMSMEGLVKPTRGVMIQITINSLDQPVXXP

SEQ ID NO: 99243 - protein, 34 aa, Artificial Sequence
  Cyclic GFR-binding peptide
  MOD_RES (2)..(4): Xaa is C or S
SXKXSKVVMSMEGLVKPTRGVMIQITINSLDQPV

SEQ ID NO: 99244 - protein, 27 aa, Artificial Sequence
  Cyclic GFR-binding peptide
EVVMDSMEGLVVNNAADMIQITINSLR

SEQ ID NO: 99245 - protein, 31 aa, Artificial Sequence
  Cyclic GFR-binding peptide
  MOD_RES (2)..(2): Xaa is C or S
GXEEVIMSMEGLLLVRGNDMIQMTINSTKVP

SEQ ID NO: 99246 - protein, 28 aa, Artificial Sequence
  Cyclic GFR-binding peptide
VVMDSMEGLVVNNAADMIQITINSLRAP

SEQ ID NO: 99247 - protein, 37 aa, Artificial Sequence
  Cyclic GFR-binding peptide
  MOD_RES (1)..(33)..(34): Xaa is C or S
XAEVVMDSMEGIVVNNAADMIQITINSLRAPVXXSAP

SEQ ID NO: 99248 - protein, 33 aa, Artificial Sequence; identical to SEQ ID NO: 22634
  Cyclic GFR-binding peptide
  MOD_RES (1)..(3): Xaa is C or S

SEQ ID NO: 99249 - protein, 25 aa, Artificial Sequence
  Cyclic GFR-binding peptide
LSMEGIHQGQHPKIRMIQMTINSQG

SEQ ID NO: 99250 - protein, 25 aa, Artificial Sequence
  Cyclic GFR-binding peptide
RVVMNSMEGIIVNSSDDMIQVTINS

SEQ ID NO: 99251 - protein, 31 aa, Artificial Sequence
  Cyclic GFR-binding peptide
  MOD_RES (2)..(4): Xaa is C or S
SXGXRDVVMGSMEGLIIQQKDNMIQMTINSM

SEQ ID NO: 99252 - protein, 37 aa, Artificial Sequence
  Cyclic GFR-binding peptide
  MOD_RES (2)..(4)..(36)..(37): Xaa is C or S
HXGXSRVVMNSMEGLIVNSSDDMIQVTINSLKTPAXX

SEQ ID NO: 99253 - protein, 33 aa, Artificial Sequence; identical to SEQ ID NO: 62965
  Cyclic GFR-binding peptide
  MOD_RES (1)..(3): Xaa is C or S

SEQ ID NO: 99254 - protein, 32 aa, Artificial Sequence
  Cyclic GFR-binding peptide
  MOD_RES (27)..(28): Xaa is C or S
DSMEGLVVNNAADMIQITINSLRAPVXXSAPA

SEQ ID NO: 99255 - protein, 39 aa, Artificial Sequence
  Cyclic GFR-binding peptide
  MOD_RES (1)..(3)..(35)..(36): Xaa is C or S
XGXSEVVMDSMEGLVVNNASDMIQITINSLRTPVXXTPP

SEQ ID NO: 99256 - protein, 33 aa, Artificial Sequence
  Cyclic GFR-binding peptide
  MOD_RES (27)..(28): Xaa is C or S
GSMEGIIIQQKDNMIQMTINSMKTPTXXPGASG

SEQ ID NO: 99257 - protein, 33 aa, Artificial Sequence
  Cyclic GFR-binding peptide
  MOD_RES (32)..(33): Xaa is C or S
RDVVMGSMEGIIIQQKDNMIQMTINSMKTPTXX

SEQ ID NO: 99258 - protein, 31 aa, Artificial Sequence
  Cyclic GFR-binding peptide
  MOD_RES (1)..(1): Xaa is C or S
XRDVVMGSMEGIIIQQKDNMIQMTINSMKTP

SEQ ID NO: 99259 - protein, 21 aa, Artificial Sequence
  Cyclic GFR-binding peptide
DSMEGIVVNNASDMIQITINS

SEQ ID NO: 99260 - protein, 35 aa, Artificial Sequence; identical to SEQ ID NO: 22645
  Cyclic GFR-binding peptide
  MOD_RES (31)..(31): Xaa is C or S

SEQ ID NO: 99261 - protein, 29 aa, Artificial Sequence
  Cyclic GFR-binding peptide
  MOD_RES (29)..(29): Xaa is C or S
VIMSMEGLLLVRGNDMIQMTINSTKVPAX

SEQ ID NO: 99262 - protein, 36 aa, Artificial Sequence; identical to SEQ ID NO: 22647
  Cyclic GFR-binding peptide

SEQ ID NO: 99263 - protein, 31 aa, Artificial Sequence; identical to SEQ ID NO: 22650
  Cyclic GFR-binding peptide
  MOD_RES (28)..(28): Xaa is C or S

SEQ ID NO: 99264 - protein, 30 aa, Artificial Sequence; identical to SEQ ID NO: 22651
  Cyclic GFR-binding peptide
  MOD_RES (30)..(30): Xaa is C or S

SEQ ID NO: 99265 - protein, 35 aa, Artificial Sequence
  Cyclic GFR-binding peptide
  MOD_RES (30)..(31): Xaa is C or S
VVMDSMEGIVVNNAADMIQITINSLRAPVXXSAPA

SEQ ID NO: 99266 - protein, 26 aa, Artificial Sequence
  Cyclic GFR-binding peptide
MGSMEGIIIQQKDNMIQMTINSMKTP

SEQ ID NO: 99267 - protein, 44 aa, Artificial Sequence; identical to SEQ ID NO: 22655
  Cyclic GFR-binding peptide
  MOD_RES (2)..(4)..(41): Xaa is C or S

SEQ ID NO: 99268 - protein, 39 aa, Artificial Sequence
  Cyclic GFR-binding peptide
  MOD_RES (1)..(3)..(34)..(35): Xaa is C or S
XKXSKVIMSMEGLIKPTKGIMIQITINSLDQSVXXPSAS

SEQ ID NO: 99269 - protein, 27 aa, Artificial Sequence
  Cyclic GFR-binding peptide
  MOD_RES (26)..(27): Xaa is C or S
SMEGIVVNNAADMIQITINSLRAPVXX

SEQ ID NO: 99270 - protein, 22 aa, Artificial Sequence
  Cyclic GFR-binding peptide
MSMEGLVKPTRGVMIQITINSL

SEQ ID NO: 99271 - protein, 36 aa, Artificial Sequence; identical to SEQ ID NO: 22660
  Cyclic GFR-binding peptide
  MOD_RES (33)..(33): Xaa is C or S

SEQ ID NO: 99272 - protein, 41 aa, Artificial Sequence; identical to SEQ ID NO: 22661
  Cyclic GFR-binding peptide
  MOD_RES (2)..(4)..(41): Xaa is C or S

SEQ ID NO: 99273 - protein, 30 aa, Artificial Sequence; identical to SEQ ID NO: 22664
  Cyclic GFR-binding peptide

SEQ ID NO: 99274 - protein, 30 aa, Artificial Sequence
  Cyclic GFR-binding peptide
  MOD_RES (27)..(28): Xaa is C or S
MSMEGLVKPTRGVMIQITINSLDQPVXXPS

SEQ ID NO: 99275 - protein, 28 aa, Artificial Sequence
  Cyclic GFR-binding peptide
SKVIMSMEGLIKPTKGIMIQITINSLDQ

SEQ ID NO: 99276 - protein, 29 aa, Artificial Sequence
  Cyclic GFR-binding peptide
SKVIMSMEGLIKPTKGIMIQITINSLDQS

SEQ ID NO: 99277 - protein, 28 aa, Artificial Sequence
  Cyclic GFR-binding peptide
VMGSMEGLIIQQKDNMIQMTINSMKTPT

SEQ ID NO: 99278 - protein, 26 aa, Artificial Sequence
  Cyclic GFR-binding peptide
VVMNSMEGIIVNSSDDMIQVTINSLK

SEQ ID NO: 99279 - protein, 22 aa, Artificial Sequence
  Cyclic GFR-binding peptide
MSMEGILLVRGNDMIQMTINST

SEQ ID NO: 99280 - protein, 30 aa, Artificial Sequence
  Cyclic GFR-binding peptide
  MOD_RES (26)..(27): Xaa is C or S
SMEGIIIQQKDNMIQMTINSMKTPTXXPGA

SEQ ID NO: 99281 - protein, 27 aa, Artificial Sequence
  Cyclic GFR-binding peptide
MDSMEGIVVNNAADMIQITINSLRAPV

SEQ ID NO: 99282 - protein, 33 aa, Artificial Sequence; identical to SEQ ID NO: 22667
  Cyclic GFR-binding peptide
  MOD_RES (31)..(31): Xaa is C or S

SEQ ID NO: 99283 - protein, 35 aa, Artificial Sequence
  Cyclic GFR-binding peptide
  MOD_RES (1)..(32)..(33): Xaa is C or S
XSRVIMSMEGLVKPKRGVMIQITINSLAQPVXXPA

SEQ ID NO: 99284 - protein, 29 aa, Artificial Sequence
  Cyclic GFR-binding peptide
SEVVMDSMEGLVVNNASDMIQITINSLRT

SEQ ID NO: 99285 - protein, 30 aa, Artificial Sequence
  Cyclic GFR-binding peptide
EVVMDSMEGIVVNNAADMIQITINSLRAPV

SEQ ID NO: 99286 - protein, 33 aa, Artificial Sequence
  Cyclic GFR-binding peptide
  MOD_RES (1)..(32)..(33): Xaa is C or S
XEEVIMSMEGILLVRGNDMIQMTINSTKVPAXX

SEQ ID NO: 99287 - protein, 33 aa, Artificial Sequence; identical to SEQ ID NO: 22670
  Cyclic GFR-binding peptide
  MOD_RES (30)..(30): Xaa is C or S

SEQ ID NO: 99288 - protein, 26 aa, Artificial Sequence
  Cyclic GFR-binding peptide
SRVVMNSMEGIIVNSSDDMIQVTINS

SEQ ID NO: 99289 - protein, 34 aa, Artificial Sequence
  Cyclic GFR-binding peptide
  MOD_RES (31)..(32): Xaa is C or S
EEVIMSMEGILLVRGNDMIQMTINSTKVPAXXTS

SEQ ID NO: 99290 - protein, 37 aa, Artificial Sequence; identical to SEQ ID NO: 22672
  Cyclic GFR-binding peptide
  MOD_RES (1)..(3): Xaa is C or S

SEQ ID NO: 99291 - protein, 38 aa, Artificial Sequence
  Cyclic GFR-binding peptide
  MOD_RES (2)..(4)..(35)..(36): Xaa is C or S
LXGXEEVIMSMEGLLLVRGNDMIQMTINSTKVPAXXTS

SEQ ID NO: 99292 - protein, 30 aa, Artificial Sequence; identical to SEQ ID NO: 66378
  Cyclic GFR-binding peptide
  MOD_RES (28)..(29): Xaa is C or S

SEQ ID NO: 99293 - protein, 27 aa, Artificial Sequence
  Cyclic GFR-binding peptide
RDVVMGSMEGLIIQQKDNMIQMTINSM

SEQ ID NO: 99294 - protein, 33 aa, Artificial Sequence
  Cyclic GFR-binding peptide
  MOD_RES (29)..(30): Xaa is C or S
VMDSMEGIVVNNASDMIQITINSLRTPVXXTPP

SEQ ID NO: 99295 - protein, 41 aa, Artificial Sequence
  Cyclic GFR-binding peptide
  MOD_RES (2)..(4)..(36)..(37): Xaa is C or S
RXGXSEVVMDSMEGIVVNNASDMIQITINSLRTPVXXTPPT

SEQ ID NO: 99296 - protein, 40 aa, Artificial Sequence; identical to SEQ ID NO: 22678
  Cyclic GFR-binding peptide
  MOD_RES (34)..(34): Xaa is C or S

SEQ ID NO: 99297 - protein, 33 aa, Artificial Sequence
  Cyclic GFR-binding peptide
  MOD_RES (30)..(31): Xaa is C or S
VVMDSMEGIVVNNAADMIQITINSLRAPVXXSA

SEQ ID NO: 99298 - protein, 22 aa, Artificial Sequence
  Cyclic GFR-binding peptide
SMEGLIVNSSDDMIQVTINSLK

SEQ ID NO: 99299 - protein, 30 aa, Artificial Sequence
  Cyclic GFR-binding peptide
  MOD_RES (1)..(1): Xaa is C or S
XSRVIMSMEGLVKPKRGVMIQITINSLAQP

SEQ ID NO: 99300 - protein, 41 aa, Artificial Sequence; identical to SEQ ID NO: 22682
  Cyclic GFR-binding peptide
  MOD_RES (1)..(38): Xaa is C or S

SEQ ID NO: 99301 - protein, 28 aa, Artificial Sequence
  Cyclic GFR-binding peptide
VVMDSMEGIVVNNASDMIQITINSLRTP

SEQ ID NO: 99302 - protein, 28 aa, Artificial Sequence
  Cyclic GFR-binding peptide
  MOD_RES (2)..(2): Xaa is C or S
GXSRVVMNSMEGIIVNSSDDMIQVTINS

SEQ ID NO: 99303 - protein, 40 aa, Artificial Sequence
  Cyclic GFR-binding peptide
  MOD_RES (2)..(4)..(36)..(37): Xaa is C or S
SXGXRDVVMGSMEGLIIQQKDNMIQMTINSMKTPTXXPGA

SEQ ID NO: 99304 - protein, 24 aa, Artificial Sequence
  Cyclic GFR-binding peptide
FSMEGLHQGQHPKIRMIQMTINSE

SEQ ID NO: 99305 - protein, 27 aa, Artificial Sequence
  Cyclic GFR-binding peptide
  MOD_RES (1)..(1): Xaa is C or S
XSKVVMSMEGLVKPTRGVMIQITINSL

SEQ ID NO: 99306 - protein, 38 aa, Artificial Sequence
  Cyclic GFR-binding peptide
  MOD_RES (2)..(4)..(35)..(36): Xaa is C or S
LXGXEEVIMSMEGILLVRGNDMIQMTINSTKVPAXXTS

SEQ ID NO: 99307 - protein, 36 aa, Artificial Sequence
  Cyclic GFR-binding peptide
  MOD_RES (2)..(4)..(35)..(36): Xaa is C or S
LXGXEEVIMSMEGILLVRGNDMIQMTINSTKVPAXX

SEQ ID NO: 99308 - protein, 37 aa, Artificial Sequence
  Cyclic GFR-binding peptide
  MOD_RES (1)..(3)..(34)..(35): Xaa is C or S
XKXSRVIMSMEGLVKPKRGVMIQITINSLAQPVXXPA

SEQ ID NO: 99309 - protein, 23 aa, Artificial Sequence
  Cyclic GFR-binding peptide
IMSMEGLLLVRGNDMIQMTINST

SEQ ID NO: 99310 - protein, 28 aa, Artificial Sequence
  Cyclic GFR-binding peptide
LHEELRSMEGILKPKKRVYEMIQVTINS

SEQ ID NO: 99311 - protein, 28 aa, Artificial Sequence
  Cyclic GFR-binding peptide
  MOD_RES (1)..(3): Xaa is C or S
XGXEEVIMSMEGILLVRGNDMIQMTINS

SEQ ID NO: 99312 - protein, 32 aa, Artificial Sequence
  Cyclic GFR-binding peptide
  MOD_RES (32)..(32): Xaa is C or S
AEVVMDSMEGLVVNNAADMIQITINSLRAPVX

SEQ ID NO: 99313 - protein, 36 aa, Artificial Sequence
  Cyclic GFR-binding peptide
  MOD_RES (2)..(4)..(35)..(36): Xaa is C or S
SXKXSKVIMSMEGLIKPTKGIMIQITINSLDQSVXX

SEQ ID NO: 99314 - protein, 34 aa, Artificial Sequence
  Cyclic GFR-binding peptide
  MOD_RES (1)..(33)..(34): Xaa is C or S
XSEVVMDSMEGLVVNNASDMIQITINSLRTPVXX

SEQ ID NO: 99315 - protein, 32 aa, Artificial Sequence; identical to SEQ ID NO: 22691
  Cyclic GFR-binding peptide
  MOD_RES (2)..(2): Xaa is C or S

SEQ ID NO: 99316 - protein, 42 aa, Artificial Sequence; identical to SEQ ID NO: 22693
  Cyclic GFR-binding peptide
  MOD_RES (2)..(36): Xaa is C or S

SEQ ID NO: 99317 - protein, 25 aa, Artificial Sequence
  Cyclic GFR-binding peptide
VIMSMEGIIKPTKGIMIQITINSLD

SEQ ID NO: 99318 - protein, 36 aa, Artificial Sequence
  Cyclic GFR-binding peptide
  MOD_RES (31)..(32): Xaa is C or S
DVVMGSMEGLIIQQKDNMIQMTINSMKTPTXXPGAS

SEQ ID NO: 99319 - protein, 31 aa, Artificial Sequence; identical to SEQ ID NO: 63033
  Cyclic GFR-binding peptide
  MOD_RES (29)..(30): Xaa is C or S

SEQ ID NO: 99320 - protein, 23 aa, Artificial Sequence
  Cyclic GFR-binding peptide
SMEGIFIPKKRVIEMIQVTINSL

SEQ ID NO: 99321 - protein, 40 aa, Artificial Sequence; identical to SEQ ID NO: 22698
  Cyclic GFR-binding peptide
  MOD_RES (1)..(3)..(37): Xaa is C or S

SEQ ID NO: 99322 - protein, 43 aa, Artificial Sequence; identical to SEQ ID NO: 22700
  Cyclic GFR-binding peptide
  MOD_RES (2)..(4)..(38): Xaa is C or S

SEQ ID NO: 99323 - protein, 24 aa, Artificial Sequence
  Cyclic GFR-binding peptide
SMEGLLLVRGNDMIQMTINSTKVP

SEQ ID NO: 99324 - protein, 34 aa, Artificial Sequence; identical to SEQ ID NO: 63043
  Cyclic GFR-binding peptide
  MOD_RES (2)..(33)..(34): Xaa is C or S

SEQ ID NO: 99325 - protein, 27 aa, Artificial Sequence
  Cyclic GFR-binding peptide
MNSMEGIIVNSSDDMIQVTINSLKTPA

SEQ ID NO: 99326 - protein, 31 aa, Artificial Sequence; identical to SEQ ID NO: 22701
  Cyclic GFR-binding peptide
  MOD_RES (1)..(1): Xaa is C or S

SEQ ID NO: 99327 - protein, 26 aa, Artificial Sequence
  Cyclic GFR-binding peptide
VVMNSMEGLIVNSSDDMIQVTINSLK

SEQ ID NO: 99328 - protein, 25 aa, Artificial Sequence
  Cyclic GFR-binding peptide
VIMSMEGIVKPKRGVMIQITINSLA

SEQ ID NO: 99329 - protein, 37 aa, Artificial Sequence
  Cyclic GFR-binding peptide
  MOD_RES (32)..(33): Xaa is C or S
AEVVMDSMEGIVVNNAADMIQITINSLRAPVXXSAPA

SEQ ID NO: 99330 - protein, 27 aa, Artificial Sequence
  Cyclic GFR-binding peptide
  MOD_RES (1)..(1): Xaa is C or S
XSRVVMNSMEGIIVNSSDDMIQVTINS

SEQ ID NO: 99331 - protein, 30 aa, Artificial Sequence; identical to SEQ ID NO: 66418
  Cyclic GFR-binding peptide
  MOD_RES (30)..(30): Xaa is C or S

SEQ ID NO: 99332 - protein, 29 aa, Artificial Sequence
  Cyclic GFR-binding peptide
  MOD_RES (1)..(3): Xaa is C or S
XGXSEVVMDSMEGLVVNNASDMIQITINS

SEQ ID NO: 99333 - protein, 28 aa, Artificial Sequence
  Cyclic GFR-binding peptide
VVMGSMEGIIIQQKDNMIQMTINSMKTP

SEQ ID NO: 99334 - protein, 40 aa, Artificial Sequence; identical to SEQ ID NO: 66426
  Cyclic GFR-binding peptide
  MOD_RES (1)..(3)..(35)..(36): Xaa is C or S

SEQ ID NO: 99335 - protein, 32 aa, Artificial Sequence; identical to SEQ ID NO: 22708
  Cyclic GFR-binding peptide

SEQ ID NO: 99336 - protein, 26 aa, Artificial Sequence
  Cyclic GFR-binding peptide
EEVIMSMEGILLVRGNDMIQMTINST

SEQ ID NO: 99337 - protein, 29 aa, Artificial Sequence
  Cyclic GFR-binding peptide
ALHDELTSMEGLFIPKKRVIEMIQVTINS

SEQ ID NO: 99338 - protein, 38 aa, Artificial Sequence; identical to SEQ ID NO: 22710
  Cyclic GFR-binding peptide
  MOD_RES (35)..(35): Xaa is C or S

SEQ ID NO: 99339 - protein, 32 aa, Artificial Sequence
  Cyclic GFR-binding peptide
  MOD_RES (29)..(30): Xaa is C or S
VIMSMEGILLVRGNDMIQMTINSTKVPAXXTS

SEQ ID NO: 99340 - protein, 35 aa, Artificial Sequence
  Cyclic GFR-binding peptide
  MOD_RES (1)..(33)..(34): Xaa is C or S
XRDVVMGSMEGIIIQQKDNMIQMTINSMKTPTXXP

SEQ ID NO: 99341 - protein, 39 aa, Artificial Sequence; identical to SEQ ID NO: 22724
  Cyclic GFR-binding peptide
  MOD_RES (2)..(4)..(38): Xaa is C or S

SEQ ID NO: 99342 - protein, 28 aa, Artificial Sequence
  Cyclic GFR-binding peptide
RDVVMGSMEGLIIQQKDNMIQMTINSMK

SEQ ID NO: 99343 - protein, 24 aa, Artificial Sequence
  Cyclic GFR-binding peptide
VVMNSMEGIIVNSSDDMIQVTINS

SEQ ID NO: 99344 - protein, 42 aa, Artificial Sequence; identical to SEQ ID NO: 22726
  Cyclic GFR-binding peptide
  MOD_RES (1)..(3)..(37): Xaa is C or S

SEQ ID NO: 99345 - protein, 33 aa, Artificial Sequence; identical to SEQ ID NO: 63073
  Cyclic GFR-binding peptide
  MOD_RES (2)..(33): Xaa is C or S

SEQ ID NO: 99346 - protein, 40 aa, Artificial Sequence; identical to SEQ ID NO: 22730
  Cyclic GFR-binding peptide
  MOD_RES (36)..(36): Xaa is C or S

SEQ ID NO: 99347 - protein, 31 aa, Artificial Sequence; identical to SEQ ID NO: 22731
  Cyclic GFR-binding peptide
  MOD_RES (1)..(3): Xaa is C or S

SEQ ID NO: 99348 - protein, 40 aa, Artificial Sequence; identical to SEQ ID NO: 22733
  Cyclic GFR-binding peptide
  MOD_RES (1)..(3)..(40): Xaa is C or S

SEQ ID NO: 99349 - protein, 41 aa, Artificial Sequence; identical to SEQ ID NO: 22734
  Cyclic GFR-binding peptide
  MOD_RES (2)..(4)..(41): Xaa is C or S

SEQ ID NO: 99350 - protein, 29 aa, Artificial Sequence
  Cyclic GFR-binding peptide
LTSMEGIFIPKKRVIEMIQVTINSLQVQT

SEQ ID NO: 99351 - protein, 31 aa, Artificial Sequence; identical to SEQ ID NO: 66438
  Cyclic GFR-binding peptide
  MOD_RES (26)..(27): Xaa is C or S

SEQ ID NO: 99352 - protein, 30 aa, Artificial Sequence; identical to SEQ ID NO: 22740
  Cyclic GFR-binding peptide

SEQ ID NO: 99353 - protein, 36 aa, Artificial Sequence; identical to SEQ ID NO: 22741
  Cyclic GFR-binding peptide
  MOD_RES (2)..(2): Xaa is C or S

SEQ ID NO: 99354 - protein, 23 aa, Artificial Sequence
  Cyclic GFR-binding peptide
SMEGIHQGQHPKIRMIQMTINSE

SEQ ID NO: 99355 - protein, 33 aa, Artificial Sequence; identical to SEQ ID NO: 22743
  Cyclic GFR-binding peptide
  MOD_RES (1)..(1): Xaa is C or S

SEQ ID NO: 99356 - protein, 30 aa, Artificial Sequence
  Cyclic GFR-binding peptide
  MOD_RES (26)..(27): Xaa is C or S
SMEGLIKPTKGIMIQITINSLDQSVXXPSA

SEQ ID NO: 99357 - protein, 41 aa, Artificial Sequence; identical to SEQ ID NO: 66443
  Cyclic GFR-binding peptide
  MOD_RES (2)..(4)..(35)..(36): Xaa is C or S

SEQ ID NO: 99358 - protein, 36 aa, Artificial Sequence; identical to SEQ ID NO: 66444
  Cyclic GFR-binding peptide
  MOD_RES (2)..(4)..(35)..(36): Xaa is C or S

SEQ ID NO: 99359 - protein, 25 aa, Artificial Sequence
  Cyclic GFR-binding peptide
SMEGIIVNSSDDMIQVTINSLKTPA

SEQ ID NO: 99360 - protein, 29 aa, Artificial Sequence
  Cyclic GFR-binding peptide
  MOD_RES (1)..(1): Xaa is C or S
XSEVVMDSMEGIVVNNASDMIQITINSLR

SEQ ID NO: 99361 - protein, 25 aa, Artificial Sequence
  Cyclic GFR-binding peptide
NSMEGLIVNSSDDMIQVTINSLKTP

SEQ ID NO: 99362 - protein, 24 aa, Artificial Sequence
  Cyclic GFR-binding peptide
VMDSMEGLVVNNAADMIQITINSL

SEQ ID NO: 99363 - protein, 28 aa, Artificial Sequence
  Cyclic GFR-binding peptide
EVIMSMEGLLLVRGNDMIQMTINSTKVP

SEQ ID NO: 99364 - protein, 39 aa, Artificial Sequence
  Cyclic GFR-binding peptide
  MOD_RES (1)..(3)..(35)..(36): Xaa is C or S
XGXRDVVMGSMEGIIIQQKDNMIQMTINSMKTPTXXPGA

SEQ ID NO: 99365 - protein, 28 aa, Artificial Sequence
  Cyclic GFR-binding peptide
VMDSMEGLVVNNASDMIQITINSLRTPV

SEQ ID NO: 99366 - protein, 32 aa, Artificial Sequence
  Cyclic GFR-binding peptide
  MOD_RES (2)..(4): Xaa is C or S
LXGXEEVIMSMEGILLVRGNDMIQMTINSTKV

SEQ ID NO: 99367 - protein, 33 aa, Artificial Sequence
  Cyclic GFR-binding peptide
  MOD_RES (29)..(30): Xaa is C or S
VMDSMEGLVVNNASDMIQITINSLRTPVXXTPP

SEQ ID NO: 99368 - protein, 28 aa, Artificial Sequence
  Cyclic GFR-binding peptide
KNHQLFSMEGLHQGQHPKIRMIQMTINS

SEQ ID NO: 99369 - protein, 30 aa, Artificial Sequence; identical to SEQ ID NO: 22759
  Cyclic GFR-binding peptide

SEQ ID NO: 99370 - protein, 25 aa, Artificial Sequence
  Cyclic GFR-binding peptide
SKVVMSMEGLVKPTRGVMIQITINS

SEQ ID NO: 99371 - protein, 28 aa, Artificial Sequence
  Cyclic GFR-binding peptide
LSMEGIHQGQHPKIRMIQMTINSQGTPV

SEQ ID NO: 99372 - protein, 33 aa, Artificial Sequence
  Cyclic GFR-binding peptide
  MOD_RES (29)..(30): Xaa is C or S
VMDSMEGIVVNNAADMIQITINSLRAPVXXSAP

SEQ ID NO: 99373 - protein, 26 aa, Artificial Sequence
  Cyclic GFR-binding peptide
  MOD_RES (26)..(26): Xaa is C or S
SMEGLIVNSSDDMIQVTINSLKTPAX

SEQ ID NO: 99374 - protein, 28 aa, Artificial Sequence
  Cyclic GFR-binding peptide
  MOD_RES (28)..(28): Xaa is C or S
MDSMEGIVVNNAADMIQITINSLRAPVX

SEQ ID NO: 99375 - protein, 33 aa, Artificial Sequence; identical to SEQ ID NO: 63098
  Cyclic GFR-binding peptide
  MOD_RES (28)..(29): Xaa is C or S

SEQ ID NO: 99376 - protein, 33 aa, Artificial Sequence; identical to SEQ ID NO: 22778
  Cyclic GFR-binding peptide
  MOD_RES (1)..(1): Xaa is C or S

SEQ ID NO: 99377 - protein, 39 aa, Artificial Sequence; identical to SEQ ID NO: 22779
  Cyclic GFR-binding peptide
  MOD_RES (2)..(36): Xaa is C or S

SEQ ID NO: 99378 - protein, 28 aa, Artificial Sequence
  Cyclic GFR-binding peptide
SMEGILKPKKRVYEMIQVTINSHHVRSP

SEQ ID NO: 99379 - protein, 28 aa, Artificial Sequence
  Cyclic GFR-binding peptide
RDVVMGSMEGIIIQQKDNMIQMTINSMK

SEQ ID NO: 99380 - protein, 40 aa, Artificial Sequence
  Cyclic GFR-binding peptide
  MOD_RES (2)..(34)..(35): Xaa is C or S
GXAEVVMDSMEGIVVNNAADMIQITINSLRAPVXXSAPAA

SEQ ID NO: 99381 - protein, 33 aa, Artificial Sequence; identical to SEQ ID NO: 22781
  Cyclic GFR-binding peptide

SEQ ID NO: 99382 - protein, 29 aa, Artificial Sequence
  Cyclic GFR-binding peptide
  MOD_RES (27)..(28): Xaa is C or S
MSMEGIVKPKRGVMIQITINSLAQPVXXP

SEQ ID NO: 99383 - protein, 38 aa, Artificial Sequence; identical to SEQ ID NO: 22787
  Cyclic GFR-binding peptide
  MOD_RES (33)..(33): Xaa is C or S

SEQ ID NO: 99384 - protein, 27 aa, Artificial Sequence
  Cyclic GFR-binding peptide
SEVVMDSMEGIVVNNASDMIQITINSL

SEQ ID NO: 99385 - protein, 30 aa, Artificial Sequence
  Cyclic GFR-binding peptide
  MOD_RES (2)..(2): Xaa is C or S
KXSKVVMSMEGLVKPTRGVMIQITINSLDQ

SEQ ID NO: 99386 - protein, 32 aa, Artificial Sequence
  Cyclic GFR-binding peptide
  MOD_RES (2)..(4): Xaa is C or S
SXKXSRVIMSMEGLVKPKRGVMIQITINSLAQ

SEQ ID NO: 99387 - protein, 34 aa, Artificial Sequence
  Cyclic GFR-binding peptide
  MOD_RES (28)..(29): Xaa is C or S
IMSMEGLLLVRGNDMIQMTINSTKVPAXXTSPVR

SEQ ID NO: 99388 - protein, 37 aa, Artificial Sequence
  Cyclic GFR-binding peptide
  MOD_RES (2)..(4)..(35)..(36): Xaa is C or S
LXGXEEVIMSMEGLLLVRGNDMIQMTINSTKVPAXXT

SEQ ID NO: 99389 - protein, 37 aa, Artificial Sequence
  Cyclic GFR-binding peptide
  MOD_RES (31)..(32): Xaa is C or S
EEVIMSMEGILLVRGNDMIQMTINSTKVPAXXTSPVR

SEQ ID NO: 99390 - protein, 30 aa, Artificial Sequence
  Cyclic GFR-binding peptide
  MOD_RES (2)..(2): Xaa is C or S
GXAEVVMDSMEGIVVNNAADMIQITINSLR

SEQ ID NO: 99391 - protein, 23 aa, Artificial Sequence
  Cyclic GFR-binding peptide
DSMEGIVVNNAADMIQITINSLR

SEQ ID NO: 99392 - protein, 35 aa, Artificial Sequence
  Cyclic GFR-binding peptide
  MOD_RES (30)..(31): Xaa is C or S
VVMGSMEGLIIQQKDNMIQMTINSMKTPTXXPGAS

SEQ ID NO: 99393 - protein, 36 aa, Artificial Sequence; identical to SEQ ID NO: 22796
  Cyclic GFR-binding peptide
  MOD_RES (33)..(33): Xaa is C or S

SEQ ID NO: 99394 - protein, 37 aa, Artificial Sequence; identical to SEQ ID NO: 22799
  Cyclic GFR-binding peptide
  MOD_RES (2)..(4): Xaa is C or S

SEQ ID NO: 99395 - protein, 42 aa, Artificial Sequence; identical to SEQ ID NO: 22800
  Cyclic GFR-binding peptide
  MOD_RES (2)..(4)..(38): Xaa is C or S

SEQ ID NO: 99396 - protein, 37 aa, Artificial Sequence; identical to SEQ ID NO: 66481
  Cyclic GFR-binding peptide
  MOD_RES (1)..(32)..(33): Xaa is C or S

SEQ ID NO: 99397 - protein, 29 aa, Artificial Sequence
  Cyclic GFR-binding peptide
VVMNSMEGLIVNSSDDMIQVTINSLKTPA

SEQ ID NO: 99398 - protein, 27 aa, Artificial Sequence
  Cyclic GFR-binding peptide
HDELTSMEGIFIPKKRVIEMIQVTINS

SEQ ID NO: 99399 - protein, 37 aa, Artificial Sequence
  Cyclic GFR-binding peptide
  MOD_RES (2)..(34)..(35): Xaa is C or S
GXRDVVMGSMEGLIIQQKDNMIQMTINSMKTPTXXPG

SEQ ID NO: 99400 - protein, 34 aa, Artificial Sequence
  Cyclic GFR-binding peptide
  MOD_RES (31)..(32): Xaa is C or S
DVVMGSMEGLIIQQKDNMIQMTINSMKTPTXXPG

SEQ ID NO: 99401 - protein, 33 aa, Artificial Sequence; identical to SEQ ID NO: 22803
  Cyclic GFR-binding peptide
  MOD_RES (30)..(30): Xaa is C or S

SEQ ID NO: 99402 - protein, 32 aa, Artificial Sequence; identical to SEQ ID NO: 22805
  Cyclic GFR-binding peptide

SEQ ID NO: 99403 - protein, 35 aa, Artificial Sequence
  Cyclic GFR-binding peptide
  MOD_RES (1)..(3)..(34)..(35): Xaa is C or S
XKXSRVIMSMEGLVKPKRGVMIQITINSLAQPVXX

SEQ ID NO: 99404 - protein, 20 aa, Artificial Sequence
  Cyclic GFR-binding peptide
SMEGLVVNNAADMIQITINS

SEQ ID NO: 99405 - protein, 33 aa, Artificial Sequence; identical to SEQ ID NO: 22806
  Cyclic GFR-binding peptide
  MOD_RES (2)..(2): Xaa is C or S

SEQ ID NO: 99406 - protein, 30 aa, Artificial Sequence
  Cyclic GFR-binding peptide
  MOD_RES (2)..(4): Xaa is C or S
LXGXEEVIMSMEGLLLVRGNDMIQMTINST

SEQ ID NO: 99407 - protein, 26 aa, Artificial Sequence
  Cyclic GFR-binding peptide
SMEGIHQGQHPKIRMIQMTINSEETP

SEQ ID NO: 99408 - protein, 23 aa, Artificial Sequence
  Cyclic GFR-binding peptide
SMEGIIIQQKDNMIQMTINSMKT

SEQ ID NO: 99409 - protein, 38 aa, Artificial Sequence
  Cyclic GFR-binding peptide
  MOD_RES (2)..(4)..(35)..(36): Xaa is C or S
SXKXSKVIMSMEGLIKPTKGIMIQITINSLDQSVXXPS

SEQ ID NO: 99410 - protein, 21 aa, Artificial Sequence
  Cyclic GFR-binding peptide
SMEGLVVNNAADMIQITINSL

SEQ ID NO: 99411 - protein, 38 aa, Artificial Sequence
  Cyclic GFR-binding peptide
  MOD_RES (2)..(34)..(35): Xaa is C or S
GXRDVVMGSMEGLIIQQKDNMIQMTINSMKTPTXXPGA

SEQ ID NO: 99412 - protein, 25 aa, Artificial Sequence
  Cyclic GFR-binding peptide
MDSMEGLVVNNAADMIQITINSLRA

SEQ ID NO: 99413 - protein, 39 aa, Artificial Sequence
  Cyclic GFR-binding peptide
  MOD_RES (1)..(33)..(34): Xaa is C or S
XSRVVMNSMEGLIVNSSDDMIQVTINSLKTPAXXPKPVH

SEQ ID NO: 99414 - protein, 35 aa, Artificial Sequence
  Cyclic GFR-binding peptide
  MOD_RES (29)..(30): Xaa is C or S
VIMSMEGILLVRGNDMIQMTINSTKVPAXXTSPVR

SEQ ID NO: 99415 - protein, 40 aa, Artificial Sequence; identical to SEQ ID NO: 22813
  Cyclic GFR-binding peptide
  MOD_RES (37)..(37): Xaa is C or S

SEQ ID NO: 99416 - protein, 27 aa, Artificial Sequence
  Cyclic GFR-binding peptide
MGSMEGLIIQQKDNMIQMTINSMKTPT

SEQ ID NO: 99417 - protein, 32 aa, Artificial Sequence
  Cyclic GFR-binding peptide
  MOD_RES (2)..(2): Xaa is C or S
GXAEVVMDSMEGIVVNNAADMIQITINSLRAP

SEQ ID NO: 99418 - protein, 30 aa, Artificial Sequence
  Cyclic GFR-binding peptide
  MOD_RES (28)..(29): Xaa is C or S
MNSMEGLIVNSSDDMIQVTINSLKTPAXXP

SEQ ID NO: 99419 - protein, 34 aa, Artificial Sequence
  Cyclic GFR-binding peptide
  MOD_RES (1)..(32)..(33): Xaa is C or S
XEEVIMSMEGLLLVRGNDMIQMTINSTKVPAXXT

SEQ ID NO: 99420 - protein, 33 aa, Artificial Sequence; identical to SEQ ID NO: 22821
  Cyclic GFR-binding peptide
  MOD_RES (33)..(33): Xaa is C or S

SEQ ID NO: 99421 - protein, 36 aa, Artificial Sequence
  Cyclic GFR-binding peptide
  MOD_RES (1)..(32)..(33): Xaa is C or S
XSKVIMSMEGLIKPTKGIMIQITINSLDQSVXXPSA

SEQ ID NO: 99422 - protein, 27 aa, Artificial Sequence
  Cyclic GFR-binding peptide
VIMSMEGILLVRGNDMIQMTINSTKVP

SEQ ID NO: 99423 - protein, 34 aa, Artificial Sequence; identical to SEQ ID NO: 22825
  Cyclic GFR-binding peptide
  MOD_RES (30)..(30): Xaa is C or S

SEQ ID NO: 99424 - protein, 30 aa, Artificial Sequence
  Cyclic GFR-binding peptide
  MOD_RES (29)..(30): Xaa is C or S
VMGSMEGLIIQQKDNMIQMTINSMKTPTXX

SEQ ID NO: 99425 - protein, 29 aa, Artificial Sequence
  Cyclic GFR-binding peptide
RVVMNSMEGLIVNSSDDMIQVTINSLKTP

SEQ ID NO: 99426 - protein, 27 aa, Artificial Sequence
  Cyclic GFR-binding peptide
EELSMEGIHQGQHPKIRMIQMTINSQG

SEQ ID NO: 99427 - protein, 32 aa, Artificial Sequence; identical to SEQ ID NO: 22830
  Cyclic GFR-binding peptide

SEQ ID NO: 99428 - protein, 23 aa, Artificial Sequence
  Cyclic GFR-binding peptide
MGSMEGIIIQQKDNMIQMTINSM

SEQ ID NO: 99429 - protein, 40 aa, Artificial Sequence
  Cyclic GFR-binding peptide
  MOD_RES (2)..(4)..(36)..(37): Xaa is C or S
HXGXSRVVMNSMEGLIVNSSDDMIQVTINSLKTPAXXPKP

SEQ ID NO: 99430 - protein, 35 aa, Artificial Sequence
  Cyclic GFR-binding peptide
  MOD_RES (29)..(30): Xaa is C or S
VMDSMEGLVVNNAADMIQITINSLRAPVXXSAPAA

SEQ ID NO: 99431 - protein, 36 aa, Artificial Sequence
  Cyclic GFR-binding peptide
  MOD_RES (30)..(31): Xaa is C or S
VVMDSMEGIVVNNAADMIQITINSLRAPVXXSAPAA

SEQ ID NO: 99432 - protein, 32 aa, Artificial Sequence
  Cyclic GFR-binding peptide
  MOD_RES (31)..(32): Xaa is C or S
EVVMDSMEGIVVNNAADMIQITINSLRAPVXX

SEQ ID NO: 99433 - protein, 24 aa, Artificial Sequence
  Cyclic GFR-binding peptide
SMEGILLVRGNDMIQMTINSTKVP

SEQ ID NO: 99434 - protein, 31 aa, Artificial Sequence
  Cyclic GFR-binding peptide
  MOD_RES (1)..(3): Xaa is C or S
XGXSRVVMNSMEGLIVNSSDDMIQVTINSLK

SEQ ID NO: 99435 - protein, 31 aa, Artificial Sequence; identical to SEQ ID NO: 22841
  Cyclic GFR-binding peptide

SEQ ID NO: 99436 - protein, 36 aa, Artificial Sequence
  Cyclic GFR-binding peptide
  MOD_RES (2)..(4)..(36): Xaa is C or S
SXGXRDVVMGSMEGIIIQQKDNMIQMTINSMKTPTX

SEQ ID NO: 99437 - protein, 31 aa, Artificial Sequence; identical to SEQ ID NO: 22845
  Cyclic GFR-binding peptide

SEQ ID NO: 99438 - protein, 30 aa, Artificial Sequence; identical to SEQ ID NO: 66517
  Cyclic GFR-binding peptide
  MOD_RES (27)..(28): Xaa is C or S

SEQ ID NO: 99439 - protein, 34 aa, Artificial Sequence
  Cyclic GFR-binding peptide
  MOD_RES (31)..(32): Xaa is C or S
SKVVMSMEGLVKPTRGVMIQITINSLDQPVXXPS

SEQ ID NO: 99440 - protein, 36 aa, Artificial Sequence; identical to SEQ ID NO: 63169
  Cyclic GFR-binding peptide
  MOD_RES (2)..(33)..(34): Xaa is C or S

SEQ ID NO: 99441 - protein, 41 aa, Artificial Sequence; identical to SEQ ID NO: 22849
  Cyclic GFR-binding peptide
  MOD_RES (37)..(37): Xaa is C or S

SEQ ID NO: 99442 - protein, 27 aa, Artificial Sequence
  Cyclic GFR-binding peptide
  MOD_RES (27)..(27): Xaa is C or S
MSMEGIVKPKRGVMIQITINSLAQPVX

SEQ ID NO: 99443 - protein, 30 aa, Artificial Sequence
  Cyclic GFR-binding peptide
SKVIMSMEGLIKPTKGIMIQITINSLDQSV

SEQ ID NO: 99444 - protein, 26 aa, Artificial Sequence
  Cyclic GFR-binding peptide
  MOD_RES (26)..(26): Xaa is C or S
SMEGLLLVRGNDMIQMTINSTKVPAX

SEQ ID NO: 99445 - protein, 29 aa, Artificial Sequence
  Cyclic GFR-binding peptide
  MOD_RES (1)..(1): Xaa is C or S
XAEVVMDSMEGLVVNNAADMIQITINSLR

SEQ ID NO: 99446 - protein, 27 aa, Artificial Sequence
  Cyclic GFR-binding peptide
VIMSMEGLLLVRGNDMIQMTINSTKVP

SEQ ID NO: 99447 - protein, 34 aa, Artificial Sequence; identical to SEQ ID NO: 22853
  Cyclic GFR-binding peptide
  MOD_RES (31)..(31): Xaa is C or S

SEQ ID NO: 99448 - protein, 28 aa, Artificial Sequence
  Cyclic GFR-binding peptide
  MOD_RES (2)..(2): Xaa is C or S
KXSKVIMSMEGLIKPTKGIMIQITINSL

SEQ ID NO: 99449 - protein, 28 aa, Artificial Sequence
  Cyclic GFR-binding peptide
  MOD_RES (27)..(28): Xaa is C or S
MSMEGIVKPKRGVMIQITINSLAQPVXX

SEQ ID NO: 99450 - protein, 29 aa, Artificial Sequence
  Cyclic GFR-binding peptide
  MOD_RES (1)..(3): Xaa is C or S
XGXSEVVMDSMEGIVVNNASDMIQITINS

SEQ ID NO: 99451 - protein, 30 aa, Artificial Sequence
  Cyclic GFR-binding peptide
  MOD_RES (1)..(3): Xaa is C or S
XGXSEVVMDSMEGIVVNNASDMIQITINSL

SEQ ID NO: 99452 - protein, 29 aa, Artificial Sequence
  Cyclic GFR-binding peptide
  MOD_RES (1)..(1): Xaa is C or S
XAEVVMDSMEGIVVNNAADMIQITINSLR

SEQ ID NO: 99453 - protein, 28 aa, Artificial Sequence
  Cyclic GFR-binding peptide
  MOD_RES (1)..(3): Xaa is C or S
XKXSKVIMSMEGIIKPTKGIMIQITINS

SEQ ID NO: 99454 - protein, 35 aa, Artificial Sequence
  Cyclic GFR-binding peptide
  MOD_RES (31)..(32): Xaa is C or S
SRVIMSMEGLVKPKRGVMIQITINSLAQPVXXPAA

SEQ ID NO: 99455 - protein, 42 aa, Artificial Sequence; identical to SEQ ID NO: 22858
  Cyclic GFR-binding peptide
  MOD_RES (1)..(3)..(40): Xaa is C or S

SEQ ID NO: 99456 - protein, 38 aa, Artificial Sequence
  Cyclic GFR-binding peptide
  MOD_RES (32)..(33): Xaa is C or S
SRVVMNSMEGIIVNSSDDMIQVTINSLKTPAXXPKPVH

SEQ ID NO: 99457 - protein, 30 aa, Artificial Sequence
  Cyclic GFR-binding peptide
DVVMGSMEGIIIQQKDNMIQMTINSMKTPT

SEQ ID NO: 99458 - protein, 29 aa, Artificial Sequence
  Cyclic GFR-binding peptide
  MOD_RES (27)..(28): Xaa is C or S
MSMEGLIKPTKGIMIQITINSLDQSVXXP

SEQ ID NO: 99459 - protein, 34 aa, Artificial Sequence; identical to SEQ ID NO: 22863
  Cyclic GFR-binding peptide
  MOD_RES (30)..(30): Xaa is C or S

SEQ ID NO: 99460 - protein, 26 aa, Artificial Sequence
  Cyclic GFR-binding peptide
EVVMDSMEGLVVNNAADMIQITINSL

SEQ ID NO: 99461 - protein, 28 aa, Artificial Sequence
  Cyclic GFR-binding peptide
  MOD_RES (2)..(2): Xaa is C or S
KXSKVIMSMEGIIKPTKGIMIQITINSL

SEQ ID NO: 99462 - protein, 29 aa, Artificial Sequence
  Cyclic GFR-binding peptide
  MOD_RES (27)..(28): Xaa is C or S
NSMEGIIVNSSDDMIQVTINSLKTPAXXP

SEQ ID NO: 99463 - protein, 30 aa, Artificial Sequence
  Cyclic GFR-binding peptide
  MOD_RES (1)..(1): Xaa is C or S
XRDVVMGSMEGIIIQQKDNMIQMTINSMKT

SEQ ID NO: 99464 - protein, 32 aa, Artificial Sequence
  Cyclic GFR-binding peptide
  MOD_RES (30)..(31): Xaa is C or S
VVMGSMEGIIIQQKDNMIQMTINSMKTPTXXP

SEQ ID NO: 99465 - protein, 26 aa, Artificial Sequence
  Cyclic GFR-binding peptide
VMSMEGIVKPTRGVMIQITINSLDQP

SEQ ID NO: 99466 - protein, 35 aa, Artificial Sequence
  Cyclic GFR-binding peptide
  MOD_RES (1)..(3)..(35): Xaa is C or S
XGXAEVVMDSMEGIVVNNAADMIQITINSLRAPVX

SEQ ID NO: 99467 - protein, 33 aa, Artificial Sequence; identical to SEQ ID NO: 22868
  Cyclic GFR-binding peptide
  MOD_RES (1)..(1): Xaa is C or S

SEQ ID NO: 99468 - protein, 37 aa, Artificial Sequence; identical to SEQ ID NO: 22870
  Cyclic GFR-binding peptide
  MOD_RES (34)..(34): Xaa is C or S

SEQ ID NO: 99469 - protein, 32 aa, Artificial Sequence; identical to SEQ ID NO: 66538
  Cyclic GFR-binding peptide
  MOD_RES (1)..(3): Xaa is C or S

SEQ ID NO: 99470 - protein, 36 aa, Artificial Sequence
  Cyclic GFR-binding peptide
  MOD_RES (31)..(32): Xaa is C or S
EVVMDSMEGLVVNNAADMIQITINSLRAPVXXSAPA

SEQ ID NO: 99471 - protein, 36 aa, Artificial Sequence; identical to SEQ ID NO: 22872
  Cyclic GFR-binding peptide
  MOD_RES (35)..(35): Xaa is C or S

SEQ ID NO: 99472 - protein, 31 aa, Artificial Sequence; identical to SEQ ID NO: 22873
  Cyclic GFR-binding peptide

SEQ ID NO: 99473 - protein, 42 aa, Artificial Sequence
  Cyclic GFR-binding peptide
  MOD_RES (2)..(4)..(36)..(37): Xaa is C or S
RXGXAEVVMDSMEGLVVNNAADMIQITINSLRAPVXXSAPAA

SEQ ID NO: 99474 - protein, 33 aa, Artificial Sequence
  Cyclic GFR-binding peptide
  MOD_RES (28)..(29): Xaa is C or S
MDSMEGIVVNNAADMIQITINSLRAPVXXSAPA

SEQ ID NO: 99475 - protein, 30 aa, Artificial Sequence; identical to SEQ ID NO: 22877
  Cyclic GFR-binding peptide

SEQ ID NO: 99476 - protein, 24 aa, Artificial Sequence
  Cyclic GFR-binding peptide
VMSMEGIVKPTRGVMIQITINSLD

SEQ ID NO: 99477 - protein, 32 aa, Artificial Sequence
  Cyclic GFR-binding peptide
  MOD_RES (26)..(27): Xaa is C or S
SMEGLIIQQKDNMIQMTINSMKTPTXXPGASG

SEQ ID NO: 99478 - protein, 29 aa, Artificial Sequence
  Cyclic GFR-binding peptide
  MOD_RES (28)..(29): Xaa is C or S
VMSMEGIVKPTRGVMIQITINSLDQPVXX

SEQ ID NO: 99479 - protein, 38 aa, Artificial Sequence; identical to SEQ ID NO: 22880
  Cyclic GFR-binding peptide
  MOD_RES (2)..(4)..(38): Xaa is C or S

SEQ ID NO: 99480 - protein, 31 aa, Artificial Sequence
  Cyclic GFR-binding peptide
  MOD_RES (29)..(30): Xaa is C or S
VIMSMEGILLVRGNDMIQMTINSTKVPAXXT

SEQ ID NO: 99481 - protein, 39 aa, Artificial Sequence; identical to SEQ ID NO: 22885
  Cyclic GFR-binding peptide
  MOD_RES (2)..(36): Xaa is C or S

SEQ ID NO: 99482 - protein, 30 aa, Artificial Sequence; identical to SEQ ID NO: 63212
  Cyclic GFR-binding peptide
  MOD_RES (2)..(2): Xaa is C or S

SEQ ID NO: 99483 - protein, 25 aa, Artificial Sequence
  Cyclic GFR-binding peptide
IMSMEGLIKPTKGIMIQITINSLDQ

SEQ ID NO: 99484 - protein, 43 aa, Artificial Sequence; identical to SEQ ID NO: 22886
  Cyclic GFR-binding peptide
  MOD_RES (2)..(4)..(41): Xaa is C or S

SEQ ID NO: 99485 - protein, 32 aa, Artificial Sequence
  Cyclic GFR-binding peptide
  MOD_RES (26)..(27): Xaa is C or S
SMEGLVVNNASDMIQITINSLRTPVXXTPPTS

SEQ ID NO: 99486 - protein, 36 aa, Artificial Sequence; identical to SEQ ID NO: 22887
  Cyclic GFR-binding peptide
  MOD_RES (1)..(35): Xaa is C or S

SEQ ID NO: 99487 - protein, 42 aa, Artificial Sequence; identical to SEQ ID NO: 22890
  Cyclic GFR-binding peptide
  MOD_RES (2)..(4)..(38): Xaa is C or S

SEQ ID NO: 99488 - protein, 36 aa, Artificial Sequence; identical to SEQ ID NO: 63218
  Cyclic GFR-binding peptide
  MOD_RES (30)..(31): Xaa is C or S

SEQ ID NO: 99489 - protein, 30 aa, Artificial Sequence
  Cyclic GFR-binding peptide
  MOD_RES (27)..(28): Xaa is C or S
DSMEGIVVNNASDMIQITINSLRTPVXXTP

SEQ ID NO: 99490 - protein, 38 aa, Artificial Sequence
  Cyclic GFR-binding peptide
  MOD_RES (1)..(32)..(33): Xaa is C or S
XEEVIMSMEGILLVRGNDMIQMTINSTKVPAXXTSPVR

SEQ ID NO: 99491 - protein, 27 aa, Artificial Sequence
  Cyclic GFR-binding peptide
VMDSMEGIVVNNASDMIQITINSLRTP

SEQ ID NO: 99492 - protein, 31 aa, Artificial Sequence
  Cyclic GFR-binding peptide
  MOD_RES (1)..(1): Xaa is C or S
XSKVIMSMEGLIKPTKGIMIQITINSLDQSV

SEQ ID NO: 99493 - protein, 28 aa, Artificial Sequence
  Cyclic GFR-binding peptide
  MOD_RES (26)..(27): Xaa is C or S
SMEGIIIQQKDNMIQMTINSMKTPTXXP

SEQ ID NO: 99494 - protein, 31 aa, Artificial Sequence; identical to SEQ ID NO: 22900
  Cyclic GFR-binding peptide

SEQ ID NO: 99495 - protein, 36 aa, Artificial Sequence; identical to SEQ ID NO: 22903
  Cyclic GFR-binding peptide
  MOD_RES (2)..(4): Xaa is C or S

SEQ ID NO: 99496 - protein, 31 aa, Artificial Sequence
  Cyclic GFR-binding peptide
  MOD_RES (28)..(29): Xaa is C or S
MGSMEGIIIQQKDNMIQMTINSMKTPTXXPG

SEQ ID NO: 99497 - protein, 29 aa, Artificial Sequence
  Cyclic GFR-binding peptide
  MOD_RES (27)..(28): Xaa is C or S
GSMEGLIIQQKDNMIQMTINSMKTPTXXP

SEQ ID NO: 99498 - protein, 22 aa, Artificial Sequence
  Cyclic GFR-binding peptide
MNSMEGLIVNSSDDMIQVTINS

SEQ ID NO: 99499 - protein, 21 aa, Artificial Sequence
  Cyclic GFR-binding peptide
SMEGIVVNNAADMIQITINSL

SEQ ID NO: 99500 - protein, 32 aa, Artificial Sequence; identical to SEQ ID NO: 66585
  Cyclic GFR-binding peptide
  MOD_RES (28)..(29): Xaa is C or S

SEQ ID NO: 99501 - protein, 24 aa, Artificial Sequence
  Cyclic GFR-binding peptide
SMEGIVVNNAADMIQITINSLRAP

SEQ ID NO: 99502 - protein, 32 aa, Artificial Sequence; identical to SEQ ID NO: 22918
  Cyclic GFR-binding peptide
  MOD_RES (31)..(31): Xaa is C or S

SEQ ID NO: 99503 - protein, 38 aa, Artificial Sequence
  Cyclic GFR-binding peptide
  MOD_RES (2)..(4)..(35)..(36): Xaa is C or S
SXKXSRVIMSMEGLVKPKRGVMIQITINSLAQPVXXPA

SEQ ID NO: 99504 - protein, 28 aa, Artificial Sequence
  Cyclic GFR-binding peptide
  MOD_RES (27)..(28): Xaa is C or S
MSMEGILLVRGNDMIQMTINSTKVPAXX

SEQ ID NO: 99505 - protein, 33 aa, Artificial Sequence; identical to SEQ ID NO: 22922
  Cyclic GFR-binding peptide
  MOD_RES (28)..(28): Xaa is C or S

SEQ ID NO: 99506 - protein, 38 aa, Artificial Sequence; identical to SEQ ID NO: 22924
  Cyclic GFR-binding peptide
  MOD_RES (32)..(32): Xaa is C or S

SEQ ID NO: 99507 - protein, 29 aa, Artificial Sequence
  Cyclic GFR-binding peptide
KVIMSMEGLIKPTKGIMIQITINSLDQSV

SEQ ID NO: 99508 - protein, 33 aa, Artificial Sequence
  Cyclic GFR-binding peptide
  MOD_RES (28)..(29): Xaa is C or S
MDSMEGLVVNNASDMIQITINSLRTPVXXTPPT

SEQ ID NO: 99509 - protein, 23 aa, Artificial Sequence
  Cyclic GFR-binding peptide
VMGSMEGLIIQQKDNMIQMTINS

SEQ ID NO: 99510 - protein, 29 aa, Artificial Sequence
  Cyclic GFR-binding peptide
RSMEGILKPKKRVYEMIQVTINSHHVRSP

SEQ ID NO: 99511 - protein, 36 aa, Artificial Sequence
  Cyclic GFR-binding peptide
  MOD_RES (2)..(33)..(34): Xaa is C or S
KXSKVVMSMEGLVKPTRGVMIQITINSLDQPVXXPS

SEQ ID NO: 99512 - protein, 26 aa, Artificial Sequence
  Cyclic GFR-binding peptide
  MOD_RES (26)..(26): Xaa is C or S
SMEGIIVNSSDDMIQVTINSLKTPAX

SEQ ID NO: 99513 - protein, 33 aa, Artificial Sequence; identical to SEQ ID NO: 22934
  Cyclic GFR-binding peptide
  MOD_RES (1)..(3): Xaa is C or S

SEQ ID NO: 99514 - protein, 37 aa, Artificial Sequence
  Cyclic GFR-binding peptide
  MOD_RES (31)..(32): Xaa is C or S
EVVMDSMEGIVVNNAADMIQITINSLRAPVXXSAPAA

SEQ ID NO: 99515 - protein, 33 aa, Artificial Sequence
  Cyclic GFR-binding peptide
  MOD_RES (2)..(2): Xaa is C or S
GXSRVVMNSMEGLIVNSSDDMIQVTINSLKTPA

SEQ ID NO: 99516 - protein, 34 aa, Artificial Sequence
  Cyclic GFR-binding peptide
  MOD_RES (1)..(3): Xaa is C or S
XGXSEVVMDSMEGIVVNNASDMIQITINSLRTPV

SEQ ID NO: 99517 - protein, 37 aa, Artificial Sequence; identical to SEQ ID NO: 22939
  Cyclic GFR-binding peptide
  MOD_RES (32)..(32): Xaa is C or S

SEQ ID NO: 99518 - protein, 33 aa, Artificial Sequence; identical to SEQ ID NO: 22941
  Cyclic GFR-binding peptide

SEQ ID NO: 99519 - protein, 28 aa, Artificial Sequence
  Cyclic GFR-binding peptide
  MOD_RES (28)..(28): Xaa is C or S
MGSMEGLIIQQKDNMIQMTINSMKTPTX

SEQ ID NO: 99520 - protein, 25 aa, Artificial Sequence
  Cyclic GFR-binding peptide
IMSMEGILLVRGNDMIQMTINSTKV

SEQ ID NO: 99521 - protein, 29 aa, Artificial Sequence
  Cyclic GFR-binding peptide
  MOD_RES (29)..(29): Xaa is C or S
VMDSMEGIVVNNAADMIQITINSLRAPVX

SEQ ID NO: 99522 - protein, 37 aa, Artificial Sequence; identical to SEQ ID NO: 66623
  Cyclic GFR-binding peptide
  MOD_RES (2)..(4)..(35)..(36): Xaa is C or S

SEQ ID NO: 99523 - protein, 36 aa, Artificial Sequence; identical to SEQ ID NO: 22942
  Cyclic GFR-binding peptide
  MOD_RES (34)..(34): Xaa is C or S

SEQ ID NO: 99524 - protein, 37 aa, Artificial Sequence
  Cyclic GFR-binding peptide
  MOD_RES (1)..(3)..(34)..(35): Xaa is C or S
XGXEEVIMSMEGILLVRGNDMIQMTINSTKVPAXXTS

SEQ ID NO: 99525 - protein, 29 aa, Artificial Sequence
  Cyclic GFR-binding peptide
  MOD_RES (26)..(27): Xaa is C or S
SMEGIIVNSSDDMIQVTINSLKTPAXXPK

SEQ ID NO: 99526 - protein, 33 aa, Artificial Sequence
  Cyclic GFR-binding peptide
  MOD_RES (2)..(4): Xaa is C or S
SXKXSKVVMSMEGLVKPTRGVMIQITINSLDQP

SEQ ID NO: 99527 - protein, 39 aa, Artificial Sequence; identical to SEQ ID NO: 22945
  Cyclic GFR-binding peptide
  MOD_RES (34)..(34): Xaa is C or S

SEQ ID NO: 99528 - protein, 27 aa, Artificial Sequence
  Cyclic GFR-binding peptide
EVVMDSMEGIVVNNASDMIQITINSLR

SEQ ID NO: 99529 - protein, 40 aa, Artificial Sequence; identical to SEQ ID NO: 22948
  Cyclic GFR-binding peptide
  MOD_RES (1)..(3)..(40): Xaa is C or S

SEQ ID NO: 99530 - protein, 29 aa, Artificial Sequence
  Cyclic GFR-binding peptide
  MOD_RES (29)..(29): Xaa is C or S
FSMEGIHQGQHPKIRMIQMTINSEETPVX

SEQ ID NO: 99531 - protein, 33 aa, Artificial Sequence; identical to SEQ ID NO: 22955
  Cyclic GFR-binding peptide

SEQ ID NO: 99532 - protein, 29 aa, Artificial Sequence
  Cyclic GFR-binding peptide
EVVMDSMEGIVVNNASDMIQITINSLRTP

SEQ ID NO: 99533 - protein, 33 aa, Artificial Sequence; identical to SEQ ID NO: 22957
  Cyclic GFR-binding peptide
  MOD_RES (1)..(1): Xaa is C or S

SEQ ID NO: 99534 - protein, 36 aa, Artificial Sequence
  Cyclic GFR-binding peptide
  MOD_RES (2)..(33)..(34): Xaa is C or S
KXSKVIMSMEGLIKPTKGIMIQITINSLDQSVXXPS

SEQ ID NO: 99535 - protein, 31 aa, Artificial Sequence
  Cyclic GFR-binding peptide
  MOD_RES (26)..(27): Xaa is C or S
SMEGLVVNNAADMIQITINSLRAPVXXSAPA

SEQ ID NO: 99536 - protein, 33 aa, Artificial Sequence; identical to SEQ ID NO: 66635
  Cyclic GFR-binding peptide
  MOD_RES (2)..(2): Xaa is C or S

SEQ ID NO: 99537 - protein, 32 aa, Artificial Sequence
  Cyclic GFR-binding peptide
  MOD_RES (2)..(4): Xaa is C or S
SXGXRDVVMGSMEGLIIQQKDNMIQMTINSMK

SEQ ID NO: 99538 - protein, 26 aa, Artificial Sequence
  Cyclic GFR-binding peptide
HEELSMEGIHQGQHPKIRMIQMTINS

SEQ ID NO: 99539 - protein, 30 aa, Artificial Sequence; identical to SEQ ID NO: 22966
  Cyclic GFR-binding peptide

SEQ ID NO: 99540 - protein, 31 aa, Artificial Sequence; identical to SEQ ID NO: 63279
  Cyclic GFR-binding peptide
  MOD_RES (27)..(28): Xaa is C or S

SEQ ID NO: 99541 - protein, 35 aa, Artificial Sequence
  Cyclic GFR-binding peptide
  MOD_RES (31)..(32): Xaa is C or S
DVVMGSMEGIIIQQKDNMIQMTINSMKTPTXXPGA

SEQ ID NO: 99542 - protein, 21 aa, Artificial Sequence
  Cyclic GFR-binding peptide
DSMEGLVVNNAADMIQITINS

SEQ ID NO: 99543 - protein, 31 aa, Artificial Sequence
  Cyclic GFR-binding peptide
SEVVMDSMEGLVVNNASDMIQITINSLRTPV

SEQ ID NO: 99544 - protein, 32 aa, Artificial Sequence; identical to SEQ ID NO: 63280
  Cyclic GFR-binding peptide
  MOD_RES (28)..(29): Xaa is C or S

SEQ ID NO: 99545 - protein, 26 aa, Artificial Sequence
  Cyclic GFR-binding peptide
RDVVMGSMEGLIIQQKDNMIQMTINS

SEQ ID NO: 99546 - protein, 23 aa, Artificial Sequence
  Cyclic GFR-binding peptide
SMEGLLLVRGNDMIQMTINSTKV

SEQ ID NO: 99547 - protein, 32 aa, Artificial Sequence; identical to SEQ ID NO: 22970
  Cyclic GFR-binding peptide
  MOD_RES (2)..(4): Xaa is C or S

SEQ ID NO: 99548 - protein, 22 aa, Artificial Sequence
  Cyclic GFR-binding peptide
NSMEGIIVNSSDDMIQVTINSL

SEQ ID NO: 99549 - protein, 29 aa, Artificial Sequence
  Cyclic GFR-binding peptide
  MOD_RES (29)..(29): Xaa is C or S
VMDSMEGLVVNNAADMIQITINSLRAPVX

SEQ ID NO: 99550 - protein, 33 aa, Artificial Sequence
  Cyclic GFR-binding peptide
  MOD_RES (30)..(31): Xaa is C or S
VVMGSMEGLIIQQKDNMIQMTINSMKTPTXXPG

SEQ ID NO: 99551 - protein, 28 aa, Artificial Sequence
  Cyclic GFR-binding peptide
  MOD_RES (26)..(27): Xaa is C or S
SMEGIVKPTRGVMIQITINSLDQPVXXP

SEQ ID NO: 99552 - protein, 40 aa, Artificial Sequence
  Cyclic GFR-binding peptide
  MOD_RES (2)..(4)..(35)..(36): Xaa is C or S
LXGXEEVIMSMEGLLLVRGNDMIQMTINSTKVPAXXTSPV

SEQ ID NO: 99553 - protein, 32 aa, Artificial Sequence
  Cyclic GFR-binding peptide
  MOD_RES (1)..(1): Xaa is C or S
XSEVVMDSMEGIVVNNASDMIQITINSLRTPV

SEQ ID NO: 99554 - protein, 40 aa, Artificial Sequence; identical to SEQ ID NO: 22984
  Cyclic GFR-binding peptide
  MOD_RES (2)..(39): Xaa is C or S

SEQ ID NO: 99555 - protein, 32 aa, Artificial Sequence
  Cyclic GFR-binding peptide
  MOD_RES (28)..(29): Xaa is C or S
MGSMEGLIIQQKDNMIQMTINSMKTPTXXPGA

SEQ ID NO: 99556 - protein, 21 aa, Artificial Sequence
  Cyclic GFR-binding peptide
SMEGLIKPTKGIMIQITINSL

SEQ ID NO: 99557 - protein, 27 aa, Artificial Sequence
  Cyclic GFR-binding peptide
EEVIMSMEGLLLVRGNDMIQMTINSTK

SEQ ID NO: 99558 - protein, 27 aa, Artificial Sequence
  Cyclic GFR-binding peptide
VMSMEGIVKPTRGVMIQITINSLDQPV

SEQ ID NO: 99559 - protein, 33 aa, Artificial Sequence
  Cyclic GFR-binding peptide
  MOD_RES (1)..(3): Xaa is C or S
XGXRDVVMGSMEGIIIQQKDNMIQMTINSMKTP

SEQ ID NO: 99560 - protein, 22 aa, Artificial Sequence
  Cyclic GFR-binding peptide
SMEGLVVNNAADMIQITINSLR

SEQ ID NO: 99561 - protein, 38 aa, Artificial Sequence; identical to SEQ ID NO: 22989
  Cyclic GFR-binding peptide
  MOD_RES (2)..(4)..(38): Xaa is C or S

SEQ ID NO: 99562 - protein, 35 aa, Artificial Sequence; identical to SEQ ID NO: 22990
  Cyclic GFR-binding peptide
  MOD_RES (32)..(32): Xaa is C or S

SEQ ID NO: 99563 - protein, 31 aa, Artificial Sequence
  Cyclic GFR-binding peptide
  MOD_RES (28)..(29): Xaa is C or S
MDSMEGIVVNNASDMIQITINSLRTPVXXTP

SEQ ID NO: 99564 - protein, 43 aa, Artificial Sequence; identical to SEQ ID NO: 22991
  Cyclic GFR-binding peptide
  MOD_RES (1)..(3)..(40): Xaa is C or S

SEQ ID NO: 99565 - protein, 31 aa, Artificial Sequence; identical to SEQ ID NO: 22992
  Cyclic GFR-binding peptide

SEQ ID NO: 99566 - protein, 35 aa, Artificial Sequence; identical to SEQ ID NO: 22994
  Cyclic GFR-binding peptide
  MOD_RES (29)..(29): Xaa is C or S

SEQ ID NO: 99567 - protein, 37 aa, Artificial Sequence
  Cyclic GFR-binding peptide
  MOD_RES (1)..(3)..(35)..(36): Xaa is C or S
XGXRDVVMGSMEGIIIQQKDNMIQMTINSMKTPTXXP

SEQ ID NO: 99568 - protein, 26 aa, Artificial Sequence
  Cyclic GFR-binding peptide
ELTSMEGLFIPKKRVIEMIQVTINSL

SEQ ID NO: 99569 - protein, 39 aa, Artificial Sequence; identical to SEQ ID NO: 22997
  Cyclic GFR-binding peptide
  MOD_RES (2)..(36): Xaa is C or S

SEQ ID NO: 99570 - protein, 33 aa, Artificial Sequence
  Cyclic GFR-binding peptide
  MOD_RES (30)..(31): Xaa is C or S
EVIMSMEGLLLVRGNDMIQMTINSTKVPAXXTS

SEQ ID NO: 99571 - protein, 26 aa, Artificial Sequence
  Cyclic GFR-binding peptide
  MOD_RES (1)..(1): Xaa is C or S
XEEVIMSMEGLLLVRGNDMIQMTINS

SEQ ID NO: 99572 - protein, 26 aa, Artificial Sequence
  Cyclic GFR-binding peptide
SEVVMDSMEGIVVNNASDMIQITINS

SEQ ID NO: 99573 - protein, 27 aa, Artificial Sequence
  Cyclic GFR-binding peptide
  MOD_RES (27)..(27): Xaa is C or S
DSMEGLVVNNAADMIQITINSLRAPVX

SEQ ID NO: 99574 - protein, 28 aa, Artificial Sequence
  Cyclic GFR-binding peptide
  MOD_RES (27)..(28): Xaa is C or S
DSMEGLVVNNAADMIQITINSLRAPVXX

SEQ ID NO: 99575 - protein, 32 aa, Artificial Sequence
  Cyclic GFR-binding peptide
  MOD_RES (2)..(4): Xaa is C or S
HXGXSRVVMNSMEGLIVNSSDDMIQVTINSLK

SEQ ID NO: 99576 - protein, 28 aa, Artificial Sequence
  Cyclic GFR-binding peptide
SMEGLLKPKKRVYEMIQVTINSHHVRSP

SEQ ID NO: 99577 - protein, 33 aa, Artificial Sequence
  Cyclic GFR-binding peptide
  MOD_RES (1)..(32)..(33): Xaa is C or S
XEEVIMSMEGLLLVRGNDMIQMTINSTKVPAXX

SEQ ID NO: 99578 - protein, 31 aa, Artificial Sequence; identical to SEQ ID NO: 23006
  Cyclic GFR-binding peptide
  MOD_RES (2)..(2): Xaa is C or S

SEQ ID NO: 99579 - protein, 27 aa, Artificial Sequence
  Cyclic GFR-binding peptide
LTSMEGLFIPKKRVIEMIQVTINSLQV

SEQ ID NO: 99580 - protein, 36 aa, Artificial Sequence; identical to SEQ ID NO: 23009
  Cyclic GFR-binding peptide
  MOD_RES (2)..(36): Xaa is C or S

SEQ ID NO: 99581 - protein, 31 aa, Artificial Sequence
  Cyclic GFR-binding peptide
  MOD_RES (1)..(1): Xaa is C or S
XEEVIMSMEGILLVRGNDMIQMTINSTKVPA

SEQ ID NO: 99582 - protein, 32 aa, Artificial Sequence
  Cyclic GFR-binding peptide
  MOD_RES (1)..(32): Xaa is C or S
XSKVVMSMEGLVKPTRGVMIQITINSLDQPVX

SEQ ID NO: 99583 - protein, 23 aa, Artificial Sequence
  Cyclic GFR-binding peptide
DSMEGLVVNNASDMIQITINSLR

SEQ ID NO: 99584 - protein, 38 aa, Artificial Sequence
  Cyclic GFR-binding peptide
  MOD_RES (2)..(34)..(35): Xaa is C or S
GXRDVVMGSMEGIIIQQKDNMIQMTINSMKTPTXXPGA

SEQ ID NO: 99585 - protein, 37 aa, Artificial Sequence
  Cyclic GFR-binding peptide
  MOD_RES (2)..(4)..(35)..(36): Xaa is C or S
LXGXEEVIMSMEGILLVRGNDMIQMTINSTKVPAXXT

SEQ ID NO: 99586 - protein, 33 aa, Artificial Sequence; identical to SEQ ID NO: 23020
  Cyclic GFR-binding peptide
  MOD_RES (32)..(32): Xaa is C or S

SEQ ID NO: 99587 - protein, 23 aa, Artificial Sequence
  Cyclic GFR-binding peptide
SMEGLLKPKKRVYEMIQVTINSH

SEQ ID NO: 99588 - protein, 33 aa, Artificial Sequence; identical to SEQ ID NO: 23023
  Cyclic GFR-binding peptide
  MOD_RES (1)..(3): Xaa is C or S

SEQ ID NO: 99589 - protein, 41 aa, Artificial Sequence; identical to SEQ ID NO: 23024
  Cyclic GFR-binding peptide
  MOD_RES (1)..(3)..(37): Xaa is C or S

SEQ ID NO: 99590 - protein, 31 aa, Artificial Sequence; identical to SEQ ID NO: 23026
  Cyclic GFR-binding peptide
  MOD_RES (1)..(1): Xaa is C or S

SEQ ID NO: 99591 - protein, 21 aa, Artificial Sequence
  Cyclic GFR-binding peptide
MSMEGLVKPKRGVMIQITINS

SEQ ID NO: 99592 - protein, 26 aa, Artificial Sequence
  Cyclic GFR-binding peptide
VIMSMEGIIKPTKGIMIQITINSLDQ

SEQ ID NO: 99593 - protein, 21 aa, Artificial Sequence
  Cyclic GFR-binding peptide
SMEGIVKPTRGVMIQITINSL

SEQ ID NO: 99594 - protein, 31 aa, Artificial Sequence
  Cyclic GFR-binding peptide
  MOD_RES (27)..(28): Xaa is C or S
NSMEGLIVNSSDDMIQVTINSLKTPAXXPKP

SEQ ID NO: 99595 - protein, 28 aa, Artificial Sequence
  Cyclic GFR-binding peptide
VIMSMEGIIKPTKGIMIQITINSLDQSV

SEQ ID NO: 99596 - protein, 27 aa, Artificial Sequence
  Cyclic GFR-binding peptide
  MOD_RES (27)..(27): Xaa is C or S
MSMEGILLVRGNDMIQMTINSTKVPAX

SEQ ID NO: 99597 - protein, 31 aa, Artificial Sequence
  Cyclic GFR-binding peptide
  MOD_RES (28)..(29): Xaa is C or S
MDSMEGLVVNNAADMIQITINSLRAPVXXSA

SEQ ID NO: 99598 - protein, 29 aa, Artificial Sequence
  Cyclic GFR-binding peptide
  MOD_RES (28)..(29): Xaa is C or S
MGSMEGLIIQQKDNMIQMTINSMKTPTXX

SEQ ID NO: 99599 - protein, 26 aa, Artificial Sequence
  Cyclic GFR-binding peptide
SKVIMSMEGIIKPTKGIMIQITINSL

SEQ ID NO: 99600 - protein, 34 aa, Artificial Sequence
  Cyclic GFR-binding peptide
  MOD_RES (28)..(29): Xaa is C or S
MGSMEGLIIQQKDNMIQMTINSMKTPTXXPGASG

SEQ ID NO: 99601 - protein, 29 aa, Artificial Sequence
  Cyclic GFR-binding peptide
TSMEGLFIPKKRVIEMIQVTINSLQVQTP

SEQ ID NO: 99602 - protein, 42 aa, Artificial Sequence
  Cyclic GFR-binding peptide
  MOD_RES (2)..(4)..(36)..(37): Xaa is C or S
HXGXSRVVMNSMEGIIVNSSDDMIQVTINSLKTPAXXPKPVH

SEQ ID NO: 99603 - protein, 32 aa, Artificial Sequence; identical to SEQ ID NO: 66695
  Cyclic GFR-binding peptide
  MOD_RES (27)..(28): Xaa is C or S

SEQ ID NO: 99604 - protein, 23 aa, Artificial Sequence
  Cyclic GFR-binding peptide
SMEGLHQGQHPKIRMIQMTINSE

SEQ ID NO: 99605 - protein, 30 aa, Artificial Sequence
  Cyclic GFR-binding peptide
  MOD_RES (1)..(1): Xaa is C or S
XRDVVMGSMEGLIIQQKDNMIQMTINSMKT

SEQ ID NO: 99606 - protein, 31 aa, Artificial Sequence; identical to SEQ ID NO: 23041
  Cyclic GFR-binding peptide
  MOD_RES (31)..(31): Xaa is C or S

SEQ ID NO: 99607 - protein, 32 aa, Artificial Sequence
  Cyclic GFR-binding peptide
  MOD_RES (28)..(29): Xaa is C or S
MDSMEGIVVNNASDMIQITINSLRTPVXXTPP

SEQ ID NO: 99608 - protein, 39 aa, Artificial Sequence; identical to SEQ ID NO: 66699
  Cyclic GFR-binding peptide
  MOD_RES (1)..(3)..(35)..(36): Xaa is C or S

SEQ ID NO: 99609 - protein, 34 aa, Artificial Sequence; identical to SEQ ID NO: 23044
  Cyclic GFR-binding peptide
  MOD_RES (33)..(33): Xaa is C or S

SEQ ID NO: 99610 - protein, 32 aa, Artificial Sequence
  Cyclic GFR-binding peptide
  MOD_RES (2)..(4): Xaa is C or S
LXGXEEVIMSMEGLLLVRGNDMIQMTINSTKV

SEQ ID NO: 99611 - protein, 23 aa, Artificial Sequence
  Cyclic GFR-binding peptide
SMEGLVVNNAADMIQITINSLRA

SEQ ID NO: 99612 - protein, 28 aa, Artificial Sequence
  Cyclic GFR-binding peptide
VMDSMEGLVVNNAADMIQITINSLRAPV

SEQ ID NO: 99613 - protein, 29 aa, Artificial Sequence
  Cyclic GFR-binding peptide
  MOD_RES (29)..(29): Xaa is C or S
VMGSMEGLIIQQKDNMIQMTINSMKTPTX

SEQ ID NO: 99614 - protein, 40 aa, Artificial Sequence; identical to SEQ ID NO: 23053
  Cyclic GFR-binding peptide
  MOD_RES (2)..(4)..(38): Xaa is C or S

SEQ ID NO: 99615 - protein, 31 aa, Artificial Sequence
  Cyclic GFR-binding peptide
  MOD_RES (2)..(4): Xaa is C or S
RXGXSEVVMDSMEGLVVNNASDMIQITINSL

SEQ ID NO: 99616 - protein, 30 aa, Artificial Sequence
  Cyclic GFR-binding peptide
  MOD_RES (29)..(30): Xaa is C or S
VMGSMEGIIIQQKDNMIQMTINSMKTPTXX

SEQ ID NO: 99617 - protein, 35 aa, Artificial Sequence
  Cyclic GFR-binding peptide
  MOD_RES (31)..(32): Xaa is C or S
EVVMDSMEGLVVNNAADMIQITINSLRAPVXXSAP

SEQ ID NO: 99618 - protein, 41 aa, Artificial Sequence; identical to SEQ ID NO: 23057
  Cyclic GFR-binding peptide
  MOD_RES (2)..(4)..(38): Xaa is C or S

SEQ ID NO: 99619 - protein, 36 aa, Artificial Sequence
  Cyclic GFR-binding peptide
  MOD_RES (1)..(3)..(35)..(36): Xaa is C or S
XGXSRVVMNSMEGLIVNSSDDMIQVTINSLKTPAXX

SEQ ID NO: 99620 - protein, 30 aa, Artificial Sequence
  Cyclic GFR-binding peptide
  MOD_RES (2)..(4): Xaa is C or S
SXGXRDVVMGSMEGLIIQQKDNMIQMTINS

SEQ ID NO: 99621 - protein, 35 aa, Artificial Sequence; identical to SEQ ID NO: 23058
  Cyclic GFR-binding peptide
  MOD_RES (1)..(3): Xaa is C or S

SEQ ID NO: 99622 - protein, 28 aa, Artificial Sequence
  Cyclic GFR-binding peptide
VVMNSMEGLIVNSSDDMIQVTINSLKTP

SEQ ID NO: 99623 - protein, 22 aa, Artificial Sequence
  Cyclic GFR-binding peptide
MSMEGIIKPTKGIMIQITINSL

SEQ ID NO: 99624 - protein, 31 aa, Artificial Sequence; identical to SEQ ID NO: 66717
  Cyclic GFR-binding peptide
  MOD_RES (28)..(29): Xaa is C or S

SEQ ID NO: 99625 - protein, 32 aa, Artificial Sequence; identical to SEQ ID NO: 23066
  Cyclic GFR-binding peptide
  MOD_RES (2)..(2): Xaa is C or S

SEQ ID NO: 99626 - protein, 34 aa, Artificial Sequence; identical to SEQ ID NO: 23067
  Cyclic GFR-binding peptide
  MOD_RES (31)..(31): Xaa is C or S

SEQ ID NO: 99627 - protein, 42 aa, Artificial Sequence; identical to SEQ ID NO: 23068
  Cyclic GFR-binding peptide
  MOD_RES (2)..(36): Xaa is C or S

SEQ ID NO: 99628 - protein, 38 aa, Artificial Sequence
  Cyclic GFR-binding peptide
  MOD_RES (1)..(3)..(34)..(35): Xaa is C or S
XKXSKVVMSMEGLVKPTRGVMIQITINSLDQPVXXPSA

SEQ ID NO: 99629 - protein, 40 aa, Artificial Sequence; identical to SEQ ID NO: 23069
  Cyclic GFR-binding peptide
  MOD_RES (1)..(38): Xaa is C or S

SEQ ID NO: 99630 - protein, 22 aa, Artificial Sequence
  Cyclic GFR-binding peptide
SMEGIIVNSSDDMIQVTINSLK

SEQ ID NO: 99631 - protein, 30 aa, Artificial Sequence
  Cyclic GFR-binding peptide
  MOD_RES (1)..(1): Xaa is C or S
XSRVVMNSMEGLIVNSSDDMIQVTINSLKT

SEQ ID NO: 99632 - protein, 44 aa, Artificial Sequence; identical to SEQ ID NO: 23071
  Cyclic GFR-binding peptide
  MOD_RES (2)..(4)..(38): Xaa is C or S

SEQ ID NO: 99633 - protein, 32 aa, Artificial Sequence; identical to SEQ ID NO: 66727
  Cyclic GFR-binding peptide
  MOD_RES (2)..(4): Xaa is C or S

SEQ ID NO: 99634 - protein, 29 aa, Artificial Sequence
  Cyclic GFR-binding peptide
KNHQLFSMEGIHQGQHPKIRMIQMTINSE

SEQ ID NO: 99635 - protein, 26 aa, Artificial Sequence
  Cyclic GFR-binding peptide
QLFSMEGLHQGQHPKIRMIQMTINSE

SEQ ID NO: 99636 - protein, 28 aa, Artificial Sequence
  Cyclic GFR-binding peptide
  MOD_RES (28)..(28): Xaa is C or S
SMEGIHQGQHPKIRMIQMTINSQGTPVX

SEQ ID NO: 99637 - protein, 29 aa, Artificial Sequence
  Cyclic GFR-binding peptide
  MOD_RES (2)..(2): Xaa is C or S
KXSKVVMSMEGLVKPTRGVMIQITINSLD

SEQ ID NO: 99638 - protein, 28 aa, Artificial Sequence
  Cyclic GFR-binding peptide
  MOD_RES (2)..(2): Xaa is C or S
KXSKVVMSMEGLVKPTRGVMIQITINSL

SEQ ID NO: 99639 - protein, 26 aa, Artificial Sequence
  Cyclic GFR-binding peptide
MDSMEGIVVNNASDMIQITINSLRTP

SEQ ID NO: 99640 - protein, 38 aa, Artificial Sequence
  Cyclic GFR-binding peptide
  MOD_RES (1)..(33)..(34): Xaa is C or S
XRDVVMGSMEGLIIQQKDNMIQMTINSMKTPTXXPGAS

SEQ ID NO: 99641 - protein, 31 aa, Artificial Sequence; identical to SEQ ID NO: 66730
  Cyclic GFR-binding peptide
  MOD_RES (1)..(3): Xaa is C or S

SEQ ID NO: 99642 - protein, 40 aa, Artificial Sequence; identical to SEQ ID NO: 23082
  Cyclic GFR-binding peptide
  MOD_RES (36)..(36): Xaa is C or S

SEQ ID NO: 99643 - protein, 32 aa, Artificial Sequence
  Cyclic GFR-binding peptide
  MOD_RES (30)..(31): Xaa is C or S
VVMDSMEGIVVNNASDMIQITINSLRTPVXXT

SEQ ID NO: 99644 - protein, 30 aa, Artificial Sequence; identical to SEQ ID NO: 23085
  Cyclic GFR-binding peptide

SEQ ID NO: 99645 - protein, 30 aa, Artificial Sequence; identical to SEQ ID NO: 23087
  Cyclic GFR-binding peptide
  MOD_RES (2)..(2): Xaa is C or S

SEQ ID NO: 99646 - protein, 27 aa, Artificial Sequence
  Cyclic GFR-binding peptide
LRSMEGLLKPKKRVYEMIQVTINSHHV

SEQ ID NO: 99647 - protein, 32 aa, Artificial Sequence; identical to SEQ ID NO: 23089
  Cyclic GFR-binding peptide
  MOD_RES (2)..(2): Xaa is C or S

SEQ ID NO: 99648 - protein, 34 aa, Artificial Sequence; identical to SEQ ID NO: 63378
  Cyclic GFR-binding peptide
  MOD_RES (1)..(32)..(33): Xaa is C or S

SEQ ID NO: 99649 - protein, 26 aa, Artificial Sequence
  Cyclic GFR-binding peptide
VIMSMEGILLVRGNDMIQMTINSTKV

SEQ ID NO: 99650 - protein, 35 aa, Artificial Sequence; identical to SEQ ID NO: 63379
  Cyclic GFR-binding peptide
  MOD_RES (29)..(30): Xaa is C or S

SEQ ID NO: 99651 - protein, 35 aa, Artificial Sequence
  Cyclic GFR-binding peptide
  MOD_RES (29)..(30): Xaa is C or S
VVMSMEGLVKPTRGVMIQITINSLDQPVXXPSASA

SEQ ID NO: 99652 - protein, 37 aa, Artificial Sequence; identical to SEQ ID NO: 66741
  Cyclic GFR-binding peptide
  MOD_RES (32)..(33): Xaa is C or S

SEQ ID NO: 99653 - protein, 32 aa, Artificial Sequence
  Cyclic GFR-binding peptide
  MOD_RES (1)..(1): Xaa is C or S
XAEVVMDSMEGIVVNNAADMIQITINSLRAPV

SEQ ID NO: 99654 - protein, 32 aa, Artificial Sequence
  Cyclic GFR-binding peptide
  MOD_RES (31)..(32): Xaa is C or S
EVVMDSMEGIVVNNASDMIQITINSLRTPVXX

SEQ ID NO: 99655 - protein, 31 aa, Artificial Sequence
  Cyclic GFR-binding peptide
  MOD_RES (2)..(2): Xaa is C or S
GXEEVIMSMEGILLVRGNDMIQMTINSTKVP

SEQ ID NO: 99656 - protein, 34 aa, Artificial Sequence
  Cyclic GFR-binding peptide
  MOD_RES (32)..(33): Xaa is C or S
AEVVMDSMEGIVVNNAADMIQITINSLRAPVXXS

SEQ ID NO: 99657 - protein, 34 aa, Artificial Sequence; identical to SEQ ID NO: 23095
  Cyclic GFR-binding peptide
  MOD_RES (32)..(32): Xaa is C or S

SEQ ID NO: 99658 - protein, 29 aa, Artificial Sequence
  Cyclic GFR-binding peptide
  MOD_RES (29)..(29): Xaa is C or S
VIMSMEGIIKPTKGIMIQITINSLDQSVX

SEQ ID NO: 99659 - protein, 28 aa, Artificial Sequence
  Cyclic GFR-binding peptide
EVVMDSMEGLVVNNASDMIQITINSLRT

SEQ ID NO: 99660 - protein, 33 aa, Artificial Sequence; identical to SEQ ID NO: 23097
  Cyclic GFR-binding peptide
  MOD_RES (29)..(29): Xaa is C or S

SEQ ID NO: 99661 - protein, 34 aa, Artificial Sequence; identical to SEQ ID NO: 23101
  Cyclic GFR-binding peptide
  MOD_RES (1)..(3): Xaa is C or S

SEQ ID NO: 99662 - protein, 31 aa, Artificial Sequence
  Cyclic GFR-binding peptide
  MOD_RES (2)..(4): Xaa is C or S
HXGXSRVVMNSMEGLIVNSSDDMIQVTINSL

SEQ ID NO: 99663 - protein, 26 aa, Artificial Sequence
  Cyclic GFR-binding peptide
VVMDSMEGIVVNNAADMIQITINSLR

SEQ ID NO: 99664 - protein, 29 aa, Artificial Sequence
  Cyclic GFR-binding peptide
  MOD_RES (1)..(1): Xaa is C or S
XSRVIMSMEGLVKPKRGVMIQITINSLAQ

SEQ ID NO: 99665 - protein, 38 aa, Artificial Sequence; identical to SEQ ID NO: 23104
  Cyclic GFR-binding peptide
  MOD_RES (1)..(3): Xaa is C or S

SEQ ID NO: 99666 - protein, 37 aa, Artificial Sequence
  Cyclic GFR-binding peptide
  MOD_RES (2)..(34)..(35): Xaa is C or S
GXRDVVMGSMEGIIIQQKDNMIQMTINSMKTPTXXPG

SEQ ID NO: 99667 - protein, 23 aa, Artificial Sequence
  Cyclic GFR-binding peptide
SMEGIVKPKRGVMIQITINSLAQ

SEQ ID NO: 99668 - protein, 36 aa, Artificial Sequence; identical to SEQ ID NO: 23107
  Cyclic GFR-binding peptide
  MOD_RES (2)..(4): Xaa is C or S

SEQ ID NO: 99669 - protein, 37 aa, Artificial Sequence; identical to SEQ ID NO: 23108
  Cyclic GFR-binding peptide
  MOD_RES (35)..(35): Xaa is C or S

SEQ ID NO: 99670 - protein, 30 aa, Artificial Sequence; identical to SEQ ID NO: 23113
  Cyclic GFR-binding peptide
  MOD_RES (29)..(29): Xaa is C or S

SEQ ID NO: 99671 - protein, 27 aa, Artificial Sequence
  Cyclic GFR-binding peptide
DELTSMEGIFIPKKRVIEMIQVTINSL

SEQ ID NO: 99672 - protein, 31 aa, Artificial Sequence; identical to SEQ ID NO: 23117
  Cyclic GFR-binding peptide
  MOD_RES (31)..(31): Xaa is C or S

SEQ ID NO: 99673 - protein, 32 aa, Artificial Sequence
  Cyclic GFR-binding peptide
  MOD_RES (1)..(32): Xaa is C or S
XEEVIMSMEGILLVRGNDMIQMTINSTKVPAX

SEQ ID NO: 99674 - protein, 31 aa, Artificial Sequence
  Cyclic GFR-binding peptide
  MOD_RES (1)..(1): Xaa is C or S
XSKVVMSMEGLVKPTRGVMIQITINSLDQPV

SEQ ID NO: 99675 - protein, 38 aa, Artificial Sequence; identical to SEQ ID NO: 23125
  Cyclic GFR-binding peptide
  MOD_RES (36)..(36): Xaa is C or S

SEQ ID NO: 99676 - protein, 33 aa, Artificial Sequence; identical to SEQ ID NO: 63408
  Cyclic GFR-binding peptide
  MOD_RES (2)..(4): Xaa is C or S

SEQ ID NO: 99677 - protein, 42 aa, Artificial Sequence; identical to SEQ ID NO: 23128
  Cyclic GFR-binding peptide
  MOD_RES (2)..(39): Xaa is C or S

SEQ ID NO: 99678 - protein, 40 aa, Artificial Sequence
  Cyclic GFR-binding peptide
  MOD_RES (1)..(3)..(35)..(36): Xaa is C or S
XGXSRVVMNSMEGLIVNSSDDMIQVTINSLKTPAXXPKPV

SEQ ID NO: 99679 - protein, 38 aa, Artificial Sequence; identical to SEQ ID NO: 23131
  Cyclic GFR-binding peptide
  MOD_RES (34)..(34): Xaa is C or S

SEQ ID NO: 99680 - protein, 31 aa, Artificial Sequence
  Cyclic GFR-binding peptide
  MOD_RES (27)..(28): Xaa is C or S
DSMEGLVVNNASDMIQITINSLRTPVXXTPP

SEQ ID NO: 99681 - protein, 34 aa, Artificial Sequence; identical to SEQ ID NO: 23139
  Cyclic GFR-binding peptide
  MOD_RES (2)..(2): Xaa is C or S

SEQ ID NO: 99682 - protein, 34 aa, Artificial Sequence; identical to SEQ ID NO: 23140
  Cyclic GFR-binding peptide

SEQ ID NO: 99683 - protein, 26 aa, Artificial Sequence
  Cyclic GFR-binding peptide
LRSMEGLLKPKKRVYEMIQVTINSHH

SEQ ID NO: 99684 - protein, 33 aa, Artificial Sequence; identical to SEQ ID NO: 63415
  Cyclic GFR-binding peptide
  MOD_RES (30)..(31): Xaa is C or S

SEQ ID NO: 99685 - protein, 30 aa, Artificial Sequence
  Cyclic GFR-binding peptide
  MOD_RES (26)..(27): Xaa is C or S
SMEGLLLVRGNDMIQMTINSTKVPAXXTSP

SEQ ID NO: 99686 - protein, 26 aa, Artificial Sequence
  Cyclic GFR-binding peptide
RSMEGILKPKKRVYEMIQVTINSHHV

SEQ ID NO: 99687 - protein, 34 aa, Artificial Sequence
  Cyclic GFR-binding peptide
  MOD_RES (30)..(31): Xaa is C or S
KVVMSMEGLVKPTRGVMIQITINSLDQPVXXPSA

SEQ ID NO: 99688 - protein, 36 aa, Artificial Sequence; identical to SEQ ID NO: 23145
  Cyclic GFR-binding peptide
  MOD_RES (35)..(35): Xaa is C or S

SEQ ID NO: 99689 - protein, 31 aa, Artificial Sequence
  Cyclic GFR-binding peptide
  MOD_RES (30)..(31): Xaa is C or S
VVMDSMEGLVVNNASDMIQITINSLRTPVXX

SEQ ID NO: 99690 - protein, 33 aa, Artificial Sequence
  Cyclic GFR-binding peptide
  MOD_RES (1)..(33): Xaa is C or S
XRDVVMGSMEGLIIQQKDNMIQMTINSMKTPTX

SEQ ID NO: 99691 - protein, 38 aa, Artificial Sequence
  Cyclic GFR-binding peptide
  MOD_RES (1)..(3)..(35)..(36): Xaa is C or S
XGXSEVVMDSMEGIVVNNASDMIQITINSLRTPVXXTP

SEQ ID NO: 99692 - protein, 29 aa, Artificial Sequence
  Cyclic GFR-binding peptide
  MOD_RES (2)..(4): Xaa is C or S
LXGXEEVIMSMEGILLVRGNDMIQMTINS

SEQ ID NO: 99693 - protein, 21 aa, Artificial Sequence
  Cyclic GFR-binding peptide
SMEGLLLVRGNDMIQMTINST

SEQ ID NO: 99694 - protein, 24 aa, Artificial Sequence
  Cyclic GFR-binding peptide
DSMEGIVVNNASDMIQITINSLRT

SEQ ID NO: 99695 - protein, 28 aa, Artificial Sequence
  Cyclic GFR-binding peptide
LHDELTSMEGIFIPKKRVIEMIQVTINS

SEQ ID NO: 99696 - protein, 34 aa, Artificial Sequence
  Cyclic GFR-binding peptide
  MOD_RES (1)..(33)..(34): Xaa is C or S
XAEVVMDSMEGIVVNNAADMIQITINSLRAPVXX

SEQ ID NO: 99697 - protein, 27 aa, Artificial Sequence
  Cyclic GFR-binding peptide
KVVMSMEGLVKPTRGVMIQITINSLDQ

SEQ ID NO: 99698 - protein, 36 aa, Artificial Sequence
  Cyclic GFR-binding peptide
  MOD_RES (2)..(4)..(36): Xaa is C or S
RXGXAEVVMDSMEGLVVNNAADMIQITINSLRAPVX

SEQ ID NO: 99699 - protein, 41 aa, Artificial Sequence; identical to SEQ ID NO: 23157
  Cyclic GFR-binding peptide
  MOD_RES (2)..(36): Xaa is C or S

SEQ ID NO: 99700 - protein, 28 aa, Artificial Sequence
  Cyclic GFR-binding peptide
LFSMEGLHQGQHPKIRMIQMTINSEETP

SEQ ID NO: 99701 - protein, 35 aa, Artificial Sequence; identical to SEQ ID NO: 23162
  Cyclic GFR-binding peptide
  MOD_RES (33)..(33): Xaa is C or S

SEQ ID NO: 99702 - protein, 29 aa, Artificial Sequence
  Cyclic GFR-binding peptide
  MOD_RES (28)..(29): Xaa is C or S
IMSMEGIIKPTKGIMIQITINSLDQSVXX

SEQ ID NO: 99703 - protein, 32 aa, Artificial Sequence; identical to SEQ ID NO: 23165
  Cyclic GFR-binding peptide
  MOD_RES (32)..(32): Xaa is C or S

SEQ ID NO: 99704 - protein, 29 aa, Artificial Sequence
  Cyclic GFR-binding peptide
  MOD_RES (2)..(4): Xaa is C or S
LXGXEEVIMSMEGLLLVRGNDMIQMTINS

SEQ ID NO: 99705 - protein, 36 aa, Artificial Sequence
  Cyclic GFR-binding peptide
  MOD_RES (1)..(32)..(33): Xaa is C or S
XEEVIMSMEGILLVRGNDMIQMTINSTKVPAXXTSP

SEQ ID NO: 99706 - protein, 36 aa, Artificial Sequence; identical to SEQ ID NO: 66810
  Cyclic GFR-binding peptide
  MOD_RES (2)..(4)..(35)..(36): Xaa is C or S

SEQ ID NO: 99707 - protein, 31 aa, Artificial Sequence; identical to SEQ ID NO: 23167
  Cyclic GFR-binding peptide
  MOD_RES (29)..(29): Xaa is C or S

SEQ ID NO: 99708 - protein, 23 aa, Artificial Sequence
  Cyclic GFR-binding peptide
VMGSMEGIIIQQKDNMIQMTINS

SEQ ID NO: 99709 - protein, 31 aa, Artificial Sequence; identical to SEQ ID NO: 23176
  Cyclic GFR-binding peptide
  MOD_RES (1)..(1): Xaa is C or S

SEQ ID NO: 99710 - protein, 37 aa, Artificial Sequence; identical to SEQ ID NO: 23178
  Cyclic GFR-binding peptide
  MOD_RES (34)..(34): Xaa is C or S

SEQ ID NO: 99711 - protein, 33 aa, Artificial Sequence
  Cyclic GFR-binding peptide
  MOD_RES (29)..(30): Xaa is C or S
VIMSMEGLIKPTKGIMIQITINSLDQSVXXPSA

SEQ ID NO: 99712 - protein, 30 aa, Artificial Sequence
  Cyclic GFR-binding peptide
  MOD_RES (1)..(3): Xaa is C or S
XKXSRVIMSMEGLVKPKRGVMIQITINSLA

SEQ ID NO: 99713 - protein, 28 aa, Artificial Sequence
  Cyclic GFR-binding peptide
  MOD_RES (1)..(1): Xaa is C or S
XSKVVMSMEGIVKPTRGVMIQITINSLD

SEQ ID NO: 99714 - protein, 35 aa, Artificial Sequence; identical to SEQ ID NO: 23182
  Cyclic GFR-binding peptide
  MOD_RES (32)..(32): Xaa is C or S

SEQ ID NO: 99715 - protein, 24 aa, Artificial Sequence
  Cyclic GFR-binding peptide
EVIMSMEGILLVRGNDMIQMTINS

SEQ ID NO: 99716 - protein, 31 aa, Artificial Sequence
  Cyclic GFR-binding peptide
  MOD_RES (2)..(4): Xaa is C or S
RXGXAEVVMDSMEGLVVNNAADMIQITINSL

SEQ ID NO: 99717 - protein, 41 aa, Artificial Sequence; identical to SEQ ID NO: 23186
  Cyclic GFR-binding peptide
  MOD_RES (2)..(36): Xaa is C or S

SEQ ID NO: 99718 - protein, 30 aa, Artificial Sequence
  Cyclic GFR-binding peptide
EEVIMSMEGILLVRGNDMIQMTINSTKVPA

SEQ ID NO: 99719 - protein, 28 aa, Artificial Sequence
  Cyclic GFR-binding peptide
NHQLFSMEGIHQGQHPKIRMIQMTINSE

SEQ ID NO: 99720 - protein, 33 aa, Artificial Sequence
  Cyclic GFR-binding peptide
  MOD_RES (32)..(33): Xaa is C or S
AEVVMDSMEGLVVNNAADMIQITINSLRAPVXX

SEQ ID NO: 99721 - protein, 27 aa, Artificial Sequence
  Cyclic GFR-binding peptide
IMSMEGIIKPTKGIMIQITINSLDQSV

SEQ ID NO: 99722 - protein, 39 aa, Artificial Sequence; identical to SEQ ID NO: 23190
  Cyclic GFR-binding peptide
  MOD_RES (2)..(39): Xaa is C or S

SEQ ID NO: 99723 - protein, 28 aa, Artificial Sequence
  Cyclic GFR-binding peptide
  MOD_RES (2)..(2): Xaa is C or S
KXSKVVMSMEGIVKPTRGVMIQITINSL

SEQ ID NO: 99724 - protein, 33 aa, Artificial Sequence
  Cyclic GFR-binding peptide
  MOD_RES (1)..(3): Xaa is C or S
XGXRDVVMGSMEGLIIQQKDNMIQMTINSMKTP

SEQ ID NO: 99725 - protein, 29 aa, Artificial Sequence
  Cyclic GFR-binding peptide
SMEGIFIPKKRVIEMIQVTINSLQVQTPR

SEQ ID NO: 99726 - protein, 28 aa, Artificial Sequence
  Cyclic GFR-binding peptide
  MOD_RES (26)..(27): Xaa is C or S
SMEGIVVNNAADMIQITINSLRAPVXXS

SEQ ID NO: 99727 - protein, 39 aa, Artificial Sequence; identical to SEQ ID NO: 23195
  Cyclic GFR-binding peptide
  MOD_RES (1)..(3)..(37): Xaa is C or S

SEQ ID NO: 99728 - protein, 38 aa, Artificial Sequence
  Cyclic GFR-binding peptide
  MOD_RES (1)..(33)..(34): Xaa is C or S
XRDVVMGSMEGIIIQQKDNMIQMTINSMKTPTXXPGAS

SEQ ID NO: 99729 - protein, 36 aa, Artificial Sequence
  Cyclic GFR-binding peptide
  MOD_RES (2)..(4)..(35)..(36): Xaa is C or S
SXKXSRVIMSMEGLVKPKRGVMIQITINSLAQPVXX

SEQ ID NO: 99730 - protein, 38 aa, Artificial Sequence; identical to SEQ ID NO: 63490
  Cyclic GFR-binding peptide
  MOD_RES (1)..(3)..(35)..(36): Xaa is C or S

SEQ ID NO: 99731 - protein, 28 aa, Artificial Sequence
  Cyclic GFR-binding peptide
EELRSMEGLLKPKKRVYEMIQVTINSHH

SEQ ID NO: 99732 - protein, 38 aa, Artificial Sequence; identical to SEQ ID NO: 23197
  Cyclic GFR-binding peptide
  MOD_RES (2)..(2): Xaa is C or S

SEQ ID NO: 99733 - protein, 26 aa, Artificial Sequence
  Cyclic GFR-binding peptide
IMSMEGLLLVRGNDMIQMTINSTKVP

SEQ ID NO: 99734 - protein, 29 aa, Artificial Sequence
  Cyclic GFR-binding peptide
  MOD_RES (28)..(29): Xaa is C or S
IMSMEGILLVRGNDMIQMTINSTKVPAXX

SEQ ID NO: 99735 - protein, 35 aa, Artificial Sequence
  Cyclic GFR-binding peptide
  MOD_RES (29)..(30): Xaa is C or S
VMDSMEGIVVNNAADMIQITINSLRAPVXXSAPAA

SEQ ID NO: 99736 - protein, 26 aa, Artificial Sequence
  Cyclic GFR-binding peptide
MDSMEGIVVNNAADMIQITINSLRAP

SEQ ID NO: 99737 - protein, 30 aa, Artificial Sequence
  Cyclic GFR-binding peptide
  MOD_RES (26)..(27): Xaa is C or S
SMEGLVVNNASDMIQITINSLRTPVXXTPP

SEQ ID NO: 99738 - protein, 31 aa, Artificial Sequence; identical to SEQ ID NO: 23199
  Cyclic GFR-binding peptide
  MOD_RES (30)..(30): Xaa is C or S

SEQ ID NO: 99739 - protein, 24 aa, Artificial Sequence
  Cyclic GFR-binding peptide
MSMEGLVKPTRGVMIQITINSLDQ

SEQ ID NO: 99740 - protein, 24 aa, Artificial Sequence
  Cyclic GFR-binding peptide
MDSMEGLVVNNASDMIQITINSLR

SEQ ID NO: 99741 - protein, 32 aa, Artificial Sequence; identical to SEQ ID NO: 23203
  Cyclic GFR-binding peptide
  MOD_RES (2)..(4): Xaa is C or S

SEQ ID NO: 99742 - protein, 35 aa, Artificial Sequence
  Cyclic GFR-binding peptide
  MOD_RES (29)..(30): Xaa is C or S
VIMSMEGLVKPKRGVMIQITINSLAQPVXXPAASA

SEQ ID NO: 99743 - protein, 27 aa, Artificial Sequence
  Cyclic GFR-binding peptide
LFSMEGIHQGQHPKIRMIQMTINSEET

SEQ ID NO: 99744 - protein, 30 aa, Artificial Sequence; identical to SEQ ID NO: 63505
  Cyclic GFR-binding peptide

SEQ ID NO: 99745 - protein, 32 aa, Artificial Sequence
  Cyclic GFR-binding peptide
  MOD_RES (1)..(32): Xaa is C or S
XSKVIMSMEGLIKPTKGIMIQITINSLDQSVX

SEQ ID NO: 99746 - protein, 25 aa, Artificial Sequence
  Cyclic GFR-binding peptide
MSMEGLVKPTRGVMIQITINSLDQP

SEQ ID NO: 99747 - protein, 36 aa, Artificial Sequence; identical to SEQ ID NO: 66847
  Cyclic GFR-binding peptide
  MOD_RES (2)..(33)..(34): Xaa is C or S

SEQ ID NO: 99748 - protein, 40 aa, Artificial Sequence; identical to SEQ ID NO: 23218
  Cyclic GFR-binding peptide
  MOD_RES (2)..(4)..(38): Xaa is C or S

SEQ ID NO: 99749 - protein, 23 aa, Artificial Sequence
  Cyclic GFR-binding peptide
SMEGIIVNSSDDMIQVTINSLKT

SEQ ID NO: 99750 - protein, 35 aa, Artificial Sequence; identical to SEQ ID NO: 66855
  Cyclic GFR-binding peptide
  MOD_RES (2)..(4): Xaa is C or S

SEQ ID NO: 99751 - protein, 29 aa, Artificial Sequence
  Cyclic GFR-binding peptide
ELRSMEGILKPKKRVYEMIQVTINSHHVR

SEQ ID NO: 99752 - protein, 34 aa, Artificial Sequence; identical to SEQ ID NO: 23225
  Cyclic GFR-binding peptide
  MOD_RES (31)..(31): Xaa is C or S

SEQ ID NO: 99753 - protein, 27 aa, Artificial Sequence
  Cyclic GFR-binding peptide
VVMGSMEGLIIQQKDNMIQMTINSMKT

SEQ ID NO: 99754 - protein, 31 aa, Artificial Sequence
  Cyclic GFR-binding peptide
  MOD_RES (28)..(29): Xaa is C or S
IMSMEGLVKPKRGVMIQITINSLAQPVXXPA

SEQ ID NO: 99755 - protein, 44 aa, Artificial Sequence; identical to SEQ ID NO: 23231
  Cyclic GFR-binding peptide
  MOD_RES (1)..(3)..(40): Xaa is C or S

SEQ ID NO: 99756 - protein, 31 aa, Artificial Sequence
  Cyclic GFR-binding peptide
  MOD_RES (27)..(28): Xaa is C or S
MSMEGILLVRGNDMIQMTINSTKVPAXXTSP

SEQ ID NO: 99757 - protein, 34 aa, Artificial Sequence
  Cyclic GFR-binding peptide
  MOD_RES (1)..(33)..(34): Xaa is C or S
XRDVVMGSMEGLIIQQKDNMIQMTINSMKTPTXX

SEQ ID NO: 99758 - protein, 34 aa, Artificial Sequence
  Cyclic GFR-binding peptide
  MOD_RES (1)..(33)..(34): Xaa is C or S
XRDVVMGSMEGIIIQQKDNMIQMTINSMKTPTXX

SEQ ID NO: 99759 - protein, 32 aa, Artificial Sequence
  Cyclic GFR-binding peptide
  MOD_RES (30)..(31): Xaa is C or S
VVMDSMEGLVVNNAADMIQITINSLRAPVXXS

SEQ ID NO: 99760 - protein, 33 aa, Artificial Sequence
  Cyclic GFR-binding peptide
  MOD_RES (1)..(33): Xaa is C or S
XAEVVMDSMEGIVVNNAADMIQITINSLRAPVX

SEQ ID NO: 99761 - protein, 22 aa, Artificial Sequence
  Cyclic GFR-binding peptide
IMSMEGLVKPKRGVMIQITINS

SEQ ID NO: 99762 - protein, 28 aa, Artificial Sequence
  Cyclic GFR-binding peptide
FSMEGIHQGQHPKIRMIQMTINSEETPV

SEQ ID NO: 99763 - protein, 37 aa, Artificial Sequence; identical to SEQ ID NO: 23240
  Cyclic GFR-binding peptide
  MOD_RES (35)..(35): Xaa is C or S

SEQ ID NO: 99764 - protein, 33 aa, Artificial Sequence
  Cyclic GFR-binding peptide
  MOD_RES (1)..(33): Xaa is C or S
XAEVVMDSMEGLVVNNAADMIQITINSLRAPVX

SEQ ID NO: 99765 - protein, 31 aa, Artificial Sequence; identical to SEQ ID NO: 23241
  Cyclic GFR-binding peptide
  MOD_RES (30)..(30): Xaa is C or S

SEQ ID NO: 99766 - protein, 32 aa, Artificial Sequence
  Cyclic GFR-binding peptide
  MOD_RES (1)..(1): Xaa is C or S
XSEVVMDSMEGLVVNNASDMIQITINSLRTPV

SEQ ID NO: 99767 - protein, 41 aa, Artificial Sequence; identical to SEQ ID NO: 23244
  Cyclic GFR-binding peptide
  MOD_RES (1)..(3)..(40): Xaa is C or S

SEQ ID NO: 99768 - protein, 39 aa, Artificial Sequence
  Cyclic GFR-binding peptide
  MOD_RES (1)..(3)..(35)..(36): Xaa is C or S
XGXSEVVMDSMEGIVVNNASDMIQITINSLRTPVXXTPP

SEQ ID NO: 99769 - protein, 39 aa, Artificial Sequence
  Cyclic GFR-binding peptide
  MOD_RES (2)..(4)..(36)..(37): Xaa is C or S
RXGXSEVVMDSMEGLVVNNASDMIQITINSLRTPVXXTP

SEQ ID NO: 99770 - protein, 30 aa, Artificial Sequence
  Cyclic GFR-binding peptide
  MOD_RES (27)..(28): Xaa is C or S
GSMEGLIIQQKDNMIQMTINSMKTPTXXPG

SEQ ID NO: 99771 - protein, 41 aa, Artificial Sequence; identical to SEQ ID NO: 23247
  Cyclic GFR-binding peptide
  MOD_RES (2)..(39): Xaa is C or S

SEQ ID NO: 99772 - protein, 21 aa, Artificial Sequence
  Cyclic GFR-binding peptide
MSMEGIVKPTRGVMIQITINS

SEQ ID NO: 99773 - protein, 32 aa, Artificial Sequence; identical to SEQ ID NO: 23250
  Cyclic GFR-binding peptide
  MOD_RES (1)..(3): Xaa is C or S

SEQ ID NO: 99774 - protein, 25 aa, Artificial Sequence
  Cyclic GFR-binding peptide
MGSMEGLIIQQKDNMIQMTINSMKT

SEQ ID NO: 99775 - protein, 20 aa, Artificial Sequence
  Cyclic GFR-binding peptide
SMEGIVKPKRGVMIQITINS

SEQ ID NO: 99776 - protein, 33 aa, Artificial Sequence
  Cyclic GFR-binding peptide
  MOD_RES (28)..(29): Xaa is C or S
IMSMEGILLVRGNDMIQMTINSTKVPAXXTSPV

SEQ ID NO: 99777 - protein, 29 aa, Artificial Sequence
  Cyclic GFR-binding peptide
LHEELRSMEGILKPKKRVYEMIQVTINSH

SEQ ID NO: 99778 - protein, 31 aa, Artificial Sequence
  Cyclic GFR-binding peptide
  MOD_RES (27)..(28): Xaa is C or S
GSMEGIIIQQKDNMIQMTINSMKTPTXXPGA

SEQ ID NO: 99779 - protein, 28 aa, Artificial Sequence
  Cyclic GFR-binding peptide
  MOD_RES (26)..(27): Xaa is C or S
SMEGILLVRGNDMIQMTINSTKVPAXXT

SEQ ID NO: 99780 - protein, 37 aa, Artificial Sequence
  Cyclic GFR-binding peptide
  MOD_RES (32)..(33): Xaa is C or S
SEVVMDSMEGLVVNNASDMIQITINSLRTPVXXTPPT

SEQ ID NO: 99781 - protein, 25 aa, Artificial Sequence
  Cyclic GFR-binding peptide
VMSMEGLVKPTRGVMIQITINSLDQ

SEQ ID NO: 99782 - protein, 41 aa, Artificial Sequence; identical to SEQ ID NO: 63545
  Cyclic GFR-binding peptide
  MOD_RES (2)..(4)..(36)..(37): Xaa is C or S

SEQ ID NO: 99783 - protein, 38 aa, Artificial Sequence
  Cyclic GFR-binding peptide
  MOD_RES (32)..(33): Xaa is C or S
SEVVMDSMEGIVVNNASDMIQITINSLRTPVXXTPPTS

SEQ ID NO: 99784 - protein, 28 aa, Artificial Sequence
  Cyclic GFR-binding peptide
LRSMEGLLKPKKRVYEMIQVTINSHHVR

SEQ ID NO: 99785 - protein, 36 aa, Artificial Sequence
  Cyclic GFR-binding peptide
  MOD_RES (30)..(31): Xaa is C or S
VVMNSMEGIIVNSSDDMIQVTINSLKTPAXXPKPVH

SEQ ID NO: 99786 - protein, 30 aa, Artificial Sequence
  Cyclic GFR-binding peptide
  MOD_RES (2)..(2): Xaa is C or S
KXSKVIMSMEGLIKPTKGIMIQITINSLDQ

SEQ ID NO: 99787 - protein, 38 aa, Artificial Sequence
  Cyclic GFR-binding peptide
  MOD_RES (2)..(4)..(36)..(37): Xaa is C or S
RXGXSEVVMDSMEGLVVNNASDMIQITINSLRTPVXXT

SEQ ID NO: 99788 - protein, 31 aa, Artificial Sequence; identical to SEQ ID NO: 23266
  Cyclic GFR-binding peptide

SEQ ID NO: 99789 - protein, 34 aa, Artificial Sequence
  Cyclic GFR-binding peptide
  MOD_RES (1)..(33)..(34): Xaa is C or S
XAEVVMDSMEGLVVNNAADMIQITINSLRAPVXX

SEQ ID NO: 99790 - protein, 29 aa, Artificial Sequence
  Cyclic GFR-binding peptide
VVMDSMEGIVVNNAADMIQITINSLRAPV

SEQ ID NO: 99791 - protein, 33 aa, Artificial Sequence
  Cyclic GFR-binding peptide
  MOD_RES (1)..(33): Xaa is C or S
XRDVVMGSMEGIIIQQKDNMIQMTINSMKTPTX

SEQ ID NO: 99792 - protein, 30 aa, Artificial Sequence
  Cyclic GFR-binding peptide
  MOD_RES (29)..(30): Xaa is C or S
VIMSMEGLLLVRGNDMIQMTINSTKVPAXX

SEQ ID NO: 99793 - protein, 33 aa, Artificial Sequence
  Cyclic GFR-binding peptide
  MOD_RES (1)..(3): Xaa is C or S
XGXSEVVMDSMEGLVVNNASDMIQITINSLRTP

SEQ ID NO: 99794 - protein, 29 aa, Artificial Sequence
  Cyclic GFR-binding peptide
HEELRSMEGLLKPKKRVYEMIQVTINSHH

SEQ ID NO: 99795 - protein, 37 aa, Artificial Sequence
  Cyclic GFR-binding peptide
  MOD_RES (1)..(3)..(34)..(35): Xaa is C or S
XKXSKVIMSMEGLIKPTKGIMIQITINSLDQSVXXPS

SEQ ID NO: 99796 - protein, 37 aa, Artificial Sequence; identical to SEQ ID NO: 23274
  Cyclic GFR-binding peptide
  MOD_RES (2)..(2): Xaa is C or S

SEQ ID NO: 99797 - protein, 26 aa, Artificial Sequence
  Cyclic GFR-binding peptide
HQLFSMEGIHQGQHPKIRMIQMTINS

SEQ ID NO: 99798 - protein, 42 aa, Artificial Sequence; identical to SEQ ID NO: 23277
  Cyclic GFR-binding peptide
  MOD_RES (2)..(36): Xaa is C or S

SEQ ID NO: 99799 - protein, 24 aa, Artificial Sequence
  Cyclic GFR-binding peptide
IMSMEGIIKPTKGIMIQITINSLD

SEQ ID NO: 99800 - protein, 26 aa, Artificial Sequence
  Cyclic GFR-binding peptide
QLFSMEGIHQGQHPKIRMIQMTINSE

SEQ ID NO: 99801 - protein, 28 aa, Artificial Sequence
  Cyclic GFR-binding peptide
  MOD_RES (28)..(28): Xaa is C or S
VMSMEGIVKPTRGVMIQITINSLDQPVX

SEQ ID NO: 99802 - protein, 35 aa, Artificial Sequence
  Cyclic GFR-binding peptide
  MOD_RES (2)..(4): Xaa is C or S
RXGXSEVVMDSMEGIVVNNASDMIQITINSLRTPV

SEQ ID NO: 99803 - protein, 25 aa, Artificial Sequence
  Cyclic GFR-binding peptide
KVVMSMEGLVKPTRGVMIQITINSL

SEQ ID NO: 99804 - protein, 31 aa, Artificial Sequence; identical to SEQ ID NO: 23281
  Cyclic GFR-binding peptide

SEQ ID NO: 99805 - protein, 34 aa, Artificial Sequence
  Cyclic GFR-binding peptide
  MOD_RES (28)..(29): Xaa is C or S
IMSMEGLIKPTKGIMIQITINSLDQSVXXPSASA

SEQ ID NO: 99806 - protein, 27 aa, Artificial Sequence
  Cyclic GFR-binding peptide
VIMSMEGLIKPTKGIMIQITINSLDQS

SEQ ID NO: 99807 - protein, 36 aa, Artificial Sequence; identical to SEQ ID NO: 23284
  Cyclic GFR-binding peptide
  MOD_RES (1)..(3): Xaa is C or S

SEQ ID NO: 99808 - protein, 41 aa, Artificial Sequence; identical to SEQ ID NO: 23286
  Cyclic GFR-binding peptide
  MOD_RES (1)..(3)..(37): Xaa is C or S

SEQ ID NO: 99809 - protein, 35 aa, Artificial Sequence; identical to SEQ ID NO: 63568
  Cyclic GFR-binding peptide
  MOD_RES (31)..(32): Xaa is C or S

SEQ ID NO: 99810 - protein, 43 aa, Artificial Sequence; identical to SEQ ID NO: 23288
  Cyclic GFR-binding peptide
  MOD_RES (2)..(39): Xaa is C or S

SEQ ID NO: 99811 - protein, 29 aa, Artificial Sequence
  Cyclic GFR-binding peptide
  MOD_RES (1)..(1): Xaa is C or S
XEEVIMSMEGLLLVRGNDMIQMTINSTKV

SEQ ID NO: 99812 - protein, 24 aa, Artificial Sequence
  Cyclic GFR-binding peptide
VVMDSMEGLVVNNASDMIQITINS

SEQ ID NO: 99813 - protein, 27 aa, Artificial Sequence
  Cyclic GFR-binding peptide
VVMDSMEGLVVNNASDMIQITINSLRT

SEQ ID NO: 99814 - protein, 25 aa, Artificial Sequence
  Cyclic GFR-binding peptide
VVMNSMEGLIVNSSDDMIQVTINSL

SEQ ID NO: 99815 - protein, 36 aa, Artificial Sequence; identical to SEQ ID NO: 23289
  Cyclic GFR-binding peptide
  MOD_RES (34)..(34): Xaa is C or S

SEQ ID NO: 99816 - protein, 33 aa, Artificial Sequence; identical to SEQ ID NO: 23290
  Cyclic GFR-binding peptide
  MOD_RES (28)..(28): Xaa is C or S

SEQ ID NO: 99817 - protein, 21 aa, Artificial Sequence
  Cyclic GFR-binding peptide
SMEGIVKPKRGVMIQITINSL

SEQ ID NO: 99818 - protein, 36 aa, Artificial Sequence; identical to SEQ ID NO: 23294
  Cyclic GFR-binding peptide
  MOD_RES (2)..(36): Xaa is C or S

SEQ ID NO: 99819 - protein, 30 aa, Artificial Sequence; identical to SEQ ID NO: 66918
  Cyclic GFR-binding peptide
  MOD_RES (28)..(29): Xaa is C or S

SEQ ID NO: 99820 - protein, 36 aa, Artificial Sequence; identical to SEQ ID NO: 23298
  Cyclic GFR-binding peptide

SEQ ID NO: 99821 - protein, 27 aa, Artificial Sequence
  Cyclic GFR-binding peptide
VMDSMEGIVVNNAADMIQITINSLRAP

SEQ ID NO: 99822 - protein, 28 aa, Artificial Sequence
  Cyclic GFR-binding peptide
  MOD_RES (1)..(3): Xaa is C or S
XKXSRVIMSMEGIVKPKRGVMIQITINS

SEQ ID NO: 99823 - protein, 27 aa, Artificial Sequence
  Cyclic GFR-binding peptide
HEELRSMEGILKPKKRVYEMIQVTINS

SEQ ID NO: 99824 - protein, 42 aa, Artificial Sequence; identical to SEQ ID NO: 23305
  Cyclic GFR-binding peptide
  MOD_RES (2)..(4)..(41): Xaa is C or S

SEQ ID NO: 99825 - protein, 29 aa, Artificial Sequence
  Cyclic GFR-binding peptide
EEVIMSMEGILLVRGNDMIQMTINSTKVP

SEQ ID NO: 99826 - protein, 26 aa, Artificial Sequence
  Cyclic GFR-binding peptide
MSMEGILLVRGNDMIQMTINSTKVPA

SEQ ID NO: 99827 - protein, 28 aa, Artificial Sequence
  Cyclic GFR-binding peptide
VIMSMEGLIKPTKGIMIQITINSLDQSV

SEQ ID NO: 99828 - protein, 33 aa, Artificial Sequence
  Cyclic GFR-binding peptide
  MOD_RES (2)..(4): Xaa is C or S
SXGXRDVVMGSMEGIIIQQKDNMIQMTINSMKT

SEQ ID NO: 99829 - protein, 30 aa, Artificial Sequence; identical to SEQ ID NO: 23311
  Cyclic GFR-binding peptide
  MOD_RES (30)..(30): Xaa is C or S

SEQ ID NO: 99830 - protein, 31 aa, Artificial Sequence; identical to SEQ ID NO: 23315
  Cyclic GFR-binding peptide

SEQ ID NO: 99831 - protein, 25 aa, Artificial Sequence
  Cyclic GFR-binding peptide
DSMEGIVVNNASDMIQITINSLRTP

SEQ ID NO: 99832 - protein, 30 aa, Artificial Sequence
  Cyclic GFR-binding peptide
  MOD_RES (1)..(3): Xaa is C or S
XGXSEVVMDSMEGLVVNNASDMIQITINSL

SEQ ID NO: 99833 - protein, 39 aa, Artificial Sequence
  Cyclic GFR-binding peptide
  MOD_RES (1)..(3)..(35)..(36): Xaa is C or S
XGXSRVVMNSMEGLIVNSSDDMIQVTINSLKTPAXXPKP

SEQ ID NO: 99834 - protein, 34 aa, Artificial Sequence
  Cyclic GFR-binding peptide
  MOD_RES (28)..(29): Xaa is C or S
VMSMEGLVKPTRGVMIQITINSLDQPVXXPSASA

SEQ ID NO: 99835 - protein, 37 aa, Artificial Sequence
  Cyclic GFR-binding peptide
  MOD_RES (31)..(32): Xaa is C or S
EVVMDSMEGIVVNNASDMIQITINSLRTPVXXTPPTS

SEQ ID NO: 99836 - protein, 28 aa, Artificial Sequence
  Cyclic GFR-binding peptide
  MOD_RES (28)..(28): Xaa is C or S
IMSMEGIIKPTKGIMIQITINSLDQSVX

SEQ ID NO: 99837 - protein, 28 aa, Artificial Sequence
  Cyclic GFR-binding peptide
VMDSMEGIVVNNAADMIQITINSLRAPV

SEQ ID NO: 99838 - protein, 37 aa, Artificial Sequence; identical to SEQ ID NO: 63600
  Cyclic GFR-binding peptide
  MOD_RES (31)..(32): Xaa is C or S

SEQ ID NO: 99839 - protein, 31 aa, Artificial Sequence
  Cyclic GFR-binding peptide
  MOD_RES (2)..(2): Xaa is C or S
KXSKVVMSMEGLVKPTRGVMIQITINSLDQP

SEQ ID NO: 99840 - protein, 37 aa, Artificial Sequence; identical to SEQ ID NO: 21370
  Cyclic GFR-binding peptide
  MOD_RES (33)..(33): Xaa is C or S

SEQ ID NO: 99841 - protein, 28 aa, Artificial Sequence
  Cyclic GFR-binding peptide
  MOD_RES (28)..(28): Xaa is C or S
IMSMEGIVKPKRGVMIQITINSLAQPVX

SEQ ID NO: 99842 - protein, 29 aa, Artificial Sequence
  Cyclic GFR-binding peptide
ELRSMEGLLKPKKRVYEMIQVTINSHHVR

SEQ ID NO: 99843 - protein, 37 aa, Artificial Sequence
  Cyclic GFR-binding peptide
  MOD_RES (31)..(32): Xaa is C or S
EEVIMSMEGLLLVRGNDMIQMTINSTKVPAXXTSPVR

SEQ ID NO: 99844 - protein, 29 aa, Artificial Sequence
  Cyclic GFR-binding peptide
SKVIMSMEGIIKPTKGIMIQITINSLDQS

SEQ ID NO: 99845 - protein, 30 aa, Artificial Sequence
  Cyclic GFR-binding peptide
  MOD_RES (28)..(29): Xaa is C or S
MDSMEGIVVNNASDMIQITINSLRTPVXXT

SEQ ID NO: 99846 - protein, 43 aa, Artificial Sequence; identical to SEQ ID NO: 21377
  Cyclic GFR-binding peptide
  MOD_RES (1)..(3)..(37): Xaa is C or S

SEQ ID NO: 99847 - protein, 35 aa, Artificial Sequence; identical to SEQ ID NO: 21378
  Cyclic GFR-binding peptide
  MOD_RES (1)..(35): Xaa is C or S

SEQ ID NO: 99848 - protein, 27 aa, Artificial Sequence
  Cyclic GFR-binding peptide
  MOD_RES (27)..(27): Xaa is C or S
GSMEGLIIQQKDNMIQMTINSMKTPTX

SEQ ID NO: 99849 - protein, 31 aa, Artificial Sequence; identical to SEQ ID NO: 21380
  Cyclic GFR-binding peptide

SEQ ID NO: 99850 - protein, 29 aa, Artificial Sequence
  Cyclic GFR-binding peptide
  MOD_RES (1)..(3): Xaa is C or S
XGXRDVVMGSMEGLIIQQKDNMIQMTINS

SEQ ID NO: 99851 - protein, 34 aa, Artificial Sequence; identical to SEQ ID NO: 21384
  Cyclic GFR-binding peptide
  MOD_RES (34)..(34): Xaa is C or S

SEQ ID NO: 99852 - protein, 29 aa, Artificial Sequence
  Cyclic GFR-binding peptide
  MOD_RES (29)..(29): Xaa is C or S
VMDSMEGIVVNNASDMIQITINSLRTPVX

SEQ ID NO: 99853 - protein, 31 aa, Artificial Sequence; identical to SEQ ID NO: 21388
  Cyclic GFR-binding peptide
  MOD_RES (31)..(31): Xaa is C or S

SEQ ID NO: 99854 - protein, 29 aa, Artificial Sequence
  Cyclic GFR-binding peptide
SEVVMDSMEGIVVNNASDMIQITINSLRT

SEQ ID NO: 99855 - protein, 32 aa, Artificial Sequence; identical to SEQ ID NO: 66960
  Cyclic GFR-binding peptide
  MOD_RES (1)..(32): Xaa is C or S

SEQ ID NO: 99856 - protein, 34 aa, Artificial Sequence; identical to SEQ ID NO: 63619
  Cyclic GFR-binding peptide
  MOD_RES (32)..(33): Xaa is C or S

SEQ ID NO: 99857 - protein, 24 aa, Artificial Sequence
  Cyclic GFR-binding peptide
LRSMEGLLKPKKRVYEMIQVTINS

SEQ ID NO: 99858 - protein, 31 aa, Artificial Sequence
  Cyclic GFR-binding peptide
  MOD_RES (31)..(31): Xaa is C or S
EEVIMSMEGLLLVRGNDMIQMTINSTKVPAX

SEQ ID NO: 99859 - protein, 35 aa, Artificial Sequence; identical to SEQ ID NO: 21395
  Cyclic GFR-binding peptide
  MOD_RES (2)..(2): Xaa is C or S

SEQ ID NO: 99860 - protein, 23 aa, Artificial Sequence
  Cyclic GFR-binding peptide
MDSMEGLVVNNAADMIQITINSL

SEQ ID NO: 99861 - protein, 28 aa, Artificial Sequence
  Cyclic GFR-binding peptide
  MOD_RES (26)..(27): Xaa is C or S
SMEGLIVNSSDDMIQVTINSLKTPAXXP

SEQ ID NO: 99862 - protein, 29 aa, Artificial Sequence
  Cyclic GFR-binding peptide
  MOD_RES (2)..(2): Xaa is C or S
GXEEVIMSMEGLLLVRGNDMIQMTINSTK

SEQ ID NO: 99863 - protein, 30 aa, Artificial Sequence
  Cyclic GFR-binding peptide
EVVMDSMEGIVVNNASDMIQITINSLRTPV

SEQ ID NO: 99864 - protein, 28 aa, Artificial Sequence
  Cyclic GFR-binding peptide
EVVMDSMEGLVVNNAADMIQITINSLRA

SEQ ID NO: 99865 - protein, 36 aa, Artificial Sequence; identical to SEQ ID NO: 21403
  Cyclic GFR-binding peptide
  MOD_RES (36)..(36): Xaa is C or S

SEQ ID NO: 99866 - protein, 36 aa, Artificial Sequence
  Cyclic GFR-binding peptide
  MOD_RES (2)..(4)..(35)..(36): Xaa is C or S
LXGXEEVIMSMEGLLLVRGNDMIQMTINSTKVPAXX

SEQ ID NO: 99867 - protein, 35 aa, Artificial Sequence
  Cyclic GFR-binding peptide
  MOD_RES (1)..(32)..(33): Xaa is C or S
XSKVVMSMEGLVKPTRGVMIQITINSLDQPVXXPS

SEQ ID NO: 99868 - protein, 45 aa, Artificial Sequence; identical to SEQ ID NO: 21404
  Cyclic GFR-binding peptide
  MOD_RES (2)..(4)..(41): Xaa is C or S

SEQ ID NO: 99869 - protein, 39 aa, Artificial Sequence; identical to SEQ ID NO: 63635
  Cyclic GFR-binding peptide
  MOD_RES (2)..(4)..(35)..(36): Xaa is C or S

SEQ ID NO: 99870 - protein, 27 aa, Artificial Sequence
  Cyclic GFR-binding peptide
FSMEGIHQGQHPKIRMIQMTINSEETP

SEQ ID NO: 99871 - protein, 25 aa, Artificial Sequence
  Cyclic GFR-binding peptide
IMSMEGIIKPTKGIMIQITINSLDQ

SEQ ID NO: 99872 - protein, 33 aa, Artificial Sequence; identical to SEQ ID NO: 21413
  Cyclic GFR-binding peptide

SEQ ID NO: 99873 - protein, 44 aa, Artificial Sequence; identical to SEQ ID NO: 21414
  Cyclic GFR-binding peptide
  MOD_RES (2)..(4)..(41): Xaa is C or S

SEQ ID NO: 99874 - protein, 32 aa, Artificial Sequence
  Cyclic GFR-binding peptide
  MOD_RES (1)..(1): Xaa is C or S
XRDVVMGSMEGIIIQQKDNMIQMTINSMKTPT

SEQ ID NO: 99875 - protein, 26 aa, Artificial Sequence
  Cyclic GFR-binding peptide
DVVMGSMEGIIIQQKDNMIQMTINSM

SEQ ID NO: 99876 - protein, 27 aa, Artificial Sequence
  Cyclic GFR-binding peptide
  MOD_RES (26)..(27): Xaa is C or S
SMEGLVKPTRGVMIQITINSLDQPVXX

SEQ ID NO: 99877 - protein, 29 aa, Artificial Sequence
  Cyclic GFR-binding peptide
  MOD_RES (2)..(4): Xaa is C or S
SXKXSRVIMSMEGLVKPKRGVMIQITINS

SEQ ID NO: 99878 - protein, 36 aa, Artificial Sequence
  Cyclic GFR-binding peptide
  MOD_RES (1)..(3)..(35)..(36): Xaa is C or S
XGXSEVVMDSMEGLVVNNASDMIQITINSLRTPVXX

SEQ ID NO: 99879 - protein, 27 aa, Artificial Sequence
  Cyclic GFR-binding peptide
RSMEGLLKPKKRVYEMIQVTINSHHVR

SEQ ID NO: 99880 - protein, 30 aa, Artificial Sequence; identical to SEQ ID NO: 66998
  Cyclic GFR-binding peptide
  MOD_RES (29)..(30): Xaa is C or S

SEQ ID NO: 99881 - protein, 25 aa, Artificial Sequence
  Cyclic GFR-binding peptide
MNSMEGLIVNSSDDMIQVTINSLKT

SEQ ID NO: 99882 - protein, 27 aa, Artificial Sequence
  Cyclic GFR-binding peptide
KVIMSMEGIIKPTKGIMIQITINSLDQ

SEQ ID NO: 99883 - protein, 29 aa, Artificial Sequence
  Cyclic GFR-binding peptide
  MOD_RES (26)..(27): Xaa is C or S
SMEGIVVNNAADMIQITINSLRAPVXXSA

SEQ ID NO: 99884 - protein, 25 aa, Artificial Sequence
  Cyclic GFR-binding peptide
MDSMEGLVVNNASDMIQITINSLRT

SEQ ID NO: 99885 - protein, 37 aa, Artificial Sequence
  Cyclic GFR-binding peptide
  MOD_RES (2)..(4)..(35)..(36): Xaa is C or S
SXKXSRVIMSMEGLVKPKRGVMIQITINSLAQPVXXP

SEQ ID NO: 99886 - protein, 41 aa, Artificial Sequence; identical to SEQ ID NO: 21427
  Cyclic GFR-binding peptide
  MOD_RES (1)..(38): Xaa is C or S

SEQ ID NO: 99887 - protein, 33 aa, Artificial Sequence; identical to SEQ ID NO: 67003
  Cyclic GFR-binding peptide
  MOD_RES (2)..(33): Xaa is C or S

SEQ ID NO: 99888 - protein, 25 aa, Artificial Sequence
  Cyclic GFR-binding peptide
NSMEGIIVNSSDDMIQVTINSLKTP

SEQ ID NO: 99889 - protein, 29 aa, Artificial Sequence
  Cyclic GFR-binding peptide
LRSMEGLLKPKKRVYEMIQVTINSHHVRS

SEQ ID NO: 99890 - protein, 28 aa, Artificial Sequence
  Cyclic GFR-binding peptide
ELSMEGIHQGQHPKIRMIQMTINSQGTP

SEQ ID NO: 99891 - protein, 29 aa, Artificial Sequence
  Cyclic GFR-binding peptide
EVIMSMEGILLVRGNDMIQMTINSTKVPA

SEQ ID NO: 99892 - protein, 30 aa, Artificial Sequence; identical to SEQ ID NO: 67010
  Cyclic GFR-binding peptide
  MOD_RES (30)..(30): Xaa is C or S

SEQ ID NO: 99893 - protein, 39 aa, Artificial Sequence; identical to SEQ ID NO: 21435
  Cyclic GFR-binding peptide
  MOD_RES (2)..(4)..(38): Xaa is C or S

SEQ ID NO: 99894 - protein, 26 aa, Artificial Sequence
  Cyclic GFR-binding peptide
LSMEGIHQGQHPKIRMIQMTINSQGT

SEQ ID NO: 99895 - protein, 32 aa, Artificial Sequence
  Cyclic GFR-binding peptide
  MOD_RES (27)..(28): Xaa is C or S
NSMEGLIVNSSDDMIQVTINSLKTPAXXPKPV

SEQ ID NO: 99896 - protein, 34 aa, Artificial Sequence
  Cyclic GFR-binding peptide
  MOD_RES (1)..(3)..(34): Xaa is C or S
XGXEEVIMSMEGILLVRGNDMIQMTINSTKVPAX

SEQ ID NO: 99897 - protein, 41 aa, Artificial Sequence
  Cyclic GFR-binding peptide
  MOD_RES (2)..(4)..(36)..(37): Xaa is C or S
SXGXRDVVMGSMEGIIIQQKDNMIQMTINSMKTPTXXPGAS

SEQ ID NO: 99898 - protein, 36 aa, Artificial Sequence; identical to SEQ ID NO: 67015
  Cyclic GFR-binding peptide
  MOD_RES (2)..(4)..(35)..(36): Xaa is C or S

SEQ ID NO: 99899 - protein, 35 aa, Artificial Sequence
  Cyclic GFR-binding peptide
  MOD_RES (1)..(3)..(34)..(35): Xaa is C or S
XGXEEVIMSMEGILLVRGNDMIQMTINSTKVPAXX

SEQ ID NO: 99900 - protein, 29 aa, Artificial Sequence
  Cyclic GFR-binding peptide
EELRSMEGLLKPKKRVYEMIQVTINSHHV

SEQ ID NO: 99901 - protein, 26 aa, Artificial Sequence
  Cyclic GFR-binding peptide
SMEGIFIPKKRVIEMIQVTINSLQVQ

SEQ ID NO: 99902 - protein, 23 aa, Artificial Sequence
  Cyclic GFR-binding peptide
DSMEGLVVNNAADMIQITINSLR

SEQ ID NO: 99903 - protein, 28 aa, Artificial Sequence
  Cyclic GFR-binding peptide
  MOD_RES (2)..(2): Xaa is C or S
GXSEVVMDSMEGIVVNNASDMIQITINS

SEQ ID NO: 99904 - protein, 35 aa, Artificial Sequence
  Cyclic GFR-binding peptide
  MOD_RES (1)..(3)..(35): Xaa is C or S
XGXRDVVMGSMEGLIIQQKDNMIQMTINSMKTPTX

SEQ ID NO: 99905 - protein, 26 aa, Artificial Sequence
  Cyclic GFR-binding peptide
  MOD_RES (1)..(1): Xaa is C or S
XSRVIMSMEGIVKPKRGVMIQITINS

SEQ ID NO: 99906 - protein, 39 aa, Artificial Sequence; identical to SEQ ID NO: 21453
  Cyclic GFR-binding peptide
  MOD_RES (34)..(34): Xaa is C or S

SEQ ID NO: 99907 - protein, 39 aa, Artificial Sequence; identical to SEQ ID NO: 21454
  Cyclic GFR-binding peptide
  MOD_RES (1)..(35): Xaa is C or S

SEQ ID NO: 99908 - protein, 42 aa, Artificial Sequence; identical to SEQ ID NO: 21456
  Cyclic GFR-binding peptide
  MOD_RES (1)..(38): Xaa is C or S

SEQ ID NO: 99909 - protein, 28 aa, Artificial Sequence
  Cyclic GFR-binding peptide
  MOD_RES (1)..(1): Xaa is C or S
XSEVVMDSMEGLVVNNASDMIQITINSL

SEQ ID NO: 99910 - protein, 31 aa, Artificial Sequence; identical to SEQ ID NO: 21462
  Cyclic GFR-binding peptide
  MOD_RES (1)..(1): Xaa is C or S

SEQ ID NO: 99911 - protein, 29 aa, Artificial Sequence
  Cyclic GFR-binding peptide
  MOD_RES (1)..(3): Xaa is C or S
XGXEEVIMSMEGLLLVRGNDMIQMTINST

SEQ ID NO: 99912 - protein, 29 aa, Artificial Sequence
  Cyclic GFR-binding peptide
  MOD_RES (1)..(3): Xaa is C or S
XKXSRVIMSMEGLVKPKRGVMIQITINSL

SEQ ID NO: 99913 - protein, 38 aa, Artificial Sequence; identical to SEQ ID NO: 21468
  Cyclic GFR-binding peptide
  MOD_RES (2)..(36): Xaa is C or S

SEQ ID NO: 99914 - protein, 26 aa, Artificial Sequence
  Cyclic GFR-binding peptide
SMEGILKPKKRVYEMIQVTINSHHVR

SEQ ID NO: 99915 - protein, 24 aa, Artificial Sequence
  Cyclic GFR-binding peptide
KVVMSMEGLVKPTRGVMIQITINS

SEQ ID NO: 99916 - protein, 37 aa, Artificial Sequence; identical to SEQ ID NO: 21478
  Cyclic GFR-binding peptide
  MOD_RES (31)..(31): Xaa is C or S

SEQ ID NO: 99917 - protein, 31 aa, Artificial Sequence
  Cyclic GFR-binding peptide
  MOD_RES (28)..(29): Xaa is C or S
MDSMEGLVVNNASDMIQITINSLRTPVXXTP

SEQ ID NO: 99918 - protein, 32 aa, Artificial Sequence; identical to SEQ ID NO: 63695
  Cyclic GFR-binding peptide
  MOD_RES (26)..(27): Xaa is C or S

SEQ ID NO: 99919 - protein, 31 aa, Artificial Sequence; identical to SEQ ID NO: 63698
  Cyclic GFR-binding peptide
  MOD_RES (31)..(31): Xaa is C or S

SEQ ID NO: 99920 - protein, 39 aa, Artificial Sequence
  Cyclic GFR-binding peptide
  MOD_RES (2)..(34)..(35): Xaa is C or S
GXSEVVMDSMEGIVVNNASDMIQITINSLRTPVXXTPPT

SEQ ID NO: 99921 - protein, 37 aa, Artificial Sequence; identical to SEQ ID NO: 63700
  Cyclic GFR-binding peptide
  MOD_RES (1)..(32)..(33): Xaa is C or S

SEQ ID NO: 99922 - protein, 35 aa, Artificial Sequence
  Cyclic GFR-binding peptide
  MOD_RES (1)..(3)..(35): Xaa is C or S
XGXAEVVMDSMEGLVVNNAADMIQITINSLRAPVX

SEQ ID NO: 99923 - protein, 39 aa, Artificial Sequence
  Cyclic GFR-binding peptide
  MOD_RES (2)..(34)..(35): Xaa is C or S
GXRDVVMGSMEGLIIQQKDNMIQMTINSMKTPTXXPGAS

SEQ ID NO: 99924 - protein, 30 aa, Artificial Sequence
  Cyclic GFR-binding peptide
SKVVMSMEGLVKPTRGVMIQITINSLDQPV

SEQ ID NO: 99925 - protein, 38 aa, Artificial Sequence; identical to SEQ ID NO: 21484
  Cyclic GFR-binding peptide
  MOD_RES (34)..(34): Xaa is C or S

SEQ ID NO: 99926 - protein, 29 aa, Artificial Sequence
  Cyclic GFR-binding peptide
  MOD_RES (27)..(28): Xaa is C or S
MSMEGLLLVRGNDMIQMTINSTKVPAXXT

SEQ ID NO: 99927 - protein, 35 aa, Artificial Sequence
  Cyclic GFR-binding peptide
  MOD_RES (2)..(34)..(35): Xaa is C or S
GXSEVVMDSMEGLVVNNASDMIQITINSLRTPVXX

SEQ ID NO: 99928 - protein, 29 aa, Artificial Sequence
  Cyclic GFR-binding peptide
ELHEELRSMEGILKPKKRVYEMIQVTINS

SEQ ID NO: 99929 - protein, 23 aa, Artificial Sequence
  Cyclic GFR-binding peptide
SMEGIVVNNASDMIQITINSLRT

SEQ ID NO: 99930 - protein, 26 aa, Artificial Sequence
  Cyclic GFR-binding peptide
VMGSMEGLIIQQKDNMIQMTINSMKT

SEQ ID NO: 99931 - protein, 24 aa, Artificial Sequence
  Cyclic GFR-binding peptide
VMGSMEGLIIQQKDNMIQMTINSM

SEQ ID NO: 99932 - protein, 28 aa, Artificial Sequence
  Cyclic GFR-binding peptide
  MOD_RES (26)..(27): Xaa is C or S
SMEGLVVNNASDMIQITINSLRTPVXXT

SEQ ID NO: 99933 - protein, 38 aa, Artificial Sequence
  Cyclic GFR-binding peptide
  MOD_RES (2)..(4)..(36)..(37): Xaa is C or S
RXGXAEVVMDSMEGIVVNNAADMIQITINSLRAPVXXS

SEQ ID NO: 99934 - protein, 32 aa, Artificial Sequence; identical to SEQ ID NO: 21491
  Cyclic GFR-binding peptide
  MOD_RES (32)..(32): Xaa is C or S

SEQ ID NO: 99935 - protein, 30 aa, Artificial Sequence
  Cyclic GFR-binding peptide
  MOD_RES (1)..(1): Xaa is C or S
XSKVVMSMEGLVKPTRGVMIQITINSLDQP

SEQ ID NO: 99936 - protein, 31 aa, Artificial Sequence
  Cyclic GFR-binding peptide
  MOD_RES (1)..(3): Xaa is C or S
XGXAEVVMDSMEGIVVNNAADMIQITINSLR

SEQ ID NO: 99937 - protein, 24 aa, Artificial Sequence
  Cyclic GFR-binding peptide
VMSMEGLVKPTRGVMIQITINSLD

SEQ ID NO: 99938 - protein, 34 aa, Artificial Sequence
  Cyclic GFR-binding peptide
  MOD_RES (30)..(31): Xaa is C or S
EVIMSMEGLLLVRGNDMIQMTINSTKVPAXXTSP

SEQ ID NO: 99939 - protein, 28 aa, Artificial Sequence
  Cyclic GFR-binding peptide
SRVVMNSMEGLIVNSSDDMIQVTINSLK

SEQ ID NO: 99940 - protein, 29 aa, Artificial Sequence
  Cyclic GFR-binding peptide
  MOD_RES (29)..(29): Xaa is C or S
VIMSMEGLIKPTKGIMIQITINSLDQSVX

SEQ ID NO: 99941 - protein, 25 aa, Artificial Sequence
  Cyclic GFR-binding peptide
EVVMDSMEGLVVNNASDMIQITINS

SEQ ID NO: 99942 - protein, 36 aa, Artificial Sequence; identical to SEQ ID NO: 21503
  Cyclic GFR-binding peptide
  MOD_RES (1)..(3): Xaa is C or S

SEQ ID NO: 99943 - protein, 29 aa, Artificial Sequence
  Cyclic GFR-binding peptide
  MOD_RES (1)..(1): Xaa is C or S
XSRVVMNSMEGIIVNSSDDMIQVTINSLK

SEQ ID NO: 99944 - protein, 28 aa, Artificial Sequence
  Cyclic GFR-binding peptide
EEVIMSMEGLLLVRGNDMIQMTINSTKV

SEQ ID NO: 99945 - protein, 32 aa, Artificial Sequence; identical to SEQ ID NO: 21506
  Cyclic GFR-binding peptide
  MOD_RES (31)..(31): Xaa is C or S

SEQ ID NO: 99946 - protein, 30 aa, Artificial Sequence; identical to SEQ ID NO: 21511
  Cyclic GFR-binding peptide

SEQ ID NO: 99947 - protein, 38 aa, Artificial Sequence
  Cyclic GFR-binding peptide
  MOD_RES (1)..(3)..(35)..(36): Xaa is C or S
XGXRDVVMGSMEGLIIQQKDNMIQMTINSMKTPTXXPG

SEQ ID NO: 99948 - protein, 44 aa, Artificial Sequence; identical to SEQ ID NO: 21516
  Cyclic GFR-binding peptide
  MOD_RES (2)..(4)..(41): Xaa is C or S

SEQ ID NO: 99949 - protein, 43 aa, Artificial Sequence; identical to SEQ ID NO: 21518
  Cyclic GFR-binding peptide
  MOD_RES (2)..(39): Xaa is C or S

SEQ ID NO: 99950 - protein, 40 aa, Artificial Sequence; identical to SEQ ID NO: 21519
  Cyclic GFR-binding peptide
  MOD_RES (34)..(34): Xaa is C or S

SEQ ID NO: 99951 - protein, 28 aa, Artificial Sequence
  Cyclic GFR-binding peptide
  MOD_RES (2)..(2): Xaa is C or S
GXRDVVMGSMEGLIIQQKDNMIQMTINS

SEQ ID NO: 99952 - protein, 30 aa, Artificial Sequence
  Cyclic GFR-binding peptide
  MOD_RES (30)..(30): Xaa is C or S
EVIMSMEGILLVRGNDMIQMTINSTKVPAX

SEQ ID NO: 99953 - protein, 30 aa, Artificial Sequence; identical to SEQ ID NO: 21520
  Cyclic GFR-binding peptide

SEQ ID NO: 99954 - protein, 27 aa, Artificial Sequence
  Cyclic GFR-binding peptide
  MOD_RES (2)..(2): Xaa is C or S
GXEEVIMSMEGLLLVRGNDMIQMTINS

SEQ ID NO: 99955 - protein, 32 aa, Artificial Sequence
  Cyclic GFR-binding peptide
  MOD_RES (29)..(30): Xaa is C or S
VMDSMEGLVVNNAADMIQITINSLRAPVXXSA

SEQ ID NO: 99956 - protein, 27 aa, Artificial Sequence
  Cyclic GFR-binding peptide
  MOD_RES (26)..(27): Xaa is C or S
SMEGIVVNNASDMIQITINSLRTPVXX

SEQ ID NO: 99957 - protein, 40 aa, Artificial Sequence
  Cyclic GFR-binding peptide
  MOD_RES (1)..(3)..(35)..(36): Xaa is C or S
XGXRDVVMGSMEGLIIQQKDNMIQMTINSMKTPTXXPGAS

SEQ ID NO: 99958 - protein, 26 aa, Artificial Sequence
  Cyclic GFR-binding peptide
SEVVMDSMEGLVVNNASDMIQITINS

SEQ ID NO: 99959 - protein, 38 aa, Artificial Sequence
  Cyclic GFR-binding peptide
  MOD_RES (2)..(34)..(35): Xaa is C or S
GXSEVVMDSMEGIVVNNASDMIQITINSLRTPVXXTPP

SEQ ID NO: 99960 - protein, 35 aa, Artificial Sequence
  Cyclic GFR-binding peptide
  MOD_RES (1)..(3)..(35): Xaa is C or S
XGXSRVVMNSMEGLIVNSSDDMIQVTINSLKTPAX

SEQ ID NO: 99961 - protein, 31 aa, Artificial Sequence; identical to SEQ ID NO: 63742
  Cyclic GFR-binding peptide
  MOD_RES (27)..(28): Xaa is C or S

SEQ ID NO: 99962 - protein, 30 aa, Artificial Sequence; identical to SEQ ID NO: 63743
  Cyclic GFR-binding peptide

SEQ ID NO: 99963 - protein, 28 aa, Artificial Sequence
  Cyclic GFR-binding peptide
HEELRSMEGLLKPKKRVYEMIQVTINSH

SEQ ID NO: 99964 - protein, 25 aa, Artificial Sequence
  Cyclic GFR-binding peptide
SMEGLVVNNASDMIQITINSLRTPV

SEQ ID NO: 99965 - protein, 32 aa, Artificial Sequence
  Cyclic GFR-binding peptide
  MOD_RES (2)..(2): Xaa is C or S
GXAEVVMDSMEGLVVNNAADMIQITINSLRAP

SEQ ID NO: 99966 - protein, 31 aa, Artificial Sequence; identical to SEQ ID NO: 21532
  Cyclic GFR-binding peptide
  MOD_RES (2)..(2): Xaa is C or S

SEQ ID NO: 99967 - protein, 32 aa, Artificial Sequence; identical to SEQ ID NO: 21533
  Cyclic GFR-binding peptide
  MOD_RES (32)..(32): Xaa is C or S

SEQ ID NO: 99968 - protein, 31 aa, Artificial Sequence
  Cyclic GFR-binding peptide
  MOD_RES (1)..(3): Xaa is C or S
XKXSKVIMSMEGLIKPTKGIMIQITINSLDQ

SEQ ID NO: 99969 - protein, 23 aa, Artificial Sequence
  Cyclic GFR-binding peptide
SMEGLIIQQKDNMIQMTINSMKT

SEQ ID NO: 99970 - protein, 26 aa, Artificial Sequence
  Cyclic GFR-binding peptide
RSMEGLLKPKKRVYEMIQVTINSHHV

SEQ ID NO: 99971 - protein, 29 aa, Artificial Sequence
  Cyclic GFR-binding peptide
  MOD_RES (28)..(28): Xaa is C or S
SMEGIHQGQHPKIRMIQMTINSQGTPVXE

SEQ ID NO: 99972 - protein, 34 aa, Artificial Sequence; identical to SEQ ID NO: 21542
  Cyclic GFR-binding peptide

SEQ ID NO: 99973 - protein, 33 aa, Artificial Sequence
  Cyclic GFR-binding peptide
  MOD_RES (28)..(29): Xaa is C or S
MGSMEGLIIQQKDNMIQMTINSMKTPTXXPGAS

SEQ ID NO: 99974 - protein, 29 aa, Artificial Sequence
  Cyclic GFR-binding peptide
  MOD_RES (1)..(1): Xaa is C or S
XQSHEELSMEGIHQGQHPKIRMIQMTINS

SEQ ID NO: 99975 - protein, 28 aa, Artificial Sequence
  Cyclic GFR-binding peptide
  MOD_RES (1)..(1): Xaa is C or S
XSKVIMSMEGIIKPTKGIMIQITINSLD

SEQ ID NO: 99976 - protein, 39 aa, Artificial Sequence
  Cyclic GFR-binding peptide
  MOD_RES (1)..(33)..(34): Xaa is C or S
XSEVVMDSMEGIVVNNASDMIQITINSLRTPVXXTPPTS

SEQ ID NO: 99977 - protein, 30 aa, Artificial Sequence
  Cyclic GFR-binding peptide
  MOD_RES (2)..(4): Xaa is C or S
SXKXSKVVMSMEGLVKPTRGVMIQITINSL

SEQ ID NO: 99978 - protein, 20 aa, Artificial Sequence
  Cyclic GFR-binding peptide
SMEGIVVNNAADMIQITINS

SEQ ID NO: 99979 - protein, 36 aa, Artificial Sequence
  Cyclic GFR-binding peptide
  MOD_RES (1)..(33)..(34): Xaa is C or S
XRDVVMGSMEGIIIQQKDNMIQMTINSMKTPTXXPG

SEQ ID NO: 99980 - protein, 36 aa, Artificial Sequence; identical to SEQ ID NO: 21550
  Cyclic GFR-binding peptide
  MOD_RES (32)..(32): Xaa is C or S

SEQ ID NO: 99981 - protein, 27 aa, Artificial Sequence
  Cyclic GFR-binding peptide
  MOD_RES (27)..(27): Xaa is C or S
NSMEGIIVNSSDDMIQVTINSLKTPAX

SEQ ID NO: 99982 - protein, 26 aa, Artificial Sequence
  Cyclic GFR-binding peptide
  MOD_RES (26)..(26): Xaa is C or S
SMEGIVVNNAADMIQITINSLRAPVX

SEQ ID NO: 99983 - protein, 34 aa, Artificial Sequence; identical to SEQ ID NO: 21552
  Cyclic GFR-binding peptide
  MOD_RES (2)..(2): Xaa is C or S

SEQ ID NO: 99984 - protein, 25 aa, Artificial Sequence
  Cyclic GFR-binding peptide
RVVMNSMEGLIVNSSDDMIQVTINS

SEQ ID NO: 99985 - protein, 29 aa, Artificial Sequence
  Cyclic GFR-binding peptide
EVVMDSMEGLVVNNAADMIQITINSLRAP

SEQ ID NO: 99986 - protein, 35 aa, Artificial Sequence
  Cyclic GFR-binding peptide
  MOD_RES (32)..(33): Xaa is C or S
SEVVMDSMEGLVVNNASDMIQITINSLRTPVXXTP

SEQ ID NO: 99987 - protein, 34 aa, Artificial Sequence
  Cyclic GFR-binding peptide
  MOD_RES (30)..(31): Xaa is C or S
VVMDSMEGIVVNNASDMIQITINSLRTPVXXTPP

SEQ ID NO: 99988 - protein, 27 aa, Artificial Sequence
  Cyclic GFR-binding peptide
HEELSMEGIHQGQHPKIRMIQMTINSQ

SEQ ID NO: 99989 - protein, 26 aa, Artificial Sequence
  Cyclic GFR-binding peptide
SKVVMSMEGIVKPTRGVMIQITINSL

SEQ ID NO: 99990 - protein, 37 aa, Artificial Sequence; identical to SEQ ID NO: 21562
  Cyclic GFR-binding peptide
  MOD_RES (34)..(34): Xaa is C or S

SEQ ID NO: 99991 - protein, 35 aa, Artificial Sequence; identical to SEQ ID NO: 21565
  Cyclic GFR-binding peptide
  MOD_RES (1)..(3): Xaa is C or S

SEQ ID NO: 99992 - protein, 25 aa, Artificial Sequence
  Cyclic GFR-binding peptide
KVIMSMEGIIKPTKGIMIQITINSL

SEQ ID NO: 99993 - protein, 35 aa, Artificial Sequence; identical to SEQ ID NO: 21567
  Cyclic GFR-binding peptide
  MOD_RES (1)..(1): Xaa is C or S

SEQ ID NO: 99994 - protein, 33 aa, Artificial Sequence; identical to SEQ ID NO: 21568
  Cyclic GFR-binding peptide
  MOD_RES (1)..(3): Xaa is C or S

SEQ ID NO: 99995 - protein, 32 aa, Artificial Sequence; identical to SEQ ID NO: 21571
  Cyclic GFR-binding peptide

SEQ ID NO: 99996 - protein, 36 aa, Artificial Sequence; identical to SEQ ID NO: 21573
  Cyclic GFR-binding peptide
  MOD_RES (31)..(31): Xaa is C or S

SEQ ID NO: 99997 - protein, 30 aa, Artificial Sequence
  Cyclic GFR-binding peptide
  MOD_RES (1)..(3): Xaa is C or S
XGXRDVVMGSMEGLIIQQKDNMIQMTINSM

SEQ ID NO: 99998 - protein, 20 aa, Artificial Sequence
  Cyclic GFR-binding peptide
SMEGLVVNNASDMIQITINS

SEQ ID NO: 99999 - protein, 39 aa, Artificial Sequence
  Cyclic GFR-binding peptide
  MOD_RES (1)..(33)..(34): Xaa is C or S
XAEVVMDSMEGLVVNNAADMIQITINSLRAPVXXSAPAA

SEQ ID NO: 100000 - protein, 38 aa, Artificial Sequence
  Cyclic GFR-binding peptide
  MOD_RES (1)..(3)..(34)..(35): Xaa is C or S
XKXSKVIMSMEGLIKPTKGIMIQITINSLDQSVXXPSA

SEQ ID NO: 100001 - protein, 36 aa, Artificial Sequence
  Cyclic GFR-binding peptide
  MOD_RES (1)..(3)..(35)..(36): Xaa is C or S
XGXAEVVMDSMEGIVVNNAADMIQITINSLRAPVXX

SEQ ID NO: 100002 - protein, 25 aa, Artificial Sequence
  Cyclic GFR-binding peptide
SMEGIHQGQHPKIRMIQMTINSEET

SEQ ID NO: 100003 - protein, 28 aa, Artificial Sequence
  Cyclic GFR-binding peptide
HDELTSMEGLFIPKKRVIEMIQVTINSL

SEQ ID NO: 100004 - protein, 34 aa, Artificial Sequence; identical to SEQ ID NO: 21578
  Cyclic GFR-binding peptide

SEQ ID NO: 100005 - protein, 31 aa, Artificial Sequence
  Cyclic GFR-binding peptide
  MOD_RES (30)..(31): Xaa is C or S
VVMNSMEGLIVNSSDDMIQVTINSLKTPAXX

SEQ ID NO: 100006 - protein, 23 aa, Artificial Sequence
  Cyclic GFR-binding peptide
SMEGLFIPKKRVIEMIQVTINSL

SEQ ID NO: 100007 - protein, 40 aa, Artificial Sequence; identical to SEQ ID NO: 21584
  Cyclic GFR-binding peptide
  MOD_RES (2)..(36): Xaa is C or S

SEQ ID NO: 100008 - protein, 28 aa, Artificial Sequence
  Cyclic GFR-binding peptide
  MOD_RES (27)..(28): Xaa is C or S
MSMEGLVKPKRGVMIQITINSLAQPVXX

SEQ ID NO: 100009 - protein, 36 aa, Artificial Sequence
  Cyclic GFR-binding peptide
  MOD_RES (1)..(33)..(34): Xaa is C or S
XAEVVMDSMEGLVVNNAADMIQITINSLRAPVXXSA

SEQ ID NO: 100010 - protein, 35 aa, Artificial Sequence
  Cyclic GFR-binding peptide
  MOD_RES (31)..(32): Xaa is C or S
SKVIMSMEGLIKPTKGIMIQITINSLDQSVXXPSA

SEQ ID NO: 100011 - protein, 38 aa, Artificial Sequence; identical to SEQ ID NO: 67117
  Cyclic GFR-binding peptide
  MOD_RES (2)..(33)..(34): Xaa is C or S

SEQ ID NO: 100012 - protein, 27 aa, Artificial Sequence
  Cyclic GFR-binding peptide
  MOD_RES (1)..(1): Xaa is C or S
XSKVIMSMEGLIKPTKGIMIQITINSL

SEQ ID NO: 100013 - protein, 36 aa, Artificial Sequence; identical to SEQ ID NO: 67118
  Cyclic GFR-binding peptide
  MOD_RES (2)..(4)..(36): Xaa is C or S

SEQ ID NO: 100014 - protein, 31 aa, Artificial Sequence; identical to SEQ ID NO: 21587
  Cyclic GFR-binding peptide
  MOD_RES (31)..(31): Xaa is C or S

SEQ ID NO: 100015 - protein, 33 aa, Artificial Sequence; identical to SEQ ID NO: 67126
  Cyclic GFR-binding peptide
  MOD_RES (29)..(30): Xaa is C or S

SEQ ID NO: 100016 - protein, 35 aa, Artificial Sequence; identical to SEQ ID NO: 21595
  Cyclic GFR-binding peptide
  MOD_RES (32)..(32): Xaa is C or S

SEQ ID NO: 100017 - protein, 38 aa, Artificial Sequence; identical to SEQ ID NO: 21598
  Cyclic GFR-binding peptide
  MOD_RES (1)..(38): Xaa is C or S

SEQ ID NO: 100018 - protein, 28 aa, Artificial Sequence
  Cyclic GFR-binding peptide
VMNSMEGLIVNSSDDMIQVTINSLKTPA

SEQ ID NO: 100019 - protein, 32 aa, Artificial Sequence
  Cyclic GFR-binding peptide
  MOD_RES (30)..(31): Xaa is C or S
VVMDSMEGLVVNNASDMIQITINSLRTPVXXT

SEQ ID NO: 100020 - protein, 29 aa, Artificial Sequence
  Cyclic GFR-binding peptide
RVIMSMEGIVKPKRGVMIQITINSLAQPV

SEQ ID NO: 100021 - protein, 33 aa, Artificial Sequence; identical to SEQ ID NO: 21600
  Cyclic GFR-binding peptide

SEQ ID NO: 100022 - protein, 34 aa, Artificial Sequence
  Cyclic GFR-binding peptide
  MOD_RES (28)..(29): Xaa is C or S
MNSMEGIIVNSSDDMIQVTINSLKTPAXXPKPVH

SEQ ID NO: 100023 - protein, 34 aa, Artificial Sequence; identical to SEQ ID NO: 21602
  Cyclic GFR-binding peptide
  MOD_RES (2)..(4): Xaa is C or S

SEQ ID NO: 100024 - protein, 37 aa, Artificial Sequence; identical to SEQ ID NO: 21604
  Cyclic GFR-binding peptide
  MOD_RES (2)..(4): Xaa is C or S

SEQ ID NO: 100025 - protein, 32 aa, Artificial Sequence; identical to SEQ ID NO: 67133
  Cyclic GFR-binding peptide
  MOD_RES (2)..(4): Xaa is C or S

SEQ ID NO: 100026 - protein, 31 aa, Artificial Sequence
  Cyclic GFR-binding peptide
  MOD_RES (1)..(1): Xaa is C or S
XSEVVMDSMEGLVVNNASDMIQITINSLRTP

SEQ ID NO: 100027 - protein, 34 aa, Artificial Sequence
  Cyclic GFR-binding peptide
  MOD_RES (30)..(31): Xaa is C or S
VVMGSMEGLIIQQKDNMIQMTINSMKTPTXXPGA

SEQ ID NO: 100028 - protein, 24 aa, Artificial Sequence
  Cyclic GFR-binding peptide
NSMEGIIVNSSDDMIQVTINSLKT

SEQ ID NO: 100029 - protein, 31 aa, Artificial Sequence
  Cyclic GFR-binding peptide
  MOD_RES (1)..(3): Xaa is C or S
XGXRDVVMGSMEGIIIQQKDNMIQMTINSMK

SEQ ID NO: 100030 - protein, 25 aa, Artificial Sequence
  Cyclic GFR-binding peptide
VVMSMEGLVKPTRGVMIQITINSLD

SEQ ID NO: 100031 - protein, 32 aa, Artificial Sequence; identical to SEQ ID NO: 21608
  Cyclic GFR-binding peptide
  MOD_RES (2)..(2): Xaa is C or S

SEQ ID NO: 100032 - protein, 25 aa, Artificial Sequence
  Cyclic GFR-binding peptide
TSMEGLFIPKKRVIEMIQVTINSLQ

SEQ ID NO: 100033 - protein, 34 aa, Artificial Sequence
  Cyclic GFR-binding peptide
  MOD_RES (1)..(3)..(34): Xaa is C or S
XKXSKVIMSMEGLIKPTKGIMIQITINSLDQSVX

SEQ ID NO: 100034 - protein, 24 aa, Artificial Sequence
  Cyclic GFR-binding peptide
VVMDSMEGLVVNNAADMIQITINS

SEQ ID NO: 100035 - protein, 24 aa, Artificial Sequence
  Cyclic GFR-binding peptide
VIMSMEGIIKPTKGIMIQITINSL

SEQ ID NO: 100036 - protein, 27 aa, Artificial Sequence
  Cyclic GFR-binding peptide
  MOD_RES (1)..(1): Xaa is C or S
XRDVVMGSMEGLIIQQKDNMIQMTINS

SEQ ID NO: 100037 - protein, 23 aa, Artificial Sequence
  Cyclic GFR-binding peptide
MSMEGIVKPKRGVMIQITINSLA

SEQ ID NO: 100038 - protein, 34 aa, Artificial Sequence; identical to SEQ ID NO: 21613
  Cyclic GFR-binding peptide
  MOD_RES (28)..(28): Xaa is C or S

SEQ ID NO: 100039 - protein, 24 aa, Artificial Sequence
  Cyclic GFR-binding peptide
FSMEGIHQGQHPKIRMIQMTINSE

SEQ ID NO: 100040 - protein, 42 aa, Artificial Sequence
  Cyclic GFR-binding peptide
  MOD_RES (2)..(4)..(36)..(37): Xaa is C or S
SXGXRDVVMGSMEGLIIQQKDNMIQMTINSMKTPTXXPGASG

SEQ ID NO: 100041 - protein, 29 aa, Artificial Sequence
  Cyclic GFR-binding peptide
SRVIMSMEGLVKPKRGVMIQITINSLAQP

SEQ ID NO: 100042 - protein, 27 aa, Artificial Sequence
  Cyclic GFR-binding peptide
RVIMSMEGLVKPKRGVMIQITINSLAQ

SEQ ID NO: 100043 - protein, 37 aa, Artificial Sequence; identical to SEQ ID NO: 21625
  Cyclic GFR-binding peptide
  MOD_RES (1)..(3)..(37): Xaa is C or S

SEQ ID NO: 100044 - protein, 32 aa, Artificial Sequence; identical to SEQ ID NO: 21626
  Cyclic GFR-binding peptide
  MOD_RES (30)..(30): Xaa is C or S

SEQ ID NO: 100045 - protein, 29 aa, Artificial Sequence
  Cyclic GFR-binding peptide
  MOD_RES (27)..(28): Xaa is C or S
DSMEGIVVNNASDMIQITINSLRTPVXXT

SEQ ID NO: 100046 - protein, 34 aa, Artificial Sequence; identical to SEQ ID NO: 21627
  Cyclic GFR-binding peptide

SEQ ID NO: 100047 - protein, 26 aa, Artificial Sequence
  Cyclic GFR-binding peptide
GSMEGIIIQQKDNMIQMTINSMKTPT

SEQ ID NO: 100048 - protein, 28 aa, Artificial Sequence
  Cyclic GFR-binding peptide
LTSMEGLFIPKKRVIEMIQVTINSLQVQ

SEQ ID NO: 100049 - protein, 27 aa, Artificial Sequence
  Cyclic GFR-binding peptide
IMSMEGILLVRGNDMIQMTINSTKVPA

SEQ ID NO: 100050 - protein, 40 aa, Artificial Sequence; identical to SEQ ID NO: 21637
  Cyclic GFR-binding peptide
  MOD_RES (37)..(37): Xaa is C or S

SEQ ID NO: 100051 - protein, 33 aa, Artificial Sequence; identical to SEQ ID NO: 21638
  Cyclic GFR-binding peptide
  MOD_RES (29)..(29): Xaa is C or S

SEQ ID NO: 100052 - protein, 35 aa, Artificial Sequence; identical to SEQ ID NO: 21639
  Cyclic GFR-binding peptide
  MOD_RES (2)..(2): Xaa is C or S

SEQ ID NO: 100053 - protein, 30 aa, Artificial Sequence
  Cyclic GFR-binding peptide
  MOD_RES (30)..(30): Xaa is C or S
KVIMSMEGLIKPTKGIMIQITINSLDQSVX

SEQ ID NO: 100054 - protein, 34 aa, Artificial Sequence
  Cyclic GFR-binding peptide
  MOD_RES (1)..(33)..(34): Xaa is C or S
XSEVVMDSMEGIVVNNASDMIQITINSLRTPVXX

SEQ ID NO: 100055 - protein, 33 aa, Artificial Sequence; identical to SEQ ID NO: 21640
  Cyclic GFR-binding peptide
  MOD_RES (2)..(4): Xaa is C or S

SEQ ID NO: 100056 - protein, 27 aa, Artificial Sequence
  Cyclic GFR-binding peptide
  MOD_RES (26)..(27): Xaa is C or S
SMEGLLLVRGNDMIQMTINSTKVPAXX

SEQ ID NO: 100057 - protein, 34 aa, Artificial Sequence; identical to SEQ ID NO: 67165
  Cyclic GFR-binding peptide
  MOD_RES (2)..(4): Xaa is C or S

SEQ ID NO: 100058 - protein, 32 aa, Artificial Sequence
  Cyclic GFR-binding peptide
  MOD_RES (27)..(28): Xaa is C or S
DSMEGLVVNNASDMIQITINSLRTPVXXTPPT

SEQ ID NO: 100059 - protein, 22 aa, Artificial Sequence
  Cyclic GFR-binding peptide
SMEGLLKPKKRVYEMIQVTINS

SEQ ID NO: 100060 - protein, 32 aa, Artificial Sequence; identical to SEQ ID NO: 21644
  Cyclic GFR-binding peptide

SEQ ID NO: 100061 - protein, 41 aa, Artificial Sequence
  Cyclic GFR-binding peptide
  MOD_RES (2)..(4)..(35)..(36): Xaa is C or S
LXGXEEVIMSMEGILLVRGNDMIQMTINSTKVPAXXTSPVR

SEQ ID NO: 100062 - protein, 38 aa, Artificial Sequence; identical to SEQ ID NO: 21645
  Cyclic GFR-binding peptide
  MOD_RES (2)..(4): Xaa is C or S

SEQ ID NO: 100063 - protein, 22 aa, Artificial Sequence
  Cyclic GFR-binding peptide
DSMEGIVVNNASDMIQITINSL

SEQ ID NO: 100064 - protein, 33 aa, Artificial Sequence; identical to SEQ ID NO: 21646
  Cyclic GFR-binding peptide

SEQ ID NO: 100065 - protein, 31 aa, Artificial Sequence
  Cyclic GFR-binding peptide
  MOD_RES (27)..(28): Xaa is C or S
DSMEGIVVNNAADMIQITINSLRAPVXXSAP

SEQ ID NO: 100066 - protein, 36 aa, Artificial Sequence
  Cyclic GFR-binding peptide
  MOD_RES (30)..(31): Xaa is C or S
VVMDSMEGLVVNNASDMIQITINSLRTPVXXTPPTS

SEQ ID NO: 100067 - protein, 32 aa, Artificial Sequence; identical to SEQ ID NO: 21648
  Cyclic GFR-binding peptide
  MOD_RES (31)..(31): Xaa is C or S

SEQ ID NO: 100068 - protein, 25 aa, Artificial Sequence
  Cyclic GFR-binding peptide
MSMEGLVKPKRGVMIQITINSLAQP

SEQ ID NO: 100069 - protein, 33 aa, Artificial Sequence; identical to SEQ ID NO: 21649
  Cyclic GFR-binding peptide
  MOD_RES (33)..(33): Xaa is C or S

SEQ ID NO: 100070 - protein, 31 aa, Artificial Sequence
  Cyclic GFR-binding peptide
  MOD_RES (1)..(1): Xaa is C or S
XRDVVMGSMEGLIIQQKDNMIQMTINSMKTP

SEQ ID NO: 100071 - protein, 39 aa, Artificial Sequence; identical to SEQ ID NO: 21650
  Cyclic GFR-binding peptide
  MOD_RES (36)..(36): Xaa is C or S

SEQ ID NO: 100072 - protein, 37 aa, Artificial Sequence; identical to SEQ ID NO: 21652
  Cyclic GFR-binding peptide
  MOD_RES (34)..(34): Xaa is C or S

SEQ ID NO: 100073 - protein, 32 aa, Artificial Sequence; identical to SEQ ID NO: 21655
  Cyclic GFR-binding peptide

SEQ ID NO: 100074 - protein, 28 aa, Artificial Sequence
  Cyclic GFR-binding peptide
KNHQLFSMEGIHQGQHPKIRMIQMTINS

SEQ ID NO: 100075 - protein, 20 aa, Artificial Sequence
  Cyclic GFR-binding peptide
SMEGLVKPTRGVMIQITINS

SEQ ID NO: 100076 - protein, 32 aa, Artificial Sequence
  Cyclic GFR-binding peptide
  MOD_RES (30)..(31): Xaa is C or S
EVIMSMEGLLLVRGNDMIQMTINSTKVPAXXT

SEQ ID NO: 100077 - protein, 22 aa, Artificial Sequence
  Cyclic GFR-binding peptide
SMEGIIKPTKGIMIQITINSLD

SEQ ID NO: 100078 - protein, 34 aa, Artificial Sequence; identical to SEQ ID NO: 21664
  Cyclic GFR-binding peptide
  MOD_RES (2)..(2): Xaa is C or S

SEQ ID NO: 100079 - protein, 30 aa, Artificial Sequence; identical to SEQ ID NO: 21666
  Cyclic GFR-binding peptide

SEQ ID NO: 100080 - protein, 38 aa, Artificial Sequence; identical to SEQ ID NO: 21670
  Cyclic GFR-binding peptide
  MOD_RES (36)..(36): Xaa is C or S

SEQ ID NO: 100081 - protein, 34 aa, Artificial Sequence; identical to SEQ ID NO: 21674
  Cyclic GFR-binding peptide

SEQ ID NO: 100082 - protein, 27 aa, Artificial Sequence
  Cyclic GFR-binding peptide
VIMSMEGLVKPKRGVMIQITINSLAQP

SEQ ID NO: 100083 - protein, 33 aa, Artificial Sequence
  Cyclic GFR-binding peptide
  MOD_RES (2)..(2): Xaa is C or S
GXSEVVMDSMEGIVVNNASDMIQITINSLRTPV

SEQ ID NO: 100084 - protein, 32 aa, Artificial Sequence; identical to SEQ ID NO: 21676
  Cyclic GFR-binding peptide
  MOD_RES (31)..(31): Xaa is C or S

SEQ ID NO: 100085 - protein, 39 aa, Artificial Sequence; identical to SEQ ID NO: 63870
  Cyclic GFR-binding peptide
  MOD_RES (2)..(34)..(35): Xaa is C or S

SEQ ID NO: 100086 - protein, 32 aa, Artificial Sequence; identical to SEQ ID NO: 21679
  Cyclic GFR-binding peptide

SEQ ID NO: 100087 - protein, 24 aa, Artificial Sequence
  Cyclic GFR-binding peptide
SMEGILKPKKRVYEMIQVTINSHH

SEQ ID NO: 100088 - protein, 23 aa, Artificial Sequence
  Cyclic GFR-binding peptide
SMEGIIKPTKGIMIQITINSLDQ

SEQ ID NO: 100089 - protein, 26 aa, Artificial Sequence
  Cyclic GFR-binding peptide
  MOD_RES (26)..(26): Xaa is C or S
SMEGLVVNNASDMIQITINSLRTPVX

SEQ ID NO: 100090 - protein, 26 aa, Artificial Sequence
  Cyclic GFR-binding peptide
EELRSMEGILKPKKRVYEMIQVTINS

SEQ ID NO: 100091 - protein, 27 aa, Artificial Sequence
  Cyclic GFR-binding peptide
SKVIMSMEGLIKPTKGIMIQITINSLD

SEQ ID NO: 100092 - protein, 38 aa, Artificial Sequence; identical to SEQ ID NO: 21687
  Cyclic GFR-binding peptide
  MOD_RES (35)..(35): Xaa is C or S

SEQ ID NO: 100093 - protein, 34 aa, Artificial Sequence; identical to SEQ ID NO: 21689
  Cyclic GFR-binding peptide
  MOD_RES (33)..(33): Xaa is C or S

SEQ ID NO: 100094 - protein, 32 aa, Artificial Sequence
  Cyclic GFR-binding peptide
  MOD_RES (29)..(30): Xaa is C or S
VVMSMEGLVKPTRGVMIQITINSLDQPVXXPS

SEQ ID NO: 100095 - protein, 36 aa, Artificial Sequence
  Cyclic GFR-binding peptide
  MOD_RES (31)..(32): Xaa is C or S
DVVMGSMEGIIIQQKDNMIQMTINSMKTPTXXPGAS

SEQ ID NO: 100096 - protein, 25 aa, Artificial Sequence
  Cyclic GFR-binding peptide
LFSMEGLHQGQHPKIRMIQMTINSE

SEQ ID NO: 100097 - protein, 36 aa, Artificial Sequence
  Cyclic GFR-binding peptide
  MOD_RES (1)..(32)..(33): Xaa is C or S
XSKVVMSMEGLVKPTRGVMIQITINSLDQPVXXPSA

SEQ ID NO: 100098 - protein, 31 aa, Artificial Sequence
  Cyclic GFR-binding peptide
  MOD_RES (26)..(27): Xaa is C or S
SMEGLIKPTKGIMIQITINSLDQSVXXPSAS

SEQ ID NO: 100099 - protein, 37 aa, Artificial Sequence; identical to SEQ ID NO: 21693
  Cyclic GFR-binding peptide
  MOD_RES (32)..(32): Xaa is C or S

SEQ ID NO: 100100 - protein, 28 aa, Artificial Sequence
  Cyclic GFR-binding peptide
SRVIMSMEGLVKPKRGVMIQITINSLAQ

SEQ ID NO: 100101 - protein, 23 aa, Artificial Sequence
  Cyclic GFR-binding peptide
VMDSMEGIVVNNAADMIQITINS

SEQ ID NO: 100102 - protein, 35 aa, Artificial Sequence
  Cyclic GFR-binding peptide
  MOD_RES (2)..(34)..(35): Xaa is C or S
GXSRVVMNSMEGLIVNSSDDMIQVTINSLKTPAXX

SEQ ID NO: 100103 - protein, 22 aa, Artificial Sequence
  Cyclic GFR-binding peptide
DSMEGLVVNNASDMIQITINSL

SEQ ID NO: 100104 - protein, 32 aa, Artificial Sequence; identical to SEQ ID NO: 63891
  Cyclic GFR-binding peptide
  MOD_RES (1)..(32): Xaa is C or S

SEQ ID NO: 100105 - protein, 30 aa, Artificial Sequence
  Cyclic GFR-binding peptide
  MOD_RES (1)..(1): Xaa is C or S
XEEVIMSMEGLLLVRGNDMIQMTINSTKVP

SEQ ID NO: 100106 - protein, 31 aa, Artificial Sequence
  Cyclic GFR-binding peptide
  MOD_RES (2)..(4): Xaa is C or S
RXGXAEVVMDSMEGIVVNNAADMIQITINSL

SEQ ID NO: 100107 - protein, 27 aa, Artificial Sequence
  Cyclic GFR-binding peptide
SMEGIHQGQHPKIRMIQMTINSQGTPV

SEQ ID NO: 100108 - protein, 29 aa, Artificial Sequence
  Cyclic GFR-binding peptide
  MOD_RES (1)..(3): Xaa is C or S
XGXAEVVMDSMEGLVVNNAADMIQITINS

SEQ ID NO: 100109 - protein, 23 aa, Artificial Sequence
  Cyclic GFR-binding peptide
VIMSMEGLVKPKRGVMIQITINS

SEQ ID NO: 100110 - protein, 30 aa, Artificial Sequence; identical to SEQ ID NO: 21709
  Cyclic GFR-binding peptide
  MOD_RES (29)..(29): Xaa is C or S

SEQ ID NO: 100111 - protein, 31 aa, Artificial Sequence
  Cyclic GFR-binding peptide
SRVVMNSMEGLIVNSSDDMIQVTINSLKTPA

SEQ ID NO: 100112 - protein, 34 aa, Artificial Sequence; identical to SEQ ID NO: 21711
  Cyclic GFR-binding peptide
  MOD_RES (33)..(33): Xaa is C or S

SEQ ID NO: 100113 - protein, 37 aa, Artificial Sequence; identical to SEQ ID NO: 67230
  Cyclic GFR-binding peptide
  MOD_RES (31)..(32): Xaa is C or S

SEQ ID NO: 100114 - protein, 34 aa, Artificial Sequence; identical to SEQ ID NO: 21714
  Cyclic GFR-binding peptide
  MOD_RES (1)..(1): Xaa is C or S

SEQ ID NO: 100115 - protein, 24 aa, Artificial Sequence
  Cyclic GFR-binding peptide
IMSMEGLLLVRGNDMIQMTINSTK

SEQ ID NO: 100116 - protein, 37 aa, Artificial Sequence
  Cyclic GFR-binding peptide
  MOD_RES (1)..(32)..(33): Xaa is C or S
XSRVIMSMEGLVKPKRGVMIQITINSLAQPVXXPAAS

SEQ ID NO: 100117 - protein, 36 aa, Artificial Sequence; identical to SEQ ID NO: 63902
  Cyclic GFR-binding peptide
  MOD_RES (31)..(32): Xaa is C or S

SEQ ID NO: 100118 - protein, 33 aa, Artificial Sequence; identical to SEQ ID NO: 21716
  Cyclic GFR-binding peptide
  MOD_RES (33)..(33): Xaa is C or S

SEQ ID NO: 100119 - protein, 30 aa, Artificial Sequence; identical to SEQ ID NO: 21718
  Cyclic GFR-binding peptide

SEQ ID NO: 100120 - protein, 40 aa, Artificial Sequence; identical to SEQ ID NO: 21719
  Cyclic GFR-binding peptide
  MOD_RES (1)..(35): Xaa is C or S

SEQ ID NO: 100121 - protein, 31 aa, Artificial Sequence
  Cyclic GFR-binding peptide
  MOD_RES (2)..(2): Xaa is C or S
KXSKVIMSMEGLIKPTKGIMIQITINSLDQS

SEQ ID NO: 100122 - protein, 26 aa, Artificial Sequence
  Cyclic GFR-binding peptide
ELTSMEGIFIPKKRVIEMIQVTINSL

SEQ ID NO: 100123 - protein, 36 aa, Artificial Sequence; identical to SEQ ID NO: 67236
  Cyclic GFR-binding peptide
  MOD_RES (1)..(3)..(34)..(35): Xaa is C or S

SEQ ID NO: 100124 - protein, 37 aa, Artificial Sequence; identical to SEQ ID NO: 21722
  Cyclic GFR-binding peptide
  MOD_RES (2)..(2): Xaa is C or S

SEQ ID NO: 100125 - protein, 38 aa, Artificial Sequence
  Cyclic GFR-binding peptide
  MOD_RES (1)..(3)..(35)..(36): Xaa is C or S
XGXSEVVMDSMEGLVVNNASDMIQITINSLRTPVXXTP

SEQ ID NO: 100126 - protein, 38 aa, Artificial Sequence; identical to SEQ ID NO: 21724
  Cyclic GFR-binding peptide
  MOD_RES (37)..(37): Xaa is C or S

SEQ ID NO: 100127 - protein, 33 aa, Artificial Sequence; identical to SEQ ID NO: 21727
  Cyclic GFR-binding peptide
  MOD_RES (33)..(33): Xaa is C or S

SEQ ID NO: 100128 - protein, 29 aa, Artificial Sequence
  Cyclic GFR-binding peptide
  MOD_RES (28)..(29): Xaa is C or S
IMSMEGIVKPKRGVMIQITINSLAQPVXX

SEQ ID NO: 100129 - protein, 39 aa, Artificial Sequence; identical to SEQ ID NO: 21728
  Cyclic GFR-binding peptide
  MOD_RES (35)..(35): Xaa is C or S

SEQ ID NO: 100130 - protein, 39 aa, Artificial Sequence
  Cyclic GFR-binding peptide
  MOD_RES (1)..(33)..(34): Xaa is C or S
XSRVVMNSMEGIIVNSSDDMIQVTINSLKTPAXXPKPVH

SEQ ID NO: 100131 - protein, 25 aa, Artificial Sequence
  Cyclic GFR-binding peptide
VVMGSMEGLIIQQKDNMIQMTINSM

SEQ ID NO: 100132 - protein, 42 aa, Artificial Sequence; identical to SEQ ID NO: 21730
  Cyclic GFR-binding peptide
  MOD_RES (2)..(39): Xaa is C or S

SEQ ID NO: 100133 - protein, 32 aa, Artificial Sequence
  Cyclic GFR-binding peptide
  MOD_RES (26)..(27): Xaa is C or S
SMEGLVKPTRGVMIQITINSLDQPVXXPSASA

SEQ ID NO: 100134 - protein, 33 aa, Artificial Sequence; identical to SEQ ID NO: 21732
  Cyclic GFR-binding peptide
  MOD_RES (32)..(32): Xaa is C or S

SEQ ID NO: 100135 - protein, 32 aa, Artificial Sequence; identical to SEQ ID NO: 21734
  Cyclic GFR-binding peptide

SEQ ID NO: 100136 - protein, 38 aa, Artificial Sequence; identical to SEQ ID NO: 21735
  Cyclic GFR-binding peptide
  MOD_RES (34)..(34): Xaa is C or S

SEQ ID NO: 100137 - protein, 30 aa, Artificial Sequence; identical to SEQ ID NO: 21737
  Cyclic GFR-binding peptide

SEQ ID NO: 100138 - protein, 30 aa, Artificial Sequence; identical to SEQ ID NO: 63908
  Cyclic GFR-binding peptide
  MOD_RES (1)..(1): Xaa is C or S

SEQ ID NO: 100139 - protein, 26 aa, Artificial Sequence
  Cyclic GFR-binding peptide
SMEGIHQGQHPKIRMIQMTINSQGTP

SEQ ID NO: 100140 - protein, 24 aa, Artificial Sequence
  Cyclic GFR-binding peptide
KVIMSMEGIIKPTKGIMIQITINS

SEQ ID NO: 100141 - protein, 33 aa, Artificial Sequence; identical to SEQ ID NO: 63913
  Cyclic GFR-binding peptide
  MOD_RES (2)..(4): Xaa is C or S

SEQ ID NO: 100142 - protein, 34 aa, Artificial Sequence; identical to SEQ ID NO: 67251
  Cyclic GFR-binding peptide
  MOD_RES (2)..(33)..(34): Xaa is C or S

SEQ ID NO: 100143 - protein, 22 aa, Artificial Sequence
  Cyclic GFR-binding peptide
SMEGIFIPKKRVIEMIQVTINS

SEQ ID NO: 100144 - protein, 29 aa, Artificial Sequence
  Cyclic GFR-binding peptide
SMEGILKPKKRVYEMIQVTINSHHVRSPQ

SEQ ID NO: 100145 - protein, 27 aa, Artificial Sequence
  Cyclic GFR-binding peptide
RVVMNSMEGLIVNSSDDMIQVTINSLK

SEQ ID NO: 100146 - protein, 25 aa, Artificial Sequence
  Cyclic GFR-binding peptide
EVIMSMEGILLVRGNDMIQMTINST

SEQ ID NO: 100147 - protein, 41 aa, Artificial Sequence; identical to SEQ ID NO: 21746
  Cyclic GFR-binding peptide
  MOD_RES (1)..(35): Xaa is C or S

SEQ ID NO: 100148 - protein, 29 aa, Artificial Sequence
  Cyclic GFR-binding peptide
  MOD_RES (29)..(29): Xaa is C or S
LSMEGIHQGQHPKIRMIQMTINSQGTPVX

SEQ ID NO: 100149 - protein, 36 aa, Artificial Sequence; identical to SEQ ID NO: 21748
  Cyclic GFR-binding peptide
  MOD_RES (30)..(30): Xaa is C or S

SEQ ID NO: 100150 - protein, 30 aa, Artificial Sequence
  Cyclic GFR-binding peptide
RDVVMGSMEGLIIQQKDNMIQMTINSMKTP

SEQ ID NO: 100151 - protein, 32 aa, Artificial Sequence
  Cyclic GFR-binding peptide
  MOD_RES (32)..(32): Xaa is C or S
RDVVMGSMEGIIIQQKDNMIQMTINSMKTPTX

SEQ ID NO: 100152 - protein, 32 aa, Artificial Sequence
  Cyclic GFR-binding peptide
  MOD_RES (2)..(2): Xaa is C or S
KXSKVIMSMEGLIKPTKGIMIQITINSLDQSV

SEQ ID NO: 100153 - protein, 32 aa, Artificial Sequence; identical to SEQ ID NO: 21754
  Cyclic GFR-binding peptide
  MOD_RES (2)..(4): Xaa is C or S

SEQ ID NO: 100154 - protein, 29 aa, Artificial Sequence
  Cyclic GFR-binding peptide
  MOD_RES (29)..(29): Xaa is C or S
VIMSMEGIVKPKRGVMIQITINSLAQPVX

SEQ ID NO: 100155 - protein, 35 aa, Artificial Sequence; identical to SEQ ID NO: 63926
  Cyclic GFR-binding peptide
  MOD_RES (1)..(32)..(33): Xaa is C or S

SEQ ID NO: 100156 - protein, 28 aa, Artificial Sequence
  Cyclic GFR-binding peptide
  MOD_RES (27)..(28): Xaa is C or S
NSMEGLIVNSSDDMIQVTINSLKTPAXX

SEQ ID NO: 100157 - protein, 36 aa, Artificial Sequence; identical to SEQ ID NO: 67264
  Cyclic GFR-binding peptide
  MOD_RES (31)..(32): Xaa is C or S

SEQ ID NO: 100158 - protein, 35 aa, Artificial Sequence
  Cyclic GFR-binding peptide
  MOD_RES (2)..(33)..(34): Xaa is C or S
GXEEVIMSMEGILLVRGNDMIQMTINSTKVPAXXT

SEQ ID NO: 100159 - protein, 33 aa, Artificial Sequence
  Cyclic GFR-binding peptide
  MOD_RES (31)..(32): Xaa is C or S
EEVIMSMEGILLVRGNDMIQMTINSTKVPAXXT

SEQ ID NO: 100160 - protein, 28 aa, Artificial Sequence
  Cyclic GFR-binding peptide
HEELSMEGIHQGQHPKIRMIQMTINSQG

SEQ ID NO: 100161 - protein, 36 aa, Artificial Sequence; identical to SEQ ID NO: 63930
  Cyclic GFR-binding peptide
  MOD_RES (1)..(3)..(35)..(36): Xaa is C or S

SEQ ID NO: 100162 - protein, 30 aa, Artificial Sequence; identical to SEQ ID NO: 21761
  Cyclic GFR-binding peptide

SEQ ID NO: 100163 - protein, 23 aa, Artificial Sequence
  Cyclic GFR-binding peptide
MNSMEGIIVNSSDDMIQVTINSL

SEQ ID NO: 100164 - protein, 25 aa, Artificial Sequence
  Cyclic GFR-binding peptide
SKVVMSMEGIVKPTRGVMIQITINS

SEQ ID NO: 100165 - protein, 28 aa, Artificial Sequence
  Cyclic GFR-binding peptide
  MOD_RES (2)..(2): Xaa is C or S
GXEEVIMSMEGILLVRGNDMIQMTINST

SEQ ID NO: 100166 - protein, 38 aa, Artificial Sequence; identical to SEQ ID NO: 21766
  Cyclic GFR-binding peptide
  MOD_RES (34)..(34): Xaa is C or S

SEQ ID NO: 100167 - protein, 32 aa, Artificial Sequence
  Cyclic GFR-binding peptide
  MOD_RES (27)..(28): Xaa is C or S
DSMEGIVVNNASDMIQITINSLRTPVXXTPPT

SEQ ID NO: 100168 - protein, 29 aa, Artificial Sequence
  Cyclic GFR-binding peptide
ELSMEGIHQGQHPKIRMIQMTINSQGTPV

SEQ ID NO: 100169 - protein, 37 aa, Artificial Sequence
  Cyclic GFR-binding peptide
  MOD_RES (2)..(34)..(35): Xaa is C or S
GXSEVVMDSMEGIVVNNASDMIQITINSLRTPVXXTP

SEQ ID NO: 100170 - protein, 33 aa, Artificial Sequence; identical to SEQ ID NO: 21772
  Cyclic GFR-binding peptide
  MOD_RES (32)..(32): Xaa is C or S

SEQ ID NO: 100171 - protein, 32 aa, Artificial Sequence
  Cyclic GFR-binding peptide
  MOD_RES (2)..(4): Xaa is C or S
RXGXAEVVMDSMEGIVVNNAADMIQITINSLR

SEQ ID NO: 100172 - protein, 33 aa, Artificial Sequence
  Cyclic GFR-binding peptide
  MOD_RES (2)..(33): Xaa is C or S
KXSRVIMSMEGLVKPKRGVMIQITINSLAQPVX

SEQ ID NO: 100173 - protein, 23 aa, Artificial Sequence
  Cyclic GFR-binding peptide
MDSMEGIVVNNASDMIQITINSL

SEQ ID NO: 100174 - protein, 37 aa, Artificial Sequence; identical to SEQ ID NO: 21774
  Cyclic GFR-binding peptide
  MOD_RES (33)..(33): Xaa is C or S

SEQ ID NO: 100175 - protein, 34 aa, Artificial Sequence
  Cyclic GFR-binding peptide
  MOD_RES (1)..(32)..(33): Xaa is C or S
XEEVIMSMEGILLVRGNDMIQMTINSTKVPAXXT

SEQ ID NO: 100176 - protein, 21 aa, Artificial Sequence
  Cyclic GFR-binding peptide
SMEGLVKPTRGVMIQITINSL

SEQ ID NO: 100177 - protein, 24 aa, Artificial Sequence
  Cyclic GFR-binding peptide
SMEGIIKPTKGIMIQITINSLDQS

SEQ ID NO: 100178 - protein, 33 aa, Artificial Sequence
  Cyclic GFR-binding peptide
  MOD_RES (32)..(33): Xaa is C or S
RDVVMGSMEGLIIQQKDNMIQMTINSMKTPTXX

SEQ ID NO: 100179 - protein, 39 aa, Artificial Sequence
  Cyclic GFR-binding peptide
  MOD_RES (2)..(4)..(36)..(37): Xaa is C or S
RXGXSEVVMDSMEGIVVNNASDMIQITINSLRTPVXXTP

SEQ ID NO: 100180 - protein, 29 aa, Artificial Sequence
  Cyclic GFR-binding peptide
  MOD_RES (29)..(29): Xaa is C or S
VMGSMEGIIIQQKDNMIQMTINSMKTPTX

SEQ ID NO: 100181 - protein, 37 aa, Artificial Sequence; identical to SEQ ID NO: 63955
  Cyclic GFR-binding peptide
  MOD_RES (2)..(4)..(35)..(36): Xaa is C or S

SEQ ID NO: 100182 - protein, 29 aa, Artificial Sequence
  Cyclic GFR-binding peptide
  MOD_RES (1)..(1): Xaa is C or S
XSEVVMDSMEGLVVNNASDMIQITINSLR

SEQ ID NO: 100183 - protein, 37 aa, Artificial Sequence
  Cyclic GFR-binding peptide
  MOD_RES (2)..(4)..(36)..(37): Xaa is C or S
SXGXRDVVMGSMEGIIIQQKDNMIQMTINSMKTPTXX

SEQ ID NO: 100184 - protein, 34 aa, Artificial Sequence; identical to SEQ ID NO: 21783
  Cyclic GFR-binding peptide

SEQ ID NO: 100185 - protein, 31 aa, Artificial Sequence
  Cyclic GFR-binding peptide
  MOD_RES (26)..(27): Xaa is C or S
SMEGIIIQQKDNMIQMTINSMKTPTXXPGAS

SEQ ID NO: 100186 - protein, 38 aa, Artificial Sequence; identical to SEQ ID NO: 21785
  Cyclic GFR-binding peptide
  MOD_RES (1)..(3)..(37): Xaa is C or S

SEQ ID NO: 100187 - protein, 35 aa, Artificial Sequence; identical to SEQ ID NO: 21786
  Cyclic GFR-binding peptide
  MOD_RES (2)..(4): Xaa is C or S

SEQ ID NO: 100188 - protein, 33 aa, Artificial Sequence; identical to SEQ ID NO: 21787
  Cyclic GFR-binding peptide
  MOD_RES (2)..(4): Xaa is C or S

SEQ ID NO: 100189 - protein, 31 aa, Artificial Sequence
  Cyclic GFR-binding peptide
  MOD_RES (2)..(2): Xaa is C or S
GXSRVVMNSMEGLIVNSSDDMIQVTINSLKT

SEQ ID NO: 100190 - protein, 26 aa, Artificial Sequence
  Cyclic GFR-binding peptide
ELRSMEGLLKPKKRVYEMIQVTINSH

SEQ ID NO: 100191 - protein, 34 aa, Artificial Sequence; identical to SEQ ID NO: 21795
  Cyclic GFR-binding peptide
  MOD_RES (30)..(30): Xaa is C or S

SEQ ID NO: 100192 - protein, 26 aa, Artificial Sequence
  Cyclic GFR-binding peptide
EVIMSMEGLLLVRGNDMIQMTINSTK

SEQ ID NO: 100193 - protein, 26 aa, Artificial Sequence
  Cyclic GFR-binding peptide
VIMSMEGLLLVRGNDMIQMTINSTKV

SEQ ID NO: 100194 - protein, 27 aa, Artificial Sequence
  Cyclic GFR-binding peptide
  MOD_RES (26)..(27): Xaa is C or S
SMEGLIKPTKGIMIQITINSLDQSVXX

SEQ ID NO: 100195 - protein, 34 aa, Artificial Sequence; identical to SEQ ID NO: 21799
  Cyclic GFR-binding peptide
  MOD_RES (33)..(33): Xaa is C or S

SEQ ID NO: 100196 - protein, 28 aa, Artificial Sequence
  Cyclic GFR-binding peptide
  MOD_RES (1)..(3): Xaa is C or S
XKXSRVIMSMEGLVKPKRGVMIQITINS

SEQ ID NO: 100197 - protein, 30 aa, Artificial Sequence
  Cyclic GFR-binding peptide
  MOD_RES (28)..(29): Xaa is C or S
IMSMEGLLLVRGNDMIQMTINSTKVPAXXT

SEQ ID NO: 100198 - protein, 40 aa, Artificial Sequence; identical to SEQ ID NO: 21801
  Cyclic GFR-binding peptide
  MOD_RES (1)..(38): Xaa is C or S

SEQ ID NO: 100199 - protein, 41 aa, Artificial Sequence
  Cyclic GFR-binding peptide
  MOD_RES (2)..(4)..(36)..(37): Xaa is C or S
HXGXSRVVMNSMEGLIVNSSDDMIQVTINSLKTPAXXPKPV

SEQ ID NO: 100200 - protein, 33 aa, Artificial Sequence
  Cyclic GFR-binding peptide
  MOD_RES (1)..(33): Xaa is C or S
XSEVVMDSMEGIVVNNASDMIQITINSLRTPVX

SEQ ID NO: 100201 - protein, 39 aa, Artificial Sequence
  Cyclic GFR-binding peptide
  MOD_RES (2)..(4)..(35)..(36): Xaa is C or S
LXGXEEVIMSMEGLLLVRGNDMIQMTINSTKVPAXXTSP

SEQ ID NO: 100202 - protein, 33 aa, Artificial Sequence
  Cyclic GFR-binding peptide
  MOD_RES (29)..(30): Xaa is C or S
VIMSMEGILLVRGNDMIQMTINSTKVPAXXTSP

SEQ ID NO: 100203 - protein, 32 aa, Artificial Sequence
  Cyclic GFR-binding peptide
  MOD_RES (2)..(4): Xaa is C or S
RXGXSEVVMDSMEGIVVNNASDMIQITINSLR

SEQ ID NO: 100204 - protein, 32 aa, Artificial Sequence
  Cyclic GFR-binding peptide
  MOD_RES (26)..(27): Xaa is C or S
SMEGLLLVRGNDMIQMTINSTKVPAXXTSPVR

SEQ ID NO: 100205 - protein, 35 aa, Artificial Sequence
  Cyclic GFR-binding peptide
  MOD_RES (1)..(33)..(34): Xaa is C or S
XSRVVMNSMEGLIVNSSDDMIQVTINSLKTPAXXP

SEQ ID NO: 100206 - protein, 22 aa, Artificial Sequence
  Cyclic GFR-binding peptide
SMEGLHQGQHPKIRMIQMTINS

SEQ ID NO: 100207 - protein, 34 aa, Artificial Sequence
  Cyclic GFR-binding peptide
  MOD_RES (30)..(31): Xaa is C or S
VVMDSMEGIVVNNAADMIQITINSLRAPVXXSAP

SEQ ID NO: 100208 - protein, 27 aa, Artificial Sequence
  Cyclic GFR-binding peptide
SMEGLLKPKKRVYEMIQVTINSHHVRS

SEQ ID NO: 100209 - protein, 27 aa, Artificial Sequence
  Cyclic GFR-binding peptide
  MOD_RES (2)..(2): Xaa is C or S
KXSKVVMSMEGLVKPTRGVMIQITINS

SEQ ID NO: 100210 - protein, 30 aa, Artificial Sequence; identical to SEQ ID NO: 21812
  Cyclic GFR-binding peptide
  MOD_RES (1)..(1): Xaa is C or S

SEQ ID NO: 100211 - protein, 26 aa, Artificial Sequence
  Cyclic GFR-binding peptide
VIMSMEGLIKPTKGIMIQITINSLDQ

SEQ ID NO: 100212 - protein, 33 aa, Artificial Sequence
  Cyclic GFR-binding peptide
  MOD_RES (28)..(29): Xaa is C or S
IMSMEGLIKPTKGIMIQITINSLDQSVXXPSAS

SEQ ID NO: 100213 - protein, 30 aa, Artificial Sequence; identical to SEQ ID NO: 21817
  Cyclic GFR-binding peptide
  MOD_RES (1)..(1): Xaa is C or S

SEQ ID NO: 100214 - protein, 38 aa, Artificial Sequence
  Cyclic GFR-binding peptide
  MOD_RES (32)..(33): Xaa is C or S
AEVVMDSMEGIVVNNAADMIQITINSLRAPVXXSAPAA

SEQ ID NO: 100215 - protein, 36 aa, Artificial Sequence
  Cyclic GFR-binding peptide
  MOD_RES (31)..(32): Xaa is C or S
EVVMDSMEGIVVNNAADMIQITINSLRAPVXXSAPA

SEQ ID NO: 100216 - protein, 29 aa, Artificial Sequence
  Cyclic GFR-binding peptide
  MOD_RES (27)..(28): Xaa is C or S
GSMEGIIIQQKDNMIQMTINSMKTPTXXP

SEQ ID NO: 100217 - protein, 33 aa, Artificial Sequence
  Cyclic GFR-binding peptide
  MOD_RES (31)..(32): Xaa is C or S
DVVMGSMEGLIIQQKDNMIQMTINSMKTPTXXP

SEQ ID NO: 100218 - protein, 29 aa, Artificial Sequence
  Cyclic GFR-binding peptide
DELTSMEGIFIPKKRVIEMIQVTINSLQV

SEQ ID NO: 100219 - protein, 39 aa, Artificial Sequence; identical to SEQ ID NO: 21828
  Cyclic GFR-binding peptide
  MOD_RES (1)..(3): Xaa is C or S

SEQ ID NO: 100220 - protein, 31 aa, Artificial Sequence; identical to SEQ ID NO: 21829
  Cyclic GFR-binding peptide
  MOD_RES (29)..(29): Xaa is C or S

SEQ ID NO: 100221 - protein, 36 aa, Artificial Sequence; identical to SEQ ID NO: 21830
  Cyclic GFR-binding peptide
  MOD_RES (34)..(34): Xaa is C or S

SEQ ID NO: 100222 - protein, 24 aa, Artificial Sequence
  Cyclic GFR-binding peptide
MGSMEGLIIQQKDNMIQMTINSMK

SEQ ID NO: 100223 - protein, 32 aa, Artificial Sequence; identical to SEQ ID NO: 21833
  Cyclic GFR-binding peptide

SEQ ID NO: 100224 - protein, 24 aa, Artificial Sequence
  Cyclic GFR-binding peptide
VMDSMEGIVVNNASDMIQITINSL

SEQ ID NO: 100225 - protein, 39 aa, Artificial Sequence
  Cyclic GFR-binding peptide
  MOD_RES (1)..(3)..(35)..(36): Xaa is C or S
XGXAEVVMDSMEGLVVNNAADMIQITINSLRAPVXXSAP

SEQ ID NO: 100226 - protein, 33 aa, Artificial Sequence
  Cyclic GFR-binding peptide
  MOD_RES (28)..(29): Xaa is C or S
VMSMEGLVKPTRGVMIQITINSLDQPVXXPSAS

SEQ ID NO: 100227 - protein, 35 aa, Artificial Sequence; identical to SEQ ID NO: 21843
  Cyclic GFR-binding peptide
  MOD_RES (31)..(31): Xaa is C or S

SEQ ID NO: 100228 - protein, 26 aa, Artificial Sequence
  Cyclic GFR-binding peptide
MSMEGLVKPTRGVMIQITINSLDQPV

SEQ ID NO: 100229 - protein, 38 aa, Artificial Sequence; identical to SEQ ID NO: 64000
  Cyclic GFR-binding peptide
  MOD_RES (1)..(32)..(33): Xaa is C or S

SEQ ID NO: 100230 - protein, 30 aa, Artificial Sequence; identical to SEQ ID NO: 21846
  Cyclic GFR-binding peptide
  MOD_RES (30)..(30): Xaa is C or S

SEQ ID NO: 100231 - protein, 30 aa, Artificial Sequence; identical to SEQ ID NO: 21848
  Cyclic GFR-binding peptide

SEQ ID NO: 100232 - protein, 30 aa, Artificial Sequence; identical to SEQ ID NO: 21849
  Cyclic GFR-binding peptide
  MOD_RES (30)..(30): Xaa is C or S

SEQ ID NO: 100233 - protein, 32 aa, Artificial Sequence; identical to SEQ ID NO: 67355
  Cyclic GFR-binding peptide
  MOD_RES (30)..(31): Xaa is C or S

SEQ ID NO: 100234 - protein, 22 aa, Artificial Sequence
  Cyclic GFR-binding peptide
GSMEGLIIQQKDNMIQMTINSM

SEQ ID NO: 100235 - protein, 39 aa, Artificial Sequence; identical to SEQ ID NO: 21852
  Cyclic GFR-binding peptide
  MOD_RES (35)..(35): Xaa is C or S

SEQ ID NO: 100236 - protein, 41 aa, Artificial Sequence; identical to SEQ ID NO: 21854
  Cyclic GFR-binding peptide
  MOD_RES (2)..(36): Xaa is C or S

SEQ ID NO: 100237 - protein, 32 aa, Artificial Sequence
  Cyclic GFR-binding peptide
  MOD_RES (31)..(32): Xaa is C or S
DVVMGSMEGIIIQQKDNMIQMTINSMKTPTXX

SEQ ID NO: 100238 - protein, 34 aa, Artificial Sequence
  Cyclic GFR-binding peptide
  MOD_RES (2)..(33)..(34): Xaa is C or S
KXSRVIMSMEGLVKPKRGVMIQITINSLAQPVXX

SEQ ID NO: 100239 - protein, 35 aa, Artificial Sequence; identical to SEQ ID NO: 21860
  Cyclic GFR-binding peptide
  MOD_RES (2)..(4): Xaa is C or S

SEQ ID NO: 100240 - protein, 36 aa, Artificial Sequence
  Cyclic GFR-binding peptide
  MOD_RES (1)..(3)..(35)..(36): Xaa is C or S
XGXRDVVMGSMEGIIIQQKDNMIQMTINSMKTPTXX

SEQ ID NO: 100241 - protein, 27 aa, Artificial Sequence
  Cyclic GFR-binding peptide
  MOD_RES (1)..(1): Xaa is C or S
XSRVVMNSMEGLIVNSSDDMIQVTINS

SEQ ID NO: 100242 - protein, 34 aa, Artificial Sequence
  Cyclic GFR-binding peptide
  MOD_RES (28)..(29): Xaa is C or S
MDSMEGIVVNNASDMIQITINSLRTPVXXTPPTS

SEQ ID NO: 100243 - protein, 23 aa, Artificial Sequence
  Cyclic GFR-binding peptide
VVMSMEGIVKPTRGVMIQITINS

SEQ ID NO: 100244 - protein, 29 aa, Artificial Sequence
  Cyclic GFR-binding peptide
  MOD_RES (1)..(1): Xaa is C or S
XRDVVMGSMEGLIIQQKDNMIQMTINSMK

SEQ ID NO: 100245 - protein, 34 aa, Artificial Sequence
  Cyclic GFR-binding peptide
  MOD_RES (2)..(4): Xaa is C or S
RXGXSEVVMDSMEGLVVNNASDMIQITINSLRTP

SEQ ID NO: 100246 - protein, 35 aa, Artificial Sequence
  Cyclic GFR-binding peptide
  MOD_RES (2)..(4)..(35): Xaa is C or S
SXKXSKVVMSMEGLVKPTRGVMIQITINSLDQPVX

SEQ ID NO: 100247 - protein, 27 aa, Artificial Sequence
  Cyclic GFR-binding peptide
NHQLFSMEGIHQGQHPKIRMIQMTINS

SEQ ID NO: 100248 - protein, 41 aa, Artificial Sequence
  Cyclic GFR-binding peptide
  MOD_RES (1)..(3)..(35)..(36): Xaa is C or S
XGXSRVVMNSMEGIIVNSSDDMIQVTINSLKTPAXXPKPVH

SEQ ID NO: 100249 - protein, 42 aa, Artificial Sequence; identical to SEQ ID NO: 21871
  Cyclic GFR-binding peptide
  MOD_RES (1)..(3)..(37): Xaa is C or S

SEQ ID NO: 100250 - protein, 38 aa, Artificial Sequence; identical to SEQ ID NO: 21872
  Cyclic GFR-binding peptide
  MOD_RES (35)..(35): Xaa is C or S

SEQ ID NO: 100251 - protein, 23 aa, Artificial Sequence
  Cyclic GFR-binding peptide
SMEGIHQGQHPKIRMIQMTINSQ

SEQ ID NO: 100252 - protein, 33 aa, Artificial Sequence; identical to SEQ ID NO: 21874
  Cyclic GFR-binding peptide
  MOD_RES (31)..(31): Xaa is C or S

SEQ ID NO: 100253 - protein, 31 aa, Artificial Sequence; identical to SEQ ID NO: 21879
  Cyclic GFR-binding peptide

SEQ ID NO: 100254 - protein, 36 aa, Artificial Sequence
  Cyclic GFR-binding peptide
  MOD_RES (2)..(33)..(34): Xaa is C or S
KXSRVIMSMEGLVKPKRGVMIQITINSLAQPVXXPA

SEQ ID NO: 100255 - protein, 30 aa, Artificial Sequence; identical to SEQ ID NO: 64030
  Cyclic GFR-binding peptide
  MOD_RES (2)..(2): Xaa is C or S

SEQ ID NO: 100256 - protein, 31 aa, Artificial Sequence; identical to SEQ ID NO: 67371
  Cyclic GFR-binding peptide
  MOD_RES (2)..(4): Xaa is C or S

SEQ ID NO: 100257 - protein, 28 aa, Artificial Sequence
  Cyclic GFR-binding peptide
HQLFSMEGIHQGQHPKIRMIQMTINSEE

SEQ ID NO: 100258 - protein, 32 aa, Artificial Sequence; identical to SEQ ID NO: 64034
  Cyclic GFR-binding peptide
  MOD_RES (26)..(27): Xaa is C or S

SEQ ID NO: 100259 - protein, 30 aa, Artificial Sequence
  Cyclic GFR-binding peptide
  MOD_RES (28)..(29): Xaa is C or S
IMSMEGLIKPTKGIMIQITINSLDQSVXXP

SEQ ID NO: 100260 - protein, 35 aa, Artificial Sequence
  Cyclic GFR-binding peptide
  MOD_RES (30)..(31): Xaa is C or S
VVMGSMEGIIIQQKDNMIQMTINSMKTPTXXPGAS

SEQ ID NO: 100261 - protein, 33 aa, Artificial Sequence; identical to SEQ ID NO: 21884
  Cyclic GFR-binding peptide
  MOD_RES (1)..(3): Xaa is C or S

SEQ ID NO: 100262 - protein, 33 aa, Artificial Sequence; identical to SEQ ID NO: 67381
  Cyclic GFR-binding peptide
  MOD_RES (31)..(32): Xaa is C or S

SEQ ID NO: 100263 - protein, 41 aa, Artificial Sequence; identical to SEQ ID NO: 21889
  Cyclic GFR-binding peptide
  MOD_RES (2)..(4)..(38): Xaa is C or S

SEQ ID NO: 100264 - protein, 23 aa, Artificial Sequence
  Cyclic GFR-binding peptide
VMSMEGLVKPTRGVMIQITINSL

SEQ ID NO: 100265 - protein, 30 aa, Artificial Sequence; identical to SEQ ID NO: 21890
  Cyclic GFR-binding peptide

SEQ ID NO: 100266 - protein, 29 aa, Artificial Sequence
  Cyclic GFR-binding peptide
  MOD_RES (2)..(4): Xaa is C or S
SXKXSKVVMSMEGIVKPTRGVMIQITINS

SEQ ID NO: 100267 - protein, 37 aa, Artificial Sequence; identical to SEQ ID NO: 21892
  Cyclic GFR-binding peptide
  MOD_RES (1)..(35): Xaa is C or S

SEQ ID NO: 100268 - protein, 26 aa, Artificial Sequence
  Cyclic GFR-binding peptide
KVVMSMEGIVKPTRGVMIQITINSLD

SEQ ID NO: 100269 - protein, 37 aa, Artificial Sequence; identical to SEQ ID NO: 21893
  Cyclic GFR-binding peptide
  MOD_RES (34)..(34): Xaa is C or S

SEQ ID NO: 100270 - protein, 42 aa, Artificial Sequence; identical to SEQ ID NO: 21898
  Cyclic GFR-binding peptide
  MOD_RES (2)..(4)..(41): Xaa is C or S

SEQ ID NO: 100271 - protein, 35 aa, Artificial Sequence; identical to SEQ ID NO: 21900
  Cyclic GFR-binding peptide
  MOD_RES (33)..(33): Xaa is C or S

SEQ ID NO: 100272 - protein, 35 aa, Artificial Sequence
  Cyclic GFR-binding peptide
  MOD_RES (31)..(32): Xaa is C or S
RVVMNSMEGLIVNSSDDMIQVTINSLKTPAXXPKP

SEQ ID NO: 100273 - protein, 30 aa, Artificial Sequence
  Cyclic GFR-binding peptide
  MOD_RES (29)..(30): Xaa is C or S
VMDSMEGIVVNNAADMIQITINSLRAPVXX

SEQ ID NO: 100274 - protein, 23 aa, Artificial Sequence
  Cyclic GFR-binding peptide
TSMEGLFIPKKRVIEMIQVTINS

SEQ ID NO: 100275 - protein, 36 aa, Artificial Sequence; identical to SEQ ID NO: 67395
  Cyclic GFR-binding peptide
  MOD_RES (2)..(33)..(34): Xaa is C or S

SEQ ID NO: 100276 - protein, 34 aa, Artificial Sequence
  Cyclic GFR-binding peptide
  MOD_RES (2)..(4): Xaa is C or S
RXGXAEVVMDSMEGLVVNNAADMIQITINSLRAP

SEQ ID NO: 100277 - protein, 31 aa, Artificial Sequence; identical to SEQ ID NO: 21904
  Cyclic GFR-binding peptide
  MOD_RES (30)..(30): Xaa is C or S

SEQ ID NO: 100278 - protein, 34 aa, Artificial Sequence
  Cyclic GFR-binding peptide
  MOD_RES (2)..(4): Xaa is C or S
RXGXAEVVMDSMEGIVVNNAADMIQITINSLRAP

SEQ ID NO: 100279 - protein, 27 aa, Artificial Sequence
  Cyclic GFR-binding peptide
SRVIMSMEGLVKPKRGVMIQITINSLA

SEQ ID NO: 100280 - protein, 31 aa, Artificial Sequence; identical to SEQ ID NO: 64054
  Cyclic GFR-binding peptide
  MOD_RES (29)..(30): Xaa is C or S

SEQ ID NO: 100281 - protein, 27 aa, Artificial Sequence
  Cyclic GFR-binding peptide
AEVVMDSMEGLVVNNAADMIQITINSL

SEQ ID NO: 100282 - protein, 39 aa, Artificial Sequence; identical to SEQ ID NO: 21916
  Cyclic GFR-binding peptide
  MOD_RES (2)..(39): Xaa is C or S

SEQ ID NO: 100283 - protein, 43 aa, Artificial Sequence; identical to SEQ ID NO: 21920
  Cyclic GFR-binding peptide
  MOD_RES (2)..(4)..(41): Xaa is C or S

SEQ ID NO: 100284 - protein, 24 aa, Artificial Sequence
  Cyclic GFR-binding peptide
LSMEGIHQGQHPKIRMIQMTINSQ

SEQ ID NO: 100285 - protein, 34 aa, Artificial Sequence
  Cyclic GFR-binding peptide
  MOD_RES (31)..(32): Xaa is C or S
EVVMDSMEGIVVNNASDMIQITINSLRTPVXXTP

SEQ ID NO: 100286 - protein, 32 aa, Artificial Sequence; identical to SEQ ID NO: 21923
  Cyclic GFR-binding peptide
  MOD_RES (2)..(2): Xaa is C or S

SEQ ID NO: 100287 - protein, 30 aa, Artificial Sequence; identical to SEQ ID NO: 64068
  Cyclic GFR-binding peptide
  MOD_RES (30)..(30): Xaa is C or S

SEQ ID NO: 100288 - protein, 39 aa, Artificial Sequence
  Cyclic GFR-binding peptide
  MOD_RES (2)..(33)..(34): Xaa is C or S
GXEEVIMSMEGILLVRGNDMIQMTINSTKVPAXXTSPVR

SEQ ID NO: 100289 - protein, 33 aa, Artificial Sequence; identical to SEQ ID NO: 21925
  Cyclic GFR-binding peptide
  MOD_RES (31)..(31): Xaa is C or S

SEQ ID NO: 100290 - protein, 37 aa, Artificial Sequence
  Cyclic GFR-binding peptide
  MOD_RES (32)..(33): Xaa is C or S
SEVVMDSMEGIVVNNASDMIQITINSLRTPVXXTPPT

SEQ ID NO: 100291 - protein, 39 aa, Artificial Sequence; identical to SEQ ID NO: 21929
  Cyclic GFR-binding peptide
  MOD_RES (36)..(36): Xaa is C or S

SEQ ID NO: 100292 - protein, 36 aa, Artificial Sequence
  Cyclic GFR-binding peptide
  MOD_RES (2)..(34)..(35): Xaa is C or S
GXAEVVMDSMEGLVVNNAADMIQITINSLRAPVXXS

SEQ ID NO: 100293 - protein, 31 aa, Artificial Sequence
  Cyclic GFR-binding peptide
  MOD_RES (31)..(31): Xaa is C or S
RVVMNSMEGLIVNSSDDMIQVTINSLKTPAX

SEQ ID NO: 100294 - protein, 38 aa, Artificial Sequence; identical to SEQ ID NO: 21933
  Cyclic GFR-binding peptide
  MOD_RES (2)..(2): Xaa is C or S

SEQ ID NO: 100295 - protein, 31 aa, Artificial Sequence; identical to SEQ ID NO: 21941
  Cyclic GFR-binding peptide

SEQ ID NO: 100296 - protein, 40 aa, Artificial Sequence; identical to SEQ ID NO: 21944
  Cyclic GFR-binding peptide
  MOD_RES (1)..(38): Xaa is C or S

SEQ ID NO: 100297 - protein, 32 aa, Artificial Sequence; identical to SEQ ID NO: 67426
  Cyclic GFR-binding peptide
  MOD_RES (31)..(32): Xaa is C or S

SEQ ID NO: 100298 - protein, 29 aa, Artificial Sequence
  Cyclic GFR-binding peptide
HDELTSMEGIFIPKKRVIEMIQVTINSLQ

SEQ ID NO: 100299 - protein, 27 aa, Artificial Sequence
  Cyclic GFR-binding peptide
QLFSMEGLHQGQHPKIRMIQMTINSEE

SEQ ID NO: 100300 - protein, 36 aa, Artificial Sequence
  Cyclic GFR-binding peptide
  MOD_RES (31)..(32): Xaa is C or S
EVVMDSMEGLVVNNASDMIQITINSLRTPVXXTPPT

SEQ ID NO: 100301 - protein, 25 aa, Artificial Sequence
  Cyclic GFR-binding peptide
LTSMEGLFIPKKRVIEMIQVTINSL

SEQ ID NO: 100302 - protein, 37 aa, Artificial Sequence; identical to SEQ ID NO: 21949
  Cyclic GFR-binding peptide
  MOD_RES (1)..(3)..(37): Xaa is C or S

SEQ ID NO: 100303 - protein, 36 aa, Artificial Sequence; identical to SEQ ID NO: 67429
  Cyclic GFR-binding peptide
  MOD_RES (32)..(33): Xaa is C or S

SEQ ID NO: 100304 - protein, 25 aa, Artificial Sequence
  Cyclic GFR-binding peptide
EVVMDSMEGLVVNNAADMIQITINS

SEQ ID NO: 100305 - protein, 31 aa, Artificial Sequence
  Cyclic GFR-binding peptide
  MOD_RES (28)..(29): Xaa is C or S
IMSMEGLIKPTKGIMIQITINSLDQSVXXPS

SEQ ID NO: 100306 - protein, 32 aa, Artificial Sequence
  Cyclic GFR-binding peptide
  MOD_RES (32)..(32): Xaa is C or S
RDVVMGSMEGLIIQQKDNMIQMTINSMKTPTX

SEQ ID NO: 100307 - protein, 30 aa, Artificial Sequence
  Cyclic GFR-binding peptide
RDVVMGSMEGIIIQQKDNMIQMTINSMKTP

SEQ ID NO: 100308 - protein, 29 aa, Artificial Sequence
  Cyclic GFR-binding peptide
SKVVMSMEGIVKPTRGVMIQITINSLDQP

SEQ ID NO: 100309 - protein, 33 aa, Artificial Sequence; identical to SEQ ID NO: 67433
  Cyclic GFR-binding peptide
  MOD_RES (31)..(32): Xaa is C or S

SEQ ID NO: 100310 - protein, 35 aa, Artificial Sequence
  Cyclic GFR-binding peptide
  MOD_RES (29)..(30): Xaa is C or S
VMDSMEGIVVNNASDMIQITINSLRTPVXXTPPTS

SEQ ID NO: 100311 - protein, 34 aa, Artificial Sequence
  Cyclic GFR-binding peptide
  MOD_RES (1)..(3): Xaa is C or S
XGXRDVVMGSMEGLIIQQKDNMIQMTINSMKTPT

SEQ ID NO: 100312 - protein, 26 aa, Artificial Sequence
  Cyclic GFR-binding peptide
LTSMEGLFIPKKRVIEMIQVTINSLQ

SEQ ID NO: 100313 - protein, 39 aa, Artificial Sequence; identical to SEQ ID NO: 64089
  Cyclic GFR-binding peptide
  MOD_RES (2)..(33)..(34): Xaa is C or S

SEQ ID NO: 100314 - protein, 39 aa, Artificial Sequence; identical to SEQ ID NO: 21959
  Cyclic GFR-binding peptide
  MOD_RES (1)..(3): Xaa is C or S

SEQ ID NO: 100315 - protein, 37 aa, Artificial Sequence
  Cyclic GFR-binding peptide
  MOD_RES (1)..(3)..(35)..(36): Xaa is C or S
XGXSEVVMDSMEGIVVNNASDMIQITINSLRTPVXXT

SEQ ID NO: 100316 - protein, 44 aa, Artificial Sequence; identical to SEQ ID NO: 21964
  Cyclic GFR-binding peptide
  MOD_RES (1)..(3)..(40): Xaa is C or S

SEQ ID NO: 100317 - protein, 38 aa, Artificial Sequence
  Cyclic GFR-binding peptide
  MOD_RES (1)..(33)..(34): Xaa is C or S
XAEVVMDSMEGLVVNNAADMIQITINSLRAPVXXSAPA

SEQ ID NO: 100318 - protein, 34 aa, Artificial Sequence
  Cyclic GFR-binding peptide
  MOD_RES (31)..(32): Xaa is C or S
EVVMDSMEGIVVNNAADMIQITINSLRAPVXXSA

SEQ ID NO: 100319 - protein, 27 aa, Artificial Sequence
  Cyclic GFR-binding peptide
VMDSMEGLVVNNASDMIQITINSLRTP

SEQ ID NO: 100320 - protein, 25 aa, Artificial Sequence
  Cyclic GFR-binding peptide
QLFSMEGIHQGQHPKIRMIQMTINS

SEQ ID NO: 100321 - protein, 30 aa, Artificial Sequence
  Cyclic GFR-binding peptide
  MOD_RES (26)..(27): Xaa is C or S
SMEGILLVRGNDMIQMTINSTKVPAXXTSP

SEQ ID NO: 100322 - protein, 22 aa, Artificial Sequence
  Cyclic GFR-binding peptide
VMSMEGLVKPTRGVMIQITINS

SEQ ID NO: 100323 - protein, 33 aa, Artificial Sequence; identical to SEQ ID NO: 64094
  Cyclic GFR-binding peptide
  MOD_RES (30)..(31): Xaa is C or S

SEQ ID NO: 100324 - protein, 31 aa, Artificial Sequence; identical to SEQ ID NO: 64095
  Cyclic GFR-binding peptide
  MOD_RES (1)..(1): Xaa is C or S

SEQ ID NO: 100325 - protein, 39 aa, Artificial Sequence; identical to SEQ ID NO: 21971
  Cyclic GFR-binding peptide
  MOD_RES (2)..(4): Xaa is C or S

SEQ ID NO: 100326 - protein, 31 aa, Artificial Sequence; identical to SEQ ID NO: 21972
  Cyclic GFR-binding peptide

SEQ ID NO: 100327 - protein, 27 aa, Artificial Sequence
  Cyclic GFR-binding peptide
  MOD_RES (26)..(27): Xaa is C or S
SMEGIIKPTKGIMIQITINSLDQSVXX

SEQ ID NO: 100328 - protein, 29 aa, Artificial Sequence
  Cyclic GFR-binding peptide
DVVMGSMEGIIIQQKDNMIQMTINSMKTP

SEQ ID NO: 100329 - protein, 29 aa, Artificial Sequence
  Cyclic GFR-binding peptide
  MOD_RES (28)..(29): Xaa is C or S
MDSMEGIVVNNAADMIQITINSLRAPVXX

SEQ ID NO: 100330 - protein, 34 aa, Artificial Sequence
  Cyclic GFR-binding peptide
  MOD_RES (28)..(29): Xaa is C or S
MDSMEGLVVNNAADMIQITINSLRAPVXXSAPAA

SEQ ID NO: 100331 - protein, 34 aa, Artificial Sequence; identical to SEQ ID NO: 21976
  Cyclic GFR-binding peptide
  MOD_RES (34)..(34): Xaa is C or S

SEQ ID NO: 100332 - protein, 32 aa, Artificial Sequence; identical to SEQ ID NO: 21977
  Cyclic GFR-binding peptide
  MOD_RES (32)..(32): Xaa is C or S

SEQ ID NO: 100333 - protein, 24 aa, Artificial Sequence
  Cyclic GFR-binding peptide
SMEGIVKPTRGVMIQITINSLDQP

SEQ ID NO: 100334 - protein, 24 aa, Artificial Sequence
  Cyclic GFR-binding peptide
DSMEGIVVNNAADMIQITINSLRA

SEQ ID NO: 100335 - protein, 26 aa, Artificial Sequence
  Cyclic GFR-binding peptide
RDVVMGSMEGIIIQQKDNMIQMTINS

SEQ ID NO: 100336 - protein, 36 aa, Artificial Sequence; identical to SEQ ID NO: 64107
  Cyclic GFR-binding peptide
  MOD_RES (1)..(32)..(33): Xaa is C or S

SEQ ID NO: 100337 - protein, 39 aa, Artificial Sequence; identical to SEQ ID NO: 64108
  Cyclic GFR-binding peptide
  MOD_RES (2)..(4)..(35)..(36): Xaa is C or S

SEQ ID NO: 100338 - protein, 30 aa, Artificial Sequence; identical to SEQ ID NO: 21983
  Cyclic GFR-binding peptide
  MOD_RES (28)..(28): Xaa is C or S

SEQ ID NO: 100339 - protein, 36 aa, Artificial Sequence; identical to SEQ ID NO: 67457
  Cyclic GFR-binding peptide
  MOD_RES (2)..(34)..(35): Xaa is C or S

SEQ ID NO: 100340 - protein, 34 aa, Artificial Sequence
  Cyclic GFR-binding peptide
  MOD_RES (2)..(34): Xaa is C or S
GXSRVVMNSMEGLIVNSSDDMIQVTINSLKTPAX

SEQ ID NO: 100341 - protein, 31 aa, Artificial Sequence
  Cyclic GFR-binding peptide
  MOD_RES (29)..(30): Xaa is C or S
VMNSMEGLIVNSSDDMIQVTINSLKTPAXXP

SEQ ID NO: 100342 - protein, 35 aa, Artificial Sequence; identical to SEQ ID NO: 21987
  Cyclic GFR-binding peptide
  MOD_RES (2)..(4): Xaa is C or S

SEQ ID NO: 100343 - protein, 36 aa, Artificial Sequence
  Cyclic GFR-binding peptide
  MOD_RES (1)..(3)..(34)..(35): Xaa is C or S
XKXSRVIMSMEGLVKPKRGVMIQITINSLAQPVXXP

SEQ ID NO: 100344 - protein, 33 aa, Artificial Sequence
  Cyclic GFR-binding peptide
  MOD_RES (30)..(31): Xaa is C or S
VVMNSMEGLIVNSSDDMIQVTINSLKTPAXXPK

SEQ ID NO: 100345 - protein, 29 aa, Artificial Sequence
  Cyclic GFR-binding peptide
  MOD_RES (1)..(3): Xaa is C or S
XKXSKVVMSMEGLVKPTRGVMIQITINSL

SEQ ID NO: 100346 - protein, 32 aa, Artificial Sequence
  Cyclic GFR-binding peptide
  MOD_RES (28)..(29): Xaa is C or S
IMSMEGILLVRGNDMIQMTINSTKVPAXXTSP

SEQ ID NO: 100347 - protein, 28 aa, Artificial Sequence
  Cyclic GFR-binding peptide
  MOD_RES (28)..(28): Xaa is C or S
MDSMEGIVVNNASDMIQITINSLRTPVX

SEQ ID NO: 100348 - protein, 31 aa, Artificial Sequence
  Cyclic GFR-binding peptide
  MOD_RES (26)..(27): Xaa is C or S
SMEGLIIQQKDNMIQMTINSMKTPTXXPGAS

SEQ ID NO: 100349 - protein, 35 aa, Artificial Sequence
  Cyclic GFR-binding peptide
  MOD_RES (2)..(4): Xaa is C or S
SXGXRDVVMGSMEGIIIQQKDNMIQMTINSMKTPT

SEQ ID NO: 100350 - protein, 25 aa, Artificial Sequence
  Cyclic GFR-binding peptide
TSMEGIFIPKKRVIEMIQVTINSLQ

SEQ ID NO: 100351 - protein, 24 aa, Artificial Sequence
  Cyclic GFR-binding peptide
NSMEGLIVNSSDDMIQVTINSLKT

SEQ ID NO: 100352 - protein, 29 aa, Artificial Sequence
  Cyclic GFR-binding peptide
  MOD_RES (1)..(1): Xaa is C or S
XSKVVMSMEGIVKPTRGVMIQITINSLDQ

SEQ ID NO: 100353 - protein, 33 aa, Artificial Sequence
  Cyclic GFR-binding peptide
  MOD_RES (27)..(28): Xaa is C or S
NSMEGIIVNSSDDMIQVTINSLKTPAXXPKPVH

SEQ ID NO: 100354 - protein, 36 aa, Artificial Sequence
  Cyclic GFR-binding peptide
  MOD_RES (30)..(31): Xaa is C or S
KVVMSMEGLVKPTRGVMIQITINSLDQPVXXPSASA

SEQ ID NO: 100355 - protein, 31 aa, Artificial Sequence
  Cyclic GFR-binding peptide
  MOD_RES (31)..(31): Xaa is C or S
SKVIMSMEGLIKPTKGIMIQITINSLDQSVX

SEQ ID NO: 100356 - protein, 35 aa, Artificial Sequence
  Cyclic GFR-binding peptide
  MOD_RES (1)..(33)..(34): Xaa is C or S
XAEVVMDSMEGLVVNNAADMIQITINSLRAPVXXS

SEQ ID NO: 100357 - protein, 35 aa, Artificial Sequence
  Cyclic GFR-binding peptide
  MOD_RES (30)..(31): Xaa is C or S
VVMDSMEGLVVNNASDMIQITINSLRTPVXXTPPT

SEQ ID NO: 100358 - protein, 34 aa, Artificial Sequence
  Cyclic GFR-binding peptide
  MOD_RES (1)..(32)..(33): Xaa is C or S
XSRVIMSMEGLVKPKRGVMIQITINSLAQPVXXP

SEQ ID NO: 100359 - protein, 39 aa, Artificial Sequence; identical to SEQ ID NO: 21997
  Cyclic GFR-binding peptide
  MOD_RES (33)..(33): Xaa is C or S

SEQ ID NO: 100360 - protein, 36 aa, Artificial Sequence; identical to SEQ ID NO: 21998
  Cyclic GFR-binding peptide
  MOD_RES (2)..(36): Xaa is C or S

SEQ ID NO: 100361 - protein, 22 aa, Artificial Sequence
  Cyclic GFR-binding peptide
IMSMEGIIKPTKGIMIQITINS

SEQ ID NO: 100362 - protein, 36 aa, Artificial Sequence
  Cyclic GFR-binding peptide
  MOD_RES (31)..(32): Xaa is C or S
EVVMDSMEGIVVNNASDMIQITINSLRTPVXXTPPT

SEQ ID NO: 100363 - protein, 34 aa, Artificial Sequence; identical to SEQ ID NO: 64130
  Cyclic GFR-binding peptide
  MOD_RES (29)..(30): Xaa is C or S

SEQ ID NO: 100364 - protein, 28 aa, Artificial Sequence
  Cyclic GFR-binding peptide
LHDELTSMEGLFIPKKRVIEMIQVTINS

SEQ ID NO: 100365 - protein, 37 aa, Artificial Sequence
  Cyclic GFR-binding peptide
  MOD_RES (31)..(32): Xaa is C or S
RVVMNSMEGIIVNSSDDMIQVTINSLKTPAXXPKPVH

SEQ ID NO: 100366 - protein, 37 aa, Artificial Sequence; identical to SEQ ID NO: 67472
  Cyclic GFR-binding peptide
  MOD_RES (2)..(4)..(35)..(36): Xaa is C or S

SEQ ID NO: 100367 - protein, 24 aa, Artificial Sequence
  Cyclic GFR-binding peptide
SMEGIHQGQHPKIRMIQMTINSEE

SEQ ID NO: 100368 - protein, 34 aa, Artificial Sequence
  Cyclic GFR-binding peptide
  MOD_RES (30)..(31): Xaa is C or S
RVIMSMEGLVKPKRGVMIQITINSLAQPVXXPAA

SEQ ID NO: 100369 - protein, 32 aa, Artificial Sequence; identical to SEQ ID NO: 22004
  Cyclic GFR-binding peptide
  MOD_RES (1)..(1): Xaa is C or S

SEQ ID NO: 100370 - protein, 32 aa, Artificial Sequence
  Cyclic GFR-binding peptide
  MOD_RES (2)..(4): Xaa is C or S
SXGXRDVVMGSMEGIIIQQKDNMIQMTINSMK

SEQ ID NO: 100371 - protein, 35 aa, Artificial Sequence; identical to SEQ ID NO: 67474
  Cyclic GFR-binding peptide
  MOD_RES (30)..(31): Xaa is C or S

SEQ ID NO: 100372 - protein, 24 aa, Artificial Sequence
  Cyclic GFR-binding peptide
MNSMEGLIVNSSDDMIQVTINSLK

SEQ ID NO: 100373 - protein, 33 aa, Artificial Sequence; identical to SEQ ID NO: 22005
  Cyclic GFR-binding peptide
  MOD_RES (30)..(30): Xaa is C or S

SEQ ID NO: 100374 - protein, 33 aa, Artificial Sequence
  Cyclic GFR-binding peptide
  MOD_RES (28)..(29): Xaa is C or S
IMSMEGLVKPKRGVMIQITINSLAQPVXXPAAS

SEQ ID NO: 100375 - protein, 35 aa, Artificial Sequence
  Cyclic GFR-binding peptide
  MOD_RES (2)..(34)..(35): Xaa is C or S
GXAEVVMDSMEGLVVNNAADMIQITINSLRAPVXX

SEQ ID NO: 100376 - protein, 29 aa, Artificial Sequence
  Cyclic GFR-binding peptide
HDELTSMEGLFIPKKRVIEMIQVTINSLQ

SEQ ID NO: 100377 - protein, 35 aa, Artificial Sequence; identical to SEQ ID NO: 22007
  Cyclic GFR-binding peptide
  MOD_RES (1)..(3): Xaa is C or S

SEQ ID NO: 100378 - protein, 25 aa, Artificial Sequence
  Cyclic GFR-binding peptide
DVVMGSMEGLIIQQKDNMIQMTINS

SEQ ID NO: 100379 - protein, 27 aa, Artificial Sequence
  Cyclic GFR-binding peptide
EVIMSMEGLLLVRGNDMIQMTINSTKV

SEQ ID NO: 100380 - protein, 30 aa, Artificial Sequence; identical to SEQ ID NO: 22011
  Cyclic GFR-binding peptide

SEQ ID NO: 100381 - protein, 32 aa, Artificial Sequence; identical to SEQ ID NO: 22013
  Cyclic GFR-binding peptide
  MOD_RES (2)..(4): Xaa is C or S

SEQ ID NO: 100382 - protein, 33 aa, Artificial Sequence; identical to SEQ ID NO: 22016
  Cyclic GFR-binding peptide
  MOD_RES (1)..(1): Xaa is C or S

SEQ ID NO: 100383 - protein, 33 aa, Artificial Sequence
  Cyclic GFR-binding peptide
  MOD_RES (29)..(30): Xaa is C or S
VMGSMEGLIIQQKDNMIQMTINSMKTPTXXPGA

SEQ ID NO: 100384 - protein, 26 aa, Artificial Sequence
  Cyclic GFR-binding peptide
GSMEGLIIQQKDNMIQMTINSMKTPT

SEQ ID NO: 100385 - protein, 32 aa, Artificial Sequence
  Cyclic GFR-binding peptide
  MOD_RES (32)..(32): Xaa is C or S
AEVVMDSMEGIVVNNAADMIQITINSLRAPVX

SEQ ID NO: 100386 - protein, 41 aa, Artificial Sequence; identical to SEQ ID NO: 22019
  Cyclic GFR-binding peptide
  MOD_RES (2)..(4)..(41): Xaa is C or S

SEQ ID NO: 100387 - protein, 28 aa, Artificial Sequence
  Cyclic GFR-binding peptide
QLFSMEGIHQGQHPKIRMIQMTINSEET

SEQ ID NO: 100388 - protein, 37 aa, Artificial Sequence; identical to SEQ ID NO: 22022
  Cyclic GFR-binding peptide
  MOD_RES (2)..(4): Xaa is C or S

SEQ ID NO: 100389 - protein, 34 aa, Artificial Sequence
  Cyclic GFR-binding peptide
  MOD_RES (1)..(3)..(34): Xaa is C or S
XKXSKVVMSMEGLVKPTRGVMIQITINSLDQPVX

SEQ ID NO: 100390 - protein, 29 aa, Artificial Sequence
  Cyclic GFR-binding peptide
KVVMSMEGIVKPTRGVMIQITINSLDQPV

SEQ ID NO: 100391 - protein, 32 aa, Artificial Sequence
  Cyclic GFR-binding peptide
  MOD_RES (2)..(2): Xaa is C or S
GXSEVVMDSMEGLVVNNASDMIQITINSLRTP

SEQ ID NO: 100392 - protein, 32 aa, Artificial Sequence; identical to SEQ ID NO: 64148
  Cyclic GFR-binding peptide
  MOD_RES (1)..(3): Xaa is C or S

SEQ ID NO: 100393 - protein, 37 aa, Artificial Sequence; identical to SEQ ID NO: 67493
  Cyclic GFR-binding peptide
  MOD_RES (1)..(3)..(35)..(36): Xaa is C or S

SEQ ID NO: 100394 - protein, 31 aa, Artificial Sequence
  Cyclic GFR-binding peptide
  MOD_RES (29)..(30): Xaa is C or S
VIMSMEGLLLVRGNDMIQMTINSTKVPAXXT

SEQ ID NO: 100395 - protein, 35 aa, Artificial Sequence; identical to SEQ ID NO: 22033
  Cyclic GFR-binding peptide
  MOD_RES (34)..(34): Xaa is C or S

SEQ ID NO: 100396 - protein, 27 aa, Artificial Sequence
  Cyclic GFR-binding peptide
SRVIMSMEGIVKPKRGVMIQITINSLA

SEQ ID NO: 100397 - protein, 27 aa, Artificial Sequence
  Cyclic GFR-binding peptide
VMNSMEGLIVNSSDDMIQVTINSLKTP

SEQ ID NO: 100398 - protein, 27 aa, Artificial Sequence
  Cyclic GFR-binding peptide
  MOD_RES (27)..(27): Xaa is C or S
NSMEGLIVNSSDDMIQVTINSLKTPAX

SEQ ID NO: 100399 - protein, 41 aa, Artificial Sequence
  Cyclic GFR-binding peptide
  MOD_RES (2)..(4)..(35)..(36): Xaa is C or S
SXKXSRVIMSMEGLVKPKRGVMIQITINSLAQPVXXPAASA

SEQ ID NO: 100400 - protein, 26 aa, Artificial Sequence
  Cyclic GFR-binding peptide
MSMEGLIKPTKGIMIQITINSLDQSV

SEQ ID NO: 100401 - protein, 25 aa, Artificial Sequence
  Cyclic GFR-binding peptide
ELTSMEGIFIPKKRVIEMIQVTINS

SEQ ID NO: 100402 - protein, 33 aa, Artificial Sequence; identical to SEQ ID NO: 22037
  Cyclic GFR-binding peptide
  MOD_RES (2)..(2): Xaa is C or S

SEQ ID NO: 100403 - protein, 28 aa, Artificial Sequence
  Cyclic GFR-binding peptide
VVMSMEGLVKPTRGVMIQITINSLDQPV

SEQ ID NO: 100404 - protein, 25 aa, Artificial Sequence
  Cyclic GFR-binding peptide
VVMDSMEGLVVNNASDMIQITINSL

SEQ ID NO: 100405 - protein, 29 aa, Artificial Sequence
  Cyclic GFR-binding peptide
  MOD_RES (26)..(27): Xaa is C or S
SMEGLLLVRGNDMIQMTINSTKVPAXXTS

SEQ ID NO: 100406 - protein, 39 aa, Artificial Sequence; identical to SEQ ID NO: 22039
  Cyclic GFR-binding peptide
  MOD_RES (1)..(3): Xaa is C or S

SEQ ID NO: 100407 - protein, 33 aa, Artificial Sequence; identical to SEQ ID NO: 64163
  Cyclic GFR-binding peptide
  MOD_RES (29)..(30): Xaa is C or S

SEQ ID NO: 100408 - protein, 31 aa, Artificial Sequence
  Cyclic GFR-binding peptide
  MOD_RES (30)..(31): Xaa is C or S
VVMGSMEGLIIQQKDNMIQMTINSMKTPTXX

SEQ ID NO: 100409 - protein, 29 aa, Artificial Sequence
  Cyclic GFR-binding peptide
NHQLFSMEGLHQGQHPKIRMIQMTINSEE

SEQ ID NO: 100410 - protein, 37 aa, Artificial Sequence; identical to SEQ ID NO: 22045
  Cyclic GFR-binding peptide
  MOD_RES (33)..(33): Xaa is C or S

SEQ ID NO: 100411 - protein, 33 aa, Artificial Sequence
  Cyclic GFR-binding peptide
  MOD_RES (31)..(32): Xaa is C or S
RVVMNSMEGLIVNSSDDMIQVTINSLKTPAXXP

SEQ ID NO: 100412 - protein, 29 aa, Artificial Sequence
  Cyclic GFR-binding peptide
VVMDSMEGIVVNNASDMIQITINSLRTPV

SEQ ID NO: 100413 - protein, 32 aa, Artificial Sequence; identical to SEQ ID NO: 22047
  Cyclic GFR-binding peptide
  MOD_RES (1)..(3): Xaa is C or S

SEQ ID NO: 100414 - protein, 29 aa, Artificial Sequence
  Cyclic GFR-binding peptide
  MOD_RES (1)..(1): Xaa is C or S
XKNHQLFSMEGIHQGQHPKIRMIQMTINS

SEQ ID NO: 100415 - protein, 33 aa, Artificial Sequence; identical to SEQ ID NO: 22053
  Cyclic GFR-binding peptide

SEQ ID NO: 100416 - protein, 28 aa, Artificial Sequence
  Cyclic GFR-binding peptide
KVVMSMEGIVKPTRGVMIQITINSLDQP

SEQ ID NO: 100417 - protein, 36 aa, Artificial Sequence; identical to SEQ ID NO: 64172
  Cyclic GFR-binding peptide
  MOD_RES (1)..(3)..(34)..(35): Xaa is C or S

SEQ ID NO: 100418 - protein, 28 aa, Artificial Sequence
  Cyclic GFR-binding peptide
  MOD_RES (28)..(28): Xaa is C or S
MNSMEGLIVNSSDDMIQVTINSLKTPAX

SEQ ID NO: 100419 - protein, 33 aa, Artificial Sequence; identical to SEQ ID NO: 64174
  Cyclic GFR-binding peptide
  MOD_RES (31)..(32): Xaa is C or S

SEQ ID NO: 100420 - protein, 24 aa, Artificial Sequence
  Cyclic GFR-binding peptide
VIMSMEGLVKPKRGVMIQITINSL

SEQ ID NO: 100421 - protein, 32 aa, Artificial Sequence
  Cyclic GFR-binding peptide
  MOD_RES (30)..(31): Xaa is C or S
KVVMSMEGLVKPTRGVMIQITINSLDQPVXXP

SEQ ID NO: 100422 - protein, 36 aa, Artificial Sequence; identical to SEQ ID NO: 22062
  Cyclic GFR-binding peptide
  MOD_RES (2)..(2): Xaa is C or S

SEQ ID NO: 100423 - protein, 24 aa, Artificial Sequence
  Cyclic GFR-binding peptide
SMEGIIIQQKDNMIQMTINSMKTP

SEQ ID NO: 100424 - protein, 31 aa, Artificial Sequence
  Cyclic GFR-binding peptide
  MOD_RES (2)..(2): Xaa is C or S
GXRDVVMGSMEGIIIQQKDNMIQMTINSMKT

SEQ ID NO: 100425 - protein, 25 aa, Artificial Sequence
  Cyclic GFR-binding peptide
EEVIMSMEGLLLVRGNDMIQMTINS

SEQ ID NO: 100426 - protein, 25 aa, Artificial Sequence
  Cyclic GFR-binding peptide
ELRSMEGLLKPKKRVYEMIQVTINS

SEQ ID NO: 100427 - protein, 33 aa, Artificial Sequence
  Cyclic GFR-binding peptide
  MOD_RES (1)..(3): Xaa is C or S
XKXSRVIMSMEGLVKPKRGVMIQITINSLAQPV

SEQ ID NO: 100428 - protein, 33 aa, Artificial Sequence
  Cyclic GFR-binding peptide
  MOD_RES (1)..(3): Xaa is C or S
XKXSKVIMSMEGLIKPTKGIMIQITINSLDQSV

SEQ ID NO: 100429 - protein, 31 aa, Artificial Sequence
  Cyclic GFR-binding peptide
  MOD_RES (26)..(27): Xaa is C or S
SMEGLVKPTRGVMIQITINSLDQPVXXPSAS

SEQ ID NO: 100430 - protein, 32 aa, Artificial Sequence; identical to SEQ ID NO: 22072
  Cyclic GFR-binding peptide

SEQ ID NO: 100431 - protein, 39 aa, Artificial Sequence
  Cyclic GFR-binding peptide
  MOD_RES (2)..(33)..(34): Xaa is C or S
KXSRVIMSMEGLVKPKRGVMIQITINSLAQPVXXPAASA

SEQ ID NO: 100432 - protein, 34 aa, Artificial Sequence; identical to SEQ ID NO: 22073
  Cyclic GFR-binding peptide
  MOD_RES (29)..(29): Xaa is C or S

SEQ ID NO: 100433 - protein, 38 aa, Artificial Sequence
  Cyclic GFR-binding peptide
  MOD_RES (1)..(33)..(34): Xaa is C or S
XAEVVMDSMEGIVVNNAADMIQITINSLRAPVXXSAPA

SEQ ID NO: 100434 - protein, 29 aa, Artificial Sequence
  Cyclic GFR-binding peptide
SHEELSMEGIHQGQHPKIRMIQMTINSQG

SEQ ID NO: 100435 - protein, 30 aa, Artificial Sequence
  Cyclic GFR-binding peptide
  MOD_RES (1)..(1): Xaa is C or S
XAEVVMDSMEGLVVNNAADMIQITINSLRA

SEQ ID NO: 100436 - protein, 21 aa, Artificial Sequence
  Cyclic GFR-binding peptide
MSMEGLIKPTKGIMIQITINS

SEQ ID NO: 100437 - protein, 39 aa, Artificial Sequence; identical to SEQ ID NO: 22075
  Cyclic GFR-binding peptide
  MOD_RES (33)..(33): Xaa is C or S

SEQ ID NO: 100438 - protein, 29 aa, Artificial Sequence
  Cyclic GFR-binding peptide
  MOD_RES (28)..(29): Xaa is C or S
MDSMEGIVVNNASDMIQITINSLRTPVXX

SEQ ID NO: 100439 - protein, 32 aa, Artificial Sequence
  Cyclic GFR-binding peptide
  MOD_RES (2)..(2): Xaa is C or S
KXSRVIMSMEGLVKPKRGVMIQITINSLAQPV

SEQ ID NO: 100440 - protein, 31 aa, Artificial Sequence
  Cyclic GFR-binding peptide
  MOD_RES (31)..(31): Xaa is C or S
SRVIMSMEGLVKPKRGVMIQITINSLAQPVX

SEQ ID NO: 100441 - protein, 37 aa, Artificial Sequence; identical to SEQ ID NO: 67534
  Cyclic GFR-binding peptide
  MOD_RES (31)..(32): Xaa is C or S

SEQ ID NO: 100442 - protein, 30 aa, Artificial Sequence
  Cyclic GFR-binding peptide
  MOD_RES (30)..(30): Xaa is C or S
VVMDSMEGIVVNNASDMIQITINSLRTPVX

SEQ ID NO: 100443 - protein, 33 aa, Artificial Sequence; identical to SEQ ID NO: 64189
  Cyclic GFR-binding peptide
  MOD_RES (1)..(3): Xaa is C or S

SEQ ID NO: 100444 - protein, 24 aa, Artificial Sequence
  Cyclic GFR-binding peptide
SMEGLIKPTKGIMIQITINSLDQS

SEQ ID NO: 100445 - protein, 34 aa, Artificial Sequence; identical to SEQ ID NO: 22082
  Cyclic GFR-binding peptide
  MOD_RES (32)..(32): Xaa is C or S

SEQ ID NO: 100446 - protein, 31 aa, Artificial Sequence
  Cyclic GFR-binding peptide
RDVVMGSMEGIIIQQKDNMIQMTINSMKTPT

SEQ ID NO: 100447 - protein, 26 aa, Artificial Sequence
  Cyclic GFR-binding peptide
ELSMEGIHQGQHPKIRMIQMTINSQG

SEQ ID NO: 100448 - protein, 37 aa, Artificial Sequence
  Cyclic GFR-binding peptide
  MOD_RES (1)..(33)..(34): Xaa is C or S
XSEVVMDSMEGLVVNNASDMIQITINSLRTPVXXTPP

SEQ ID NO: 100449 - protein, 35 aa, Artificial Sequence
  Cyclic GFR-binding peptide
  MOD_RES (32)..(33): Xaa is C or S
RDVVMGSMEGLIIQQKDNMIQMTINSMKTPTXXPG

SEQ ID NO: 100450 - protein, 32 aa, Artificial Sequence
  Cyclic GFR-binding peptide
  MOD_RES (30)..(31): Xaa is C or S
VVMDSMEGIVVNNAADMIQITINSLRAPVXXS

SEQ ID NO: 100451 - protein, 28 aa, Artificial Sequence
  Cyclic GFR-binding peptide
  MOD_RES (26)..(27): Xaa is C or S
SMEGLVVNNAADMIQITINSLRAPVXXS

SEQ ID NO: 100452 - protein, 32 aa, Artificial Sequence
  Cyclic GFR-binding peptide
  MOD_RES (26)..(27): Xaa is C or S
SMEGLIKPTKGIMIQITINSLDQSVXXPSASA

SEQ ID NO: 100453 - protein, 38 aa, Artificial Sequence
  Cyclic GFR-binding peptide
  MOD_RES (32)..(33): Xaa is C or S
RDVVMGSMEGIIIQQKDNMIQMTINSMKTPTXXPGASG

SEQ ID NO: 100454 - protein, 31 aa, Artificial Sequence
  Cyclic GFR-binding peptide
  MOD_RES (2)..(4): Xaa is C or S
RXGXSEVVMDSMEGIVVNNASDMIQITINSL

SEQ ID NO: 100455 - protein, 23 aa, Artificial Sequence
  Cyclic GFR-binding peptide
IMSMEGIVKPKRGVMIQITINSL

SEQ ID NO: 100456 - protein, 30 aa, Artificial Sequence
  Cyclic GFR-binding peptide
  MOD_RES (28)..(29): Xaa is C or S
VMSMEGLVKPTRGVMIQITINSLDQPVXXP

SEQ ID NO: 100457 - protein, 37 aa, Artificial Sequence; identical to SEQ ID NO: 22099
  Cyclic GFR-binding peptide
  MOD_RES (33)..(33): Xaa is C or S

SEQ ID NO: 100458 - protein, 30 aa, Artificial Sequence
  Cyclic GFR-binding peptide
  MOD_RES (26)..(27): Xaa is C or S
SMEGLIIQQKDNMIQMTINSMKTPTXXPGA

SEQ ID NO: 100459 - protein, 28 aa, Artificial Sequence
  Cyclic GFR-binding peptide
SKVVMSMEGIVKPTRGVMIQITINSLDQ

SEQ ID NO: 100460 - protein, 32 aa, Artificial Sequence; identical to SEQ ID NO: 64205
  Cyclic GFR-binding peptide
  MOD_RES (29)..(30): Xaa is C or S

SEQ ID NO: 100461 - protein, 35 aa, Artificial Sequence
  Cyclic GFR-binding peptide
  MOD_RES (1)..(33)..(34): Xaa is C or S
XAEVVMDSMEGIVVNNAADMIQITINSLRAPVXXS

SEQ ID NO: 100462 - protein, 29 aa, Artificial Sequence
  Cyclic GFR-binding peptide
  MOD_RES (27)..(28): Xaa is C or S
MSMEGLVKPTRGVMIQITINSLDQPVXXP

SEQ ID NO: 100463 - protein, 21 aa, Artificial Sequence
  Cyclic GFR-binding peptide
SMEGILLVRGNDMIQMTINST

SEQ ID NO: 100464 - protein, 36 aa, Artificial Sequence
  Cyclic GFR-binding peptide
  MOD_RES (1)..(32)..(33): Xaa is C or S
XEEVIMSMEGLLLVRGNDMIQMTINSTKVPAXXTSP

SEQ ID NO: 100465 - protein, 35 aa, Artificial Sequence
  Cyclic GFR-binding peptide
  MOD_RES (1)..(33)..(34): Xaa is C or S
XSEVVMDSMEGLVVNNASDMIQITINSLRTPVXXT

SEQ ID NO: 100466 - protein, 43 aa, Artificial Sequence; identical to SEQ ID NO: 22104
  Cyclic GFR-binding peptide
  MOD_RES (2)..(4)..(38): Xaa is C or S

SEQ ID NO: 100467 - protein, 43 aa, Artificial Sequence; identical to SEQ ID NO: 22106
  Cyclic GFR-binding peptide
  MOD_RES (2)..(4)..(38): Xaa is C or S

SEQ ID NO: 100468 - protein, 35 aa, Artificial Sequence; identical to SEQ ID NO: 22110
  Cyclic GFR-binding peptide
  MOD_RES (30)..(30): Xaa is C or S

SEQ ID NO: 100469 - protein, 35 aa, Artificial Sequence
  Cyclic GFR-binding peptide
  MOD_RES (2)..(34)..(35): Xaa is C or S
GXRDVVMGSMEGIIIQQKDNMIQMTINSMKTPTXX

SEQ ID NO: 100470 - protein, 38 aa, Artificial Sequence; identical to SEQ ID NO: 22113
  Cyclic GFR-binding peptide
  MOD_RES (37)..(37): Xaa is C or S

SEQ ID NO: 100471 - protein, 36 aa, Artificial Sequence
  Cyclic GFR-binding peptide
  MOD_RES (1)..(3)..(34)..(35): Xaa is C or S
XGXEEVIMSMEGLLLVRGNDMIQMTINSTKVPAXXT

SEQ ID NO: 100472 - protein, 40 aa, Artificial Sequence
  Cyclic GFR-binding peptide
  MOD_RES (1)..(3)..(34)..(35): Xaa is C or S
XKXSKVVMSMEGLVKPTRGVMIQITINSLDQPVXXPSASA

SEQ ID NO: 100473 - protein, 30 aa, Artificial Sequence; identical to SEQ ID NO: 64220
  Cyclic GFR-binding peptide
  MOD_RES (1)..(1): Xaa is C or S

SEQ ID NO: 100474 - protein, 32 aa, Artificial Sequence
  Cyclic GFR-binding peptide
  MOD_RES (1)..(3): Xaa is C or S
XGXAEVVMDSMEGLVVNNAADMIQITINSLRA

SEQ ID NO: 100475 - protein, 32 aa, Artificial Sequence
  Cyclic GFR-binding peptide
  MOD_RES (28)..(29): Xaa is C or S
MDSMEGLVVNNAADMIQITINSLRAPVXXSAP

SEQ ID NO: 100476 - protein, 37 aa, Artificial Sequence; identical to SEQ ID NO: 22121
  Cyclic GFR-binding peptide
  MOD_RES (1)..(3): Xaa is C or S

SEQ ID NO: 100477 - protein, 34 aa, Artificial Sequence
  Cyclic GFR-binding peptide
  MOD_RES (1)..(32)..(33): Xaa is C or S
XSKVIMSMEGLIKPTKGIMIQITINSLDQSVXXP

SEQ ID NO: 100478 - protein, 33 aa, Artificial Sequence
  Cyclic GFR-binding peptide
  MOD_RES (1)..(3): Xaa is C or S
XGXAEVVMDSMEGLVVNNAADMIQITINSLRAP

SEQ ID NO: 100479 - protein, 28 aa, Artificial Sequence
  Cyclic GFR-binding peptide
AEVVMDSMEGLVVNNAADMIQITINSLR

SEQ ID NO: 100480 - protein, 25 aa, Artificial Sequence
  Cyclic GFR-binding peptide
IMSMEGLVKPKRGVMIQITINSLAQ

SEQ ID NO: 100481 - protein, 30 aa, Artificial Sequence
  Cyclic GFR-binding peptide
  MOD_RES (2)..(4): Xaa is C or S
SXKXSKVIMSMEGLIKPTKGIMIQITINSL

SEQ ID NO: 100482 - protein, 24 aa, Artificial Sequence
  Cyclic GFR-binding peptide
MSMEGLVKPKRGVMIQITINSLAQ

SEQ ID NO: 100483 - protein, 34 aa, Artificial Sequence; identical to SEQ ID NO: 22129
  Cyclic GFR-binding peptide
  MOD_RES (34)..(34): Xaa is C or S

SEQ ID NO: 100484 - protein, 20 aa, Artificial Sequence
  Cyclic GFR-binding peptide
SMEGIIKPTKGIMIQITINS

SEQ ID NO: 100485 - protein, 32 aa, Artificial Sequence
  Cyclic GFR-binding peptide
  MOD_RES (30)..(31): Xaa is C or S
RVIMSMEGLVKPKRGVMIQITINSLAQPVXXP

SEQ ID NO: 100486 - protein, 25 aa, Artificial Sequence
  Cyclic GFR-binding peptide
DSMEGIVVNNAADMIQITINSLRAP

SEQ ID NO: 100487 - protein, 29 aa, Artificial Sequence
  Cyclic GFR-binding peptide
  MOD_RES (1)..(3): Xaa is C or S
XGXSRVVMNSMEGLIVNSSDDMIQVTINS

SEQ ID NO: 100488 - protein, 39 aa, Artificial Sequence; identical to SEQ ID NO: 64226
  Cyclic GFR-binding peptide
  MOD_RES (1)..(3)..(34)..(35): Xaa is C or S

SEQ ID NO: 100489 - protein, 29 aa, Artificial Sequence
  Cyclic GFR-binding peptide
  MOD_RES (29)..(29): Xaa is C or S
VVMSMEGIVKPTRGVMIQITINSLDQPVX

SEQ ID NO: 100490 - protein, 22 aa, Artificial Sequence
  Cyclic GFR-binding peptide
SMEGLLLVRGNDMIQMTINSTK

SEQ ID NO: 100491 - protein, 32 aa, Artificial Sequence; identical to SEQ ID NO: 22139
  Cyclic GFR-binding peptide

SEQ ID NO: 100492 - protein, 38 aa, Artificial Sequence; identical to SEQ ID NO: 64234
  Cyclic GFR-binding peptide
  MOD_RES (1)..(33)..(34): Xaa is C or S

SEQ ID NO: 100493 - protein, 34 aa, Artificial Sequence
  Cyclic GFR-binding peptide
  MOD_RES (1)..(3): Xaa is C or S
XGXAEVVMDSMEGLVVNNAADMIQITINSLRAPV

SEQ ID NO: 100494 - protein, 29 aa, Artificial Sequence
  Cyclic GFR-binding peptide
  MOD_RES (1)..(3): Xaa is C or S
XKXSKVIMSMEGIIKPTKGIMIQITINSL

SEQ ID NO: 100495 - protein, 21 aa, Artificial Sequence
  Cyclic GFR-binding peptide
SMEGIVVNNASDMIQITINSL

SEQ ID NO: 100496 - protein, 23 aa, Artificial Sequence
  Cyclic GFR-binding peptide
MSMEGLIKPTKGIMIQITINSLD

SEQ ID NO: 100497 - protein, 26 aa, Artificial Sequence
  Cyclic GFR-binding peptide
  MOD_RES (26)..(26): Xaa is C or S
SMEGLVVNNAADMIQITINSLRAPVX

SEQ ID NO: 100498 - protein, 26 aa, Artificial Sequence
  Cyclic GFR-binding peptide
  MOD_RES (26)..(26): Xaa is C or S
SMEGIVKPKRGVMIQITINSLAQPVX

SEQ ID NO: 100499 - protein, 33 aa, Artificial Sequence; identical to SEQ ID NO: 64246
  Cyclic GFR-binding peptide
  MOD_RES (27)..(28): Xaa is C or S

SEQ ID NO: 100500 - protein, 28 aa, Artificial Sequence
  Cyclic GFR-binding peptide
RVIMSMEGIVKPKRGVMIQITINSLAQP

SEQ ID NO: 100501 - protein, 27 aa, Artificial Sequence
  Cyclic GFR-binding peptide
VVMDSMEGLVVNNAADMIQITINSLRA

SEQ ID NO: 100502 - protein, 32 aa, Artificial Sequence
  Cyclic GFR-binding peptide
  MOD_RES (27)..(28): Xaa is C or S
GSMEGLIIQQKDNMIQMTINSMKTPTXXPGAS

SEQ ID NO: 100503 - protein, 31 aa, Artificial Sequence
  Cyclic GFR-binding peptide
  MOD_RES (30)..(31): Xaa is C or S
VVMDSMEGIVVNNASDMIQITINSLRTPVXX

SEQ ID NO: 100504 - protein, 25 aa, Artificial Sequence
  Cyclic GFR-binding peptide
FSMEGIHQGQHPKIRMIQMTINSEE

SEQ ID NO: 100505 - protein, 37 aa, Artificial Sequence; identical to SEQ ID NO: 64255
  Cyclic GFR-binding peptide
  MOD_RES (2)..(4)..(36)..(37): Xaa is C or S

SEQ ID NO: 100506 - protein, 35 aa, Artificial Sequence
  Cyclic GFR-binding peptide
  MOD_RES (2)..(33)..(34): Xaa is C or S
KXSRVIMSMEGLVKPKRGVMIQITINSLAQPVXXP

SEQ ID NO: 100507 - protein, 34 aa, Artificial Sequence
  Cyclic GFR-binding peptide
  MOD_RES (30)..(31): Xaa is C or S
VVMNSMEGLIVNSSDDMIQVTINSLKTPAXXPKP

SEQ ID NO: 100508 - protein, 31 aa, Artificial Sequence
  Cyclic GFR-binding peptide
  MOD_RES (2)..(2): Xaa is C or S
GXRDVVMGSMEGLIIQQKDNMIQMTINSMKT

SEQ ID NO: 100509 - protein, 26 aa, Artificial Sequence
  Cyclic GFR-binding peptide
EVVMDSMEGLVVNNASDMIQITINSL

SEQ ID NO: 100510 - protein, 31 aa, Artificial Sequence
  Cyclic GFR-binding peptide
  MOD_RES (2)..(4): Xaa is C or S
LXGXEEVIMSMEGLLLVRGNDMIQMTINSTK

SEQ ID NO: 100511 - protein, 23 aa, Artificial Sequence
  Cyclic GFR-binding peptide
GSMEGLIIQQKDNMIQMTINSMK

SEQ ID NO: 100512 - protein, 29 aa, Artificial Sequence
  Cyclic GFR-binding peptide
  MOD_RES (1)..(1): Xaa is C or S
XEEVIMSMEGILLVRGNDMIQMTINSTKV

SEQ ID NO: 100513 - protein, 38 aa, Artificial Sequence
  Cyclic GFR-binding peptide
  MOD_RES (32)..(33): Xaa is C or S
SRVVMNSMEGLIVNSSDDMIQVTINSLKTPAXXPKPVH

SEQ ID NO: 100514 - protein, 28 aa, Artificial Sequence
  Cyclic GFR-binding peptide
  MOD_RES (26)..(27): Xaa is C or S
SMEGLVKPKRGVMIQITINSLAQPVXXP

SEQ ID NO: 100515 - protein, 36 aa, Artificial Sequence; identical to SEQ ID NO: 22171
  Cyclic GFR-binding peptide
  MOD_RES (32)..(32): Xaa is C or S

SEQ ID NO: 100516 - protein, 29 aa, Artificial Sequence
  Cyclic GFR-binding peptide
LHEELRSMEGLLKPKKRVYEMIQVTINSH

SEQ ID NO: 100517 - protein, 31 aa, Artificial Sequence
  Cyclic GFR-binding peptide
  MOD_RES (1)..(3): Xaa is C or S
XGXSEVVMDSMEGLVVNNASDMIQITINSLR

SEQ ID NO: 100518 - protein, 35 aa, Artificial Sequence
  Cyclic GFR-binding peptide
  MOD_RES (31)..(32): Xaa is C or S
EVVMDSMEGLVVNNASDMIQITINSLRTPVXXTPP

SEQ ID NO: 100519 - protein, 35 aa, Artificial Sequence; identical to SEQ ID NO: 64271
  Cyclic GFR-binding peptide
  MOD_RES (2)..(33)..(34): Xaa is C or S

SEQ ID NO: 100520 - protein, 38 aa, Artificial Sequence
  Cyclic GFR-binding peptide
  MOD_RES (1)..(32)..(33): Xaa is C or S
XEEVIMSMEGLLLVRGNDMIQMTINSTKVPAXXTSPVR

SEQ ID NO: 100521 - protein, 37 aa, Artificial Sequence
  Cyclic GFR-binding peptide
  MOD_RES (1)..(3)..(35)..(36): Xaa is C or S
XGXAEVVMDSMEGIVVNNAADMIQITINSLRAPVXXS

SEQ ID NO: 100522 - protein, 32 aa, Artificial Sequence
  Cyclic GFR-binding peptide
  MOD_RES (29)..(30): Xaa is C or S
VIMSMEGLVKPKRGVMIQITINSLAQPVXXPA

SEQ ID NO: 100523 - protein, 36 aa, Artificial Sequence
  Cyclic GFR-binding peptide
  MOD_RES (1)..(33)..(34): Xaa is C or S
XAEVVMDSMEGIVVNNAADMIQITINSLRAPVXXSA

SEQ ID NO: 100524 - protein, 35 aa, Artificial Sequence
  Cyclic GFR-binding peptide
  MOD_RES (29)..(30): Xaa is C or S
VMNSMEGIIVNSSDDMIQVTINSLKTPAXXPKPVH

SEQ ID NO: 100525 - protein, 24 aa, Artificial Sequence
  Cyclic GFR-binding peptide
IMSMEGIVKPKRGVMIQITINSLA

SEQ ID NO: 100526 - protein, 25 aa, Artificial Sequence
  Cyclic GFR-binding peptide
FSMEGLHQGQHPKIRMIQMTINSEE

SEQ ID NO: 100527 - protein, 32 aa, Artificial Sequence; identical to SEQ ID NO: 67619
  Cyclic GFR-binding peptide
  MOD_RES (31)..(32): Xaa is C or S

SEQ ID NO: 100528 - protein, 26 aa, Artificial Sequence
  Cyclic GFR-binding peptide
VMDSMEGIVVNNASDMIQITINSLRT

SEQ ID NO: 100529 - protein, 29 aa, Artificial Sequence
  Cyclic GFR-binding peptide
  MOD_RES (28)..(29): Xaa is C or S
MNSMEGLIVNSSDDMIQVTINSLKTPAXX

SEQ ID NO: 100530 - protein, 33 aa, Artificial Sequence; identical to SEQ ID NO: 22185
  Cyclic GFR-binding peptide
  MOD_RES (32)..(32): Xaa is C or S

SEQ ID NO: 100531 - protein, 24 aa, Artificial Sequence
  Cyclic GFR-binding peptide
IMSMEGLVKPKRGVMIQITINSLA

SEQ ID NO: 100532 - protein, 26 aa, Artificial Sequence
  Cyclic GFR-binding peptide
  MOD_RES (1)..(1): Xaa is C or S
XSKVVMSMEGIVKPTRGVMIQITINS

SEQ ID NO: 100533 - protein, 31 aa, Artificial Sequence
  Cyclic GFR-binding peptide
  MOD_RES (1)..(1): Xaa is C or S
XEEVIMSMEGLLLVRGNDMIQMTINSTKVPA

SEQ ID NO: 100534 - protein, 38 aa, Artificial Sequence
  Cyclic GFR-binding peptide
  MOD_RES (2)..(33)..(34): Xaa is C or S
GXEEVIMSMEGLLLVRGNDMIQMTINSTKVPAXXTSPV

SEQ ID NO: 100535 - protein, 35 aa, Artificial Sequence
  Cyclic GFR-binding peptide
  MOD_RES (29)..(30): Xaa is C or S
VMGSMEGLIIQQKDNMIQMTINSMKTPTXXPGASG

SEQ ID NO: 100536 - protein, 25 aa, Artificial Sequence
  Cyclic GFR-binding peptide
VIMSMEGLIKPTKGIMIQITINSLD

SEQ ID NO: 100537 - protein, 28 aa, Artificial Sequence
  Cyclic GFR-binding peptide
  MOD_RES (1)..(3): Xaa is C or S
XGXEEVIMSMEGLLLVRGNDMIQMTINS

SEQ ID NO: 100538 - protein, 23 aa, Artificial Sequence
  Cyclic GFR-binding peptide
SMEGLVKPTRGVMIQITINSLDQ

SEQ ID NO: 100539 - protein, 31 aa, Artificial Sequence; identical to SEQ ID NO: 67644
  Cyclic GFR-binding peptide
  MOD_RES (31)..(31): Xaa is C or S

SEQ ID NO: 100540 - protein, 41 aa, Artificial Sequence
  Cyclic GFR-binding peptide
  MOD_RES (2)..(4)..(36)..(37): Xaa is C or S
RXGXSEVVMDSMEGLVVNNASDMIQITINSLRTPVXXTPPT

SEQ ID NO: 100541 - protein, 31 aa, Artificial Sequence
  Cyclic GFR-binding peptide
  MOD_RES (29)..(30): Xaa is C or S
VMDSMEGLVVNNAADMIQITINSLRAPVXXS

SEQ ID NO: 100542 - protein, 29 aa, Artificial Sequence
  Cyclic GFR-binding peptide
  MOD_RES (2)..(4): Xaa is C or S
SXKXSKVIMSMEGIIKPTKGIMIQITINS

SEQ ID NO: 100543 - protein, 21 aa, Artificial Sequence
  Cyclic GFR-binding peptide
MSMEGIIKPTKGIMIQITINS

SEQ ID NO: 100544 - protein, 36 aa, Artificial Sequence; identical to SEQ ID NO: 67655
  Cyclic GFR-binding peptide
  MOD_RES (31)..(32): Xaa is C or S

SEQ ID NO: 100545 - protein, 34 aa, Artificial Sequence; identical to SEQ ID NO: 22200
  Cyclic GFR-binding peptide
  MOD_RES (2)..(2): Xaa is C or S

SEQ ID NO: 100546 - protein, 44 aa, Artificial Sequence; identical to SEQ ID NO: 22204
  Cyclic GFR-binding peptide
  MOD_RES (2)..(4)..(38): Xaa is C or S

SEQ ID NO: 100547 - protein, 26 aa, Artificial Sequence
  Cyclic GFR-binding peptide
MNSMEGLIVNSSDDMIQVTINSLKTP

SEQ ID NO: 100548 - protein, 24 aa, Artificial Sequence
  Cyclic GFR-binding peptide
VMNSMEGIIVNSSDDMIQVTINSL

SEQ ID NO: 100549 - protein, 31 aa, Artificial Sequence
  Cyclic GFR-binding peptide
  MOD_RES (1)..(3): Xaa is C or S
XGXSEVVMDSMEGIVVNNASDMIQITINSLR

SEQ ID NO: 100550 - protein, 29 aa, Artificial Sequence
  Cyclic GFR-binding peptide
DVVMGSMEGLIIQQKDNMIQMTINSMKTP

SEQ ID NO: 100551 - protein, 29 aa, Artificial Sequence
  Cyclic GFR-binding peptide
  MOD_RES (27)..(28): Xaa is C or S
DSMEGLVVNNASDMIQITINSLRTPVXXT

SEQ ID NO: 100552 - protein, 41 aa, Artificial Sequence
  Cyclic GFR-binding peptide
  MOD_RES (1)..(3)..(35)..(36): Xaa is C or S
XGXAEVVMDSMEGLVVNNAADMIQITINSLRAPVXXSAPAA

SEQ ID NO: 100553 - protein, 31 aa, Artificial Sequence
  Cyclic GFR-binding peptide
  MOD_RES (28)..(29): Xaa is C or S
VMSMEGLVKPTRGVMIQITINSLDQPVXXPS

SEQ ID NO: 100554 - protein, 30 aa, Artificial Sequence
  Cyclic GFR-binding peptide
  MOD_RES (1)..(3): Xaa is C or S
XGXEEVIMSMEGILLVRGNDMIQMTINSTK

SEQ ID NO: 100555 - protein, 28 aa, Artificial Sequence
  Cyclic GFR-binding peptide
  MOD_RES (2)..(2): Xaa is C or S
GXAEVVMDSMEGLVVNNAADMIQITINS

SEQ ID NO: 100556 - protein, 33 aa, Artificial Sequence
  Cyclic GFR-binding peptide
  MOD_RES (2)..(4): Xaa is C or S
HXGXSRVVMNSMEGLIVNSSDDMIQVTINSLKT

SEQ ID NO: 100557 - protein, 36 aa, Artificial Sequence; identical to SEQ ID NO: 22220
  Cyclic GFR-binding peptide
  MOD_RES (32)..(32): Xaa is C or S

SEQ ID NO: 100558 - protein, 36 aa, Artificial Sequence
  Cyclic GFR-binding peptide
  MOD_RES (2)..(33)..(34): Xaa is C or S
GXEEVIMSMEGILLVRGNDMIQMTINSTKVPAXXTS

SEQ ID NO: 100559 - protein, 33 aa, Artificial Sequence; identical to SEQ ID NO: 22222
  Cyclic GFR-binding peptide
  MOD_RES (2)..(2): Xaa is C or S

SEQ ID NO: 100560 - protein, 31 aa, Artificial Sequence; identical to SEQ ID NO: 67678
  Cyclic GFR-binding peptide
  MOD_RES (30)..(31): Xaa is C or S

SEQ ID NO: 100561 - protein, 38 aa, Artificial Sequence; identical to SEQ ID NO: 22226
  Cyclic GFR-binding peptide
  MOD_RES (1)..(3): Xaa is C or S

SEQ ID NO: 100562 - protein, 23 aa, Artificial Sequence
  Cyclic GFR-binding peptide
VMDSMEGLVVNNASDMIQITINS

SEQ ID NO: 100563 - protein, 28 aa, Artificial Sequence
  Cyclic GFR-binding peptide
VIMSMEGILLVRGNDMIQMTINSTKVPA

SEQ ID NO: 100564 - protein, 28 aa, Artificial Sequence
  Cyclic GFR-binding peptide
SMEGLFIPKKRVIEMIQVTINSLQVQTP

SEQ ID NO: 100565 - protein, 35 aa, Artificial Sequence
  Cyclic GFR-binding peptide
  MOD_RES (2)..(4)..(35): Xaa is C or S
SXKXSKVIMSMEGLIKPTKGIMIQITINSLDQSVX

SEQ ID NO: 100566 - protein, 28 aa, Artificial Sequence
  Cyclic GFR-binding peptide
  MOD_RES (27)..(28): Xaa is C or S
DSMEGIVVNNASDMIQITINSLRTPVXX

SEQ ID NO: 100567 - protein, 28 aa, Artificial Sequence
  Cyclic GFR-binding peptide
  MOD_RES (26)..(27): Xaa is C or S
SMEGLIIQQKDNMIQMTINSMKTPTXXP

SEQ ID NO: 100568 - protein, 33 aa, Artificial Sequence
  Cyclic GFR-binding peptide
  MOD_RES (30)..(31): Xaa is C or S
EVIMSMEGILLVRGNDMIQMTINSTKVPAXXTS

SEQ ID NO: 100569 - protein, 40 aa, Artificial Sequence
  Cyclic GFR-binding peptide
  MOD_RES (1)..(3)..(35)..(36): Xaa is C or S
XGXSEVVMDSMEGIVVNNASDMIQITINSLRTPVXXTPPT

SEQ ID NO: 100570 - protein, 35 aa, Artificial Sequence
  Cyclic GFR-binding peptide
  MOD_RES (32)..(33): Xaa is C or S
SEVVMDSMEGIVVNNASDMIQITINSLRTPVXXTP

SEQ ID NO: 100571 - protein, 20 aa, Artificial Sequence
  Cyclic GFR-binding peptide
SMEGIVVNNASDMIQITINS

SEQ ID NO: 100572 - protein, 34 aa, Artificial Sequence
  Cyclic GFR-binding peptide
  MOD_RES (29)..(30): Xaa is C or S
VMDSMEGLVVNNASDMIQITINSLRTPVXXTPPT

SEQ ID NO: 100573 - protein, 21 aa, Artificial Sequence
  Cyclic GFR-binding peptide
SMEGIIKPTKGIMIQITINSL

SEQ ID NO: 100574 - protein, 28 aa, Artificial Sequence
  Cyclic GFR-binding peptide
DVVMGSMEGIIIQQKDNMIQMTINSMKT

SEQ ID NO: 100575 - protein, 32 aa, Artificial Sequence
  Cyclic GFR-binding peptide
  MOD_RES (1)..(3): Xaa is C or S
XGXEEVIMSMEGLLLVRGNDMIQMTINSTKVP

SEQ ID NO: 100576 - protein, 25 aa, Artificial Sequence
  Cyclic GFR-binding peptide
SMEGLLKPKKRVYEMIQVTINSHHV

SEQ ID NO: 100577 - protein, 32 aa, Artificial Sequence
  Cyclic GFR-binding peptide
  MOD_RES (31)..(32): Xaa is C or S
SKVVMSMEGLVKPTRGVMIQITINSLDQPVXX

SEQ ID NO: 100578 - protein, 26 aa, Artificial Sequence
  Cyclic GFR-binding peptide
RVVMNSMEGLIVNSSDDMIQVTINSL

SEQ ID NO: 100579 - protein, 32 aa, Artificial Sequence
  Cyclic GFR-binding peptide
  MOD_RES (2)..(4): Xaa is C or S
RXGXAEVVMDSMEGLVVNNAADMIQITINSLR

SEQ ID NO: 100580 - protein, 39 aa, Artificial Sequence
  Cyclic GFR-binding peptide
  MOD_RES (2)..(34)..(35): Xaa is C or S
GXSRVVMNSMEGLIVNSSDDMIQVTINSLKTPAXXPKPV

SEQ ID NO: 100581 - protein, 32 aa, Artificial Sequence; identical to SEQ ID NO: 22252
  Cyclic GFR-binding peptide
  MOD_RES (1)..(3): Xaa is C or S

SEQ ID NO: 100582 - protein, 36 aa, Artificial Sequence; identical to SEQ ID NO: 67706
  Cyclic GFR-binding peptide
  MOD_RES (1)..(33)..(34): Xaa is C or S

SEQ ID NO: 100583 - protein, 26 aa, Artificial Sequence
  Cyclic GFR-binding peptide
NSMEGIIVNSSDDMIQVTINSLKTPA

SEQ ID NO: 100584 - protein, 36 aa, Artificial Sequence; identical to SEQ ID NO: 22259
  Cyclic GFR-binding peptide

SEQ ID NO: 100585 - protein, 28 aa, Artificial Sequence
  Cyclic GFR-binding peptide
  MOD_RES (1)..(1): Xaa is C or S
XSKVVMSMEGLVKPTRGVMIQITINSLD

SEQ ID NO: 100586 - protein, 28 aa, Artificial Sequence
  Cyclic GFR-binding peptide
KVIMSMEGLIKPTKGIMIQITINSLDQS

SEQ ID NO: 100587 - protein, 29 aa, Artificial Sequence
  Cyclic GFR-binding peptide
  MOD_RES (2)..(2): Xaa is C or S
GXSEVVMDSMEGIVVNNASDMIQITINSL

SEQ ID NO: 100588 - protein, 44 aa, Artificial Sequence; identical to SEQ ID NO: 22260
  Cyclic GFR-binding peptide
  MOD_RES (2)..(4)..(41): Xaa is C or S

SEQ ID NO: 100589 - protein, 36 aa, Artificial Sequence
  Cyclic GFR-binding peptide
  MOD_RES (30)..(31): Xaa is C or S
RVIMSMEGLVKPKRGVMIQITINSLAQPVXXPAASA

SEQ ID NO: 100590 - protein, 36 aa, Artificial Sequence; identical to SEQ ID NO: 22263
  Cyclic GFR-binding peptide
  MOD_RES (33)..(33): Xaa is C or S

SEQ ID NO: 100591 - protein, 30 aa, Artificial Sequence
  Cyclic GFR-binding peptide
  MOD_RES (2)..(2): Xaa is C or S
GXSRVVMNSMEGLIVNSSDDMIQVTINSLK

SEQ ID NO: 100592 - protein, 31 aa, Artificial Sequence; identical to SEQ ID NO: 64361
  Cyclic GFR-binding peptide
  MOD_RES (1)..(1): Xaa is C or S

SEQ ID NO: 100593 - protein, 34 aa, Artificial Sequence
  Cyclic GFR-binding peptide
  MOD_RES (2)..(4): Xaa is C or S
LXGXEEVIMSMEGILLVRGNDMIQMTINSTKVPA

SEQ ID NO: 100594 - protein, 34 aa, Artificial Sequence; identical to SEQ ID NO: 22269
  Cyclic GFR-binding peptide
  MOD_RES (32)..(32): Xaa is C or S

SEQ ID NO: 100595 - protein, 38 aa, Artificial Sequence
  Cyclic GFR-binding peptide
  MOD_RES (1)..(3)..(34)..(35): Xaa is C or S
XGXEEVIMSMEGLLLVRGNDMIQMTINSTKVPAXXTSP

SEQ ID NO: 100596 - protein, 25 aa, Artificial Sequence
  Cyclic GFR-binding peptide
LRSMEGLLKPKKRVYEMIQVTINSH

SEQ ID NO: 100597 - protein, 24 aa, Artificial Sequence
  Cyclic GFR-binding peptide
LFSMEGLHQGQHPKIRMIQMTINS

SEQ ID NO: 100598 - protein, 37 aa, Artificial Sequence; identical to SEQ ID NO: 22272
  Cyclic GFR-binding peptide
  MOD_RES (36)..(36): Xaa is C or S

SEQ ID NO: 100599 - protein, 23 aa, Artificial Sequence
  Cyclic GFR-binding peptide
GSMEGIIIQQKDNMIQMTINSMK

SEQ ID NO: 100600 - protein, 35 aa, Artificial Sequence
  Cyclic GFR-binding peptide
  MOD_RES (2)..(34)..(35): Xaa is C or S
GXRDVVMGSMEGLIIQQKDNMIQMTINSMKTPTXX

SEQ ID NO: 100601 - protein, 36 aa, Artificial Sequence; identical to SEQ ID NO: 22276
  Cyclic GFR-binding peptide
  MOD_RES (36)..(36): Xaa is C or S

SEQ ID NO: 100602 - protein, 26 aa, Artificial Sequence
  Cyclic GFR-binding peptide
VIMSMEGIVKPKRGVMIQITINSLAQ

SEQ ID NO: 100603 - protein, 35 aa, Artificial Sequence; identical to SEQ ID NO: 22277
  Cyclic GFR-binding peptide
  MOD_RES (35)..(35): Xaa is C or S

SEQ ID NO: 100604 - protein, 33 aa, Artificial Sequence
  Cyclic GFR-binding peptide
  MOD_RES (1)..(3): Xaa is C or S
XGXEEVIMSMEGILLVRGNDMIQMTINSTKVPA

SEQ ID NO: 100605 - protein, 41 aa, Artificial Sequence
  Cyclic GFR-binding peptide
  MOD_RES (2)..(4)..(35)..(36): Xaa is C or S
SXKXSKVVMSMEGLVKPTRGVMIQITINSLDQPVXXPSASA

SEQ ID NO: 100606 - protein, 31 aa, Artificial Sequence
  Cyclic GFR-binding peptide
  MOD_RES (26)..(27): Xaa is C or S
SMEGILLVRGNDMIQMTINSTKVPAXXTSPV

SEQ ID NO: 100607 - protein, 42 aa, Artificial Sequence
  Cyclic GFR-binding peptide
  MOD_RES (2)..(4)..(36)..(37): Xaa is C or S
RXGXSEVVMDSMEGIVVNNASDMIQITINSLRTPVXXTPPTS

SEQ ID NO: 100608 - protein, 26 aa, Artificial Sequence
  Cyclic GFR-binding peptide
VMDSMEGLVVNNAADMIQITINSLRA

SEQ ID NO: 100609 - protein, 32 aa, Artificial Sequence; identical to SEQ ID NO: 67735
  Cyclic GFR-binding peptide
  MOD_RES (28)..(29): Xaa is C or S

SEQ ID NO: 100610 - protein, 28 aa, Artificial Sequence
  Cyclic GFR-binding peptide
DELTSMEGIFIPKKRVIEMIQVTINSLQ

SEQ ID NO: 100611 - protein, 29 aa, Artificial Sequence
  Cyclic GFR-binding peptide
  MOD_RES (26)..(27): Xaa is C or S
SMEGIVKPKRGVMIQITINSLAQPVXXPA

SEQ ID NO: 100612 - protein, 37 aa, Artificial Sequence
  Cyclic GFR-binding peptide
  MOD_RES (32)..(33): Xaa is C or S
SRVVMNSMEGLIVNSSDDMIQVTINSLKTPAXXPKPV

SEQ ID NO: 100613 - protein, 31 aa, Artificial Sequence
  Cyclic GFR-binding peptide
  MOD_RES (2)..(4): Xaa is C or S
SXKXSKVIMSMEGLIKPTKGIMIQITINSLD

SEQ ID NO: 100614 - protein, 37 aa, Artificial Sequence; identical to SEQ ID NO: 22283
  Cyclic GFR-binding peptide
  MOD_RES (1)..(1): Xaa is C or S

SEQ ID NO: 100615 - protein, 30 aa, Artificial Sequence
  Cyclic GFR-binding peptide
  MOD_RES (2)..(2): Xaa is C or S
GXEEVIMSMEGLLLVRGNDMIQMTINSTKV

SEQ ID NO: 100616 - protein, 29 aa, Artificial Sequence
  Cyclic GFR-binding peptide
QLFSMEGIHQGQHPKIRMIQMTINSEETP

SEQ ID NO: 100617 - protein, 28 aa, Artificial Sequence
  Cyclic GFR-binding peptide
VVMNSMEGIIVNSSDDMIQVTINSLKTP

SEQ ID NO: 100618 - protein, 41 aa, Artificial Sequence
  Cyclic GFR-binding peptide
  MOD_RES (1)..(3)..(35)..(36): Xaa is C or S
XGXSEVVMDSMEGLVVNNASDMIQITINSLRTPVXXTPPTS

SEQ ID NO: 100619 - protein, 26 aa, Artificial Sequence
  Cyclic GFR-binding peptide
VVMDSMEGLVVNNAADMIQITINSLR

SEQ ID NO: 100620 - protein, 24 aa, Artificial Sequence
  Cyclic GFR-binding peptide
VIMSMEGLLLVRGNDMIQMTINST

SEQ ID NO: 100621 - protein, 27 aa, Artificial Sequence
  Cyclic GFR-binding peptide
  MOD_RES (27)..(27): Xaa is C or S
GSMEGIIIQQKDNMIQMTINSMKTPTX

SEQ ID NO: 100622 - protein, 28 aa, Artificial Sequence
  Cyclic GFR-binding peptide
DVVMGSMEGLIIQQKDNMIQMTINSMKT

SEQ ID NO: 100623 - protein, 27 aa, Artificial Sequence
  Cyclic GFR-binding peptide
  MOD_RES (2)..(2): Xaa is C or S
KXSKVIMSMEGLIKPTKGIMIQITINS

SEQ ID NO: 100624 - protein, 30 aa, Artificial Sequence; identical to SEQ ID NO: 22295
  Cyclic GFR-binding peptide
  MOD_RES (28)..(28): Xaa is C or S

SEQ ID NO: 100625 - protein, 42 aa, Artificial Sequence; identical to SEQ ID NO: 22296
  Cyclic GFR-binding peptide
  MOD_RES (1)..(3)..(37): Xaa is C or S

SEQ ID NO: 100626 - protein, 39 aa, Artificial Sequence; identical to SEQ ID NO: 22297
  Cyclic GFR-binding peptide
  MOD_RES (1)..(3): Xaa is C or S

SEQ ID NO: 100627 - protein, 32 aa, Artificial Sequence
  Cyclic GFR-binding peptide
  MOD_RES (27)..(28): Xaa is C or S
GSMEGIIIQQKDNMIQMTINSMKTPTXXPGAS

SEQ ID NO: 100628 - protein, 26 aa, Artificial Sequence
  Cyclic GFR-binding peptide
VVMDSMEGIVVNNASDMIQITINSLR

SEQ ID NO: 100629 - protein, 25 aa, Artificial Sequence
  Cyclic GFR-binding peptide
SMEGIVVNNAADMIQITINSLRAPV

SEQ ID NO: 100630 - protein, 36 aa, Artificial Sequence; identical to SEQ ID NO: 22303
  Cyclic GFR-binding peptide
  MOD_RES (33)..(33): Xaa is C or S

SEQ ID NO: 100631 - protein, 38 aa, Artificial Sequence
  Cyclic GFR-binding peptide
  MOD_RES (2)..(33)..(34): Xaa is C or S
GXEEVIMSMEGILLVRGNDMIQMTINSTKVPAXXTSPV

SEQ ID NO: 100632 - protein, 34 aa, Artificial Sequence; identical to SEQ ID NO: 64399
  Cyclic GFR-binding peptide
  MOD_RES (31)..(32): Xaa is C or S

SEQ ID NO: 100633 - protein, 33 aa, Artificial Sequence; identical to SEQ ID NO: 67768
  Cyclic GFR-binding peptide
  MOD_RES (29)..(30): Xaa is C or S

SEQ ID NO: 100634 - protein, 38 aa, Artificial Sequence; identical to SEQ ID NO: 22311
  Cyclic GFR-binding peptide
  MOD_RES (36)..(36): Xaa is C or S

SEQ ID NO: 100635 - protein, 35 aa, Artificial Sequence; identical to SEQ ID NO: 22312
  Cyclic GFR-binding peptide

SEQ ID NO: 100636 - protein, 42 aa, Artificial Sequence; identical to SEQ ID NO: 22314
  Cyclic GFR-binding peptide
  MOD_RES (2)..(39): Xaa is C or S

SEQ ID NO: 100637 - protein, 23 aa, Artificial Sequence
  Cyclic GFR-binding peptide
VIMSMEGILLVRGNDMIQMTINS

SEQ ID NO: 100638 - protein, 35 aa, Artificial Sequence
  Cyclic GFR-binding peptide
  MOD_RES (1)..(3)..(34)..(35): Xaa is C or S
XKXSKVVMSMEGLVKPTRGVMIQITINSLDQPVXX

SEQ ID NO: 100639 - protein, 27 aa, Artificial Sequence
  Cyclic GFR-binding peptide
RSMEGILKPKKRVYEMIQVTINSHHVR

SEQ ID NO: 100640 - protein, 25 aa, Artificial Sequence
  Cyclic GFR-binding peptide
LRSMEGILKPKKRVYEMIQVTINSH

SEQ ID NO: 100641 - protein, 41 aa, Artificial Sequence; identical to SEQ ID NO: 22320
  Cyclic GFR-binding peptide
  MOD_RES (2)..(4)..(41): Xaa is C or S

SEQ ID NO: 100642 - protein, 32 aa, Artificial Sequence
  Cyclic GFR-binding peptide
  MOD_RES (2)..(2): Xaa is C or S
GXSEVVMDSMEGIVVNNASDMIQITINSLRTP

SEQ ID NO: 100643 - protein, 36 aa, Artificial Sequence
  Cyclic GFR-binding peptide
  MOD_RES (2)..(33)..(34): Xaa is C or S
GXEEVIMSMEGLLLVRGNDMIQMTINSTKVPAXXTS

SEQ ID NO: 100644 - protein, 33 aa, Artificial Sequence
  Cyclic GFR-binding peptide
  MOD_RES (32)..(33): Xaa is C or S
AEVVMDSMEGIVVNNAADMIQITINSLRAPVXX

SEQ ID NO: 100645 - protein, 35 aa, Artificial Sequence
  Cyclic GFR-binding peptide
  MOD_RES (1)..(3)..(34)..(35): Xaa is C or S
XKXSKVIMSMEGLIKPTKGIMIQITINSLDQSVXX

SEQ ID NO: 100646 - protein, 31 aa, Artificial Sequence
  Cyclic GFR-binding peptide
  MOD_RES (1)..(3): Xaa is C or S
XGXEEVIMSMEGILLVRGNDMIQMTINSTKV

SEQ ID NO: 100647 - protein, 42 aa, Artificial Sequence; identical to SEQ ID NO: 22325
  Cyclic GFR-binding peptide
  MOD_RES (2)..(4)..(38): Xaa is C or S

SEQ ID NO: 100648 - protein, 36 aa, Artificial Sequence
  Cyclic GFR-binding peptide
  MOD_RES (30)..(31): Xaa is C or S
EVIMSMEGILLVRGNDMIQMTINSTKVPAXXTSPVR

SEQ ID NO: 100649 - protein, 35 aa, Artificial Sequence
  Cyclic GFR-binding peptide
  MOD_RES (31)..(32): Xaa is C or S
EEVIMSMEGLLLVRGNDMIQMTINSTKVPAXXTSP

SEQ ID NO: 100650 - protein, 27 aa, Artificial Sequence
  Cyclic GFR-binding peptide
DVVMGSMEGIIIQQKDNMIQMTINSMK

SEQ ID NO: 100651 - protein, 31 aa, Artificial Sequence
  Cyclic GFR-binding peptide
  MOD_RES (2)..(4): Xaa is C or S
SXKXSKVVMSMEGLVKPTRGVMIQITINSLD

SEQ ID NO: 100652 - protein, 26 aa, Artificial Sequence
  Cyclic GFR-binding peptide
VVMGSMEGIIIQQKDNMIQMTINSMK

SEQ ID NO: 100653 - protein, 27 aa, Artificial Sequence
  Cyclic GFR-binding peptide
VVMSMEGIVKPTRGVMIQITINSLDQP

SEQ ID NO: 100654 - protein, 40 aa, Artificial Sequence
  Cyclic GFR-binding peptide
  MOD_RES (2)..(34)..(35): Xaa is C or S
GXSRVVMNSMEGLIVNSSDDMIQVTINSLKTPAXXPKPVH

SEQ ID NO: 100655 - protein, 31 aa, Artificial Sequence; identical to SEQ ID NO: 22332
  Cyclic GFR-binding peptide

SEQ ID NO: 100656 - protein, 33 aa, Artificial Sequence
  Cyclic GFR-binding peptide
  MOD_RES (27)..(28): Xaa is C or S
NSMEGLIVNSSDDMIQVTINSLKTPAXXPKPVH

SEQ ID NO: 100657 - protein, 26 aa, Artificial Sequence
  Cyclic GFR-binding peptide
  MOD_RES (26)..(26): Xaa is C or S
SMEGIIIQQKDNMIQMTINSMKTPTX

SEQ ID NO: 100658 - protein, 25 aa, Artificial Sequence
  Cyclic GFR-binding peptide
RVIMSMEGIVKPKRGVMIQITINSL

SEQ ID NO: 100659 - protein, 27 aa, Artificial Sequence
  Cyclic GFR-binding peptide
  MOD_RES (1)..(1): Xaa is C or S
XAEVVMDSMEGLVVNNAADMIQITINS

SEQ ID NO: 100660 - protein, 40 aa, Artificial Sequence; identical to SEQ ID NO: 64428
  Cyclic GFR-binding peptide
  MOD_RES (1)..(3)..(34)..(35): Xaa is C or S

SEQ ID NO: 100661 - protein, 33 aa, Artificial Sequence; identical to SEQ ID NO: 22338
  Cyclic GFR-binding peptide
  MOD_RES (2)..(4): Xaa is C or S

SEQ ID NO: 100662 - protein, 26 aa, Artificial Sequence
  Cyclic GFR-binding peptide
NSMEGLIVNSSDDMIQVTINSLKTPA

SEQ ID NO: 100663 - protein, 28 aa, Artificial Sequence
  Cyclic GFR-binding peptide
FSMEGLHQGQHPKIRMIQMTINSEETPV

SEQ ID NO: 100664 - protein, 27 aa, Artificial Sequence
  Cyclic GFR-binding peptide
  MOD_RES (1)..(1): Xaa is C or S
XRDVVMGSMEGIIIQQKDNMIQMTINS

SEQ ID NO: 100665 - protein, 24 aa, Artificial Sequence
  Cyclic GFR-binding peptide
MDSMEGIVVNNASDMIQITINSLR

SEQ ID NO: 100666 - protein, 35 aa, Artificial Sequence; identical to SEQ ID NO: 22346
  Cyclic GFR-binding peptide

SEQ ID NO: 100667 - protein, 25 aa, Artificial Sequence
  Cyclic GFR-binding peptide
VMNSMEGIIVNSSDDMIQVTINSLK

SEQ ID NO: 100668 - protein, 28 aa, Artificial Sequence
  Cyclic GFR-binding peptide
  MOD_RES (27)..(28): Xaa is C or S
MSMEGLLLVRGNDMIQMTINSTKVPAXX

SEQ ID NO: 100669 - protein, 24 aa, Artificial Sequence
  Cyclic GFR-binding peptide
MDSMEGIVVNNAADMIQITINSLR

SEQ ID NO: 100670 - protein, 29 aa, Artificial Sequence
  Cyclic GFR-binding peptide
  MOD_RES (27)..(28): Xaa is C or S
MSMEGIVKPTRGVMIQITINSLDQPVXXP

SEQ ID NO: 100671 - protein, 22 aa, Artificial Sequence
  Cyclic GFR-binding peptide
SMEGIHQGQHPKIRMIQMTINS

SEQ ID NO: 100672 - protein, 36 aa, Artificial Sequence; identical to SEQ ID NO: 22355
  Cyclic GFR-binding peptide
  MOD_RES (34)..(34): Xaa is C or S

SEQ ID NO: 100673 - protein, 32 aa, Artificial Sequence
  Cyclic GFR-binding peptide
  MOD_RES (29)..(30): Xaa is C or S
VMGSMEGLIIQQKDNMIQMTINSMKTPTXXPG

SEQ ID NO: 100674 - protein, 32 aa, Artificial Sequence; identical to SEQ ID NO: 22356
  Cyclic GFR-binding peptide
  MOD_RES (1)..(3): Xaa is C or S

SEQ ID NO: 100675 - protein, 35 aa, Artificial Sequence; identical to SEQ ID NO: 22358
  Cyclic GFR-binding peptide
  MOD_RES (34)..(34): Xaa is C or S

SEQ ID NO: 100676 - protein, 32 aa, Artificial Sequence; identical to SEQ ID NO: 22359
  Cyclic GFR-binding peptide
  MOD_RES (30)..(30): Xaa is C or S

SEQ ID NO: 100677 - protein, 40 aa, Artificial Sequence; identical to SEQ ID NO: 67810
  Cyclic GFR-binding peptide
  MOD_RES (1)..(3)..(34)..(35): Xaa is C or S

SEQ ID NO: 100678 - protein, 27 aa, Artificial Sequence
  Cyclic GFR-binding peptide
HQLFSMEGIHQGQHPKIRMIQMTINSE

SEQ ID NO: 100679 - protein, 34 aa, Artificial Sequence
  Cyclic GFR-binding peptide
  MOD_RES (28)..(29): Xaa is C or S
MDSMEGIVVNNAADMIQITINSLRAPVXXSAPAA

SEQ ID NO: 100680 - protein, 32 aa, Artificial Sequence
  Cyclic GFR-binding peptide
  MOD_RES (31)..(32): Xaa is C or S
DVVMGSMEGLIIQQKDNMIQMTINSMKTPTXX

SEQ ID NO: 100681 - protein, 36 aa, Artificial Sequence
  Cyclic GFR-binding peptide
  MOD_RES (32)..(33): Xaa is C or S
AEVVMDSMEGIVVNNAADMIQITINSLRAPVXXSAP

SEQ ID NO: 100682 - protein, 23 aa, Artificial Sequence
  Cyclic GFR-binding peptide
MGSMEGLIIQQKDNMIQMTINSM

SEQ ID NO: 100683 - protein, 28 aa, Artificial Sequence
  Cyclic GFR-binding peptide
HEELRSMEGILKPKKRVYEMIQVTINSH

SEQ ID NO: 100684 - protein, 35 aa, Artificial Sequence
  Cyclic GFR-binding peptide
  MOD_RES (2)..(34)..(35): Xaa is C or S
GXSEVVMDSMEGIVVNNASDMIQITINSLRTPVXX

SEQ ID NO: 100685 - protein, 34 aa, Artificial Sequence; identical to SEQ ID NO: 64456
  Cyclic GFR-binding peptide
  MOD_RES (28)..(29): Xaa is C or S

SEQ ID NO: 100686 - protein, 42 aa, Artificial Sequence; identical to SEQ ID NO: 22371
  Cyclic GFR-binding peptide
  MOD_RES (1)..(38): Xaa is C or S

SEQ ID NO: 100687 - protein, 36 aa, Artificial Sequence; identical to SEQ ID NO: 22372
  Cyclic GFR-binding peptide
  MOD_RES (34)..(34): Xaa is C or S

SEQ ID NO: 100688 - protein, 35 aa, Artificial Sequence; identical to SEQ ID NO: 22374
  Cyclic GFR-binding peptide
  MOD_RES (2)..(4): Xaa is C or S

SEQ ID NO: 100689 - protein, 36 aa, Artificial Sequence; identical to SEQ ID NO: 22376
  Cyclic GFR-binding peptide
  MOD_RES (1)..(3): Xaa is C or S

SEQ ID NO: 100690 - protein, 25 aa, Artificial Sequence
  Cyclic GFR-binding peptide
IMSMEGLLLVRGNDMIQMTINSTKV

SEQ ID NO: 100691 - protein, 30 aa, Artificial Sequence
  Cyclic GFR-binding peptide
EEVIMSMEGLLLVRGNDMIQMTINSTKVPA

SEQ ID NO: 100692 - protein, 30 aa, Artificial Sequence
  Cyclic GFR-binding peptide
  MOD_RES (29)..(30): Xaa is C or S
VMDSMEGIVVNNASDMIQITINSLRTPVXX

SEQ ID NO: 100693 - protein, 39 aa, Artificial Sequence
  Cyclic GFR-binding peptide
  MOD_RES (2)..(34)..(35): Xaa is C or S
GXAEVVMDSMEGLVVNNAADMIQITINSLRAPVXXSAPA

SEQ ID NO: 100694 - protein, 32 aa, Artificial Sequence
  Cyclic GFR-binding peptide
  MOD_RES (1)..(32): Xaa is C or S
XSRVIMSMEGLVKPKRGVMIQITINSLAQPVX

SEQ ID NO: 100695 - protein, 39 aa, Artificial Sequence
  Cyclic GFR-binding peptide
  MOD_RES (2)..(4)..(36)..(37): Xaa is C or S
HXGXSRVVMNSMEGLIVNSSDDMIQVTINSLKTPAXXPK

SEQ ID NO: 100696 - protein, 24 aa, Artificial Sequence
  Cyclic GFR-binding peptide
VVMGSMEGIIIQQKDNMIQMTINS

SEQ ID NO: 100697 - protein, 37 aa, Artificial Sequence
  Cyclic GFR-binding peptide
  MOD_RES (1)..(3)..(35)..(36): Xaa is C or S
XGXSEVVMDSMEGLVVNNASDMIQITINSLRTPVXXT

SEQ ID NO: 100698 - protein, 29 aa, Artificial Sequence
  Cyclic GFR-binding peptide
  MOD_RES (2)..(2): Xaa is C or S
GXEEVIMSMEGILLVRGNDMIQMTINSTK

SEQ ID NO: 100699 - protein, 34 aa, Artificial Sequence; identical to SEQ ID NO: 22380
  Cyclic GFR-binding peptide
  MOD_RES (2)..(4): Xaa is C or S

SEQ ID NO: 100700 - protein, 41 aa, Artificial Sequence; identical to SEQ ID NO: 22382
  Cyclic GFR-binding peptide
  MOD_RES (1)..(38): Xaa is C or S

SEQ ID NO: 100701 - protein, 27 aa, Artificial Sequence
  Cyclic GFR-binding peptide
  MOD_RES (26)..(27): Xaa is C or S
SMEGILLVRGNDMIQMTINSTKVPAXX

SEQ ID NO: 100702 - protein, 23 aa, Artificial Sequence
  Cyclic GFR-binding peptide
IMSMEGILLVRGNDMIQMTINST

SEQ ID NO: 100703 - protein, 35 aa, Artificial Sequence; identical to SEQ ID NO: 22383
  Cyclic GFR-binding peptide

SEQ ID NO: 100704 - protein, 39 aa, Artificial Sequence; identical to SEQ ID NO: 22385
  Cyclic GFR-binding peptide
  MOD_RES (1)..(3)..(37): Xaa is C or S

SEQ ID NO: 100705 - protein, 31 aa, Artificial Sequence
  Cyclic GFR-binding peptide
  MOD_RES (29)..(30): Xaa is C or S
VMGSMEGIIIQQKDNMIQMTINSMKTPTXXP

SEQ ID NO: 100706 - protein, 31 aa, Artificial Sequence; identical to SEQ ID NO: 22388
  Cyclic GFR-binding peptide
  MOD_RES (2)..(2): Xaa is C or S

SEQ ID NO: 100707 - protein, 35 aa, Artificial Sequence; identical to SEQ ID NO: 22390
  Cyclic GFR-binding peptide
  MOD_RES (34)..(34): Xaa is C or S

SEQ ID NO: 100708 - protein, 28 aa, Artificial Sequence
  Cyclic GFR-binding peptide
  MOD_RES (27)..(28): Xaa is C or S
DSMEGIVVNNAADMIQITINSLRAPVXX

SEQ ID NO: 100709 - protein, 29 aa, Artificial Sequence
  Cyclic GFR-binding peptide
  MOD_RES (1)..(1): Xaa is C or S
XSKVIMSMEGIIKPTKGIMIQITINSLDQ

SEQ ID NO: 100710 - protein, 38 aa, Artificial Sequence; identical to SEQ ID NO: 22392
  Cyclic GFR-binding peptide
  MOD_RES (2)..(36): Xaa is C or S

SEQ ID NO: 100711 - protein, 39 aa, Artificial Sequence
  Cyclic GFR-binding peptide
  MOD_RES (1)..(3)..(34)..(35): Xaa is C or S
XGXEEVIMSMEGLLLVRGNDMIQMTINSTKVPAXXTSPV

SEQ ID NO: 100712 - protein, 39 aa, Artificial Sequence; identical to SEQ ID NO: 64474
  Cyclic GFR-binding peptide
  MOD_RES (1)..(3)..(34)..(35): Xaa is C or S

SEQ ID NO: 100713 - protein, 39 aa, Artificial Sequence
  Cyclic GFR-binding peptide
  MOD_RES (2)..(34)..(35): Xaa is C or S
GXSEVVMDSMEGLVVNNASDMIQITINSLRTPVXXTPPT

SEQ ID NO: 100714 - protein, 28 aa, Artificial Sequence
  Cyclic GFR-binding peptide
  MOD_RES (28)..(28): Xaa is C or S
MDSMEGLVVNNAADMIQITINSLRAPVX

SEQ ID NO: 100715 - protein, 28 aa, Artificial Sequence
  Cyclic GFR-binding peptide
SRVIMSMEGIVKPKRGVMIQITINSLAQ

SEQ ID NO: 100716 - protein, 23 aa, Artificial Sequence
  Cyclic GFR-binding peptide
VMNSMEGLIVNSSDDMIQVTINS

SEQ ID NO: 100717 - protein, 43 aa, Artificial Sequence; identical to SEQ ID NO: 22407
  Cyclic GFR-binding peptide
  MOD_RES (2)..(39): Xaa is C or S

SEQ ID NO: 100718 - protein, 29 aa, Artificial Sequence
  Cyclic GFR-binding peptide
  MOD_RES (27)..(28): Xaa is C or S
NSMEGLIVNSSDDMIQVTINSLKTPAXXP

SEQ ID NO: 100719 - protein, 27 aa, Artificial Sequence
  Cyclic GFR-binding peptide
RVVMNSMEGIIVNSSDDMIQVTINSLK

SEQ ID NO: 100720 - protein, 25 aa, Artificial Sequence
  Cyclic GFR-binding peptide
SMEGIFIPKKRVIEMIQVTINSLQV

SEQ ID NO: 100721 - protein, 35 aa, Artificial Sequence
  Cyclic GFR-binding peptide
  MOD_RES (29)..(30): Xaa is C or S
VMNSMEGLIVNSSDDMIQVTINSLKTPAXXPKPVH

SEQ ID NO: 100722 - protein, 28 aa, Artificial Sequence
  Cyclic GFR-binding peptide
  MOD_RES (2)..(2): Xaa is C or S
GXRDVVMGSMEGIIIQQKDNMIQMTINS

SEQ ID NO: 100723 - protein, 34 aa, Artificial Sequence; identical to SEQ ID NO: 22410
  Cyclic GFR-binding peptide

SEQ ID NO: 100724 - protein, 26 aa, Artificial Sequence
  Cyclic GFR-binding peptide
  MOD_RES (26)..(26): Xaa is C or S
SMEGLVKPKRGVMIQITINSLAQPVX

SEQ ID NO: 100725 - protein, 26 aa, Artificial Sequence
  Cyclic GFR-binding peptide
LTSMEGIFIPKKRVIEMIQVTINSLQ

SEQ ID NO: 100726 - protein, 35 aa, Artificial Sequence
  Cyclic GFR-binding peptide
  MOD_RES (29)..(30): Xaa is C or S
VMGSMEGIIIQQKDNMIQMTINSMKTPTXXPGASG

SEQ ID NO: 100727 - protein, 22 aa, Artificial Sequence
  Cyclic GFR-binding peptide
MNSMEGIIVNSSDDMIQVTINS

SEQ ID NO: 100728 - protein, 31 aa, Artificial Sequence
  Cyclic GFR-binding peptide
  MOD_RES (30)..(31): Xaa is C or S
KVIMSMEGLIKPTKGIMIQITINSLDQSVXX

SEQ ID NO: 100729 - protein, 28 aa, Artificial Sequence
  Cyclic GFR-binding peptide
NHQLFSMEGLHQGQHPKIRMIQMTINSE

SEQ ID NO: 100730 - protein, 30 aa, Artificial Sequence
  Cyclic GFR-binding peptide
  MOD_RES (30)..(30): Xaa is C or S
VVMDSMEGLVVNNAADMIQITINSLRAPVX

SEQ ID NO: 100731 - protein, 33 aa, Artificial Sequence
  Cyclic GFR-binding peptide
  MOD_RES (32)..(33): Xaa is C or S
SEVVMDSMEGIVVNNASDMIQITINSLRTPVXX

SEQ ID NO: 100732 - protein, 32 aa, Artificial Sequence
  Cyclic GFR-binding peptide
  MOD_RES (28)..(29): Xaa is C or S
IMSMEGLVKPKRGVMIQITINSLAQPVXXPAA

SEQ ID NO: 100733 - protein, 24 aa, Artificial Sequence
  Cyclic GFR-binding peptide
SMEGIHQGQHPKIRMIQMTINSQG

SEQ ID NO: 100734 - protein, 25 aa, Artificial Sequence
  Cyclic GFR-binding peptide
SRVIMSMEGLVKPKRGVMIQITINS

SEQ ID NO: 100735 - protein, 31 aa, Artificial Sequence
  Cyclic GFR-binding peptide
  MOD_RES (31)..(31): Xaa is C or S
SKVVMSMEGLVKPTRGVMIQITINSLDQPVX

SEQ ID NO: 100736 - protein, 40 aa, Artificial Sequence; identical to SEQ ID NO: 22428
  Cyclic GFR-binding peptide
  MOD_RES (2)..(36): Xaa is C or S

SEQ ID NO: 100737 - protein, 32 aa, Artificial Sequence
  Cyclic GFR-binding peptide
  MOD_RES (30)..(31): Xaa is C or S
KVIMSMEGLIKPTKGIMIQITINSLDQSVXXP

SEQ ID NO: 100738 - protein, 40 aa, Artificial Sequence
  Cyclic GFR-binding peptide
  MOD_RES (1)..(3)..(34)..(35): Xaa is C or S
XGXEEVIMSMEGILLVRGNDMIQMTINSTKVPAXXTSPVR

SEQ ID NO: 100739 - protein, 41 aa, Artificial Sequence; identical to SEQ ID NO: 64510
  Cyclic GFR-binding peptide
  MOD_RES (2)..(4)..(35)..(36): Xaa is C or S

SEQ ID NO: 100740 - protein, 29 aa, Artificial Sequence
  Cyclic GFR-binding peptide
VVMGSMEGLIIQQKDNMIQMTINSMKTPT

SEQ ID NO: 100741 - protein, 33 aa, Artificial Sequence; identical to SEQ ID NO: 22432
  Cyclic GFR-binding peptide
  MOD_RES (31)..(31): Xaa is C or S

SEQ ID NO: 100742 - protein, 31 aa, Artificial Sequence
  Cyclic GFR-binding peptide
  MOD_RES (1)..(3): Xaa is C or S
XKXSKVVMSMEGLVKPTRGVMIQITINSLDQ

SEQ ID NO: 100743 - protein, 41 aa, Artificial Sequence
  Cyclic GFR-binding peptide
  MOD_RES (2)..(4)..(36)..(37): Xaa is C or S
SXGXRDVVMGSMEGLIIQQKDNMIQMTINSMKTPTXXPGAS

SEQ ID NO: 100744 - protein, 31 aa, Artificial Sequence; identical to SEQ ID NO: 64515
  Cyclic GFR-binding peptide
  MOD_RES (2)..(4): Xaa is C or S

SEQ ID NO: 100745 - protein, 24 aa, Artificial Sequence
  Cyclic GFR-binding peptide
SMEGLFIPKKRVIEMIQVTINSLQ

SEQ ID NO: 100746 - protein, 26 aa, Artificial Sequence
  Cyclic GFR-binding peptide
EELSMEGIHQGQHPKIRMIQMTINSQ

SEQ ID NO: 100747 - protein, 29 aa, Artificial Sequence
  Cyclic GFR-binding peptide
  MOD_RES (26)..(27): Xaa is C or S
SMEGLVKPKRGVMIQITINSLAQPVXXPA

SEQ ID NO: 100748 - protein, 35 aa, Artificial Sequence; identical to SEQ ID NO: 67865
  Cyclic GFR-binding peptide
  MOD_RES (2)..(4)..(35): Xaa is C or S

SEQ ID NO: 100749 - protein, 25 aa, Artificial Sequence
  Cyclic GFR-binding peptide
SMEGLHQGQHPKIRMIQMTINSEET

SEQ ID NO: 100750 - protein, 31 aa, Artificial Sequence; identical to SEQ ID NO: 22443
  Cyclic GFR-binding peptide

SEQ ID NO: 100751 - protein, 27 aa, Artificial Sequence
  Cyclic GFR-binding peptide
ELTSMEGLFIPKKRVIEMIQVTINSLQ

SEQ ID NO: 100752 - protein, 27 aa, Artificial Sequence
  Cyclic GFR-binding peptide
ELTSMEGIFIPKKRVIEMIQVTINSLQ

SEQ ID NO: 100753 - protein, 27 aa, Artificial Sequence
  Cyclic GFR-binding peptide
VVMNSMEGIIVNSSDDMIQVTINSLKT

SEQ ID NO: 100754 - protein, 25 aa, Artificial Sequence
  Cyclic GFR-binding peptide
SKVIMSMEGLIKPTKGIMIQITINS

SEQ ID NO: 100755 - protein, 37 aa, Artificial Sequence; identical to SEQ ID NO: 22447
  Cyclic GFR-binding peptide
  MOD_RES (36)..(36): Xaa is C or S

SEQ ID NO: 100756 - protein, 31 aa, Artificial Sequence; identical to SEQ ID NO: 22448
  Cyclic GFR-binding peptide
  MOD_RES (1)..(1): Xaa is C or S

SEQ ID NO: 100757 - protein, 33 aa, Artificial Sequence; identical to SEQ ID NO: 64535
  Cyclic GFR-binding peptide
  MOD_RES (31)..(32): Xaa is C or S

SEQ ID NO: 100758 - protein, 29 aa, Artificial Sequence
  Cyclic GFR-binding peptide
  MOD_RES (28)..(29): Xaa is C or S
VMSMEGLVKPTRGVMIQITINSLDQPVXX

SEQ ID NO: 100759 - protein, 27 aa, Artificial Sequence
  Cyclic GFR-binding peptide
LTSMEGIFIPKKRVIEMIQVTINSLQV

SEQ ID NO: 100760 - protein, 22 aa, Artificial Sequence
  Cyclic GFR-binding peptide
DSMEGIVVNNAADMIQITINSL

SEQ ID NO: 100761 - protein, 36 aa, Artificial Sequence; identical to SEQ ID NO: 22456
  Cyclic GFR-binding peptide
  MOD_RES (1)..(1): Xaa is C or S

SEQ ID NO: 100762 - protein, 25 aa, Artificial Sequence
  Cyclic GFR-binding peptide
DSMEGLVVNNASDMIQITINSLRTP

SEQ ID NO: 100763 - protein, 38 aa, Artificial Sequence
  Cyclic GFR-binding peptide
  MOD_RES (1)..(32)..(33): Xaa is C or S
XSRVIMSMEGLVKPKRGVMIQITINSLAQPVXXPAASA

SEQ ID NO: 100764 - protein, 31 aa, Artificial Sequence
  Cyclic GFR-binding peptide
  MOD_RES (2)..(2): Xaa is C or S
KXSRVIMSMEGLVKPKRGVMIQITINSLAQP

SEQ ID NO: 100765 - protein, 25 aa, Artificial Sequence
  Cyclic GFR-binding peptide
SMEGLIIQQKDNMIQMTINSMKTPT

SEQ ID NO: 100766 - protein, 29 aa, Artificial Sequence
  Cyclic GFR-binding peptide
  MOD_RES (2)..(2): Xaa is C or S
GXAEVVMDSMEGIVVNNAADMIQITINSL

SEQ ID NO: 100767 - protein, 27 aa, Artificial Sequence
  Cyclic GFR-binding peptide
VVMNSMEGLIVNSSDDMIQVTINSLKT

SEQ ID NO: 100768 - protein, 27 aa, Artificial Sequence
  Cyclic GFR-binding peptide
  MOD_RES (1)..(1): Xaa is C or S
XEEVIMSMEGILLVRGNDMIQMTINST

SEQ ID NO: 100769 - protein, 29 aa, Artificial Sequence
  Cyclic GFR-binding peptide
RDVVMGSMEGIIIQQKDNMIQMTINSMKT

SEQ ID NO: 100770 - protein, 35 aa, Artificial Sequence
  Cyclic GFR-binding peptide
  MOD_RES (30)..(31): Xaa is C or S
RVIMSMEGLVKPKRGVMIQITINSLAQPVXXPAAS

SEQ ID NO: 100771 - protein, 23 aa, Artificial Sequence
  Cyclic GFR-binding peptide
MSMEGLLLVRGNDMIQMTINSTK

SEQ ID NO: 100772 - protein, 31 aa, Artificial Sequence; identical to SEQ ID NO: 22461
  Cyclic GFR-binding peptide

SEQ ID NO: 100773 - protein, 34 aa, Artificial Sequence
  Cyclic GFR-binding peptide
  MOD_RES (29)..(30): Xaa is C or S
VVMSMEGLVKPTRGVMIQITINSLDQPVXXPSAS

SEQ ID NO: 100774 - protein, 31 aa, Artificial Sequence; identical to SEQ ID NO: 22463
  Cyclic GFR-binding peptide

SEQ ID NO: 100775 - protein, 21 aa, Artificial Sequence
  Cyclic GFR-binding peptide
SMEGLIVNSSDDMIQVTINSL

SEQ ID NO: 100776 - protein, 41 aa, Artificial Sequence; identical to SEQ ID NO: 22466
  Cyclic GFR-binding peptide
  MOD_RES (37)..(37): Xaa is C or S

SEQ ID NO: 100777 - protein, 24 aa, Artificial Sequence
  Cyclic GFR-binding peptide
MSMEGIVKPKRGVMIQITINSLAQ

SEQ ID NO: 100778 - protein, 27 aa, Artificial Sequence
  Cyclic GFR-binding peptide
  MOD_RES (26)..(27): Xaa is C or S
SMEGIIIQQKDNMIQMTINSMKTPTXX

SEQ ID NO: 100779 - protein, 34 aa, Artificial Sequence; identical to SEQ ID NO: 22467
  Cyclic GFR-binding peptide
  MOD_RES (33)..(33): Xaa is C or S

SEQ ID NO: 100780 - protein, 42 aa, Artificial Sequence; identical to SEQ ID NO: 22470
  Cyclic GFR-binding peptide
  MOD_RES (1)..(38): Xaa is C or S

SEQ ID NO: 100781 - protein, 29 aa, Artificial Sequence
  Cyclic GFR-binding peptide
  MOD_RES (27)..(28): Xaa is C or S
MSMEGIIKPTKGIMIQITINSLDQSVXXP

SEQ ID NO: 100782 - protein, 25 aa, Artificial Sequence
  Cyclic GFR-binding peptide
SMEGLVVNNAADMIQITINSLRAPV

SEQ ID NO: 100783 - protein, 34 aa, Artificial Sequence; identical to SEQ ID NO: 22473
  Cyclic GFR-binding peptide
  MOD_RES (1)..(1): Xaa is C or S

SEQ ID NO: 100784 - protein, 35 aa, Artificial Sequence; identical to SEQ ID NO: 22475
  Cyclic GFR-binding peptide
  MOD_RES (2)..(2): Xaa is C or S

SEQ ID NO: 100785 - protein, 25 aa, Artificial Sequence
  Cyclic GFR-binding peptide
VVMNSMEGIIVNSSDDMIQVTINSL

SEQ ID NO: 100786 - protein, 37 aa, Artificial Sequence; identical to SEQ ID NO: 22478
  Cyclic GFR-binding peptide
  MOD_RES (2)..(4): Xaa is C or S

SEQ ID NO: 100787 - protein, 35 aa, Artificial Sequence; identical to SEQ ID NO: 22479
  Cyclic GFR-binding peptide
  MOD_RES (32)..(32): Xaa is C or S

SEQ ID NO: 100788 - protein, 27 aa, Artificial Sequence
  Cyclic GFR-binding peptide
IMSMEGLVKPKRGVMIQITINSLAQPV

SEQ ID NO: 100789 - protein, 31 aa, Artificial Sequence; identical to SEQ ID NO: 67905
  Cyclic GFR-binding peptide
  MOD_RES (29)..(30): Xaa is C or S

SEQ ID NO: 100790 - protein, 27 aa, Artificial Sequence
  Cyclic GFR-binding peptide
  MOD_RES (2)..(2): Xaa is C or S
KXSRVIMSMEGLVKPKRGVMIQITINS

SEQ ID NO: 100791 - protein, 24 aa, Artificial Sequence
  Cyclic GFR-binding peptide
VVMDSMEGIVVNNASDMIQITINS

SEQ ID NO: 100792 - protein, 25 aa, Artificial Sequence
  Cyclic GFR-binding peptide
VMNSMEGLIVNSSDDMIQVTINSLK

SEQ ID NO: 100793 - protein, 21 aa, Artificial Sequence
  Cyclic GFR-binding peptide
MSMEGLLLVRGNDMIQMTINS

SEQ ID NO: 100794 - protein, 27 aa, Artificial Sequence
  Cyclic GFR-binding peptide
  MOD_RES (27)..(27): Xaa is C or S
MSMEGLVKPKRGVMIQITINSLAQPVX

SEQ ID NO: 100795 - protein, 26 aa, Artificial Sequence
  Cyclic GFR-binding peptide
HQLFSMEGLHQGQHPKIRMIQMTINS

SEQ ID NO: 100796 - protein, 39 aa, Artificial Sequence; identical to SEQ ID NO: 22493
  Cyclic GFR-binding peptide
  MOD_RES (34)..(34): Xaa is C or S

SEQ ID NO: 100797 - protein, 25 aa, Artificial Sequence
  Cyclic GFR-binding peptide
VMGSMEGIIIQQKDNMIQMTINSMK

SEQ ID NO: 100798 - protein, 31 aa, Artificial Sequence
  Cyclic GFR-binding peptide
  MOD_RES (1)..(1): Xaa is C or S
XSEVVMDSMEGIVVNNASDMIQITINSLRTP

SEQ ID NO: 100799 - protein, 37 aa, Artificial Sequence
  Cyclic GFR-binding peptide
  MOD_RES (31)..(32): Xaa is C or S
DVVMGSMEGLIIQQKDNMIQMTINSMKTPTXXPGASG

SEQ ID NO: 100800 - protein, 29 aa, Artificial Sequence
  Cyclic GFR-binding peptide
  MOD_RES (2)..(2): Xaa is C or S
GXSRVVMNSMEGIIVNSSDDMIQVTINSL

SEQ ID NO: 100801 - protein, 37 aa, Artificial Sequence
  Cyclic GFR-binding peptide
  MOD_RES (1)..(33)..(34): Xaa is C or S
XRDVVMGSMEGIIIQQKDNMIQMTINSMKTPTXXPGA

SEQ ID NO: 100802 - protein, 36 aa, Artificial Sequence; identical to SEQ ID NO: 22498
  Cyclic GFR-binding peptide
  MOD_RES (1)..(3): Xaa is C or S

SEQ ID NO: 100803 - protein, 34 aa, Artificial Sequence
  Cyclic GFR-binding peptide
  MOD_RES (28)..(29): Xaa is C or S
IMSMEGLVKPKRGVMIQITINSLAQPVXXPAASA

SEQ ID NO: 100804 - protein, 36 aa, Artificial Sequence; identical to SEQ ID NO: 22502
  Cyclic GFR-binding peptide
  MOD_RES (2)..(4): Xaa is C or S

SEQ ID NO: 100805 - protein, 33 aa, Artificial Sequence; identical to SEQ ID NO: 22504
  Cyclic GFR-binding peptide

SEQ ID NO: 100806 - protein, 36 aa, Artificial Sequence
  Cyclic GFR-binding peptide
  MOD_RES (32)..(33): Xaa is C or S
RDVVMGSMEGIIIQQKDNMIQMTINSMKTPTXXPGA

SEQ ID NO: 100807 - protein, 27 aa, Artificial Sequence
  Cyclic GFR-binding peptide
MNSMEGLIVNSSDDMIQVTINSLKTPA

SEQ ID NO: 100808 - protein, 28 aa, Artificial Sequence
  Cyclic GFR-binding peptide
VIMSMEGIVKPKRGVMIQITINSLAQPV

SEQ ID NO: 100809 - protein, 34 aa, Artificial Sequence; identical to SEQ ID NO: 64576
  Cyclic GFR-binding peptide
  MOD_RES (2)..(4): Xaa is C or S

SEQ ID NO: 100810 - protein, 27 aa, Artificial Sequence
  Cyclic GFR-binding peptide
EEVIMSMEGILLVRGNDMIQMTINSTK

SEQ ID NO: 100811 - protein, 24 aa, Artificial Sequence
  Cyclic GFR-binding peptide
RVIMSMEGIVKPKRGVMIQITINS

SEQ ID NO: 100812 - protein, 24 aa, Artificial Sequence
  Cyclic GFR-binding peptide
SMEGLLKPKKRVYEMIQVTINSHH

SEQ ID NO: 100813 - protein, 37 aa, Artificial Sequence; identical to SEQ ID NO: 22508
  Cyclic GFR-binding peptide
  MOD_RES (36)..(36): Xaa is C or S

SEQ ID NO: 100814 - protein, 36 aa, Artificial Sequence
  Cyclic GFR-binding peptide
  MOD_RES (2)..(4)..(36): Xaa is C or S
RXGXSEVVMDSMEGIVVNNASDMIQITINSLRTPVX

SEQ ID NO: 100815 - protein, 30 aa, Artificial Sequence
  Cyclic GFR-binding peptide
  MOD_RES (1)..(1): Xaa is C or S
XEEVIMSMEGILLVRGNDMIQMTINSTKVP

SEQ ID NO: 100816 - protein, 27 aa, Artificial Sequence
  Cyclic GFR-binding peptide
  MOD_RES (2)..(2): Xaa is C or S
GXEEVIMSMEGILLVRGNDMIQMTINS

SEQ ID NO: 100817 - protein, 33 aa, Artificial Sequence; identical to SEQ ID NO: 22515
  Cyclic GFR-binding peptide
  MOD_RES (31)..(31): Xaa is C or S

SEQ ID NO: 100818 - protein, 34 aa, Artificial Sequence; identical to SEQ ID NO: 22519
  Cyclic GFR-binding peptide
  MOD_RES (1)..(3): Xaa is C or S

SEQ ID NO: 100819 - protein, 38 aa, Artificial Sequence; identical to SEQ ID NO: 22521
  Cyclic GFR-binding peptide
  MOD_RES (36)..(36): Xaa is C or S

SEQ ID NO: 100820 - protein, 26 aa, Artificial Sequence
  Cyclic GFR-binding peptide
SKVIMSMEGLIKPTKGIMIQITINSL

SEQ ID NO: 100821 - protein, 36 aa, Artificial Sequence
  Cyclic GFR-binding peptide
  MOD_RES (1)..(33)..(34): Xaa is C or S
XRDVVMGSMEGLIIQQKDNMIQMTINSMKTPTXXPG

SEQ ID NO: 100822 - protein, 32 aa, Artificial Sequence
  Cyclic GFR-binding peptide
  MOD_RES (28)..(29): Xaa is C or S
MDSMEGIVVNNAADMIQITINSLRAPVXXSAP

SEQ ID NO: 100823 - protein, 33 aa, Artificial Sequence; identical to SEQ ID NO: 22522
  Cyclic GFR-binding peptide
  MOD_RES (30)..(30): Xaa is C or S

SEQ ID NO: 100824 - protein, 34 aa, Artificial Sequence; identical to SEQ ID NO: 22523
  Cyclic GFR-binding peptide

SEQ ID NO: 100825 - protein, 35 aa, Artificial Sequence
  Cyclic GFR-binding peptide
  MOD_RES (2)..(4): Xaa is C or S
RXGXAEVVMDSMEGLVVNNAADMIQITINSLRAPV

SEQ ID NO: 100826 - protein, 32 aa, Artificial Sequence; identical to SEQ ID NO: 22525
  Cyclic GFR-binding peptide

SEQ ID NO: 100827 - protein, 32 aa, Artificial Sequence; identical to SEQ ID NO: 22526
  Cyclic GFR-binding peptide

SEQ ID NO: 100828 - protein, 36 aa, Artificial Sequence
  Cyclic GFR-binding peptide
  MOD_RES (2)..(34)..(35): Xaa is C or S
GXRDVVMGSMEGIIIQQKDNMIQMTINSMKTPTXXP

SEQ ID NO: 100829 - protein, 32 aa, Artificial Sequence; identical to SEQ ID NO: 22528
  Cyclic GFR-binding peptide
  MOD_RES (29)..(29): Xaa is C or S

SEQ ID NO: 100830 - protein, 36 aa, Artificial Sequence; identical to SEQ ID NO: 22529
  Cyclic GFR-binding peptide
  MOD_RES (32)..(32): Xaa is C or S

SEQ ID NO: 100831 - protein, 39 aa, Artificial Sequence
  Cyclic GFR-binding peptide
  MOD_RES (1)..(33)..(34): Xaa is C or S
XSEVVMDSMEGLVVNNASDMIQITINSLRTPVXXTPPTS

SEQ ID NO: 100832 - protein, 25 aa, Artificial Sequence
  Cyclic GFR-binding peptide
SMEGILKPKKRVYEMIQVTINSHHV

SEQ ID NO: 100833 - protein, 28 aa, Artificial Sequence
  Cyclic GFR-binding peptide
  MOD_RES (26)..(27): Xaa is C or S
SMEGIVVNNASDMIQITINSLRTPVXXT

SEQ ID NO: 100834 - protein, 30 aa, Artificial Sequence
  Cyclic GFR-binding peptide
  MOD_RES (2)..(2): Xaa is C or S
GXSEVVMDSMEGLVVNNASDMIQITINSLR

SEQ ID NO: 100835 - protein, 29 aa, Artificial Sequence
  Cyclic GFR-binding peptide
VVMGSMEGIIIQQKDNMIQMTINSMKTPT

SEQ ID NO: 100836 - protein, 36 aa, Artificial Sequence; identical to SEQ ID NO: 64597
  Cyclic GFR-binding peptide
  MOD_RES (30)..(31): Xaa is C or S

SEQ ID NO: 100837 - protein, 38 aa, Artificial Sequence; identical to SEQ ID NO: 22535
  Cyclic GFR-binding peptide
  MOD_RES (1)..(35): Xaa is C or S

SEQ ID NO: 100838 - protein, 30 aa, Artificial Sequence; identical to SEQ ID NO: 22538
  Cyclic GFR-binding peptide
  MOD_RES (29)..(29): Xaa is C or S

SEQ ID NO: 100839 - protein, 30 aa, Artificial Sequence
  Cyclic GFR-binding peptide
  MOD_RES (2)..(4): Xaa is C or S
RXGXSEVVMDSMEGLVVNNASDMIQITINS

SEQ ID NO: 100840 - protein, 25 aa, Artificial Sequence
  Cyclic GFR-binding peptide
MSMEGIVKPKRGVMIQITINSLAQP

SEQ ID NO: 100841 - protein, 33 aa, Artificial Sequence
  Cyclic GFR-binding peptide
  MOD_RES (2)..(33): Xaa is C or S
KXSKVVMSMEGLVKPTRGVMIQITINSLDQPVX

SEQ ID NO: 100842 - protein, 26 aa, Artificial Sequence
  Cyclic GFR-binding peptide
  MOD_RES (26)..(26): Xaa is C or S
SMEGLIKPTKGIMIQITINSLDQSVX

SEQ ID NO: 100843 - protein, 34 aa, Artificial Sequence
  Cyclic GFR-binding peptide
  MOD_RES (32)..(33): Xaa is C or S
SRVVMNSMEGLIVNSSDDMIQVTINSLKTPAXXP

SEQ ID NO: 100844 - protein, 37 aa, Artificial Sequence; identical to SEQ ID NO: 67961
  Cyclic GFR-binding peptide
  MOD_RES (1)..(3)..(34)..(35): Xaa is C or S

SEQ ID NO: 100845 - protein, 22 aa, Artificial Sequence
  Cyclic GFR-binding peptide
SMEGLVKPTRGVMIQITINSLD

SEQ ID NO: 100846 - protein, 29 aa, Artificial Sequence
  Cyclic GFR-binding peptide
ELTSMEGIFIPKKRVIEMIQVTINSLQVQ

SEQ ID NO: 100847 - protein, 27 aa, Artificial Sequence
  Cyclic GFR-binding peptide
  MOD_RES (27)..(27): Xaa is C or S
MSMEGLVKPTRGVMIQITINSLDQPVX

SEQ ID NO: 100848 - protein, 28 aa, Artificial Sequence
  Cyclic GFR-binding peptide
SRVVMNSMEGIIVNSSDDMIQVTINSLK

SEQ ID NO: 100849 - protein, 32 aa, Artificial Sequence
  Cyclic GFR-binding peptide
  MOD_RES (2)..(2): Xaa is C or S
GXEEVIMSMEGILLVRGNDMIQMTINSTKVPA

SEQ ID NO: 100850 - protein, 31 aa, Artificial Sequence
  Cyclic GFR-binding peptide
  MOD_RES (28)..(29): Xaa is C or S
MGSMEGLIIQQKDNMIQMTINSMKTPTXXPG

SEQ ID NO: 100851 - protein, 38 aa, Artificial Sequence; identical to SEQ ID NO: 22550
  Cyclic GFR-binding peptide
  MOD_RES (2)..(36): Xaa is C or S

SEQ ID NO: 100852 - protein, 29 aa, Artificial Sequence
  Cyclic GFR-binding peptide
QLFSMEGLHQGQHPKIRMIQMTINSEETP

SEQ ID NO: 100853 - protein, 36 aa, Artificial Sequence
  Cyclic GFR-binding peptide
  MOD_RES (32)..(33): Xaa is C or S
SEVVMDSMEGLVVNNASDMIQITINSLRTPVXXTPP

SEQ ID NO: 100854 - protein, 27 aa, Artificial Sequence
  Cyclic GFR-binding peptide
VVMSMEGLVKPTRGVMIQITINSLDQP

SEQ ID NO: 100855 - protein, 40 aa, Artificial Sequence; identical to SEQ ID NO: 67971
  Cyclic GFR-binding peptide
  MOD_RES (2)..(4)..(35)..(36): Xaa is C or S

SEQ ID NO: 100856 - protein, 32 aa, Artificial Sequence
  Cyclic GFR-binding peptide
  MOD_RES (1)..(3): Xaa is C or S
XKXSKVVMSMEGLVKPTRGVMIQITINSLDQP

SEQ ID NO: 100857 - protein, 35 aa, Artificial Sequence; identical to SEQ ID NO: 22564
  Cyclic GFR-binding peptide
  MOD_RES (35)..(35): Xaa is C or S

SEQ ID NO: 100858 - protein, 27 aa, Artificial Sequence
  Cyclic GFR-binding peptide
SMEGLFIPKKRVIEMIQVTINSLQVQT

SEQ ID NO: 100859 - protein, 31 aa, Artificial Sequence; identical to SEQ ID NO: 22568
  Cyclic GFR-binding peptide

SEQ ID NO: 100860 - protein, 33 aa, Artificial Sequence
  Cyclic GFR-binding peptide
  MOD_RES (2)..(33): Xaa is C or S
KXSKVIMSMEGLIKPTKGIMIQITINSLDQSVX

SEQ ID NO: 100861 - protein, 40 aa, Artificial Sequence; identical to SEQ ID NO: 22570
  Cyclic GFR-binding peptide
  MOD_RES (1)..(3)..(37): Xaa is C or S

SEQ ID NO: 100862 - protein, 26 aa, Artificial Sequence
  Cyclic GFR-binding peptide
VVMSMEGIVKPTRGVMIQITINSLDQ

SEQ ID NO: 100863 - protein, 31 aa, Artificial Sequence
  Cyclic GFR-binding peptide
  MOD_RES (28)..(29): Xaa is C or S
IMSMEGLLLVRGNDMIQMTINSTKVPAXXTS

SEQ ID NO: 100864 - protein, 24 aa, Artificial Sequence
  Cyclic GFR-binding peptide
DSMEGLVVNNAADMIQITINSLRA

SEQ ID NO: 100865 - protein, 27 aa, Artificial Sequence
  Cyclic GFR-binding peptide
ELRSMEGILKPKKRVYEMIQVTINSHH

SEQ ID NO: 100866 - protein, 36 aa, Artificial Sequence
  Cyclic GFR-binding peptide
  MOD_RES (30)..(31): Xaa is C or S
VVMGSMEGLIIQQKDNMIQMTINSMKTPTXXPGASG

SEQ ID NO: 100867 - protein, 33 aa, Artificial Sequence; identical to SEQ ID NO: 22575
  Cyclic GFR-binding peptide

SEQ ID NO: 100868 - protein, 37 aa, Artificial Sequence
  Cyclic GFR-binding peptide
  MOD_RES (2)..(34)..(35): Xaa is C or S
GXSEVVMDSMEGLVVNNASDMIQITINSLRTPVXXTP

SEQ ID NO: 100869 - protein, 40 aa, Artificial Sequence; identical to SEQ ID NO: 22582
  Cyclic GFR-binding peptide
  MOD_RES (2)..(39): Xaa is C or S

SEQ ID NO: 100870 - protein, 36 aa, Artificial Sequence
  Cyclic GFR-binding peptide
  MOD_RES (30)..(31): Xaa is C or S
VVMNSMEGLIVNSSDDMIQVTINSLKTPAXXPKPVH

SEQ ID NO: 100871 - protein, 30 aa, Artificial Sequence
  Cyclic GFR-binding peptide
  MOD_RES (1)..(1): Xaa is C or S
XSKVIMSMEGLIKPTKGIMIQITINSLDQS

SEQ ID NO: 100872 - protein, 37 aa, Artificial Sequence
  Cyclic GFR-binding peptide
  MOD_RES (1)..(32)..(33): Xaa is C or S
XSKVVMSMEGLVKPTRGVMIQITINSLDQPVXXPSAS

SEQ ID NO: 100873 - protein, 34 aa, Artificial Sequence; identical to SEQ ID NO: 22588
  Cyclic GFR-binding peptide
  MOD_RES (2)..(2): Xaa is C or S

SEQ ID NO: 100874 - protein, 29 aa, Artificial Sequence
  Cyclic GFR-binding peptide
VVMDSMEGLVVNNAADMIQITINSLRAPV

SEQ ID NO: 100875 - protein, 34 aa, Artificial Sequence
  Cyclic GFR-binding peptide
  MOD_RES (1)..(3)..(34): Xaa is C or S
XKXSRVIMSMEGLVKPKRGVMIQITINSLAQPVX

SEQ ID NO: 100876 - protein, 30 aa, Artificial Sequence
  Cyclic GFR-binding peptide
  MOD_RES (27)..(28): Xaa is C or S
DSMEGLVVNNASDMIQITINSLRTPVXXTP

SEQ ID NO: 100877 - protein, 27 aa, Artificial Sequence
  Cyclic GFR-binding peptide
  MOD_RES (26)..(27): Xaa is C or S
SMEGIVKPTRGVMIQITINSLDQPVXX

SEQ ID NO: 100878 - protein, 30 aa, Artificial Sequence
  Cyclic GFR-binding peptide
  MOD_RES (27)..(28): Xaa is C or S
NSMEGLIVNSSDDMIQVTINSLKTPAXXPK

SEQ ID NO: 100879 - protein, 35 aa, Artificial Sequence; identical to SEQ ID NO: 22595
  Cyclic GFR-binding peptide
  MOD_RES (1)..(3): Xaa is C or S

SEQ ID NO: 100880 - protein, 38 aa, Artificial Sequence; identical to SEQ ID NO: 22596
  Cyclic GFR-binding peptide
  MOD_RES (1)..(38): Xaa is C or S

SEQ ID NO: 100881 - protein, 29 aa, Artificial Sequence
  Cyclic GFR-binding peptide
HQLFSMEGLHQGQHPKIRMIQMTINSEET

SEQ ID NO: 100882 - protein, 26 aa, Artificial Sequence
  Cyclic GFR-binding peptide
MGSMEGLIIQQKDNMIQMTINSMKTP

SEQ ID NO: 100883 - protein, 42 aa, Artificial Sequence; identical to SEQ ID NO: 22600
  Cyclic GFR-binding peptide
  MOD_RES (1)..(3)..(40): Xaa is C or S

SEQ ID NO: 100884 - protein, 35 aa, Artificial Sequence
  Cyclic GFR-binding peptide
  MOD_RES (1)..(32)..(33): Xaa is C or S
XEEVIMSMEGILLVRGNDMIQMTINSTKVPAXXTS

SEQ ID NO: 100885 - protein, 31 aa, Artificial Sequence
  Cyclic GFR-binding peptide
  MOD_RES (28)..(29): Xaa is C or S
MDSMEGIVVNNAADMIQITINSLRAPVXXSA

SEQ ID NO: 100886 - protein, 35 aa, Artificial Sequence; identical to SEQ ID NO: 22602
  Cyclic GFR-binding peptide
  MOD_RES (2)..(2): Xaa is C or S

SEQ ID NO: 100887 - protein, 25 aa, Artificial Sequence
  Cyclic GFR-binding peptide
SMEGLVKPTRGVMIQITINSLDQPV

SEQ ID NO: 100888 - protein, 32 aa, Artificial Sequence
  Cyclic GFR-binding peptide
  MOD_RES (29)..(30): Xaa is C or S
VMGSMEGIIIQQKDNMIQMTINSMKTPTXXPG

SEQ ID NO: 100889 - protein, 25 aa, Artificial Sequence
  Cyclic GFR-binding peptide
VMDSMEGIVVNNASDMIQITINSLR

SEQ ID NO: 100890 - protein, 31 aa, Artificial Sequence; identical to SEQ ID NO: 68004
  Cyclic GFR-binding peptide

SEQ ID NO: 100891 - protein, 33 aa, Artificial Sequence; identical to SEQ ID NO: 22606
  Cyclic GFR-binding peptide
  MOD_RES (2)..(2): Xaa is C or S

SEQ ID NO: 100892 - protein, 24 aa, Artificial Sequence
  Cyclic GFR-binding peptide
MSMEGIVKPTRGVMIQITINSLDQ

SEQ ID NO: 100893 - protein, 31 aa, Artificial Sequence
  Cyclic GFR-binding peptide
  MOD_RES (30)..(31): Xaa is C or S
RVIMSMEGLVKPKRGVMIQITINSLAQPVXX

SEQ ID NO: 100894 - protein, 37 aa, Artificial Sequence; identical to SEQ ID NO: 64647
  Cyclic GFR-binding peptide
  MOD_RES (2)..(34)..(35): Xaa is C or S

SEQ ID NO: 100895 - protein, 31 aa, Artificial Sequence; identical to SEQ ID NO: 22608
  Cyclic GFR-binding peptide

SEQ ID NO: 100896 - protein, 34 aa, Artificial Sequence
  Cyclic GFR-binding peptide
  MOD_RES (2)..(33)..(34): Xaa is C or S
KXSKVIMSMEGLIKPTKGIMIQITINSLDQSVXX

SEQ ID NO: 100897 - protein, 31 aa, Artificial Sequence; identical to SEQ ID NO: 68009
  Cyclic GFR-binding peptide
  MOD_RES (30)..(31): Xaa is C or S

SEQ ID NO: 100898 - protein, 38 aa, Artificial Sequence
  Cyclic GFR-binding peptide
  MOD_RES (1)..(3)..(35)..(36): Xaa is C or S
XGXAEVVMDSMEGIVVNNAADMIQITINSLRAPVXXSA

SEQ ID NO: 100899 - protein, 22 aa, Artificial Sequence
  Cyclic GFR-binding peptide
MSMEGLIKPTKGIMIQITINSL

SEQ ID NO: 100900 - protein, 33 aa, Artificial Sequence
  Cyclic GFR-binding peptide
  MOD_RES (2)..(4): Xaa is C or S
RXGXAEVVMDSMEGLVVNNAADMIQITINSLRA

SEQ ID NO: 100901 - protein, 31 aa, Artificial Sequence
  Cyclic GFR-binding peptide
  MOD_RES (29)..(30): Xaa is C or S
VIMSMEGLIKPTKGIMIQITINSLDQSVXXP

SEQ ID NO: 100902 - protein, 30 aa, Artificial Sequence
  Cyclic GFR-binding peptide
  MOD_RES (28)..(29): Xaa is C or S
MGSMEGIIIQQKDNMIQMTINSMKTPTXXP

SEQ ID NO: 100903 - protein, 28 aa, Artificial Sequence
  Cyclic GFR-binding peptide
HDELTSMEGIFIPKKRVIEMIQVTINSL

SEQ ID NO: 100904 - protein, 29 aa, Artificial Sequence
  Cyclic GFR-binding peptide
LFSMEGIHQGQHPKIRMIQMTINSEETPV

SEQ ID NO: 100905 - protein, 33 aa, Artificial Sequence
  Cyclic GFR-binding peptide
  MOD_RES (31)..(32): Xaa is C or S
DVVMGSMEGIIIQQKDNMIQMTINSMKTPTXXP

SEQ ID NO: 100906 - protein, 31 aa, Artificial Sequence; identical to SEQ ID NO: 22620
  Cyclic GFR-binding peptide
  MOD_RES (1)..(3): Xaa is C or S

SEQ ID NO: 100907 - protein, 37 aa, Artificial Sequence
  Cyclic GFR-binding peptide
  MOD_RES (2)..(33)..(34): Xaa is C or S
KXSKVVMSMEGLVKPTRGVMIQITINSLDQPVXXPSA

SEQ ID NO: 100908 - protein, 31 aa, Artificial Sequence
  Cyclic GFR-binding peptide
  MOD_RES (30)..(31): Xaa is C or S
EVIMSMEGILLVRGNDMIQMTINSTKVPAXX

SEQ ID NO: 100909 - protein, 29 aa, Artificial Sequence
  Cyclic GFR-binding peptide
  MOD_RES (26)..(27): Xaa is C or S
SMEGLVVNNAADMIQITINSLRAPVXXSA

SEQ ID NO: 100910 - protein, 27 aa, Artificial Sequence
  Cyclic GFR-binding peptide
AEVVMDSMEGIVVNNAADMIQITINSL

SEQ ID NO: 100911 - protein, 40 aa, Artificial Sequence
  Cyclic GFR-binding peptide
  MOD_RES (2)..(34)..(35): Xaa is C or S
GXRDVVMGSMEGIIIQQKDNMIQMTINSMKTPTXXPGASG

SEQ ID NO: 100912 - protein, 38 aa, Artificial Sequence
  Cyclic GFR-binding peptide
  MOD_RES (1)..(3)..(34)..(35): Xaa is C or S
XGXEEVIMSMEGILLVRGNDMIQMTINSTKVPAXXTSP

SEQ ID NO: 100913 - protein, 40 aa, Artificial Sequence
  Cyclic GFR-binding peptide
  MOD_RES (1)..(3)..(35)..(36): Xaa is C or S
XGXAEVVMDSMEGLVVNNAADMIQITINSLRAPVXXSAPA

SEQ ID NO: 100914 - protein, 34 aa, Artificial Sequence; identical to SEQ ID NO: 22628
  Cyclic GFR-binding peptide
  MOD_RES (30)..(30): Xaa is C or S

SEQ ID NO: 100915 - protein, 35 aa, Artificial Sequence
  Cyclic GFR-binding peptide
  MOD_RES (1)..(32)..(33): Xaa is C or S
XSKVIMSMEGLIKPTKGIMIQITINSLDQSVXXPS

SEQ ID NO: 100916 - protein, 31 aa, Artificial Sequence
  Cyclic GFR-binding peptide
RDVVMGSMEGLIIQQKDNMIQMTINSMKTPT

SEQ ID NO: 100917 - protein, 20 aa, Artificial Sequence
  Cyclic GFR-binding peptide
SMEGIIIQQKDNMIQMTINS

SEQ ID NO: 100918 - protein, 31 aa, Artificial Sequence
  Cyclic GFR-binding peptide
  MOD_RES (31)..(31): Xaa is C or S
DVVMGSMEGLIIQQKDNMIQMTINSMKTPTX

SEQ ID NO: 100919 - protein, 33 aa, Artificial Sequence
  Cyclic GFR-binding peptide
  MOD_RES (30)..(31): Xaa is C or S
KVVMSMEGLVKPTRGVMIQITINSLDQPVXXPS

SEQ ID NO: 100920 - protein, 38 aa, Artificial Sequence; identical to SEQ ID NO: 22630
  Cyclic GFR-binding peptide
  MOD_RES (1)..(3): Xaa is C or S

SEQ ID NO: 100921 - protein, 21 aa, Artificial Sequence
  Cyclic GFR-binding peptide
SMEGLIIQQKDNMIQMTINSM

SEQ ID NO: 100922 - protein, 30 aa, Artificial Sequence; identical to SEQ ID NO: 22636
  Cyclic GFR-binding peptide
  MOD_RES (1)..(1): Xaa is C or S

SEQ ID NO: 100923 - protein, 28 aa, Artificial Sequence
  Cyclic GFR-binding peptide
  MOD_RES (26)..(27): Xaa is C or S
SMEGIIVNSSDDMIQVTINSLKTPAXXP

SEQ ID NO: 100924 - protein, 31 aa, Artificial Sequence; identical to SEQ ID NO: 22639
  Cyclic GFR-binding peptide
  MOD_RES (30)..(30): Xaa is C or S

SEQ ID NO: 100925 - protein, 34 aa, Artificial Sequence
  Cyclic GFR-binding peptide
  MOD_RES (2)..(34): Xaa is C or S
GXAEVVMDSMEGLVVNNAADMIQITINSLRAPVX

SEQ ID NO: 100926 - protein, 32 aa, Artificial Sequence; identical to SEQ ID NO: 64678
  Cyclic GFR-binding peptide
  MOD_RES (2)..(2): Xaa is C or S

SEQ ID NO: 100927 - protein, 33 aa, Artificial Sequence
  Cyclic GFR-binding peptide
  MOD_RES (30)..(31): Xaa is C or S
VVMDSMEGLVVNNAADMIQITINSLRAPVXXSA

SEQ ID NO: 100928 - protein, 34 aa, Artificial Sequence
  Cyclic GFR-binding peptide
  MOD_RES (2)..(4): Xaa is C or S
SXKXSKVIMSMEGLIKPTKGIMIQITINSLDQSV

SEQ ID NO: 100929 - protein, 32 aa, Artificial Sequence; identical to SEQ ID NO: 22644
  Cyclic GFR-binding peptide
  MOD_RES (32)..(32): Xaa is C or S

SEQ ID NO: 100930 - protein, 28 aa, Artificial Sequence
  Cyclic GFR-binding peptide
VIMSMEGLVKPKRGVMIQITINSLAQPV

SEQ ID NO: 100931 - protein, 29 aa, Artificial Sequence
  Cyclic GFR-binding peptide
  MOD_RES (28)..(29): Xaa is C or S
MDSMEGLVVNNAADMIQITINSLRAPVXX

SEQ ID NO: 100932 - protein, 32 aa, Artificial Sequence
  Cyclic GFR-binding peptide
  MOD_RES (1)..(3): Xaa is C or S
XGXAEVVMDSMEGIVVNNAADMIQITINSLRA

SEQ ID NO: 100933 - protein, 31 aa, Artificial Sequence
  Cyclic GFR-binding peptide
  MOD_RES (1)..(1): Xaa is C or S
XSRVIMSMEGLVKPKRGVMIQITINSLAQPV

SEQ ID NO: 100934 - protein, 39 aa, Artificial Sequence
  Cyclic GFR-binding peptide
  MOD_RES (2)..(4)..(35)..(36): Xaa is C or S
SXKXSRVIMSMEGLVKPKRGVMIQITINSLAQPVXXPAA

SEQ ID NO: 100935 - protein, 27 aa, Artificial Sequence
  Cyclic GFR-binding peptide
EELRSMEGLLKPKKRVYEMIQVTINSH

SEQ ID NO: 100936 - protein, 24 aa, Artificial Sequence
  Cyclic GFR-binding peptide
TSMEGLFIPKKRVIEMIQVTINSL

SEQ ID NO: 100937 - protein, 30 aa, Artificial Sequence
  Cyclic GFR-binding peptide
  MOD_RES (26)..(27): Xaa is C or S
SMEGIVVNNAADMIQITINSLRAPVXXSAP

SEQ ID NO: 100938 - protein, 35 aa, Artificial Sequence; identical to SEQ ID NO: 64690
  Cyclic GFR-binding peptide
  MOD_RES (2)..(33)..(34): Xaa is C or S

SEQ ID NO: 100939 - protein, 22 aa, Artificial Sequence
  Cyclic GFR-binding peptide
SMEGIVKPKRGVMIQITINSLA

SEQ ID NO: 100940 - protein, 30 aa, Artificial Sequence
  Cyclic GFR-binding peptide
  MOD_RES (27)..(28): Xaa is C or S
MSMEGILLVRGNDMIQMTINSTKVPAXXTS

SEQ ID NO: 100941 - protein, 34 aa, Artificial Sequence; identical to SEQ ID NO: 68059
  Cyclic GFR-binding peptide
  MOD_RES (30)..(31): Xaa is C or S

SEQ ID NO: 100942 - protein, 33 aa, Artificial Sequence
  Cyclic GFR-binding peptide
  MOD_RES (27)..(28): Xaa is C or S
GSMEGLIIQQKDNMIQMTINSMKTPTXXPGASG

SEQ ID NO: 100943 - protein, 36 aa, Artificial Sequence
  Cyclic GFR-binding peptide
  MOD_RES (30)..(31): Xaa is C or S
KVIMSMEGLIKPTKGIMIQITINSLDQSVXXPSASA

SEQ ID NO: 100944 - protein, 24 aa, Artificial Sequence
  Cyclic GFR-binding peptide
MSMEGILLVRGNDMIQMTINSTKV

SEQ ID NO: 100945 - protein, 24 aa, Artificial Sequence
  Cyclic GFR-binding peptide
SMEGLVVNNASDMIQITINSLRTP

SEQ ID NO: 100946 - protein, 36 aa, Artificial Sequence
  Cyclic GFR-binding peptide
  MOD_RES (31)..(32): Xaa is C or S
SRVIMSMEGLVKPKRGVMIQITINSLAQPVXXPAAS

SEQ ID NO: 100947 - protein, 24 aa, Artificial Sequence
  Cyclic GFR-binding peptide
EVIMSMEGLLLVRGNDMIQMTINS

SEQ ID NO: 100948 - protein, 29 aa, Artificial Sequence
  Cyclic GFR-binding peptide
EVVMDSMEGLVVNNASDMIQITINSLRTP

SEQ ID NO: 100949 - protein, 30 aa, Artificial Sequence
  Cyclic GFR-binding peptide
  MOD_RES (1)..(1): Xaa is C or S
XAEVVMDSMEGIVVNNAADMIQITINSLRA

SEQ ID NO: 100950 - protein, 30 aa, Artificial Sequence
  Cyclic GFR-binding peptide
  MOD_RES (2)..(4): Xaa is C or S
HXGXSRVVMNSMEGLIVNSSDDMIQVTINS

SEQ ID NO: 100951 - protein, 37 aa, Artificial Sequence
  Cyclic GFR-binding peptide
  MOD_RES (1)..(32)..(33): Xaa is C or S
XEEVIMSMEGLLLVRGNDMIQMTINSTKVPAXXTSPV

SEQ ID NO: 100952 - protein, 27 aa, Artificial Sequence
  Cyclic GFR-binding peptide
VVMDSMEGIVVNNAADMIQITINSLRA

SEQ ID NO: 100953 - protein, 23 aa, Artificial Sequence
  Cyclic GFR-binding peptide
IMSMEGLIKPTKGIMIQITINSL

SEQ ID NO: 100954 - protein, 32 aa, Artificial Sequence; identical to SEQ ID NO: 68084
  Cyclic GFR-binding peptide
  MOD_RES (29)..(30): Xaa is C or S

SEQ ID NO: 100955 - protein, 28 aa, Artificial Sequence
  Cyclic GFR-binding peptide
RVVMNSMEGLIVNSSDDMIQVTINSLKT

SEQ ID NO: 100956 - protein, 32 aa, Artificial Sequence
  Cyclic GFR-binding peptide
  MOD_RES (26)..(27): Xaa is C or S
SMEGLVKPKRGVMIQITINSLAQPVXXPAASA

SEQ ID NO: 100957 - protein, 30 aa, Artificial Sequence
  Cyclic GFR-binding peptide
  MOD_RES (1)..(3): Xaa is C or S
XGXAEVVMDSMEGIVVNNAADMIQITINSL

SEQ ID NO: 100958 - protein, 40 aa, Artificial Sequence; identical to SEQ ID NO: 22683
  Cyclic GFR-binding peptide
  MOD_RES (2)..(36): Xaa is C or S

SEQ ID NO: 100959 - protein, 28 aa, Artificial Sequence
  Cyclic GFR-binding peptide
  MOD_RES (1)..(1): Xaa is C or S
XRDVVMGSMEGIIIQQKDNMIQMTINSM

SEQ ID NO: 100960 - protein, 29 aa, Artificial Sequence
  Cyclic GFR-binding peptide
  MOD_RES (1)..(1): Xaa is C or S
XRDVVMGSMEGIIIQQKDNMIQMTINSMK

SEQ ID NO: 100961 - protein, 30 aa, Artificial Sequence
  Cyclic GFR-binding peptide
  MOD_RES (1)..(1): Xaa is C or S
XSEVVMDSMEGLVVNNASDMIQITINSLRT

SEQ ID NO: 100962 - protein, 29 aa, Artificial Sequence
  Cyclic GFR-binding peptide
LTSMEGLFIPKKRVIEMIQVTINSLQVQT

SEQ ID NO: 100963 - protein, 25 aa, Artificial Sequence
  Cyclic GFR-binding peptide
DSMEGLVVNNAADMIQITINSLRAP

SEQ ID NO: 100964 - protein, 31 aa, Artificial Sequence; identical to SEQ ID NO: 64724
  Cyclic GFR-binding peptide
  MOD_RES (2)..(4): Xaa is C or S

SEQ ID NO: 100965 - protein, 27 aa, Artificial Sequence
  Cyclic GFR-binding peptide
SMEGILKPKKRVYEMIQVTINSHHVRS

SEQ ID NO: 100966 - protein, 36 aa, Artificial Sequence; identical to SEQ ID NO: 22689
  Cyclic GFR-binding peptide
  MOD_RES (34)..(34): Xaa is C or S

SEQ ID NO: 100967 - protein, 44 aa, Artificial Sequence; identical to SEQ ID NO: 22690
  Cyclic GFR-binding peptide
  MOD_RES (2)..(4)..(38): Xaa is C or S

SEQ ID NO: 100968 - protein, 38 aa, Artificial Sequence; identical to SEQ ID NO: 68101
  Cyclic GFR-binding peptide
  MOD_RES (1)..(32)..(33): Xaa is C or S

SEQ ID NO: 100969 - protein, 36 aa, Artificial Sequence; identical to SEQ ID NO: 22692
  Cyclic GFR-binding peptide
  MOD_RES (1)..(1): Xaa is C or S

SEQ ID NO: 100970 - protein, 23 aa, Artificial Sequence
  Cyclic GFR-binding peptide
SMEGLVVNNASDMIQITINSLRT

SEQ ID NO: 100971 - protein, 27 aa, Artificial Sequence
  Cyclic GFR-binding peptide
SKVVMSMEGIVKPTRGVMIQITINSLD

SEQ ID NO: 100972 - protein, 38 aa, Artificial Sequence; identical to SEQ ID NO: 22694
  Cyclic GFR-binding peptide
  MOD_RES (1)..(3): Xaa is C or S

SEQ ID NO: 100973 - protein, 32 aa, Artificial Sequence; identical to SEQ ID NO: 22695
  Cyclic GFR-binding peptide
  MOD_RES (1)..(1): Xaa is C or S

SEQ ID NO: 100974 - protein, 32 aa, Artificial Sequence
  Cyclic GFR-binding peptide
  MOD_RES (2)..(4): Xaa is C or S
SXKXSKVVMSMEGLVKPTRGVMIQITINSLDQ

SEQ ID NO: 100975 - protein, 32 aa, Artificial Sequence
  Cyclic GFR-binding peptide
  MOD_RES (27)..(28): Xaa is C or S
MSMEGLIKPTKGIMIQITINSLDQSVXXPSAS

SEQ ID NO: 100976 - protein, 28 aa, Artificial Sequence
  Cyclic GFR-binding peptide
  MOD_RES (1)..(1): Xaa is C or S
XSRVIMSMEGIVKPKRGVMIQITINSLA

SEQ ID NO: 100977 - protein, 31 aa, Artificial Sequence
  Cyclic GFR-binding peptide
  MOD_RES (30)..(31): Xaa is C or S
EVIMSMEGLLLVRGNDMIQMTINSTKVPAXX

SEQ ID NO: 100978 - protein, 34 aa, Artificial Sequence
  Cyclic GFR-binding peptide
  MOD_RES (1)..(32)..(33): Xaa is C or S
XSKVVMSMEGLVKPTRGVMIQITINSLDQPVXXP

SEQ ID NO: 100979 - protein, 25 aa, Artificial Sequence
  Cyclic GFR-binding peptide
SMEGIVVNNASDMIQITINSLRTPV

SEQ ID NO: 100980 - protein, 30 aa, Artificial Sequence; identical to SEQ ID NO: 64739
  Cyclic GFR-binding peptide

SEQ ID NO: 100981 - protein, 28 aa, Artificial Sequence
  Cyclic GFR-binding peptide
  MOD_RES (1)..(1): Xaa is C or S
XAEVVMDSMEGIVVNNAADMIQITINSL

SEQ ID NO: 100982 - protein, 27 aa, Artificial Sequence
  Cyclic GFR-binding peptide
VMGSMEGIIIQQKDNMIQMTINSMKTP

SEQ ID NO: 100983 - protein, 32 aa, Artificial Sequence; identical to SEQ ID NO: 68114
  Cyclic GFR-binding peptide
  MOD_RES (2)..(2): Xaa is C or S

SEQ ID NO: 100984 - protein, 33 aa, Artificial Sequence; identical to SEQ ID NO: 22702
  Cyclic GFR-binding peptide
  MOD_RES (2)..(2): Xaa is C or S

SEQ ID NO: 100985 - protein, 32 aa, Artificial Sequence; identical to SEQ ID NO: 22703
  Cyclic GFR-binding peptide
  MOD_RES (30)..(30): Xaa is C or S

SEQ ID NO: 100986 - protein, 30 aa, Artificial Sequence
  Cyclic GFR-binding peptide
  MOD_RES (2)..(4): Xaa is C or S
RXGXAEVVMDSMEGLVVNNAADMIQITINS

SEQ ID NO: 100987 - protein, 26 aa, Artificial Sequence
  Cyclic GFR-binding peptide
DVVMGSMEGLIIQQKDNMIQMTINSM

SEQ ID NO: 100988 - protein, 23 aa, Artificial Sequence
  Cyclic GFR-binding peptide
MSMEGLVKPKRGVMIQITINSLA

SEQ ID NO: 100989 - protein, 32 aa, Artificial Sequence
  Cyclic GFR-binding peptide
  MOD_RES (27)..(28): Xaa is C or S
DSMEGIVVNNAADMIQITINSLRAPVXXSAPA

SEQ ID NO: 100990 - protein, 28 aa, Artificial Sequence
  Cyclic GFR-binding peptide
LTSMEGIFIPKKRVIEMIQVTINSLQVQ

SEQ ID NO: 100991 - protein, 25 aa, Artificial Sequence
  Cyclic GFR-binding peptide
MDSMEGIVVNNAADMIQITINSLRA

SEQ ID NO: 100992 - protein, 33 aa, Artificial Sequence; identical to SEQ ID NO: 64752
  Cyclic GFR-binding peptide
  MOD_RES (27)..(28): Xaa is C or S

SEQ ID NO: 100993 - protein, 36 aa, Artificial Sequence; identical to SEQ ID NO: 64753
  Cyclic GFR-binding peptide
  MOD_RES (31)..(32): Xaa is C or S

SEQ ID NO: 100994 - protein, 21 aa, Artificial Sequence
  Cyclic GFR-binding peptide
DSMEGLVVNNASDMIQITINS

SEQ ID NO: 100995 - protein, 40 aa, Artificial Sequence
  Cyclic GFR-binding peptide
  MOD_RES (2)..(4)..(36)..(37): Xaa is C or S
RXGXSEVVMDSMEGIVVNNASDMIQITINSLRTPVXXTPP

SEQ ID NO: 100996 - protein, 38 aa, Artificial Sequence
  Cyclic GFR-binding peptide
  MOD_RES (1)..(3)..(35)..(36): Xaa is C or S
XGXAEVVMDSMEGLVVNNAADMIQITINSLRAPVXXSA

SEQ ID NO: 100997 - protein, 35 aa, Artificial Sequence; identical to SEQ ID NO: 22711
  Cyclic GFR-binding peptide
  MOD_RES (1)..(1): Xaa is C or S

SEQ ID NO: 100998 - protein, 32 aa, Artificial Sequence; identical to SEQ ID NO: 22713
  Cyclic GFR-binding peptide
  MOD_RES (28)..(28): Xaa is C or S

SEQ ID NO: 100999 - protein, 40 aa, Artificial Sequence; identical to SEQ ID NO: 22714
  Cyclic GFR-binding peptide
  MOD_RES (2)..(4)..(38): Xaa is C or S

SEQ ID NO: 101000 - protein, 41 aa, Artificial Sequence; identical to SEQ ID NO: 22715
  Cyclic GFR-binding peptide
  MOD_RES (1)..(3)..(37): Xaa is C or S

SEQ ID NO: 101001 - protein, 30 aa, Artificial Sequence; identical to SEQ ID NO: 64756
  Cyclic GFR-binding peptide
  MOD_RES (28)..(29): Xaa is C or S

SEQ ID NO: 101002 - protein, 37 aa, Artificial Sequence; identical to SEQ ID NO: 68121
  Cyclic GFR-binding peptide
  MOD_RES (1)..(32)..(33): Xaa is C or S

SEQ ID NO: 101003 - protein, 35 aa, Artificial Sequence
  Cyclic GFR-binding peptide
  MOD_RES (2)..(4): Xaa is C or S
HXGXSRVVMNSMEGLIVNSSDDMIQVTINSLKTPA

SEQ ID NO: 101004 - protein, 39 aa, Artificial Sequence; identical to SEQ ID NO: 22717
  Cyclic GFR-binding peptide
  MOD_RES (35)..(35): Xaa is C or S

SEQ ID NO: 101005 - protein, 38 aa, Artificial Sequence; identical to SEQ ID NO: 22718
  Cyclic GFR-binding peptide
  MOD_RES (2)..(2): Xaa is C or S

SEQ ID NO: 101006 - protein, 40 aa, Artificial Sequence; identical to SEQ ID NO: 22721
  Cyclic GFR-binding peptide
  MOD_RES (2)..(39): Xaa is C or S

SEQ ID NO: 101007 - protein, 29 aa, Artificial Sequence
  Cyclic GFR-binding peptide
TSMEGIFIPKKRVIEMIQVTINSLQVQTP

SEQ ID NO: 101008 - protein, 35 aa, Artificial Sequence; identical to SEQ ID NO: 64760
  Cyclic GFR-binding peptide
  MOD_RES (29)..(30): Xaa is C or S

SEQ ID NO: 101009 - protein, 39 aa, Artificial Sequence; identical to SEQ ID NO: 22725
  Cyclic GFR-binding peptide
  MOD_RES (35)..(35): Xaa is C or S

SEQ ID NO: 101010 - protein, 31 aa, Artificial Sequence; identical to SEQ ID NO: 22727
  Cyclic GFR-binding peptide
  MOD_RES (31)..(31): Xaa is C or S

SEQ ID NO: 101011 - protein, 26 aa, Artificial Sequence
  Cyclic GFR-binding peptide
  MOD_RES (26)..(26): Xaa is C or S
SMEGIVVNNASDMIQITINSLRTPVX

SEQ ID NO: 101012 - protein, 23 aa, Artificial Sequence
  Cyclic GFR-binding peptide
VMNSMEGIIVNSSDDMIQVTINS

SEQ ID NO: 101013 - protein, 35 aa, Artificial Sequence; identical to SEQ ID NO: 64767
  Cyclic GFR-binding peptide
  MOD_RES (30)..(31): Xaa is C or S

SEQ ID NO: 101014 - protein, 31 aa, Artificial Sequence; identical to SEQ ID NO: 22728
  Cyclic GFR-binding peptide
  MOD_RES (1)..(3): Xaa is C or S

SEQ ID NO: 101015 - protein, 25 aa, Artificial Sequence
  Cyclic GFR-binding peptide
MSMEGIIKPTKGIMIQITINSLDQS

SEQ ID NO: 101016 - protein, 30 aa, Artificial Sequence; identical to SEQ ID NO: 68132
  Cyclic GFR-binding peptide

SEQ ID NO: 101017 - protein, 26 aa, Artificial Sequence
  Cyclic GFR-binding peptide
DELTSMEGLFIPKKRVIEMIQVTINS

SEQ ID NO: 101018 - protein, 37 aa, Artificial Sequence; identical to SEQ ID NO: 22737
  Cyclic GFR-binding peptide
  MOD_RES (37)..(37): Xaa is C or S

SEQ ID NO: 101019 - protein, 31 aa, Artificial Sequence; identical to SEQ ID NO: 22738
  Cyclic GFR-binding peptide

SEQ ID NO: 101020 - protein, 30 aa, Artificial Sequence
  Cyclic GFR-binding peptide
AEVVMDSMEGIVVNNAADMIQITINSLRAP

SEQ ID NO: 101021 - protein, 33 aa, Artificial Sequence
  Cyclic GFR-binding peptide
  MOD_RES (1)..(32)..(33): Xaa is C or S
XSRVIMSMEGLVKPKRGVMIQITINSLAQPVXX

SEQ ID NO: 101022 - protein, 36 aa, Artificial Sequence
  Cyclic GFR-binding peptide
  MOD_RES (1)..(33)..(34): Xaa is C or S
XSEVVMDSMEGIVVNNASDMIQITINSLRTPVXXTP

SEQ ID NO: 101023 - protein, 30 aa, Artificial Sequence
  Cyclic GFR-binding peptide
  MOD_RES (29)..(30): Xaa is C or S
VMDSMEGLVVNNASDMIQITINSLRTPVXX

SEQ ID NO: 101024 - protein, 33 aa, Artificial Sequence
  Cyclic GFR-binding peptide
  MOD_RES (28)..(29): Xaa is C or S
MDSMEGIVVNNASDMIQITINSLRTPVXXTPPT

SEQ ID NO: 101025 - protein, 38 aa, Artificial Sequence; identical to SEQ ID NO: 68140
  Cyclic GFR-binding peptide
  MOD_RES (2)..(33)..(34): Xaa is C or S

SEQ ID NO: 101026 - protein, 35 aa, Artificial Sequence
  Cyclic GFR-binding peptide
  MOD_RES (32)..(33): Xaa is C or S
RDVVMGSMEGIIIQQKDNMIQMTINSMKTPTXXPG

SEQ ID NO: 101027 - protein, 38 aa, Artificial Sequence
  Cyclic GFR-binding peptide
  MOD_RES (1)..(33)..(34): Xaa is C or S
XSEVVMDSMEGIVVNNASDMIQITINSLRTPVXXTPPT

SEQ ID NO: 101028 - protein, 41 aa, Artificial Sequence; identical to SEQ ID NO: 22747
  Cyclic GFR-binding peptide
  MOD_RES (1)..(3)..(40): Xaa is C or S

SEQ ID NO: 101029 - protein, 34 aa, Artificial Sequence; identical to SEQ ID NO: 22748
  Cyclic GFR-binding peptide
  MOD_RES (1)..(1): Xaa is C or S

SEQ ID NO: 101030 - protein, 30 aa, Artificial Sequence; identical to SEQ ID NO: 64789
  Cyclic GFR-binding peptide
  MOD_RES (26)..(27): Xaa is C or S

SEQ ID NO: 101031 - protein, 33 aa, Artificial Sequence; identical to SEQ ID NO: 22750
  Cyclic GFR-binding peptide

SEQ ID NO: 101032 - protein, 39 aa, Artificial Sequence; identical to SEQ ID NO: 22751
  Cyclic GFR-binding peptide
  MOD_RES (2)..(4): Xaa is C or S

SEQ ID NO: 101033 - protein, 27 aa, Artificial Sequence
  Cyclic GFR-binding peptide
MDSMEGLVVNNASDMIQITINSLRTPV

SEQ ID NO: 101034 - protein, 30 aa, Artificial Sequence
  Cyclic GFR-binding peptide
EVVMDSMEGLVVNNASDMIQITINSLRTPV

SEQ ID NO: 101035 - protein, 36 aa, Artificial Sequence
  Cyclic GFR-binding peptide
  MOD_RES (1)..(3)..(35)..(36): Xaa is C or S
XGXAEVVMDSMEGLVVNNAADMIQITINSLRAPVXX

SEQ ID NO: 101036 - protein, 32 aa, Artificial Sequence; identical to SEQ ID NO: 22758
  Cyclic GFR-binding peptide
  MOD_RES (1)..(3): Xaa is C or S

SEQ ID NO: 101037 - protein, 34 aa, Artificial Sequence; identical to SEQ ID NO: 22760
  Cyclic GFR-binding peptide
  MOD_RES (34)..(34): Xaa is C or S

SEQ ID NO: 101038 - protein, 27 aa, Artificial Sequence
  Cyclic GFR-binding peptide
MGSMEGIIIQQKDNMIQMTINSMKTPT

SEQ ID NO: 101039 - protein, 38 aa, Artificial Sequence; identical to SEQ ID NO: 22762
  Cyclic GFR-binding peptide
  MOD_RES (1)..(38): Xaa is C or S

SEQ ID NO: 101040 - protein, 38 aa, Artificial Sequence; identical to SEQ ID NO: 22763
  Cyclic GFR-binding peptide
  MOD_RES (1)..(35): Xaa is C or S

SEQ ID NO: 101041 - protein, 32 aa, Artificial Sequence; identical to SEQ ID NO: 22766
  Cyclic GFR-binding peptide
  MOD_RES (1)..(1): Xaa is C or S

SEQ ID NO: 101042 - protein, 31 aa, Artificial Sequence; identical to SEQ ID NO: 22768
  Cyclic GFR-binding peptide

SEQ ID NO: 101043 - protein, 34 aa, Artificial Sequence; identical to SEQ ID NO: 22769
  Cyclic GFR-binding peptide
  MOD_RES (33)..(33): Xaa is C or S

SEQ ID NO: 101044 - protein, 38 aa, Artificial Sequence; identical to SEQ ID NO: 64802
  Cyclic GFR-binding peptide
  MOD_RES (1)..(32)..(33): Xaa is C or S

SEQ ID NO: 101045 - protein, 42 aa, Artificial Sequence
  Cyclic GFR-binding peptide
  MOD_RES (2)..(4)..(36)..(37): Xaa is C or S
RXGXSEVVMDSMEGLVVNNASDMIQITINSLRTPVXXTPPTS

SEQ ID NO: 101046 - protein, 37 aa, Artificial Sequence; identical to SEQ ID NO: 22774
  Cyclic GFR-binding peptide
  MOD_RES (1)..(35): Xaa is C or S

SEQ ID NO: 101047 - protein, 35 aa, Artificial Sequence; identical to SEQ ID NO: 22776
  Cyclic GFR-binding peptide
  MOD_RES (1)..(35): Xaa is C or S

SEQ ID NO: 101048 - protein, 41 aa, Artificial Sequence; identical to SEQ ID NO: 22777
  Cyclic GFR-binding peptide
  MOD_RES (1)..(3)..(40): Xaa is C or S

SEQ ID NO: 101049 - protein, 32 aa, Artificial Sequence
  Cyclic GFR-binding peptide
  MOD_RES (26)..(27): Xaa is C or S
SMEGIVVNNAADMIQITINSLRAPVXXSAPAA

SEQ ID NO: 101050 - protein, 34 aa, Artificial Sequence
  Cyclic GFR-binding peptide
  MOD_RES (2)..(34): Xaa is C or S
GXRDVVMGSMEGIIIQQKDNMIQMTINSMKTPTX

SEQ ID NO: 101051 - protein, 27 aa, Artificial Sequence
  Cyclic GFR-binding peptide
  MOD_RES (26)..(27): Xaa is C or S
SMEGLVVNNASDMIQITINSLRTPVXX

SEQ ID NO: 101052 - protein, 24 aa, Artificial Sequence
  Cyclic GFR-binding peptide
RSMEGLLKPKKRVYEMIQVTINSH

SEQ ID NO: 101053 - protein, 28 aa, Artificial Sequence
  Cyclic GFR-binding peptide
LHEELRSMEGLLKPKKRVYEMIQVTINS

SEQ ID NO: 101054 - protein, 33 aa, Artificial Sequence; identical to SEQ ID NO: 22786
  Cyclic GFR-binding peptide
  MOD_RES (2)..(4): Xaa is C or S

SEQ ID NO: 101055 - protein, 28 aa, Artificial Sequence
  Cyclic GFR-binding peptide
  MOD_RES (2)..(2): Xaa is C or S
GXSEVVMDSMEGLVVNNASDMIQITINS

SEQ ID NO: 101056 - protein, 38 aa, Artificial Sequence
  Cyclic GFR-binding peptide
  MOD_RES (2)..(4)..(36)..(37): Xaa is C or S
RXGXSEVVMDSMEGIVVNNASDMIQITINSLRTPVXXT

SEQ ID NO: 101057 - protein, 30 aa, Artificial Sequence; identical to SEQ ID NO: 68179
  Cyclic GFR-binding peptide
  MOD_RES (2)..(4): Xaa is C or S

SEQ ID NO: 101058 - protein, 25 aa, Artificial Sequence
  Cyclic GFR-binding peptide
VMDSMEGLVVNNASDMIQITINSLR

SEQ ID NO: 101059 - protein, 37 aa, Artificial Sequence; identical to SEQ ID NO: 64821
  Cyclic GFR-binding peptide
  MOD_RES (1)..(3)..(34)..(35): Xaa is C or S

SEQ ID NO: 101060 - protein, 32 aa, Artificial Sequence
  Cyclic GFR-binding peptide
  MOD_RES (29)..(30): Xaa is C or S
VIMSMEGLIKPTKGIMIQITINSLDQSVXXPS

SEQ ID NO: 101061 - protein, 24 aa, Artificial Sequence
  Cyclic GFR-binding peptide
MGSMEGIIIQQKDNMIQMTINSMK

SEQ ID NO: 101062 - protein, 34 aa, Artificial Sequence; identical to SEQ ID NO: 22793
  Cyclic GFR-binding peptide
  MOD_RES (2)..(4): Xaa is C or S

SEQ ID NO: 101063 - protein, 23 aa, Artificial Sequence
  Cyclic GFR-binding peptide
TSMEGIFIPKKRVIEMIQVTINS

SEQ ID NO: 101064 - protein, 34 aa, Artificial Sequence; identical to SEQ ID NO: 22797
  Cyclic GFR-binding peptide
  MOD_RES (2)..(2): Xaa is C or S

SEQ ID NO: 101065 - protein, 27 aa, Artificial Sequence
  Cyclic GFR-binding peptide
NHQLFSMEGLHQGQHPKIRMIQMTINS

SEQ ID NO: 101066 - protein, 29 aa, Artificial Sequence
  Cyclic GFR-binding peptide
  MOD_RES (1)..(1): Xaa is C or S
XSKVVMSMEGLVKPTRGVMIQITINSLDQ

SEQ ID NO: 101067 - protein, 32 aa, Artificial Sequence
  Cyclic GFR-binding peptide
  MOD_RES (32)..(32): Xaa is C or S
SEVVMDSMEGLVVNNASDMIQITINSLRTPVX

SEQ ID NO: 101068 - protein, 36 aa, Artificial Sequence
  Cyclic GFR-binding peptide
  MOD_RES (2)..(34)..(35): Xaa is C or S
GXSEVVMDSMEGIVVNNASDMIQITINSLRTPVXXT

SEQ ID NO: 101069 - protein, 37 aa, Artificial Sequence; identical to SEQ ID NO: 68188
  Cyclic GFR-binding peptide
  MOD_RES (1)..(3)..(34)..(35): Xaa is C or S

SEQ ID NO: 101070 - protein, 30 aa, Artificial Sequence; identical to SEQ ID NO: 68191
  Cyclic GFR-binding peptide
  MOD_RES (27)..(28): Xaa is C or S

SEQ ID NO: 101071 - protein, 39 aa, Artificial Sequence; identical to SEQ ID NO: 22804
  Cyclic GFR-binding peptide
  MOD_RES (37)..(37): Xaa is C or S

SEQ ID NO: 101072 - protein, 32 aa, Artificial Sequence
  Cyclic GFR-binding peptide
  MOD_RES (2)..(2): Xaa is C or S
GXRDVVMGSMEGLIIQQKDNMIQMTINSMKTP

SEQ ID NO: 101073 - protein, 36 aa, Artificial Sequence
  Cyclic GFR-binding peptide
  MOD_RES (1)..(32)..(33): Xaa is C or S
XSRVIMSMEGLVKPKRGVMIQITINSLAQPVXXPAA

SEQ ID NO: 101074 - protein, 30 aa, Artificial Sequence
  Cyclic GFR-binding peptide
  MOD_RES (30)..(30): Xaa is C or S
VVMDSMEGLVVNNASDMIQITINSLRTPVX

SEQ ID NO: 101075 - protein, 28 aa, Artificial Sequence
  Cyclic GFR-binding peptide
  MOD_RES (1)..(1): Xaa is C or S
XSEVVMDSMEGIVVNNASDMIQITINSL

SEQ ID NO: 101076 - protein, 34 aa, Artificial Sequence; identical to SEQ ID NO: 22810
  Cyclic GFR-binding peptide

SEQ ID NO: 101077 - protein, 25 aa, Artificial Sequence
  Cyclic GFR-binding peptide
VMGSMEGLIIQQKDNMIQMTINSMK

SEQ ID NO: 101078 - protein, 42 aa, Artificial Sequence; identical to SEQ ID NO: 22815
  Cyclic GFR-binding peptide
  MOD_RES (2)..(4)..(41): Xaa is C or S

SEQ ID NO: 101079 - protein, 35 aa, Artificial Sequence; identical to SEQ ID NO: 22816
  Cyclic GFR-binding peptide
  MOD_RES (1)..(1): Xaa is C or S

SEQ ID NO: 101080 - protein, 36 aa, Artificial Sequence; identical to SEQ ID NO: 68203
  Cyclic GFR-binding peptide
  MOD_RES (1)..(32)..(33): Xaa is C or S

SEQ ID NO: 101081 - protein, 31 aa, Artificial Sequence
  Cyclic GFR-binding peptide
  MOD_RES (2)..(2): Xaa is C or S
GXSEVVMDSMEGIVVNNASDMIQITINSLRT

SEQ ID NO: 101082 - protein, 22 aa, Artificial Sequence
  Cyclic GFR-binding peptide
MDSMEGIVVNNAADMIQITINS

SEQ ID NO: 101083 - protein, 33 aa, Artificial Sequence
  Cyclic GFR-binding peptide
  MOD_RES (31)..(32): Xaa is C or S
EEVIMSMEGLLLVRGNDMIQMTINSTKVPAXXT

SEQ ID NO: 101084 - protein, 29 aa, Artificial Sequence
  Cyclic GFR-binding peptide
AEVVMDSMEGLVVNNAADMIQITINSLRA

SEQ ID NO: 101085 - protein, 26 aa, Artificial Sequence
  Cyclic GFR-binding peptide
  MOD_RES (1)..(1): Xaa is C or S
XSRVIMSMEGLVKPKRGVMIQITINS

SEQ ID NO: 101086 - protein, 29 aa, Artificial Sequence
  Cyclic GFR-binding peptide
  MOD_RES (26)..(27): Xaa is C or S
SMEGILLVRGNDMIQMTINSTKVPAXXTS

SEQ ID NO: 101087 - protein, 38 aa, Artificial Sequence; identical to SEQ ID NO: 64842
  Cyclic GFR-binding peptide
  MOD_RES (1)..(3)..(34)..(35): Xaa is C or S

SEQ ID NO: 101088 - protein, 33 aa, Artificial Sequence
  Cyclic GFR-binding peptide
  MOD_RES (30)..(31): Xaa is C or S
VVMGSMEGIIIQQKDNMIQMTINSMKTPTXXPG

SEQ ID NO: 101089 - protein, 30 aa, Artificial Sequence; identical to SEQ ID NO: 22829
  Cyclic GFR-binding peptide

SEQ ID NO: 101090 - protein, 36 aa, Artificial Sequence
  Cyclic GFR-binding peptide
  MOD_RES (2)..(34)..(35): Xaa is C or S
GXSEVVMDSMEGLVVNNASDMIQITINSLRTPVXXT

SEQ ID NO: 101091 - protein, 36 aa, Artificial Sequence; identical to SEQ ID NO: 22836
  Cyclic GFR-binding peptide
  MOD_RES (30)..(30): Xaa is C or S

SEQ ID NO: 101092 - protein, 27 aa, Artificial Sequence
  Cyclic GFR-binding peptide
VMGSMEGLIIQQKDNMIQMTINSMKTP

SEQ ID NO: 101093 - protein, 28 aa, Artificial Sequence
  Cyclic GFR-binding peptide
ELTSMEGIFIPKKRVIEMIQVTINSLQV

SEQ ID NO: 101094 - protein, 30 aa, Artificial Sequence; identical to SEQ ID NO: 64848
  Cyclic GFR-binding peptide
  MOD_RES (2)..(4): Xaa is C or S

SEQ ID NO: 101095 - protein, 30 aa, Artificial Sequence; identical to SEQ ID NO: 22838
  Cyclic GFR-binding peptide

SEQ ID NO: 101096 - protein, 30 aa, Artificial Sequence
  Cyclic GFR-binding peptide
  MOD_RES (28)..(29): Xaa is C or S
MDSMEGLVVNNAADMIQITINSLRAPVXXS

SEQ ID NO: 101097 - protein, 32 aa, Artificial Sequence
  Cyclic GFR-binding peptide
  MOD_RES (29)..(30): Xaa is C or S
VMDSMEGLVVNNASDMIQITINSLRTPVXXTP

SEQ ID NO: 101098 - protein, 22 aa, Artificial Sequence
  Cyclic GFR-binding peptide
SMEGLIKPTKGIMIQITINSLD

SEQ ID NO: 101099 - protein, 36 aa, Artificial Sequence; identical to SEQ ID NO: 22844
  Cyclic GFR-binding peptide
  MOD_RES (2)..(2): Xaa is C or S

SEQ ID NO: 101100 - protein, 25 aa, Artificial Sequence
  Cyclic GFR-binding peptide
SMEGIHQGQHPKIRMIQMTINSQGT

SEQ ID NO: 101101 - protein, 38 aa, Artificial Sequence
  Cyclic GFR-binding peptide
  MOD_RES (32)..(33): Xaa is C or S
RDVVMGSMEGLIIQQKDNMIQMTINSMKTPTXXPGASG

SEQ ID NO: 101102 - protein, 30 aa, Artificial Sequence; identical to SEQ ID NO: 22850
  Cyclic GFR-binding peptide

SEQ ID NO: 101103 - protein, 26 aa, Artificial Sequence
  Cyclic GFR-binding peptide
KVVMSMEGLVKPTRGVMIQITINSLD

SEQ ID NO: 101104 - protein, 33 aa, Artificial Sequence
  Cyclic GFR-binding peptide
  MOD_RES (2)..(4): Xaa is C or S
LXGXEEVIMSMEGLLLVRGNDMIQMTINSTKVP

SEQ ID NO: 101105 - protein, 29 aa, Artificial Sequence
  Cyclic GFR-binding peptide
  MOD_RES (28)..(28): Xaa is C or S
SMEGIHQGQHPKIRMIQMTINSEETPVXE

SEQ ID NO: 101106 - protein, 34 aa, Artificial Sequence
  Cyclic GFR-binding peptide
  MOD_RES (2)..(34): Xaa is C or S
GXSEVVMDSMEGLVVNNASDMIQITINSLRTPVX

SEQ ID NO: 101107 - protein, 27 aa, Artificial Sequence
  Cyclic GFR-binding peptide
SEVVMDSMEGLVVNNASDMIQITINSL

SEQ ID NO: 101108 - protein, 32 aa, Artificial Sequence; identical to SEQ ID NO: 22857
  Cyclic GFR-binding peptide

SEQ ID NO: 101109 - protein, 31 aa, Artificial Sequence
  Cyclic GFR-binding peptide
  MOD_RES (26)..(27): Xaa is C or S
SMEGLLLVRGNDMIQMTINSTKVPAXXTSPV

SEQ ID NO: 101110 - protein, 24 aa, Artificial Sequence
  Cyclic GFR-binding peptide
SMEGLIIQQKDNMIQMTINSMKTP

SEQ ID NO: 101111 - protein, 29 aa, Artificial Sequence
  Cyclic GFR-binding peptide
  MOD_RES (27)..(28): Xaa is C or S
MSMEGILLVRGNDMIQMTINSTKVPAXXT

SEQ ID NO: 101112 - protein, 30 aa, Artificial Sequence; identical to SEQ ID NO: 22860
  Cyclic GFR-binding peptide

SEQ ID NO: 101113 - protein, 32 aa, Artificial Sequence; identical to SEQ ID NO: 22861
  Cyclic GFR-binding peptide
  MOD_RES (1)..(1): Xaa is C or S

SEQ ID NO: 101114 - protein, 31 aa, Artificial Sequence
  Cyclic GFR-binding peptide
  MOD_RES (2)..(2): Xaa is C or S
GXAEVVMDSMEGLVVNNAADMIQITINSLRA

SEQ ID NO: 101115 - protein, 31 aa, Artificial Sequence; identical to SEQ ID NO: 22864
  Cyclic GFR-binding peptide

SEQ ID NO: 101116 - protein, 29 aa, Artificial Sequence
  Cyclic GFR-binding peptide
  MOD_RES (26)..(27): Xaa is C or S
SMEGIVVNNASDMIQITINSLRTPVXXTP

SEQ ID NO: 101117 - protein, 32 aa, Artificial Sequence
  Cyclic GFR-binding peptide
  MOD_RES (2)..(4): Xaa is C or S
SXKXSKVIMSMEGLIKPTKGIMIQITINSLDQ

SEQ ID NO: 101118 - protein, 31 aa, Artificial Sequence
  Cyclic GFR-binding peptide
  MOD_RES (1)..(1): Xaa is C or S
XAEVVMDSMEGIVVNNAADMIQITINSLRAP

SEQ ID NO: 101119 - protein, 27 aa, Artificial Sequence
  Cyclic GFR-binding peptide
FSMEGLHQGQHPKIRMIQMTINSEETP

SEQ ID NO: 101120 - protein, 31 aa, Artificial Sequence
  Cyclic GFR-binding peptide
  MOD_RES (1)..(1): Xaa is C or S
XAEVVMDSMEGLVVNNAADMIQITINSLRAP

SEQ ID NO: 101121 - protein, 24 aa, Artificial Sequence
  Cyclic GFR-binding peptide
SMEGIVVNNASDMIQITINSLRTP

SEQ ID NO: 101122 - protein, 33 aa, Artificial Sequence
  Cyclic GFR-binding peptide
  MOD_RES (30)..(31): Xaa is C or S
KVIMSMEGLIKPTKGIMIQITINSLDQSVXXPS

SEQ ID NO: 101123 - protein, 34 aa, Artificial Sequence; identical to SEQ ID NO: 68251
  Cyclic GFR-binding peptide
  MOD_RES (29)..(30): Xaa is C or S

SEQ ID NO: 101124 - protein, 21 aa, Artificial Sequence
  Cyclic GFR-binding peptide
SMEGIIIQQKDNMIQMTINSM

SEQ ID NO: 101125 - protein, 26 aa, Artificial Sequence
  Cyclic GFR-binding peptide
  MOD_RES (1)..(1): Xaa is C or S
XSKVVMSMEGLVKPTRGVMIQITINS

SEQ ID NO: 101126 - protein, 28 aa, Artificial Sequence
  Cyclic GFR-binding peptide
LRSMEGILKPKKRVYEMIQVTINSHHVR

SEQ ID NO: 101127 - protein, 41 aa, Artificial Sequence
  Cyclic GFR-binding peptide
  MOD_RES (1)..(3)..(35)..(36): Xaa is C or S
XGXRDVVMGSMEGIIIQQKDNMIQMTINSMKTPTXXPGASG

SEQ ID NO: 101128 - protein, 23 aa, Artificial Sequence
  Cyclic GFR-binding peptide
VIMSMEGLIKPTKGIMIQITINS

SEQ ID NO: 101129 - protein, 37 aa, Artificial Sequence; identical to SEQ ID NO: 22881
  Cyclic GFR-binding peptide
  MOD_RES (31)..(31): Xaa is C or S

SEQ ID NO: 101130 - protein, 21 aa, Artificial Sequence
  Cyclic GFR-binding peptide
SMEGLVVNNASDMIQITINSL

SEQ ID NO: 101131 - protein, 25 aa, Artificial Sequence
  Cyclic GFR-binding peptide
RSMEGILKPKKRVYEMIQVTINSHH

SEQ ID NO: 101132 - protein, 39 aa, Artificial Sequence
  Cyclic GFR-binding peptide
  MOD_RES (2)..(33)..(34): Xaa is C or S
KXSKVVMSMEGLVKPTRGVMIQITINSLDQPVXXPSASA

SEQ ID NO: 101133 - protein, 34 aa, Artificial Sequence; identical to SEQ ID NO: 22891
  Cyclic GFR-binding peptide
  MOD_RES (32)..(32): Xaa is C or S

SEQ ID NO: 101134 - protein, 22 aa, Artificial Sequence
  Cyclic GFR-binding peptide
SMEGLVKPKRGVMIQITINSLA

SEQ ID NO: 101135 - protein, 30 aa, Artificial Sequence
  Cyclic GFR-binding peptide
SRVIMSMEGLVKPKRGVMIQITINSLAQPV

SEQ ID NO: 101136 - protein, 30 aa, Artificial Sequence
  Cyclic GFR-binding peptide
  MOD_RES (2)..(2): Xaa is C or S
GXRDVVMGSMEGLIIQQKDNMIQMTINSMK

SEQ ID NO: 101137 - protein, 20 aa, Artificial Sequence
  Cyclic GFR-binding peptide
SMEGLIIQQKDNMIQMTINS

SEQ ID NO: 101138 - protein, 37 aa, Artificial Sequence; identical to SEQ ID NO: 22899
  Cyclic GFR-binding peptide
  MOD_RES (2)..(2): Xaa is C or S

SEQ ID NO: 101139 - protein, 25 aa, Artificial Sequence
  Cyclic GFR-binding peptide
VIMSMEGLLLVRGNDMIQMTINSTK

SEQ ID NO: 101140 - protein, 36 aa, Artificial Sequence; identical to SEQ ID NO: 22901
  Cyclic GFR-binding peptide
  MOD_RES (2)..(4): Xaa is C or S

SEQ ID NO: 101141 - protein, 25 aa, Artificial Sequence
  Cyclic GFR-binding peptide
VIMSMEGILLVRGNDMIQMTINSTK

SEQ ID NO: 101142 - protein, 32 aa, Artificial Sequence
  Cyclic GFR-binding peptide
  MOD_RES (31)..(32): Xaa is C or S
EVVMDSMEGLVVNNASDMIQITINSLRTPVXX

SEQ ID NO: 101143 - protein, 36 aa, Artificial Sequence; identical to SEQ ID NO: 22902
  Cyclic GFR-binding peptide
  MOD_RES (33)..(33): Xaa is C or S

SEQ ID NO: 101144 - protein, 28 aa, Artificial Sequence
  Cyclic GFR-binding peptide
  MOD_RES (2)..(2): Xaa is C or S
KXSRVIMSMEGLVKPKRGVMIQITINSL

SEQ ID NO: 101145 - protein, 30 aa, Artificial Sequence; identical to SEQ ID NO: 22905
  Cyclic GFR-binding peptide

SEQ ID NO: 101146 - protein, 30 aa, Artificial Sequence; identical to SEQ ID NO: 22906
  Cyclic GFR-binding peptide
  MOD_RES (30)..(30): Xaa is C or S

SEQ ID NO: 101147 - protein, 38 aa, Artificial Sequence
  Cyclic GFR-binding peptide
  MOD_RES (2)..(34)..(35): Xaa is C or S
GXSRVVMNSMEGLIVNSSDDMIQVTINSLKTPAXXPKP

SEQ ID NO: 101148 - protein, 30 aa, Artificial Sequence; identical to SEQ ID NO: 64915
  Cyclic GFR-binding peptide
  MOD_RES (1)..(3): Xaa is C or S

SEQ ID NO: 101149 - protein, 30 aa, Artificial Sequence; identical to SEQ ID NO: 64916
  Cyclic GFR-binding peptide
  MOD_RES (27)..(28): Xaa is C or S

SEQ ID NO: 101150 - protein, 30 aa, Artificial Sequence; identical to SEQ ID NO: 68272
  Cyclic GFR-binding peptide
  MOD_RES (1)..(3): Xaa is C or S

SEQ ID NO: 101151 - protein, 39 aa, Artificial Sequence; identical to SEQ ID NO: 22912
  Cyclic GFR-binding peptide
  MOD_RES (2)..(39): Xaa is C or S

SEQ ID NO: 101152 - protein, 26 aa, Artificial Sequence
  Cyclic GFR-binding peptide
MSMEGLVKPKRGVMIQITINSLAQPV

SEQ ID NO: 101153 - protein, 27 aa, Artificial Sequence
  Cyclic GFR-binding peptide
VIMSMEGIVKPKRGVMIQITINSLAQP

SEQ ID NO: 101154 - protein, 34 aa, Artificial Sequence; identical to SEQ ID NO: 68278
  Cyclic GFR-binding peptide
  MOD_RES (29)..(30): Xaa is C or S

SEQ ID NO: 101155 - protein, 25 aa, Artificial Sequence
  Cyclic GFR-binding peptide
SMEGLIKPTKGIMIQITINSLDQSV

SEQ ID NO: 101156 - protein, 34 aa, Artificial Sequence; identical to SEQ ID NO: 68280
  Cyclic GFR-binding peptide
  MOD_RES (1)..(32)..(33): Xaa is C or S

SEQ ID NO: 101157 - protein, 34 aa, Artificial Sequence
  Cyclic GFR-binding peptide
  MOD_RES (1)..(3): Xaa is C or S
XGXSRVVMNSMEGLIVNSSDDMIQVTINSLKTPA

SEQ ID NO: 101158 - protein, 24 aa, Artificial Sequence
  Cyclic GFR-binding peptide
SMEGLHQGQHPKIRMIQMTINSEE

SEQ ID NO: 101159 - protein, 23 aa, Artificial Sequence
  Cyclic GFR-binding peptide
NSMEGLIVNSSDDMIQVTINSLK

SEQ ID NO: 101160 - protein, 31 aa, Artificial Sequence; identical to SEQ ID NO: 22919
  Cyclic GFR-binding peptide
  MOD_RES (2)..(2): Xaa is C or S

SEQ ID NO: 101161 - protein, 32 aa, Artificial Sequence
  Cyclic GFR-binding peptide
  MOD_RES (26)..(27): Xaa is C or S
SMEGLVVNNAADMIQITINSLRAPVXXSAPAA

SEQ ID NO: 101162 - protein, 36 aa, Artificial Sequence; identical to SEQ ID NO: 22920
  Cyclic GFR-binding peptide
  MOD_RES (32)..(32): Xaa is C or S

SEQ ID NO: 101163 - protein, 25 aa, Artificial Sequence
  Cyclic GFR-binding peptide
MSMEGILLVRGNDMIQMTINSTKVP

SEQ ID NO: 101164 - protein, 43 aa, Artificial Sequence; identical to SEQ ID NO: 22926
  Cyclic GFR-binding peptide
  MOD_RES (1)..(3)..(40): Xaa is C or S

SEQ ID NO: 101165 - protein, 30 aa, Artificial Sequence; identical to SEQ ID NO: 22927
  Cyclic GFR-binding peptide
  MOD_RES (1)..(1): Xaa is C or S

SEQ ID NO: 101166 - protein, 35 aa, Artificial Sequence; identical to SEQ ID NO: 22929
  Cyclic GFR-binding peptide
  MOD_RES (2)..(4): Xaa is C or S

SEQ ID NO: 101167 - protein, 26 aa, Artificial Sequence
  Cyclic GFR-binding peptide
MSMEGLLLVRGNDMIQMTINSTKVPA

SEQ ID NO: 101168 - protein, 28 aa, Artificial Sequence
  Cyclic GFR-binding peptide
AEVVMDSMEGIVVNNAADMIQITINSLR

SEQ ID NO: 101169 - protein, 35 aa, Artificial Sequence; identical to SEQ ID NO: 22932
  Cyclic GFR-binding peptide
  MOD_RES (34)..(34): Xaa is C or S

SEQ ID NO: 101170 - protein, 29 aa, Artificial Sequence
  Cyclic GFR-binding peptide
  MOD_RES (2)..(2): Xaa is C or S
KXSRVIMSMEGIVKPKRGVMIQITINSLA

SEQ ID NO: 101171 - protein, 33 aa, Artificial Sequence; identical to SEQ ID NO: 68299
  Cyclic GFR-binding peptide
  MOD_RES (27)..(28): Xaa is C or S

SEQ ID NO: 101172 - protein, 30 aa, Artificial Sequence
  Cyclic GFR-binding peptide
EVVMDSMEGLVVNNAADMIQITINSLRAPV

SEQ ID NO: 101173 - protein, 30 aa, Artificial Sequence; identical to SEQ ID NO: 22936
  Cyclic GFR-binding peptide

SEQ ID NO: 101174 - protein, 39 aa, Artificial Sequence
  Cyclic GFR-binding peptide
  MOD_RES (2)..(33)..(34): Xaa is C or S
KXSKVIMSMEGLIKPTKGIMIQITINSLDQSVXXPSASA

SEQ ID NO: 101175 - protein, 40 aa, Artificial Sequence; identical to SEQ ID NO: 22938
  Cyclic GFR-binding peptide
  MOD_RES (2)..(4): Xaa is C or S

SEQ ID NO: 101176 - protein, 34 aa, Artificial Sequence; identical to SEQ ID NO: 68305
  Cyclic GFR-binding peptide
  MOD_RES (30)..(31): Xaa is C or S

SEQ ID NO: 101177 - protein, 34 aa, Artificial Sequence
  Cyclic GFR-binding peptide
  MOD_RES (29)..(30): Xaa is C or S
VIMSMEGILLVRGNDMIQMTINSTKVPAXXTSPV

SEQ ID NO: 101178 - protein, 38 aa, Artificial Sequence
  Cyclic GFR-binding peptide
  MOD_RES (1)..(32)..(33): Xaa is C or S
XSKVIMSMEGLIKPTKGIMIQITINSLDQSVXXPSASA

SEQ ID NO: 101179 - protein, 21 aa, Artificial Sequence
  Cyclic GFR-binding peptide
GSMEGIIIQQKDNMIQMTINS

SEQ ID NO: 101180 - protein, 33 aa, Artificial Sequence
  Cyclic GFR-binding peptide
  MOD_RES (28)..(29): Xaa is C or S
IMSMEGLLLVRGNDMIQMTINSTKVPAXXTSPV

SEQ ID NO: 101181 - protein, 33 aa, Artificial Sequence
  Cyclic GFR-binding peptide
  MOD_RES (2)..(2): Xaa is C or S
GXAEVVMDSMEGIVVNNAADMIQITINSLRAPV

SEQ ID NO: 101182 - protein, 35 aa, Artificial Sequence; identical to SEQ ID NO: 22944
  Cyclic GFR-binding peptide

SEQ ID NO: 101183 - protein, 31 aa, Artificial Sequence; identical to SEQ ID NO: 22946
  Cyclic GFR-binding peptide

SEQ ID NO: 101184 - protein, 32 aa, Artificial Sequence
  Cyclic GFR-binding peptide
  MOD_RES (26)..(27): Xaa is C or S
SMEGIIVNSSDDMIQVTINSLKTPAXXPKPVH

SEQ ID NO: 101185 - protein, 40 aa, Artificial Sequence; identical to SEQ ID NO: 22949
  Cyclic GFR-binding peptide
  MOD_RES (1)..(3)..(40): Xaa is C or S

SEQ ID NO: 101186 - protein, 37 aa, Artificial Sequence; identical to SEQ ID NO: 22950
  Cyclic GFR-binding peptide
  MOD_RES (1)..(3)..(37): Xaa is C or S

SEQ ID NO: 101187 - protein, 36 aa, Artificial Sequence; identical to SEQ ID NO: 22952
  Cyclic GFR-binding peptide
  MOD_RES (36)..(36): Xaa is C or S

SEQ ID NO: 101188 - protein, 24 aa, Artificial Sequence
  Cyclic GFR-binding peptide
LRSMEGILKPKKRVYEMIQVTINS

SEQ ID NO: 101189 - protein, 31 aa, Artificial Sequence
  Cyclic GFR-binding peptide
  MOD_RES (27)..(28): Xaa is C or S
MSMEGLVKPTRGVMIQITINSLDQPVXXPSA

SEQ ID NO: 101190 - protein, 28 aa, Artificial Sequence
  Cyclic GFR-binding peptide
ELTSMEGLFIPKKRVIEMIQVTINSLQV

SEQ ID NO: 101191 - protein, 37 aa, Artificial Sequence; identical to SEQ ID NO: 22958
  Cyclic GFR-binding peptide
  MOD_RES (2)..(36): Xaa is C or S

SEQ ID NO: 101192 - protein, 26 aa, Artificial Sequence
  Cyclic GFR-binding peptide
IMSMEGLIKPTKGIMIQITINSLDQS

SEQ ID NO: 101193 - protein, 34 aa, Artificial Sequence; identical to SEQ ID NO: 22962
  Cyclic GFR-binding peptide

SEQ ID NO: 101194 - protein, 35 aa, Artificial Sequence; identical to SEQ ID NO: 22963
  Cyclic GFR-binding peptide
  MOD_RES (31)..(31): Xaa is C or S

SEQ ID NO: 101195 - protein, 28 aa, Artificial Sequence
  Cyclic GFR-binding peptide
  MOD_RES (28)..(28): Xaa is C or S
IMSMEGLLLVRGNDMIQMTINSTKVPAX

SEQ ID NO: 101196 - protein, 40 aa, Artificial Sequence; identical to SEQ ID NO: 22965
  Cyclic GFR-binding peptide
  MOD_RES (37)..(37): Xaa is C or S

SEQ ID NO: 101197 - protein, 27 aa, Artificial Sequence
  Cyclic GFR-binding peptide
  MOD_RES (1)..(1): Xaa is C or S
XSEVVMDSMEGLVVNNASDMIQITINS

SEQ ID NO: 101198 - protein, 39 aa, Artificial Sequence; identical to SEQ ID NO: 68325
  Cyclic GFR-binding peptide
  MOD_RES (1)..(3)..(34)..(35): Xaa is C or S

SEQ ID NO: 101199 - protein, 38 aa, Artificial Sequence
  Cyclic GFR-binding peptide
  MOD_RES (2)..(34)..(35): Xaa is C or S
GXAEVVMDSMEGIVVNNAADMIQITINSLRAPVXXSAP

SEQ ID NO: 101200 - protein, 40 aa, Artificial Sequence; identical to SEQ ID NO: 64957
  Cyclic GFR-binding peptide
  MOD_RES (1)..(3)..(34)..(35): Xaa is C or S

SEQ ID NO: 101201 - protein, 34 aa, Artificial Sequence
  Cyclic GFR-binding peptide
  MOD_RES (29)..(30): Xaa is C or S
VIMSMEGLVKPKRGVMIQITINSLAQPVXXPAAS

SEQ ID NO: 101202 - protein, 26 aa, Artificial Sequence
  Cyclic GFR-binding peptide
  MOD_RES (26)..(26): Xaa is C or S
SMEGLIIQQKDNMIQMTINSMKTPTX

SEQ ID NO: 101203 - protein, 34 aa, Artificial Sequence; identical to SEQ ID NO: 22968
  Cyclic GFR-binding peptide
  MOD_RES (1)..(1): Xaa is C or S

SEQ ID NO: 101204 - protein, 31 aa, Artificial Sequence
  Cyclic GFR-binding peptide
  MOD_RES (31)..(31): Xaa is C or S
EVVMDSMEGLVVNNAADMIQITINSLRAPVX

SEQ ID NO: 101205 - protein, 29 aa, Artificial Sequence
  Cyclic GFR-binding peptide
SRVVMNSMEGLIVNSSDDMIQVTINSLKT

SEQ ID NO: 101206 - protein, 27 aa, Artificial Sequence
  Cyclic GFR-binding peptide
TSMEGIFIPKKRVIEMIQVTINSLQVQ

SEQ ID NO: 101207 - protein, 28 aa, Artificial Sequence
  Cyclic GFR-binding peptide
  MOD_RES (2)..(2): Xaa is C or S
GXEEVIMSMEGLLLVRGNDMIQMTINST

SEQ ID NO: 101208 - protein, 36 aa, Artificial Sequence; identical to SEQ ID NO: 22974
  Cyclic GFR-binding peptide
  MOD_RES (35)..(35): Xaa is C or S

SEQ ID NO: 101209 - protein, 37 aa, Artificial Sequence; identical to SEQ ID NO: 22976
  Cyclic GFR-binding peptide
  MOD_RES (2)..(4): Xaa is C or S

SEQ ID NO: 101210 - protein, 28 aa, Artificial Sequence
  Cyclic GFR-binding peptide
VVMGSMEGLIIQQKDNMIQMTINSMKTP

SEQ ID NO: 101211 - protein, 33 aa, Artificial Sequence
  Cyclic GFR-binding peptide
  MOD_RES (2)..(2): Xaa is C or S
GXRDVVMGSMEGIIIQQKDNMIQMTINSMKTPT

SEQ ID NO: 101212 - protein, 25 aa, Artificial Sequence
  Cyclic GFR-binding peptide
RVIMSMEGLVKPKRGVMIQITINSL

SEQ ID NO: 101213 - protein, 31 aa, Artificial Sequence
  Cyclic GFR-binding peptide
  MOD_RES (27)..(28): Xaa is C or S
DSMEGLVVNNAADMIQITINSLRAPVXXSAP

SEQ ID NO: 101214 - protein, 30 aa, Artificial Sequence
  Cyclic GFR-binding peptide
SEVVMDSMEGLVVNNASDMIQITINSLRTP

SEQ ID NO: 101215 - protein, 35 aa, Artificial Sequence; identical to SEQ ID NO: 22982
  Cyclic GFR-binding peptide
  MOD_RES (1)..(3): Xaa is C or S

SEQ ID NO: 101216 - protein, 26 aa, Artificial Sequence
  Cyclic GFR-binding peptide
TSMEGLFIPKKRVIEMIQVTINSLQV

SEQ ID NO: 101217 - protein, 26 aa, Artificial Sequence
  Cyclic GFR-binding peptide
MDSMEGLVVNNASDMIQITINSLRTP

SEQ ID NO: 101218 - protein, 24 aa, Artificial Sequence
  Cyclic GFR-binding peptide
VMDSMEGLVVNNASDMIQITINSL

SEQ ID NO: 101219 - protein, 33 aa, Artificial Sequence
  Cyclic GFR-binding peptide
  MOD_RES (2)..(4): Xaa is C or S
RXGXSEVVMDSMEGLVVNNASDMIQITINSLRT

SEQ ID NO: 101220 - protein, 32 aa, Artificial Sequence; identical to SEQ ID NO: 22988
  Cyclic GFR-binding peptide
  MOD_RES (1)..(3): Xaa is C or S

SEQ ID NO: 101221 - protein, 32 aa, Artificial Sequence
  Cyclic GFR-binding peptide
  MOD_RES (26)..(27): Xaa is C or S
SMEGILLVRGNDMIQMTINSTKVPAXXTSPVR

SEQ ID NO: 101222 - protein, 43 aa, Artificial Sequence; identical to SEQ ID NO: 22995
  Cyclic GFR-binding peptide
  MOD_RES (1)..(3)..(40): Xaa is C or S

SEQ ID NO: 101223 - protein, 35 aa, Artificial Sequence
  Cyclic GFR-binding peptide
  MOD_RES (2)..(33)..(34): Xaa is C or S
KXSKVVMSMEGLVKPTRGVMIQITINSLDQPVXXP

SEQ ID NO: 101224 - protein, 25 aa, Artificial Sequence
  Cyclic GFR-binding peptide
SMEGIVKPKRGVMIQITINSLAQPV

SEQ ID NO: 101225 - protein, 30 aa, Artificial Sequence
  Cyclic GFR-binding peptide
  MOD_RES (1)..(3): Xaa is C or S
XGXAEVVMDSMEGLVVNNAADMIQITINSL

SEQ ID NO: 101226 - protein, 34 aa, Artificial Sequence
  Cyclic GFR-binding peptide
  MOD_RES (32)..(33): Xaa is C or S
SEVVMDSMEGLVVNNASDMIQITINSLRTPVXXT

SEQ ID NO: 101227 - protein, 34 aa, Artificial Sequence
  Cyclic GFR-binding peptide
  MOD_RES (29)..(30): Xaa is C or S
VMNSMEGLIVNSSDDMIQVTINSLKTPAXXPKPV

SEQ ID NO: 101228 - protein, 33 aa, Artificial Sequence
  Cyclic GFR-binding peptide
  MOD_RES (2)..(2): Xaa is C or S
GXAEVVMDSMEGLVVNNAADMIQITINSLRAPV

SEQ ID NO: 101229 - protein, 33 aa, Artificial Sequence; identical to SEQ ID NO: 23000
  Cyclic GFR-binding peptide

SEQ ID NO: 101230 - protein, 31 aa, Artificial Sequence
  Cyclic GFR-binding peptide
  MOD_RES (29)..(30): Xaa is C or S
VMDSMEGIVVNNASDMIQITINSLRTPVXXT

SEQ ID NO: 101231 - protein, 32 aa, Artificial Sequence
  Cyclic GFR-binding peptide
  MOD_RES (1)..(3): Xaa is C or S
XGXRDVVMGSMEGIIIQQKDNMIQMTINSMKT

SEQ ID NO: 101232 - protein, 28 aa, Artificial Sequence
  Cyclic GFR-binding peptide
ELRSMEGILKPKKRVYEMIQVTINSHHV

SEQ ID NO: 101233 - protein, 32 aa, Artificial Sequence; identical to SEQ ID NO: 68346
  Cyclic GFR-binding peptide
  MOD_RES (2)..(4): Xaa is C or S

SEQ ID NO: 101234 - protein, 35 aa, Artificial Sequence
  Cyclic GFR-binding peptide
  MOD_RES (31)..(32): Xaa is C or S
DVVMGSMEGLIIQQKDNMIQMTINSMKTPTXXPGA

SEQ ID NO: 101235 - protein, 36 aa, Artificial Sequence; identical to SEQ ID NO: 64992
  Cyclic GFR-binding peptide
  MOD_RES (1)..(3)..(34)..(35): Xaa is C or S

SEQ ID NO: 101236 - protein, 22 aa, Artificial Sequence
  Cyclic GFR-binding peptide
MGSMEGIIIQQKDNMIQMTINS

SEQ ID NO: 101237 - protein, 35 aa, Artificial Sequence; identical to SEQ ID NO: 64994
  Cyclic GFR-binding peptide
  MOD_RES (2)..(33)..(34): Xaa is C or S

SEQ ID NO: 101238 - protein, 30 aa, Artificial Sequence; identical to SEQ ID NO: 64995
  Cyclic GFR-binding peptide

SEQ ID NO: 101239 - protein, 39 aa, Artificial Sequence; identical to SEQ ID NO: 64996
  Cyclic GFR-binding peptide
  MOD_RES (2)..(33)..(34): Xaa is C or S

SEQ ID NO: 101240 - protein, 33 aa, Artificial Sequence; identical to SEQ ID NO: 23016
  Cyclic GFR-binding peptide
  MOD_RES (1)..(3): Xaa is C or S

SEQ ID NO: 101241 - protein, 24 aa, Artificial Sequence
  Cyclic GFR-binding peptide
LTSMEGIFIPKKRVIEMIQVTINS

SEQ ID NO: 101242 - protein, 28 aa, Artificial Sequence
  Cyclic GFR-binding peptide
  MOD_RES (1)..(1): Xaa is C or S
XAEVVMDSMEGLVVNNAADMIQITINSL

SEQ ID NO: 101243 - protein, 30 aa, Artificial Sequence; identical to SEQ ID NO: 23025
  Cyclic GFR-binding peptide

SEQ ID NO: 101244 - protein, 35 aa, Artificial Sequence; identical to SEQ ID NO: 23027
  Cyclic GFR-binding peptide
  MOD_RES (2)..(4): Xaa is C or S

SEQ ID NO: 101245 - protein, 28 aa, Artificial Sequence
  Cyclic GFR-binding peptide
  MOD_RES (2)..(2): Xaa is C or S
KXSRVIMSMEGIVKPKRGVMIQITINSL

SEQ ID NO: 101246 - protein, 28 aa, Artificial Sequence
  Cyclic GFR-binding peptide
LFSMEGIHQGQHPKIRMIQMTINSEETP

SEQ ID NO: 101247 - protein, 26 aa, Artificial Sequence
  Cyclic GFR-binding peptide
DSMEGIVVNNAADMIQITINSLRAPV

SEQ ID NO: 101248 - protein, 34 aa, Artificial Sequence; identical to SEQ ID NO: 23029
  Cyclic GFR-binding peptide
  MOD_RES (1)..(3): Xaa is C or S

SEQ ID NO: 101249 - protein, 34 aa, Artificial Sequence; identical to SEQ ID NO: 65005
  Cyclic GFR-binding peptide
  MOD_RES (31)..(32): Xaa is C or S

SEQ ID NO: 101250 - protein, 28 aa, Artificial Sequence
  Cyclic GFR-binding peptide
SEVVMDSMEGLVVNNASDMIQITINSLR

SEQ ID NO: 101251 - protein, 30 aa, Artificial Sequence
  Cyclic GFR-binding peptide
  MOD_RES (26)..(27): Xaa is C or S
SMEGLVVNNAADMIQITINSLRAPVXXSAP

SEQ ID NO: 101252 - protein, 25 aa, Artificial Sequence
  Cyclic GFR-binding peptide
EVVMDSMEGIVVNNASDMIQITINS

SEQ ID NO: 101253 - protein, 34 aa, Artificial Sequence; identical to SEQ ID NO: 65008
  Cyclic GFR-binding peptide
  MOD_RES (1)..(32)..(33): Xaa is C or S

SEQ ID NO: 101254 - protein, 27 aa, Artificial Sequence
  Cyclic GFR-binding peptide
EVVMDSMEGLVVNNASDMIQITINSLR

SEQ ID NO: 101255 - protein, 26 aa, Artificial Sequence
  Cyclic GFR-binding peptide
VVMDSMEGLVVNNASDMIQITINSLR

SEQ ID NO: 101256 - protein, 30 aa, Artificial Sequence; identical to SEQ ID NO: 23033
  Cyclic GFR-binding peptide
  MOD_RES (1)..(1): Xaa is C or S

SEQ ID NO: 101257 - protein, 40 aa, Artificial Sequence; identical to SEQ ID NO: 23034
  Cyclic GFR-binding peptide
  MOD_RES (36)..(36): Xaa is C or S

SEQ ID NO: 101258 - protein, 30 aa, Artificial Sequence; identical to SEQ ID NO: 23037
  Cyclic GFR-binding peptide

SEQ ID NO: 101259 - protein, 28 aa, Artificial Sequence
  Cyclic GFR-binding peptide
EVVMDSMEGIVVNNASDMIQITINSLRT

SEQ ID NO: 101260 - protein, 31 aa, Artificial Sequence
  Cyclic GFR-binding peptide
  MOD_RES (1)..(3): Xaa is C or S
XKXSRVIMSMEGLVKPKRGVMIQITINSLAQ

SEQ ID NO: 101261 - protein, 39 aa, Artificial Sequence
  Cyclic GFR-binding peptide
  MOD_RES (2)..(4)..(36)..(37): Xaa is C or S
RXGXAEVVMDSMEGIVVNNAADMIQITINSLRAPVXXSA

SEQ ID NO: 101262 - protein, 22 aa, Artificial Sequence
  Cyclic GFR-binding peptide
MDSMEGIVVNNASDMIQITINS

SEQ ID NO: 101263 - protein, 38 aa, Artificial Sequence; identical to SEQ ID NO: 65015
  Cyclic GFR-binding peptide
  MOD_RES (1)..(3)..(34)..(35): Xaa is C or S

SEQ ID NO: 101264 - protein, 31 aa, Artificial Sequence
  Cyclic GFR-binding peptide
  MOD_RES (27)..(28): Xaa is C or S
MSMEGLLLVRGNDMIQMTINSTKVPAXXTSP

SEQ ID NO: 101265 - protein, 42 aa, Artificial Sequence; identical to SEQ ID NO: 23046
  Cyclic GFR-binding peptide
  MOD_RES (2)..(4)..(41): Xaa is C or S

SEQ ID NO: 101266 - protein, 28 aa, Artificial Sequence
  Cyclic GFR-binding peptide
  MOD_RES (1)..(1): Xaa is C or S
XSKVIMSMEGLIKPTKGIMIQITINSLD

SEQ ID NO: 101267 - protein, 32 aa, Artificial Sequence; identical to SEQ ID NO: 23048
  Cyclic GFR-binding peptide
  MOD_RES (1)..(1): Xaa is C or S

SEQ ID NO: 101268 - protein, 30 aa, Artificial Sequence
  Cyclic GFR-binding peptide
  MOD_RES (2)..(4): Xaa is C or S
SXGXRDVVMGSMEGIIIQQKDNMIQMTINS

SEQ ID NO: 101269 - protein, 26 aa, Artificial Sequence
  Cyclic GFR-binding peptide
EVVMDSMEGIVVNNAADMIQITINSL

SEQ ID NO: 101270 - protein, 35 aa, Artificial Sequence; identical to SEQ ID NO: 23054
  Cyclic GFR-binding peptide
  MOD_RES (32)..(32): Xaa is C or S

SEQ ID NO: 101271 - protein, 30 aa, Artificial Sequence
  Cyclic GFR-binding peptide
DVVMGSMEGLIIQQKDNMIQMTINSMKTPT

SEQ ID NO: 101272 - protein, 34 aa, Artificial Sequence
  Cyclic GFR-binding peptide
  MOD_RES (2)..(33)..(34): Xaa is C or S
KXSKVVMSMEGLVKPTRGVMIQITINSLDQPVXX

SEQ ID NO: 101273 - protein, 32 aa, Artificial Sequence
  Cyclic GFR-binding peptide
  MOD_RES (27)..(28): Xaa is C or S
MSMEGLVKPKRGVMIQITINSLAQPVXXPAAS

SEQ ID NO: 101274 - protein, 30 aa, Artificial Sequence
  Cyclic GFR-binding peptide
  MOD_RES (1)..(1): Xaa is C or S
XSEVVMDSMEGIVVNNASDMIQITINSLRT

SEQ ID NO: 101275 - protein, 33 aa, Artificial Sequence
  Cyclic GFR-binding peptide
  MOD_RES (27)..(28): Xaa is C or S
DSMEGLVVNNASDMIQITINSLRTPVXXTPPTS

SEQ ID NO: 101276 - protein, 28 aa, Artificial Sequence
  Cyclic GFR-binding peptide
  MOD_RES (1)..(1): Xaa is C or S
XRDVVMGSMEGLIIQQKDNMIQMTINSM

SEQ ID NO: 101277 - protein, 33 aa, Artificial Sequence; identical to SEQ ID NO: 68400
  Cyclic GFR-binding peptide
  MOD_RES (2)..(4): Xaa is C or S

SEQ ID NO: 101278 - protein, 26 aa, Artificial Sequence
  Cyclic GFR-binding peptide
VMNSMEGIIVNSSDDMIQVTINSLKT

SEQ ID NO: 101279 - protein, 28 aa, Artificial Sequence
  Cyclic GFR-binding peptide
SMEGIFIPKKRVIEMIQVTINSLQVQTP

SEQ ID NO: 101280 - protein, 32 aa, Artificial Sequence
  Cyclic GFR-binding peptide
  MOD_RES (28)..(29): Xaa is C or S
MGSMEGIIIQQKDNMIQMTINSMKTPTXXPGA

SEQ ID NO: 101281 - protein, 39 aa, Artificial Sequence; identical to SEQ ID NO: 65038
  Cyclic GFR-binding peptide
  MOD_RES (2)..(33)..(34): Xaa is C or S

SEQ ID NO: 101282 - protein, 34 aa, Artificial Sequence
  Cyclic GFR-binding peptide
  MOD_RES (28)..(29): Xaa is C or S
MGSMEGIIIQQKDNMIQMTINSMKTPTXXPGASG

SEQ ID NO: 101283 - protein, 29 aa, Artificial Sequence
  Cyclic GFR-binding peptide
  MOD_RES (27)..(28): Xaa is C or S
DSMEGLVVNNAADMIQITINSLRAPVXXS

SEQ ID NO: 101284 - protein, 30 aa, Artificial Sequence; identical to SEQ ID NO: 23064
  Cyclic GFR-binding peptide

SEQ ID NO: 101285 - protein, 35 aa, Artificial Sequence; identical to SEQ ID NO: 23065
  Cyclic GFR-binding peptide
  MOD_RES (33)..(33): Xaa is C or S

SEQ ID NO: 101286 - protein, 33 aa, Artificial Sequence; identical to SEQ ID NO: 68406
  Cyclic GFR-binding peptide
  MOD_RES (2)..(4): Xaa is C or S

SEQ ID NO: 101287 - protein, 27 aa, Artificial Sequence
  Cyclic GFR-binding peptide
  MOD_RES (1)..(1): Xaa is C or S
XSEVVMDSMEGIVVNNASDMIQITINS

SEQ ID NO: 101288 - protein, 34 aa, Artificial Sequence
  Cyclic GFR-binding peptide
  MOD_RES (29)..(30): Xaa is C or S
VMDSMEGLVVNNAADMIQITINSLRAPVXXSAPA

SEQ ID NO: 101289 - protein, 37 aa, Artificial Sequence
  Cyclic GFR-binding peptide
  MOD_RES (2)..(4)..(35)..(36): Xaa is C or S
SXKXSKVVMSMEGLVKPTRGVMIQITINSLDQPVXXP

SEQ ID NO: 101290 - protein, 34 aa, Artificial Sequence
  Cyclic GFR-binding peptide
  MOD_RES (31)..(32): Xaa is C or S
SRVIMSMEGLVKPKRGVMIQITINSLAQPVXXPA

SEQ ID NO: 101291 - protein, 41 aa, Artificial Sequence
  Cyclic GFR-binding peptide
  MOD_RES (2)..(4)..(35)..(36): Xaa is C or S
LXGXEEVIMSMEGLLLVRGNDMIQMTINSTKVPAXXTSPVR

SEQ ID NO: 101292 - protein, 32 aa, Artificial Sequence
  Cyclic GFR-binding peptide
  MOD_RES (1)..(3): Xaa is C or S
XKXSRVIMSMEGLVKPKRGVMIQITINSLAQP

SEQ ID NO: 101293 - protein, 32 aa, Artificial Sequence
  Cyclic GFR-binding peptide
  MOD_RES (1)..(3): Xaa is C or S
XKXSKVIMSMEGLIKPTKGIMIQITINSLDQS

SEQ ID NO: 101294 - protein, 32 aa, Artificial Sequence; identical to SEQ ID NO: 23076
  Cyclic GFR-binding peptide
  MOD_RES (1)..(1): Xaa is C or S

SEQ ID NO: 101295 - protein, 34 aa, Artificial Sequence
  Cyclic GFR-binding peptide
  MOD_RES (32)..(33): Xaa is C or S
RDVVMGSMEGLIIQQKDNMIQMTINSMKTPTXXP

SEQ ID NO: 101296 - protein, 32 aa, Artificial Sequence; identical to SEQ ID NO: 23078
  Cyclic GFR-binding peptide
  MOD_RES (28)..(28): Xaa is C or S

SEQ ID NO: 101297 - protein, 33 aa, Artificial Sequence; identical to SEQ ID NO: 23080
  Cyclic GFR-binding peptide

SEQ ID NO: 101298 - protein, 26 aa, Artificial Sequence
  Cyclic GFR-binding peptide
LRSMEGILKPKKRVYEMIQVTINSHH

SEQ ID NO: 101299 - protein, 33 aa, Artificial Sequence
  Cyclic GFR-binding peptide
  MOD_RES (28)..(29): Xaa is C or S
MGSMEGIIIQQKDNMIQMTINSMKTPTXXPGAS

SEQ ID NO: 101300 - protein, 23 aa, Artificial Sequence
  Cyclic GFR-binding peptide
RSMEGILKPKKRVYEMIQVTINS

SEQ ID NO: 101301 - protein, 25 aa, Artificial Sequence
  Cyclic GFR-binding peptide
SMEGIIIQQKDNMIQMTINSMKTPT

SEQ ID NO: 101302 - protein, 36 aa, Artificial Sequence; identical to SEQ ID NO: 23086
  Cyclic GFR-binding peptide
  MOD_RES (1)..(1): Xaa is C or S

SEQ ID NO: 101303 - protein, 26 aa, Artificial Sequence
  Cyclic GFR-binding peptide
VMGSMEGIIIQQKDNMIQMTINSMKT

SEQ ID NO: 101304 - protein, 30 aa, Artificial Sequence; identical to SEQ ID NO: 65055
  Cyclic GFR-binding peptide
  MOD_RES (29)..(30): Xaa is C or S

SEQ ID NO: 101305 - protein, 22 aa, Artificial Sequence
  Cyclic GFR-binding peptide
NSMEGLIVNSSDDMIQVTINSL

SEQ ID NO: 101306 - protein, 25 aa, Artificial Sequence
  Cyclic GFR-binding peptide
VVMDSMEGLVVNNAADMIQITINSL

SEQ ID NO: 101307 - protein, 34 aa, Artificial Sequence
  Cyclic GFR-binding peptide
  MOD_RES (2)..(33)..(34): Xaa is C or S
GXEEVIMSMEGLLLVRGNDMIQMTINSTKVPAXX

SEQ ID NO: 101308 - protein, 29 aa, Artificial Sequence
  Cyclic GFR-binding peptide
HEELRSMEGILKPKKRVYEMIQVTINSHH

SEQ ID NO: 101309 - protein, 21 aa, Artificial Sequence
  Cyclic GFR-binding peptide
MSMEGLVKPTRGVMIQITINS

SEQ ID NO: 101310 - protein, 34 aa, Artificial Sequence
  Cyclic GFR-binding peptide
  MOD_RES (2)..(33)..(34): Xaa is C or S
GXEEVIMSMEGILLVRGNDMIQMTINSTKVPAXX

SEQ ID NO: 101311 - protein, 27 aa, Artificial Sequence
  Cyclic GFR-binding peptide
LFSMEGLHQGQHPKIRMIQMTINSEET

SEQ ID NO: 101312 - protein, 20 aa, Artificial Sequence
  Cyclic GFR-binding peptide
SMEGLIVNSSDDMIQVTINS

SEQ ID NO: 101313 - protein, 32 aa, Artificial Sequence; identical to SEQ ID NO: 68438
  Cyclic GFR-binding peptide
  MOD_RES (2)..(2): Xaa is C or S

SEQ ID NO: 101314 - protein, 26 aa, Artificial Sequence
  Cyclic GFR-binding peptide
VVMGSMEGLIIQQKDNMIQMTINSMK

SEQ ID NO: 101315 - protein, 25 aa, Artificial Sequence
  Cyclic GFR-binding peptide
EVIMSMEGLLLVRGNDMIQMTINST

SEQ ID NO: 101316 - protein, 34 aa, Artificial Sequence
  Cyclic GFR-binding peptide
  MOD_RES (29)..(30): Xaa is C or S
VMGSMEGIIIQQKDNMIQMTINSMKTPTXXPGAS

SEQ ID NO: 101317 - protein, 29 aa, Artificial Sequence
  Cyclic GFR-binding peptide
  MOD_RES (1)..(3): Xaa is C or S
XGXAEVVMDSMEGIVVNNAADMIQITINS

SEQ ID NO: 101318 - protein, 33 aa, Artificial Sequence
  Cyclic GFR-binding peptide
  MOD_RES (31)..(32): Xaa is C or S
EVVMDSMEGLVVNNAADMIQITINSLRAPVXXS

SEQ ID NO: 101319 - protein, 31 aa, Artificial Sequence; identical to SEQ ID NO: 23111
  Cyclic GFR-binding peptide
  MOD_RES (30)..(30): Xaa is C or S

SEQ ID NO: 101320 - protein, 35 aa, Artificial Sequence
  Cyclic GFR-binding peptide
  MOD_RES (30)..(31): Xaa is C or S
EVIMSMEGILLVRGNDMIQMTINSTKVPAXXTSPV

SEQ ID NO: 101321 - protein, 37 aa, Artificial Sequence
  Cyclic GFR-binding peptide
  MOD_RES (2)..(34)..(35): Xaa is C or S
GXAEVVMDSMEGLVVNNAADMIQITINSLRAPVXXSA

SEQ ID NO: 101322 - protein, 40 aa, Artificial Sequence
  Cyclic GFR-binding peptide
  MOD_RES (2)..(4)..(36)..(37): Xaa is C or S
RXGXAEVVMDSMEGLVVNNAADMIQITINSLRAPVXXSAP

SEQ ID NO: 101323 - protein, 29 aa, Artificial Sequence
  Cyclic GFR-binding peptide
  MOD_RES (28)..(29): Xaa is C or S
IMSMEGLLLVRGNDMIQMTINSTKVPAXX

SEQ ID NO: 101324 - protein, 35 aa, Artificial Sequence; identical to SEQ ID NO: 23124
  Cyclic GFR-binding peptide
  MOD_RES (1)..(1): Xaa is C or S

SEQ ID NO: 101325 - protein, 30 aa, Artificial Sequence
  Cyclic GFR-binding peptide
  MOD_RES (30)..(30): Xaa is C or S
VVMGSMEGIIIQQKDNMIQMTINSMKTPTX

SEQ ID NO: 101326 - protein, 31 aa, Artificial Sequence
  Cyclic GFR-binding peptide
  MOD_RES (28)..(29): Xaa is C or S
MNSMEGLIVNSSDDMIQVTINSLKTPAXXPK

SEQ ID NO: 101327 - protein, 34 aa, Artificial Sequence; identical to SEQ ID NO: 23126
  Cyclic GFR-binding peptide
  MOD_RES (34)..(34): Xaa is C or S

SEQ ID NO: 101328 - protein, 35 aa, Artificial Sequence
  Cyclic GFR-binding peptide
  MOD_RES (30)..(31): Xaa is C or S
VVMDSMEGLVVNNAADMIQITINSLRAPVXXSAPA

SEQ ID NO: 101329 - protein, 31 aa, Artificial Sequence
  Cyclic GFR-binding peptide
  MOD_RES (30)..(31): Xaa is C or S
VVMDSMEGIVVNNAADMIQITINSLRAPVXX

SEQ ID NO: 101330 - protein, 30 aa, Artificial Sequence; identical to SEQ ID NO: 23129
  Cyclic GFR-binding peptide

SEQ ID NO: 101331 - protein, 26 aa, Artificial Sequence
  Cyclic GFR-binding peptide
KVIMSMEGLIKPTKGIMIQITINSLD

SEQ ID NO: 101332 - protein, 33 aa, Artificial Sequence; identical to SEQ ID NO: 68456
  Cyclic GFR-binding peptide
  MOD_RES (2)..(33): Xaa is C or S

SEQ ID NO: 101333 - protein, 24 aa, Artificial Sequence
  Cyclic GFR-binding peptide
DSMEGLVVNNASDMIQITINSLRT

SEQ ID NO: 101334 - protein, 35 aa, Artificial Sequence; identical to SEQ ID NO: 23132
  Cyclic GFR-binding peptide
  MOD_RES (1)..(3): Xaa is C or S

SEQ ID NO: 101335 - protein, 32 aa, Artificial Sequence; identical to SEQ ID NO: 65082
  Cyclic GFR-binding peptide
  MOD_RES (2)..(4): Xaa is C or S

SEQ ID NO: 101336 - protein, 25 aa, Artificial Sequence
  Cyclic GFR-binding peptide
SMEGIVKPTRGVMIQITINSLDQPV

SEQ ID NO: 101337 - protein, 36 aa, Artificial Sequence; identical to SEQ ID NO: 23134
  Cyclic GFR-binding peptide
  MOD_RES (1)..(1): Xaa is C or S

SEQ ID NO: 101338 - protein, 36 aa, Artificial Sequence; identical to SEQ ID NO: 23137
  Cyclic GFR-binding peptide
  MOD_RES (35)..(35): Xaa is C or S

SEQ ID NO: 101339 - protein, 33 aa, Artificial Sequence; identical to SEQ ID NO: 23138
  Cyclic GFR-binding peptide

SEQ ID NO: 101340 - protein, 37 aa, Artificial Sequence
  Cyclic GFR-binding peptide
  MOD_RES (2)..(34)..(35): Xaa is C or S
GXSRVVMNSMEGLIVNSSDDMIQVTINSLKTPAXXPK

SEQ ID NO: 101341 - protein, 25 aa, Artificial Sequence
  Cyclic GFR-binding peptide
MSMEGIVKPTRGVMIQITINSLDQP

SEQ ID NO: 101342 - protein, 34 aa, Artificial Sequence
  Cyclic GFR-binding peptide
  MOD_RES (2)..(34): Xaa is C or S
GXRDVVMGSMEGLIIQQKDNMIQMTINSMKTPTX

SEQ ID NO: 101343 - protein, 29 aa, Artificial Sequence
  Cyclic GFR-binding peptide
LHDELTSMEGLFIPKKRVIEMIQVTINSL

SEQ ID NO: 101344 - protein, 37 aa, Artificial Sequence; identical to SEQ ID NO: 68464
  Cyclic GFR-binding peptide
  MOD_RES (2)..(33)..(34): Xaa is C or S

SEQ ID NO: 101345 - protein, 26 aa, Artificial Sequence
  Cyclic GFR-binding peptide
MDSMEGLVVNNAADMIQITINSLRAP

SEQ ID NO: 101346 - protein, 37 aa, Artificial Sequence
  Cyclic GFR-binding peptide
  MOD_RES (2)..(33)..(34): Xaa is C or S
KXSRVIMSMEGLVKPKRGVMIQITINSLAQPVXXPAA

SEQ ID NO: 101347 - protein, 33 aa, Artificial Sequence; identical to SEQ ID NO: 23147
  Cyclic GFR-binding peptide
  MOD_RES (32)..(32): Xaa is C or S

SEQ ID NO: 101348 - protein, 36 aa, Artificial Sequence
  Cyclic GFR-binding peptide
  MOD_RES (30)..(31): Xaa is C or S
VVMDSMEGIVVNNASDMIQITINSLRTPVXXTPPTS

SEQ ID NO: 101349 - protein, 35 aa, Artificial Sequence
  Cyclic GFR-binding peptide
  MOD_RES (2)..(4)..(35): Xaa is C or S
LXGXEEVIMSMEGILLVRGNDMIQMTINSTKVPAX

SEQ ID NO: 101350 - protein, 32 aa, Artificial Sequence
  Cyclic GFR-binding peptide
  MOD_RES (1)..(3): Xaa is C or S
XGXRDVVMGSMEGLIIQQKDNMIQMTINSMKT

SEQ ID NO: 101351 - protein, 26 aa, Artificial Sequence
  Cyclic GFR-binding peptide
IMSMEGILLVRGNDMIQMTINSTKVP

SEQ ID NO: 101352 - protein, 29 aa, Artificial Sequence
  Cyclic GFR-binding peptide
  MOD_RES (28)..(29): Xaa is C or S
IMSMEGLIKPTKGIMIQITINSLDQSVXX

SEQ ID NO: 101353 - protein, 35 aa, Artificial Sequence; identical to SEQ ID NO: 23153
  Cyclic GFR-binding peptide
  MOD_RES (34)..(34): Xaa is C or S

SEQ ID NO: 101354 - protein, 27 aa, Artificial Sequence
  Cyclic GFR-binding peptide
SRVVMNSMEGLIVNSSDDMIQVTINSL

SEQ ID NO: 101355 - protein, 30 aa, Artificial Sequence
  Cyclic GFR-binding peptide
  MOD_RES (2)..(2): Xaa is C or S
GXSEVVMDSMEGIVVNNASDMIQITINSLR

SEQ ID NO: 101356 - protein, 28 aa, Artificial Sequence
  Cyclic GFR-binding peptide
EEVIMSMEGILLVRGNDMIQMTINSTKV

SEQ ID NO: 101357 - protein, 29 aa, Artificial Sequence
  Cyclic GFR-binding peptide
  MOD_RES (2)..(2): Xaa is C or S
GXAEVVMDSMEGLVVNNAADMIQITINSL

SEQ ID NO: 101358 - protein, 36 aa, Artificial Sequence; identical to SEQ ID NO: 23158
  Cyclic GFR-binding peptide
  MOD_RES (33)..(33): Xaa is C or S

SEQ ID NO: 101359 - protein, 24 aa, Artificial Sequence
  Cyclic GFR-binding peptide
SMEGLVKPKRGVMIQITINSLAQP

SEQ ID NO: 101360 - protein, 37 aa, Artificial Sequence; identical to SEQ ID NO: 23163
  Cyclic GFR-binding peptide
  MOD_RES (1)..(3): Xaa is C or S

SEQ ID NO: 101361 - protein, 28 aa, Artificial Sequence
  Cyclic GFR-binding peptide
DELTSMEGLFIPKKRVIEMIQVTINSLQ

SEQ ID NO: 101362 - protein, 27 aa, Artificial Sequence
  Cyclic GFR-binding peptide
VMSMEGLVKPTRGVMIQITINSLDQPV

SEQ ID NO: 101363 - protein, 43 aa, Artificial Sequence; identical to SEQ ID NO: 23169
  Cyclic GFR-binding peptide
  MOD_RES (1)..(3)..(37): Xaa is C or S

SEQ ID NO: 101364 - protein, 33 aa, Artificial Sequence; identical to SEQ ID NO: 23170
  Cyclic GFR-binding peptide
  MOD_RES (29)..(29): Xaa is C or S

SEQ ID NO: 101365 - protein, 45 aa, Artificial Sequence; identical to SEQ ID NO: 23171
  Cyclic GFR-binding peptide
  MOD_RES (2)..(4)..(41): Xaa is C or S

SEQ ID NO: 101366 - protein, 28 aa, Artificial Sequence
  Cyclic GFR-binding peptide
ELRSMEGLLKPKKRVYEMIQVTINSHHV

SEQ ID NO: 101367 - protein, 37 aa, Artificial Sequence
  Cyclic GFR-binding peptide
  MOD_RES (2)..(34)..(35): Xaa is C or S
GXAEVVMDSMEGIVVNNAADMIQITINSLRAPVXXSA

SEQ ID NO: 101368 - protein, 34 aa, Artificial Sequence; identical to SEQ ID NO: 23177
  Cyclic GFR-binding peptide

SEQ ID NO: 101369 - protein, 32 aa, Artificial Sequence; identical to SEQ ID NO: 23179
  Cyclic GFR-binding peptide

SEQ ID NO: 101370 - protein, 26 aa, Artificial Sequence
  Cyclic GFR-binding peptide
LFSMEGIHQGQHPKIRMIQMTINSEE

SEQ ID NO: 101371 - protein, 26 aa, Artificial Sequence
  Cyclic GFR-binding peptide
  MOD_RES (1)..(1): Xaa is C or S
XSKVIMSMEGIIKPTKGIMIQITINS

SEQ ID NO: 101372 - protein, 33 aa, Artificial Sequence; identical to SEQ ID NO: 23183
  Cyclic GFR-binding peptide
  MOD_RES (2)..(4): Xaa is C or S

SEQ ID NO: 101373 - protein, 21 aa, Artificial Sequence
  Cyclic GFR-binding peptide
MSMEGIVKPKRGVMIQITINS

SEQ ID NO: 101374 - protein, 35 aa, Artificial Sequence; identical to SEQ ID NO: 65119
  Cyclic GFR-binding peptide
  MOD_RES (31)..(32): Xaa is C or S

SEQ ID NO: 101375 - protein, 28 aa, Artificial Sequence
  Cyclic GFR-binding peptide
TSMEGLFIPKKRVIEMIQVTINSLQVQT

SEQ ID NO: 101376 - protein, 34 aa, Artificial Sequence; identical to SEQ ID NO: 68505
  Cyclic GFR-binding peptide
  MOD_RES (2)..(4): Xaa is C or S

SEQ ID NO: 101377 - protein, 31 aa, Artificial Sequence
  Cyclic GFR-binding peptide
  MOD_RES (31)..(31): Xaa is C or S
EVVMDSMEGLVVNNASDMIQITINSLRTPVX

SEQ ID NO: 101378 - protein, 33 aa, Artificial Sequence
  Cyclic GFR-binding peptide
  MOD_RES (2)..(33): Xaa is C or S
GXEEVIMSMEGLLLVRGNDMIQMTINSTKVPAX

SEQ ID NO: 101379 - protein, 33 aa, Artificial Sequence; identical to SEQ ID NO: 65126
  Cyclic GFR-binding peptide
  MOD_RES (1)..(32)..(33): Xaa is C or S

SEQ ID NO: 101380 - protein, 28 aa, Artificial Sequence
  Cyclic GFR-binding peptide
VVMDSMEGLVVNNASDMIQITINSLRTP

SEQ ID NO: 101381 - protein, 41 aa, Artificial Sequence; identical to SEQ ID NO: 23194
  Cyclic GFR-binding peptide
  MOD_RES (2)..(39): Xaa is C or S

SEQ ID NO: 101382 - protein, 29 aa, Artificial Sequence
  Cyclic GFR-binding peptide
  MOD_RES (26)..(27): Xaa is C or S
SMEGIIKPTKGIMIQITINSLDQSVXXPS

SEQ ID NO: 101383 - protein, 30 aa, Artificial Sequence
  Cyclic GFR-binding peptide
  MOD_RES (2)..(2): Xaa is C or S
GXRDVVMGSMEGIIIQQKDNMIQMTINSMK

SEQ ID NO: 101384 - protein, 34 aa, Artificial Sequence; identical to SEQ ID NO: 68519
  Cyclic GFR-binding peptide
  MOD_RES (2)..(33)..(34): Xaa is C or S

SEQ ID NO: 101385 - protein, 30 aa, Artificial Sequence
  Cyclic GFR-binding peptide
  MOD_RES (27)..(28): Xaa is C or S
DSMEGIVVNNAADMIQITINSLRAPVXXSA

SEQ ID NO: 101386 - protein, 25 aa, Artificial Sequence
  Cyclic GFR-binding peptide
VMSMEGIVKPTRGVMIQITINSLDQ

SEQ ID NO: 101387 - protein, 25 aa, Artificial Sequence
  Cyclic GFR-binding peptide
VVMDSMEGIVVNNASDMIQITINSL

SEQ ID NO: 101388 - protein, 35 aa, Artificial Sequence
  Cyclic GFR-binding peptide
  MOD_RES (2)..(4)..(35): Xaa is C or S
LXGXEEVIMSMEGLLLVRGNDMIQMTINSTKVPAX

SEQ ID NO: 101389 - protein, 39 aa, Artificial Sequence; identical to SEQ ID NO: 23202
  Cyclic GFR-binding peptide
  MOD_RES (1)..(38): Xaa is C or S

SEQ ID NO: 101390 - protein, 42 aa, Artificial Sequence; identical to SEQ ID NO: 23205
  Cyclic GFR-binding peptide
  MOD_RES (1)..(38): Xaa is C or S

SEQ ID NO: 101391 - protein, 30 aa, Artificial Sequence
  Cyclic GFR-binding peptide
  MOD_RES (29)..(30): Xaa is C or S
VVMSMEGLVKPTRGVMIQITINSLDQPVXX

SEQ ID NO: 101392 - protein, 37 aa, Artificial Sequence; identical to SEQ ID NO: 23208
  Cyclic GFR-binding peptide
  MOD_RES (2)..(4): Xaa is C or S

SEQ ID NO: 101393 - protein, 31 aa, Artificial Sequence; identical to SEQ ID NO: 23209
  Cyclic GFR-binding peptide
  MOD_RES (1)..(1): Xaa is C or S

SEQ ID NO: 101394 - protein, 31 aa, Artificial Sequence
  Cyclic GFR-binding peptide
  MOD_RES (2)..(2): Xaa is C or S
GXAEVVMDSMEGIVVNNAADMIQITINSLRA

SEQ ID NO: 101395 - protein, 27 aa, Artificial Sequence
  Cyclic GFR-binding peptide
LRSMEGILKPKKRVYEMIQVTINSHHV

SEQ ID NO: 101396 - protein, 28 aa, Artificial Sequence
  Cyclic GFR-binding peptide
KVVMSMEGLVKPTRGVMIQITINSLDQP

SEQ ID NO: 101397 - protein, 30 aa, Artificial Sequence; identical to SEQ ID NO: 68534
  Cyclic GFR-binding peptide
  MOD_RES (1)..(3): Xaa is C or S

SEQ ID NO: 101398 - protein, 32 aa, Artificial Sequence; identical to SEQ ID NO: 23219
  Cyclic GFR-binding peptide
  MOD_RES (29)..(29): Xaa is C or S

SEQ ID NO: 101399 - protein, 38 aa, Artificial Sequence; identical to SEQ ID NO: 68536
  Cyclic GFR-binding peptide
  MOD_RES (2)..(34)..(35): Xaa is C or S

SEQ ID NO: 101400 - protein, 29 aa, Artificial Sequence
  Cyclic GFR-binding peptide
  MOD_RES (1)..(1): Xaa is C or S
XSRVVMNSMEGLIVNSSDDMIQVTINSLK

SEQ ID NO: 101401 - protein, 36 aa, Artificial Sequence; identical to SEQ ID NO: 23220
  Cyclic GFR-binding peptide
  MOD_RES (31)..(31): Xaa is C or S

SEQ ID NO: 101402 - protein, 34 aa, Artificial Sequence
  Cyclic GFR-binding peptide
  MOD_RES (29)..(30): Xaa is C or S
VMDSMEGIVVNNAADMIQITINSLRAPVXXSAPA

SEQ ID NO: 101403 - protein, 39 aa, Artificial Sequence; identical to SEQ ID NO: 23223
  Cyclic GFR-binding peptide
  MOD_RES (2)..(4)..(38): Xaa is C or S

SEQ ID NO: 101404 - protein, 34 aa, Artificial Sequence
  Cyclic GFR-binding peptide
  MOD_RES (29)..(30): Xaa is C or S
VIMSMEGLLLVRGNDMIQMTINSTKVPAXXTSPV

SEQ ID NO: 101405 - protein, 38 aa, Artificial Sequence
  Cyclic GFR-binding peptide
  MOD_RES (2)..(4)..(35)..(36): Xaa is C or S
SXKXSKVVMSMEGLVKPTRGVMIQITINSLDQPVXXPS

SEQ ID NO: 101406 - protein, 35 aa, Artificial Sequence; identical to SEQ ID NO: 65159
  Cyclic GFR-binding peptide
  MOD_RES (30)..(31): Xaa is C or S

SEQ ID NO: 101407 - protein, 34 aa, Artificial Sequence; identical to SEQ ID NO: 65163
  Cyclic GFR-binding peptide
  MOD_RES (29)..(30): Xaa is C or S

SEQ ID NO: 101408 - protein, 28 aa, Artificial Sequence
  Cyclic GFR-binding peptide
  MOD_RES (1)..(3): Xaa is C or S
XKXSKVVMSMEGLVKPTRGVMIQITINS

SEQ ID NO: 101409 - protein, 35 aa, Artificial Sequence; identical to SEQ ID NO: 23229
  Cyclic GFR-binding peptide
  MOD_RES (33)..(33): Xaa is C or S

SEQ ID NO: 101410 - protein, 40 aa, Artificial Sequence; identical to SEQ ID NO: 23230
  Cyclic GFR-binding peptide
  MOD_RES (1)..(3)..(40): Xaa is C or S

SEQ ID NO: 101411 - protein, 31 aa, Artificial Sequence
  Cyclic GFR-binding peptide
  MOD_RES (29)..(30): Xaa is C or S
VMGSMEGLIIQQKDNMIQMTINSMKTPTXXP

SEQ ID NO: 101412 - protein, 39 aa, Artificial Sequence
  Cyclic GFR-binding peptide
  MOD_RES (2)..(34)..(35): Xaa is C or S
GXAEVVMDSMEGIVVNNAADMIQITINSLRAPVXXSAPA

SEQ ID NO: 101413 - protein, 33 aa, Artificial Sequence; identical to SEQ ID NO: 23232
  Cyclic GFR-binding peptide
  MOD_RES (2)..(2): Xaa is C or S

SEQ ID NO: 101414 - protein, 33 aa, Artificial Sequence
  Cyclic GFR-binding peptide
  MOD_RES (27)..(28): Xaa is C or S
DSMEGLVVNNAADMIQITINSLRAPVXXSAPAA

SEQ ID NO: 101415 - protein, 26 aa, Artificial Sequence
  Cyclic GFR-binding peptide
SMEGLLKPKKRVYEMIQVTINSHHVR

SEQ ID NO: 101416 - protein, 28 aa, Artificial Sequence
  Cyclic GFR-binding peptide
  MOD_RES (28)..(28): Xaa is C or S
IMSMEGLIKPTKGIMIQITINSLDQSVX

SEQ ID NO: 101417 - protein, 37 aa, Artificial Sequence
  Cyclic GFR-binding peptide
  MOD_RES (2)..(4)..(36)..(37): Xaa is C or S
SXGXRDVVMGSMEGLIIQQKDNMIQMTINSMKTPTXX

SEQ ID NO: 101418 - protein, 37 aa, Artificial Sequence; identical to SEQ ID NO: 23238
  Cyclic GFR-binding peptide
  MOD_RES (35)..(35): Xaa is C or S

SEQ ID NO: 101419 - protein, 35 aa, Artificial Sequence
  Cyclic GFR-binding peptide
  MOD_RES (30)..(31): Xaa is C or S
KVVMSMEGLVKPTRGVMIQITINSLDQPVXXPSAS

SEQ ID NO: 101420 - protein, 27 aa, Artificial Sequence
  Cyclic GFR-binding peptide
  MOD_RES (26)..(27): Xaa is C or S
SMEGLIIQQKDNMIQMTINSMKTPTXX

SEQ ID NO: 101421 - protein, 37 aa, Artificial Sequence
  Cyclic GFR-binding peptide
  MOD_RES (1)..(3)..(34)..(35): Xaa is C or S
XGXEEVIMSMEGLLLVRGNDMIQMTINSTKVPAXXTS

SEQ ID NO: 101422 - protein, 23 aa, Artificial Sequence
  Cyclic GFR-binding peptide
VIMSMEGIIKPTKGIMIQITINS

SEQ ID NO: 101423 - protein, 36 aa, Artificial Sequence
  Cyclic GFR-binding peptide
  MOD_RES (2)..(4)..(35)..(36): Xaa is C or S
SXKXSKVVMSMEGLVKPTRGVMIQITINSLDQPVXX

SEQ ID NO: 101424 - protein, 40 aa, Artificial Sequence; identical to SEQ ID NO: 23246
  Cyclic GFR-binding peptide
  MOD_RES (1)..(3)..(37): Xaa is C or S

SEQ ID NO: 101425 - protein, 27 aa, Artificial Sequence
  Cyclic GFR-binding peptide
  MOD_RES (27)..(27): Xaa is C or S
DSMEGIVVNNAADMIQITINSLRAPVX

SEQ ID NO: 101426 - protein, 27 aa, Artificial Sequence
  Cyclic GFR-binding peptide
ELRSMEGLLKPKKRVYEMIQVTINSHH

SEQ ID NO: 101427 - protein, 26 aa, Artificial Sequence
  Cyclic GFR-binding peptide
VVMSMEGLVKPTRGVMIQITINSLDQ

SEQ ID NO: 101428 - protein, 38 aa, Artificial Sequence; identical to SEQ ID NO: 23256
  Cyclic GFR-binding peptide
  MOD_RES (1)..(35): Xaa is C or S

SEQ ID NO: 101429 - protein, 31 aa, Artificial Sequence
  Cyclic GFR-binding peptide
  MOD_RES (27)..(28): Xaa is C or S
GSMEGLIIQQKDNMIQMTINSMKTPTXXPGA

SEQ ID NO: 101430 - protein, 27 aa, Artificial Sequence
  Cyclic GFR-binding peptide
IMSMEGLIKPTKGIMIQITINSLDQSV

SEQ ID NO: 101431 - protein, 24 aa, Artificial Sequence
  Cyclic GFR-binding peptide
SMEGLVKPTRGVMIQITINSLDQP

SEQ ID NO: 101432 - protein, 35 aa, Artificial Sequence; identical to SEQ ID NO: 23260
  Cyclic GFR-binding peptide

SEQ ID NO: 101433 - protein, 35 aa, Artificial Sequence; identical to SEQ ID NO: 65195
  Cyclic GFR-binding peptide
  MOD_RES (1)..(3)..(34)..(35): Xaa is C or S

SEQ ID NO: 101434 - protein, 29 aa, Artificial Sequence
  Cyclic GFR-binding peptide
ELTSMEGLFIPKKRVIEMIQVTINSLQVQ

SEQ ID NO: 101435 - protein, 33 aa, Artificial Sequence
  Cyclic GFR-binding peptide
  MOD_RES (2)..(4): Xaa is C or S
SXKXSKVIMSMEGLIKPTKGIMIQITINSLDQS

SEQ ID NO: 101436 - protein, 26 aa, Artificial Sequence
  Cyclic GFR-binding peptide
  MOD_RES (26)..(26): Xaa is C or S
SMEGLVKPTRGVMIQITINSLDQPVX

SEQ ID NO: 101437 - protein, 38 aa, Artificial Sequence; identical to SEQ ID NO: 68576
  Cyclic GFR-binding peptide
  MOD_RES (2)..(33)..(34): Xaa is C or S

SEQ ID NO: 101438 - protein, 33 aa, Artificial Sequence
  Cyclic GFR-binding peptide
  MOD_RES (30)..(31): Xaa is C or S
VVMDSMEGIVVNNASDMIQITINSLRTPVXXTP

SEQ ID NO: 101439 - protein, 34 aa, Artificial Sequence; identical to SEQ ID NO: 65200
  Cyclic GFR-binding peptide
  MOD_RES (28)..(29): Xaa is C or S

SEQ ID NO: 101440 - protein, 35 aa, Artificial Sequence
  Cyclic GFR-binding peptide
  MOD_RES (1)..(3)..(35): Xaa is C or S
XGXRDVVMGSMEGIIIQQKDNMIQMTINSMKTPTX

SEQ ID NO: 101441 - protein, 40 aa, Artificial Sequence
  Cyclic GFR-binding peptide
  MOD_RES (2)..(34)..(35): Xaa is C or S
GXRDVVMGSMEGLIIQQKDNMIQMTINSMKTPTXXPGASG

SEQ ID NO: 101442 - protein, 39 aa, Artificial Sequence; identical to SEQ ID NO: 23268
  Cyclic GFR-binding peptide
  MOD_RES (36)..(36): Xaa is C or S

SEQ ID NO: 101443 - protein, 38 aa, Artificial Sequence
  Cyclic GFR-binding peptide
  MOD_RES (2)..(34)..(35): Xaa is C or S
GXSEVVMDSMEGLVVNNASDMIQITINSLRTPVXXTPP

SEQ ID NO: 101444 - protein, 32 aa, Artificial Sequence
  Cyclic GFR-binding peptide
  MOD_RES (2)..(2): Xaa is C or S
GXSRVVMNSMEGLIVNSSDDMIQVTINSLKTP

SEQ ID NO: 101445 - protein, 31 aa, Artificial Sequence; identical to SEQ ID NO: 23270
  Cyclic GFR-binding peptide

SEQ ID NO: 101446 - protein, 34 aa, Artificial Sequence; identical to SEQ ID NO: 23275
  Cyclic GFR-binding peptide
  MOD_RES (31)..(31): Xaa is C or S

SEQ ID NO: 101447 - protein, 25 aa, Artificial Sequence
  Cyclic GFR-binding peptide
VVMSMEGIVKPTRGVMIQITINSLD

SEQ ID NO: 101448 - protein, 22 aa, Artificial Sequence
  Cyclic GFR-binding peptide
SMEGILLVRGNDMIQMTINSTK

SEQ ID NO: 101449 - protein, 28 aa, Artificial Sequence
  Cyclic GFR-binding peptide
EVVMDSMEGIVVNNAADMIQITINSLRA

SEQ ID NO: 101450 - protein, 28 aa, Artificial Sequence
  Cyclic GFR-binding peptide
  MOD_RES (28)..(28): Xaa is C or S
VMSMEGLVKPTRGVMIQITINSLDQPVX

SEQ ID NO: 101451 - protein, 35 aa, Artificial Sequence; identical to SEQ ID NO: 65209
  Cyclic GFR-binding peptide
  MOD_RES (32)..(33): Xaa is C or S

SEQ ID NO: 101452 - protein, 31 aa, Artificial Sequence; identical to SEQ ID NO: 23282
  Cyclic GFR-binding peptide

SEQ ID NO: 101453 - protein, 31 aa, Artificial Sequence
  Cyclic GFR-binding peptide
  MOD_RES (29)..(30): Xaa is C or S
VMDSMEGLVVNNASDMIQITINSLRTPVXXT

SEQ ID NO: 101454 - protein, 24 aa, Artificial Sequence
  Cyclic GFR-binding peptide
IMSMEGLIKPTKGIMIQITINSLD

SEQ ID NO: 101455 - protein, 30 aa, Artificial Sequence
  Cyclic GFR-binding peptide
  MOD_RES (28)..(29): Xaa is C or S
IMSMEGLVKPKRGVMIQITINSLAQPVXXP

SEQ ID NO: 101456 - protein, 31 aa, Artificial Sequence; identical to SEQ ID NO: 68592
  Cyclic GFR-binding peptide
  MOD_RES (28)..(29): Xaa is C or S

SEQ ID NO: 101457 - protein, 29 aa, Artificial Sequence
  Cyclic GFR-binding peptide
EEVIMSMEGLLLVRGNDMIQMTINSTKVP

SEQ ID NO: 101458 - protein, 33 aa, Artificial Sequence
  Cyclic GFR-binding peptide
  MOD_RES (2)..(33): Xaa is C or S
GXEEVIMSMEGILLVRGNDMIQMTINSTKVPAX

SEQ ID NO: 101459 - protein, 40 aa, Artificial Sequence
  Cyclic GFR-binding peptide
  MOD_RES (2)..(4)..(35)..(36): Xaa is C or S
SXKXSRVIMSMEGLVKPKRGVMIQITINSLAQPVXXPAAS

SEQ ID NO: 101460 - protein, 32 aa, Artificial Sequence; identical to SEQ ID NO: 65221
  Cyclic GFR-binding peptide
  MOD_RES (30)..(31): Xaa is C or S

SEQ ID NO: 101461 - protein, 37 aa, Artificial Sequence
  Cyclic GFR-binding peptide
  MOD_RES (31)..(32): Xaa is C or S
EVVMDSMEGLVVNNASDMIQITINSLRTPVXXTPPTS

SEQ ID NO: 101462 - protein, 28 aa, Artificial Sequence
  Cyclic GFR-binding peptide
RSMEGILKPKKRVYEMIQVTINSHHVRS

SEQ ID NO: 101463 - protein, 26 aa, Artificial Sequence
  Cyclic GFR-binding peptide
VMNSMEGLIVNSSDDMIQVTINSLKT

SEQ ID NO: 101464 - protein, 39 aa, Artificial Sequence; identical to SEQ ID NO: 23297
  Cyclic GFR-binding peptide
  MOD_RES (1)..(35): Xaa is C or S

SEQ ID NO: 101465 - protein, 34 aa, Artificial Sequence; identical to SEQ ID NO: 23299
  Cyclic GFR-binding peptide
  MOD_RES (29)..(29): Xaa is C or S

SEQ ID NO: 101466 - protein, 22 aa, Artificial Sequence
  Cyclic GFR-binding peptide
IMSMEGIVKPKRGVMIQITINS

SEQ ID NO: 101467 - protein, 32 aa, Artificial Sequence
  Cyclic GFR-binding peptide
  MOD_RES (1)..(3): Xaa is C or S
XGXSEVVMDSMEGLVVNNASDMIQITINSLRT

SEQ ID NO: 101468 - protein, 32 aa, Artificial Sequence
  Cyclic GFR-binding peptide
  MOD_RES (2)..(2): Xaa is C or S
KXSKVVMSMEGLVKPTRGVMIQITINSLDQPV

SEQ ID NO: 101469 - protein, 32 aa, Artificial Sequence; identical to SEQ ID NO: 23302
  Cyclic GFR-binding peptide
  MOD_RES (31)..(31): Xaa is C or S

SEQ ID NO: 101470 - protein, 27 aa, Artificial Sequence
  Cyclic GFR-binding peptide
HEELRSMEGLLKPKKRVYEMIQVTINS

SEQ ID NO: 101471 - protein, 34 aa, Artificial Sequence; identical to SEQ ID NO: 68600
  Cyclic GFR-binding peptide
  MOD_RES (31)..(32): Xaa is C or S

SEQ ID NO: 101472 - protein, 35 aa, Artificial Sequence; identical to SEQ ID NO: 23307
  Cyclic GFR-binding peptide
  MOD_RES (2)..(2): Xaa is C or S

SEQ ID NO: 101473 - protein, 23 aa, Artificial Sequence
  Cyclic GFR-binding peptide
MSMEGLVKPTRGVMIQITINSLD

SEQ ID NO: 101474 - protein, 20 aa, Artificial Sequence
  Cyclic GFR-binding peptide
SMEGLLLVRGNDMIQMTINS

SEQ ID NO: 101475 - protein, 33 aa, Artificial Sequence; identical to SEQ ID NO: 23312
  Cyclic GFR-binding peptide
  MOD_RES (1)..(3): Xaa is C or S

SEQ ID NO: 101476 - protein, 27 aa, Artificial Sequence
  Cyclic GFR-binding peptide
  MOD_RES (26)..(27): Xaa is C or S
SMEGLVKPKRGVMIQITINSLAQPVXX

SEQ ID NO: 101477 - protein, 32 aa, Artificial Sequence; identical to SEQ ID NO: 23313
  Cyclic GFR-binding peptide

SEQ ID NO: 101478 - protein, 39 aa, Artificial Sequence; identical to SEQ ID NO: 23314
  Cyclic GFR-binding peptide
  MOD_RES (37)..(37): Xaa is C or S

SEQ ID NO: 101479 - protein, 29 aa, Artificial Sequence
  Cyclic GFR-binding peptide
RSMEGLLKPKKRVYEMIQVTINSHHVRSP

SEQ ID NO: 101480 - protein, 25 aa, Artificial Sequence
  Cyclic GFR-binding peptide
MGSMEGIIIQQKDNMIQMTINSMKT

SEQ ID NO: 101481 - protein, 35 aa, Artificial Sequence
  Cyclic GFR-binding peptide
  MOD_RES (31)..(32): Xaa is C or S
SKVVMSMEGLVKPTRGVMIQITINSLDQPVXXPSA

SEQ ID NO: 101482 - protein, 34 aa, Artificial Sequence; identical to SEQ ID NO: 23321
  Cyclic GFR-binding peptide
  MOD_RES (1)..(1): Xaa is C or S

SEQ ID NO: 101483 - protein, 32 aa, Artificial Sequence
  Cyclic GFR-binding peptide
  MOD_RES (30)..(32): Xaa is C or S
PVKTSNITMQIMDNGRVLLIGEMSMIVEEXGX

SEQ ID NO: 101484 - protein, 27 aa, Artificial Sequence
  Cyclic GFR-binding peptide
MSNITMQIMNDKQQIIIGEMSGMVVDR

SEQ ID NO: 101485 - protein, 35 aa, Artificial Sequence
  Cyclic GFR-binding peptide
  MOD_RES (4)..(5): Xaa is C or S
PPTXXVPTRLSNITIQIMDSANNVVIGEMSDMVVE

SEQ ID NO: 101486 - protein, 31 aa, Artificial Sequence; identical to SEQ ID NO: 23325
  Cyclic GFR-binding peptide
  MOD_RES (2)..(2): Xaa is C or S

SEQ ID NO: 101487 - protein, 37 aa, Artificial Sequence
  Cyclic GFR-binding peptide
  MOD_RES (5)..(6): Xaa is C or S
APASXXVPARLSNITIQIMDAANNVVLGEMSDMVVEA

SEQ ID NO: 101488 - protein, 36 aa, Artificial Sequence; identical to SEQ ID NO: 23327
  Cyclic GFR-binding peptide
  MOD_RES (34)..(36): Xaa is C or S

SEQ ID NO: 101489 - protein, 34 aa, Artificial Sequence; identical to SEQ ID NO: 23328
  Cyclic GFR-binding peptide
  MOD_RES (1)..(1): Xaa is C or S

SEQ ID NO: 101490 - protein, 20 aa, Artificial Sequence
  Cyclic GFR-binding peptide
SNITMQIMDNGRVLLIGEMS

SEQ ID NO: 101491 - protein, 24 aa, Artificial Sequence
  Cyclic GFR-binding peptide
SNITIQIMDAANNVVIGEMSDMVV

SEQ ID NO: 101492 - protein, 34 aa, Artificial Sequence
  Cyclic GFR-binding peptide
  MOD_RES (3)..(4): Xaa is C or S
STXXAPVKTSNITMQIMDNGRVLLLGEMSMIVEE

SEQ ID NO: 101493 - protein, 34 aa, Artificial Sequence
  Cyclic GFR-binding peptide
  MOD_RES (5)..(6): Xaa is C or S
TPPTXXVPTRLSNITIQIMDSANNVVIGEMSDMV

SEQ ID NO: 101494 - protein, 27 aa, Artificial Sequence
  Cyclic GFR-binding peptide
  MOD_RES (1)..(2): Xaa is C or S
XXVPARLSNITIQIMDAANNVVLGEMS

SEQ ID NO: 101495 - protein, 28 aa, Artificial Sequence
  Cyclic GFR-binding peptide
APTKLSNITVQIMDDSSNVIIGEMSNMV

SEQ ID NO: 101496 - protein, 21 aa, Artificial Sequence
  Cyclic GFR-binding peptide
SNITIQIMDAANNVVIGEMSD

SEQ ID NO: 101497 - protein, 26 aa, Artificial Sequence
  Cyclic GFR-binding peptide
HSNITVQIMEYVRKKPKLIGEMSRLE

SEQ ID NO: 101498 - protein, 23 aa, Artificial Sequence
  Cyclic GFR-binding peptide
LSNITIQIMDSANNVVLGEMSDM

SEQ ID NO: 101499 - protein, 31 aa, Artificial Sequence; identical to SEQ ID NO: 23340
  Cyclic GFR-binding peptide
  MOD_RES (30)..(30): Xaa is C or S

SEQ ID NO: 101500 - protein, 32 aa, Artificial Sequence; identical to SEQ ID NO: 23341
  Cyclic GFR-binding peptide
  MOD_RES (2)..(2): Xaa is C or S

SEQ ID NO: 101501 - protein, 31 aa, Artificial Sequence
  Cyclic GFR-binding peptide
VPARLSNITIQIMDAANNVVLGEMSDMVVEA

SEQ ID NO: 101502 - protein, 35 aa, Artificial Sequence
  Cyclic GFR-binding peptide
  MOD_RES (3)..(4): Xaa is C or S
ASXXVPARLSNITIQIMDAANNVVIGEMSDMVVEA

SEQ ID NO: 101503 - protein, 29 aa, Artificial Sequence
  Cyclic GFR-binding peptide
  MOD_RES (1)..(1): Xaa is C or S
XVPTEESNITMQIMRIKPHQGQHLGEMSF

SEQ ID NO: 101504 - protein, 36 aa, Artificial Sequence; identical to SEQ ID NO: 23348
  Cyclic GFR-binding peptide
  MOD_RES (34)..(36): Xaa is C or S

SEQ ID NO: 101505 - protein, 39 aa, Artificial Sequence; identical to SEQ ID NO: 23349
  Cyclic GFR-binding peptide
  MOD_RES (2)..(39): Xaa is C or S

SEQ ID NO: 101506 - protein, 26 aa, Artificial Sequence
  Cyclic GFR-binding peptide
SNITVQIMDDSSNVILGEMSNMVVRS

SEQ ID NO: 101507 - protein, 25 aa, Artificial Sequence
  Cyclic GFR-binding peptide
LSNITIQIMIGKTPKILGEMSMIVK

SEQ ID NO: 101508 - protein, 39 aa, Artificial Sequence
  Cyclic GFR-binding peptide
  MOD_RES (4)..(5)..(36)..(38): Xaa is C or S
ASPXXVPQDLSNITIQIMVGRTPKVLGEMSMVVKSXKXS

SEQ ID NO: 101509 - protein, 28 aa, Artificial Sequence
  Cyclic GFR-binding peptide
  MOD_RES (1)..(2): Xaa is C or S
XXVSQDLSNITIQIMIGKTPKILGEMSM

SEQ ID NO: 101510 - protein, 39 aa, Artificial Sequence; identical to SEQ ID NO: 71928
  Cyclic GFR-binding peptide
  MOD_RES (3)..(4)..(36)..(38): Xaa is C or S

SEQ ID NO: 101511 - protein, 32 aa, Artificial Sequence; identical to SEQ ID NO: 68644
  Cyclic GFR-binding peptide
  MOD_RES (3)..(4): Xaa is C or S

SEQ ID NO: 101512 - protein, 33 aa, Artificial Sequence
  Cyclic GFR-binding peptide
  MOD_RES (30)..(32): Xaa is C or S
PQALSNITIQIMVGRKPKVLGEMSMIVRSXKXS

SEQ ID NO: 101513 - protein, 33 aa, Artificial Sequence; identical to SEQ ID NO: 71933
  Cyclic GFR-binding peptide
  MOD_RES (1)..(33): Xaa is C or S

SEQ ID NO: 101514 - protein, 31 aa, Artificial Sequence; identical to SEQ ID NO: 71936
  Cyclic GFR-binding peptide
  MOD_RES (1)..(2): Xaa is C or S

SEQ ID NO: 101515 - protein, 34 aa, Artificial Sequence
  Cyclic GFR-binding peptide
  MOD_RES (32)..(34): Xaa is C or S
TPTKMSNITMQIMNDKQQIIIGEMSGMVVDRXGX

SEQ ID NO: 101516 - protein, 29 aa, Artificial Sequence
  Cyclic GFR-binding peptide
VHHSNITVQIMEYVRKKPKLIGEMSRLEE

SEQ ID NO: 101517 - protein, 35 aa, Artificial Sequence; identical to SEQ ID NO: 23359
  Cyclic GFR-binding peptide
  MOD_RES (1)..(1): Xaa is C or S

SEQ ID NO: 101518 - protein, 23 aa, Artificial Sequence
  Cyclic GFR-binding peptide
QALSNITIQIMVGRKPKVLGEMS

SEQ ID NO: 101519 - protein, 30 aa, Artificial Sequence
  Cyclic GFR-binding peptide
  MOD_RES (3)..(4): Xaa is C or S
GPXXTPTKMSNITMQIMNDKQQIIIGEMSG

SEQ ID NO: 101520 - protein, 31 aa, Artificial Sequence
  Cyclic GFR-binding peptide
  MOD_RES (5)..(6): Xaa is C or S
TPPTXXVPTRLSNITIQIMDSANNVVIGEMS

SEQ ID NO: 101521 - protein, 30 aa, Artificial Sequence
  Cyclic GFR-binding peptide
  MOD_RES (1)..(1): Xaa is C or S
XVPQALSNITIQIMVGRKPKVLGEMSMIVR

SEQ ID NO: 101522 - protein, 33 aa, Artificial Sequence
  Cyclic GFR-binding peptide
  MOD_RES (6)..(7): Xaa is C or S
RVPSTXXAPVKTSNITMQIMDNGRVLLLGEMSM

SEQ ID NO: 101523 - protein, 32 aa, Artificial Sequence
  Cyclic GFR-binding peptide
  MOD_RES (30)..(32): Xaa is C or S
TKLSNITVQIMDDSSNVILGEMSNMVVRSXGX

SEQ ID NO: 101524 - protein, 26 aa, Artificial Sequence
  Cyclic GFR-binding peptide
VPTRLSNITIQIMDSANNVVIGEMSD

SEQ ID NO: 101525 - protein, 35 aa, Artificial Sequence
  Cyclic GFR-binding peptide
  MOD_RES (1)..(2)..(33)..(35): Xaa is C or S
XXAPVKTSNITMQIMDNGRVLLLGEMSMIVEEXGX

SEQ ID NO: 101526 - protein, 30 aa, Artificial Sequence
  Cyclic GFR-binding peptide
  MOD_RES (3)..(4): Xaa is C or S
APXXVPQALSNITIQIMVGRKPKVLGEMSM

SEQ ID NO: 101527 - protein, 28 aa, Artificial Sequence
  Cyclic GFR-binding peptide
SQDLSNITIQIMIGKTPKIIGEMSMIVK

SEQ ID NO: 101528 - protein, 41 aa, Artificial Sequence
  Cyclic GFR-binding peptide
  MOD_RES (6)..(7)..(39)..(41): Xaa is C or S
GSAGPXXTPTKMSNITMQIMNDKQQIILGEMSGMVVDRXGX

SEQ ID NO: 101529 - protein, 22 aa, Artificial Sequence
  Cyclic GFR-binding peptide
SNITIQIMVGRTPKVIGEMSMV

SEQ ID NO: 101530 - protein, 38 aa, Artificial Sequence; identical to SEQ ID NO: 68664
  Cyclic GFR-binding peptide
  MOD_RES (4)..(5)..(36)..(38): Xaa is C or S

SEQ ID NO: 101531 - protein, 40 aa, Artificial Sequence; identical to SEQ ID NO: 23370
  Cyclic GFR-binding peptide
  MOD_RES (6)..(40): Xaa is C or S

SEQ ID NO: 101532 - protein, 28 aa, Artificial Sequence
  Cyclic GFR-binding peptide
SRVHHSNITVQIMEYVRKKPKLLGEMSR

SEQ ID NO: 101533 - protein, 33 aa, Artificial Sequence
  Cyclic GFR-binding peptide
  MOD_RES (6)..(7): Xaa is C or S
STPPTXXVPTRLSNITIQIMDSANNVVIGEMSD

SEQ ID NO: 101534 - protein, 37 aa, Artificial Sequence; identical to SEQ ID NO: 23373
  Cyclic GFR-binding peptide
  MOD_RES (3)..(3): Xaa is C or S

SEQ ID NO: 101535 - protein, 26 aa, Artificial Sequence
  Cyclic GFR-binding peptide
TSNITMQIMDNGRVLLLGEMSMIVEE

SEQ ID NO: 101536 - protein, 38 aa, Artificial Sequence
  Cyclic GFR-binding peptide
  MOD_RES (5)..(6)..(37): Xaa is C or S
SASPXXVSQDLSNITIQIMIGKTPKILGEMSMIVKSXK

SEQ ID NO: 101537 - protein, 30 aa, Artificial Sequence
  Cyclic GFR-binding peptide
  MOD_RES (28)..(30): Xaa is C or S
KTSNITMQIMDNGRVLLLGEMSMIVEEXGX

SEQ ID NO: 101538 - protein, 32 aa, Artificial Sequence
  Cyclic GFR-binding peptide
  MOD_RES (4)..(5): Xaa is C or S
PPTXXVPTRLSNITIQIMDSANNVVLGEMSDM

SEQ ID NO: 101539 - protein, 32 aa, Artificial Sequence; identical to SEQ ID NO: 23388
  Cyclic GFR-binding peptide

SEQ ID NO: 101540 - protein, 40 aa, Artificial Sequence; identical to SEQ ID NO: 23389
  Cyclic GFR-binding peptide
  MOD_RES (4)..(4): Xaa is C or S

SEQ ID NO: 101541 - protein, 37 aa, Artificial Sequence; identical to SEQ ID NO: 23391
  Cyclic GFR-binding peptide
  MOD_RES (7)..(7): Xaa is C or S

SEQ ID NO: 101542 - protein, 34 aa, Artificial Sequence; identical to SEQ ID NO: 23392
  Cyclic GFR-binding peptide
  MOD_RES (32)..(34): Xaa is C or S

SEQ ID NO: 101543 - protein, 24 aa, Artificial Sequence
  Cyclic GFR-binding peptide
SNITIQIMVGRTPKVIGEMSMVVK

SEQ ID NO: 101544 - protein, 36 aa, Artificial Sequence
  Cyclic GFR-binding peptide
  MOD_RES (5)..(6): Xaa is C or S
VPSTXXAPVKTSNITMQIMDNGRVLLLGEMSMIVEE

SEQ ID NO: 101545 - protein, 35 aa, Artificial Sequence
  Cyclic GFR-binding peptide
  MOD_RES (3)..(4)..(35): Xaa is C or S
STXXAPVKTSNITMQIMDNGRVLLLGEMSMIVEEX

SEQ ID NO: 101546 - protein, 31 aa, Artificial Sequence; identical to SEQ ID NO: 23398
  Cyclic GFR-binding peptide
  MOD_RES (2)..(2): Xaa is C or S

SEQ ID NO: 101547 - protein, 45 aa, Artificial Sequence; identical to SEQ ID NO: 23399
  Cyclic GFR-binding peptide
  MOD_RES (5)..(42)..(44): Xaa is C or S

SEQ ID NO: 101548 - protein, 34 aa, Artificial Sequence; identical to SEQ ID NO: 23400
  Cyclic GFR-binding peptide
  MOD_RES (5)..(5): Xaa is C or S

SEQ ID NO: 101549 - protein, 28 aa, Artificial Sequence
  Cyclic GFR-binding peptide
  MOD_RES (28)..(28): Xaa is C or S
KTSNITMQIMDNGRVLLIGEMSMIVEEX

SEQ ID NO: 101550 - protein, 23 aa, Artificial Sequence
  Cyclic GFR-binding peptide
RLSNITIQIMDSANNVVIGEMSD

SEQ ID NO: 101551 - protein, 38 aa, Artificial Sequence; identical to SEQ ID NO: 23405
  Cyclic GFR-binding peptide
  MOD_RES (5)..(5): Xaa is C or S

SEQ ID NO: 101552 - protein, 31 aa, Artificial Sequence; identical to SEQ ID NO: 23407
  Cyclic GFR-binding peptide

SEQ ID NO: 101553 - protein, 27 aa, Artificial Sequence
  Cyclic GFR-binding peptide
QDLSNITIQIMIGKTPKILGEMSMIVK

SEQ ID NO: 101554 - protein, 27 aa, Artificial Sequence
  Cyclic GFR-binding peptide
TQVQLSNITVQIMEIVRKKPIFIGEMS

SEQ ID NO: 101555 - protein, 27 aa, Artificial Sequence
  Cyclic GFR-binding peptide
DLSNITIQIMVGRTPKVLGEMSMVVKS

SEQ ID NO: 101556 - protein, 27 aa, Artificial Sequence
  Cyclic GFR-binding peptide
  MOD_RES (1)..(1): Xaa is C or S
XAPVKTSNITMQIMDNGRVLLLGEMSM

SEQ ID NO: 101557 - protein, 34 aa, Artificial Sequence; identical to SEQ ID NO: 23413
  Cyclic GFR-binding peptide
  MOD_RES (2)..(2): Xaa is C or S

SEQ ID NO: 101558 - protein, 33 aa, Artificial Sequence
  Cyclic GFR-binding peptide
  MOD_RES (6)..(7): Xaa is C or S
ASAAPXXVPQALSNITIQIMVGRKPKVLGEMSM

SEQ ID NO: 101559 - protein, 40 aa, Artificial Sequence; identical to SEQ ID NO: 23415
  Cyclic GFR-binding peptide
  MOD_RES (5)..(5): Xaa is C or S

SEQ ID NO: 101560 - protein, 22 aa, Artificial Sequence
  Cyclic GFR-binding peptide
SNITMQIMNDKQQIILGEMSGM

SEQ ID NO: 101561 - protein, 31 aa, Artificial Sequence; identical to SEQ ID NO: 71982
  Cyclic GFR-binding peptide
  MOD_RES (3)..(4): Xaa is C or S

SEQ ID NO: 101562 - protein, 35 aa, Artificial Sequence; identical to SEQ ID NO: 71983
  Cyclic GFR-binding peptide
  MOD_RES (1)..(32)..(34): Xaa is C or S

SEQ ID NO: 101563 - protein, 23 aa, Artificial Sequence
  Cyclic GFR-binding peptide
DLSNITIQIMVGRTPKVIGEMSM

SEQ ID NO: 101564 - protein, 37 aa, Artificial Sequence; identical to SEQ ID NO: 71991
  Cyclic GFR-binding peptide
  MOD_RES (4)..(5)..(36): Xaa is C or S

SEQ ID NO: 101565 - protein, 32 aa, Artificial Sequence; identical to SEQ ID NO: 23421
  Cyclic GFR-binding peptide
  MOD_RES (2)..(2): Xaa is C or S

SEQ ID NO: 101566 - protein, 36 aa, Artificial Sequence
  Cyclic GFR-binding peptide
  MOD_RES (2)..(3)..(35): Xaa is C or S
PXXTPTKMSNITMQIMNDKQQIILGEMSGMVVDRXG

SEQ ID NO: 101567 - protein, 35 aa, Artificial Sequence; identical to SEQ ID NO: 23422
  Cyclic GFR-binding peptide
  MOD_RES (3)..(3): Xaa is C or S

SEQ ID NO: 101568 - protein, 33 aa, Artificial Sequence
  Cyclic GFR-binding peptide
  MOD_RES (2)..(3): Xaa is C or S
SXXVPARLSNITIQIMDAANNVVIGEMSDMVVE

SEQ ID NO: 101569 - protein, 33 aa, Artificial Sequence
  Cyclic GFR-binding peptide
  MOD_RES (5)..(6): Xaa is C or S
APASXXVPARLSNITIQIMDAANNVVLGEMSDM

SEQ ID NO: 101570 - protein, 40 aa, Artificial Sequence
  Cyclic GFR-binding peptide
  MOD_RES (5)..(6)..(38)..(40): Xaa is C or S
APASXXVPARLSNITIQIMDAANNVVIGEMSDMVVEAXGX

SEQ ID NO: 101571 - protein, 29 aa, Artificial Sequence
  Cyclic GFR-binding peptide
  MOD_RES (3)..(4): Xaa is C or S
SPXXVPQDLSNITIQIMVGRTPKVLGEMS

SEQ ID NO: 101572 - protein, 29 aa, Artificial Sequence
  Cyclic GFR-binding peptide
  MOD_RES (29)..(29): Xaa is C or S
QALSNITIQIMVGRKPKVIGEMSMIVRSX

SEQ ID NO: 101573 - protein, 41 aa, Artificial Sequence; identical to SEQ ID NO: 23431
  Cyclic GFR-binding peptide
  MOD_RES (4)..(41): Xaa is C or S

SEQ ID NO: 101574 - protein, 34 aa, Artificial Sequence; identical to SEQ ID NO: 68724
  Cyclic GFR-binding peptide
  MOD_RES (1)..(32)..(34): Xaa is C or S

SEQ ID NO: 101575 - protein, 32 aa, Artificial Sequence
  Cyclic GFR-binding peptide
  MOD_RES (1)..(2): Xaa is C or S
XXVPQALSNITIQIMVGRKPKVLGEMSMIVRS

SEQ ID NO: 101576 - protein, 38 aa, Artificial Sequence
  Cyclic GFR-binding peptide
  MOD_RES (6)..(7): Xaa is C or S
STPPTXXVPTRLSNITIQIMDSANNVVLGEMSDMVVES

SEQ ID NO: 101577 - protein, 37 aa, Artificial Sequence; identical to SEQ ID NO: 23436
  Cyclic GFR-binding peptide
  MOD_RES (5)..(5): Xaa is C or S

SEQ ID NO: 101578 - protein, 29 aa, Artificial Sequence
  Cyclic GFR-binding peptide
  MOD_RES (27)..(29): Xaa is C or S
SNITVQIMDDSSNVIIGEMSNMVVRSXGX

SEQ ID NO: 101579 - protein, 35 aa, Artificial Sequence; identical to SEQ ID NO: 72012
  Cyclic GFR-binding peptide
  MOD_RES (6)..(7): Xaa is C or S

SEQ ID NO: 101580 - protein, 28 aa, Artificial Sequence
  Cyclic GFR-binding peptide
QDLSNITIQIMIGKTPKIIGEMSMIVKS

SEQ ID NO: 101581 - protein, 41 aa, Artificial Sequence
  Cyclic GFR-binding peptide
  MOD_RES (6)..(7)..(39)..(41): Xaa is C or S
HVPKPXXAPTKLSNITVQIMDDSSNVILGEMSNMVVRSXGX

SEQ ID NO: 101582 - protein, 27 aa, Artificial Sequence
  Cyclic GFR-binding peptide
APVKTSNITMQIMDNGRVLLLGEMSMI

SEQ ID NO: 101583 - protein, 26 aa, Artificial Sequence
  Cyclic GFR-binding peptide
  MOD_RES (1)..(1): Xaa is C or S
XVPQDLSNITIQIMVGRTPKVIGEMS

SEQ ID NO: 101584 - protein, 31 aa, Artificial Sequence; identical to SEQ ID NO: 72016
  Cyclic GFR-binding peptide
  MOD_RES (29)..(31): Xaa is C or S

SEQ ID NO: 101585 - protein, 25 aa, Artificial Sequence
  Cyclic GFR-binding peptide
VQLSNITVQIMEIVRKKPIFLGEMS

SEQ ID NO: 101586 - protein, 29 aa, Artificial Sequence
  Cyclic GFR-binding peptide
  MOD_RES (29)..(29): Xaa is C or S
QDLSNITIQIMIGKTPKILGEMSMIVKSX

SEQ ID NO: 101587 - protein, 37 aa, Artificial Sequence; identical to SEQ ID NO: 23444
  Cyclic GFR-binding peptide
  MOD_RES (1)..(1): Xaa is C or S

SEQ ID NO: 101588 - protein, 30 aa, Artificial Sequence
  Cyclic GFR-binding peptide
  MOD_RES (29)..(29): Xaa is C or S
RLSNITIQIMDAANNVVLGEMSDMVVEAXG

SEQ ID NO: 101589 - protein, 34 aa, Artificial Sequence
  Cyclic GFR-binding peptide
  MOD_RES (1)..(32)..(34): Xaa is C or S
XAPVKTSNITMQIMDNGRVLLLGEMSMIVEEXGX

SEQ ID NO: 101590 - protein, 36 aa, Artificial Sequence; identical to SEQ ID NO: 23449
  Cyclic GFR-binding peptide
  MOD_RES (2)..(36): Xaa is C or S

SEQ ID NO: 101591 - protein, 34 aa, Artificial Sequence; identical to SEQ ID NO: 72023
  Cyclic GFR-binding peptide
  MOD_RES (3)..(4): Xaa is C or S

SEQ ID NO: 101592 - protein, 27 aa, Artificial Sequence
  Cyclic GFR-binding peptide
SNITMQIMRIKPHQGQHIGEMSLEEHS

SEQ ID NO: 101593 - protein, 34 aa, Artificial Sequence
  Cyclic GFR-binding peptide
  MOD_RES (32)..(34): Xaa is C or S
VPTRLSNITIQIMDSANNVVLGEMSDMVVESXGX

SEQ ID NO: 101594 - protein, 32 aa, Artificial Sequence
  Cyclic GFR-binding peptide
  MOD_RES (32)..(32): Xaa is C or S
APTKLSNITVQIMDDSSNVILGEMSNMVVRSX

SEQ ID NO: 101595 - protein, 31 aa, Artificial Sequence; identical to SEQ ID NO: 68742
  Cyclic GFR-binding peptide
  MOD_RES (28)..(30): Xaa is C or S

SEQ ID NO: 101596 - protein, 36 aa, Artificial Sequence
  Cyclic GFR-binding peptide
  MOD_RES (3)..(4)..(36): Xaa is C or S
PTXXVPTRLSNITIQIMDSANNVVLGEMSDMVVESX

SEQ ID NO: 101597 - protein, 32 aa, Artificial Sequence
  Cyclic GFR-binding peptide
  MOD_RES (30)..(32): Xaa is C or S
TRLSNITIQIMDSANNVVIGEMSDMVVESXGX

SEQ ID NO: 101598 - protein, 34 aa, Artificial Sequence
  Cyclic GFR-binding peptide
  MOD_RES (31)..(33): Xaa is C or S
PTKLSNITVQIMDDSSNVILGEMSNMVVRSXGXH

SEQ ID NO: 101599 - protein, 29 aa, Artificial Sequence
  Cyclic GFR-binding peptide
APVKTSNITMQIMDNGRVLLLGEMSMIVE

SEQ ID NO: 101600 - protein, 22 aa, Artificial Sequence
  Cyclic GFR-binding peptide
TSNITMQIMDNGRVLLLGEMSM

SEQ ID NO: 101601 - protein, 25 aa, Artificial Sequence
  Cyclic GFR-binding peptide
SNITMQIMRIKPHQGQHIGEMSLEE

SEQ ID NO: 101602 - protein, 29 aa, Artificial Sequence
  Cyclic GFR-binding peptide
  MOD_RES (1)..(2): Xaa is C or S
XXTPTKMSNITMQIMNDKQQIIIGEMSGM

SEQ ID NO: 101603 - protein, 35 aa, Artificial Sequence; identical to SEQ ID NO: 23468
  Cyclic GFR-binding peptide

SEQ ID NO: 101604 - protein, 32 aa, Artificial Sequence; identical to SEQ ID NO: 23469
  Cyclic GFR-binding peptide
  MOD_RES (1)..(1): Xaa is C or S

SEQ ID NO: 101605 - protein, 23 aa, Artificial Sequence
  Cyclic GFR-binding peptide
LSNITIQIMVGRKPKVLGEMSMI

SEQ ID NO: 101606 - protein, 36 aa, Artificial Sequence
  Cyclic GFR-binding peptide
  MOD_RES (1)..(33)..(35): Xaa is C or S
XVPTRLSNITIQIMDSANNVVLGEMSDMVVESXGXR

SEQ ID NO: 101607 - protein, 30 aa, Artificial Sequence
  Cyclic GFR-binding peptide
  MOD_RES (1)..(2): Xaa is C or S
XXAPVKTSNITMQIMDNGRVLLIGEMSMIV

SEQ ID NO: 101608 - protein, 35 aa, Artificial Sequence
  Cyclic GFR-binding peptide
  MOD_RES (32)..(34): Xaa is C or S
VPARLSNITIQIMDAANNVVIGEMSDMVVEAXGXR

SEQ ID NO: 101609 - protein, 24 aa, Artificial Sequence
  Cyclic GFR-binding peptide
TSNITMQIMDNGRVLLIGEMSMIV

SEQ ID NO: 101610 - protein, 26 aa, Artificial Sequence
  Cyclic GFR-binding peptide
SNITVQIMEYVRKKPKLLGEMSRLEE

SEQ ID NO: 101611 - protein, 29 aa, Artificial Sequence
  Cyclic GFR-binding peptide
  MOD_RES (1)..(1): Xaa is C or S
XVPTRLSNITIQIMDSANNVVLGEMSDMV

SEQ ID NO: 101612 - protein, 41 aa, Artificial Sequence
  Cyclic GFR-binding peptide
  MOD_RES (6)..(7)..(39)..(41): Xaa is C or S
AAPASXXVPARLSNITIQIMDAANNVVIGEMSDMVVEAXGX

SEQ ID NO: 101613 - protein, 30 aa, Artificial Sequence; identical to SEQ ID NO: 23481
  Cyclic GFR-binding peptide
  MOD_RES (29)..(29): Xaa is C or S

SEQ ID NO: 101614 - protein, 24 aa, Artificial Sequence
  Cyclic GFR-binding peptide
LSNITVQIMEIVRKKPIFIGEMST

SEQ ID NO: 101615 - protein, 34 aa, Artificial Sequence
  Cyclic GFR-binding peptide
  MOD_RES (31)..(33): Xaa is C or S
PTKMSNITMQIMNDKQQIIIGEMSGMVVDRXGXS

SEQ ID NO: 101616 - protein, 23 aa, Artificial Sequence
  Cyclic GFR-binding peptide
SNITMQIMRIKPHQGQHLGEMSF

SEQ ID NO: 101617 - protein, 22 aa, Artificial Sequence
  Cyclic GFR-binding peptide
LSNITIQIMVGRTPKVIGEMSM

SEQ ID NO: 101618 - protein, 28 aa, Artificial Sequence
  Cyclic GFR-binding peptide
TKLSNITVQIMDDSSNVIIGEMSNMVVR

SEQ ID NO: 101619 - protein, 31 aa, Artificial Sequence; identical to SEQ ID NO: 23489
  Cyclic GFR-binding peptide
  MOD_RES (1)..(1): Xaa is C or S

SEQ ID NO: 101620 - protein, 25 aa, Artificial Sequence
  Cyclic GFR-binding peptide
QALSNITIQIMVGRKPKVIGEMSMI

SEQ ID NO: 101621 - protein, 32 aa, Artificial Sequence; identical to SEQ ID NO: 23490
  Cyclic GFR-binding peptide
  MOD_RES (5)..(5): Xaa is C or S

SEQ ID NO: 101622 - protein, 28 aa, Artificial Sequence
  Cyclic GFR-binding peptide
  MOD_RES (1)..(1): Xaa is C or S
XVPTRLSNITIQIMDSANNVVLGEMSDM

SEQ ID NO: 101623 - protein, 30 aa, Artificial Sequence
  Cyclic GFR-binding peptide
  MOD_RES (3)..(4): Xaa is C or S
STXXAPVKTSNITMQIMDNGRVLLLGEMSM

SEQ ID NO: 101624 - protein, 37 aa, Artificial Sequence
  Cyclic GFR-binding peptide
  MOD_RES (5)..(6)..(37): Xaa is C or S
VPSTXXAPVKTSNITMQIMDNGRVLLIGEMSMIVEEX

SEQ ID NO: 101625 - protein, 40 aa, Artificial Sequence; identical to SEQ ID NO: 23492
  Cyclic GFR-binding peptide
  MOD_RES (7)..(7): Xaa is C or S

SEQ ID NO: 101626 - protein, 33 aa, Artificial Sequence
  Cyclic GFR-binding peptide
  MOD_RES (4)..(5): Xaa is C or S
PSTXXAPVKTSNITMQIMDNGRVLLLGEMSMIV

SEQ ID NO: 101627 - protein, 37 aa, Artificial Sequence
  Cyclic GFR-binding peptide
  MOD_RES (6)..(7): Xaa is C or S
HVPKPXXAPTKLSNITVQIMDDSSNVILGEMSNMVVR

SEQ ID NO: 101628 - protein, 28 aa, Artificial Sequence
  Cyclic GFR-binding peptide
  MOD_RES (27)..(27): Xaa is C or S
SNITVQIMDDSSNVILGEMSNMVVRSXG

SEQ ID NO: 101629 - protein, 36 aa, Artificial Sequence
  Cyclic GFR-binding peptide
  MOD_RES (6)..(7): Xaa is C or S
RVPSTXXAPVKTSNITMQIMDNGRVLLLGEMSMIVE

SEQ ID NO: 101630 - protein, 34 aa, Artificial Sequence; identical to SEQ ID NO: 23499
  Cyclic GFR-binding peptide
  MOD_RES (3)..(3): Xaa is C or S

SEQ ID NO: 101631 - protein, 26 aa, Artificial Sequence
  Cyclic GFR-binding peptide
QALSNITIQIMVGRKPKVLGEMSMIV

SEQ ID NO: 101632 - protein, 32 aa, Artificial Sequence; identical to SEQ ID NO: 23501
  Cyclic GFR-binding peptide
  MOD_RES (31)..(31): Xaa is C or S

SEQ ID NO: 101633 - protein, 34 aa, Artificial Sequence; identical to SEQ ID NO: 68775
  Cyclic GFR-binding peptide
  MOD_RES (32)..(34): Xaa is C or S

SEQ ID NO: 101634 - protein, 25 aa, Artificial Sequence
  Cyclic GFR-binding peptide
SNITMQIMNDKQQIIIGEMSGMVVD

SEQ ID NO: 101635 - protein, 26 aa, Artificial Sequence
  Cyclic GFR-binding peptide
TRLSNITIQIMDSANNVVLGEMSDMV

SEQ ID NO: 101636 - protein, 32 aa, Artificial Sequence
  Cyclic GFR-binding peptide
  MOD_RES (5)..(6): Xaa is C or S
VPSTXXAPVKTSNITMQIMDNGRVLLIGEMSM

SEQ ID NO: 101637 - protein, 24 aa, Artificial Sequence
  Cyclic GFR-binding peptide
KTSNITMQIMDNGRVLLIGEMSMI

SEQ ID NO: 101638 - protein, 30 aa, Artificial Sequence
  Cyclic GFR-binding peptide
  MOD_RES (27)..(29): Xaa is C or S
SNITIQIMDSANNVVIGEMSDMVVESXGXR

SEQ ID NO: 101639 - protein, 27 aa, Artificial Sequence
  Cyclic GFR-binding peptide
LSNITVQIMEIVRKKPIFLGEMSTLED

SEQ ID NO: 101640 - protein, 28 aa, Artificial Sequence
  Cyclic GFR-binding peptide
SNITMQIMRIKPHQGQHIGEMSLEEHSQ

SEQ ID NO: 101641 - protein, 39 aa, Artificial Sequence
  Cyclic GFR-binding peptide
  MOD_RES (3)..(4)..(36)..(38): Xaa is C or S
GPXXTPTKMSNITMQIMNDKQQIIIGEMSGMVVDRXGXS

SEQ ID NO: 101642 - protein, 40 aa, Artificial Sequence
  Cyclic GFR-binding peptide
  MOD_RES (6)..(7)..(39): Xaa is C or S
AAPASXXVPARLSNITIQIMDAANNVVLGEMSDMVVEAXG

SEQ ID NO: 101643 - protein, 31 aa, Artificial Sequence; identical to SEQ ID NO: 23513
  Cyclic GFR-binding peptide
  MOD_RES (3)..(3): Xaa is C or S

SEQ ID NO: 101644 - protein, 32 aa, Artificial Sequence
  Cyclic GFR-binding peptide
  MOD_RES (31)..(31): Xaa is C or S
PTKMSNITMQIMNDKQQIIIGEMSGMVVDRXG

SEQ ID NO: 101645 - protein, 43 aa, Artificial Sequence; identical to SEQ ID NO: 23518
  Cyclic GFR-binding peptide
  MOD_RES (5)..(42): Xaa is C or S

SEQ ID NO: 101646 - protein, 23 aa, Artificial Sequence
  Cyclic GFR-binding peptide
SNITIQIMVGRTPKVLGEMSMVV

SEQ ID NO: 101647 - protein, 31 aa, Artificial Sequence; identical to SEQ ID NO: 72073
  Cyclic GFR-binding peptide
  MOD_RES (29)..(31): Xaa is C or S

SEQ ID NO: 101648 - protein, 37 aa, Artificial Sequence
  Cyclic GFR-binding peptide
  MOD_RES (2)..(3)..(35)..(37): Xaa is C or S
SXXVPARLSNITIQIMDAANNVVLGEMSDMVVEAXGX

SEQ ID NO: 101649 - protein, 38 aa, Artificial Sequence; identical to SEQ ID NO: 23527
  Cyclic GFR-binding peptide
  MOD_RES (2)..(2): Xaa is C or S

SEQ ID NO: 101650 - protein, 37 aa, Artificial Sequence; identical to SEQ ID NO: 23528
  Cyclic GFR-binding peptide
  MOD_RES (2)..(2): Xaa is C or S

SEQ ID NO: 101651 - protein, 35 aa, Artificial Sequence
  Cyclic GFR-binding peptide
  MOD_RES (4)..(5): Xaa is C or S
PASXXVPARLSNITIQIMDAANNVVIGEMSDMVVE

SEQ ID NO: 101652 - protein, 38 aa, Artificial Sequence
  Cyclic GFR-binding peptide
  MOD_RES (2)..(3)..(35)..(37): Xaa is C or S
PXXAPTKLSNITVQIMDDSSNVILGEMSNMVVRSXGXH

SEQ ID NO: 101653 - protein, 38 aa, Artificial Sequence
  Cyclic GFR-binding peptide
  MOD_RES (6)..(7)..(38): Xaa is C or S
ASASPXXVPQDLSNITIQIMVGRTPKVLGEMSMVVKSX

SEQ ID NO: 101654 - protein, 27 aa, Artificial Sequence
  Cyclic GFR-binding peptide
  MOD_RES (1)..(2): Xaa is C or S
XXAPTKLSNITVQIMDDSSNVIIGEMS

SEQ ID NO: 101655 - protein, 27 aa, Artificial Sequence
  Cyclic GFR-binding peptide
PARLSNITIQIMDAANNVVLGEMSDMV

SEQ ID NO: 101656 - protein, 32 aa, Artificial Sequence
  Cyclic GFR-binding peptide
  MOD_RES (2)..(3): Xaa is C or S
PXXAPTKLSNITVQIMDDSSNVILGEMSNMVV

SEQ ID NO: 101657 - protein, 30 aa, Artificial Sequence
  Cyclic GFR-binding peptide
  MOD_RES (2)..(3): Xaa is C or S
SXXVPARLSNITIQIMDAANNVVIGEMSDM

SEQ ID NO: 101658 - protein, 41 aa, Artificial Sequence
  Cyclic GFR-binding peptide
  MOD_RES (6)..(7)..(39)..(41): Xaa is C or S
STPPTXXVPTRLSNITIQIMDSANNVVIGEMSDMVVESXGX

SEQ ID NO: 101659 - protein, 42 aa, Artificial Sequence; identical to SEQ ID NO: 23541
  Cyclic GFR-binding peptide
  MOD_RES (3)..(40)..(42): Xaa is C or S

SEQ ID NO: 101660 - protein, 40 aa, Artificial Sequence; identical to SEQ ID NO: 23543
  Cyclic GFR-binding peptide
  MOD_RES (37)..(39): Xaa is C or S

SEQ ID NO: 101661 - protein, 32 aa, Artificial Sequence; identical to SEQ ID NO: 68813
  Cyclic GFR-binding peptide
  MOD_RES (5)..(6): Xaa is C or S

SEQ ID NO: 101662 - protein, 27 aa, Artificial Sequence
  Cyclic GFR-binding peptide
TKMSNITMQIMNDKQQIIIGEMSGMVV

SEQ ID NO: 101663 - protein, 32 aa, Artificial Sequence; identical to SEQ ID NO: 23546
  Cyclic GFR-binding peptide
  MOD_RES (1)..(1): Xaa is C or S

SEQ ID NO: 101664 - protein, 34 aa, Artificial Sequence; identical to SEQ ID NO: 68819
  Cyclic GFR-binding peptide
  MOD_RES (1)..(32)..(34): Xaa is C or S

SEQ ID NO: 101665 - protein, 33 aa, Artificial Sequence; identical to SEQ ID NO: 72093
  Cyclic GFR-binding peptide
  MOD_RES (1)..(2)..(33): Xaa is C or S

SEQ ID NO: 101666 - protein, 34 aa, Artificial Sequence
  Cyclic GFR-binding peptide
  MOD_RES (31)..(33): Xaa is C or S
APVKTSNITMQIMDNGRVLLLGEMSMIVEEXGXL

SEQ ID NO: 101667 - protein, 37 aa, Artificial Sequence
  Cyclic GFR-binding peptide
  MOD_RES (5)..(6): Xaa is C or S
SAGPXXTPTKMSNITMQIMNDKQQIILGEMSGMVVDR

SEQ ID NO: 101668 - protein, 28 aa, Artificial Sequence
  Cyclic GFR-binding peptide
  MOD_RES (1)..(1): Xaa is C or S
XAPTKLSNITVQIMDDSSNVIIGEMSNM

SEQ ID NO: 101669 - protein, 25 aa, Artificial Sequence
  Cyclic GFR-binding peptide
HHSNITVQIMEYVRKKPKLLGEMSR

SEQ ID NO: 101670 - protein, 34 aa, Artificial Sequence
  Cyclic GFR-binding peptide
  MOD_RES (4)..(5): Xaa is C or S
PASXXVPARLSNITIQIMDAANNVVLGEMSDMVV

SEQ ID NO: 101671 - protein, 24 aa, Artificial Sequence
  Cyclic GFR-binding peptide
MSNITMQIMNDKQQIIIGEMSGMV

SEQ ID NO: 101672 - protein, 37 aa, Artificial Sequence; identical to SEQ ID NO: 23557
  Cyclic GFR-binding peptide
  MOD_RES (4)..(4): Xaa is C or S

SEQ ID NO: 101673 - protein, 35 aa, Artificial Sequence
  Cyclic GFR-binding peptide
  MOD_RES (5)..(6): Xaa is C or S
VPSTXXAPVKTSNITMQIMDNGRVLLLGEMSMIVE

SEQ ID NO: 101674 - protein, 36 aa, Artificial Sequence; identical to SEQ ID NO: 23558
  Cyclic GFR-binding peptide
  MOD_RES (7)..(7): Xaa is C or S

SEQ ID NO: 101675 - protein, 32 aa, Artificial Sequence
  Cyclic GFR-binding peptide
  MOD_RES (1)..(2): Xaa is C or S
XXAPTKLSNITVQIMDDSSNVILGEMSNMVVR

SEQ ID NO: 101676 - protein, 37 aa, Artificial Sequence
  Cyclic GFR-binding peptide
  MOD_RES (2)..(3)..(35)..(37): Xaa is C or S
PXXAPTKLSNITVQIMDDSSNVILGEMSNMVVRSXGX

SEQ ID NO: 101677 - protein, 32 aa, Artificial Sequence
  Cyclic GFR-binding peptide
  MOD_RES (4)..(5): Xaa is C or S
PKPXXAPTKLSNITVQIMDDSSNVILGEMSNM

SEQ ID NO: 101678 - protein, 35 aa, Artificial Sequence; identical to SEQ ID NO: 23559
  Cyclic GFR-binding peptide
  MOD_RES (3)..(3): Xaa is C or S

SEQ ID NO: 101679 - protein, 37 aa, Artificial Sequence
  Cyclic GFR-binding peptide
  MOD_RES (5)..(6)..(37): Xaa is C or S
SASPXXVSQDLSNITIQIMIGKTPKILGEMSMIVKSX

SEQ ID NO: 101680 - protein, 22 aa, Artificial Sequence
  Cyclic GFR-binding peptide
RLSNITIQIMDSANNVVIGEMS

SEQ ID NO: 101681 - protein, 29 aa, Artificial Sequence
  Cyclic GFR-binding peptide
  MOD_RES (2)..(3): Xaa is C or S
SXXVPARLSNITIQIMDAANNVVIGEMSD

SEQ ID NO: 101682 - protein, 29 aa, Artificial Sequence
  Cyclic GFR-binding peptide
  MOD_RES (1)..(1): Xaa is C or S
XVPQALSNITIQIMVGRKPKVLGEMSMIV

SEQ ID NO: 101683 - protein, 37 aa, Artificial Sequence; identical to SEQ ID NO: 68830
  Cyclic GFR-binding peptide
  MOD_RES (4)..(5)..(36): Xaa is C or S

SEQ ID NO: 101684 - protein, 22 aa, Artificial Sequence
  Cyclic GFR-binding peptide
LSNITIQIMVGRKPKVLGEMSM

SEQ ID NO: 101685 - protein, 30 aa, Artificial Sequence; identical to SEQ ID NO: 23563
  Cyclic GFR-binding peptide

SEQ ID NO: 101686 - protein, 27 aa, Artificial Sequence
  Cyclic GFR-binding peptide
  MOD_RES (27)..(27): Xaa is C or S
TSNITMQIMDNGRVLLLGEMSMIVEEX

SEQ ID NO: 101687 - protein, 30 aa, Artificial Sequence; identical to SEQ ID NO: 23566
  Cyclic GFR-binding peptide

SEQ ID NO: 101688 - protein, 41 aa, Artificial Sequence
  Cyclic GFR-binding peptide
  MOD_RES (5)..(6)..(38)..(40): Xaa is C or S
APASXXVPARLSNITIQIMDAANNVVIGEMSDMVVEAXGXR

SEQ ID NO: 101689 - protein, 31 aa, Artificial Sequence
  Cyclic GFR-binding peptide
  MOD_RES (4)..(5): Xaa is C or S
ASPXXVSQDLSNITIQIMIGKTPKILGEMSM

SEQ ID NO: 101690 - protein, 30 aa, Artificial Sequence; identical to SEQ ID NO: 68837
  Cyclic GFR-binding peptide
  MOD_RES (4)..(5): Xaa is C or S

SEQ ID NO: 101691 - protein, 34 aa, Artificial Sequence; identical to SEQ ID NO: 23568
  Cyclic GFR-binding peptide
  MOD_RES (3)..(3): Xaa is C or S

SEQ ID NO: 101692 - protein, 39 aa, Artificial Sequence
  Cyclic GFR-binding peptide
  MOD_RES (4)..(5)..(37)..(39): Xaa is C or S
PASXXVPARLSNITIQIMDAANNVVIGEMSDMVVEAXGX

SEQ ID NO: 101693 - protein, 34 aa, Artificial Sequence; identical to SEQ ID NO: 23570
  Cyclic GFR-binding peptide
  MOD_RES (32)..(34): Xaa is C or S

SEQ ID NO: 101694 - protein, 40 aa, Artificial Sequence
  Cyclic GFR-binding peptide
  MOD_RES (4)..(5)..(37)..(39): Xaa is C or S
PASXXVPARLSNITIQIMDAANNVVIGEMSDMVVEAXGXR

SEQ ID NO: 101695 - protein, 32 aa, Artificial Sequence
  Cyclic GFR-binding peptide
  MOD_RES (1)..(1): Xaa is C or S
XVPTRLSNITIQIMDSANNVVIGEMSDMVVES

SEQ ID NO: 101696 - protein, 24 aa, Artificial Sequence
  Cyclic GFR-binding peptide
SNITIQIMIGKTPKILGEMSMIVK

SEQ ID NO: 101697 - protein, 37 aa, Artificial Sequence
  Cyclic GFR-binding peptide
  MOD_RES (4)..(5)..(37): Xaa is C or S
PASXXVPARLSNITIQIMDAANNVVLGEMSDMVVEAX

SEQ ID NO: 101698 - protein, 29 aa, Artificial Sequence
  Cyclic GFR-binding peptide
  MOD_RES (27)..(29): Xaa is C or S
LSNITIQIMVGRTPKVIGEMSMVVKSXKX

SEQ ID NO: 101699 - protein, 26 aa, Artificial Sequence
  Cyclic GFR-binding peptide
  MOD_RES (1)..(1): Xaa is C or S
XVSQDLSNITIQIMIGKTPKIIGEMS

SEQ ID NO: 101700 - protein, 27 aa, Artificial Sequence
  Cyclic GFR-binding peptide
QALSNITIQIMVGRKPKVIGEMSMIVR

SEQ ID NO: 101701 - protein, 31 aa, Artificial Sequence; identical to SEQ ID NO: 72113
  Cyclic GFR-binding peptide
  MOD_RES (1)..(1): Xaa is C or S

SEQ ID NO: 101702 - protein, 25 aa, Artificial Sequence
  Cyclic GFR-binding peptide
SQDLSNITIQIMIGKTPKILGEMSM

SEQ ID NO: 101703 - protein, 30 aa, Artificial Sequence
  Cyclic GFR-binding peptide
  MOD_RES (4)..(5): Xaa is C or S
PKPXXAPTKLSNITVQIMDDSSNVILGEMS

SEQ ID NO: 101704 - protein, 37 aa, Artificial Sequence
  Cyclic GFR-binding peptide
  MOD_RES (2)..(3)..(35)..(37): Xaa is C or S
PXXTPTKMSNITMQIMNDKQQIILGEMSGMVVDRXGX

SEQ ID NO: 101705 - protein, 32 aa, Artificial Sequence
  Cyclic GFR-binding peptide
  MOD_RES (3)..(4): Xaa is C or S
ASXXVPARLSNITIQIMDAANNVVIGEMSDMV

SEQ ID NO: 101706 - protein, 35 aa, Artificial Sequence
  Cyclic GFR-binding peptide
  MOD_RES (1)..(2)..(34): Xaa is C or S
XXVPARLSNITIQIMDAANNVVIGEMSDMVVEAXG

SEQ ID NO: 101707 - protein, 33 aa, Artificial Sequence
  Cyclic GFR-binding peptide
  MOD_RES (31)..(33): Xaa is C or S
PARLSNITIQIMDAANNVVIGEMSDMVVEAXGX

SEQ ID NO: 101708 - protein, 25 aa, Artificial Sequence
  Cyclic GFR-binding peptide
SNITIQIMIGKTPKIIGEMSMIVKS

SEQ ID NO: 101709 - protein, 35 aa, Artificial Sequence
  Cyclic GFR-binding peptide
  MOD_RES (1)..(32)..(34): Xaa is C or S
XVPQALSNITIQIMVGRKPKVLGEMSMIVRSXKXS

SEQ ID NO: 101710 - protein, 34 aa, Artificial Sequence; identical to SEQ ID NO: 68856
  Cyclic GFR-binding peptide
  MOD_RES (4)..(5): Xaa is C or S

SEQ ID NO: 101711 - protein, 26 aa, Artificial Sequence
  Cyclic GFR-binding peptide
  MOD_RES (1)..(1): Xaa is C or S
XAPVKTSNITMQIMDNGRVLLIGEMS

SEQ ID NO: 101712 - protein, 33 aa, Artificial Sequence
  Cyclic GFR-binding peptide
  MOD_RES (1)..(2): Xaa is C or S
XXVPTRLSNITIQIMDSANNVVLGEMSDMVVES

SEQ ID NO: 101713 - protein, 32 aa, Artificial Sequence; identical to SEQ ID NO: 72120
  Cyclic GFR-binding peptide
  MOD_RES (2)..(3): Xaa is C or S

SEQ ID NO: 101714 - protein, 39 aa, Artificial Sequence; identical to SEQ ID NO: 23589
  Cyclic GFR-binding peptide
  MOD_RES (2)..(39): Xaa is C or S

SEQ ID NO: 101715 - protein, 21 aa, Artificial Sequence
  Cyclic GFR-binding peptide
SNITMQIMDNGRVLLIGEMSM

SEQ ID NO: 101716 - protein, 30 aa, Artificial Sequence; identical to SEQ ID NO: 23592
  Cyclic GFR-binding peptide

SEQ ID NO: 101717 - protein, 28 aa, Artificial Sequence
  Cyclic GFR-binding peptide
PQALSNITIQIMVGRKPKVLGEMSMIVR

SEQ ID NO: 101718 - protein, 34 aa, Artificial Sequence
  Cyclic GFR-binding peptide
  MOD_RES (3)..(4): Xaa is C or S
ASXXVPARLSNITIQIMDAANNVVLGEMSDMVVE

SEQ ID NO: 101719 - protein, 39 aa, Artificial Sequence
  Cyclic GFR-binding peptide
  MOD_RES (4)..(5)..(36)..(38): Xaa is C or S
PSTXXAPVKTSNITMQIMDNGRVLLIGEMSMIVEEXGXL

SEQ ID NO: 101720 - protein, 30 aa, Artificial Sequence
  Cyclic GFR-binding peptide
  MOD_RES (28)..(30): Xaa is C or S
LSNITVQIMDDSSNVILGEMSNMVVRSXGX

SEQ ID NO: 101721 - protein, 34 aa, Artificial Sequence
  Cyclic GFR-binding peptide
  MOD_RES (6)..(7): Xaa is C or S
STPPTXXVPTRLSNITIQIMDSANNVVLGEMSDM

SEQ ID NO: 101722 - protein, 29 aa, Artificial Sequence
  Cyclic GFR-binding peptide
PQDLSNITIQIMVGRTPKVLGEMSMVVKS

SEQ ID NO: 101723 - protein, 29 aa, Artificial Sequence
  Cyclic GFR-binding peptide
  MOD_RES (27)..(29): Xaa is C or S
TSNITMQIMDNGRVLLIGEMSMIVEEXGX

SEQ ID NO: 101724 - protein, 42 aa, Artificial Sequence; identical to SEQ ID NO: 23595
  Cyclic GFR-binding peptide
  MOD_RES (4)..(41): Xaa is C or S

SEQ ID NO: 101725 - protein, 26 aa, Artificial Sequence
  Cyclic GFR-binding peptide
PTEESNITMQIMRIKPHQGQHLGEMS

SEQ ID NO: 101726 - protein, 38 aa, Artificial Sequence; identical to SEQ ID NO: 68876
  Cyclic GFR-binding peptide
  MOD_RES (3)..(4)..(35)..(37): Xaa is C or S

SEQ ID NO: 101727 - protein, 29 aa, Artificial Sequence
  Cyclic GFR-binding peptide
  MOD_RES (1)..(2): Xaa is C or S
XXVPQALSNITIQIMVGRKPKVLGEMSMI

SEQ ID NO: 101728 - protein, 26 aa, Artificial Sequence
  Cyclic GFR-binding peptide
SNITIQIMDAANNVVLGEMSDMVVEA

SEQ ID NO: 101729 - protein, 32 aa, Artificial Sequence; identical to SEQ ID NO: 72134
  Cyclic GFR-binding peptide
  MOD_RES (31)..(31): Xaa is C or S

SEQ ID NO: 101730 - protein, 31 aa, Artificial Sequence
  Cyclic GFR-binding peptide
  MOD_RES (4)..(5): Xaa is C or S
PPTXXVPTRLSNITIQIMDSANNVVIGEMSD

SEQ ID NO: 101731 - protein, 30 aa, Artificial Sequence
  Cyclic GFR-binding peptide
  MOD_RES (1)..(2): Xaa is C or S
XXAPTKLSNITVQIMDDSSNVILGEMSNMV

SEQ ID NO: 101732 - protein, 30 aa, Artificial Sequence
  Cyclic GFR-binding peptide
  MOD_RES (28)..(30): Xaa is C or S
DLSNITIQIMVGRTPKVLGEMSMVVKSXKX

SEQ ID NO: 101733 - protein, 36 aa, Artificial Sequence
  Cyclic GFR-binding peptide
  MOD_RES (1)..(33)..(35): Xaa is C or S
XVPARLSNITIQIMDAANNVVIGEMSDMVVEAXGXR

SEQ ID NO: 101734 - protein, 32 aa, Artificial Sequence
  Cyclic GFR-binding peptide
  MOD_RES (1)..(2): Xaa is C or S
XXVPARLSNITIQIMDAANNVVLGEMSDMVVE

SEQ ID NO: 101735 - protein, 37 aa, Artificial Sequence
  Cyclic GFR-binding peptide
  MOD_RES (6)..(7): Xaa is C or S
AAPASXXVPARLSNITIQIMDAANNVVLGEMSDMVVE

SEQ ID NO: 101736 - protein, 30 aa, Artificial Sequence; identical to SEQ ID NO: 68891
  Cyclic GFR-binding peptide
  MOD_RES (29)..(29): Xaa is C or S

SEQ ID NO: 101737 - protein, 32 aa, Artificial Sequence
  Cyclic GFR-binding peptide
  MOD_RES (6)..(7): Xaa is C or S
GSAGPXXTPTKMSNITMQIMNDKQQIIIGEMS

SEQ ID NO: 101738 - protein, 21 aa, Artificial Sequence
  Cyclic GFR-binding peptide
SNITVQIMDDSSNVIIGEMSN

SEQ ID NO: 101739 - protein, 36 aa, Artificial Sequence
  Cyclic GFR-binding peptide
  MOD_RES (4)..(5): Xaa is C or S
PASXXVPARLSNITIQIMDAANNVVLGEMSDMVVEA

SEQ ID NO: 101740 - protein, 33 aa, Artificial Sequence
  Cyclic GFR-binding peptide
  MOD_RES (32)..(32): Xaa is C or S
TPTKMSNITMQIMNDKQQIILGEMSGMVVDRXG

SEQ ID NO: 101741 - protein, 32 aa, Artificial Sequence
  Cyclic GFR-binding peptide
  MOD_RES (31)..(31): Xaa is C or S
APVKTSNITMQIMDNGRVLLLGEMSMIVEEXG

SEQ ID NO: 101742 - protein, 34 aa, Artificial Sequence
  Cyclic GFR-binding peptide
  MOD_RES (3)..(4): Xaa is C or S
PTXXVPTRLSNITIQIMDSANNVVLGEMSDMVVE

SEQ ID NO: 101743 - protein, 25 aa, Artificial Sequence
  Cyclic GFR-binding peptide
MSNITMQIMNDKQQIIIGEMSGMVV

SEQ ID NO: 101744 - protein, 38 aa, Artificial Sequence
  Cyclic GFR-binding peptide
  MOD_RES (2)..(3)..(35)..(37): Xaa is C or S
PXXTPTKMSNITMQIMNDKQQIIIGEMSGMVVDRXGXS

SEQ ID NO: 101745 - protein, 24 aa, Artificial Sequence
  Cyclic GFR-binding peptide
LSNITVQIMDDSSNVILGEMSNMV

SEQ ID NO: 101746 - protein, 26 aa, Artificial Sequence
  Cyclic GFR-binding peptide
PQDLSNITIQIMVGRTPKVLGEMSMV

SEQ ID NO: 101747 - protein, 39 aa, Artificial Sequence; identical to SEQ ID NO: 72153
  Cyclic GFR-binding peptide
  MOD_RES (4)..(5)..(36)..(38): Xaa is C or S

SEQ ID NO: 101748 - protein, 31 aa, Artificial Sequence; identical to SEQ ID NO: 23634
  Cyclic GFR-binding peptide
  MOD_RES (4)..(4): Xaa is C or S

SEQ ID NO: 101749 - protein, 26 aa, Artificial Sequence
  Cyclic GFR-binding peptide
  MOD_RES (26)..(26): Xaa is C or S
SNITMQIMDNGRVLLIGEMSMIVEEX

SEQ ID NO: 101750 - protein, 31 aa, Artificial Sequence
  Cyclic GFR-binding peptide
  MOD_RES (1)..(2): Xaa is C or S
XXVPQDLSNITIQIMVGRTPKVLGEMSMVVK

SEQ ID NO: 101751 - protein, 23 aa, Artificial Sequence
  Cyclic GFR-binding peptide
SNITIQIMVGRKPKVIGEMSMIV

SEQ ID NO: 101752 - protein, 28 aa, Artificial Sequence
  Cyclic GFR-binding peptide
  MOD_RES (2)..(3): Xaa is C or S
PXXVSQDLSNITIQIMIGKTPKILGEMS

SEQ ID NO: 101753 - protein, 36 aa, Artificial Sequence
  Cyclic GFR-binding peptide
  MOD_RES (4)..(5): Xaa is C or S
PPTXXVPTRLSNITIQIMDSANNVVIGEMSDMVVES

SEQ ID NO: 101754 - protein, 24 aa, Artificial Sequence
  Cyclic GFR-binding peptide
HSNITVQIMEYVRKKPKLIGEMSR

SEQ ID NO: 101755 - protein, 25 aa, Artificial Sequence
  Cyclic GFR-binding peptide
SNITIQIMVGRKPKVIGEMSMIVRS

SEQ ID NO: 101756 - protein, 36 aa, Artificial Sequence; identical to SEQ ID NO: 68925
  Cyclic GFR-binding peptide
  MOD_RES (4)..(5)..(36): Xaa is C or S

SEQ ID NO: 101757 - protein, 31 aa, Artificial Sequence
  Cyclic GFR-binding peptide
  MOD_RES (1)..(1): Xaa is C or S
XVPARLSNITIQIMDAANNVVIGEMSDMVVE

SEQ ID NO: 101758 - protein, 37 aa, Artificial Sequence
  Cyclic GFR-binding peptide
  MOD_RES (6)..(7): Xaa is C or S
GSAGPXXTPTKMSNITMQIMNDKQQIIIGEMSGMVVD

SEQ ID NO: 101759 - protein, 28 aa, Artificial Sequence
  Cyclic GFR-binding peptide
QSNITMQIMRIKPHQGQHIGEMSLEEHS

SEQ ID NO: 101760 - protein, 33 aa, Artificial Sequence; identical to SEQ ID NO: 68928
  Cyclic GFR-binding peptide
  MOD_RES (1)..(2)..(33): Xaa is C or S

SEQ ID NO: 101761 - protein, 27 aa, Artificial Sequence
  Cyclic GFR-binding peptide
  MOD_RES (27)..(27): Xaa is C or S
LSNITIQIMVGRKPKVIGEMSMIVRSX

SEQ ID NO: 101762 - protein, 33 aa, Artificial Sequence; identical to SEQ ID NO: 23656
  Cyclic GFR-binding peptide
  MOD_RES (2)..(2): Xaa is C or S

SEQ ID NO: 101763 - protein, 33 aa, Artificial Sequence; identical to SEQ ID NO: 68929
  Cyclic GFR-binding peptide
  MOD_RES (4)..(5): Xaa is C or S

SEQ ID NO: 101764 - protein, 29 aa, Artificial Sequence
  Cyclic GFR-binding peptide
  MOD_RES (28)..(28): Xaa is C or S
DLSNITIQIMVGRTPKVIGEMSMVVKSXK

SEQ ID NO: 101765 - protein, 29 aa, Artificial Sequence
  Cyclic GFR-binding peptide
PTGQSNITMQIMRIKPHQGQHIGEMSLEE

SEQ ID NO: 101766 - protein, 32 aa, Artificial Sequence; identical to SEQ ID NO: 23665
  Cyclic GFR-binding peptide

SEQ ID NO: 101767 - protein, 29 aa, Artificial Sequence
  Cyclic GFR-binding peptide
VSQDLSNITIQIMIGKTPKIIGEMSMIVK

SEQ ID NO: 101768 - protein, 30 aa, Artificial Sequence
  Cyclic GFR-binding peptide
  MOD_RES (2)..(3): Xaa is C or S
TXXVPTRLSNITIQIMDSANNVVLGEMSDM

SEQ ID NO: 101769 - protein, 32 aa, Artificial Sequence; identical to SEQ ID NO: 68935
  Cyclic GFR-binding peptide
  MOD_RES (5)..(6): Xaa is C or S

SEQ ID NO: 101770 - protein, 21 aa, Artificial Sequence
  Cyclic GFR-binding peptide
SNITMQIMNDKQQIILGEMSG

SEQ ID NO: 101771 - protein, 33 aa, Artificial Sequence; identical to SEQ ID NO: 23671
  Cyclic GFR-binding peptide
  MOD_RES (4)..(4): Xaa is C or S

SEQ ID NO: 101772 - protein, 29 aa, Artificial Sequence
  Cyclic GFR-binding peptide
TGQSNITMQIMRIKPHQGQHIGEMSLEEH

SEQ ID NO: 101773 - protein, 34 aa, Artificial Sequence; identical to SEQ ID NO: 72179
  Cyclic GFR-binding peptide
  MOD_RES (31)..(33): Xaa is C or S

SEQ ID NO: 101774 - protein, 28 aa, Artificial Sequence
  Cyclic GFR-binding peptide
  MOD_RES (26)..(28): Xaa is C or S
SNITIQIMIGKTPKILGEMSMIVKSXKX

SEQ ID NO: 101775 - protein, 27 aa, Artificial Sequence
  Cyclic GFR-binding peptide
  MOD_RES (26)..(26): Xaa is C or S
SNITIQIMVGRKPKVIGEMSMIVRSXK

SEQ ID NO: 101776 - protein, 30 aa, Artificial Sequence; identical to SEQ ID NO: 72181
  Cyclic GFR-binding peptide
  MOD_RES (4)..(5): Xaa is C or S

SEQ ID NO: 101777 - protein, 29 aa, Artificial Sequence
  Cyclic GFR-binding peptide
  MOD_RES (28)..(28): Xaa is C or S
ALSNITIQIMVGRKPKVLGEMSMIVRSXK

SEQ ID NO: 101778 - protein, 38 aa, Artificial Sequence; identical to SEQ ID NO: 23678
  Cyclic GFR-binding peptide
  MOD_RES (1)..(38): Xaa is C or S

SEQ ID NO: 101779 - protein, 25 aa, Artificial Sequence
  Cyclic GFR-binding peptide
APVKTSNITMQIMDNGRVLLIGEMS

SEQ ID NO: 101780 - protein, 22 aa, Artificial Sequence
  Cyclic GFR-binding peptide
DLSNITIQIMVGRTPKVIGEMS

SEQ ID NO: 101781 - protein, 29 aa, Artificial Sequence
  Cyclic GFR-binding peptide
VPTRLSNITIQIMDSANNVVLGEMSDMVV

SEQ ID NO: 101782 - protein, 34 aa, Artificial Sequence; identical to SEQ ID NO: 23682
  Cyclic GFR-binding peptide
  MOD_RES (4)..(4): Xaa is C or S

SEQ ID NO: 101783 - protein, 28 aa, Artificial Sequence
  Cyclic GFR-binding peptide
TGQSNITMQIMRIKPHQGQHIGEMSLEE

SEQ ID NO: 101784 - protein, 37 aa, Artificial Sequence
  Cyclic GFR-binding peptide
  MOD_RES (4)..(5)..(37): Xaa is C or S
AGPXXTPTKMSNITMQIMNDKQQIILGEMSGMVVDRX

SEQ ID NO: 101785 - protein, 34 aa, Artificial Sequence
  Cyclic GFR-binding peptide
  MOD_RES (1)..(33): Xaa is C or S
XVPTRLSNITIQIMDSANNVVIGEMSDMVVESXG

SEQ ID NO: 101786 - protein, 36 aa, Artificial Sequence; identical to SEQ ID NO: 23684
  Cyclic GFR-binding peptide

SEQ ID NO: 101787 - protein, 31 aa, Artificial Sequence; identical to SEQ ID NO: 68952
  Cyclic GFR-binding peptide
  MOD_RES (31)..(31): Xaa is C or S

SEQ ID NO: 101788 - protein, 28 aa, Artificial Sequence
  Cyclic GFR-binding peptide
  MOD_RES (28)..(28): Xaa is C or S
ALSNITIQIMVGRKPKVLGEMSMIVRSX

SEQ ID NO: 101789 - protein, 44 aa, Artificial Sequence; identical to SEQ ID NO: 23690
  Cyclic GFR-binding peptide
  MOD_RES (5)..(42)..(44): Xaa is C or S

SEQ ID NO: 101790 - protein, 37 aa, Artificial Sequence; identical to SEQ ID NO: 23692
  Cyclic GFR-binding peptide
  MOD_RES (6)..(6): Xaa is C or S

SEQ ID NO: 101791 - protein, 35 aa, Artificial Sequence
  Cyclic GFR-binding peptide
  MOD_RES (2)..(3)..(35): Xaa is C or S
PXXTPTKMSNITMQIMNDKQQIILGEMSGMVVDRX

SEQ ID NO: 101792 - protein, 32 aa, Artificial Sequence; identical to SEQ ID NO: 23694
  Cyclic GFR-binding peptide
  MOD_RES (3)..(3): Xaa is C or S

SEQ ID NO: 101793 - protein, 34 aa, Artificial Sequence
  Cyclic GFR-binding peptide
  MOD_RES (4)..(5): Xaa is C or S
PPTXXVPTRLSNITIQIMDSANNVVLGEMSDMVV

SEQ ID NO: 101794 - protein, 33 aa, Artificial Sequence
  Cyclic GFR-binding peptide
  MOD_RES (4)..(5): Xaa is C or S
PKPXXAPTKLSNITVQIMDDSSNVILGEMSNMV

SEQ ID NO: 101795 - protein, 24 aa, Artificial Sequence
  Cyclic GFR-binding peptide
VKTSNITMQIMDNGRVLLLGEMSM

SEQ ID NO: 101796 - protein, 31 aa, Artificial Sequence; identical to SEQ ID NO: 68968
  Cyclic GFR-binding peptide
  MOD_RES (5)..(6): Xaa is C or S

SEQ ID NO: 101797 - protein, 36 aa, Artificial Sequence
  Cyclic GFR-binding peptide
  MOD_RES (4)..(5): Xaa is C or S
AGPXXTPTKMSNITMQIMNDKQQIILGEMSGMVVDR

SEQ ID NO: 101798 - protein, 38 aa, Artificial Sequence
  Cyclic GFR-binding peptide
  MOD_RES (5)..(6)..(37): Xaa is C or S
SASPXXVPQDLSNITIQIMVGRTPKVLGEMSMVVKSXK

SEQ ID NO: 101799 - protein, 32 aa, Artificial Sequence; identical to SEQ ID NO: 72212
  Cyclic GFR-binding peptide
  MOD_RES (1)..(1): Xaa is C or S

SEQ ID NO: 101800 - protein, 29 aa, Artificial Sequence
  Cyclic GFR-binding peptide
VPQDLSNITIQIMVGRTPKVLGEMSMVVK

SEQ ID NO: 101801 - protein, 31 aa, Artificial Sequence
  Cyclic GFR-binding peptide
  MOD_RES (5)..(6): Xaa is C or S
APASXXVPARLSNITIQIMDAANNVVIGEMS

SEQ ID NO: 101802 - protein, 27 aa, Artificial Sequence
  Cyclic GFR-binding peptide
VPTEESNITMQIMRIKPHQGQHLGEMS

SEQ ID NO: 101803 - protein, 30 aa, Artificial Sequence; identical to SEQ ID NO: 68979
  Cyclic GFR-binding peptide
  MOD_RES (28)..(30): Xaa is C or S

SEQ ID NO: 101804 - protein, 36 aa, Artificial Sequence; identical to SEQ ID NO: 23710
  Cyclic GFR-binding peptide
  MOD_RES (33)..(35): Xaa is C or S

SEQ ID NO: 101805 - protein, 24 aa, Artificial Sequence
  Cyclic GFR-binding peptide
PTKLSNITVQIMDDSSNVILGEMS

SEQ ID NO: 101806 - protein, 35 aa, Artificial Sequence; identical to SEQ ID NO: 72221
  Cyclic GFR-binding peptide
  MOD_RES (4)..(5): Xaa is C or S

SEQ ID NO: 101807 - protein, 33 aa, Artificial Sequence
  Cyclic GFR-binding peptide
  MOD_RES (30)..(32): Xaa is C or S
PVKTSNITMQIMDNGRVLLIGEMSMIVEEXGXL

SEQ ID NO: 101808 - protein, 35 aa, Artificial Sequence; identical to SEQ ID NO: 68986
  Cyclic GFR-binding peptide
  MOD_RES (1)..(2)..(33)..(35): Xaa is C or S

SEQ ID NO: 101809 - protein, 34 aa, Artificial Sequence
  Cyclic GFR-binding peptide
  MOD_RES (5)..(6): Xaa is C or S
SAGPXXTPTKMSNITMQIMNDKQQIILGEMSGMV

SEQ ID NO: 101810 - protein, 33 aa, Artificial Sequence; identical to SEQ ID NO: 23717
  Cyclic GFR-binding peptide
  MOD_RES (4)..(4): Xaa is C or S

SEQ ID NO: 101811 - protein, 28 aa, Artificial Sequence
  Cyclic GFR-binding peptide
  MOD_RES (1)..(1): Xaa is C or S
XTPTKMSNITMQIMNDKQQIIIGEMSGM

SEQ ID NO: 101812 - protein, 40 aa, Artificial Sequence; identical to SEQ ID NO: 72227
  Cyclic GFR-binding peptide
  MOD_RES (5)..(6)..(37)..(39): Xaa is C or S

SEQ ID NO: 101813 - protein, 31 aa, Artificial Sequence
  Cyclic GFR-binding peptide
  MOD_RES (5)..(6): Xaa is C or S
SAAPXXVPQALSNITIQIMVGRKPKVLGEMS

SEQ ID NO: 101814 - protein, 27 aa, Artificial Sequence
  Cyclic GFR-binding peptide
VPARLSNITIQIMDAANNVVLGEMSDM

SEQ ID NO: 101815 - protein, 37 aa, Artificial Sequence
  Cyclic GFR-binding peptide
  MOD_RES (1)..(2)..(34)..(36): Xaa is C or S
XXVPTRLSNITIQIMDSANNVVLGEMSDMVVESXGXR

SEQ ID NO: 101816 - protein, 25 aa, Artificial Sequence
  Cyclic GFR-binding peptide
PVKTSNITMQIMDNGRVLLLGEMSM

SEQ ID NO: 101817 - protein, 25 aa, Artificial Sequence
  Cyclic GFR-binding peptide
TRLSNITIQIMDSANNVVIGEMSDM

SEQ ID NO: 101818 - protein, 29 aa, Artificial Sequence
  Cyclic GFR-binding peptide
  MOD_RES (28)..(28): Xaa is C or S
LSNITVQIMDDSSNVILGEMSNMVVRSXG

SEQ ID NO: 101819 - protein, 35 aa, Artificial Sequence; identical to SEQ ID NO: 68996
  Cyclic GFR-binding peptide
  MOD_RES (1)..(2)..(33)..(35): Xaa is C or S

SEQ ID NO: 101820 - protein, 24 aa, Artificial Sequence
  Cyclic GFR-binding peptide
QLSNITVQIMEIVRKKPIFIGEMS

SEQ ID NO: 101821 - protein, 36 aa, Artificial Sequence
  Cyclic GFR-binding peptide
  MOD_RES (5)..(6): Xaa is C or S
VPKPXXAPTKLSNITVQIMDDSSNVILGEMSNMVVR

SEQ ID NO: 101822 - protein, 27 aa, Artificial Sequence
  Cyclic GFR-binding peptide
PTGQSNITMQIMRIKPHQGQHIGEMSL

SEQ ID NO: 101823 - protein, 35 aa, Artificial Sequence; identical to SEQ ID NO: 69001
  Cyclic GFR-binding peptide
  MOD_RES (3)..(4)..(35): Xaa is C or S

SEQ ID NO: 101824 - protein, 32 aa, Artificial Sequence
  Cyclic GFR-binding peptide
  MOD_RES (2)..(3): Xaa is C or S
TXXAPVKTSNITMQIMDNGRVLLIGEMSMIVE

SEQ ID NO: 101825 - protein, 33 aa, Artificial Sequence
  Cyclic GFR-binding peptide
  MOD_RES (1)..(2): Xaa is C or S
XXAPTKLSNITVQIMDDSSNVILGEMSNMVVRS

SEQ ID NO: 101826 - protein, 40 aa, Artificial Sequence
  Cyclic GFR-binding peptide
  MOD_RES (6)..(7)..(38)..(40): Xaa is C or S
ASAAPXXVPQALSNITIQIMVGRKPKVLGEMSMIVRSXKX

SEQ ID NO: 101827 - protein, 31 aa, Artificial Sequence
  Cyclic GFR-binding peptide
  MOD_RES (29)..(31): Xaa is C or S
VKTSNITMQIMDNGRVLLLGEMSMIVEEXGX

SEQ ID NO: 101828 - protein, 30 aa, Artificial Sequence
  Cyclic GFR-binding peptide
PARLSNITIQIMDAANNVVLGEMSDMVVEA

SEQ ID NO: 101829 - protein, 30 aa, Artificial Sequence; identical to SEQ ID NO: 23735
  Cyclic GFR-binding peptide

SEQ ID NO: 101830 - protein, 33 aa, Artificial Sequence; identical to SEQ ID NO: 23736
  Cyclic GFR-binding peptide
  MOD_RES (3)..(3): Xaa is C or S

SEQ ID NO: 101831 - protein, 29 aa, Artificial Sequence
  Cyclic GFR-binding peptide
PTKLSNITVQIMDDSSNVIIGEMSNMVVR

SEQ ID NO: 101832 - protein, 35 aa, Artificial Sequence
  Cyclic GFR-binding peptide
  MOD_RES (32)..(34): Xaa is C or S
VPTRLSNITIQIMDSANNVVLGEMSDMVVESXGXR

SEQ ID NO: 101833 - protein, 23 aa, Artificial Sequence
  Cyclic GFR-binding peptide
LSNITIQIMIGKTPKIIGEMSMI

SEQ ID NO: 101834 - protein, 41 aa, Artificial Sequence; identical to SEQ ID NO: 23737
  Cyclic GFR-binding peptide
  MOD_RES (5)..(5): Xaa is C or S

SEQ ID NO: 101835 - protein, 37 aa, Artificial Sequence; identical to SEQ ID NO: 23738
  Cyclic GFR-binding peptide
  MOD_RES (2)..(36): Xaa is C or S

SEQ ID NO: 101836 - protein, 23 aa, Artificial Sequence
  Cyclic GFR-binding peptide
KLSNITVQIMDDSSNVIIGEMSN

SEQ ID NO: 101837 - protein, 31 aa, Artificial Sequence
  Cyclic GFR-binding peptide
  MOD_RES (1)..(2): Xaa is C or S
XXTPTKMSNITMQIMNDKQQIIIGEMSGMVV

SEQ ID NO: 101838 - protein, 34 aa, Artificial Sequence
  Cyclic GFR-binding peptide
  MOD_RES (3)..(4): Xaa is C or S
GPXXTPTKMSNITMQIMNDKQQIIIGEMSGMVVD

SEQ ID NO: 101839 - protein, 27 aa, Artificial Sequence
  Cyclic GFR-binding peptide
SNITVQIMEIVRKKPIFLGEMSTLEDH

SEQ ID NO: 101840 - protein, 27 aa, Artificial Sequence
  Cyclic GFR-binding peptide
VKTSNITMQIMDNGRVLLIGEMSMIVE

SEQ ID NO: 101841 - protein, 43 aa, Artificial Sequence; identical to SEQ ID NO: 23752
  Cyclic GFR-binding peptide
  MOD_RES (3)..(40)..(42): Xaa is C or S

SEQ ID NO: 101842 - protein, 37 aa, Artificial Sequence; identical to SEQ ID NO: 23754
  Cyclic GFR-binding peptide
  MOD_RES (36)..(36): Xaa is C or S

SEQ ID NO: 101843 - protein, 31 aa, Artificial Sequence; identical to SEQ ID NO: 69022
  Cyclic GFR-binding peptide
  MOD_RES (4)..(5): Xaa is C or S

SEQ ID NO: 101844 - protein, 40 aa, Artificial Sequence; identical to SEQ ID NO: 23760
  Cyclic GFR-binding peptide
  MOD_RES (3)..(40): Xaa is C or S

SEQ ID NO: 101845 - protein, 34 aa, Artificial Sequence; identical to SEQ ID NO: 23763
  Cyclic GFR-binding peptide
  MOD_RES (32)..(34): Xaa is C or S

SEQ ID NO: 101846 - protein, 30 aa, Artificial Sequence; identical to SEQ ID NO: 69026
  Cyclic GFR-binding peptide
  MOD_RES (1)..(1): Xaa is C or S

SEQ ID NO: 101847 - protein, 29 aa, Artificial Sequence
  Cyclic GFR-binding peptide
TKMSNITMQIMNDKQQIILGEMSGMVVDR

SEQ ID NO: 101848 - protein, 31 aa, Artificial Sequence; identical to SEQ ID NO: 69029
  Cyclic GFR-binding peptide
  MOD_RES (30)..(30): Xaa is C or S

SEQ ID NO: 101849 - protein, 34 aa, Artificial Sequence; identical to SEQ ID NO: 23768
  Cyclic GFR-binding peptide
  MOD_RES (31)..(33): Xaa is C or S

SEQ ID NO: 101850 - protein, 27 aa, Artificial Sequence
  Cyclic GFR-binding peptide
RLSNITIQIMDAANNVVIGEMSDMVVE

SEQ ID NO: 101851 - protein, 33 aa, Artificial Sequence
  Cyclic GFR-binding peptide
  MOD_RES (30)..(32): Xaa is C or S
TKMSNITMQIMNDKQQIILGEMSGMVVDRXGXS

SEQ ID NO: 101852 - protein, 38 aa, Artificial Sequence; identical to SEQ ID NO: 23771
  Cyclic GFR-binding peptide
  MOD_RES (6)..(6): Xaa is C or S

SEQ ID NO: 101853 - protein, 31 aa, Artificial Sequence
  Cyclic GFR-binding peptide
  MOD_RES (1)..(1): Xaa is C or S
XTPTKMSNITMQIMNDKQQIIIGEMSGMVVD

SEQ ID NO: 101854 - protein, 35 aa, Artificial Sequence; identical to SEQ ID NO: 23774
  Cyclic GFR-binding peptide
  MOD_RES (3)..(3): Xaa is C or S

SEQ ID NO: 101855 - protein, 27 aa, Artificial Sequence
  Cyclic GFR-binding peptide
VPTRLSNITIQIMDSANNVVIGEMSDM

SEQ ID NO: 101856 - protein, 37 aa, Artificial Sequence; identical to SEQ ID NO: 23778
  Cyclic GFR-binding peptide
  MOD_RES (1)..(1): Xaa is C or S

SEQ ID NO: 101857 - protein, 30 aa, Artificial Sequence
  Cyclic GFR-binding peptide
  MOD_RES (2)..(3): Xaa is C or S
TXXAPVKTSNITMQIMDNGRVLLIGEMSMI

SEQ ID NO: 101858 - protein, 29 aa, Artificial Sequence
  Cyclic GFR-binding peptide
LSNITVQIMEIVRKKPIFIGEMSTLEDHL

SEQ ID NO: 101859 - protein, 40 aa, Artificial Sequence; identical to SEQ ID NO: 72280
  Cyclic GFR-binding peptide
  MOD_RES (4)..(5)..(37)..(39): Xaa is C or S

SEQ ID NO: 101860 - protein, 36 aa, Artificial Sequence
  Cyclic GFR-binding peptide
  MOD_RES (1)..(33)..(35): Xaa is C or S
XTPTKMSNITMQIMNDKQQIILGEMSGMVVDRXGXS

SEQ ID NO: 101861 - protein, 33 aa, Artificial Sequence
  Cyclic GFR-binding peptide
  MOD_RES (5)..(6): Xaa is C or S
VPKPXXAPTKLSNITVQIMDDSSNVILGEMSNM

SEQ ID NO: 101862 - protein, 41 aa, Artificial Sequence; identical to SEQ ID NO: 23785
  Cyclic GFR-binding peptide
  MOD_RES (3)..(40): Xaa is C or S

SEQ ID NO: 101863 - protein, 36 aa, Artificial Sequence
  Cyclic GFR-binding peptide
  MOD_RES (1)..(2)..(34)..(36): Xaa is C or S
XXTPTKMSNITMQIMNDKQQIILGEMSGMVVDRXGX

SEQ ID NO: 101864 - protein, 34 aa, Artificial Sequence
  Cyclic GFR-binding peptide
  MOD_RES (5)..(6): Xaa is C or S
SASPXXVSQDLSNITIQIMIGKTPKILGEMSMIV

SEQ ID NO: 101865 - protein, 40 aa, Artificial Sequence; identical to SEQ ID NO: 23787
  Cyclic GFR-binding peptide
  MOD_RES (37)..(39): Xaa is C or S

SEQ ID NO: 101866 - protein, 30 aa, Artificial Sequence; identical to SEQ ID NO: 23789
  Cyclic GFR-binding peptide

SEQ ID NO: 101867 - protein, 37 aa, Artificial Sequence; identical to SEQ ID NO: 23790
  Cyclic GFR-binding peptide
  MOD_RES (37)..(37): Xaa is C or S

SEQ ID NO: 101868 - protein, 30 aa, Artificial Sequence
  Cyclic GFR-binding peptide
  MOD_RES (1)..(1): Xaa is C or S
XVPQDLSNITIQIMVGRTPKVLGEMSMVVK

SEQ ID NO: 101869 - protein, 27 aa, Artificial Sequence
  Cyclic GFR-binding peptide
TGQSNITMQIMRIKPHQGQHIGEMSLE

SEQ ID NO: 101870 - protein, 35 aa, Artificial Sequence
  Cyclic GFR-binding peptide
  MOD_RES (1)..(33)..(35): Xaa is C or S
XVPTRLSNITIQIMDSANNVVLGEMSDMVVESXGX

SEQ ID NO: 101871 - protein, 36 aa, Artificial Sequence; identical to SEQ ID NO: 23795
  Cyclic GFR-binding peptide
  MOD_RES (33)..(35): Xaa is C or S

SEQ ID NO: 101872 - protein, 36 aa, Artificial Sequence
  Cyclic GFR-binding peptide
  MOD_RES (2)..(3)..(34)..(36): Xaa is C or S
PXXVSQDLSNITIQIMIGKTPKILGEMSMIVKSXKX

SEQ ID NO: 101873 - protein, 38 aa, Artificial Sequence
  Cyclic GFR-binding peptide
  MOD_RES (4)..(5)..(37): Xaa is C or S
PASXXVPARLSNITIQIMDAANNVVLGEMSDMVVEAXG

SEQ ID NO: 101874 - protein, 31 aa, Artificial Sequence; identical to SEQ ID NO: 69051
  Cyclic GFR-binding peptide
  MOD_RES (5)..(6): Xaa is C or S

SEQ ID NO: 101875 - protein, 33 aa, Artificial Sequence
  Cyclic GFR-binding peptide
  MOD_RES (31)..(33): Xaa is C or S
APVKTSNITMQIMDNGRVLLLGEMSMIVEEXGX

SEQ ID NO: 101876 - protein, 42 aa, Artificial Sequence; identical to SEQ ID NO: 23798
  Cyclic GFR-binding peptide
  MOD_RES (3)..(40)..(42): Xaa is C or S

SEQ ID NO: 101877 - protein, 36 aa, Artificial Sequence
  Cyclic GFR-binding peptide
  MOD_RES (5)..(6): Xaa is C or S
SASPXXVPQDLSNITIQIMVGRTPKVLGEMSMVVKS

SEQ ID NO: 101878 - protein, 29 aa, Artificial Sequence
  Cyclic GFR-binding peptide
  MOD_RES (2)..(3): Xaa is C or S
PXXVPQALSNITIQIMVGRKPKVLGEMSM

SEQ ID NO: 101879 - protein, 27 aa, Artificial Sequence
  Cyclic GFR-binding peptide
DLSNITIQIMIGKTPKIIGEMSMIVKS

SEQ ID NO: 101880 - protein, 29 aa, Artificial Sequence
  Cyclic GFR-binding peptide
  MOD_RES (3)..(4): Xaa is C or S
SPXXVSQDLSNITIQIMIGKTPKILGEMS

SEQ ID NO: 101881 - protein, 39 aa, Artificial Sequence; identical to SEQ ID NO: 23802
  Cyclic GFR-binding peptide
  MOD_RES (4)..(4): Xaa is C or S

SEQ ID NO: 101882 - protein, 23 aa, Artificial Sequence
  Cyclic GFR-binding peptide
LSNITVQIMDDSSNVILGEMSNM

SEQ ID NO: 101883 - protein, 35 aa, Artificial Sequence; identical to SEQ ID NO: 69057
  Cyclic GFR-binding peptide
  MOD_RES (1)..(32)..(34): Xaa is C or S

SEQ ID NO: 101884 - protein, 23 aa, Artificial Sequence
  Cyclic GFR-binding peptide
HSNITVQIMEYVRKKPKLIGEMS

SEQ ID NO: 101885 - protein, 34 aa, Artificial Sequence; identical to SEQ ID NO: 69060
  Cyclic GFR-binding peptide
  MOD_RES (6)..(7): Xaa is C or S

SEQ ID NO: 101886 - protein, 36 aa, Artificial Sequence
  Cyclic GFR-binding peptide
  MOD_RES (6)..(7): Xaa is C or S
AAPASXXVPARLSNITIQIMDAANNVVLGEMSDMVV

SEQ ID NO: 101887 - protein, 40 aa, Artificial Sequence
  Cyclic GFR-binding peptide
  MOD_RES (6)..(7)..(39): Xaa is C or S
STPPTXXVPTRLSNITIQIMDSANNVVLGEMSDMVVESXG

SEQ ID NO: 101888 - protein, 37 aa, Artificial Sequence; identical to SEQ ID NO: 23810
  Cyclic GFR-binding peptide
  MOD_RES (37)..(37): Xaa is C or S

SEQ ID NO: 101889 - protein, 27 aa, Artificial Sequence
  Cyclic GFR-binding peptide
  MOD_RES (1)..(1): Xaa is C or S
XVSQDLSNITIQIMIGKTPKIIGEMSM

SEQ ID NO: 101890 - protein, 38 aa, Artificial Sequence; identical to SEQ ID NO: 23815
  Cyclic GFR-binding peptide
  MOD_RES (6)..(6): Xaa is C or S

SEQ ID NO: 101891 - protein, 30 aa, Artificial Sequence
  Cyclic GFR-binding peptide
PTRLSNITIQIMDSANNVVIGEMSDMVVES

SEQ ID NO: 101892 - protein, 20 aa, Artificial Sequence
  Cyclic GFR-binding peptide
SNITVQIMDDSSNVIIGEMS

SEQ ID NO: 101893 - protein, 39 aa, Artificial Sequence
  Cyclic GFR-binding peptide
  MOD_RES (6)..(7)..(38): Xaa is C or S
RVPSTXXAPVKTSNITMQIMDNGRVLLLGEMSMIVEEXG

SEQ ID NO: 101894 - protein, 25 aa, Artificial Sequence
  Cyclic GFR-binding peptide
SNITVQIMEIVRKKPIFLGEMSTLE

SEQ ID NO: 101895 - protein, 32 aa, Artificial Sequence; identical to SEQ ID NO: 72315
  Cyclic GFR-binding peptide
  MOD_RES (30)..(32): Xaa is C or S

SEQ ID NO: 101896 - protein, 37 aa, Artificial Sequence
  Cyclic GFR-binding peptide
  MOD_RES (6)..(7): Xaa is C or S
ASAAPXXVPQALSNITIQIMVGRKPKVLGEMSMIVRS

SEQ ID NO: 101897 - protein, 28 aa, Artificial Sequence
  Cyclic GFR-binding peptide
  MOD_RES (26)..(28): Xaa is C or S
SNITIQIMVGRTPKVIGEMSMVVKSXKX

SEQ ID NO: 101898 - protein, 33 aa, Artificial Sequence; identical to SEQ ID NO: 72318
  Cyclic GFR-binding peptide
  MOD_RES (5)..(6): Xaa is C or S

SEQ ID NO: 101899 - protein, 29 aa, Artificial Sequence
  Cyclic GFR-binding peptide
VQLSNITVQIMEIVRKKPIFLGEMSTLED

SEQ ID NO: 101900 - protein, 36 aa, Artificial Sequence
  Cyclic GFR-binding peptide
  MOD_RES (1)..(2)..(34)..(36): Xaa is C or S
XXVPTRLSNITIQIMDSANNVVIGEMSDMVVESXGX

SEQ ID NO: 101901 - protein, 37 aa, Artificial Sequence; identical to SEQ ID NO: 23822
  Cyclic GFR-binding peptide
  MOD_RES (3)..(37): Xaa is C or S

SEQ ID NO: 101902 - protein, 42 aa, Artificial Sequence
  Cyclic GFR-binding peptide
  MOD_RES (6)..(7)..(39)..(41): Xaa is C or S
AAPASXXVPARLSNITIQIMDAANNVVIGEMSDMVVEAXGXR

SEQ ID NO: 101903 - protein, 28 aa, Artificial Sequence
  Cyclic GFR-binding peptide
TPTKMSNITMQIMNDKQQIIIGEMSGMV

SEQ ID NO: 101904 - protein, 32 aa, Artificial Sequence; identical to SEQ ID NO: 23827
  Cyclic GFR-binding peptide
  MOD_RES (4)..(4): Xaa is C or S

SEQ ID NO: 101905 - protein, 29 aa, Artificial Sequence
  Cyclic GFR-binding peptide
SNITVQIMEIVRKKPIFIGEMSTLEDHLA

SEQ ID NO: 101906 - protein, 28 aa, Artificial Sequence
  Cyclic GFR-binding peptide
EESNITMQIMRIKPHQGQHLGEMSFLQH

SEQ ID NO: 101907 - protein, 35 aa, Artificial Sequence; identical to SEQ ID NO: 23836
  Cyclic GFR-binding peptide
  MOD_RES (4)..(4): Xaa is C or S

SEQ ID NO: 101908 - protein, 37 aa, Artificial Sequence; identical to SEQ ID NO: 23837
  Cyclic GFR-binding peptide
  MOD_RES (5)..(5): Xaa is C or S

SEQ ID NO: 101909 - protein, 23 aa, Artificial Sequence
  Cyclic GFR-binding peptide
SNITMQIMRIKPHQGQHIGEMSL

SEQ ID NO: 101910 - protein, 36 aa, Artificial Sequence; identical to SEQ ID NO: 23840
  Cyclic GFR-binding peptide
  MOD_RES (5)..(5): Xaa is C or S

SEQ ID NO: 101911 - protein, 25 aa, Artificial Sequence
  Cyclic GFR-binding peptide
TKLSNITVQIMDDSSNVIIGEMSNM

SEQ ID NO: 101912 - protein, 22 aa, Artificial Sequence
  Cyclic GFR-binding peptide
RLSNITIQIMDAANNVVIGEMS

SEQ ID NO: 101913 - protein, 36 aa, Artificial Sequence; identical to SEQ ID NO: 23848
  Cyclic GFR-binding peptide
  MOD_RES (33)..(35): Xaa is C or S

SEQ ID NO: 101914 - protein, 31 aa, Artificial Sequence; identical to SEQ ID NO: 23852
  Cyclic GFR-binding peptide
  MOD_RES (1)..(1): Xaa is C or S

SEQ ID NO: 101915 - protein, 29 aa, Artificial Sequence
  Cyclic GFR-binding peptide
  MOD_RES (26)..(28): Xaa is C or S
SNITIQIMVGRKPKVIGEMSMIVRSXKXS

SEQ ID NO: 101916 - protein, 28 aa, Artificial Sequence
  Cyclic GFR-binding peptide
  MOD_RES (1)..(2): Xaa is C or S
XXVSQDLSNITIQIMIGKTPKIIGEMSM

SEQ ID NO: 101917 - protein, 25 aa, Artificial Sequence
  Cyclic GFR-binding peptide
SNITVQIMEYVRKKPKLIGEMSRLE

SEQ ID NO: 101918 - protein, 41 aa, Artificial Sequence; identical to SEQ ID NO: 23855
  Cyclic GFR-binding peptide
  MOD_RES (3)..(40): Xaa is C or S

SEQ ID NO: 101919 - protein, 35 aa, Artificial Sequence; identical to SEQ ID NO: 72345
  Cyclic GFR-binding peptide
  MOD_RES (2)..(3)..(35): Xaa is C or S

SEQ ID NO: 101920 - protein, 30 aa, Artificial Sequence; identical to SEQ ID NO: 72346
  Cyclic GFR-binding peptide
  MOD_RES (27)..(29): Xaa is C or S

SEQ ID NO: 101921 - protein, 29 aa, Artificial Sequence
  Cyclic GFR-binding peptide
  MOD_RES (29)..(29): Xaa is C or S
SNITMQIMRIKPHQGQHLGEMSFLQHNKX

SEQ ID NO: 101922 - protein, 31 aa, Artificial Sequence
  Cyclic GFR-binding peptide
  MOD_RES (3)..(4): Xaa is C or S
STXXAPVKTSNITMQIMDNGRVLLIGEMSMI

SEQ ID NO: 101923 - protein, 31 aa, Artificial Sequence; identical to SEQ ID NO: 69104
  Cyclic GFR-binding peptide
  MOD_RES (2)..(3): Xaa is C or S

SEQ ID NO: 101924 - protein, 33 aa, Artificial Sequence; identical to SEQ ID NO: 23860
  Cyclic GFR-binding peptide
  MOD_RES (2)..(2): Xaa is C or S

SEQ ID NO: 101925 - protein, 43 aa, Artificial Sequence; identical to SEQ ID NO: 23861
  Cyclic GFR-binding peptide
  MOD_RES (4)..(41)..(43): Xaa is C or S

SEQ ID NO: 101926 - protein, 32 aa, Artificial Sequence
  Cyclic GFR-binding peptide
  MOD_RES (2)..(3): Xaa is C or S
PXXTPTKMSNITMQIMNDKQQIILGEMSGMVV

SEQ ID NO: 101927 - protein, 44 aa, Artificial Sequence; identical to SEQ ID NO: 23863
  Cyclic GFR-binding peptide
  MOD_RES (5)..(42)..(44): Xaa is C or S

SEQ ID NO: 101928 - protein, 29 aa, Artificial Sequence
  Cyclic GFR-binding peptide
  MOD_RES (28)..(28): Xaa is C or S
DLSNITIQIMIGKTPKIIGEMSMIVKSXK

SEQ ID NO: 101929 - protein, 38 aa, Artificial Sequence; identical to SEQ ID NO: 23865
  Cyclic GFR-binding peptide
  MOD_RES (35)..(37): Xaa is C or S

SEQ ID NO: 101930 - protein, 38 aa, Artificial Sequence
  Cyclic GFR-binding peptide
  MOD_RES (5)..(6)..(38): Xaa is C or S
TPPTXXVPTRLSNITIQIMDSANNVVLGEMSDMVVESX

SEQ ID NO: 101931 - protein, 29 aa, Artificial Sequence
  Cyclic GFR-binding peptide
TKLSNITVQIMDDSSNVIIGEMSNMVVRS

SEQ ID NO: 101932 - protein, 39 aa, Artificial Sequence
  Cyclic GFR-binding peptide
  MOD_RES (4)..(5)..(36)..(38): Xaa is C or S
ASPXXVSQDLSNITIQIMIGKTPKILGEMSMIVKSXKXS

SEQ ID NO: 101933 - protein, 34 aa, Artificial Sequence
  Cyclic GFR-binding peptide
  MOD_RES (6)..(7): Xaa is C or S
RVPSTXXAPVKTSNITMQIMDNGRVLLIGEMSMI

SEQ ID NO: 101934 - protein, 27 aa, Artificial Sequence
  Cyclic GFR-binding peptide
  MOD_RES (1)..(2): Xaa is C or S
XXAPTKLSNITVQIMDDSSNVILGEMS

SEQ ID NO: 101935 - protein, 33 aa, Artificial Sequence; identical to SEQ ID NO: 23866
  Cyclic GFR-binding peptide

SEQ ID NO: 101936 - protein, 22 aa, Artificial Sequence
  Cyclic GFR-binding peptide
RLSNITIQIMDSANNVVLGEMS

SEQ ID NO: 101937 - protein, 30 aa, Artificial Sequence
  Cyclic GFR-binding peptide
APTKLSNITVQIMDDSSNVILGEMSNMVVR

SEQ ID NO: 101938 - protein, 31 aa, Artificial Sequence
  Cyclic GFR-binding peptide
  MOD_RES (5)..(6): Xaa is C or S
VPKPXXAPTKLSNITVQIMDDSSNVILGEMS

SEQ ID NO: 101939 - protein, 37 aa, Artificial Sequence
  Cyclic GFR-binding peptide
  MOD_RES (4)..(5)..(37): Xaa is C or S
PPTXXVPTRLSNITIQIMDSANNVVIGEMSDMVVESX

SEQ ID NO: 101940 - protein, 41 aa, Artificial Sequence
  Cyclic GFR-binding peptide
  MOD_RES (6)..(7)..(38)..(40): Xaa is C or S
ASASPXXVSQDLSNITIQIMIGKTPKILGEMSMIVKSXKXS

SEQ ID NO: 101941 - protein, 33 aa, Artificial Sequence; identical to SEQ ID NO: 23869
  Cyclic GFR-binding peptide
  MOD_RES (32)..(32): Xaa is C or S

SEQ ID NO: 101942 - protein, 27 aa, Artificial Sequence
  Cyclic GFR-binding peptide
  MOD_RES (1)..(2): Xaa is C or S
XXVPQALSNITIQIMVGRKPKVIGEMS

SEQ ID NO: 101943 - protein, 37 aa, Artificial Sequence; identical to SEQ ID NO: 23872
  Cyclic GFR-binding peptide
  MOD_RES (2)..(36): Xaa is C or S

SEQ ID NO: 101944 - protein, 30 aa, Artificial Sequence; identical to SEQ ID NO: 23874
  Cyclic GFR-binding peptide

SEQ ID NO: 101945 - protein, 35 aa, Artificial Sequence
  Cyclic GFR-binding peptide
  MOD_RES (2)..(3)..(35): Xaa is C or S
TXXVPTRLSNITIQIMDSANNVVIGEMSDMVVESX

SEQ ID NO: 101946 - protein, 39 aa, Artificial Sequence
  Cyclic GFR-binding peptide
  MOD_RES (5)..(6)..(37)..(39): Xaa is C or S
SAAPXXVPQALSNITIQIMVGRKPKVLGEMSMIVRSXKX

SEQ ID NO: 101947 - protein, 25 aa, Artificial Sequence
  Cyclic GFR-binding peptide
VPQALSNITIQIMVGRKPKVLGEMS

SEQ ID NO: 101948 - protein, 35 aa, Artificial Sequence
  Cyclic GFR-binding peptide
  MOD_RES (5)..(6): Xaa is C or S
TPPTXXVPTRLSNITIQIMDSANNVVIGEMSDMVV

SEQ ID NO: 101949 - protein, 40 aa, Artificial Sequence
  Cyclic GFR-binding peptide
  MOD_RES (5)..(6)..(37)..(39): Xaa is C or S
SASPXXVSQDLSNITIQIMIGKTPKILGEMSMIVKSXKXS

SEQ ID NO: 101950 - protein, 33 aa, Artificial Sequence; identical to SEQ ID NO: 23878
  Cyclic GFR-binding peptide
  MOD_RES (1)..(1): Xaa is C or S

SEQ ID NO: 101951 - protein, 27 aa, Artificial Sequence
  Cyclic GFR-binding peptide
  MOD_RES (1)..(1): Xaa is C or S
XVPQDLSNITIQIMVGRTPKVIGEMSM

SEQ ID NO: 101952 - protein, 38 aa, Artificial Sequence; identical to SEQ ID NO: 23880
  Cyclic GFR-binding peptide
  MOD_RES (35)..(37): Xaa is C or S

SEQ ID NO: 101953 - protein, 28 aa, Artificial Sequence
  Cyclic GFR-binding peptide
RLSNITIQIMDSANNVVIGEMSDMVVES

SEQ ID NO: 101954 - protein, 29 aa, Artificial Sequence
  Cyclic GFR-binding peptide
ESNITMQIMRIKPHQGQHLGEMSFLQHNK

SEQ ID NO: 101955 - protein, 29 aa, Artificial Sequence
  Cyclic GFR-binding peptide
  MOD_RES (27)..(29): Xaa is C or S
SNITMQIMNDKQQIIIGEMSGMVVDRXGX

SEQ ID NO: 101956 - protein, 30 aa, Artificial Sequence
  Cyclic GFR-binding peptide
  MOD_RES (4)..(5): Xaa is C or S
ASPXXVPQDLSNITIQIMVGRTPKVLGEMS

SEQ ID NO: 101957 - protein, 32 aa, Artificial Sequence; identical to SEQ ID NO: 23883
  Cyclic GFR-binding peptide

SEQ ID NO: 101958 - protein, 38 aa, Artificial Sequence; identical to SEQ ID NO: 23884
  Cyclic GFR-binding peptide
  MOD_RES (2)..(36)..(38): Xaa is C or S

SEQ ID NO: 101959 - protein, 39 aa, Artificial Sequence; identical to SEQ ID NO: 23886
  Cyclic GFR-binding peptide
  MOD_RES (3)..(3): Xaa is C or S

SEQ ID NO: 101960 - protein, 32 aa, Artificial Sequence
  Cyclic GFR-binding peptide
  MOD_RES (6)..(7): Xaa is C or S
HVPKPXXAPTKLSNITVQIMDDSSNVILGEMS

SEQ ID NO: 101961 - protein, 33 aa, Artificial Sequence
  Cyclic GFR-binding peptide
  MOD_RES (4)..(5): Xaa is C or S
AGPXXTPTKMSNITMQIMNDKQQIIIGEMSGMV

SEQ ID NO: 101962 - protein, 34 aa, Artificial Sequence
  Cyclic GFR-binding peptide
  MOD_RES (2)..(3): Xaa is C or S
PXXTPTKMSNITMQIMNDKQQIIIGEMSGMVVDR

SEQ ID NO: 101963 - protein, 35 aa, Artificial Sequence
  Cyclic GFR-binding peptide
  MOD_RES (32)..(34): Xaa is C or S
TPTKMSNITMQIMNDKQQIILGEMSGMVVDRXGXS

SEQ ID NO: 101964 - protein, 34 aa, Artificial Sequence
  Cyclic GFR-binding peptide
  MOD_RES (1)..(2)..(34): Xaa is C or S
XXAPTKLSNITVQIMDDSSNVILGEMSNMVVRSX

SEQ ID NO: 101965 - protein, 33 aa, Artificial Sequence; identical to SEQ ID NO: 72371
  Cyclic GFR-binding peptide
  MOD_RES (3)..(4): Xaa is C or S

SEQ ID NO: 101966 - protein, 30 aa, Artificial Sequence
  Cyclic GFR-binding peptide
  MOD_RES (4)..(5): Xaa is C or S
AAPXXVPQALSNITIQIMVGRKPKVLGEMS

SEQ ID NO: 101967 - protein, 29 aa, Artificial Sequence
  Cyclic GFR-binding peptide
  MOD_RES (27)..(29): Xaa is C or S
LSNITIQIMIGKTPKILGEMSMIVKSXKX

SEQ ID NO: 101968 - protein, 35 aa, Artificial Sequence
  Cyclic GFR-binding peptide
  MOD_RES (5)..(6): Xaa is C or S
SASPXXVSQDLSNITIQIMIGKTPKILGEMSMIVK

SEQ ID NO: 101969 - protein, 38 aa, Artificial Sequence
  Cyclic GFR-binding peptide
  MOD_RES (3)..(4)..(36)..(38): Xaa is C or S
GPXXTPTKMSNITMQIMNDKQQIIIGEMSGMVVDRXGX

SEQ ID NO: 101970 - protein, 28 aa, Artificial Sequence
  Cyclic GFR-binding peptide
  MOD_RES (28)..(28): Xaa is C or S
LSNITVQIMDDSSNVIIGEMSNMVVRSX

SEQ ID NO: 101971 - protein, 31 aa, Artificial Sequence
  Cyclic GFR-binding peptide
  MOD_RES (29)..(31): Xaa is C or S
RLSNITIQIMDAANNVVLGEMSDMVVEAXGX

SEQ ID NO: 101972 - protein, 29 aa, Artificial Sequence
  Cyclic GFR-binding peptide
APTKLSNITVQIMDDSSNVIIGEMSNMVV

SEQ ID NO: 101973 - protein, 41 aa, Artificial Sequence; identical to SEQ ID NO: 23897
  Cyclic GFR-binding peptide
  MOD_RES (7)..(41): Xaa is C or S

SEQ ID NO: 101974 - protein, 28 aa, Artificial Sequence
  Cyclic GFR-binding peptide
  MOD_RES (1)..(1): Xaa is C or S
XVPQALSNITIQIMVGRKPKVLGEMSMI

SEQ ID NO: 101975 - protein, 29 aa, Artificial Sequence
  Cyclic GFR-binding peptide
  MOD_RES (1)..(1): Xaa is C or S
XVPQDLSNITIQIMVGRTPKVLGEMSMVV

SEQ ID NO: 101976 - protein, 34 aa, Artificial Sequence
  Cyclic GFR-binding peptide
  MOD_RES (2)..(3): Xaa is C or S
TXXVPTRLSNITIQIMDSANNVVIGEMSDMVVES

SEQ ID NO: 101977 - protein, 32 aa, Artificial Sequence; identical to SEQ ID NO: 69157
  Cyclic GFR-binding peptide
  MOD_RES (6)..(7): Xaa is C or S

SEQ ID NO: 101978 - protein, 26 aa, Artificial Sequence
  Cyclic GFR-binding peptide
SNITIQIMDAANNVVIGEMSDMVVEA

SEQ ID NO: 101979 - protein, 34 aa, Artificial Sequence
  Cyclic GFR-binding peptide
  MOD_RES (6)..(7): Xaa is C or S
HVPKPXXAPTKLSNITVQIMDDSSNVILGEMSNM

SEQ ID NO: 101980 - protein, 31 aa, Artificial Sequence; identical to SEQ ID NO: 23903
  Cyclic GFR-binding peptide

SEQ ID NO: 101981 - protein, 35 aa, Artificial Sequence; identical to SEQ ID NO: 23904
  Cyclic GFR-binding peptide
  MOD_RES (32)..(34): Xaa is C or S

SEQ ID NO: 101982 - protein, 29 aa, Artificial Sequence
  Cyclic GFR-binding peptide
ARLSNITIQIMDAANNVVIGEMSDMVVEA

SEQ ID NO: 101983 - protein, 35 aa, Artificial Sequence; identical to SEQ ID NO: 23907
  Cyclic GFR-binding peptide
  MOD_RES (33)..(35): Xaa is C or S

SEQ ID NO: 101984 - protein, 32 aa, Artificial Sequence
  Cyclic GFR-binding peptide
  MOD_RES (3)..(4): Xaa is C or S
PTXXVPTRLSNITIQIMDSANNVVIGEMSDMV

SEQ ID NO: 101985 - protein, 38 aa, Artificial Sequence; identical to SEQ ID NO: 23913
  Cyclic GFR-binding peptide
  MOD_RES (37)..(37): Xaa is C or S

SEQ ID NO: 101986 - protein, 39 aa, Artificial Sequence; identical to SEQ ID NO: 23915
  Cyclic GFR-binding peptide
  MOD_RES (36)..(38): Xaa is C or S

SEQ ID NO: 101987 - protein, 32 aa, Artificial Sequence
  Cyclic GFR-binding peptide
  MOD_RES (6)..(7): Xaa is C or S
STPPTXXVPTRLSNITIQIMDSANNVVIGEMS

SEQ ID NO: 101988 - protein, 33 aa, Artificial Sequence; identical to SEQ ID NO: 23918
  Cyclic GFR-binding peptide
  MOD_RES (1)..(1): Xaa is C or S

SEQ ID NO: 101989 - protein, 41 aa, Artificial Sequence; identical to SEQ ID NO: 23920
  Cyclic GFR-binding peptide
  MOD_RES (4)..(38)..(40): Xaa is C or S

SEQ ID NO: 101990 - protein, 35 aa, Artificial Sequence; identical to SEQ ID NO: 23925
  Cyclic GFR-binding peptide
  MOD_RES (4)..(4): Xaa is C or S

SEQ ID NO: 101991 - protein, 26 aa, Artificial Sequence
  Cyclic GFR-binding peptide
KTSNITMQIMDNGRVLLIGEMSMIVE

SEQ ID NO: 101992 - protein, 27 aa, Artificial Sequence
  Cyclic GFR-binding peptide
  MOD_RES (1)..(1): Xaa is C or S
XVPTRLSNITIQIMDSANNVVIGEMSD

SEQ ID NO: 101993 - protein, 28 aa, Artificial Sequence
  Cyclic GFR-binding peptide
QDLSNITIQIMVGRTPKVLGEMSMVVKS

SEQ ID NO: 101994 - protein, 32 aa, Artificial Sequence
  Cyclic GFR-binding peptide
  MOD_RES (5)..(6): Xaa is C or S
VPSTXXAPVKTSNITMQIMDNGRVLLLGEMSM

SEQ ID NO: 101995 - protein, 33 aa, Artificial Sequence; identical to SEQ ID NO: 69186
  Cyclic GFR-binding peptide
  MOD_RES (31)..(33): Xaa is C or S

SEQ ID NO: 101996 - protein, 33 aa, Artificial Sequence
  Cyclic GFR-binding peptide
  MOD_RES (32)..(32): Xaa is C or S
VPTRLSNITIQIMDSANNVVLGEMSDMVVESXG

SEQ ID NO: 101997 - protein, 24 aa, Artificial Sequence
  Cyclic GFR-binding peptide
RLSNITIQIMDAANNVVLGEMSDM

SEQ ID NO: 101998 - protein, 27 aa, Artificial Sequence
  Cyclic GFR-binding peptide
  MOD_RES (27)..(27): Xaa is C or S
LSNITIQIMVGRTPKVIGEMSMVVKSX

SEQ ID NO: 101999 - protein, 32 aa, Artificial Sequence; identical to SEQ ID NO: 23933
  Cyclic GFR-binding peptide
  MOD_RES (31)..(31): Xaa is C or S

SEQ ID NO: 102000 - protein, 31 aa, Artificial Sequence; identical to SEQ ID NO: 69192
  Cyclic GFR-binding peptide
  MOD_RES (1)..(1): Xaa is C or S

SEQ ID NO: 102001 - protein, 32 aa, Artificial Sequence
  Cyclic GFR-binding peptide
  MOD_RES (1)..(2): Xaa is C or S
XXAPVKTSNITMQIMDNGRVLLLGEMSMIVEE

SEQ ID NO: 102002 - protein, 29 aa, Artificial Sequence
  Cyclic GFR-binding peptide
  MOD_RES (26)..(28): Xaa is C or S
SNITIQIMIGKTPKILGEMSMIVKSXKXS

SEQ ID NO: 102003 - protein, 34 aa, Artificial Sequence
  Cyclic GFR-binding peptide
  MOD_RES (31)..(33): Xaa is C or S
VPQALSNITIQIMVGRKPKVLGEMSMIVRSXKXS

SEQ ID NO: 102004 - protein, 26 aa, Artificial Sequence
  Cyclic GFR-binding peptide
VPTRLSNITIQIMDSANNVVLGEMSD

SEQ ID NO: 102005 - protein, 33 aa, Artificial Sequence
  Cyclic GFR-binding peptide
  MOD_RES (30)..(32): Xaa is C or S
TRLSNITIQIMDSANNVVIGEMSDMVVESXGXR

SEQ ID NO: 102006 - protein, 33 aa, Artificial Sequence
  Cyclic GFR-binding peptide
  MOD_RES (4)..(5): Xaa is C or S
AAPXXVPQALSNITIQIMVGRKPKVLGEMSMIV

SEQ ID NO: 102007 - protein, 41 aa, Artificial Sequence; identical to SEQ ID NO: 23947
  Cyclic GFR-binding peptide
  MOD_RES (5)..(5): Xaa is C or S

SEQ ID NO: 102008 - protein, 40 aa, Artificial Sequence
  Cyclic GFR-binding peptide
  MOD_RES (6)..(7)..(39): Xaa is C or S
HVPKPXXAPTKLSNITVQIMDDSSNVIIGEMSNMVVRSXG

SEQ ID NO: 102009 - protein, 32 aa, Artificial Sequence; identical to SEQ ID NO: 23950
  Cyclic GFR-binding peptide

SEQ ID NO: 102010 - protein, 31 aa, Artificial Sequence
  Cyclic GFR-binding peptide
  MOD_RES (2)..(3): Xaa is C or S
SXXVPARLSNITIQIMDAANNVVIGEMSDMV

SEQ ID NO: 102011 - protein, 35 aa, Artificial Sequence
  Cyclic GFR-binding peptide
  MOD_RES (6)..(7): Xaa is C or S
STPPTXXVPTRLSNITIQIMDSANNVVLGEMSDMV

SEQ ID NO: 102012 - protein, 29 aa, Artificial Sequence
  Cyclic GFR-binding peptide
  MOD_RES (3)..(4): Xaa is C or S
SPXXVPQDLSNITIQIMVGRTPKVIGEMS

SEQ ID NO: 102013 - protein, 23 aa, Artificial Sequence
  Cyclic GFR-binding peptide
TKLSNITVQIMDDSSNVILGEMS

SEQ ID NO: 102014 - protein, 38 aa, Artificial Sequence; identical to SEQ ID NO: 23955
  Cyclic GFR-binding peptide
  MOD_RES (4)..(4): Xaa is C or S

SEQ ID NO: 102015 - protein, 28 aa, Artificial Sequence
  Cyclic GFR-binding peptide
  MOD_RES (1)..(2): Xaa is C or S
XXVPQDLSNITIQIMVGRTPKVIGEMSM

SEQ ID NO: 102016 - protein, 34 aa, Artificial Sequence; identical to SEQ ID NO: 23958
  Cyclic GFR-binding peptide
  MOD_RES (32)..(34): Xaa is C or S

SEQ ID NO: 102017 - protein, 42 aa, Artificial Sequence
  Cyclic GFR-binding peptide
  MOD_RES (6)..(7)..(39)..(41): Xaa is C or S
HVPKPXXAPTKLSNITVQIMDDSSNVILGEMSNMVVRSXGXH

SEQ ID NO: 102018 - protein, 29 aa, Artificial Sequence
  Cyclic GFR-binding peptide
  MOD_RES (28)..(28): Xaa is C or S
DLSNITIQIMIGKTPKILGEMSMIVKSXK

SEQ ID NO: 102019 - protein, 25 aa, Artificial Sequence
  Cyclic GFR-binding peptide
LSNITIQIMVGRTPKVIGEMSMVVK

SEQ ID NO: 102020 - protein, 34 aa, Artificial Sequence; identical to SEQ ID NO: 72445
  Cyclic GFR-binding peptide
  MOD_RES (1)..(2)..(34): Xaa is C or S

SEQ ID NO: 102021 - protein, 32 aa, Artificial Sequence; identical to SEQ ID NO: 23966
  Cyclic GFR-binding peptide

SEQ ID NO: 102022 - protein, 30 aa, Artificial Sequence; identical to SEQ ID NO: 72446
  Cyclic GFR-binding peptide
  MOD_RES (4)..(5): Xaa is C or S

SEQ ID NO: 102023 - protein, 29 aa, Artificial Sequence
  Cyclic GFR-binding peptide
  MOD_RES (1)..(2): Xaa is C or S
XXVPTRLSNITIQIMDSANNVVLGEMSDM

SEQ ID NO: 102024 - protein, 29 aa, Artificial Sequence
  Cyclic GFR-binding peptide
  MOD_RES (28)..(28): Xaa is C or S
MSNITMQIMNDKQQIIIGEMSGMVVDRXG

SEQ ID NO: 102025 - protein, 34 aa, Artificial Sequence
  Cyclic GFR-binding peptide
  MOD_RES (2)..(3): Xaa is C or S
SXXVPARLSNITIQIMDAANNVVLGEMSDMVVEA

SEQ ID NO: 102026 - protein, 29 aa, Artificial Sequence
  Cyclic GFR-binding peptide
SRVHHSNITVQIMEYVRKKPKLIGEMSRL

SEQ ID NO: 102027 - protein, 39 aa, Artificial Sequence
  Cyclic GFR-binding peptide
  MOD_RES (3)..(4)..(36)..(38): Xaa is C or S
ASXXVPARLSNITIQIMDAANNVVLGEMSDMVVEAXGXR

SEQ ID NO: 102028 - protein, 40 aa, Artificial Sequence
  Cyclic GFR-binding peptide
  MOD_RES (6)..(7)..(39): Xaa is C or S
STPPTXXVPTRLSNITIQIMDSANNVVIGEMSDMVVESXG

SEQ ID NO: 102029 - protein, 21 aa, Artificial Sequence
  Cyclic GFR-binding peptide
SNITVQIMDDSSNVILGEMSN

SEQ ID NO: 102030 - protein, 31 aa, Artificial Sequence; identical to SEQ ID NO: 23979
  Cyclic GFR-binding peptide
  MOD_RES (30)..(30): Xaa is C or S

SEQ ID NO: 102031 - protein, 36 aa, Artificial Sequence
  Cyclic GFR-binding peptide
  MOD_RES (2)..(3)..(34)..(36): Xaa is C or S
TXXAPVKTSNITMQIMDNGRVLLIGEMSMIVEEXGX

SEQ ID NO: 102032 - protein, 41 aa, Artificial Sequence; identical to SEQ ID NO: 23981
  Cyclic GFR-binding peptide
  MOD_RES (7)..(41): Xaa is C or S

SEQ ID NO: 102033 - protein, 29 aa, Artificial Sequence
  Cyclic GFR-binding peptide
  MOD_RES (3)..(4): Xaa is C or S
PTXXVPTRLSNITIQIMDSANNVVLGEMS

SEQ ID NO: 102034 - protein, 37 aa, Artificial Sequence
  Cyclic GFR-binding peptide
  MOD_RES (1)..(2)..(34)..(36): Xaa is C or S
XXVPARLSNITIQIMDAANNVVIGEMSDMVVEAXGXR

SEQ ID NO: 102035 - protein, 37 aa, Artificial Sequence; identical to SEQ ID NO: 23984
  Cyclic GFR-binding peptide
  MOD_RES (35)..(37): Xaa is C or S

SEQ ID NO: 102036 - protein, 27 aa, Artificial Sequence
  Cyclic GFR-binding peptide
  MOD_RES (27)..(27): Xaa is C or S
LSNITIQIMVGRKPKVLGEMSMIVRSX

SEQ ID NO: 102037 - protein, 26 aa, Artificial Sequence
  Cyclic GFR-binding peptide
ARLSNITIQIMDAANNVVIGEMSDMV

SEQ ID NO: 102038 - protein, 37 aa, Artificial Sequence
  Cyclic GFR-binding peptide
  MOD_RES (1)..(2)..(34)..(36): Xaa is C or S
XXVPARLSNITIQIMDAANNVVLGEMSDMVVEAXGXR

SEQ ID NO: 102039 - protein, 30 aa, Artificial Sequence; identical to SEQ ID NO: 23987
  Cyclic GFR-binding peptide

SEQ ID NO: 102040 - protein, 28 aa, Artificial Sequence
  Cyclic GFR-binding peptide
  MOD_RES (2)..(3): Xaa is C or S
TXXAPVKTSNITMQIMDNGRVLLLGEMS

SEQ ID NO: 102041 - protein, 24 aa, Artificial Sequence
  Cyclic GFR-binding peptide
PTKLSNITVQIMDDSSNVIIGEMS

SEQ ID NO: 102042 - protein, 22 aa, Artificial Sequence
  Cyclic GFR-binding peptide
LSNITIQIMVGRKPKVIGEMSM

SEQ ID NO: 102043 - protein, 36 aa, Artificial Sequence; identical to SEQ ID NO: 23991
  Cyclic GFR-binding peptide
  MOD_RES (35)..(35): Xaa is C or S

SEQ ID NO: 102044 - protein, 30 aa, Artificial Sequence; identical to SEQ ID NO: 23994
  Cyclic GFR-binding peptide

SEQ ID NO: 102045 - protein, 32 aa, Artificial Sequence; identical to SEQ ID NO: 23996
  Cyclic GFR-binding peptide

SEQ ID NO: 102046 - protein, 37 aa, Artificial Sequence
  Cyclic GFR-binding peptide
  MOD_RES (6)..(7): Xaa is C or S
ASASPXXVPQDLSNITIQIMVGRTPKVLGEMSMVVKS

SEQ ID NO: 102047 - protein, 25 aa, Artificial Sequence
  Cyclic GFR-binding peptide
VSQDLSNITIQIMIGKTPKIIGEMS

SEQ ID NO: 102048 - protein, 35 aa, Artificial Sequence
  Cyclic GFR-binding peptide
  MOD_RES (6)..(7): Xaa is C or S
ASASPXXVSQDLSNITIQIMIGKTPKILGEMSMIV

SEQ ID NO: 102049 - protein, 39 aa, Artificial Sequence; identical to SEQ ID NO: 24000
  Cyclic GFR-binding peptide
  MOD_RES (5)..(39): Xaa is C or S

SEQ ID NO: 102050 - protein, 38 aa, Artificial Sequence; identical to SEQ ID NO: 24002
  Cyclic GFR-binding peptide
  MOD_RES (5)..(5): Xaa is C or S

SEQ ID NO: 102051 - protein, 34 aa, Artificial Sequence; identical to SEQ ID NO: 24003
  Cyclic GFR-binding peptide
  MOD_RES (5)..(5): Xaa is C or S

SEQ ID NO: 102052 - protein, 39 aa, Artificial Sequence
  Cyclic GFR-binding peptide
  MOD_RES (4)..(5)..(37)..(39): Xaa is C or S
AGPXXTPTKMSNITMQIMNDKQQIILGEMSGMVVDRXGX

SEQ ID NO: 102053 - protein, 28 aa, Artificial Sequence
  Cyclic GFR-binding peptide
  MOD_RES (28)..(28): Xaa is C or S
LSNITVQIMDDSSNVILGEMSNMVVRSX

SEQ ID NO: 102054 - protein, 25 aa, Artificial Sequence
  Cyclic GFR-binding peptide
APTKLSNITVQIMDDSSNVILGEMS

SEQ ID NO: 102055 - protein, 23 aa, Artificial Sequence
  Cyclic GFR-binding peptide
LSNITIQIMDAANNVVIGEMSDM

SEQ ID NO: 102056 - protein, 44 aa, Artificial Sequence; identical to SEQ ID NO: 24008
  Cyclic GFR-binding peptide
  MOD_RES (7)..(41)..(43): Xaa is C or S

SEQ ID NO: 102057 - protein, 29 aa, Artificial Sequence
  Cyclic GFR-binding peptide
  MOD_RES (2)..(2): Xaa is C or S
EXVPTEESNITMQIMRIKPHQGQHLGEMS

SEQ ID NO: 102058 - protein, 23 aa, Artificial Sequence
  Cyclic GFR-binding peptide
SNITMQIMDNGRVLLLGEMSMIV

SEQ ID NO: 102059 - protein, 23 aa, Artificial Sequence
  Cyclic GFR-binding peptide
KTSNITMQIMDNGRVLLIGEMSM

SEQ ID NO: 102060 - protein, 35 aa, Artificial Sequence; identical to SEQ ID NO: 24010
  Cyclic GFR-binding peptide
  MOD_RES (5)..(5): Xaa is C or S

SEQ ID NO: 102061 - protein, 34 aa, Artificial Sequence; identical to SEQ ID NO: 24011
  Cyclic GFR-binding peptide
  MOD_RES (4)..(4): Xaa is C or S

SEQ ID NO: 102062 - protein, 30 aa, Artificial Sequence
  Cyclic GFR-binding peptide
  MOD_RES (1)..(1): Xaa is C or S
XTPTKMSNITMQIMNDKQQIILGEMSGMVV

SEQ ID NO: 102063 - protein, 35 aa, Artificial Sequence; identical to SEQ ID NO: 24012
  Cyclic GFR-binding peptide
  MOD_RES (7)..(7): Xaa is C or S

SEQ ID NO: 102064 - protein, 31 aa, Artificial Sequence
  Cyclic GFR-binding peptide
  MOD_RES (1)..(2): Xaa is C or S
XXVPARLSNITIQIMDAANNVVLGEMSDMVV

SEQ ID NO: 102065 - protein, 31 aa, Artificial Sequence; identical to SEQ ID NO: 24015
  Cyclic GFR-binding peptide

SEQ ID NO: 102066 - protein, 38 aa, Artificial Sequence; identical to SEQ ID NO: 24017
  Cyclic GFR-binding peptide
  MOD_RES (2)..(36)..(38): Xaa is C or S

SEQ ID NO: 102067 - protein, 33 aa, Artificial Sequence
  Cyclic GFR-binding peptide
  MOD_RES (2)..(3): Xaa is C or S
PXXVSQDLSNITIQIMIGKTPKILGEMSMIVKS

SEQ ID NO: 102068 - protein, 29 aa, Artificial Sequence
  Cyclic GFR-binding peptide
  MOD_RES (27)..(29): Xaa is C or S
LSNITIQIMVGRKPKVIGEMSMIVRSXKX

SEQ ID NO: 102069 - protein, 27 aa, Artificial Sequence
  Cyclic GFR-binding peptide
  MOD_RES (1)..(1): Xaa is C or S
XVPTRLSNITIQIMDSANNVVLGEMSD

SEQ ID NO: 102070 - protein, 30 aa, Artificial Sequence
  Cyclic GFR-binding peptide
  MOD_RES (29)..(29): Xaa is C or S
QALSNITIQIMVGRKPKVLGEMSMIVRSXK

SEQ ID NO: 102071 - protein, 33 aa, Artificial Sequence
  Cyclic GFR-binding peptide
  MOD_RES (30)..(32): Xaa is C or S
ARLSNITIQIMDAANNVVIGEMSDMVVEAXGXR

SEQ ID NO: 102072 - protein, 22 aa, Artificial Sequence
  Cyclic GFR-binding peptide
SNITIQIMIGKTPKILGEMSMI

SEQ ID NO: 102073 - protein, 26 aa, Artificial Sequence
  Cyclic GFR-binding peptide
DLSNITIQIMIGKTPKIIGEMSMIVK

SEQ ID NO: 102074 - protein, 28 aa, Artificial Sequence
  Cyclic GFR-binding peptide
APVKTSNITMQIMDNGRVLLLGEMSMIV

SEQ ID NO: 102075 - protein, 31 aa, Artificial Sequence; identical to SEQ ID NO: 69267
  Cyclic GFR-binding peptide
  MOD_RES (3)..(4): Xaa is C or S

SEQ ID NO: 102076 - protein, 32 aa, Artificial Sequence; identical to SEQ ID NO: 24022
  Cyclic GFR-binding peptide

SEQ ID NO: 102077 - protein, 37 aa, Artificial Sequence
  Cyclic GFR-binding peptide
  MOD_RES (4)..(5)..(36): Xaa is C or S
PSTXXAPVKTSNITMQIMDNGRVLLLGEMSMIVEEXG

SEQ ID NO: 102078 - protein, 32 aa, Artificial Sequence; identical to SEQ ID NO: 24027
  Cyclic GFR-binding peptide

SEQ ID NO: 102079 - protein, 35 aa, Artificial Sequence; identical to SEQ ID NO: 24028
  Cyclic GFR-binding peptide

SEQ ID NO: 102080 - protein, 21 aa, Artificial Sequence
  Cyclic GFR-binding peptide
LSNITIQIMVGRKPKVLGEMS

SEQ ID NO: 102081 - protein, 25 aa, Artificial Sequence
  Cyclic GFR-binding peptide
LSNITIQIMDAANNVVIGEMSDMVV

SEQ ID NO: 102082 - protein, 28 aa, Artificial Sequence
  Cyclic GFR-binding peptide
HHSNITVQIMEYVRKKPKLIGEMSRLEE

SEQ ID NO: 102083 - protein, 27 aa, Artificial Sequence
  Cyclic GFR-binding peptide
VPQALSNITIQIMVGRKPKVIGEMSMI

SEQ ID NO: 102084 - protein, 41 aa, Artificial Sequence
  Cyclic GFR-binding peptide
  MOD_RES (5)..(6)..(38)..(40): Xaa is C or S
APASXXVPARLSNITIQIMDAANNVVLGEMSDMVVEAXGXR

SEQ ID NO: 102085 - protein, 40 aa, Artificial Sequence; identical to SEQ ID NO: 24033
  Cyclic GFR-binding peptide
  MOD_RES (2)..(39): Xaa is C or S

SEQ ID NO: 102086 - protein, 26 aa, Artificial Sequence
  Cyclic GFR-binding peptide
LSNITIQIMVGRKPKVIGEMSMIVRS

SEQ ID NO: 102087 - protein, 35 aa, Artificial Sequence
  Cyclic GFR-binding peptide
  MOD_RES (3)..(4): Xaa is C or S
ASXXVPARLSNITIQIMDAANNVVLGEMSDMVVEA

SEQ ID NO: 102088 - protein, 27 aa, Artificial Sequence
  Cyclic GFR-binding peptide
HSNITVQIMEYVRKKPKLIGEMSRLEE

SEQ ID NO: 102089 - protein, 25 aa, Artificial Sequence
  Cyclic GFR-binding peptide
SNITMQIMDNGRVLLIGEMSMIVEE

SEQ ID NO: 102090 - protein, 29 aa, Artificial Sequence
  Cyclic GFR-binding peptide
  MOD_RES (3)..(4): Xaa is C or S
GPXXTPTKMSNITMQIMNDKQQIIIGEMS

SEQ ID NO: 102091 - protein, 37 aa, Artificial Sequence; identical to SEQ ID NO: 24038
  Cyclic GFR-binding peptide
  MOD_RES (34)..(36): Xaa is C or S

SEQ ID NO: 102092 - protein, 26 aa, Artificial Sequence
  Cyclic GFR-binding peptide
LSNITIQIMVGRTPKVLGEMSMVVKS

SEQ ID NO: 102093 - protein, 24 aa, Artificial Sequence
  Cyclic GFR-binding peptide
LSNITIQIMIGKTPKILGEMSMIV

SEQ ID NO: 102094 - protein, 24 aa, Artificial Sequence
  Cyclic GFR-binding peptide
TKMSNITMQIMNDKQQIIIGEMSG

SEQ ID NO: 102095 - protein, 24 aa, Artificial Sequence
  Cyclic GFR-binding peptide
QDLSNITIQIMIGKTPKILGEMSM

SEQ ID NO: 102096 - protein, 31 aa, Artificial Sequence
  Cyclic GFR-binding peptide
  MOD_RES (28)..(30): Xaa is C or S
MSNITMQIMNDKQQIIIGEMSGMVVDRXGXS

SEQ ID NO: 102097 - protein, 33 aa, Artificial Sequence
  Cyclic GFR-binding peptide
  MOD_RES (4)..(5): Xaa is C or S
PASXXVPARLSNITIQIMDAANNVVLGEMSDMV

SEQ ID NO: 102098 - protein, 27 aa, Artificial Sequence
  Cyclic GFR-binding peptide
TRLSNITIQIMDSANNVVIGEMSDMVV

SEQ ID NO: 102099 - protein, 33 aa, Artificial Sequence; identical to SEQ ID NO: 69291
  Cyclic GFR-binding peptide
  MOD_RES (31)..(33): Xaa is C or S

SEQ ID NO: 102100 - protein, 30 aa, Artificial Sequence; identical to SEQ ID NO: 72517
  Cyclic GFR-binding peptide
  MOD_RES (29)..(29): Xaa is C or S

SEQ ID NO: 102101 - protein, 26 aa, Artificial Sequence
  Cyclic GFR-binding peptide
PTKLSNITVQIMDDSSNVIIGEMSNM

SEQ ID NO: 102102 - protein, 36 aa, Artificial Sequence
  Cyclic GFR-binding peptide
  MOD_RES (6)..(7): Xaa is C or S
GSAGPXXTPTKMSNITMQIMNDKQQIIIGEMSGMVV

SEQ ID NO: 102103 - protein, 32 aa, Artificial Sequence
  Cyclic GFR-binding peptide
  MOD_RES (4)..(5): Xaa is C or S
ASPXXVSQDLSNITIQIMIGKTPKILGEMSMI

SEQ ID NO: 102104 - protein, 33 aa, Artificial Sequence; identical to SEQ ID NO: 24042
  Cyclic GFR-binding peptide
  MOD_RES (33)..(33): Xaa is C or S

SEQ ID NO: 102105 - protein, 28 aa, Artificial Sequence
  Cyclic GFR-binding peptide
  MOD_RES (1)..(2): Xaa is C or S
XXVPTRLSNITIQIMDSANNVVLGEMSD

SEQ ID NO: 102106 - protein, 35 aa, Artificial Sequence; identical to SEQ ID NO: 72522
  Cyclic GFR-binding peptide
  MOD_RES (1)..(33)..(35): Xaa is C or S

SEQ ID NO: 102107 - protein, 31 aa, Artificial Sequence
  Cyclic GFR-binding peptide
  MOD_RES (29)..(31): Xaa is C or S
KMSNITMQIMNDKQQIILGEMSGMVVDRXGX

SEQ ID NO: 102108 - protein, 31 aa, Artificial Sequence; identical to SEQ ID NO: 24045
  Cyclic GFR-binding peptide

SEQ ID NO: 102109 - protein, 32 aa, Artificial Sequence
  Cyclic GFR-binding peptide
  MOD_RES (4)..(5): Xaa is C or S
PSTXXAPVKTSNITMQIMDNGRVLLLGEMSMI

SEQ ID NO: 102110 - protein, 35 aa, Artificial Sequence
  Cyclic GFR-binding peptide
  MOD_RES (3)..(4): Xaa is C or S
KPXXAPTKLSNITVQIMDDSSNVILGEMSNMVVRS

SEQ ID NO: 102111 - protein, 31 aa, Artificial Sequence
  Cyclic GFR-binding peptide
  MOD_RES (30)..(30): Xaa is C or S
TRLSNITIQIMDSANNVVLGEMSDMVVESXG

SEQ ID NO: 102112 - protein, 34 aa, Artificial Sequence; identical to SEQ ID NO: 24052
  Cyclic GFR-binding peptide
  MOD_RES (7)..(7): Xaa is C or S

SEQ ID NO: 102113 - protein, 27 aa, Artificial Sequence
  Cyclic GFR-binding peptide
QDLSNITIQIMVGRTPKVIGEMSMVVK

SEQ ID NO: 102114 - protein, 39 aa, Artificial Sequence; identical to SEQ ID NO: 24060
  Cyclic GFR-binding peptide
  MOD_RES (36)..(38): Xaa is C or S

SEQ ID NO: 102115 - protein, 33 aa, Artificial Sequence; identical to SEQ ID NO: 24061
  Cyclic GFR-binding peptide
  MOD_RES (30)..(32): Xaa is C or S

SEQ ID NO: 102116 - protein, 27 aa, Artificial Sequence
  Cyclic GFR-binding peptide
PTKLSNITVQIMDDSSNVIIGEMSNMV

SEQ ID NO: 102117 - protein, 22 aa, Artificial Sequence
  Cyclic GFR-binding peptide
SNITMQIMDNGRVLLLGEMSMI

SEQ ID NO: 102118 - protein, 23 aa, Artificial Sequence
  Cyclic GFR-binding peptide
SNITIQIMDSANNVVIGEMSDMV

SEQ ID NO: 102119 - protein, 35 aa, Artificial Sequence
  Cyclic GFR-binding peptide
  MOD_RES (2)..(3)..(34): Xaa is C or S
PXXVSQDLSNITIQIMIGKTPKILGEMSMIVKSXK

SEQ ID NO: 102120 - protein, 29 aa, Artificial Sequence
  Cyclic GFR-binding peptide
  MOD_RES (1)..(1): Xaa is C or S
XAPTKLSNITVQIMDDSSNVILGEMSNMV

SEQ ID NO: 102121 - protein, 31 aa, Artificial Sequence
  Cyclic GFR-binding peptide
VPARLSNITIQIMDAANNVVIGEMSDMVVEA

SEQ ID NO: 102122 - protein, 30 aa, Artificial Sequence; identical to SEQ ID NO: 24066
  Cyclic GFR-binding peptide

SEQ ID NO: 102123 - protein, 36 aa, Artificial Sequence
  Cyclic GFR-binding peptide
  MOD_RES (2)..(3)..(35): Xaa is C or S
PXXAPTKLSNITVQIMDDSSNVILGEMSNMVVRSXG

SEQ ID NO: 102124 - protein, 32 aa, Artificial Sequence; identical to SEQ ID NO: 24069
  Cyclic GFR-binding peptide
  MOD_RES (30)..(32): Xaa is C or S

SEQ ID NO: 102125 - protein, 29 aa, Artificial Sequence
  Cyclic GFR-binding peptide
  MOD_RES (1)..(2): Xaa is C or S
XXAPTKLSNITVQIMDDSSNVIIGEMSNM

SEQ ID NO: 102126 - protein, 30 aa, Artificial Sequence; identical to SEQ ID NO: 69321
  Cyclic GFR-binding peptide
  MOD_RES (27)..(29): Xaa is C or S

SEQ ID NO: 102127 - protein, 41 aa, Artificial Sequence; identical to SEQ ID NO: 69322
  Cyclic GFR-binding peptide
  MOD_RES (6)..(7)..(38)..(40): Xaa is C or S

SEQ ID NO: 102128 - protein, 36 aa, Artificial Sequence; identical to SEQ ID NO: 24072
  Cyclic GFR-binding peptide
  MOD_RES (1)..(1): Xaa is C or S

SEQ ID NO: 102129 - protein, 33 aa, Artificial Sequence
  Cyclic GFR-binding peptide
  MOD_RES (2)..(3): Xaa is C or S
PXXVPQDLSNITIQIMVGRTPKVLGEMSMVVKS

SEQ ID NO: 102130 - protein, 38 aa, Artificial Sequence; identical to SEQ ID NO: 24075
  Cyclic GFR-binding peptide
  MOD_RES (35)..(37): Xaa is C or S

SEQ ID NO: 102131 - protein, 32 aa, Artificial Sequence; identical to SEQ ID NO: 72560
  Cyclic GFR-binding peptide
  MOD_RES (1)..(32): Xaa is C or S

SEQ ID NO: 102132 - protein, 27 aa, Artificial Sequence
  Cyclic GFR-binding peptide
  MOD_RES (26)..(26): Xaa is C or S
SNITIQIMIGKTPKIIGEMSMIVKSXK

SEQ ID NO: 102133 - protein, 30 aa, Artificial Sequence; identical to SEQ ID NO: 24076
  Cyclic GFR-binding peptide
  MOD_RES (30)..(30): Xaa is C or S

SEQ ID NO: 102134 - protein, 37 aa, Artificial Sequence
  Cyclic GFR-binding peptide
  MOD_RES (4)..(5)..(37): Xaa is C or S
PKPXXAPTKLSNITVQIMDDSSNVILGEMSNMVVRSX

SEQ ID NO: 102135 - protein, 24 aa, Artificial Sequence
  Cyclic GFR-binding peptide
QDLSNITIQIMIGKTPKIIGEMSM

SEQ ID NO: 102136 - protein, 33 aa, Artificial Sequence
  Cyclic GFR-binding peptide
  MOD_RES (6)..(7): Xaa is C or S
ASASPXXVPQDLSNITIQIMVGRTPKVLGEMSM

SEQ ID NO: 102137 - protein, 26 aa, Artificial Sequence
  Cyclic GFR-binding peptide
TEESNITMQIMRIKPHQGQHLGEMSF

SEQ ID NO: 102138 - protein, 33 aa, Artificial Sequence; identical to SEQ ID NO: 24079
  Cyclic GFR-binding peptide

SEQ ID NO: 102139 - protein, 40 aa, Artificial Sequence
  Cyclic GFR-binding peptide
  MOD_RES (4)..(5)..(37)..(39): Xaa is C or S
AGPXXTPTKMSNITMQIMNDKQQIIIGEMSGMVVDRXGXS

SEQ ID NO: 102140 - protein, 28 aa, Artificial Sequence
  Cyclic GFR-binding peptide
  MOD_RES (1)..(2): Xaa is C or S
XXVPQDLSNITIQIMVGRTPKVLGEMSM

SEQ ID NO: 102141 - protein, 31 aa, Artificial Sequence; identical to SEQ ID NO: 24080
  Cyclic GFR-binding peptide

SEQ ID NO: 102142 - protein, 20 aa, Artificial Sequence
  Cyclic GFR-binding peptide
SNITIQIMVGRKPKVLGEMS

SEQ ID NO: 102143 - protein, 31 aa, Artificial Sequence; identical to SEQ ID NO: 24082
  Cyclic GFR-binding peptide

SEQ ID NO: 102144 - protein, 29 aa, Artificial Sequence
  Cyclic GFR-binding peptide
  MOD_RES (1)..(1): Xaa is C or S
XAPVKTSNITMQIMDNGRVLLIGEMSMIV

SEQ ID NO: 102145 - protein, 40 aa, Artificial Sequence; identical to SEQ ID NO: 69348
  Cyclic GFR-binding peptide
  MOD_RES (5)..(6)..(37)..(39): Xaa is C or S

SEQ ID NO: 102146 - protein, 33 aa, Artificial Sequence
  Cyclic GFR-binding peptide
  MOD_RES (2)..(3): Xaa is C or S
TXXVPTRLSNITIQIMDSANNVVIGEMSDMVVE

SEQ ID NO: 102147 - protein, 32 aa, Artificial Sequence; identical to SEQ ID NO: 24090
  Cyclic GFR-binding peptide
  MOD_RES (3)..(3): Xaa is C or S

SEQ ID NO: 102148 - protein, 26 aa, Artificial Sequence
  Cyclic GFR-binding peptide
PQALSNITIQIMVGRKPKVIGEMSMI

SEQ ID NO: 102149 - protein, 34 aa, Artificial Sequence
  Cyclic GFR-binding peptide
  MOD_RES (4)..(5): Xaa is C or S
PSTXXAPVKTSNITMQIMDNGRVLLIGEMSMIVE

SEQ ID NO: 102150 - protein, 22 aa, Artificial Sequence
  Cyclic GFR-binding peptide
KMSNITMQIMNDKQQIILGEMS

SEQ ID NO: 102151 - protein, 29 aa, Artificial Sequence
  Cyclic GFR-binding peptide
QSNITMQIMRIKPHQGQHIGEMSLEEHSQ

SEQ ID NO: 102152 - protein, 23 aa, Artificial Sequence
  Cyclic GFR-binding peptide
SNITIQIMDAANNVVLGEMSDMV

SEQ ID NO: 102153 - protein, 32 aa, Artificial Sequence; identical to SEQ ID NO: 72585
  Cyclic GFR-binding peptide
  MOD_RES (1)..(2): Xaa is C or S

SEQ ID NO: 102154 - protein, 38 aa, Artificial Sequence
  Cyclic GFR-binding peptide
  MOD_RES (5)..(6)..(38): Xaa is C or S
VPKPXXAPTKLSNITVQIMDDSSNVILGEMSNMVVRSX

SEQ ID NO: 102155 - protein, 32 aa, Artificial Sequence
  Cyclic GFR-binding peptide
  MOD_RES (1)..(2): Xaa is C or S
XXVSQDLSNITIQIMIGKTPKILGEMSMIVKS

SEQ ID NO: 102156 - protein, 38 aa, Artificial Sequence
  Cyclic GFR-binding peptide
  MOD_RES (2)..(3)..(35)..(37): Xaa is C or S
PXXTPTKMSNITMQIMNDKQQIILGEMSGMVVDRXGXS

SEQ ID NO: 102157 - protein, 30 aa, Artificial Sequence
  Cyclic GFR-binding peptide
  MOD_RES (28)..(30): Xaa is C or S
DLSNITIQIMIGKTPKILGEMSMIVKSXKX

SEQ ID NO: 102158 - protein, 25 aa, Artificial Sequence
  Cyclic GFR-binding peptide
SNITMQIMRIKPHQGQHLGEMSFLQ

SEQ ID NO: 102159 - protein, 22 aa, Artificial Sequence
  Cyclic GFR-binding peptide
SNITMQIMDNGRVLLIGEMSMI

SEQ ID NO: 102160 - protein, 24 aa, Artificial Sequence
  Cyclic GFR-binding peptide
SNITMQIMRIKPHQGQHIGEMSLE

SEQ ID NO: 102161 - protein, 35 aa, Artificial Sequence
  Cyclic GFR-binding peptide
  MOD_RES (1)..(33)..(35): Xaa is C or S
XVPTRLSNITIQIMDSANNVVIGEMSDMVVESXGX

SEQ ID NO: 102162 - protein, 32 aa, Artificial Sequence; identical to SEQ ID NO: 24110
  Cyclic GFR-binding peptide
  MOD_RES (32)..(32): Xaa is C or S

SEQ ID NO: 102163 - protein, 25 aa, Artificial Sequence
  Cyclic GFR-binding peptide
RLSNITIQIMDAANNVVIGEMSDMV

SEQ ID NO: 102164 - protein, 32 aa, Artificial Sequence; identical to SEQ ID NO: 69367
  Cyclic GFR-binding peptide
  MOD_RES (1)..(2): Xaa is C or S

SEQ ID NO: 102165 - protein, 34 aa, Artificial Sequence
  Cyclic GFR-binding peptide
  MOD_RES (1)..(33): Xaa is C or S
XVPARLSNITIQIMDAANNVVIGEMSDMVVEAXG

SEQ ID NO: 102166 - protein, 30 aa, Artificial Sequence
  Cyclic GFR-binding peptide
  MOD_RES (27)..(29): Xaa is C or S
SNITIQIMDAANNVVIGEMSDMVVEAXGXR

SEQ ID NO: 102167 - protein, 34 aa, Artificial Sequence
  Cyclic GFR-binding peptide
  MOD_RES (32)..(34): Xaa is C or S
VPARLSNITIQIMDAANNVVIGEMSDMVVEAXGX

SEQ ID NO: 102168 - protein, 33 aa, Artificial Sequence
  Cyclic GFR-binding peptide
  MOD_RES (6)..(7): Xaa is C or S
RVPSTXXAPVKTSNITMQIMDNGRVLLIGEMSM

SEQ ID NO: 102169 - protein, 28 aa, Artificial Sequence
  Cyclic GFR-binding peptide
  MOD_RES (1)..(2): Xaa is C or S
XXTPTKMSNITMQIMNDKQQIIIGEMSG

SEQ ID NO: 102170 - protein, 24 aa, Artificial Sequence
  Cyclic GFR-binding peptide
PARLSNITIQIMDAANNVVLGEMS

SEQ ID NO: 102171 - protein, 38 aa, Artificial Sequence
  Cyclic GFR-binding peptide
  MOD_RES (4)..(5)..(36)..(38): Xaa is C or S
AAPXXVPQALSNITIQIMVGRKPKVLGEMSMIVRSXKX

SEQ ID NO: 102172 - protein, 39 aa, Artificial Sequence; identical to SEQ ID NO: 24121
  Cyclic GFR-binding peptide
  MOD_RES (3)..(3): Xaa is C or S

SEQ ID NO: 102173 - protein, 24 aa, Artificial Sequence
  Cyclic GFR-binding peptide
SNITIQIMVGRKPKVLGEMSMIVR

SEQ ID NO: 102174 - protein, 29 aa, Artificial Sequence
  Cyclic GFR-binding peptide
VPQALSNITIQIMVGRKPKVLGEMSMIVR

SEQ ID NO: 102175 - protein, 30 aa, Artificial Sequence
  Cyclic GFR-binding peptide
  MOD_RES (4)..(5): Xaa is C or S
PPTXXVPTRLSNITIQIMDSANNVVIGEMS

SEQ ID NO: 102176 - protein, 40 aa, Artificial Sequence
  Cyclic GFR-binding peptide
  MOD_RES (4)..(5)..(37)..(39): Xaa is C or S
PPTXXVPTRLSNITIQIMDSANNVVLGEMSDMVVESXGXR

SEQ ID NO: 102177 - protein, 31 aa, Artificial Sequence
  Cyclic GFR-binding peptide
  MOD_RES (28)..(30): Xaa is C or S
KTSNITMQIMDNGRVLLIGEMSMIVEEXGXL

SEQ ID NO: 102178 - protein, 29 aa, Artificial Sequence
  Cyclic GFR-binding peptide
  MOD_RES (3)..(4): Xaa is C or S
KPXXAPTKLSNITVQIMDDSSNVILGEMS

SEQ ID NO: 102179 - protein, 32 aa, Artificial Sequence; identical to SEQ ID NO: 69379
  Cyclic GFR-binding peptide
  MOD_RES (32)..(32): Xaa is C or S

SEQ ID NO: 102180 - protein, 24 aa, Artificial Sequence
  Cyclic GFR-binding peptide
TKMSNITMQIMNDKQQIILGEMSG

SEQ ID NO: 102181 - protein, 30 aa, Artificial Sequence; identical to SEQ ID NO: 24128
  Cyclic GFR-binding peptide

SEQ ID NO: 102182 - protein, 36 aa, Artificial Sequence
  Cyclic GFR-binding peptide
  MOD_RES (2)..(3)..(34)..(36): Xaa is C or S
PXXVPQDLSNITIQIMVGRTPKVLGEMSMVVKSXKX

SEQ ID NO: 102183 - protein, 31 aa, Artificial Sequence; identical to SEQ ID NO: 69385
  Cyclic GFR-binding peptide
  MOD_RES (4)..(5): Xaa is C or S

SEQ ID NO: 102184 - protein, 36 aa, Artificial Sequence
  Cyclic GFR-binding peptide
  MOD_RES (3)..(4)..(36): Xaa is C or S
KPXXAPTKLSNITVQIMDDSSNVILGEMSNMVVRSX

SEQ ID NO: 102185 - protein, 32 aa, Artificial Sequence
  Cyclic GFR-binding peptide
  MOD_RES (1)..(32): Xaa is C or S
XAPVKTSNITMQIMDNGRVLLLGEMSMIVEEX

SEQ ID NO: 102186 - protein, 30 aa, Artificial Sequence; identical to SEQ ID NO: 69389
  Cyclic GFR-binding peptide
  MOD_RES (3)..(4): Xaa is C or S

SEQ ID NO: 102187 - protein, 31 aa, Artificial Sequence
  Cyclic GFR-binding peptide
  MOD_RES (2)..(3): Xaa is C or S
PXXVPQALSNITIQIMVGRKPKVLGEMSMIV

SEQ ID NO: 102188 - protein, 33 aa, Artificial Sequence
  Cyclic GFR-binding peptide
  MOD_RES (1)..(2)..(33): Xaa is C or S
XXVPQDLSNITIQIMVGRTPKVLGEMSMVVKSX

SEQ ID NO: 102189 - protein, 28 aa, Artificial Sequence
  Cyclic GFR-binding peptide
  MOD_RES (2)..(3): Xaa is C or S
PXXVPQDLSNITIQIMVGRTPKVLGEMS

SEQ ID NO: 102190 - protein, 25 aa, Artificial Sequence
  Cyclic GFR-binding peptide
PTKMSNITMQIMNDKQQIIIGEMSG

SEQ ID NO: 102191 - protein, 31 aa, Artificial Sequence
  Cyclic GFR-binding peptide
VPTRLSNITIQIMDSANNVVIGEMSDMVVES

SEQ ID NO: 102192 - protein, 33 aa, Artificial Sequence; identical to SEQ ID NO: 24144
  Cyclic GFR-binding peptide

SEQ ID NO: 102193 - protein, 32 aa, Artificial Sequence; identical to SEQ ID NO: 24145
  Cyclic GFR-binding peptide

SEQ ID NO: 102194 - protein, 34 aa, Artificial Sequence; identical to SEQ ID NO: 24147
  Cyclic GFR-binding peptide
  MOD_RES (33)..(33): Xaa is C or S

SEQ ID NO: 102195 - protein, 39 aa, Artificial Sequence
  Cyclic GFR-binding peptide
  MOD_RES (6)..(7)..(39): Xaa is C or S
GSAGPXXTPTKMSNITMQIMNDKQQIIIGEMSGMVVDRX

SEQ ID NO: 102196 - protein, 26 aa, Artificial Sequence
  Cyclic GFR-binding peptide
PQALSNITIQIMVGRKPKVLGEMSMI

SEQ ID NO: 102197 - protein, 26 aa, Artificial Sequence
  Cyclic GFR-binding peptide
LSNITVQIMDDSSNVIIGEMSNMVVR

SEQ ID NO: 102198 - protein, 25 aa, Artificial Sequence
  Cyclic GFR-binding peptide
SNITIQIMDAANNVVIGEMSDMVVE

SEQ ID NO: 102199 - protein, 31 aa, Artificial Sequence
  Cyclic GFR-binding peptide
  MOD_RES (28)..(30): Xaa is C or S
ALSNITIQIMVGRKPKVLGEMSMIVRSXKXS

SEQ ID NO: 102200 - protein, 24 aa, Artificial Sequence
  Cyclic GFR-binding peptide
LSNITIQIMVGRKPKVIGEMSMIV

SEQ ID NO: 102201 - protein, 30 aa, Artificial Sequence
  Cyclic GFR-binding peptide
  MOD_RES (1)..(1): Xaa is C or S
XAPVKTSNITMQIMDNGRVLLLGEMSMIVE

SEQ ID NO: 102202 - protein, 30 aa, Artificial Sequence
  Cyclic GFR-binding peptide
  MOD_RES (1)..(2): Xaa is C or S
XXVPARLSNITIQIMDAANNVVLGEMSDMV

SEQ ID NO: 102203 - protein, 30 aa, Artificial Sequence
  Cyclic GFR-binding peptide
  MOD_RES (28)..(30): Xaa is C or S
MSNITMQIMNDKQQIIIGEMSGMVVDRXGX

SEQ ID NO: 102204 - protein, 37 aa, Artificial Sequence
  Cyclic GFR-binding peptide
  MOD_RES (6)..(7): Xaa is C or S
ASASPXXVSQDLSNITIQIMIGKTPKILGEMSMIVKS

SEQ ID NO: 102205 - protein, 26 aa, Artificial Sequence
  Cyclic GFR-binding peptide
VSQDLSNITIQIMIGKTPKIIGEMSM

SEQ ID NO: 102206 - protein, 32 aa, Artificial Sequence
  Cyclic GFR-binding peptide
  MOD_RES (29)..(31): Xaa is C or S
RLSNITIQIMDSANNVVLGEMSDMVVESXGXR

SEQ ID NO: 102207 - protein, 35 aa, Artificial Sequence; identical to SEQ ID NO: 24161
  Cyclic GFR-binding peptide
  MOD_RES (32)..(34): Xaa is C or S

SEQ ID NO: 102208 - protein, 37 aa, Artificial Sequence
  Cyclic GFR-binding peptide
  MOD_RES (1)..(2)..(34)..(36): Xaa is C or S
XXVPTRLSNITIQIMDSANNVVIGEMSDMVVESXGXR

SEQ ID NO: 102209 - protein, 34 aa, Artificial Sequence; identical to SEQ ID NO: 72643
  Cyclic GFR-binding peptide
  MOD_RES (1)..(33): Xaa is C or S

SEQ ID NO: 102210 - protein, 43 aa, Artificial Sequence; identical to SEQ ID NO: 24164
  Cyclic GFR-binding peptide
  MOD_RES (3)..(40)..(42): Xaa is C or S

SEQ ID NO: 102211 - protein, 36 aa, Artificial Sequence
  Cyclic GFR-binding peptide
  MOD_RES (2)..(3)..(35): Xaa is C or S
SXXVPARLSNITIQIMDAANNVVIGEMSDMVVEAXG

SEQ ID NO: 102212 - protein, 34 aa, Artificial Sequence; identical to SEQ ID NO: 24165
  Cyclic GFR-binding peptide

SEQ ID NO: 102213 - protein, 25 aa, Artificial Sequence
  Cyclic GFR-binding peptide
LSNITVQIMEIVRKKPIFIGEMSTL

SEQ ID NO: 102214 - protein, 31 aa, Artificial Sequence; identical to SEQ ID NO: 72646
  Cyclic GFR-binding peptide
  MOD_RES (31)..(31): Xaa is C or S

SEQ ID NO: 102215 - protein, 29 aa, Artificial Sequence
  Cyclic GFR-binding peptide
  MOD_RES (28)..(28): Xaa is C or S
MSNITMQIMNDKQQIILGEMSGMVVDRXG

SEQ ID NO: 102216 - protein, 21 aa, Artificial Sequence
  Cyclic GFR-binding peptide
LSNITVQIMDDSSNVIIGEMS

SEQ ID NO: 102217 - protein, 33 aa, Artificial Sequence
  Cyclic GFR-binding peptide
  MOD_RES (4)..(5): Xaa is C or S
ASPXXVPQDLSNITIQIMVGRTPKVLGEMSMVV

SEQ ID NO: 102218 - protein, 35 aa, Artificial Sequence; identical to SEQ ID NO: 24176
  Cyclic GFR-binding peptide
  MOD_RES (1)..(1): Xaa is C or S

SEQ ID NO: 102219 - protein, 36 aa, Artificial Sequence; identical to SEQ ID NO: 24178
  Cyclic GFR-binding peptide
  MOD_RES (3)..(3): Xaa is C or S

SEQ ID NO: 102220 - protein, 23 aa, Artificial Sequence
  Cyclic GFR-binding peptide
DLSNITIQIMIGKTPKIIGEMSM

SEQ ID NO: 102221 - protein, 37 aa, Artificial Sequence; identical to SEQ ID NO: 69450
  Cyclic GFR-binding peptide
  MOD_RES (4)..(5)..(37): Xaa is C or S

SEQ ID NO: 102222 - protein, 35 aa, Artificial Sequence
  Cyclic GFR-binding peptide
  MOD_RES (4)..(5): Xaa is C or S
PSTXXAPVKTSNITMQIMDNGRVLLIGEMSMIVEE

SEQ ID NO: 102223 - protein, 34 aa, Artificial Sequence; identical to SEQ ID NO: 24189
  Cyclic GFR-binding peptide
  MOD_RES (4)..(4): Xaa is C or S

SEQ ID NO: 102224 - protein, 23 aa, Artificial Sequence
  Cyclic GFR-binding peptide
VKTSNITMQIMDNGRVLLIGEMS

SEQ ID NO: 102225 - protein, 24 aa, Artificial Sequence
  Cyclic GFR-binding peptide
PQALSNITIQIMVGRKPKVIGEMS

SEQ ID NO: 102226 - protein, 39 aa, Artificial Sequence; identical to SEQ ID NO: 24194
  Cyclic GFR-binding peptide
  MOD_RES (1)..(38): Xaa is C or S

SEQ ID NO: 102227 - protein, 32 aa, Artificial Sequence; identical to SEQ ID NO: 72665
  Cyclic GFR-binding peptide
  MOD_RES (4)..(5): Xaa is C or S

SEQ ID NO: 102228 - protein, 34 aa, Artificial Sequence
  Cyclic GFR-binding peptide
  MOD_RES (4)..(5): Xaa is C or S
AGPXXTPTKMSNITMQIMNDKQQIIIGEMSGMVV

SEQ ID NO: 102229 - protein, 33 aa, Artificial Sequence; identical to SEQ ID NO: 24196
  Cyclic GFR-binding peptide

SEQ ID NO: 102230 - protein, 31 aa, Artificial Sequence; identical to SEQ ID NO: 24197
  Cyclic GFR-binding peptide
  MOD_RES (31)..(31): Xaa is C or S

SEQ ID NO: 102231 - protein, 27 aa, Artificial Sequence
  Cyclic GFR-binding peptide
KMSNITMQIMNDKQQIILGEMSGMVVD

SEQ ID NO: 102232 - protein, 26 aa, Artificial Sequence
  Cyclic GFR-binding peptide
LSNITIQIMDSANNVVIGEMSDMVVE

SEQ ID NO: 102233 - protein, 37 aa, Artificial Sequence; identical to SEQ ID NO: 24200
  Cyclic GFR-binding peptide
  MOD_RES (37)..(37): Xaa is C or S

SEQ ID NO: 102234 - protein, 27 aa, Artificial Sequence
  Cyclic GFR-binding peptide
LSNITVQIMDDSSNVIIGEMSNMVVRS

SEQ ID NO: 102235 - protein, 36 aa, Artificial Sequence; identical to SEQ ID NO: 24201
  Cyclic GFR-binding peptide
  MOD_RES (5)..(5): Xaa is C or S

SEQ ID NO: 102236 - protein, 34 aa, Artificial Sequence
  Cyclic GFR-binding peptide
  MOD_RES (31)..(33): Xaa is C or S
PTRLSNITIQIMDSANNVVIGEMSDMVVESXGXR

SEQ ID NO: 102237 - protein, 37 aa, Artificial Sequence
  Cyclic GFR-binding peptide
  MOD_RES (4)..(5)..(36): Xaa is C or S
PSTXXAPVKTSNITMQIMDNGRVLLIGEMSMIVEEXG

SEQ ID NO: 102238 - protein, 28 aa, Artificial Sequence
  Cyclic GFR-binding peptide
VPQDLSNITIQIMVGRTPKVIGEMSMVV

SEQ ID NO: 102239 - protein, 40 aa, Artificial Sequence
  Cyclic GFR-binding peptide
  MOD_RES (5)..(6)..(38)..(40): Xaa is C or S
SAGPXXTPTKMSNITMQIMNDKQQIIIGEMSGMVVDRXGX

SEQ ID NO: 102240 - protein, 22 aa, Artificial Sequence
  Cyclic GFR-binding peptide
LSNITIQIMDAANNVVLGEMSD

SEQ ID NO: 102241 - protein, 41 aa, Artificial Sequence; identical to SEQ ID NO: 24205
  Cyclic GFR-binding peptide
  MOD_RES (2)..(39)..(41): Xaa is C or S

SEQ ID NO: 102242 - protein, 35 aa, Artificial Sequence; identical to SEQ ID NO: 24206
  Cyclic GFR-binding peptide
  MOD_RES (5)..(5): Xaa is C or S

SEQ ID NO: 102243 - protein, 34 aa, Artificial Sequence
  Cyclic GFR-binding peptide
  MOD_RES (3)..(4): Xaa is C or S
KPXXAPTKLSNITVQIMDDSSNVILGEMSNMVVR

SEQ ID NO: 102244 - protein, 34 aa, Artificial Sequence; identical to SEQ ID NO: 24207
  Cyclic GFR-binding peptide
  MOD_RES (31)..(33): Xaa is C or S

SEQ ID NO: 102245 - protein, 32 aa, Artificial Sequence
  Cyclic GFR-binding peptide
  MOD_RES (4)..(5): Xaa is C or S
ASPXXVPQDLSNITIQIMVGRTPKVLGEMSMV

SEQ ID NO: 102246 - protein, 26 aa, Artificial Sequence
  Cyclic GFR-binding peptide
  MOD_RES (26)..(26): Xaa is C or S
SNITIQIMIGKTPKILGEMSMIVKSX

SEQ ID NO: 102247 - protein, 33 aa, Artificial Sequence
  Cyclic GFR-binding peptide
  MOD_RES (6)..(7): Xaa is C or S
AAPASXXVPARLSNITIQIMDAANNVVIGEMSD

SEQ ID NO: 102248 - protein, 32 aa, Artificial Sequence; identical to SEQ ID NO: 69482
  Cyclic GFR-binding peptide
  MOD_RES (5)..(6): Xaa is C or S

SEQ ID NO: 102249 - protein, 27 aa, Artificial Sequence
  Cyclic GFR-binding peptide
ESNITMQIMRIKPHQGQHLGEMSFLQH

SEQ ID NO: 102250 - protein, 24 aa, Artificial Sequence
  Cyclic GFR-binding peptide
KLSNITVQIMDDSSNVIIGEMSNM

SEQ ID NO: 102251 - protein, 32 aa, Artificial Sequence; identical to SEQ ID NO: 24212
  Cyclic GFR-binding peptide
  MOD_RES (3)..(3): Xaa is C or S

SEQ ID NO: 102252 - protein, 31 aa, Artificial Sequence; identical to SEQ ID NO: 24214
  Cyclic GFR-binding peptide

SEQ ID NO: 102253 - protein, 25 aa, Artificial Sequence
  Cyclic GFR-binding peptide
PTKMSNITMQIMNDKQQIILGEMSG

SEQ ID NO: 102254 - protein, 28 aa, Artificial Sequence
  Cyclic GFR-binding peptide
  MOD_RES (2)..(3): Xaa is C or S
PXXVSQDLSNITIQIMIGKTPKIIGEMS

SEQ ID NO: 102255 - protein, 28 aa, Artificial Sequence
  Cyclic GFR-binding peptide
  MOD_RES (1)..(1): Xaa is C or S
XAPVKTSNITMQIMDNGRVLLIGEMSMI

SEQ ID NO: 102256 - protein, 32 aa, Artificial Sequence
  Cyclic GFR-binding peptide
  MOD_RES (3)..(4): Xaa is C or S
STXXAPVKTSNITMQIMDNGRVLLLGEMSMIV

SEQ ID NO: 102257 - protein, 29 aa, Artificial Sequence
  Cyclic GFR-binding peptide
SNITVQIMEYVRKKPKLLGEMSRLEEHLE

SEQ ID NO: 102258 - protein, 28 aa, Artificial Sequence
  Cyclic GFR-binding peptide
  MOD_RES (2)..(3): Xaa is C or S
PXXVPQALSNITIQIMVGRKPKVIGEMS

SEQ ID NO: 102259 - protein, 30 aa, Artificial Sequence; identical to SEQ ID NO: 72694
  Cyclic GFR-binding peptide
  MOD_RES (30)..(30): Xaa is C or S

SEQ ID NO: 102260 - protein, 22 aa, Artificial Sequence
  Cyclic GFR-binding peptide
SNITVQIMEIVRKKPIFLGEMS

SEQ ID NO: 102261 - protein, 24 aa, Artificial Sequence
  Cyclic GFR-binding peptide
SNITMQIMNDKQQIILGEMSGMVV

SEQ ID NO: 102262 - protein, 32 aa, Artificial Sequence
  Cyclic GFR-binding peptide
  MOD_RES (3)..(4): Xaa is C or S
KPXXAPTKLSNITVQIMDDSSNVILGEMSNMV

SEQ ID NO: 102263 - protein, 28 aa, Artificial Sequence
  Cyclic GFR-binding peptide
VPTRLSNITIQIMDSANNVVIGEMSDMV

SEQ ID NO: 102264 - protein, 31 aa, Artificial Sequence; identical to SEQ ID NO: 24228
  Cyclic GFR-binding peptide

SEQ ID NO: 102265 - protein, 35 aa, Artificial Sequence; identical to SEQ ID NO: 24229
  Cyclic GFR-binding peptide
  MOD_RES (2)..(2): Xaa is C or S

SEQ ID NO: 102266 - protein, 35 aa, Artificial Sequence; identical to SEQ ID NO: 69502
  Cyclic GFR-binding peptide
  MOD_RES (5)..(6): Xaa is C or S

SEQ ID NO: 102267 - protein, 37 aa, Artificial Sequence
  Cyclic GFR-binding peptide
  MOD_RES (2)..(3)..(34)..(36): Xaa is C or S
PXXVSQDLSNITIQIMIGKTPKILGEMSMIVKSXKXS

SEQ ID NO: 102268 - protein, 31 aa, Artificial Sequence
  Cyclic GFR-binding peptide
  MOD_RES (4)..(5): Xaa is C or S
AAPXXVPQALSNITIQIMVGRKPKVLGEMSM

SEQ ID NO: 102269 - protein, 39 aa, Artificial Sequence
  Cyclic GFR-binding peptide
  MOD_RES (5)..(6)..(38): Xaa is C or S
SAGPXXTPTKMSNITMQIMNDKQQIIIGEMSGMVVDRXG

SEQ ID NO: 102270 - protein, 33 aa, Artificial Sequence
  Cyclic GFR-binding peptide
  MOD_RES (31)..(33): Xaa is C or S
PTKLSNITVQIMDDSSNVILGEMSNMVVRSXGX

SEQ ID NO: 102271 - protein, 33 aa, Artificial Sequence; identical to SEQ ID NO: 24235
  Cyclic GFR-binding peptide

SEQ ID NO: 102272 - protein, 32 aa, Artificial Sequence
  Cyclic GFR-binding peptide
  MOD_RES (32)..(32): Xaa is C or S
TPTKMSNITMQIMNDKQQIILGEMSGMVVDRX

SEQ ID NO: 102273 - protein, 31 aa, Artificial Sequence
  Cyclic GFR-binding peptide
  MOD_RES (1)..(1): Xaa is C or S
XVPTRLSNITIQIMDSANNVVIGEMSDMVVE

SEQ ID NO: 102274 - protein, 40 aa, Artificial Sequence
  Cyclic GFR-binding peptide
  MOD_RES (5)..(6)..(38)..(40): Xaa is C or S
TPPTXXVPTRLSNITIQIMDSANNVVLGEMSDMVVESXGX

SEQ ID NO: 102275 - protein, 23 aa, Artificial Sequence
  Cyclic GFR-binding peptide
QDLSNITIQIMIGKTPKILGEMS

SEQ ID NO: 102276 - protein, 38 aa, Artificial Sequence; identical to SEQ ID NO: 69513
  Cyclic GFR-binding peptide
  MOD_RES (3)..(4)..(35)..(37): Xaa is C or S

SEQ ID NO: 102277 - protein, 39 aa, Artificial Sequence
  Cyclic GFR-binding peptide
  MOD_RES (3)..(4)..(36)..(38): Xaa is C or S
GPXXTPTKMSNITMQIMNDKQQIILGEMSGMVVDRXGXS

SEQ ID NO: 102278 - protein, 30 aa, Artificial Sequence; identical to SEQ ID NO: 24247
  Cyclic GFR-binding peptide
  MOD_RES (1)..(1): Xaa is C or S

SEQ ID NO: 102279 - protein, 34 aa, Artificial Sequence
  Cyclic GFR-binding peptide
  MOD_RES (3)..(4): Xaa is C or S
SPXXVSQDLSNITIQIMIGKTPKILGEMSMIVKS

SEQ ID NO: 102280 - protein, 33 aa, Artificial Sequence; identical to SEQ ID NO: 69517
  Cyclic GFR-binding peptide
  MOD_RES (5)..(6): Xaa is C or S

SEQ ID NO: 102281 - protein, 26 aa, Artificial Sequence
  Cyclic GFR-binding peptide
VPARLSNITIQIMDAANNVVLGEMSD

SEQ ID NO: 102282 - protein, 20 aa, Artificial Sequence
  Cyclic GFR-binding peptide
SNITIQIMIGKTPKILGEMS

SEQ ID NO: 102283 - protein, 24 aa, Artificial Sequence
  Cyclic GFR-binding peptide
LSNITIQIMDAANNVVIGEMSDMV

SEQ ID NO: 102284 - protein, 28 aa, Artificial Sequence
  Cyclic GFR-binding peptide
  MOD_RES (1)..(2): Xaa is C or S
XXAPTKLSNITVQIMDDSSNVIIGEMSN

SEQ ID NO: 102285 - protein, 33 aa, Artificial Sequence; identical to SEQ ID NO: 24252
  Cyclic GFR-binding peptide

SEQ ID NO: 102286 - protein, 33 aa, Artificial Sequence
  Cyclic GFR-binding peptide
  MOD_RES (1)..(33): Xaa is C or S
XAPTKLSNITVQIMDDSSNVILGEMSNMVVRSX

SEQ ID NO: 102287 - protein, 22 aa, Artificial Sequence
  Cyclic GFR-binding peptide
SNITIQIMDAANNVVLGEMSDM

SEQ ID NO: 102288 - protein, 22 aa, Artificial Sequence
  Cyclic GFR-binding peptide
SNITVQIMEYVRKKPKLIGEMS

SEQ ID NO: 102289 - protein, 30 aa, Artificial Sequence
  Cyclic GFR-binding peptide
  MOD_RES (27)..(29): Xaa is C or S
LSNITIQIMVGRKPKVLGEMSMIVRSXKXS

SEQ ID NO: 102290 - protein, 37 aa, Artificial Sequence; identical to SEQ ID NO: 24264
  Cyclic GFR-binding peptide
  MOD_RES (1)..(1): Xaa is C or S

SEQ ID NO: 102291 - protein, 35 aa, Artificial Sequence; identical to SEQ ID NO: 24266
  Cyclic GFR-binding peptide
  MOD_RES (34)..(34): Xaa is C or S

SEQ ID NO: 102292 - protein, 35 aa, Artificial Sequence; identical to SEQ ID NO: 24267
  Cyclic GFR-binding peptide
  MOD_RES (6)..(6): Xaa is C or S

SEQ ID NO: 102293 - protein, 35 aa, Artificial Sequence; identical to SEQ ID NO: 72735
  Cyclic GFR-binding peptide
  MOD_RES (4)..(5): Xaa is C or S

SEQ ID NO: 102294 - protein, 25 aa, Artificial Sequence
  Cyclic GFR-binding peptide
ALSNITIQIMVGRKPKVLGEMSMIV

SEQ ID NO: 102295 - protein, 29 aa, Artificial Sequence
  Cyclic GFR-binding peptide
  MOD_RES (1)..(1): Xaa is C or S
XAPTKLSNITVQIMDDSSNVIIGEMSNMV

SEQ ID NO: 102296 - protein, 37 aa, Artificial Sequence
  Cyclic GFR-binding peptide
  MOD_RES (3)..(4)..(35)..(37): Xaa is C or S
SPXXVPQDLSNITIQIMVGRTPKVLGEMSMVVKSXKX

SEQ ID NO: 102297 - protein, 34 aa, Artificial Sequence; identical to SEQ ID NO: 72743
  Cyclic GFR-binding peptide
  MOD_RES (4)..(5): Xaa is C or S

SEQ ID NO: 102298 - protein, 38 aa, Artificial Sequence
  Cyclic GFR-binding peptide
  MOD_RES (3)..(4)..(36)..(38): Xaa is C or S
KPXXAPTKLSNITVQIMDDSSNVILGEMSNMVVRSXGX

SEQ ID NO: 102299 - protein, 22 aa, Artificial Sequence
  Cyclic GFR-binding peptide
SNITIQIMDSANNVVLGEMSDM

SEQ ID NO: 102300 - protein, 26 aa, Artificial Sequence
  Cyclic GFR-binding peptide
VPQDLSNITIQIMVGRTPKVIGEMSM

SEQ ID NO: 102301 - protein, 30 aa, Artificial Sequence; identical to SEQ ID NO: 24281
  Cyclic GFR-binding peptide
  MOD_RES (1)..(1): Xaa is C or S

SEQ ID NO: 102302 - protein, 27 aa, Artificial Sequence
  Cyclic GFR-binding peptide
  MOD_RES (1)..(1): Xaa is C or S
XVSQDLSNITIQIMIGKTPKILGEMSM

SEQ ID NO: 102303 - protein, 27 aa, Artificial Sequence
  Cyclic GFR-binding peptide
  MOD_RES (26)..(26): Xaa is C or S
SNITIQIMVGRTPKVIGEMSMVVKSXK

SEQ ID NO: 102304 - protein, 30 aa, Artificial Sequence
  Cyclic GFR-binding peptide
  MOD_RES (29)..(29): Xaa is C or S
VKTSNITMQIMDNGRVLLIGEMSMIVEEXG

SEQ ID NO: 102305 - protein, 30 aa, Artificial Sequence; identical to SEQ ID NO: 24287
  Cyclic GFR-binding peptide

SEQ ID NO: 102306 - protein, 31 aa, Artificial Sequence; identical to SEQ ID NO: 69561
  Cyclic GFR-binding peptide
  MOD_RES (1)..(2): Xaa is C or S

SEQ ID NO: 102307 - protein, 33 aa, Artificial Sequence
  Cyclic GFR-binding peptide
  MOD_RES (2)..(3): Xaa is C or S
TXXVPTRLSNITIQIMDSANNVVLGEMSDMVVE

SEQ ID NO: 102308 - protein, 35 aa, Artificial Sequence; identical to SEQ ID NO: 69562
  Cyclic GFR-binding peptide
  MOD_RES (3)..(4)..(35): Xaa is C or S

SEQ ID NO: 102309 - protein, 27 aa, Artificial Sequence
  Cyclic GFR-binding peptide
QVQLSNITVQIMEIVRKKPIFLGEMST

SEQ ID NO: 102310 - protein, 26 aa, Artificial Sequence
  Cyclic GFR-binding peptide
ALSNITIQIMVGRKPKVLGEMSMIVR

SEQ ID NO: 102311 - protein, 31 aa, Artificial Sequence
  Cyclic GFR-binding peptide
  MOD_RES (31)..(31): Xaa is C or S
PTKLSNITVQIMDDSSNVILGEMSNMVVRSX

SEQ ID NO: 102312 - protein, 34 aa, Artificial Sequence
  Cyclic GFR-binding peptide
  MOD_RES (4)..(5): Xaa is C or S
ASPXXVSQDLSNITIQIMIGKTPKILGEMSMIVK

SEQ ID NO: 102313 - protein, 39 aa, Artificial Sequence
  Cyclic GFR-binding peptide
  MOD_RES (6)..(7)..(39): Xaa is C or S
AAPASXXVPARLSNITIQIMDAANNVVIGEMSDMVVEAX

SEQ ID NO: 102314 - protein, 38 aa, Artificial Sequence
  Cyclic GFR-binding peptide
  MOD_RES (5)..(6)..(37): Xaa is C or S
SAAPXXVPQALSNITIQIMVGRKPKVLGEMSMIVRSXK

SEQ ID NO: 102315 - protein, 33 aa, Artificial Sequence
  Cyclic GFR-binding peptide
  MOD_RES (1)..(2)..(33): Xaa is C or S
XXVSQDLSNITIQIMIGKTPKILGEMSMIVKSX

SEQ ID NO: 102316 - protein, 36 aa, Artificial Sequence
  Cyclic GFR-binding peptide
  MOD_RES (5)..(6): Xaa is C or S
SASPXXVSQDLSNITIQIMIGKTPKILGEMSMIVKS

SEQ ID NO: 102317 - protein, 23 aa, Artificial Sequence
  Cyclic GFR-binding peptide
SNITVQIMEYVRKKPKLLGEMSR

SEQ ID NO: 102318 - protein, 33 aa, Artificial Sequence; identical to SEQ ID NO: 69575
  Cyclic GFR-binding peptide
  MOD_RES (3)..(4): Xaa is C or S

SEQ ID NO: 102319 - protein, 26 aa, Artificial Sequence
  Cyclic GFR-binding peptide
LSNITIQIMVGRKPKVLGEMSMIVRS

SEQ ID NO: 102320 - protein, 35 aa, Artificial Sequence; identical to SEQ ID NO: 24313
  Cyclic GFR-binding peptide
  MOD_RES (5)..(5): Xaa is C or S

SEQ ID NO: 102321 - protein, 38 aa, Artificial Sequence; identical to SEQ ID NO: 24314
  Cyclic GFR-binding peptide
  MOD_RES (2)..(2): Xaa is C or S

SEQ ID NO: 102322 - protein, 24 aa, Artificial Sequence
  Cyclic GFR-binding peptide
LSNITIQIMVGRTPKVLGEMSMVV

SEQ ID NO: 102323 - protein, 23 aa, Artificial Sequence
  Cyclic GFR-binding peptide
ARLSNITIQIMDAANNVVIGEMS

SEQ ID NO: 102324 - protein, 27 aa, Artificial Sequence
  Cyclic GFR-binding peptide
  MOD_RES (27)..(27): Xaa is C or S
LSNITIQIMIGKTPKIIGEMSMIVKSX

SEQ ID NO: 102325 - protein, 22 aa, Artificial Sequence
  Cyclic GFR-binding peptide
MSNITMQIMNDKQQIIIGEMSG

SEQ ID NO: 102326 - protein, 40 aa, Artificial Sequence
  Cyclic GFR-binding peptide
  MOD_RES (5)..(6)..(37)..(39): Xaa is C or S
VPSTXXAPVKTSNITMQIMDNGRVLLIGEMSMIVEEXGXL

SEQ ID NO: 102327 - protein, 32 aa, Artificial Sequence; identical to SEQ ID NO: 69583
  Cyclic GFR-binding peptide
  MOD_RES (2)..(3): Xaa is C or S

SEQ ID NO: 102328 - protein, 30 aa, Artificial Sequence
  Cyclic GFR-binding peptide
  MOD_RES (1)..(1): Xaa is C or S
XVPARLSNITIQIMDAANNVVIGEMSDMVV

SEQ ID NO: 102329 - protein, 36 aa, Artificial Sequence
  Cyclic GFR-binding peptide
  MOD_RES (5)..(6): Xaa is C or S
VPSTXXAPVKTSNITMQIMDNGRVLLIGEMSMIVEE

SEQ ID NO: 102330 - protein, 35 aa, Artificial Sequence; identical to SEQ ID NO: 24322
  Cyclic GFR-binding peptide
  MOD_RES (5)..(5): Xaa is C or S

SEQ ID NO: 102331 - protein, 27 aa, Artificial Sequence
  Cyclic GFR-binding peptide
  MOD_RES (27)..(27): Xaa is C or S
SNITIQIMDAANNVVIGEMSDMVVEAX

SEQ ID NO: 102332 - protein, 33 aa, Artificial Sequence; identical to SEQ ID NO: 24327
  Cyclic GFR-binding peptide
  MOD_RES (4)..(4): Xaa is C or S

SEQ ID NO: 102333 - protein, 26 aa, Artificial Sequence
  Cyclic GFR-binding peptide
ALSNITIQIMVGRKPKVIGEMSMIVR

SEQ ID NO: 102334 - protein, 23 aa, Artificial Sequence
  Cyclic GFR-binding peptide
QDLSNITIQIMVGRTPKVIGEMS

SEQ ID NO: 102335 - protein, 39 aa, Artificial Sequence
  Cyclic GFR-binding peptide
  MOD_RES (5)..(6)..(37)..(39): Xaa is C or S
SASPXXVPQDLSNITIQIMVGRTPKVLGEMSMVVKSXKX

SEQ ID NO: 102336 - protein, 25 aa, Artificial Sequence
  Cyclic GFR-binding peptide
QSNITMQIMRIKPHQGQHIGEMSLE

SEQ ID NO: 102337 - protein, 26 aa, Artificial Sequence
  Cyclic GFR-binding peptide
SNITVQIMEIVRKKPIFIGEMSTLED

SEQ ID NO: 102338 - protein, 29 aa, Artificial Sequence
  Cyclic GFR-binding peptide
VPTEESNITMQIMRIKPHQGQHLGEMSFL

SEQ ID NO: 102339 - protein, 34 aa, Artificial Sequence; identical to SEQ ID NO: 69594
  Cyclic GFR-binding peptide
  MOD_RES (1)..(32)..(34): Xaa is C or S

SEQ ID NO: 102340 - protein, 38 aa, Artificial Sequence
  Cyclic GFR-binding peptide
  MOD_RES (2)..(3)..(35)..(37): Xaa is C or S
SXXVPARLSNITIQIMDAANNVVLGEMSDMVVEAXGXR

SEQ ID NO: 102341 - protein, 35 aa, Artificial Sequence
  Cyclic GFR-binding peptide
  MOD_RES (2)..(3)..(34): Xaa is C or S
TXXAPVKTSNITMQIMDNGRVLLLGEMSMIVEEXG

SEQ ID NO: 102342 - protein, 30 aa, Artificial Sequence
  Cyclic GFR-binding peptide
  MOD_RES (2)..(3): Xaa is C or S
PXXTPTKMSNITMQIMNDKQQIILGEMSGM

SEQ ID NO: 102343 - protein, 29 aa, Artificial Sequence
  Cyclic GFR-binding peptide
PARLSNITIQIMDAANNVVIGEMSDMVVE

SEQ ID NO: 102344 - protein, 37 aa, Artificial Sequence
  Cyclic GFR-binding peptide
  MOD_RES (4)..(5)..(36): Xaa is C or S
ASPXXVSQDLSNITIQIMIGKTPKILGEMSMIVKSXK

SEQ ID NO: 102345 - protein, 30 aa, Artificial Sequence; identical to SEQ ID NO: 24341
  Cyclic GFR-binding peptide

SEQ ID NO: 102346 - protein, 39 aa, Artificial Sequence; identical to SEQ ID NO: 24342
  Cyclic GFR-binding peptide
  MOD_RES (2)..(39): Xaa is C or S

SEQ ID NO: 102347 - protein, 33 aa, Artificial Sequence; identical to SEQ ID NO: 72801
  Cyclic GFR-binding peptide
  MOD_RES (5)..(6): Xaa is C or S

SEQ ID NO: 102348 - protein, 32 aa, Artificial Sequence
  Cyclic GFR-binding peptide
  MOD_RES (1)..(1): Xaa is C or S
XAPTKLSNITVQIMDDSSNVILGEMSNMVVRS

SEQ ID NO: 102349 - protein, 39 aa, Artificial Sequence
  Cyclic GFR-binding peptide
  MOD_RES (5)..(6)..(37)..(39): Xaa is C or S
VPSTXXAPVKTSNITMQIMDNGRVLLIGEMSMIVEEXGX

SEQ ID NO: 102350 - protein, 33 aa, Artificial Sequence
  Cyclic GFR-binding peptide
  MOD_RES (3)..(4): Xaa is C or S
APXXVPQALSNITIQIMVGRKPKVLGEMSMIVR

SEQ ID NO: 102351 - protein, 30 aa, Artificial Sequence
  Cyclic GFR-binding peptide
  MOD_RES (1)..(2): Xaa is C or S
XXVSQDLSNITIQIMIGKTPKILGEMSMIV

SEQ ID NO: 102352 - protein, 30 aa, Artificial Sequence; identical to SEQ ID NO: 69601
  Cyclic GFR-binding peptide
  MOD_RES (2)..(3): Xaa is C or S

SEQ ID NO: 102353 - protein, 30 aa, Artificial Sequence
  Cyclic GFR-binding peptide
PTKLSNITVQIMDDSSNVILGEMSNMVVRS

SEQ ID NO: 102354 - protein, 26 aa, Artificial Sequence
  Cyclic GFR-binding peptide
VPQALSNITIQIMVGRKPKVIGEMSM

SEQ ID NO: 102355 - protein, 33 aa, Artificial Sequence; identical to SEQ ID NO: 24352
  Cyclic GFR-binding peptide
  MOD_RES (6)..(6): Xaa is C or S

SEQ ID NO: 102356 - protein, 28 aa, Artificial Sequence
  Cyclic GFR-binding peptide
PVKTSNITMQIMDNGRVLLIGEMSMIVE

SEQ ID NO: 102357 - protein, 39 aa, Artificial Sequence
  Cyclic GFR-binding peptide
  MOD_RES (6)..(7)..(39): Xaa is C or S
GSAGPXXTPTKMSNITMQIMNDKQQIILGEMSGMVVDRX

SEQ ID NO: 102358 - protein, 23 aa, Artificial Sequence
  Cyclic GFR-binding peptide
LSNITIQIMVGRTPKVIGEMSMV

SEQ ID NO: 102359 - protein, 38 aa, Artificial Sequence; identical to SEQ ID NO: 24357
  Cyclic GFR-binding peptide
  MOD_RES (7)..(7): Xaa is C or S

SEQ ID NO: 102360 - protein, 31 aa, Artificial Sequence
  Cyclic GFR-binding peptide
  MOD_RES (1)..(1): Xaa is C or S
XAPVKTSNITMQIMDNGRVLLIGEMSMIVEE

SEQ ID NO: 102361 - protein, 35 aa, Artificial Sequence; identical to SEQ ID NO: 69614
  Cyclic GFR-binding peptide
  MOD_RES (1)..(2)..(34): Xaa is C or S

SEQ ID NO: 102362 - protein, 28 aa, Artificial Sequence
  Cyclic GFR-binding peptide
  MOD_RES (28)..(28): Xaa is C or S
KTSNITMQIMDNGRVLLLGEMSMIVEEX

SEQ ID NO: 102363 - protein, 22 aa, Artificial Sequence
  Cyclic GFR-binding peptide
KMSNITMQIMNDKQQIIIGEMS

SEQ ID NO: 102364 - protein, 30 aa, Artificial Sequence; identical to SEQ ID NO: 24364
  Cyclic GFR-binding peptide
  MOD_RES (30)..(30): Xaa is C or S

SEQ ID NO: 102365 - protein, 24 aa, Artificial Sequence
  Cyclic GFR-binding peptide
SNITVQIMDDSSNVILGEMSNMVV

SEQ ID NO: 102366 - protein, 28 aa, Artificial Sequence
  Cyclic GFR-binding peptide
  MOD_RES (1)..(1): Xaa is C or S
XVPTEESNITMQIMRIKPHQGQHLGEMS

SEQ ID NO: 102367 - protein, 35 aa, Artificial Sequence
  Cyclic GFR-binding peptide
  MOD_RES (6)..(7): Xaa is C or S
RVPSTXXAPVKTSNITMQIMDNGRVLLLGEMSMIV

SEQ ID NO: 102368 - protein, 30 aa, Artificial Sequence; identical to SEQ ID NO: 24372
  Cyclic GFR-binding peptide
  MOD_RES (3)..(3): Xaa is C or S

SEQ ID NO: 102369 - protein, 40 aa, Artificial Sequence
  Cyclic GFR-binding peptide
  MOD_RES (6)..(7)..(38)..(40): Xaa is C or S
ASASPXXVSQDLSNITIQIMIGKTPKILGEMSMIVKSXKX

SEQ ID NO: 102370 - protein, 24 aa, Artificial Sequence
  Cyclic GFR-binding peptide
LSNITIQIMVGRTPKVIGEMSMVV

SEQ ID NO: 102371 - protein, 32 aa, Artificial Sequence
  Cyclic GFR-binding peptide
  MOD_RES (1)..(2): Xaa is C or S
XXAPVKTSNITMQIMDNGRVLLIGEMSMIVEE

SEQ ID NO: 102372 - protein, 36 aa, Artificial Sequence; identical to SEQ ID NO: 69626
  Cyclic GFR-binding peptide
  MOD_RES (6)..(7): Xaa is C or S

SEQ ID NO: 102373 - protein, 40 aa, Artificial Sequence
  Cyclic GFR-binding peptide
  MOD_RES (6)..(7)..(38)..(40): Xaa is C or S
RVPSTXXAPVKTSNITMQIMDNGRVLLLGEMSMIVEEXGX

SEQ ID NO: 102374 - protein, 28 aa, Artificial Sequence
  Cyclic GFR-binding peptide
  MOD_RES (27)..(27): Xaa is C or S
SNITIQIMDAANNVVIGEMSDMVVEAXG

SEQ ID NO: 102375 - protein, 30 aa, Artificial Sequence; identical to SEQ ID NO: 72844
  Cyclic GFR-binding peptide
  MOD_RES (1)..(2): Xaa is C or S

SEQ ID NO: 102376 - protein, 33 aa, Artificial Sequence
  Cyclic GFR-binding peptide
  MOD_RES (1)..(33): Xaa is C or S
XVPTRLSNITIQIMDSANNVVLGEMSDMVVESX

SEQ ID NO: 102377 - protein, 25 aa, Artificial Sequence
  Cyclic GFR-binding peptide
APVKTSNITMQIMDNGRVLLLGEMS

SEQ ID NO: 102378 - protein, 34 aa, Artificial Sequence
  Cyclic GFR-binding peptide
  MOD_RES (31)..(33): Xaa is C or S
PTKMSNITMQIMNDKQQIILGEMSGMVVDRXGXS

SEQ ID NO: 102379 - protein, 27 aa, Artificial Sequence
  Cyclic GFR-binding peptide
SQDLSNITIQIMIGKTPKIIGEMSMIV

SEQ ID NO: 102380 - protein, 34 aa, Artificial Sequence; identical to SEQ ID NO: 24388
  Cyclic GFR-binding peptide
  MOD_RES (3)..(3): Xaa is C or S

SEQ ID NO: 102381 - protein, 33 aa, Artificial Sequence
  Cyclic GFR-binding peptide
  MOD_RES (31)..(33): Xaa is C or S
PTRLSNITIQIMDSANNVVIGEMSDMVVESXGX

SEQ ID NO: 102382 - protein, 28 aa, Artificial Sequence
  Cyclic GFR-binding peptide
TQVQLSNITVQIMEIVRKKPIFIGEMST

SEQ ID NO: 102383 - protein, 20 aa, Artificial Sequence
  Cyclic GFR-binding peptide
SNITIQIMVGRTPKVIGEMS

SEQ ID NO: 102384 - protein, 26 aa, Artificial Sequence
  Cyclic GFR-binding peptide
VQLSNITVQIMEIVRKKPIFIGEMST

SEQ ID NO: 102385 - protein, 35 aa, Artificial Sequence; identical to SEQ ID NO: 24398
  Cyclic GFR-binding peptide
  MOD_RES (34)..(34): Xaa is C or S

SEQ ID NO: 102386 - protein, 40 aa, Artificial Sequence; identical to SEQ ID NO: 24399
  Cyclic GFR-binding peptide
  MOD_RES (37)..(39): Xaa is C or S

SEQ ID NO: 102387 - protein, 45 aa, Artificial Sequence; identical to SEQ ID NO: 24401
  Cyclic GFR-binding peptide
  MOD_RES (5)..(42)..(44): Xaa is C or S

SEQ ID NO: 102388 - protein, 29 aa, Artificial Sequence
  Cyclic GFR-binding peptide
QPSRVHHSNITVQIMEYVRKKPKLLGEMS

SEQ ID NO: 102389 - protein, 29 aa, Artificial Sequence
  Cyclic GFR-binding peptide
  MOD_RES (28)..(28): Xaa is C or S
LSNITIQIMDSANNVVLGEMSDMVVESXG

SEQ ID NO: 102390 - protein, 31 aa, Artificial Sequence; identical to SEQ ID NO: 69647
  Cyclic GFR-binding peptide
  MOD_RES (29)..(31): Xaa is C or S

SEQ ID NO: 102391 - protein, 34 aa, Artificial Sequence; identical to SEQ ID NO: 24413
  Cyclic GFR-binding peptide
  MOD_RES (34)..(34): Xaa is C or S

SEQ ID NO: 102392 - protein, 34 aa, Artificial Sequence; identical to SEQ ID NO: 24414
  Cyclic GFR-binding peptide
  MOD_RES (31)..(33): Xaa is C or S

SEQ ID NO: 102393 - protein, 30 aa, Artificial Sequence
  Cyclic GFR-binding peptide
  MOD_RES (3)..(4): Xaa is C or S
SPXXVSQDLSNITIQIMIGKTPKILGEMSM

SEQ ID NO: 102394 - protein, 32 aa, Artificial Sequence; identical to SEQ ID NO: 24417
  Cyclic GFR-binding peptide
  MOD_RES (3)..(3): Xaa is C or S

SEQ ID NO: 102395 - protein, 24 aa, Artificial Sequence
  Cyclic GFR-binding peptide
SNITVQIMEIVRKKPIFLGEMSTL

SEQ ID NO: 102396 - protein, 26 aa, Artificial Sequence
  Cyclic GFR-binding peptide
EESNITMQIMRIKPHQGQHLGEMSFL

SEQ ID NO: 102397 - protein, 33 aa, Artificial Sequence
  Cyclic GFR-binding peptide
  MOD_RES (2)..(3): Xaa is C or S
PXXVPQALSNITIQIMVGRKPKVLGEMSMIVRS

SEQ ID NO: 102398 - protein, 36 aa, Artificial Sequence
  Cyclic GFR-binding peptide
  MOD_RES (1)..(33)..(35): Xaa is C or S
XAPTKLSNITVQIMDDSSNVILGEMSNMVVRSXGXH

SEQ ID NO: 102399 - protein, 32 aa, Artificial Sequence; identical to SEQ ID NO: 24430
  Cyclic GFR-binding peptide

SEQ ID NO: 102400 - protein, 29 aa, Artificial Sequence
  Cyclic GFR-binding peptide
RPTQVQLSNITVQIMEIVRKKPIFLGEMS

SEQ ID NO: 102401 - protein, 29 aa, Artificial Sequence
  Cyclic GFR-binding peptide
PQALSNITIQIMVGRKPKVIGEMSMIVRS

SEQ ID NO: 102402 - protein, 38 aa, Artificial Sequence; identical to SEQ ID NO: 72883
  Cyclic GFR-binding peptide
  MOD_RES (3)..(4)..(35)..(37): Xaa is C or S

SEQ ID NO: 102403 - protein, 35 aa, Artificial Sequence; identical to SEQ ID NO: 24439
  Cyclic GFR-binding peptide

SEQ ID NO: 102404 - protein, 35 aa, Artificial Sequence
  Cyclic GFR-binding peptide
  MOD_RES (5)..(6): Xaa is C or S
VPKPXXAPTKLSNITVQIMDDSSNVILGEMSNMVV

SEQ ID NO: 102405 - protein, 32 aa, Artificial Sequence
  Cyclic GFR-binding peptide
  MOD_RES (5)..(6): Xaa is C or S
SASPXXVPQDLSNITIQIMVGRTPKVLGEMSM

SEQ ID NO: 102406 - protein, 28 aa, Artificial Sequence
  Cyclic GFR-binding peptide
  MOD_RES (1)..(2): Xaa is C or S
XXTPTKMSNITMQIMNDKQQIILGEMSG

SEQ ID NO: 102407 - protein, 31 aa, Artificial Sequence; identical to SEQ ID NO: 69669
  Cyclic GFR-binding peptide
  MOD_RES (5)..(6): Xaa is C or S

SEQ ID NO: 102408 - protein, 30 aa, Artificial Sequence
  Cyclic GFR-binding peptide
  MOD_RES (27)..(29): Xaa is C or S
TSNITMQIMDNGRVLLIGEMSMIVEEXGXL

SEQ ID NO: 102409 - protein, 33 aa, Artificial Sequence
  Cyclic GFR-binding peptide
  MOD_RES (3)..(4): Xaa is C or S
PTXXVPTRLSNITIQIMDSANNVVLGEMSDMVV

SEQ ID NO: 102410 - protein, 31 aa, Artificial Sequence
  Cyclic GFR-binding peptide
  MOD_RES (5)..(6): Xaa is C or S
TPPTXXVPTRLSNITIQIMDSANNVVLGEMS

SEQ ID NO: 102411 - protein, 38 aa, Artificial Sequence; identical to SEQ ID NO: 72896
  Cyclic GFR-binding peptide
  MOD_RES (2)..(3)..(35)..(37): Xaa is C or S

SEQ ID NO: 102412 - protein, 40 aa, Artificial Sequence
  Cyclic GFR-binding peptide
  MOD_RES (5)..(6)..(37)..(39): Xaa is C or S
SASPXXVPQDLSNITIQIMVGRTPKVLGEMSMVVKSXKXS

SEQ ID NO: 102413 - protein, 33 aa, Artificial Sequence
  Cyclic GFR-binding peptide
  MOD_RES (31)..(33): Xaa is C or S
VPQDLSNITIQIMVGRTPKVLGEMSMVVKSXKX

SEQ ID NO: 102414 - protein, 31 aa, Artificial Sequence; identical to SEQ ID NO: 69674
  Cyclic GFR-binding peptide
  MOD_RES (30)..(30): Xaa is C or S

SEQ ID NO: 102415 - protein, 40 aa, Artificial Sequence; identical to SEQ ID NO: 24450
  Cyclic GFR-binding peptide
  MOD_RES (6)..(40): Xaa is C or S

SEQ ID NO: 102416 - protein, 33 aa, Artificial Sequence
  Cyclic GFR-binding peptide
  MOD_RES (6)..(7): Xaa is C or S
ASASPXXVSQDLSNITIQIMIGKTPKILGEMSM

SEQ ID NO: 102417 - protein, 29 aa, Artificial Sequence
  Cyclic GFR-binding peptide
  MOD_RES (3)..(4): Xaa is C or S
GPXXTPTKMSNITMQIMNDKQQIILGEMS

SEQ ID NO: 102418 - protein, 31 aa, Artificial Sequence; identical to SEQ ID NO: 69675
  Cyclic GFR-binding peptide
  MOD_RES (30)..(30): Xaa is C or S

SEQ ID NO: 102419 - protein, 32 aa, Artificial Sequence; identical to SEQ ID NO: 69681
  Cyclic GFR-binding peptide
  MOD_RES (3)..(4): Xaa is C or S

SEQ ID NO: 102420 - protein, 29 aa, Artificial Sequence
  Cyclic GFR-binding peptide
  MOD_RES (26)..(28): Xaa is C or S
SNITIQIMVGRTPKVLGEMSMVVKSXKXS

SEQ ID NO: 102421 - protein, 32 aa, Artificial Sequence; identical to SEQ ID NO: 72909
  Cyclic GFR-binding peptide
  MOD_RES (30)..(32): Xaa is C or S

SEQ ID NO: 102422 - protein, 31 aa, Artificial Sequence; identical to SEQ ID NO: 72913
  Cyclic GFR-binding peptide
  MOD_RES (30)..(30): Xaa is C or S

SEQ ID NO: 102423 - protein, 42 aa, Artificial Sequence
  Cyclic GFR-binding peptide
  MOD_RES (6)..(7)..(39)..(41): Xaa is C or S
GSAGPXXTPTKMSNITMQIMNDKQQIIIGEMSGMVVDRXGXS

SEQ ID NO: 102424 - protein, 30 aa, Artificial Sequence
  Cyclic GFR-binding peptide
  MOD_RES (3)..(4): Xaa is C or S
ASXXVPARLSNITIQIMDAANNVVLGEMSD

SEQ ID NO: 102425 - protein, 37 aa, Artificial Sequence
  Cyclic GFR-binding peptide
  MOD_RES (5)..(6): Xaa is C or S
SAGPXXTPTKMSNITMQIMNDKQQIIIGEMSGMVVDR

SEQ ID NO: 102426 - protein, 25 aa, Artificial Sequence
  Cyclic GFR-binding peptide
RLSNITIQIMDAANNVVLGEMSDMV

SEQ ID NO: 102427 - protein, 33 aa, Artificial Sequence; identical to SEQ ID NO: 69688
  Cyclic GFR-binding peptide
  MOD_RES (1)..(2): Xaa is C or S

SEQ ID NO: 102428 - protein, 32 aa, Artificial Sequence
  Cyclic GFR-binding peptide
  MOD_RES (32)..(32): Xaa is C or S
VPARLSNITIQIMDAANNVVLGEMSDMVVEAX

SEQ ID NO: 102429 - protein, 38 aa, Artificial Sequence
  Cyclic GFR-binding peptide
  MOD_RES (6)..(7): Xaa is C or S
AAPASXXVPARLSNITIQIMDAANNVVLGEMSDMVVEA

SEQ ID NO: 102430 - protein, 26 aa, Artificial Sequence
  Cyclic GFR-binding peptide
SQDLSNITIQIMIGKTPKIIGEMSMI

SEQ ID NO: 102431 - protein, 30 aa, Artificial Sequence
  Cyclic GFR-binding peptide
  MOD_RES (1)..(1): Xaa is C or S
XAPTKLSNITVQIMDDSSNVILGEMSNMVV

SEQ ID NO: 102432 - protein, 28 aa, Artificial Sequence
  Cyclic GFR-binding peptide
TEESNITMQIMRIKPHQGQHLGEMSFLQ

SEQ ID NO: 102433 - protein, 26 aa, Artificial Sequence
  Cyclic GFR-binding peptide
QVQLSNITVQIMEIVRKKPIFLGEMS

SEQ ID NO: 102434 - protein, 30 aa, Artificial Sequence; identical to SEQ ID NO: 24469
  Cyclic GFR-binding peptide

SEQ ID NO: 102435 - protein, 28 aa, Artificial Sequence
  Cyclic GFR-binding peptide
PARLSNITIQIMDAANNVVIGEMSDMVV

SEQ ID NO: 102436 - protein, 30 aa, Artificial Sequence; identical to SEQ ID NO: 69700
  Cyclic GFR-binding peptide
  MOD_RES (30)..(30): Xaa is C or S

SEQ ID NO: 102437 - protein, 36 aa, Artificial Sequence
  Cyclic GFR-binding peptide
  MOD_RES (4)..(5): Xaa is C or S
PKPXXAPTKLSNITVQIMDDSSNVILGEMSNMVVRS

SEQ ID NO: 102438 - protein, 30 aa, Artificial Sequence; identical to SEQ ID NO: 69704
  Cyclic GFR-binding peptide
  MOD_RES (1)..(2): Xaa is C or S

SEQ ID NO: 102439 - protein, 30 aa, Artificial Sequence
  Cyclic GFR-binding peptide
  MOD_RES (1)..(2): Xaa is C or S
XXVPQALSNITIQIMVGRKPKVLGEMSMIV

SEQ ID NO: 102440 - protein, 31 aa, Artificial Sequence
  Cyclic GFR-binding peptide
  MOD_RES (2)..(3): Xaa is C or S
PXXVPQDLSNITIQIMVGRTPKVLGEMSMVV

SEQ ID NO: 102441 - protein, 34 aa, Artificial Sequence
  Cyclic GFR-binding peptide
  MOD_RES (31)..(33): Xaa is C or S
VPQDLSNITIQIMVGRTPKVLGEMSMVVKSXKXS

SEQ ID NO: 102442 - protein, 27 aa, Artificial Sequence
  Cyclic GFR-binding peptide
RLSNITIQIMDAANNVVLGEMSDMVVE

SEQ ID NO: 102443 - protein, 31 aa, Artificial Sequence
  Cyclic GFR-binding peptide
  MOD_RES (30)..(30): Xaa is C or S
PVKTSNITMQIMDNGRVLLLGEMSMIVEEXG

SEQ ID NO: 102444 - protein, 28 aa, Artificial Sequence
  Cyclic GFR-binding peptide
PARLSNITIQIMDAANNVVLGEMSDMVV

SEQ ID NO: 102445 - protein, 37 aa, Artificial Sequence
  Cyclic GFR-binding peptide
  MOD_RES (4)..(5)..(37): Xaa is C or S
PASXXVPARLSNITIQIMDAANNVVIGEMSDMVVEAX

SEQ ID NO: 102446 - protein, 33 aa, Artificial Sequence; identical to SEQ ID NO: 24484
  Cyclic GFR-binding peptide
  MOD_RES (31)..(33): Xaa is C or S

SEQ ID NO: 102447 - protein, 25 aa, Artificial Sequence
  Cyclic GFR-binding peptide
GQSNITMQIMRIKPHQGQHIGEMSL

SEQ ID NO: 102448 - protein, 25 aa, Artificial Sequence
  Cyclic GFR-binding peptide
SNITVQIMDDSSNVIIGEMSNMVVR

SEQ ID NO: 102449 - protein, 31 aa, Artificial Sequence
  Cyclic GFR-binding peptide
  MOD_RES (28)..(30): Xaa is C or S
MSNITMQIMNDKQQIILGEMSGMVVDRXGXS

SEQ ID NO: 102450 - protein, 37 aa, Artificial Sequence
  Cyclic GFR-binding peptide
  MOD_RES (1)..(2)..(34)..(36): Xaa is C or S
XXAPTKLSNITVQIMDDSSNVILGEMSNMVVRSXGXH

SEQ ID NO: 102451 - protein, 33 aa, Artificial Sequence; identical to SEQ ID NO: 69713
  Cyclic GFR-binding peptide
  MOD_RES (31)..(33): Xaa is C or S

SEQ ID NO: 102452 - protein, 32 aa, Artificial Sequence
  Cyclic GFR-binding peptide
  MOD_RES (5)..(6): Xaa is C or S
APASXXVPARLSNITIQIMDAANNVVLGEMSD

SEQ ID NO: 102453 - protein, 39 aa, Artificial Sequence
  Cyclic GFR-binding peptide
  MOD_RES (4)..(5)..(37)..(39): Xaa is C or S
PPTXXVPTRLSNITIQIMDSANNVVLGEMSDMVVESXGX

SEQ ID NO: 102454 - protein, 33 aa, Artificial Sequence
  Cyclic GFR-binding peptide
  MOD_RES (6)..(7): Xaa is C or S
GSAGPXXTPTKMSNITMQIMNDKQQIIIGEMSG

SEQ ID NO: 102455 - protein, 33 aa, Artificial Sequence
  Cyclic GFR-binding peptide
  MOD_RES (1)..(2): Xaa is C or S
XXTPTKMSNITMQIMNDKQQIIIGEMSGMVVDR

SEQ ID NO: 102456 - protein, 31 aa, Artificial Sequence
  Cyclic GFR-binding peptide
  MOD_RES (31)..(31): Xaa is C or S
PTKMSNITMQIMNDKQQIIIGEMSGMVVDRX

SEQ ID NO: 102457 - protein, 21 aa, Artificial Sequence
  Cyclic GFR-binding peptide
SNITIQIMDSANNVVIGEMSD

SEQ ID NO: 102458 - protein, 29 aa, Artificial Sequence
  Cyclic GFR-binding peptide
  MOD_RES (1)..(1): Xaa is C or S
XAPVKTSNITMQIMDNGRVLLLGEMSMIV

SEQ ID NO: 102459 - protein, 36 aa, Artificial Sequence; identical to SEQ ID NO: 24495
  Cyclic GFR-binding peptide

SEQ ID NO: 102460 - protein, 31 aa, Artificial Sequence; identical to SEQ ID NO: 24498
  Cyclic GFR-binding peptide
  MOD_RES (4)..(4): Xaa is C or S

SEQ ID NO: 102461 - protein, 30 aa, Artificial Sequence; identical to SEQ ID NO: 24499
  Cyclic GFR-binding peptide
  MOD_RES (1)..(1): Xaa is C or S

SEQ ID NO: 102462 - protein, 35 aa, Artificial Sequence
  Cyclic GFR-binding peptide
  MOD_RES (5)..(6): Xaa is C or S
APASXXVPARLSNITIQIMDAANNVVIGEMSDMVV

SEQ ID NO: 102463 - protein, 26 aa, Artificial Sequence
  Cyclic GFR-binding peptide
PTKMSNITMQIMNDKQQIIIGEMSGM

SEQ ID NO: 102464 - protein, 44 aa, Artificial Sequence; identical to SEQ ID NO: 24503
  Cyclic GFR-binding peptide
  MOD_RES (4)..(41)..(43): Xaa is C or S

SEQ ID NO: 102465 - protein, 39 aa, Artificial Sequence
  Cyclic GFR-binding peptide
  MOD_RES (5)..(6)..(37)..(39): Xaa is C or S
SASPXXVSQDLSNITIQIMIGKTPKILGEMSMIVKSXKX

SEQ ID NO: 102466 - protein, 27 aa, Artificial Sequence
  Cyclic GFR-binding peptide
  MOD_RES (1)..(2): Xaa is C or S
XXVPARLSNITIQIMDAANNVVIGEMS

SEQ ID NO: 102467 - protein, 22 aa, Artificial Sequence
  Cyclic GFR-binding peptide
LSNITIQIMVGRTPKVLGEMSM

SEQ ID NO: 102468 - protein, 36 aa, Artificial Sequence; identical to SEQ ID NO: 24508
  Cyclic GFR-binding peptide
  MOD_RES (4)..(4): Xaa is C or S

SEQ ID NO: 102469 - protein, 41 aa, Artificial Sequence; identical to SEQ ID NO: 24509
  Cyclic GFR-binding peptide
  MOD_RES (1)..(38)..(40): Xaa is C or S

SEQ ID NO: 102470 - protein, 30 aa, Artificial Sequence; identical to SEQ ID NO: 24512
  Cyclic GFR-binding peptide

SEQ ID NO: 102471 - protein, 30 aa, Artificial Sequence
  Cyclic GFR-binding peptide
  MOD_RES (3)..(4): Xaa is C or S
SPXXVPQDLSNITIQIMVGRTPKVLGEMSM

SEQ ID NO: 102472 - protein, 28 aa, Artificial Sequence
  Cyclic GFR-binding peptide
QDLSNITIQIMIGKTPKILGEMSMIVKS

SEQ ID NO: 102473 - protein, 29 aa, Artificial Sequence
  Cyclic GFR-binding peptide
SQDLSNITIQIMIGKTPKILGEMSMIVKS

SEQ ID NO: 102474 - protein, 28 aa, Artificial Sequence
  Cyclic GFR-binding peptide
TPTKMSNITMQIMNDKQQIILGEMSGMV

SEQ ID NO: 102475 - protein, 26 aa, Artificial Sequence
  Cyclic GFR-binding peptide
KLSNITVQIMDDSSNVIIGEMSNMVV

SEQ ID NO: 102476 - protein, 22 aa, Artificial Sequence
  Cyclic GFR-binding peptide
TSNITMQIMDNGRVLLIGEMSM

SEQ ID NO: 102477 - protein, 30 aa, Artificial Sequence
  Cyclic GFR-binding peptide
  MOD_RES (4)..(5): Xaa is C or S
AGPXXTPTKMSNITMQIMNDKQQIIIGEMS

SEQ ID NO: 102478 - protein, 27 aa, Artificial Sequence
  Cyclic GFR-binding peptide
VPARLSNITIQIMDAANNVVIGEMSDM

SEQ ID NO: 102479 - protein, 33 aa, Artificial Sequence; identical to SEQ ID NO: 24515
  Cyclic GFR-binding peptide
  MOD_RES (3)..(3): Xaa is C or S

SEQ ID NO: 102480 - protein, 35 aa, Artificial Sequence
  Cyclic GFR-binding peptide
  MOD_RES (3)..(4)..(35): Xaa is C or S
APXXVPQALSNITIQIMVGRKPKVLGEMSMIVRSX

SEQ ID NO: 102481 - protein, 29 aa, Artificial Sequence
  Cyclic GFR-binding peptide
TRLSNITIQIMDSANNVVLGEMSDMVVES

SEQ ID NO: 102482 - protein, 30 aa, Artificial Sequence
  Cyclic GFR-binding peptide
VPARLSNITIQIMDAANNVVIGEMSDMVVE

SEQ ID NO: 102483 - protein, 33 aa, Artificial Sequence
  Cyclic GFR-binding peptide
  MOD_RES (1)..(2)..(33): Xaa is C or S
XXAPVKTSNITMQIMDNGRVLLIGEMSMIVEEX

SEQ ID NO: 102484 - protein, 33 aa, Artificial Sequence; identical to SEQ ID NO: 24517
  Cyclic GFR-binding peptide
  MOD_RES (4)..(4): Xaa is C or S

SEQ ID NO: 102485 - protein, 26 aa, Artificial Sequence
  Cyclic GFR-binding peptide
SNITVQIMDDSSNVIIGEMSNMVVRS

SEQ ID NO: 102486 - protein, 34 aa, Artificial Sequence
  Cyclic GFR-binding peptide
  MOD_RES (3)..(4): Xaa is C or S
STXXAPVKTSNITMQIMDNGRVLLIGEMSMIVEE

SEQ ID NO: 102487 - protein, 37 aa, Artificial Sequence; identical to SEQ ID NO: 24519
  Cyclic GFR-binding peptide
  MOD_RES (35)..(37): Xaa is C or S

SEQ ID NO: 102488 - protein, 38 aa, Artificial Sequence
  Cyclic GFR-binding peptide
  MOD_RES (3)..(4)..(35)..(37): Xaa is C or S
STXXAPVKTSNITMQIMDNGRVLLLGEMSMIVEEXGXL

SEQ ID NO: 102489 - protein, 30 aa, Artificial Sequence; identical to SEQ ID NO: 72980
  Cyclic GFR-binding peptide
  MOD_RES (2)..(3): Xaa is C or S

SEQ ID NO: 102490 - protein, 27 aa, Artificial Sequence
  Cyclic GFR-binding peptide
MSNITMQIMNDKQQIILGEMSGMVVDR

SEQ ID NO: 102491 - protein, 33 aa, Artificial Sequence
  Cyclic GFR-binding peptide
  MOD_RES (4)..(5): Xaa is C or S
PPTXXVPTRLSNITIQIMDSANNVVIGEMSDMV

SEQ ID NO: 102492 - protein, 41 aa, Artificial Sequence
  Cyclic GFR-binding peptide
  MOD_RES (5)..(6)..(38)..(40): Xaa is C or S
TPPTXXVPTRLSNITIQIMDSANNVVIGEMSDMVVESXGXR

SEQ ID NO: 102493 - protein, 40 aa, Artificial Sequence; identical to SEQ ID NO: 24525
  Cyclic GFR-binding peptide
  MOD_RES (7)..(7): Xaa is C or S

SEQ ID NO: 102494 - protein, 33 aa, Artificial Sequence
  Cyclic GFR-binding peptide
  MOD_RES (3)..(4): Xaa is C or S
ASXXVPARLSNITIQIMDAANNVVIGEMSDMVV

SEQ ID NO: 102495 - protein, 22 aa, Artificial Sequence
  Cyclic GFR-binding peptide
KLSNITVQIMDDSSNVILGEMS

SEQ ID NO: 102496 - protein, 30 aa, Artificial Sequence
  Cyclic GFR-binding peptide
  MOD_RES (30)..(30): Xaa is C or S
PQALSNITIQIMVGRKPKVLGEMSMIVRSX

SEQ ID NO: 102497 - protein, 41 aa, Artificial Sequence; identical to SEQ ID NO: 24529
  Cyclic GFR-binding peptide
  MOD_RES (4)..(41): Xaa is C or S

SEQ ID NO: 102498 - protein, 28 aa, Artificial Sequence
  Cyclic GFR-binding peptide
PTRLSNITIQIMDSANNVVIGEMSDMVV

SEQ ID NO: 102499 - protein, 28 aa, Artificial Sequence
  Cyclic GFR-binding peptide
  MOD_RES (27)..(27): Xaa is C or S
SNITVQIMDDSSNVIIGEMSNMVVRSXG

SEQ ID NO: 102500 - protein, 40 aa, Artificial Sequence
  Cyclic GFR-binding peptide
  MOD_RES (4)..(5)..(37)..(39): Xaa is C or S
AGPXXTPTKMSNITMQIMNDKQQIILGEMSGMVVDRXGXS

SEQ ID NO: 102501 - protein, 24 aa, Artificial Sequence
  Cyclic GFR-binding peptide
ESNITMQIMRIKPHQGQHLGEMSF

SEQ ID NO: 102502 - protein, 27 aa, Artificial Sequence
  Cyclic GFR-binding peptide
  MOD_RES (27)..(27): Xaa is C or S
LSNITIQIMVGRTPKVLGEMSMVVKSX

SEQ ID NO: 102503 - protein, 38 aa, Artificial Sequence
  Cyclic GFR-binding peptide
  MOD_RES (3)..(4)..(35)..(37): Xaa is C or S
STXXAPVKTSNITMQIMDNGRVLLIGEMSMIVEEXGXL

SEQ ID NO: 102504 - protein, 36 aa, Artificial Sequence
  Cyclic GFR-binding peptide
  MOD_RES (1)..(2)..(33)..(35): Xaa is C or S
XXAPVKTSNITMQIMDNGRVLLIGEMSMIVEEXGXL

SEQ ID NO: 102505 - protein, 37 aa, Artificial Sequence
  Cyclic GFR-binding peptide
  MOD_RES (3)..(4)..(35)..(37): Xaa is C or S
APXXVPQALSNITIQIMVGRKPKVLGEMSMIVRSXKX

SEQ ID NO: 102506 - protein, 23 aa, Artificial Sequence
  Cyclic GFR-binding peptide
TSNITMQIMDNGRVLLLGEMSMI

SEQ ID NO: 102507 - protein, 28 aa, Artificial Sequence
  Cyclic GFR-binding peptide
SNITVQIMEYVRKKPKLIGEMSRLEEHL

SEQ ID NO: 102508 - protein, 28 aa, Artificial Sequence
  Cyclic GFR-binding peptide
  MOD_RES (26)..(28): Xaa is C or S
SNITMQIMDNGRVLLIGEMSMIVEEXGX

SEQ ID NO: 102509 - protein, 32 aa, Artificial Sequence
  Cyclic GFR-binding peptide
  MOD_RES (1)..(1): Xaa is C or S
XVPARLSNITIQIMDAANNVVLGEMSDMVVEA

SEQ ID NO: 102510 - protein, 36 aa, Artificial Sequence
  Cyclic GFR-binding peptide
  MOD_RES (1)..(2)..(33)..(35): Xaa is C or S
XXVSQDLSNITIQIMIGKTPKILGEMSMIVKSXKXS

SEQ ID NO: 102511 - protein, 34 aa, Artificial Sequence
  Cyclic GFR-binding peptide
  MOD_RES (1)..(2)..(34): Xaa is C or S
XXVPTRLSNITIQIMDSANNVVLGEMSDMVVESX

SEQ ID NO: 102512 - protein, 32 aa, Artificial Sequence; identical to SEQ ID NO: 24537
  Cyclic GFR-binding peptide
  MOD_RES (31)..(31): Xaa is C or S

SEQ ID NO: 102513 - protein, 42 aa, Artificial Sequence; identical to SEQ ID NO: 24539
  Cyclic GFR-binding peptide
  MOD_RES (7)..(41): Xaa is C or S

SEQ ID NO: 102514 - protein, 25 aa, Artificial Sequence
  Cyclic GFR-binding peptide
DLSNITIQIMIGKTPKIIGEMSMIV

SEQ ID NO: 102515 - protein, 36 aa, Artificial Sequence
  Cyclic GFR-binding peptide
  MOD_RES (5)..(6): Xaa is C or S
SAGPXXTPTKMSNITMQIMNDKQQIILGEMSGMVVD

SEQ ID NO: 102516 - protein, 31 aa, Artificial Sequence; identical to SEQ ID NO: 69779
  Cyclic GFR-binding peptide
  MOD_RES (2)..(3): Xaa is C or S

SEQ ID NO: 102517 - protein, 23 aa, Artificial Sequence
  Cyclic GFR-binding peptide
LSNITVQIMEIVRKKPIFIGEMS

SEQ ID NO: 102518 - protein, 40 aa, Artificial Sequence; identical to SEQ ID NO: 24544
  Cyclic GFR-binding peptide
  MOD_RES (4)..(38)..(40): Xaa is C or S

SEQ ID NO: 102519 - protein, 43 aa, Artificial Sequence; identical to SEQ ID NO: 24546
  Cyclic GFR-binding peptide
  MOD_RES (6)..(40)..(42): Xaa is C or S

SEQ ID NO: 102520 - protein, 24 aa, Artificial Sequence
  Cyclic GFR-binding peptide
PVKTSNITMQIMDNGRVLLLGEMS

SEQ ID NO: 102521 - protein, 34 aa, Artificial Sequence; identical to SEQ ID NO: 69789
  Cyclic GFR-binding peptide
  MOD_RES (1)..(2)..(33): Xaa is C or S

SEQ ID NO: 102522 - protein, 27 aa, Artificial Sequence
  Cyclic GFR-binding peptide
APTKLSNITVQIMDDSSNVIIGEMSNM

SEQ ID NO: 102523 - protein, 31 aa, Artificial Sequence; identical to SEQ ID NO: 24547
  Cyclic GFR-binding peptide
  MOD_RES (31)..(31): Xaa is C or S

SEQ ID NO: 102524 - protein, 26 aa, Artificial Sequence
  Cyclic GFR-binding peptide
KLSNITVQIMDDSSNVILGEMSNMVV

SEQ ID NO: 102525 - protein, 25 aa, Artificial Sequence
  Cyclic GFR-binding peptide
ALSNITIQIMVGRKPKVIGEMSMIV

SEQ ID NO: 102526 - protein, 37 aa, Artificial Sequence
  Cyclic GFR-binding peptide
  MOD_RES (5)..(6): Xaa is C or S
APASXXVPARLSNITIQIMDAANNVVIGEMSDMVVEA

SEQ ID NO: 102527 - protein, 27 aa, Artificial Sequence
  Cyclic GFR-binding peptide
  MOD_RES (27)..(27): Xaa is C or S
SNITVQIMDDSSNVIIGEMSNMVVRSX

SEQ ID NO: 102528 - protein, 30 aa, Artificial Sequence; identical to SEQ ID NO: 73019
  Cyclic GFR-binding peptide
  MOD_RES (1)..(1): Xaa is C or S

SEQ ID NO: 102529 - protein, 29 aa, Artificial Sequence
  Cyclic GFR-binding peptide
  MOD_RES (27)..(29): Xaa is C or S
SNITIQIMDSANNVVLGEMSDMVVESXGX

SEQ ID NO: 102530 - protein, 28 aa, Artificial Sequence
  Cyclic GFR-binding peptide
PTKMSNITMQIMNDKQQIIIGEMSGMVV

SEQ ID NO: 102531 - protein, 40 aa, Artificial Sequence; identical to SEQ ID NO: 73027
  Cyclic GFR-binding peptide
  MOD_RES (5)..(6)..(38)..(40): Xaa is C or S

SEQ ID NO: 102532 - protein, 26 aa, Artificial Sequence
  Cyclic GFR-binding peptide
TSNITMQIMDNGRVLLIGEMSMIVEE

SEQ ID NO: 102533 - protein, 29 aa, Artificial Sequence
  Cyclic GFR-binding peptide
SNITVQIMEIVRKKPIFLGEMSTLEDHLA

SEQ ID NO: 102534 - protein, 38 aa, Artificial Sequence; identical to SEQ ID NO: 24554
  Cyclic GFR-binding peptide
  MOD_RES (4)..(4): Xaa is C or S

SEQ ID NO: 102535 - protein, 32 aa, Artificial Sequence
  Cyclic GFR-binding peptide
  MOD_RES (3)..(4): Xaa is C or S
STXXAPVKTSNITMQIMDNGRVLLIGEMSMIV

SEQ ID NO: 102536 - protein, 35 aa, Artificial Sequence
  Cyclic GFR-binding peptide
  MOD_RES (2)..(3)..(35): Xaa is C or S
PXXTPTKMSNITMQIMNDKQQIIIGEMSGMVVDRX

SEQ ID NO: 102537 - protein, 28 aa, Artificial Sequence
  Cyclic GFR-binding peptide
KMSNITMQIMNDKQQIILGEMSGMVVDR

SEQ ID NO: 102538 - protein, 24 aa, Artificial Sequence
  Cyclic GFR-binding peptide
SNITVQIMDDSSNVIIGEMSNMVV

SEQ ID NO: 102539 - protein, 33 aa, Artificial Sequence; identical to SEQ ID NO: 69819
  Cyclic GFR-binding peptide
  MOD_RES (1)..(32): Xaa is C or S

SEQ ID NO: 102540 - protein, 40 aa, Artificial Sequence; identical to SEQ ID NO: 24569
  Cyclic GFR-binding peptide
  MOD_RES (5)..(5): Xaa is C or S

SEQ ID NO: 102541 - protein, 31 aa, Artificial Sequence; identical to SEQ ID NO: 24570
  Cyclic GFR-binding peptide
  MOD_RES (29)..(31): Xaa is C or S

SEQ ID NO: 102542 - protein, 40 aa, Artificial Sequence; identical to SEQ ID NO: 24572
  Cyclic GFR-binding peptide
  MOD_RES (1)..(38)..(40): Xaa is C or S

SEQ ID NO: 102543 - protein, 41 aa, Artificial Sequence; identical to SEQ ID NO: 24573
  Cyclic GFR-binding peptide
  MOD_RES (1)..(38)..(40): Xaa is C or S

SEQ ID NO: 102544 - protein, 29 aa, Artificial Sequence
  Cyclic GFR-binding peptide
TQVQLSNITVQIMEIVRKKPIFIGEMSTL

SEQ ID NO: 102545 - protein, 31 aa, Artificial Sequence; identical to SEQ ID NO: 73038
  Cyclic GFR-binding peptide
  MOD_RES (5)..(6): Xaa is C or S

SEQ ID NO: 102546 - protein, 30 aa, Artificial Sequence; identical to SEQ ID NO: 24579
  Cyclic GFR-binding peptide

SEQ ID NO: 102547 - protein, 36 aa, Artificial Sequence; identical to SEQ ID NO: 24580
  Cyclic GFR-binding peptide
  MOD_RES (35)..(35): Xaa is C or S

SEQ ID NO: 102548 - protein, 33 aa, Artificial Sequence; identical to SEQ ID NO: 24581
  Cyclic GFR-binding peptide
  MOD_RES (33)..(33): Xaa is C or S

SEQ ID NO: 102549 - protein, 30 aa, Artificial Sequence
  Cyclic GFR-binding peptide
  MOD_RES (4)..(5): Xaa is C or S
ASPXXVSQDLSNITIQIMIGKTPKILGEMS

SEQ ID NO: 102550 - protein, 41 aa, Artificial Sequence; identical to SEQ ID NO: 73043
  Cyclic GFR-binding peptide
  MOD_RES (6)..(7)..(38)..(40): Xaa is C or S

SEQ ID NO: 102551 - protein, 36 aa, Artificial Sequence; identical to SEQ ID NO: 73044
  Cyclic GFR-binding peptide
  MOD_RES (1)..(2)..(33)..(35): Xaa is C or S

SEQ ID NO: 102552 - protein, 25 aa, Artificial Sequence
  Cyclic GFR-binding peptide
APTKLSNITVQIMDDSSNVIIGEMS

SEQ ID NO: 102553 - protein, 29 aa, Artificial Sequence
  Cyclic GFR-binding peptide
  MOD_RES (29)..(29): Xaa is C or S
RLSNITIQIMDSANNVVIGEMSDMVVESX

SEQ ID NO: 102554 - protein, 25 aa, Artificial Sequence
  Cyclic GFR-binding peptide
PTKLSNITVQIMDDSSNVILGEMSN

SEQ ID NO: 102555 - protein, 24 aa, Artificial Sequence
  Cyclic GFR-binding peptide
LSNITIQIMDAANNVVLGEMSDMV

SEQ ID NO: 102556 - protein, 28 aa, Artificial Sequence
  Cyclic GFR-binding peptide
PVKTSNITMQIMDNGRVLLLGEMSMIVE

SEQ ID NO: 102557 - protein, 39 aa, Artificial Sequence
  Cyclic GFR-binding peptide
  MOD_RES (4)..(5)..(37)..(39): Xaa is C or S
AGPXXTPTKMSNITMQIMNDKQQIIIGEMSGMVVDRXGX

SEQ ID NO: 102558 - protein, 28 aa, Artificial Sequence
  Cyclic GFR-binding peptide
VPTRLSNITIQIMDSANNVVLGEMSDMV

SEQ ID NO: 102559 - protein, 32 aa, Artificial Sequence
  Cyclic GFR-binding peptide
  MOD_RES (29)..(31): Xaa is C or S
VKTSNITMQIMDNGRVLLIGEMSMIVEEXGXL

SEQ ID NO: 102560 - protein, 33 aa, Artificial Sequence
  Cyclic GFR-binding peptide
  MOD_RES (4)..(5): Xaa is C or S
PPTXXVPTRLSNITIQIMDSANNVVLGEMSDMV

SEQ ID NO: 102561 - protein, 28 aa, Artificial Sequence
  Cyclic GFR-binding peptide
SNITMQIMRIKPHQGQHLGEMSFLQHNK

SEQ ID NO: 102562 - protein, 30 aa, Artificial Sequence; identical to SEQ ID NO: 24596
  Cyclic GFR-binding peptide

SEQ ID NO: 102563 - protein, 25 aa, Artificial Sequence
  Cyclic GFR-binding peptide
SNITIQIMVGRTPKVLGEMSMVVKS

SEQ ID NO: 102564 - protein, 28 aa, Artificial Sequence
  Cyclic GFR-binding peptide
VPTGQSNITMQIMRIKPHQGQHIGEMSL

SEQ ID NO: 102565 - protein, 33 aa, Artificial Sequence
  Cyclic GFR-binding peptide
  MOD_RES (4)..(5): Xaa is C or S
PASXXVPARLSNITIQIMDAANNVVIGEMSDMV

SEQ ID NO: 102566 - protein, 26 aa, Artificial Sequence
  Cyclic GFR-binding peptide
  MOD_RES (1)..(1): Xaa is C or S
XAPTKLSNITVQIMDDSSNVILGEMS

SEQ ID NO: 102567 - protein, 28 aa, Artificial Sequence
  Cyclic GFR-binding peptide
  MOD_RES (1)..(1): Xaa is C or S
XVPARLSNITIQIMDAANNVVIGEMSDM

SEQ ID NO: 102568 - protein, 33 aa, Artificial Sequence; identical to SEQ ID NO: 69844
  Cyclic GFR-binding peptide
  MOD_RES (5)..(6): Xaa is C or S

SEQ ID NO: 102569 - protein, 33 aa, Artificial Sequence; identical to SEQ ID NO: 24615
  Cyclic GFR-binding peptide
  MOD_RES (33)..(33): Xaa is C or S

SEQ ID NO: 102570 - protein, 39 aa, Artificial Sequence; identical to SEQ ID NO: 24616
  Cyclic GFR-binding peptide
  MOD_RES (4)..(38): Xaa is C or S

SEQ ID NO: 102571 - protein, 28 aa, Artificial Sequence
  Cyclic GFR-binding peptide
PSRVHHSNITVQIMEYVRKKPKLIGEMS

SEQ ID NO: 102572 - protein, 28 aa, Artificial Sequence
  Cyclic GFR-binding peptide
KMSNITMQIMNDKQQIIIGEMSGMVVDR

SEQ ID NO: 102573 - protein, 40 aa, Artificial Sequence
  Cyclic GFR-binding peptide
  MOD_RES (6)..(7)..(39): Xaa is C or S
AAPASXXVPARLSNITIQIMDAANNVVIGEMSDMVVEAXG

SEQ ID NO: 102574 - protein, 33 aa, Artificial Sequence; identical to SEQ ID NO: 24618
  Cyclic GFR-binding peptide

SEQ ID NO: 102575 - protein, 29 aa, Artificial Sequence
  Cyclic GFR-binding peptide
  MOD_RES (2)..(3): Xaa is C or S
PXXVPQALSNITIQIMVGRKPKVIGEMSM

SEQ ID NO: 102576 - protein, 27 aa, Artificial Sequence
  Cyclic GFR-binding peptide
LSNITIQIMDSANNVVIGEMSDMVVES

SEQ ID NO: 102577 - protein, 30 aa, Artificial Sequence
  Cyclic GFR-binding peptide
  MOD_RES (29)..(29): Xaa is C or S
QDLSNITIQIMVGRTPKVLGEMSMVVKSXK

SEQ ID NO: 102578 - protein, 32 aa, Artificial Sequence
  Cyclic GFR-binding peptide
  MOD_RES (29)..(31): Xaa is C or S
QALSNITIQIMVGRKPKVLGEMSMIVRSXKXS

SEQ ID NO: 102579 - protein, 34 aa, Artificial Sequence
  Cyclic GFR-binding peptide
  MOD_RES (6)..(7): Xaa is C or S
RVPSTXXAPVKTSNITMQIMDNGRVLLLGEMSMI

SEQ ID NO: 102580 - protein, 37 aa, Artificial Sequence
  Cyclic GFR-binding peptide
  MOD_RES (2)..(3)..(34)..(36): Xaa is C or S
TXXAPVKTSNITMQIMDNGRVLLLGEMSMIVEEXGXL

SEQ ID NO: 102581 - protein, 37 aa, Artificial Sequence
  Cyclic GFR-binding peptide
  MOD_RES (6)..(7): Xaa is C or S
RVPSTXXAPVKTSNITMQIMDNGRVLLIGEMSMIVEE

SEQ ID NO: 102582 - protein, 30 aa, Artificial Sequence
  Cyclic GFR-binding peptide
  MOD_RES (29)..(29): Xaa is C or S
RLSNITIQIMDAANNVVIGEMSDMVVEAXG

SEQ ID NO: 102583 - protein, 23 aa, Artificial Sequence
  Cyclic GFR-binding peptide
RLSNITIQIMDAANNVVIGEMSD

SEQ ID NO: 102584 - protein, 35 aa, Artificial Sequence
  Cyclic GFR-binding peptide
  MOD_RES (5)..(6): Xaa is C or S
SAGPXXTPTKMSNITMQIMNDKQQIILGEMSGMVV

SEQ ID NO: 102585 - protein, 36 aa, Artificial Sequence; identical to SEQ ID NO: 24632
  Cyclic GFR-binding peptide
  MOD_RES (4)..(4): Xaa is C or S

SEQ ID NO: 102586 - protein, 37 aa, Artificial Sequence; identical to SEQ ID NO: 24635
  Cyclic GFR-binding peptide
  MOD_RES (34)..(36): Xaa is C or S

SEQ ID NO: 102587 - protein, 42 aa, Artificial Sequence; identical to SEQ ID NO: 24636
  Cyclic GFR-binding peptide
  MOD_RES (5)..(39)..(41): Xaa is C or S

SEQ ID NO: 102588 - protein, 37 aa, Artificial Sequence; identical to SEQ ID NO: 73081
  Cyclic GFR-binding peptide
  MOD_RES (5)..(6)..(37): Xaa is C or S

SEQ ID NO: 102589 - protein, 29 aa, Artificial Sequence
  Cyclic GFR-binding peptide
APTKLSNITVQIMDDSSNVILGEMSNMVV

SEQ ID NO: 102590 - protein, 27 aa, Artificial Sequence
  Cyclic GFR-binding peptide
SNITVQIMEIVRKKPIFIGEMSTLEDH

SEQ ID NO: 102591 - protein, 37 aa, Artificial Sequence
  Cyclic GFR-binding peptide
  MOD_RES (3)..(4)..(36): Xaa is C or S
GPXXTPTKMSNITMQIMNDKQQIILGEMSGMVVDRXG

SEQ ID NO: 102592 - protein, 34 aa, Artificial Sequence
  Cyclic GFR-binding peptide
  MOD_RES (3)..(4): Xaa is C or S
GPXXTPTKMSNITMQIMNDKQQIILGEMSGMVVD

SEQ ID NO: 102593 - protein, 32 aa, Artificial Sequence; identical to SEQ ID NO: 24640
  Cyclic GFR-binding peptide

SEQ ID NO: 102594 - protein, 35 aa, Artificial Sequence
  Cyclic GFR-binding peptide
  MOD_RES (1)..(2)..(33)..(35): Xaa is C or S
XXVPQALSNITIQIMVGRKPKVLGEMSMIVRSXKX

SEQ ID NO: 102595 - protein, 20 aa, Artificial Sequence
  Cyclic GFR-binding peptide
SNITIQIMDAANNVVLGEMS

SEQ ID NO: 102596 - protein, 33 aa, Artificial Sequence; identical to SEQ ID NO: 24641
  Cyclic GFR-binding peptide
  MOD_RES (32)..(32): Xaa is C or S

SEQ ID NO: 102597 - protein, 30 aa, Artificial Sequence
  Cyclic GFR-binding peptide
  MOD_RES (27)..(29): Xaa is C or S
TSNITMQIMDNGRVLLLGEMSMIVEEXGXL

SEQ ID NO: 102598 - protein, 23 aa, Artificial Sequence
  Cyclic GFR-binding peptide
TKMSNITMQIMNDKQQIIIGEMS

SEQ ID NO: 102599 - protein, 38 aa, Artificial Sequence
  Cyclic GFR-binding peptide
  MOD_RES (3)..(4)..(35)..(37): Xaa is C or S
SPXXVSQDLSNITIQIMIGKTPKILGEMSMIVKSXKXS

SEQ ID NO: 102600 - protein, 21 aa, Artificial Sequence
  Cyclic GFR-binding peptide
LSNITIQIMDAANNVVLGEMS

SEQ ID NO: 102601 - protein, 38 aa, Artificial Sequence
  Cyclic GFR-binding peptide
  MOD_RES (4)..(5)..(37): Xaa is C or S
AGPXXTPTKMSNITMQIMNDKQQIILGEMSGMVVDRXG

SEQ ID NO: 102602 - protein, 25 aa, Artificial Sequence
  Cyclic GFR-binding peptide
ARLSNITIQIMDAANNVVLGEMSDM

SEQ ID NO: 102603 - protein, 39 aa, Artificial Sequence
  Cyclic GFR-binding peptide
  MOD_RES (6)..(7)..(39): Xaa is C or S
HVPKPXXAPTKLSNITVQIMDDSSNVILGEMSNMVVRSX

SEQ ID NO: 102604 - protein, 35 aa, Artificial Sequence
  Cyclic GFR-binding peptide
  MOD_RES (6)..(7): Xaa is C or S
RVPSTXXAPVKTSNITMQIMDNGRVLLIGEMSMIV

SEQ ID NO: 102605 - protein, 40 aa, Artificial Sequence; identical to SEQ ID NO: 24647
  Cyclic GFR-binding peptide
  MOD_RES (4)..(4): Xaa is C or S

SEQ ID NO: 102606 - protein, 27 aa, Artificial Sequence
  Cyclic GFR-binding peptide
TPTKMSNITMQIMNDKQQIILGEMSGM

SEQ ID NO: 102607 - protein, 32 aa, Artificial Sequence
  Cyclic GFR-binding peptide
  MOD_RES (31)..(31): Xaa is C or S
PARLSNITIQIMDAANNVVIGEMSDMVVEAXG

SEQ ID NO: 102608 - protein, 30 aa, Artificial Sequence
  Cyclic GFR-binding peptide
  MOD_RES (2)..(3): Xaa is C or S
PXXAPTKLSNITVQIMDDSSNVILGEMSNM

SEQ ID NO: 102609 - protein, 34 aa, Artificial Sequence
  Cyclic GFR-binding peptide
  MOD_RES (2)..(3)..(34): Xaa is C or S
TXXAPVKTSNITMQIMDNGRVLLLGEMSMIVEEX

SEQ ID NO: 102610 - protein, 33 aa, Artificial Sequence; identical to SEQ ID NO: 24655
  Cyclic GFR-binding peptide
  MOD_RES (1)..(1): Xaa is C or S

SEQ ID NO: 102611 - protein, 36 aa, Artificial Sequence
  Cyclic GFR-binding peptide
  MOD_RES (4)..(5)..(36): Xaa is C or S
ASPXXVSQDLSNITIQIMIGKTPKILGEMSMIVKSX

SEQ ID NO: 102612 - protein, 27 aa, Artificial Sequence
  Cyclic GFR-binding peptide
PVKTSNITMQIMDNGRVLLIGEMSMIV

SEQ ID NO: 102613 - protein, 34 aa, Artificial Sequence; identical to SEQ ID NO: 24659
  Cyclic GFR-binding peptide
  MOD_RES (5)..(5): Xaa is C or S

SEQ ID NO: 102614 - protein, 30 aa, Artificial Sequence
  Cyclic GFR-binding peptide
  MOD_RES (1)..(2): Xaa is C or S
XXTPTKMSNITMQIMNDKQQIILGEMSGMV

SEQ ID NO: 102615 - protein, 29 aa, Artificial Sequence
  Cyclic GFR-binding peptide
PTKLSNITVQIMDDSSNVILGEMSNMVVR

SEQ ID NO: 102616 - protein, 27 aa, Artificial Sequence
  Cyclic GFR-binding peptide
GQSNITMQIMRIKPHQGQHIGEMSLEE

SEQ ID NO: 102617 - protein, 32 aa, Artificial Sequence; identical to SEQ ID NO: 24664
  Cyclic GFR-binding peptide

SEQ ID NO: 102618 - protein, 23 aa, Artificial Sequence
  Cyclic GFR-binding peptide
MSNITMQIMNDKQQIIIGEMSGM

SEQ ID NO: 102619 - protein, 40 aa, Artificial Sequence
  Cyclic GFR-binding peptide
  MOD_RES (4)..(5)..(37)..(39): Xaa is C or S
PKPXXAPTKLSNITVQIMDDSSNVILGEMSNMVVRSXGXH

SEQ ID NO: 102620 - protein, 35 aa, Artificial Sequence
  Cyclic GFR-binding peptide
  MOD_RES (6)..(7): Xaa is C or S
AAPASXXVPARLSNITIQIMDAANNVVLGEMSDMV

SEQ ID NO: 102621 - protein, 36 aa, Artificial Sequence
  Cyclic GFR-binding peptide
  MOD_RES (6)..(7): Xaa is C or S
AAPASXXVPARLSNITIQIMDAANNVVIGEMSDMVV

SEQ ID NO: 102622 - protein, 32 aa, Artificial Sequence
  Cyclic GFR-binding peptide
  MOD_RES (1)..(2): Xaa is C or S
XXVPARLSNITIQIMDAANNVVIGEMSDMVVE

SEQ ID NO: 102623 - protein, 24 aa, Artificial Sequence
  Cyclic GFR-binding peptide
PVKTSNITMQIMDNGRVLLIGEMS

SEQ ID NO: 102624 - protein, 31 aa, Artificial Sequence
  Cyclic GFR-binding peptide
  MOD_RES (29)..(31): Xaa is C or S
KLSNITVQIMDDSSNVILGEMSNMVVRSXGX

SEQ ID NO: 102625 - protein, 31 aa, Artificial Sequence; identical to SEQ ID NO: 24675
  Cyclic GFR-binding peptide

SEQ ID NO: 102626 - protein, 36 aa, Artificial Sequence
  Cyclic GFR-binding peptide
  MOD_RES (1)..(33)..(35): Xaa is C or S
XTPTKMSNITMQIMNDKQQIIIGEMSGMVVDRXGXS

SEQ ID NO: 102627 - protein, 31 aa, Artificial Sequence; identical to SEQ ID NO: 24679
  Cyclic GFR-binding peptide

SEQ ID NO: 102628 - protein, 30 aa, Artificial Sequence; identical to SEQ ID NO: 73114
  Cyclic GFR-binding peptide
  MOD_RES (3)..(4): Xaa is C or S

SEQ ID NO: 102629 - protein, 34 aa, Artificial Sequence
  Cyclic GFR-binding peptide
  MOD_RES (3)..(4): Xaa is C or S
SPXXVPQDLSNITIQIMVGRTPKVLGEMSMVVKS

SEQ ID NO: 102630 - protein, 36 aa, Artificial Sequence; identical to SEQ ID NO: 69913
  Cyclic GFR-binding peptide
  MOD_RES (3)..(4)..(35): Xaa is C or S

SEQ ID NO: 102631 - protein, 41 aa, Artificial Sequence; identical to SEQ ID NO: 24683
  Cyclic GFR-binding peptide
  MOD_RES (5)..(5): Xaa is C or S

SEQ ID NO: 102632 - protein, 27 aa, Artificial Sequence
  Cyclic GFR-binding peptide
  MOD_RES (1)..(1): Xaa is C or S
XVPQALSNITIQIMVGRKPKVIGEMSM

SEQ ID NO: 102633 - protein, 30 aa, Artificial Sequence
  Cyclic GFR-binding peptide
VSQDLSNITIQIMIGKTPKILGEMSMIVKS

SEQ ID NO: 102634 - protein, 26 aa, Artificial Sequence
  Cyclic GFR-binding peptide
  MOD_RES (1)..(1): Xaa is C or S
XAPVKTSNITMQIMDNGRVLLLGEMS

SEQ ID NO: 102635 - protein, 29 aa, Artificial Sequence
  Cyclic GFR-binding peptide
  MOD_RES (29)..(29): Xaa is C or S
RLSNITIQIMDAANNVVLGEMSDMVVEAX

SEQ ID NO: 102636 - protein, 27 aa, Artificial Sequence
  Cyclic GFR-binding peptide
PVKTSNITMQIMDNGRVLLLGEMSMIV

SEQ ID NO: 102637 - protein, 34 aa, Artificial Sequence; identical to SEQ ID NO: 24687
  Cyclic GFR-binding peptide
  MOD_RES (4)..(4): Xaa is C or S

SEQ ID NO: 102638 - protein, 28 aa, Artificial Sequence
  Cyclic GFR-binding peptide
  MOD_RES (27)..(27): Xaa is C or S
LSNITIQIMIGKTPKILGEMSMIVKSXK

SEQ ID NO: 102639 - protein, 28 aa, Artificial Sequence
  Cyclic GFR-binding peptide
  MOD_RES (1)..(2): Xaa is C or S
XXVPQALSNITIQIMVGRKPKVIGEMSM

SEQ ID NO: 102640 - protein, 29 aa, Artificial Sequence
  Cyclic GFR-binding peptide
  MOD_RES (27)..(29): Xaa is C or S
SNITIQIMDSANNVVIGEMSDMVVESXGX

SEQ ID NO: 102641 - protein, 30 aa, Artificial Sequence
  Cyclic GFR-binding peptide
  MOD_RES (28)..(30): Xaa is C or S
LSNITIQIMDSANNVVIGEMSDMVVESXGX

SEQ ID NO: 102642 - protein, 29 aa, Artificial Sequence
  Cyclic GFR-binding peptide
  MOD_RES (29)..(29): Xaa is C or S
RLSNITIQIMDAANNVVIGEMSDMVVEAX

SEQ ID NO: 102643 - protein, 28 aa, Artificial Sequence
  Cyclic GFR-binding peptide
  MOD_RES (26)..(28): Xaa is C or S
SNITIQIMIGKTPKIIGEMSMIVKSXKX

SEQ ID NO: 102644 - protein, 35 aa, Artificial Sequence
  Cyclic GFR-binding peptide
  MOD_RES (4)..(5): Xaa is C or S
AAPXXVPQALSNITIQIMVGRKPKVLGEMSMIVRS

SEQ ID NO: 102645 - protein, 42 aa, Artificial Sequence; identical to SEQ ID NO: 24691
  Cyclic GFR-binding peptide
  MOD_RES (3)..(40)..(42): Xaa is C or S

SEQ ID NO: 102646 - protein, 38 aa, Artificial Sequence
  Cyclic GFR-binding peptide
  MOD_RES (6)..(7): Xaa is C or S
HVPKPXXAPTKLSNITVQIMDDSSNVIIGEMSNMVVRS

SEQ ID NO: 102647 - protein, 30 aa, Artificial Sequence
  Cyclic GFR-binding peptide
TPTKMSNITMQIMNDKQQIIIGEMSGMVVD

SEQ ID NO: 102648 - protein, 29 aa, Artificial Sequence
  Cyclic GFR-binding peptide
  MOD_RES (2)..(3): Xaa is C or S
PXXVSQDLSNITIQIMIGKTPKILGEMSM

SEQ ID NO: 102649 - protein, 34 aa, Artificial Sequence; identical to SEQ ID NO: 24696
  Cyclic GFR-binding peptide
  MOD_RES (5)..(5): Xaa is C or S

SEQ ID NO: 102650 - protein, 26 aa, Artificial Sequence
  Cyclic GFR-binding peptide
LSNITIQIMDAANNVVLGEMSDMVVE

SEQ ID NO: 102651 - protein, 28 aa, Artificial Sequence
  Cyclic GFR-binding peptide
  MOD_RES (27)..(27): Xaa is C or S
LSNITIQIMIGKTPKIIGEMSMIVKSXK

SEQ ID NO: 102652 - protein, 29 aa, Artificial Sequence
  Cyclic GFR-binding peptide
  MOD_RES (2)..(3): Xaa is C or S
PXXAPTKLSNITVQIMDDSSNVIIGEMSN

SEQ ID NO: 102653 - protein, 30 aa, Artificial Sequence
  Cyclic GFR-binding peptide
  MOD_RES (30)..(30): Xaa is C or S
TKMSNITMQIMNDKQQIIIGEMSGMVVDRX

SEQ ID NO: 102654 - protein, 32 aa, Artificial Sequence
  Cyclic GFR-binding peptide
  MOD_RES (2)..(3): Xaa is C or S
PXXTPTKMSNITMQIMNDKQQIIIGEMSGMVV

SEQ ID NO: 102655 - protein, 26 aa, Artificial Sequence
  Cyclic GFR-binding peptide
PQDLSNITIQIMVGRTPKVIGEMSMV

SEQ ID NO: 102656 - protein, 35 aa, Artificial Sequence
  Cyclic GFR-binding peptide
  MOD_RES (1)..(33)..(35): Xaa is C or S
XVPARLSNITIQIMDAANNVVIGEMSDMVVEAXGX

SEQ ID NO: 102657 - protein, 33 aa, Artificial Sequence; identical to SEQ ID NO: 24701
  Cyclic GFR-binding peptide
  MOD_RES (33)..(33): Xaa is C or S

SEQ ID NO: 102658 - protein, 37 aa, Artificial Sequence; identical to SEQ ID NO: 24702
  Cyclic GFR-binding peptide
  MOD_RES (4)..(4): Xaa is C or S

SEQ ID NO: 102659 - protein, 32 aa, Artificial Sequence; identical to SEQ ID NO: 73135
  Cyclic GFR-binding peptide
  MOD_RES (30)..(32): Xaa is C or S

SEQ ID NO: 102660 - protein, 36 aa, Artificial Sequence
  Cyclic GFR-binding peptide
  MOD_RES (5)..(6): Xaa is C or S
APASXXVPARLSNITIQIMDAANNVVLGEMSDMVVE

SEQ ID NO: 102661 - protein, 36 aa, Artificial Sequence; identical to SEQ ID NO: 24704
  Cyclic GFR-binding peptide
  MOD_RES (2)..(2): Xaa is C or S

SEQ ID NO: 102662 - protein, 31 aa, Artificial Sequence; identical to SEQ ID NO: 24705
  Cyclic GFR-binding peptide

SEQ ID NO: 102663 - protein, 42 aa, Artificial Sequence
  Cyclic GFR-binding peptide
  MOD_RES (6)..(7)..(39)..(41): Xaa is C or S
AAPASXXVPARLSNITIQIMDAANNVVLGEMSDMVVEAXGXR

SEQ ID NO: 102664 - protein, 33 aa, Artificial Sequence
  Cyclic GFR-binding peptide
  MOD_RES (5)..(6): Xaa is C or S
APASXXVPARLSNITIQIMDAANNVVIGEMSDM

SEQ ID NO: 102665 - protein, 30 aa, Artificial Sequence; identical to SEQ ID NO: 24709
  Cyclic GFR-binding peptide

SEQ ID NO: 102666 - protein, 24 aa, Artificial Sequence
  Cyclic GFR-binding peptide
DLSNITIQIMVGRTPKVIGEMSMV

SEQ ID NO: 102667 - protein, 32 aa, Artificial Sequence
  Cyclic GFR-binding peptide
  MOD_RES (6)..(7): Xaa is C or S
GSAGPXXTPTKMSNITMQIMNDKQQIILGEMS

SEQ ID NO: 102668 - protein, 29 aa, Artificial Sequence
  Cyclic GFR-binding peptide
  MOD_RES (1)..(2): Xaa is C or S
XXVPQDLSNITIQIMVGRTPKVIGEMSMV

SEQ ID NO: 102669 - protein, 38 aa, Artificial Sequence; identical to SEQ ID NO: 24712
  Cyclic GFR-binding peptide
  MOD_RES (1)..(35)..(37): Xaa is C or S

SEQ ID NO: 102670 - protein, 31 aa, Artificial Sequence
  Cyclic GFR-binding peptide
  MOD_RES (2)..(3): Xaa is C or S
TXXAPVKTSNITMQIMDNGRVLLIGEMSMIV

SEQ ID NO: 102671 - protein, 39 aa, Artificial Sequence; identical to SEQ ID NO: 24717
  Cyclic GFR-binding peptide
  MOD_RES (4)..(38): Xaa is C or S

SEQ ID NO: 102672 - protein, 30 aa, Artificial Sequence; identical to SEQ ID NO: 69955
  Cyclic GFR-binding peptide
  MOD_RES (29)..(29): Xaa is C or S

SEQ ID NO: 102673 - protein, 25 aa, Artificial Sequence
  Cyclic GFR-binding peptide
QDLSNITIQIMIGKTPKILGEMSMI

SEQ ID NO: 102674 - protein, 43 aa, Artificial Sequence; identical to SEQ ID NO: 24718
  Cyclic GFR-binding peptide
  MOD_RES (3)..(40)..(42): Xaa is C or S

SEQ ID NO: 102675 - protein, 32 aa, Artificial Sequence
  Cyclic GFR-binding peptide
  MOD_RES (6)..(7): Xaa is C or S
STPPTXXVPTRLSNITIQIMDSANNVVLGEMS

SEQ ID NO: 102676 - protein, 36 aa, Artificial Sequence; identical to SEQ ID NO: 24719
  Cyclic GFR-binding peptide
  MOD_RES (2)..(36): Xaa is C or S

SEQ ID NO: 102677 - protein, 42 aa, Artificial Sequence; identical to SEQ ID NO: 24722
  Cyclic GFR-binding peptide
  MOD_RES (5)..(39)..(41): Xaa is C or S

SEQ ID NO: 102678 - protein, 36 aa, Artificial Sequence; identical to SEQ ID NO: 69960
  Cyclic GFR-binding peptide
  MOD_RES (6)..(7): Xaa is C or S

SEQ ID NO: 102679 - protein, 30 aa, Artificial Sequence
  Cyclic GFR-binding peptide
  MOD_RES (3)..(4): Xaa is C or S
PTXXVPTRLSNITIQIMDSANNVVIGEMSD

SEQ ID NO: 102680 - protein, 38 aa, Artificial Sequence
  Cyclic GFR-binding peptide
  MOD_RES (6)..(7)..(38): Xaa is C or S
RVPSTXXAPVKTSNITMQIMDNGRVLLIGEMSMIVEEX

SEQ ID NO: 102681 - protein, 27 aa, Artificial Sequence
  Cyclic GFR-binding peptide
PTRLSNITIQIMDSANNVVIGEMSDMV

SEQ ID NO: 102682 - protein, 31 aa, Artificial Sequence
  Cyclic GFR-binding peptide
  MOD_RES (31)..(31): Xaa is C or S
VSQDLSNITIQIMIGKTPKILGEMSMIVKSX

SEQ ID NO: 102683 - protein, 28 aa, Artificial Sequence
  Cyclic GFR-binding peptide
  MOD_RES (2)..(3): Xaa is C or S
PXXTPTKMSNITMQIMNDKQQIIIGEMS

SEQ ID NO: 102684 - protein, 31 aa, Artificial Sequence; identical to SEQ ID NO: 24732
  Cyclic GFR-binding peptide

SEQ ID NO: 102685 - protein, 36 aa, Artificial Sequence; identical to SEQ ID NO: 24734
  Cyclic GFR-binding peptide
  MOD_RES (33)..(35): Xaa is C or S

SEQ ID NO: 102686 - protein, 31 aa, Artificial Sequence
  Cyclic GFR-binding peptide
  MOD_RES (3)..(4): Xaa is C or S
GPXXTPTKMSNITMQIMNDKQQIIIGEMSGM

SEQ ID NO: 102687 - protein, 29 aa, Artificial Sequence
  Cyclic GFR-binding peptide
  MOD_RES (2)..(3): Xaa is C or S
PXXTPTKMSNITMQIMNDKQQIILGEMSG

SEQ ID NO: 102688 - protein, 22 aa, Artificial Sequence
  Cyclic GFR-binding peptide
SNITVQIMDDSSNVILGEMSNM

SEQ ID NO: 102689 - protein, 21 aa, Artificial Sequence
  Cyclic GFR-binding peptide
LSNITIQIMDAANNVVIGEMS

SEQ ID NO: 102690 - protein, 32 aa, Artificial Sequence; identical to SEQ ID NO: 73181
  Cyclic GFR-binding peptide
  MOD_RES (4)..(5): Xaa is C or S

SEQ ID NO: 102691 - protein, 24 aa, Artificial Sequence
  Cyclic GFR-binding peptide
PARLSNITIQIMDAANNVVIGEMS

SEQ ID NO: 102692 - protein, 32 aa, Artificial Sequence; identical to SEQ ID NO: 24748
  Cyclic GFR-binding peptide
  MOD_RES (2)..(2): Xaa is C or S

SEQ ID NO: 102693 - protein, 38 aa, Artificial Sequence
  Cyclic GFR-binding peptide
  MOD_RES (3)..(4)..(35)..(37): Xaa is C or S
APXXVPQALSNITIQIMVGRKPKVLGEMSMIVRSXKXS

SEQ ID NO: 102694 - protein, 28 aa, Artificial Sequence
  Cyclic GFR-binding peptide
  MOD_RES (1)..(2): Xaa is C or S
XXAPVKTSNITMQIMDNGRVLLIGEMSM

SEQ ID NO: 102695 - protein, 33 aa, Artificial Sequence; identical to SEQ ID NO: 24751
  Cyclic GFR-binding peptide
  MOD_RES (6)..(6): Xaa is C or S

SEQ ID NO: 102696 - protein, 38 aa, Artificial Sequence; identical to SEQ ID NO: 24753
  Cyclic GFR-binding peptide
  MOD_RES (7)..(7): Xaa is C or S

SEQ ID NO: 102697 - protein, 29 aa, Artificial Sequence
  Cyclic GFR-binding peptide
VSQDLSNITIQIMIGKTPKILGEMSMIVK

SEQ ID NO: 102698 - protein, 33 aa, Artificial Sequence
  Cyclic GFR-binding peptide
  MOD_RES (5)..(6): Xaa is C or S
TPPTXXVPTRLSNITIQIMDSANNVVLGEMSDM

SEQ ID NO: 102699 - protein, 23 aa, Artificial Sequence
  Cyclic GFR-binding peptide
SNITMQIMNDKQQIILGEMSGMV

SEQ ID NO: 102700 - protein, 29 aa, Artificial Sequence
  Cyclic GFR-binding peptide
PSRVHHSNITVQIMEYVRKKPKLIGEMSR

SEQ ID NO: 102701 - protein, 36 aa, Artificial Sequence
  Cyclic GFR-binding peptide
  MOD_RES (3)..(4)..(35): Xaa is C or S
SPXXVPQDLSNITIQIMVGRTPKVLGEMSMVVKSXK

SEQ ID NO: 102702 - protein, 26 aa, Artificial Sequence
  Cyclic GFR-binding peptide
  MOD_RES (1)..(1): Xaa is C or S
XAPTKLSNITVQIMDDSSNVIIGEMS

SEQ ID NO: 102703 - protein, 33 aa, Artificial Sequence; identical to SEQ ID NO: 24762
  Cyclic GFR-binding peptide
  MOD_RES (31)..(33): Xaa is C or S

SEQ ID NO: 102704 - protein, 37 aa, Artificial Sequence
  Cyclic GFR-binding peptide
  MOD_RES (6)..(7): Xaa is C or S
AAPASXXVPARLSNITIQIMDAANNVVIGEMSDMVVE

SEQ ID NO: 102705 - protein, 33 aa, Artificial Sequence
  Cyclic GFR-binding peptide
  MOD_RES (32)..(32): Xaa is C or S
APTKLSNITVQIMDDSSNVILGEMSNMVVRSXG

SEQ ID NO: 102706 - protein, 34 aa, Artificial Sequence
  Cyclic GFR-binding peptide
  MOD_RES (32)..(34): Xaa is C or S
VPTRLSNITIQIMDSANNVVIGEMSDMVVESXGX

SEQ ID NO: 102707 - protein, 33 aa, Artificial Sequence; identical to SEQ ID NO: 24768
  Cyclic GFR-binding peptide

SEQ ID NO: 102708 - protein, 28 aa, Artificial Sequence
  Cyclic GFR-binding peptide
  MOD_RES (1)..(1): Xaa is C or S
XTPTKMSNITMQIMNDKQQIILGEMSGM

SEQ ID NO: 102709 - protein, 25 aa, Artificial Sequence
  Cyclic GFR-binding peptide
VKTSNITMQIMDNGRVLLIGEMSMI

SEQ ID NO: 102710 - protein, 29 aa, Artificial Sequence
  Cyclic GFR-binding peptide
  MOD_RES (1)..(1): Xaa is C or S
XVPARLSNITIQIMDAANNVVIGEMSDMV

SEQ ID NO: 102711 - protein, 37 aa, Artificial Sequence; identical to SEQ ID NO: 73217
  Cyclic GFR-binding peptide
  MOD_RES (2)..(3)..(34)..(36): Xaa is C or S

SEQ ID NO: 102712 - protein, 36 aa, Artificial Sequence; identical to SEQ ID NO: 24769
  Cyclic GFR-binding peptide
  MOD_RES (3)..(3): Xaa is C or S

SEQ ID NO: 102713 - protein, 37 aa, Artificial Sequence
  Cyclic GFR-binding peptide
  MOD_RES (3)..(4)..(35)..(37): Xaa is C or S
STXXAPVKTSNITMQIMDNGRVLLIGEMSMIVEEXGX

SEQ ID NO: 102714 - protein, 29 aa, Artificial Sequence
  Cyclic GFR-binding peptide
  MOD_RES (3)..(4): Xaa is C or S
KPXXAPTKLSNITVQIMDDSSNVIIGEMS

SEQ ID NO: 102715 - protein, 33 aa, Artificial Sequence
  Cyclic GFR-binding peptide
  MOD_RES (30)..(32): Xaa is C or S
PQDLSNITIQIMVGRTPKVLGEMSMVVKSXKXS

SEQ ID NO: 102716 - protein, 39 aa, Artificial Sequence; identical to SEQ ID NO: 24772
  Cyclic GFR-binding peptide
  MOD_RES (6)..(6): Xaa is C or S

SEQ ID NO: 102717 - protein, 27 aa, Artificial Sequence
  Cyclic GFR-binding peptide
RLSNITIQIMDSANNVVIGEMSDMVVE

SEQ ID NO: 102718 - protein, 40 aa, Artificial Sequence; identical to SEQ ID NO: 24775
  Cyclic GFR-binding peptide
  MOD_RES (1)..(38)..(40): Xaa is C or S

SEQ ID NO: 102719 - protein, 33 aa, Artificial Sequence; identical to SEQ ID NO: 24780
  Cyclic GFR-binding peptide

SEQ ID NO: 102720 - protein, 29 aa, Artificial Sequence
  Cyclic GFR-binding peptide
PTRLSNITIQIMDSANNVVIGEMSDMVVE

SEQ ID NO: 102721 - protein, 33 aa, Artificial Sequence; identical to SEQ ID NO: 24782
  Cyclic GFR-binding peptide
  MOD_RES (33)..(33): Xaa is C or S

SEQ ID NO: 102722 - protein, 36 aa, Artificial Sequence
  Cyclic GFR-binding peptide
  MOD_RES (3)..(4)..(35): Xaa is C or S
SPXXVSQDLSNITIQIMIGKTPKILGEMSMIVKSXK

SEQ ID NO: 102723 - protein, 31 aa, Artificial Sequence
  Cyclic GFR-binding peptide
  MOD_RES (5)..(6): Xaa is C or S
APASXXVPARLSNITIQIMDAANNVVLGEMS

SEQ ID NO: 102724 - protein, 33 aa, Artificial Sequence; identical to SEQ ID NO: 73229
  Cyclic GFR-binding peptide
  MOD_RES (32)..(32): Xaa is C or S

SEQ ID NO: 102725 - protein, 32 aa, Artificial Sequence
  Cyclic GFR-binding peptide
  MOD_RES (29)..(31): Xaa is C or S
KMSNITMQIMNDKQQIILGEMSGMVVDRXGXS

SEQ ID NO: 102726 - protein, 26 aa, Artificial Sequence
  Cyclic GFR-binding peptide
SNITMQIMRIKPHQGQHIGEMSLEEH

SEQ ID NO: 102727 - protein, 30 aa, Artificial Sequence; identical to SEQ ID NO: 24790
  Cyclic GFR-binding peptide

SEQ ID NO: 102728 - protein, 31 aa, Artificial Sequence; identical to SEQ ID NO: 70017
  Cyclic GFR-binding peptide
  MOD_RES (4)..(5): Xaa is C or S

SEQ ID NO: 102729 - protein, 35 aa, Artificial Sequence
  Cyclic GFR-binding peptide
  MOD_RES (4)..(5): Xaa is C or S
AGPXXTPTKMSNITMQIMNDKQQIIIGEMSGMVVD

SEQ ID NO: 102730 - protein, 21 aa, Artificial Sequence
  Cyclic GFR-binding peptide
SNITIQIMDAANNVVLGEMSD

SEQ ID NO: 102731 - protein, 31 aa, Artificial Sequence
  Cyclic GFR-binding peptide
VPTRLSNITIQIMDSANNVVLGEMSDMVVES

SEQ ID NO: 102732 - protein, 32 aa, Artificial Sequence; identical to SEQ ID NO: 70018
  Cyclic GFR-binding peptide
  MOD_RES (4)..(5): Xaa is C or S

SEQ ID NO: 102733 - protein, 26 aa, Artificial Sequence
  Cyclic GFR-binding peptide
SNITMQIMNDKQQIILGEMSGMVVDR

SEQ ID NO: 102734 - protein, 23 aa, Artificial Sequence
  Cyclic GFR-binding peptide
VKTSNITMQIMDNGRVLLLGEMS

SEQ ID NO: 102735 - protein, 22 aa, Artificial Sequence
  Cyclic GFR-binding peptide
LSNITVQIMDDSSNVIIGEMSN

SEQ ID NO: 102736 - protein, 29 aa, Artificial Sequence
  Cyclic GFR-binding peptide
  MOD_RES (1)..(1): Xaa is C or S
XVPARLSNITIQIMDAANNVVLGEMSDMV

SEQ ID NO: 102737 - protein, 33 aa, Artificial Sequence
  Cyclic GFR-binding peptide
  MOD_RES (3)..(4): Xaa is C or S
GPXXTPTKMSNITMQIMNDKQQIILGEMSGMVV

SEQ ID NO: 102738 - protein, 28 aa, Artificial Sequence
  Cyclic GFR-binding peptide
  MOD_RES (2)..(3): Xaa is C or S
PXXVPQDLSNITIQIMVGRTPKVIGEMS

SEQ ID NO: 102739 - protein, 40 aa, Artificial Sequence
  Cyclic GFR-binding peptide
  MOD_RES (5)..(6)..(37)..(39): Xaa is C or S
VPSTXXAPVKTSNITMQIMDNGRVLLLGEMSMIVEEXGXL

SEQ ID NO: 102740 - protein, 32 aa, Artificial Sequence
  Cyclic GFR-binding peptide
  MOD_RES (32)..(32): Xaa is C or S
VPTRLSNITIQIMDSANNVVIGEMSDMVVESX

SEQ ID NO: 102741 - protein, 40 aa, Artificial Sequence; identical to SEQ ID NO: 24805
  Cyclic GFR-binding peptide
  MOD_RES (2)..(39): Xaa is C or S

SEQ ID NO: 102742 - protein, 32 aa, Artificial Sequence
  Cyclic GFR-binding peptide
  MOD_RES (4)..(5): Xaa is C or S
AGPXXTPTKMSNITMQIMNDKQQIILGEMSGM

SEQ ID NO: 102743 - protein, 21 aa, Artificial Sequence
  Cyclic GFR-binding peptide
LSNITIQIMIGKTPKILGEMS

SEQ ID NO: 102744 - protein, 27 aa, Artificial Sequence
  Cyclic GFR-binding peptide
KTSNITMQIMDNGRVLLLGEMSMIVEE

SEQ ID NO: 102745 - protein, 27 aa, Artificial Sequence
  Cyclic GFR-binding peptide
VPQDLSNITIQIMVGRTPKVIGEMSMV

SEQ ID NO: 102746 - protein, 33 aa, Artificial Sequence
  Cyclic GFR-binding peptide
  MOD_RES (31)..(33): Xaa is C or S
PTKMSNITMQIMNDKQQIIIGEMSGMVVDRXGX

SEQ ID NO: 102747 - protein, 22 aa, Artificial Sequence
  Cyclic GFR-binding peptide
RLSNITIQIMDAANNVVLGEMS

SEQ ID NO: 102748 - protein, 38 aa, Artificial Sequence; identical to SEQ ID NO: 24809
  Cyclic GFR-binding peptide
  MOD_RES (1)..(35)..(37): Xaa is C or S

SEQ ID NO: 102749 - protein, 35 aa, Artificial Sequence; identical to SEQ ID NO: 24810
  Cyclic GFR-binding peptide
  MOD_RES (4)..(4): Xaa is C or S

SEQ ID NO: 102750 - protein, 31 aa, Artificial Sequence
  Cyclic GFR-binding peptide
  MOD_RES (3)..(4): Xaa is C or S
PTXXVPTRLSNITIQIMDSANNVVIGEMSDM

SEQ ID NO: 102751 - protein, 43 aa, Artificial Sequence; identical to SEQ ID NO: 24811
  Cyclic GFR-binding peptide
  MOD_RES (4)..(41)..(43): Xaa is C or S

SEQ ID NO: 102752 - protein, 31 aa, Artificial Sequence; identical to SEQ ID NO: 24812
  Cyclic GFR-binding peptide

SEQ ID NO: 102753 - protein, 35 aa, Artificial Sequence; identical to SEQ ID NO: 24814
  Cyclic GFR-binding peptide
  MOD_RES (7)..(7): Xaa is C or S

SEQ ID NO: 102754 - protein, 37 aa, Artificial Sequence
  Cyclic GFR-binding peptide
  MOD_RES (2)..(3)..(35)..(37): Xaa is C or S
PXXTPTKMSNITMQIMNDKQQIIIGEMSGMVVDRXGX

SEQ ID NO: 102755 - protein, 26 aa, Artificial Sequence
  Cyclic GFR-binding peptide
LSNITVQIMEIVRKKPIFLGEMSTLE

SEQ ID NO: 102756 - protein, 33 aa, Artificial Sequence
  Cyclic GFR-binding peptide
  MOD_RES (3)..(4): Xaa is C or S
STXXAPVKTSNITMQIMDNGRVLLLGEMSMIVE

SEQ ID NO: 102757 - protein, 26 aa, Artificial Sequence
  Cyclic GFR-binding peptide
  MOD_RES (26)..(26): Xaa is C or S
SNITMQIMDNGRVLLLGEMSMIVEEX

SEQ ID NO: 102758 - protein, 26 aa, Artificial Sequence
  Cyclic GFR-binding peptide
SNITIQIMDSANNVVIGEMSDMVVES

SEQ ID NO: 102759 - protein, 27 aa, Artificial Sequence
  Cyclic GFR-binding peptide
  MOD_RES (1)..(1): Xaa is C or S
XVPARLSNITIQIMDAANNVVLGEMSD

SEQ ID NO: 102760 - protein, 28 aa, Artificial Sequence
  Cyclic GFR-binding peptide
  MOD_RES (1)..(2): Xaa is C or S
XXVPARLSNITIQIMDAANNVVLGEMSD

SEQ ID NO: 102761 - protein, 32 aa, Artificial Sequence
  Cyclic GFR-binding peptide
  MOD_RES (29)..(31): Xaa is C or S
KLSNITVQIMDDSSNVILGEMSNMVVRSXGXH

SEQ ID NO: 102762 - protein, 28 aa, Artificial Sequence
  Cyclic GFR-binding peptide
PSRVHHSNITVQIMEYVRKKPKLLGEMS

SEQ ID NO: 102763 - protein, 33 aa, Artificial Sequence
  Cyclic GFR-binding peptide
  MOD_RES (1)..(2)..(33): Xaa is C or S
XXAPVKTSNITMQIMDNGRVLLLGEMSMIVEEX

SEQ ID NO: 102764 - protein, 31 aa, Artificial Sequence; identical to SEQ ID NO: 24825
  Cyclic GFR-binding peptide
  MOD_RES (30)..(30): Xaa is C or S

SEQ ID NO: 102765 - protein, 27 aa, Artificial Sequence
  Cyclic GFR-binding peptide
VQLSNITVQIMEIVRKKPIFLGEMSTL

SEQ ID NO: 102766 - protein, 36 aa, Artificial Sequence; identical to SEQ ID NO: 24828
  Cyclic GFR-binding peptide
  MOD_RES (1)..(35): Xaa is C or S

SEQ ID NO: 102767 - protein, 31 aa, Artificial Sequence
  Cyclic GFR-binding peptide
  MOD_RES (31)..(31): Xaa is C or S
APVKTSNITMQIMDNGRVLLIGEMSMIVEEX

SEQ ID NO: 102768 - protein, 32 aa, Artificial Sequence
  Cyclic GFR-binding peptide
  MOD_RES (1)..(32): Xaa is C or S
XVPQDLSNITIQIMVGRTPKVLGEMSMVVKSX

SEQ ID NO: 102769 - protein, 23 aa, Artificial Sequence
  Cyclic GFR-binding peptide
RLSNITIQIMDSANNVVLGEMSD

SEQ ID NO: 102770 - protein, 38 aa, Artificial Sequence
  Cyclic GFR-binding peptide
  MOD_RES (4)..(5)..(37): Xaa is C or S
AGPXXTPTKMSNITMQIMNDKQQIIIGEMSGMVVDRXG

SEQ ID NO: 102771 - protein, 37 aa, Artificial Sequence
  Cyclic GFR-binding peptide
  MOD_RES (2)..(3)..(34)..(36): Xaa is C or S
TXXAPVKTSNITMQIMDNGRVLLIGEMSMIVEEXGXL

SEQ ID NO: 102772 - protein, 33 aa, Artificial Sequence; identical to SEQ ID NO: 24839
  Cyclic GFR-binding peptide
  MOD_RES (2)..(2): Xaa is C or S

SEQ ID NO: 102773 - protein, 23 aa, Artificial Sequence
  Cyclic GFR-binding peptide
HSNITVQIMEYVRKKPKLLGEMS

SEQ ID NO: 102774 - protein, 33 aa, Artificial Sequence; identical to SEQ ID NO: 24842
  Cyclic GFR-binding peptide
  MOD_RES (31)..(33): Xaa is C or S

SEQ ID NO: 102775 - protein, 41 aa, Artificial Sequence; identical to SEQ ID NO: 24843
  Cyclic GFR-binding peptide
  MOD_RES (5)..(39)..(41): Xaa is C or S

SEQ ID NO: 102776 - protein, 21 aa, Artificial Sequence
  Cyclic GFR-binding peptide
SNITIQIMVGRKPKVLGEMSM

SEQ ID NO: 102777 - protein, 26 aa, Artificial Sequence
  Cyclic GFR-binding peptide
QDLSNITIQIMIGKTPKIIGEMSMIV

SEQ ID NO: 102778 - protein, 21 aa, Artificial Sequence
  Cyclic GFR-binding peptide
LSNITIQIMVGRTPKVIGEMS

SEQ ID NO: 102779 - protein, 31 aa, Artificial Sequence
  Cyclic GFR-binding peptide
  MOD_RES (4)..(5): Xaa is C or S
PKPXXAPTKLSNITVQIMDDSSNVILGEMSN

SEQ ID NO: 102780 - protein, 28 aa, Artificial Sequence
  Cyclic GFR-binding peptide
VSQDLSNITIQIMIGKTPKIIGEMSMIV

SEQ ID NO: 102781 - protein, 27 aa, Artificial Sequence
  Cyclic GFR-binding peptide
  MOD_RES (1)..(1): Xaa is C or S
XAPVKTSNITMQIMDNGRVLLIGEMSM

SEQ ID NO: 102782 - protein, 31 aa, Artificial Sequence
  Cyclic GFR-binding peptide
  MOD_RES (3)..(4): Xaa is C or S
ASXXVPARLSNITIQIMDAANNVVLGEMSDM

SEQ ID NO: 102783 - protein, 29 aa, Artificial Sequence
  Cyclic GFR-binding peptide
  MOD_RES (1)..(2): Xaa is C or S
XXTPTKMSNITMQIMNDKQQIILGEMSGM

SEQ ID NO: 102784 - protein, 26 aa, Artificial Sequence
  Cyclic GFR-binding peptide
LSNITIQIMIGKTPKIIGEMSMIVKS

SEQ ID NO: 102785 - protein, 34 aa, Artificial Sequence
  Cyclic GFR-binding peptide
  MOD_RES (6)..(7): Xaa is C or S
GSAGPXXTPTKMSNITMQIMNDKQQIILGEMSGM

SEQ ID NO: 102786 - protein, 29 aa, Artificial Sequence
  Cyclic GFR-binding peptide
PTQVQLSNITVQIMEIVRKKPIFLGEMST

SEQ ID NO: 102787 - protein, 42 aa, Artificial Sequence
  Cyclic GFR-binding peptide
  MOD_RES (6)..(7)..(39)..(41): Xaa is C or S
HVPKPXXAPTKLSNITVQIMDDSSNVIIGEMSNMVVRSXGXH

SEQ ID NO: 102788 - protein, 32 aa, Artificial Sequence; identical to SEQ ID NO: 73288
  Cyclic GFR-binding peptide
  MOD_RES (5)..(6): Xaa is C or S

SEQ ID NO: 102789 - protein, 23 aa, Artificial Sequence
  Cyclic GFR-binding peptide
ESNITMQIMRIKPHQGQHLGEMS

SEQ ID NO: 102790 - protein, 30 aa, Artificial Sequence
  Cyclic GFR-binding peptide
  MOD_RES (30)..(30): Xaa is C or S
TKMSNITMQIMNDKQQIILGEMSGMVVDRX

SEQ ID NO: 102791 - protein, 31 aa, Artificial Sequence; identical to SEQ ID NO: 24856
  Cyclic GFR-binding peptide
  MOD_RES (1)..(1): Xaa is C or S

SEQ ID NO: 102792 - protein, 32 aa, Artificial Sequence
  Cyclic GFR-binding peptide
  MOD_RES (4)..(5): Xaa is C or S
PPTXXVPTRLSNITIQIMDSANNVVIGEMSDM

SEQ ID NO: 102793 - protein, 39 aa, Artificial Sequence; identical to SEQ ID NO: 73291
  Cyclic GFR-binding peptide
  MOD_RES (4)..(5)..(37)..(39): Xaa is C or S

SEQ ID NO: 102794 - protein, 34 aa, Artificial Sequence; identical to SEQ ID NO: 24859
  Cyclic GFR-binding peptide
  MOD_RES (2)..(2): Xaa is C or S

SEQ ID NO: 102795 - protein, 32 aa, Artificial Sequence
  Cyclic GFR-binding peptide
  MOD_RES (29)..(31): Xaa is C or S
VKTSNITMQIMDNGRVLLLGEMSMIVEEXGXL

SEQ ID NO: 102796 - protein, 23 aa, Artificial Sequence
  Cyclic GFR-binding peptide
ARLSNITIQIMDAANNVVLGEMS

SEQ ID NO: 102797 - protein, 28 aa, Artificial Sequence
  Cyclic GFR-binding peptide
VPARLSNITIQIMDAANNVVLGEMSDMV

SEQ ID NO: 102798 - protein, 29 aa, Artificial Sequence
  Cyclic GFR-binding peptide
  MOD_RES (1)..(1): Xaa is C or S
XTPTKMSNITMQIMNDKQQIILGEMSGMV

SEQ ID NO: 102799 - protein, 40 aa, Artificial Sequence; identical to SEQ ID NO: 24868
  Cyclic GFR-binding peptide
  MOD_RES (3)..(37)..(39): Xaa is C or S

SEQ ID NO: 102800 - protein, 31 aa, Artificial Sequence
  Cyclic GFR-binding peptide
  MOD_RES (28)..(30): Xaa is C or S
LSNITIQIMDSANNVVLGEMSDMVVESXGXR

SEQ ID NO: 102801 - protein, 30 aa, Artificial Sequence
  Cyclic GFR-binding peptide
  MOD_RES (1)..(2): Xaa is C or S
XXTPTKMSNITMQIMNDKQQIIIGEMSGMV

SEQ ID NO: 102802 - protein, 35 aa, Artificial Sequence
  Cyclic GFR-binding peptide
  MOD_RES (4)..(5): Xaa is C or S
PASXXVPARLSNITIQIMDAANNVVLGEMSDMVVE

SEQ ID NO: 102803 - protein, 36 aa, Artificial Sequence
  Cyclic GFR-binding peptide
  MOD_RES (1)..(2)..(34)..(36): Xaa is C or S
XXAPTKLSNITVQIMDDSSNVILGEMSNMVVRSXGX

SEQ ID NO: 102804 - protein, 30 aa, Artificial Sequence
  Cyclic GFR-binding peptide
  MOD_RES (27)..(29): Xaa is C or S
SNITMQIMNDKQQIILGEMSGMVVDRXGXS

SEQ ID NO: 102805 - protein, 35 aa, Artificial Sequence; identical to SEQ ID NO: 24872
  Cyclic GFR-binding peptide
  MOD_RES (33)..(35): Xaa is C or S

SEQ ID NO: 102806 - protein, 28 aa, Artificial Sequence
  Cyclic GFR-binding peptide
PTKLSNITVQIMDDSSNVILGEMSNMVV

SEQ ID NO: 102807 - protein, 22 aa, Artificial Sequence
  Cyclic GFR-binding peptide
LSNITIQIMIGKTPKIIGEMSM

SEQ ID NO: 102808 - protein, 31 aa, Artificial Sequence; identical to SEQ ID NO: 73309
  Cyclic GFR-binding peptide
  MOD_RES (3)..(4): Xaa is C or S

SEQ ID NO: 102809 - protein, 32 aa, Artificial Sequence; identical to SEQ ID NO: 24880
  Cyclic GFR-binding peptide
  MOD_RES (31)..(31): Xaa is C or S

SEQ ID NO: 102810 - protein, 38 aa, Artificial Sequence
  Cyclic GFR-binding peptide
  MOD_RES (4)..(5)..(36)..(38): Xaa is C or S
ASPXXVPQDLSNITIQIMVGRTPKVLGEMSMVVKSXKX

SEQ ID NO: 102811 - protein, 40 aa, Artificial Sequence; identical to SEQ ID NO: 24881
  Cyclic GFR-binding peptide
  MOD_RES (3)..(40): Xaa is C or S

SEQ ID NO: 102812 - protein, 22 aa, Artificial Sequence
  Cyclic GFR-binding peptide
KLSNITVQIMDDSSNVIIGEMS

SEQ ID NO: 102813 - protein, 30 aa, Artificial Sequence
  Cyclic GFR-binding peptide
  MOD_RES (30)..(30): Xaa is C or S
TKLSNITVQIMDDSSNVILGEMSNMVVRSX

SEQ ID NO: 102814 - protein, 32 aa, Artificial Sequence; identical to SEQ ID NO: 73319
  Cyclic GFR-binding peptide
  MOD_RES (29)..(31): Xaa is C or S

SEQ ID NO: 102815 - protein, 26 aa, Artificial Sequence
  Cyclic GFR-binding peptide
ESNITMQIMRIKPHQGQHLGEMSFLQ

SEQ ID NO: 102816 - protein, 28 aa, Artificial Sequence
  Cyclic GFR-binding peptide
  MOD_RES (1)..(1): Xaa is C or S
XVPTGQSNITMQIMRIKPHQGQHIGEMS

SEQ ID NO: 102817 - protein, 29 aa, Artificial Sequence
  Cyclic GFR-binding peptide
  MOD_RES (28)..(28): Xaa is C or S
DLSNITIQIMVGRTPKVLGEMSMVVKSXK

SEQ ID NO: 102818 - protein, 28 aa, Artificial Sequence
  Cyclic GFR-binding peptide
  MOD_RES (27)..(27): Xaa is C or S
LSNITIQIMVGRTPKVLGEMSMVVKSXK

SEQ ID NO: 102819 - protein, 26 aa, Artificial Sequence
  Cyclic GFR-binding peptide
PTRLSNITIQIMDSANNVVIGEMSDM

SEQ ID NO: 102820 - protein, 38 aa, Artificial Sequence
  Cyclic GFR-binding peptide
  MOD_RES (5)..(6)..(38): Xaa is C or S
SAGPXXTPTKMSNITMQIMNDKQQIILGEMSGMVVDRX

SEQ ID NO: 102821 - protein, 31 aa, Artificial Sequence; identical to SEQ ID NO: 73322
  Cyclic GFR-binding peptide
  MOD_RES (29)..(31): Xaa is C or S

SEQ ID NO: 102822 - protein, 40 aa, Artificial Sequence; identical to SEQ ID NO: 24892
  Cyclic GFR-binding peptide
  MOD_RES (5)..(5): Xaa is C or S

SEQ ID NO: 102823 - protein, 32 aa, Artificial Sequence
  Cyclic GFR-binding peptide
  MOD_RES (2)..(3): Xaa is C or S
TXXVPTRLSNITIQIMDSANNVVIGEMSDMVV

SEQ ID NO: 102824 - protein, 30 aa, Artificial Sequence; identical to SEQ ID NO: 24895
  Cyclic GFR-binding peptide

SEQ ID NO: 102825 - protein, 30 aa, Artificial Sequence; identical to SEQ ID NO: 24897
  Cyclic GFR-binding peptide
  MOD_RES (29)..(29): Xaa is C or S

SEQ ID NO: 102826 - protein, 27 aa, Artificial Sequence
  Cyclic GFR-binding peptide
VHHSNITVQIMEYVRKKPKLLGEMSRL

SEQ ID NO: 102827 - protein, 34 aa, Artificial Sequence; identical to SEQ ID NO: 70110
  Cyclic GFR-binding peptide
  MOD_RES (2)..(3)..(34): Xaa is C or S

SEQ ID NO: 102828 - protein, 26 aa, Artificial Sequence
  Cyclic GFR-binding peptide
VKTSNITMQIMDNGRVLLIGEMSMIV

SEQ ID NO: 102829 - protein, 35 aa, Artificial Sequence; identical to SEQ ID NO: 70111
  Cyclic GFR-binding peptide
  MOD_RES (6)..(7): Xaa is C or S

SEQ ID NO: 102830 - protein, 35 aa, Artificial Sequence
  Cyclic GFR-binding peptide
  MOD_RES (6)..(7): Xaa is C or S
ASASPXXVPQDLSNITIQIMVGRTPKVLGEMSMVV

SEQ ID NO: 102831 - protein, 37 aa, Artificial Sequence; identical to SEQ ID NO: 73332
  Cyclic GFR-binding peptide
  MOD_RES (5)..(6): Xaa is C or S

SEQ ID NO: 102832 - protein, 32 aa, Artificial Sequence
  Cyclic GFR-binding peptide
  MOD_RES (32)..(32): Xaa is C or S
VPARLSNITIQIMDAANNVVIGEMSDMVVEAX

SEQ ID NO: 102833 - protein, 32 aa, Artificial Sequence
  Cyclic GFR-binding peptide
  MOD_RES (1)..(2): Xaa is C or S
XXVPTRLSNITIQIMDSANNVVIGEMSDMVVE

SEQ ID NO: 102834 - protein, 31 aa, Artificial Sequence
  Cyclic GFR-binding peptide
  MOD_RES (30)..(30): Xaa is C or S
PVKTSNITMQIMDNGRVLLIGEMSMIVEEXG

SEQ ID NO: 102835 - protein, 34 aa, Artificial Sequence
  Cyclic GFR-binding peptide
  MOD_RES (2)..(3): Xaa is C or S
SXXVPARLSNITIQIMDAANNVVIGEMSDMVVEA

SEQ ID NO: 102836 - protein, 29 aa, Artificial Sequence
  Cyclic GFR-binding peptide
  MOD_RES (1)..(1): Xaa is C or S
XVSQDLSNITIQIMIGKTPKIIGEMSMIV

SEQ ID NO: 102837 - protein, 28 aa, Artificial Sequence
  Cyclic GFR-binding peptide
TRLSNITIQIMDSANNVVLGEMSDMVVE

SEQ ID NO: 102838 - protein, 34 aa, Artificial Sequence; identical to SEQ ID NO: 24908
  Cyclic GFR-binding peptide
  MOD_RES (32)..(34): Xaa is C or S

SEQ ID NO: 102839 - protein, 31 aa, Artificial Sequence
  Cyclic GFR-binding peptide
  MOD_RES (28)..(30): Xaa is C or S
LSNITVQIMDDSSNVILGEMSNMVVRSXGXH

SEQ ID NO: 102840 - protein, 26 aa, Artificial Sequence
  Cyclic GFR-binding peptide
RLSNITIQIMDAANNVVIGEMSDMVV

SEQ ID NO: 102841 - protein, 29 aa, Artificial Sequence
  Cyclic GFR-binding peptide
  MOD_RES (29)..(29): Xaa is C or S
QALSNITIQIMVGRKPKVLGEMSMIVRSX

SEQ ID NO: 102842 - protein, 38 aa, Artificial Sequence; identical to SEQ ID NO: 24911
  Cyclic GFR-binding peptide
  MOD_RES (36)..(38): Xaa is C or S

SEQ ID NO: 102843 - protein, 37 aa, Artificial Sequence
  Cyclic GFR-binding peptide
  MOD_RES (3)..(4)..(36): Xaa is C or S
GPXXTPTKMSNITMQIMNDKQQIIIGEMSGMVVDRXG

SEQ ID NO: 102844 - protein, 23 aa, Artificial Sequence
  Cyclic GFR-binding peptide
QALSNITIQIMVGRKPKVIGEMS

SEQ ID NO: 102845 - protein, 36 aa, Artificial Sequence; identical to SEQ ID NO: 24914
  Cyclic GFR-binding peptide
  MOD_RES (33)..(35): Xaa is C or S

SEQ ID NO: 102846 - protein, 37 aa, Artificial Sequence; identical to SEQ ID NO: 24915
  Cyclic GFR-binding peptide
  MOD_RES (3)..(3): Xaa is C or S

SEQ ID NO: 102847 - protein, 30 aa, Artificial Sequence; identical to SEQ ID NO: 24920
  Cyclic GFR-binding peptide
  MOD_RES (2)..(2): Xaa is C or S

SEQ ID NO: 102848 - protein, 27 aa, Artificial Sequence
  Cyclic GFR-binding peptide
LSNITVQIMEIVRKKPIFIGEMSTLED

SEQ ID NO: 102849 - protein, 31 aa, Artificial Sequence; identical to SEQ ID NO: 24924
  Cyclic GFR-binding peptide
  MOD_RES (1)..(1): Xaa is C or S

SEQ ID NO: 102850 - protein, 32 aa, Artificial Sequence
  Cyclic GFR-binding peptide
  MOD_RES (1)..(32): Xaa is C or S
XAPVKTSNITMQIMDNGRVLLIGEMSMIVEEX

SEQ ID NO: 102851 - protein, 31 aa, Artificial Sequence
  Cyclic GFR-binding peptide
  MOD_RES (31)..(31): Xaa is C or S
VPQDLSNITIQIMVGRTPKVLGEMSMVVKSX

SEQ ID NO: 102852 - protein, 38 aa, Artificial Sequence; identical to SEQ ID NO: 24932
  Cyclic GFR-binding peptide
  MOD_RES (3)..(3): Xaa is C or S

SEQ ID NO: 102853 - protein, 33 aa, Artificial Sequence; identical to SEQ ID NO: 70139
  Cyclic GFR-binding peptide
  MOD_RES (30)..(32): Xaa is C or S

SEQ ID NO: 102854 - protein, 42 aa, Artificial Sequence; identical to SEQ ID NO: 24935
  Cyclic GFR-binding peptide
  MOD_RES (4)..(41): Xaa is C or S

SEQ ID NO: 102855 - protein, 40 aa, Artificial Sequence
  Cyclic GFR-binding peptide
  MOD_RES (5)..(6)..(38)..(40): Xaa is C or S
VPKPXXAPTKLSNITVQIMDDSSNVILGEMSNMVVRSXGX

SEQ ID NO: 102856 - protein, 38 aa, Artificial Sequence; identical to SEQ ID NO: 24938
  Cyclic GFR-binding peptide
  MOD_RES (5)..(5): Xaa is C or S

SEQ ID NO: 102857 - protein, 31 aa, Artificial Sequence
  Cyclic GFR-binding peptide
  MOD_RES (4)..(5): Xaa is C or S
PPTXXVPTRLSNITIQIMDSANNVVLGEMSD

SEQ ID NO: 102858 - protein, 34 aa, Artificial Sequence; identical to SEQ ID NO: 24946
  Cyclic GFR-binding peptide
  MOD_RES (33)..(33): Xaa is C or S

SEQ ID NO: 102859 - protein, 34 aa, Artificial Sequence; identical to SEQ ID NO: 24947
  Cyclic GFR-binding peptide

SEQ ID NO: 102860 - protein, 26 aa, Artificial Sequence
  Cyclic GFR-binding peptide
HHSNITVQIMEYVRKKPKLLGEMSRL

SEQ ID NO: 102861 - protein, 33 aa, Artificial Sequence; identical to SEQ ID NO: 70146
  Cyclic GFR-binding peptide
  MOD_RES (3)..(4): Xaa is C or S

SEQ ID NO: 102862 - protein, 30 aa, Artificial Sequence
  Cyclic GFR-binding peptide
  MOD_RES (4)..(5): Xaa is C or S
PSTXXAPVKTSNITMQIMDNGRVLLLGEMS

SEQ ID NO: 102863 - protein, 26 aa, Artificial Sequence
  Cyclic GFR-binding peptide
VHHSNITVQIMEYVRKKPKLIGEMSR

SEQ ID NO: 102864 - protein, 34 aa, Artificial Sequence
  Cyclic GFR-binding peptide
  MOD_RES (4)..(5): Xaa is C or S
ASPXXVPQDLSNITIQIMVGRTPKVLGEMSMVVK

SEQ ID NO: 102865 - protein, 36 aa, Artificial Sequence; identical to SEQ ID NO: 24952
  Cyclic GFR-binding peptide
  MOD_RES (2)..(2): Xaa is C or S

SEQ ID NO: 102866 - protein, 31 aa, Artificial Sequence
  Cyclic GFR-binding peptide
  MOD_RES (1)..(2): Xaa is C or S
XXVPTRLSNITIQIMDSANNVVLGEMSDMVV

SEQ ID NO: 102867 - protein, 33 aa, Artificial Sequence
  Cyclic GFR-binding peptide
  MOD_RES (1)..(33): Xaa is C or S
XTPTKMSNITMQIMNDKQQIILGEMSGMVVDRX

SEQ ID NO: 102868 - protein, 38 aa, Artificial Sequence
  Cyclic GFR-binding peptide
  MOD_RES (3)..(4)..(36)..(38): Xaa is C or S
PTXXVPTRLSNITIQIMDSANNVVIGEMSDMVVESXGX

SEQ ID NO: 102869 - protein, 29 aa, Artificial Sequence
  Cyclic GFR-binding peptide
  MOD_RES (26)..(28): Xaa is C or S
SNITMQIMDNGRVLLIGEMSMIVEEXGXL

SEQ ID NO: 102870 - protein, 21 aa, Artificial Sequence
  Cyclic GFR-binding peptide
TSNITMQIMDNGRVLLLGEMS

SEQ ID NO: 102871 - protein, 24 aa, Artificial Sequence
  Cyclic GFR-binding peptide
TRLSNITIQIMDSANNVVIGEMSD

SEQ ID NO: 102872 - protein, 28 aa, Artificial Sequence
  Cyclic GFR-binding peptide
SNITVQIMEIVRKKPIFIGEMSTLEDHL

SEQ ID NO: 102873 - protein, 34 aa, Artificial Sequence
  Cyclic GFR-binding peptide
  MOD_RES (1)..(2)..(34): Xaa is C or S
XXVPARLSNITIQIMDAANNVVIGEMSDMVVEAX

SEQ ID NO: 102874 - protein, 27 aa, Artificial Sequence
  Cyclic GFR-binding peptide
QDLSNITIQIMVGRTPKVLGEMSMVVK

SEQ ID NO: 102875 - protein, 36 aa, Artificial Sequence
  Cyclic GFR-binding peptide
  MOD_RES (1)..(33)..(35): Xaa is C or S
XVPARLSNITIQIMDAANNVVLGEMSDMVVEAXGXR

SEQ ID NO: 102876 - protein, 41 aa, Artificial Sequence; identical to SEQ ID NO: 24964
  Cyclic GFR-binding peptide
  MOD_RES (6)..(40): Xaa is C or S

SEQ ID NO: 102877 - protein, 28 aa, Artificial Sequence
  Cyclic GFR-binding peptide
PTEESNITMQIMRIKPHQGQHLGEMSFL

SEQ ID NO: 102878 - protein, 35 aa, Artificial Sequence; identical to SEQ ID NO: 24969
  Cyclic GFR-binding peptide
  MOD_RES (3)..(3): Xaa is C or S

SEQ ID NO: 102879 - protein, 29 aa, Artificial Sequence
  Cyclic GFR-binding peptide
  MOD_RES (1)..(2): Xaa is C or S
XXVSQDLSNITIQIMIGKTPKIIGEMSMI

SEQ ID NO: 102880 - protein, 32 aa, Artificial Sequence; identical to SEQ ID NO: 24972
  Cyclic GFR-binding peptide
  MOD_RES (1)..(1): Xaa is C or S

SEQ ID NO: 102881 - protein, 29 aa, Artificial Sequence
  Cyclic GFR-binding peptide
  MOD_RES (26)..(28): Xaa is C or S
SNITMQIMDNGRVLLLGEMSMIVEEXGXL

SEQ ID NO: 102882 - protein, 36 aa, Artificial Sequence
  Cyclic GFR-binding peptide
  MOD_RES (4)..(5)..(36): Xaa is C or S
PSTXXAPVKTSNITMQIMDNGRVLLIGEMSMIVEEX

SEQ ID NO: 102883 - protein, 36 aa, Artificial Sequence; identical to SEQ ID NO: 73400
  Cyclic GFR-binding peptide
  MOD_RES (1)..(2)..(33)..(35): Xaa is C or S

SEQ ID NO: 102884 - protein, 23 aa, Artificial Sequence
  Cyclic GFR-binding peptide
SNITMQIMNDKQQIIIGEMSGMV

SEQ ID NO: 102885 - protein, 31 aa, Artificial Sequence; identical to SEQ ID NO: 24982
  Cyclic GFR-binding peptide
  MOD_RES (31)..(31): Xaa is C or S

SEQ ID NO: 102886 - protein, 37 aa, Artificial Sequence; identical to SEQ ID NO: 24984
  Cyclic GFR-binding peptide
  MOD_RES (4)..(4): Xaa is C or S

SEQ ID NO: 102887 - protein, 33 aa, Artificial Sequence
  Cyclic GFR-binding peptide
  MOD_RES (4)..(5): Xaa is C or S
ASPXXVSQDLSNITIQIMIGKTPKILGEMSMIV

SEQ ID NO: 102888 - protein, 30 aa, Artificial Sequence
  Cyclic GFR-binding peptide
  MOD_RES (28)..(30): Xaa is C or S
ALSNITIQIMVGRKPKVLGEMSMIVRSXKX

SEQ ID NO: 102889 - protein, 28 aa, Artificial Sequence
  Cyclic GFR-binding peptide
  MOD_RES (28)..(28): Xaa is C or S
DLSNITIQIMVGRTPKVIGEMSMVVKSX

SEQ ID NO: 102890 - protein, 24 aa, Artificial Sequence
  Cyclic GFR-binding peptide
SNITMQIMDNGRVLLIGEMSMIVE

SEQ ID NO: 102891 - protein, 31 aa, Artificial Sequence
  Cyclic GFR-binding peptide
  MOD_RES (28)..(30): Xaa is C or S
LSNITIQIMDAANNVVLGEMSDMVVEAXGXR

SEQ ID NO: 102892 - protein, 30 aa, Artificial Sequence
  Cyclic GFR-binding peptide
APVKTSNITMQIMDNGRVLLIGEMSMIVEE

SEQ ID NO: 102893 - protein, 33 aa, Artificial Sequence
  Cyclic GFR-binding peptide
  MOD_RES (1)..(2): Xaa is C or S
XXVPARLSNITIQIMDAANNVVLGEMSDMVVEA

SEQ ID NO: 102894 - protein, 27 aa, Artificial Sequence
  Cyclic GFR-binding peptide
VSQDLSNITIQIMIGKTPKIIGEMSMI

SEQ ID NO: 102895 - protein, 39 aa, Artificial Sequence; identical to SEQ ID NO: 24992
  Cyclic GFR-binding peptide
  MOD_RES (1)..(38): Xaa is C or S

SEQ ID NO: 102896 - protein, 28 aa, Artificial Sequence
  Cyclic GFR-binding peptide
  MOD_RES (27)..(27): Xaa is C or S
LSNITIQIMVGRTPKVIGEMSMVVKSXK

SEQ ID NO: 102897 - protein, 33 aa, Artificial Sequence
  Cyclic GFR-binding peptide
  MOD_RES (31)..(33): Xaa is C or S
PTKMSNITMQIMNDKQQIILGEMSGMVVDRXGX

SEQ ID NO: 102898 - protein, 29 aa, Artificial Sequence
  Cyclic GFR-binding peptide
RPTQVQLSNITVQIMEIVRKKPIFIGEMS

SEQ ID NO: 102899 - protein, 28 aa, Artificial Sequence
  Cyclic GFR-binding peptide
  MOD_RES (2)..(3): Xaa is C or S
SXXVPARLSNITIQIMDAANNVVIGEMS

SEQ ID NO: 102900 - protein, 39 aa, Artificial Sequence; identical to SEQ ID NO: 24997
  Cyclic GFR-binding peptide
  MOD_RES (3)..(37)..(39): Xaa is C or S

SEQ ID NO: 102901 - protein, 38 aa, Artificial Sequence
  Cyclic GFR-binding peptide
  MOD_RES (5)..(6)..(38): Xaa is C or S
SAGPXXTPTKMSNITMQIMNDKQQIIIGEMSGMVVDRX

SEQ ID NO: 102902 - protein, 36 aa, Artificial Sequence
  Cyclic GFR-binding peptide
  MOD_RES (1)..(2)..(33)..(35): Xaa is C or S
XXVPQALSNITIQIMVGRKPKVLGEMSMIVRSXKXS

SEQ ID NO: 102903 - protein, 38 aa, Artificial Sequence; identical to SEQ ID NO: 70215
  Cyclic GFR-binding peptide
  MOD_RES (3)..(4)..(36)..(38): Xaa is C or S

SEQ ID NO: 102904 - protein, 28 aa, Artificial Sequence
  Cyclic GFR-binding peptide
HHSNITVQIMEYVRKKPKLLGEMSRLEE

SEQ ID NO: 102905 - protein, 38 aa, Artificial Sequence; identical to SEQ ID NO: 24999
  Cyclic GFR-binding peptide
  MOD_RES (37)..(37): Xaa is C or S

SEQ ID NO: 102906 - protein, 26 aa, Artificial Sequence
  Cyclic GFR-binding peptide
PVKTSNITMQIMDNGRVLLLGEMSMI

SEQ ID NO: 102907 - protein, 29 aa, Artificial Sequence
  Cyclic GFR-binding peptide
  MOD_RES (1)..(2): Xaa is C or S
XXAPVKTSNITMQIMDNGRVLLIGEMSMI

SEQ ID NO: 102908 - protein, 35 aa, Artificial Sequence
  Cyclic GFR-binding peptide
  MOD_RES (6)..(7): Xaa is C or S
AAPASXXVPARLSNITIQIMDAANNVVIGEMSDMV

SEQ ID NO: 102909 - protein, 26 aa, Artificial Sequence
  Cyclic GFR-binding peptide
PARLSNITIQIMDAANNVVIGEMSDM

SEQ ID NO: 102910 - protein, 30 aa, Artificial Sequence
  Cyclic GFR-binding peptide
  MOD_RES (4)..(5): Xaa is C or S
PPTXXVPTRLSNITIQIMDSANNVVLGEMS

SEQ ID NO: 102911 - protein, 31 aa, Artificial Sequence; identical to SEQ ID NO: 25001
  Cyclic GFR-binding peptide
  MOD_RES (2)..(2): Xaa is C or S

SEQ ID NO: 102912 - protein, 24 aa, Artificial Sequence
  Cyclic GFR-binding peptide
QDLSNITIQIMVGRTPKVLGEMSM

SEQ ID NO: 102913 - protein, 24 aa, Artificial Sequence
  Cyclic GFR-binding peptide
RLSNITIQIMDSANNVVLGEMSDM

SEQ ID NO: 102914 - protein, 32 aa, Artificial Sequence; identical to SEQ ID NO: 25005
  Cyclic GFR-binding peptide
  MOD_RES (29)..(31): Xaa is C or S

SEQ ID NO: 102915 - protein, 35 aa, Artificial Sequence
  Cyclic GFR-binding peptide
  MOD_RES (6)..(7): Xaa is C or S
ASAAPXXVPQALSNITIQIMVGRKPKVLGEMSMIV

SEQ ID NO: 102916 - protein, 30 aa, Artificial Sequence; identical to SEQ ID NO: 70229
  Cyclic GFR-binding peptide

SEQ ID NO: 102917 - protein, 32 aa, Artificial Sequence
  Cyclic GFR-binding peptide
  MOD_RES (1)..(32): Xaa is C or S
XVSQDLSNITIQIMIGKTPKILGEMSMIVKSX

SEQ ID NO: 102918 - protein, 25 aa, Artificial Sequence
  Cyclic GFR-binding peptide
PQDLSNITIQIMVGRTPKVLGEMSM

SEQ ID NO: 102919 - protein, 36 aa, Artificial Sequence; identical to SEQ ID NO: 73432
  Cyclic GFR-binding peptide
  MOD_RES (3)..(4)..(35): Xaa is C or S

SEQ ID NO: 102920 - protein, 40 aa, Artificial Sequence; identical to SEQ ID NO: 25019
  Cyclic GFR-binding peptide
  MOD_RES (3)..(37)..(39): Xaa is C or S

SEQ ID NO: 102921 - protein, 23 aa, Artificial Sequence
  Cyclic GFR-binding peptide
TKLSNITVQIMDDSSNVIIGEMS

SEQ ID NO: 102922 - protein, 35 aa, Artificial Sequence; identical to SEQ ID NO: 73440
  Cyclic GFR-binding peptide
  MOD_RES (32)..(34): Xaa is C or S

SEQ ID NO: 102923 - protein, 29 aa, Artificial Sequence
  Cyclic GFR-binding peptide
RVHHSNITVQIMEYVRKKPKLIGEMSRLE

SEQ ID NO: 102924 - protein, 34 aa, Artificial Sequence; identical to SEQ ID NO: 25026
  Cyclic GFR-binding peptide
  MOD_RES (4)..(4): Xaa is C or S

SEQ ID NO: 102925 - protein, 27 aa, Artificial Sequence
  Cyclic GFR-binding peptide
TKMSNITMQIMNDKQQIILGEMSGMVV

SEQ ID NO: 102926 - protein, 31 aa, Artificial Sequence
  Cyclic GFR-binding peptide
  MOD_RES (3)..(4): Xaa is C or S
APXXVPQALSNITIQIMVGRKPKVLGEMSMI

SEQ ID NO: 102927 - protein, 44 aa, Artificial Sequence; identical to SEQ ID NO: 25032
  Cyclic GFR-binding peptide
  MOD_RES (5)..(42)..(44): Xaa is C or S

SEQ ID NO: 102928 - protein, 31 aa, Artificial Sequence
  Cyclic GFR-binding peptide
  MOD_RES (4)..(5): Xaa is C or S
PSTXXAPVKTSNITMQIMDNGRVLLIGEMSM

SEQ ID NO: 102929 - protein, 34 aa, Artificial Sequence
  Cyclic GFR-binding peptide
  MOD_RES (1)..(2)..(34): Xaa is C or S
XXTPTKMSNITMQIMNDKQQIILGEMSGMVVDRX

SEQ ID NO: 102930 - protein, 34 aa, Artificial Sequence
  Cyclic GFR-binding peptide
  MOD_RES (1)..(2)..(34): Xaa is C or S
XXTPTKMSNITMQIMNDKQQIIIGEMSGMVVDRX

SEQ ID NO: 102931 - protein, 32 aa, Artificial Sequence
  Cyclic GFR-binding peptide
  MOD_RES (2)..(3): Xaa is C or S
SXXVPARLSNITIQIMDAANNVVLGEMSDMVV

SEQ ID NO: 102932 - protein, 33 aa, Artificial Sequence
  Cyclic GFR-binding peptide
  MOD_RES (1)..(33): Xaa is C or S
XVPARLSNITIQIMDAANNVVIGEMSDMVVEAX

SEQ ID NO: 102933 - protein, 22 aa, Artificial Sequence
  Cyclic GFR-binding peptide
SNITIQIMVGRKPKVLGEMSMI

SEQ ID NO: 102934 - protein, 37 aa, Artificial Sequence; identical to SEQ ID NO: 25040
  Cyclic GFR-binding peptide
  MOD_RES (3)..(3): Xaa is C or S

SEQ ID NO: 102935 - protein, 33 aa, Artificial Sequence
  Cyclic GFR-binding peptide
  MOD_RES (1)..(33): Xaa is C or S
XVPARLSNITIQIMDAANNVVLGEMSDMVVEAX

SEQ ID NO: 102936 - protein, 32 aa, Artificial Sequence
  Cyclic GFR-binding peptide
  MOD_RES (32)..(32): Xaa is C or S
VPTRLSNITIQIMDSANNVVLGEMSDMVVESX

SEQ ID NO: 102937 - protein, 41 aa, Artificial Sequence; identical to SEQ ID NO: 25043
  Cyclic GFR-binding peptide
  MOD_RES (2)..(39)..(41): Xaa is C or S

SEQ ID NO: 102938 - protein, 39 aa, Artificial Sequence
  Cyclic GFR-binding peptide
  MOD_RES (4)..(5)..(37)..(39): Xaa is C or S
PPTXXVPTRLSNITIQIMDSANNVVIGEMSDMVVESXGX

SEQ ID NO: 102939 - protein, 39 aa, Artificial Sequence
  Cyclic GFR-binding peptide
  MOD_RES (3)..(4)..(36)..(38): Xaa is C or S
PTXXVPTRLSNITIQIMDSANNVVLGEMSDMVVESXGXR

SEQ ID NO: 102940 - protein, 30 aa, Artificial Sequence
  Cyclic GFR-binding peptide
  MOD_RES (3)..(4): Xaa is C or S
GPXXTPTKMSNITMQIMNDKQQIILGEMSG

SEQ ID NO: 102941 - protein, 41 aa, Artificial Sequence; identical to SEQ ID NO: 25045
  Cyclic GFR-binding peptide
  MOD_RES (3)..(40): Xaa is C or S

SEQ ID NO: 102942 - protein, 21 aa, Artificial Sequence
  Cyclic GFR-binding peptide
SNITIQIMVGRTPKVIGEMSM

SEQ ID NO: 102943 - protein, 32 aa, Artificial Sequence; identical to SEQ ID NO: 25048
  Cyclic GFR-binding peptide
  MOD_RES (30)..(32): Xaa is C or S

SEQ ID NO: 102944 - protein, 25 aa, Artificial Sequence
  Cyclic GFR-binding peptide
TKMSNITMQIMNDKQQIILGEMSGM

SEQ ID NO: 102945 - protein, 20 aa, Artificial Sequence
  Cyclic GFR-binding peptide
SNITIQIMVGRKPKVIGEMS

SEQ ID NO: 102946 - protein, 33 aa, Artificial Sequence
  Cyclic GFR-binding peptide
  MOD_RES (5)..(6): Xaa is C or S
VPSTXXAPVKTSNITMQIMDNGRVLLIGEMSMI

SEQ ID NO: 102947 - protein, 29 aa, Artificial Sequence
  Cyclic GFR-binding peptide
HSNITVQIMEYVRKKPKLIGEMSRLEEHL

SEQ ID NO: 102948 - protein, 31 aa, Artificial Sequence
  Cyclic GFR-binding peptide
  MOD_RES (4)..(5): Xaa is C or S
AGPXXTPTKMSNITMQIMNDKQQIIIGEMSG

SEQ ID NO: 102949 - protein, 28 aa, Artificial Sequence
  Cyclic GFR-binding peptide
  MOD_RES (2)..(3): Xaa is C or S
TXXAPVKTSNITMQIMDNGRVLLIGEMS

SEQ ID NO: 102950 - protein, 37 aa, Artificial Sequence
  Cyclic GFR-binding peptide
  MOD_RES (5)..(6): Xaa is C or S
TPPTXXVPTRLSNITIQIMDSANNVVLGEMSDMVVES

SEQ ID NO: 102951 - protein, 25 aa, Artificial Sequence
  Cyclic GFR-binding peptide
QDLSNITIQIMVGRTPKVLGEMSMV

SEQ ID NO: 102952 - protein, 41 aa, Artificial Sequence; identical to SEQ ID NO: 70267
  Cyclic GFR-binding peptide
  MOD_RES (5)..(6)..(38)..(40): Xaa is C or S

SEQ ID NO: 102953 - protein, 38 aa, Artificial Sequence
  Cyclic GFR-binding peptide
  MOD_RES (6)..(7): Xaa is C or S
STPPTXXVPTRLSNITIQIMDSANNVVIGEMSDMVVES

SEQ ID NO: 102954 - protein, 28 aa, Artificial Sequence
  Cyclic GFR-binding peptide
RVHHSNITVQIMEYVRKKPKLLGEMSRL

SEQ ID NO: 102955 - protein, 36 aa, Artificial Sequence
  Cyclic GFR-binding peptide
  MOD_RES (6)..(7): Xaa is C or S
HVPKPXXAPTKLSNITVQIMDDSSNVIIGEMSNMVV

SEQ ID NO: 102956 - protein, 30 aa, Artificial Sequence
  Cyclic GFR-binding peptide
  MOD_RES (29)..(29): Xaa is C or S
QDLSNITIQIMIGKTPKILGEMSMIVKSXK

SEQ ID NO: 102957 - protein, 38 aa, Artificial Sequence
  Cyclic GFR-binding peptide
  MOD_RES (2)..(3)..(35)..(37): Xaa is C or S
TXXVPTRLSNITIQIMDSANNVVLGEMSDMVVESXGXR

SEQ ID NO: 102958 - protein, 34 aa, Artificial Sequence
  Cyclic GFR-binding peptide
  MOD_RES (1)..(2)..(34): Xaa is C or S
XXVPARLSNITIQIMDAANNVVLGEMSDMVVEAX

SEQ ID NO: 102959 - protein, 29 aa, Artificial Sequence
  Cyclic GFR-binding peptide
VPARLSNITIQIMDAANNVVIGEMSDMVV

SEQ ID NO: 102960 - protein, 33 aa, Artificial Sequence
  Cyclic GFR-binding peptide
  MOD_RES (1)..(33): Xaa is C or S
XTPTKMSNITMQIMNDKQQIIIGEMSGMVVDRX

SEQ ID NO: 102961 - protein, 30 aa, Artificial Sequence
  Cyclic GFR-binding peptide
  MOD_RES (1)..(2): Xaa is C or S
XXAPVKTSNITMQIMDNGRVLLLGEMSMIV

SEQ ID NO: 102962 - protein, 33 aa, Artificial Sequence
  Cyclic GFR-binding peptide
  MOD_RES (31)..(33): Xaa is C or S
PTRLSNITIQIMDSANNVVLGEMSDMVVESXGX

SEQ ID NO: 102963 - protein, 29 aa, Artificial Sequence
  Cyclic GFR-binding peptide
HHSNITVQIMEYVRKKPKLLGEMSRLEEH

SEQ ID NO: 102964 - protein, 37 aa, Artificial Sequence
  Cyclic GFR-binding peptide
  MOD_RES (3)..(4)..(35)..(37): Xaa is C or S
SPXXVSQDLSNITIQIMIGKTPKILGEMSMIVKSXKX

SEQ ID NO: 102965 - protein, 37 aa, Artificial Sequence; identical to SEQ ID NO: 25071
  Cyclic GFR-binding peptide
  MOD_RES (36)..(36): Xaa is C or S

SEQ ID NO: 102966 - protein, 42 aa, Artificial Sequence; identical to SEQ ID NO: 25073
  Cyclic GFR-binding peptide
  MOD_RES (7)..(41): Xaa is C or S

SEQ ID NO: 102967 - protein, 24 aa, Artificial Sequence
  Cyclic GFR-binding peptide
DLSNITIQIMIGKTPKIIGEMSMI

SEQ ID NO: 102968 - protein, 28 aa, Artificial Sequence
  Cyclic GFR-binding peptide
  MOD_RES (1)..(1): Xaa is C or S
XVPQDLSNITIQIMVGRTPKVIGEMSMV

SEQ ID NO: 102969 - protein, 35 aa, Artificial Sequence
  Cyclic GFR-binding peptide
  MOD_RES (32)..(34): Xaa is C or S
VPTRLSNITIQIMDSANNVVIGEMSDMVVESXGXR

SEQ ID NO: 102970 - protein, 25 aa, Artificial Sequence
  Cyclic GFR-binding peptide
LSNITIQIMVGRTPKVLGEMSMVVK

SEQ ID NO: 102971 - protein, 31 aa, Artificial Sequence; identical to SEQ ID NO: 25076
  Cyclic GFR-binding peptide

SEQ ID NO: 102972 - protein, 34 aa, Artificial Sequence
  Cyclic GFR-binding peptide
  MOD_RES (6)..(7): Xaa is C or S
ASASPXXVSQDLSNITIQIMIGKTPKILGEMSMI

SEQ ID NO: 102973 - protein, 27 aa, Artificial Sequence
  Cyclic GFR-binding peptide
SQDLSNITIQIMIGKTPKILGEMSMIV

SEQ ID NO: 102974 - protein, 36 aa, Artificial Sequence; identical to SEQ ID NO: 25079
  Cyclic GFR-binding peptide
  MOD_RES (34)..(36): Xaa is C or S

SEQ ID NO: 102975 - protein, 35 aa, Artificial Sequence; identical to SEQ ID NO: 70289
  Cyclic GFR-binding peptide
  MOD_RES (4)..(5): Xaa is C or S

SEQ ID NO: 102976 - protein, 43 aa, Artificial Sequence; identical to SEQ ID NO: 25082
  Cyclic GFR-binding peptide
  MOD_RES (5)..(42): Xaa is C or S

SEQ ID NO: 102977 - protein, 29 aa, Artificial Sequence
  Cyclic GFR-binding peptide
  MOD_RES (29)..(29): Xaa is C or S
VKTSNITMQIMDNGRVLLLGEMSMIVEEX

SEQ ID NO: 102978 - protein, 24 aa, Artificial Sequence
  Cyclic GFR-binding peptide
SNITIQIMDSANNVVLGEMSDMVV

SEQ ID NO: 102979 - protein, 27 aa, Artificial Sequence
  Cyclic GFR-binding peptide
TRLSNITIQIMDSANNVVLGEMSDMVV

SEQ ID NO: 102980 - protein, 25 aa, Artificial Sequence
  Cyclic GFR-binding peptide
LSNITVQIMDDSSNVILGEMSNMVV

SEQ ID NO: 102981 - protein, 36 aa, Artificial Sequence; identical to SEQ ID NO: 25083
  Cyclic GFR-binding peptide
  MOD_RES (3)..(3): Xaa is C or S

SEQ ID NO: 102982 - protein, 21 aa, Artificial Sequence
  Cyclic GFR-binding peptide
LSNITIQIMVGRKPKVIGEMS

SEQ ID NO: 102983 - protein, 30 aa, Artificial Sequence; identical to SEQ ID NO: 73497
  Cyclic GFR-binding peptide
  MOD_RES (2)..(3): Xaa is C or S

SEQ ID NO: 102984 - protein, 36 aa, Artificial Sequence; identical to SEQ ID NO: 25089
  Cyclic GFR-binding peptide

SEQ ID NO: 102985 - protein, 27 aa, Artificial Sequence
  Cyclic GFR-binding peptide
PARLSNITIQIMDAANNVVIGEMSDMV

SEQ ID NO: 102986 - protein, 28 aa, Artificial Sequence
  Cyclic GFR-binding peptide
  MOD_RES (26)..(28): Xaa is C or S
SNITIQIMVGRKPKVIGEMSMIVRSXKX

SEQ ID NO: 102987 - protein, 27 aa, Artificial Sequence
  Cyclic GFR-binding peptide
SNITVQIMEYVRKKPKLIGEMSRLEEH

SEQ ID NO: 102988 - protein, 42 aa, Artificial Sequence; identical to SEQ ID NO: 25096
  Cyclic GFR-binding peptide
  MOD_RES (2)..(39)..(41): Xaa is C or S

SEQ ID NO: 102989 - protein, 29 aa, Artificial Sequence
  Cyclic GFR-binding peptide
PVKTSNITMQIMDNGRVLLIGEMSMIVEE

SEQ ID NO: 102990 - protein, 26 aa, Artificial Sequence
  Cyclic GFR-binding peptide
APVKTSNITMQIMDNGRVLLIGEMSM

SEQ ID NO: 102991 - protein, 28 aa, Artificial Sequence
  Cyclic GFR-binding peptide
VSQDLSNITIQIMIGKTPKILGEMSMIV

SEQ ID NO: 102992 - protein, 33 aa, Artificial Sequence
  Cyclic GFR-binding peptide
  MOD_RES (30)..(32): Xaa is C or S
TKMSNITMQIMNDKQQIIIGEMSGMVVDRXGXS

SEQ ID NO: 102993 - protein, 30 aa, Artificial Sequence; identical to SEQ ID NO: 25102
  Cyclic GFR-binding peptide
  MOD_RES (1)..(1): Xaa is C or S

SEQ ID NO: 102994 - protein, 25 aa, Artificial Sequence
  Cyclic GFR-binding peptide
PTRLSNITIQIMDSANNVVIGEMSD

SEQ ID NO: 102995 - protein, 30 aa, Artificial Sequence
  Cyclic GFR-binding peptide
  MOD_RES (28)..(30): Xaa is C or S
LSNITIQIMDSANNVVLGEMSDMVVESXGX

SEQ ID NO: 102996 - protein, 39 aa, Artificial Sequence
  Cyclic GFR-binding peptide
  MOD_RES (4)..(5)..(37)..(39): Xaa is C or S
PKPXXAPTKLSNITVQIMDDSSNVILGEMSNMVVRSXGX

SEQ ID NO: 102997 - protein, 34 aa, Artificial Sequence
  Cyclic GFR-binding peptide
  MOD_RES (6)..(7): Xaa is C or S
ASASPXXVPQDLSNITIQIMVGRTPKVLGEMSMV

SEQ ID NO: 102998 - protein, 37 aa, Artificial Sequence
  Cyclic GFR-binding peptide
  MOD_RES (6)..(7): Xaa is C or S
STPPTXXVPTRLSNITIQIMDSANNVVIGEMSDMVVE

SEQ ID NO: 102999 - protein, 28 aa, Artificial Sequence
  Cyclic GFR-binding peptide
  MOD_RES (1)..(1): Xaa is C or S
XVSQDLSNITIQIMIGKTPKIIGEMSMI

SEQ ID NO: 103000 - protein, 28 aa, Artificial Sequence
  Cyclic GFR-binding peptide
VPARLSNITIQIMDAANNVVIGEMSDMV

SEQ ID NO: 103001 - protein, 37 aa, Artificial Sequence; identical to SEQ ID NO: 70319
  Cyclic GFR-binding peptide
  MOD_RES (6)..(7): Xaa is C or S

SEQ ID NO: 103002 - protein, 31 aa, Artificial Sequence
  Cyclic GFR-binding peptide
  MOD_RES (30)..(30): Xaa is C or S
PQDLSNITIQIMVGRTPKVLGEMSMVVKSXK

SEQ ID NO: 103003 - protein, 37 aa, Artificial Sequence; identical to SEQ ID NO: 23322
  Cyclic GFR-binding peptide
  MOD_RES (5)..(5): Xaa is C or S

SEQ ID NO: 103004 - protein, 28 aa, Artificial Sequence
  Cyclic GFR-binding peptide
  MOD_RES (1)..(1): Xaa is C or S
XVPQALSNITIQIMVGRKPKVIGEMSMI

SEQ ID NO: 103005 - protein, 29 aa, Artificial Sequence
  Cyclic GFR-binding peptide
RVHHSNITVQIMEYVRKKPKLLGEMSRLE

SEQ ID NO: 103006 - protein, 37 aa, Artificial Sequence
  Cyclic GFR-binding peptide
  MOD_RES (6)..(7): Xaa is C or S
RVPSTXXAPVKTSNITMQIMDNGRVLLLGEMSMIVEE

SEQ ID NO: 103007 - protein, 29 aa, Artificial Sequence
  Cyclic GFR-binding peptide
SQDLSNITIQIMIGKTPKIIGEMSMIVKS

SEQ ID NO: 103008 - protein, 30 aa, Artificial Sequence
  Cyclic GFR-binding peptide
  MOD_RES (2)..(3): Xaa is C or S
TXXVPTRLSNITIQIMDSANNVVIGEMSDM

SEQ ID NO: 103009 - protein, 43 aa, Artificial Sequence; identical to SEQ ID NO: 23329
  Cyclic GFR-binding peptide
  MOD_RES (7)..(41)..(43): Xaa is C or S

SEQ ID NO: 103010 - protein, 35 aa, Artificial Sequence; identical to SEQ ID NO: 23330
  Cyclic GFR-binding peptide
  MOD_RES (1)..(35): Xaa is C or S

SEQ ID NO: 103011 - protein, 27 aa, Artificial Sequence
  Cyclic GFR-binding peptide
  MOD_RES (1)..(1): Xaa is C or S
XTPTKMSNITMQIMNDKQQIILGEMSG

SEQ ID NO: 103012 - protein, 31 aa, Artificial Sequence; identical to SEQ ID NO: 23332
  Cyclic GFR-binding peptide

SEQ ID NO: 103013 - protein, 29 aa, Artificial Sequence
  Cyclic GFR-binding peptide
  MOD_RES (27)..(29): Xaa is C or S
SNITMQIMNDKQQIILGEMSGMVVDRXGX

SEQ ID NO: 103014 - protein, 34 aa, Artificial Sequence; identical to SEQ ID NO: 23336
  Cyclic GFR-binding peptide
  MOD_RES (1)..(1): Xaa is C or S

SEQ ID NO: 103015 - protein, 29 aa, Artificial Sequence
  Cyclic GFR-binding peptide
  MOD_RES (1)..(1): Xaa is C or S
XVPTRLSNITIQIMDSANNVVIGEMSDMV

SEQ ID NO: 103016 - protein, 29 aa, Artificial Sequence
  Cyclic GFR-binding peptide
TRLSNITIQIMDSANNVVIGEMSDMVVES

SEQ ID NO: 103017 - protein, 32 aa, Artificial Sequence; identical to SEQ ID NO: 73537
  Cyclic GFR-binding peptide
  MOD_RES (1)..(32): Xaa is C or S

SEQ ID NO: 103018 - protein, 34 aa, Artificial Sequence; identical to SEQ ID NO: 70337
  Cyclic GFR-binding peptide
  MOD_RES (2)..(3): Xaa is C or S

SEQ ID NO: 103019 - protein, 24 aa, Artificial Sequence
  Cyclic GFR-binding peptide
SNITVQIMEYVRKKPKLLGEMSRL

SEQ ID NO: 103020 - protein, 31 aa, Artificial Sequence
  Cyclic GFR-binding peptide
  MOD_RES (1)..(1): Xaa is C or S
XAPVKTSNITMQIMDNGRVLLLGEMSMIVEE

SEQ ID NO: 103021 - protein, 35 aa, Artificial Sequence; identical to SEQ ID NO: 23346
  Cyclic GFR-binding peptide
  MOD_RES (34)..(34): Xaa is C or S

SEQ ID NO: 103022 - protein, 23 aa, Artificial Sequence
  Cyclic GFR-binding peptide
LSNITIQIMDAANNVVLGEMSDM

SEQ ID NO: 103023 - protein, 28 aa, Artificial Sequence
  Cyclic GFR-binding peptide
  MOD_RES (2)..(3): Xaa is C or S
PXXAPTKLSNITVQIMDDSSNVILGEMS

SEQ ID NO: 103024 - protein, 29 aa, Artificial Sequence
  Cyclic GFR-binding peptide
  MOD_RES (28)..(28): Xaa is C or S
KTSNITMQIMDNGRVLLLGEMSMIVEEXG

SEQ ID NO: 103025 - protein, 30 aa, Artificial Sequence
  Cyclic GFR-binding peptide
VPTRLSNITIQIMDSANNVVIGEMSDMVVE

SEQ ID NO: 103026 - protein, 28 aa, Artificial Sequence
  Cyclic GFR-binding peptide
ARLSNITIQIMDAANNVVLGEMSDMVVE

SEQ ID NO: 103027 - protein, 36 aa, Artificial Sequence; identical to SEQ ID NO: 23353
  Cyclic GFR-binding peptide
  MOD_RES (1)..(1): Xaa is C or S

SEQ ID NO: 103028 - protein, 36 aa, Artificial Sequence
  Cyclic GFR-binding peptide
  MOD_RES (1)..(2)..(33)..(35): Xaa is C or S
XXAPVKTSNITMQIMDNGRVLLLGEMSMIVEEXGXL

SEQ ID NO: 103029 - protein, 35 aa, Artificial Sequence
  Cyclic GFR-binding peptide
  MOD_RES (3)..(4)..(35): Xaa is C or S
SPXXVPQDLSNITIQIMVGRTPKVLGEMSMVVKSX

SEQ ID NO: 103030 - protein, 45 aa, Artificial Sequence; identical to SEQ ID NO: 23354
  Cyclic GFR-binding peptide
  MOD_RES (5)..(42)..(44): Xaa is C or S

SEQ ID NO: 103031 - protein, 39 aa, Artificial Sequence; identical to SEQ ID NO: 70353
  Cyclic GFR-binding peptide
  MOD_RES (4)..(5)..(36)..(38): Xaa is C or S

SEQ ID NO: 103032 - protein, 25 aa, Artificial Sequence
  Cyclic GFR-binding peptide
QDLSNITIQIMIGKTPKIIGEMSMI

SEQ ID NO: 103033 - protein, 33 aa, Artificial Sequence; identical to SEQ ID NO: 23362
  Cyclic GFR-binding peptide

SEQ ID NO: 103034 - protein, 44 aa, Artificial Sequence; identical to SEQ ID NO: 23363
  Cyclic GFR-binding peptide
  MOD_RES (4)..(41)..(43): Xaa is C or S

SEQ ID NO: 103035 - protein, 32 aa, Artificial Sequence
  Cyclic GFR-binding peptide
  MOD_RES (32)..(32): Xaa is C or S
TPTKMSNITMQIMNDKQQIIIGEMSGMVVDRX

SEQ ID NO: 103036 - protein, 26 aa, Artificial Sequence
  Cyclic GFR-binding peptide
MSNITMQIMNDKQQIIIGEMSGMVVD

SEQ ID NO: 103037 - protein, 27 aa, Artificial Sequence
  Cyclic GFR-binding peptide
  MOD_RES (1)..(2): Xaa is C or S
XXVPQDLSNITIQIMVGRTPKVLGEMS

SEQ ID NO: 103038 - protein, 29 aa, Artificial Sequence
  Cyclic GFR-binding peptide
  MOD_RES (26)..(28): Xaa is C or S
SNITIQIMVGRKPKVLGEMSMIVRSXKXS

SEQ ID NO: 103039 - protein, 36 aa, Artificial Sequence
  Cyclic GFR-binding peptide
  MOD_RES (1)..(2)..(34)..(36): Xaa is C or S
XXVPTRLSNITIQIMDSANNVVLGEMSDMVVESXGX

SEQ ID NO: 103040 - protein, 27 aa, Artificial Sequence
  Cyclic GFR-binding peptide
RVHHSNITVQIMEYVRKKPKLLGEMSR

SEQ ID NO: 103041 - protein, 30 aa, Artificial Sequence; identical to SEQ ID NO: 73574
  Cyclic GFR-binding peptide
  MOD_RES (1)..(2): Xaa is C or S

SEQ ID NO: 103042 - protein, 25 aa, Artificial Sequence
  Cyclic GFR-binding peptide
TKLSNITVQIMDDSSNVILGEMSNM

SEQ ID NO: 103043 - protein, 27 aa, Artificial Sequence
  Cyclic GFR-binding peptide
QDLSNITIQIMIGKTPKIIGEMSMIVK

SEQ ID NO: 103044 - protein, 29 aa, Artificial Sequence
  Cyclic GFR-binding peptide
  MOD_RES (3)..(4): Xaa is C or S
ASXXVPARLSNITIQIMDAANNVVIGEMS

SEQ ID NO: 103045 - protein, 25 aa, Artificial Sequence
  Cyclic GFR-binding peptide
TRLSNITIQIMDSANNVVLGEMSDM

SEQ ID NO: 103046 - protein, 37 aa, Artificial Sequence
  Cyclic GFR-binding peptide
  MOD_RES (2)..(3)..(34)..(36): Xaa is C or S
PXXVPQALSNITIQIMVGRKPKVLGEMSMIVRSXKXS

SEQ ID NO: 103047 - protein, 41 aa, Artificial Sequence; identical to SEQ ID NO: 23376
  Cyclic GFR-binding peptide
  MOD_RES (4)..(41): Xaa is C or S

SEQ ID NO: 103048 - protein, 33 aa, Artificial Sequence; identical to SEQ ID NO: 73579
  Cyclic GFR-binding peptide
  MOD_RES (1)..(32): Xaa is C or S

SEQ ID NO: 103049 - protein, 25 aa, Artificial Sequence
  Cyclic GFR-binding peptide
PTKLSNITVQIMDDSSNVIIGEMSN

SEQ ID NO: 103050 - protein, 29 aa, Artificial Sequence
  Cyclic GFR-binding peptide
SRVHHSNITVQIMEYVRKKPKLLGEMSRL

SEQ ID NO: 103051 - protein, 28 aa, Artificial Sequence
  Cyclic GFR-binding peptide
PTGQSNITMQIMRIKPHQGQHIGEMSLE

SEQ ID NO: 103052 - protein, 29 aa, Artificial Sequence
  Cyclic GFR-binding peptide
APVKTSNITMQIMDNGRVLLIGEMSMIVE

SEQ ID NO: 103053 - protein, 30 aa, Artificial Sequence; identical to SEQ ID NO: 73586
  Cyclic GFR-binding peptide
  MOD_RES (1)..(1): Xaa is C or S

SEQ ID NO: 103054 - protein, 39 aa, Artificial Sequence; identical to SEQ ID NO: 23384
  Cyclic GFR-binding peptide
  MOD_RES (2)..(36)..(38): Xaa is C or S

SEQ ID NO: 103055 - protein, 26 aa, Artificial Sequence
  Cyclic GFR-binding peptide
TGQSNITMQIMRIKPHQGQHIGEMSL

SEQ ID NO: 103056 - protein, 32 aa, Artificial Sequence
  Cyclic GFR-binding peptide
  MOD_RES (5)..(6): Xaa is C or S
VPKPXXAPTKLSNITVQIMDDSSNVILGEMSN

SEQ ID NO: 103057 - protein, 34 aa, Artificial Sequence
  Cyclic GFR-binding peptide
  MOD_RES (1)..(32)..(34): Xaa is C or S
XAPVKTSNITMQIMDNGRVLLIGEMSMIVEEXGX

SEQ ID NO: 103058 - protein, 41 aa, Artificial Sequence
  Cyclic GFR-binding peptide
  MOD_RES (5)..(6)..(38)..(40): Xaa is C or S
SAGPXXTPTKMSNITMQIMNDKQQIIIGEMSGMVVDRXGXS

SEQ ID NO: 103059 - protein, 36 aa, Artificial Sequence; identical to SEQ ID NO: 73591
  Cyclic GFR-binding peptide
  MOD_RES (1)..(2)..(33)..(35): Xaa is C or S

SEQ ID NO: 103060 - protein, 35 aa, Artificial Sequence
  Cyclic GFR-binding peptide
  MOD_RES (1)..(2)..(33)..(35): Xaa is C or S
XXAPVKTSNITMQIMDNGRVLLIGEMSMIVEEXGX

SEQ ID NO: 103061 - protein, 29 aa, Artificial Sequence
  Cyclic GFR-binding peptide
VHHSNITVQIMEYVRKKPKLLGEMSRLEE

SEQ ID NO: 103062 - protein, 26 aa, Artificial Sequence
  Cyclic GFR-binding peptide
QVQLSNITVQIMEIVRKKPIFIGEMS

SEQ ID NO: 103063 - protein, 23 aa, Artificial Sequence
  Cyclic GFR-binding peptide
RLSNITIQIMDAANNVVLGEMSD

SEQ ID NO: 103064 - protein, 28 aa, Artificial Sequence
  Cyclic GFR-binding peptide
  MOD_RES (27)..(27): Xaa is C or S
SNITIQIMDSANNVVIGEMSDMVVESXG

SEQ ID NO: 103065 - protein, 35 aa, Artificial Sequence
  Cyclic GFR-binding peptide
  MOD_RES (1)..(33)..(35): Xaa is C or S
XTPTKMSNITMQIMNDKQQIILGEMSGMVVDRXGX

SEQ ID NO: 103066 - protein, 26 aa, Artificial Sequence
  Cyclic GFR-binding peptide
  MOD_RES (26)..(26): Xaa is C or S
SNITIQIMVGRKPKVIGEMSMIVRSX

SEQ ID NO: 103067 - protein, 39 aa, Artificial Sequence; identical to SEQ ID NO: 23401
  Cyclic GFR-binding peptide
  MOD_RES (5)..(39): Xaa is C or S

SEQ ID NO: 103068 - protein, 42 aa, Artificial Sequence; identical to SEQ ID NO: 23403
  Cyclic GFR-binding peptide
  MOD_RES (5)..(42): Xaa is C or S

SEQ ID NO: 103069 - protein, 28 aa, Artificial Sequence
  Cyclic GFR-binding peptide
  MOD_RES (28)..(28): Xaa is C or S
LSNITIQIMDSANNVVLGEMSDMVVESX

SEQ ID NO: 103070 - protein, 31 aa, Artificial Sequence; identical to SEQ ID NO: 23409
  Cyclic GFR-binding peptide
  MOD_RES (31)..(31): Xaa is C or S

SEQ ID NO: 103071 - protein, 29 aa, Artificial Sequence
  Cyclic GFR-binding peptide
  MOD_RES (27)..(29): Xaa is C or S
TSNITMQIMDNGRVLLLGEMSMIVEEXGX

SEQ ID NO: 103072 - protein, 29 aa, Artificial Sequence
  Cyclic GFR-binding peptide
  MOD_RES (27)..(29): Xaa is C or S
LSNITIQIMVGRKPKVLGEMSMIVRSXKX

SEQ ID NO: 103073 - protein, 26 aa, Artificial Sequence
  Cyclic GFR-binding peptide
RVHHSNITVQIMEYVRKKPKLIGEMS

SEQ ID NO: 103074 - protein, 24 aa, Artificial Sequence
  Cyclic GFR-binding peptide
SNITIQIMVGRTPKVLGEMSMVVK

SEQ ID NO: 103075 - protein, 31 aa, Artificial Sequence
  Cyclic GFR-binding peptide
  MOD_RES (3)..(4): Xaa is C or S
PTXXVPTRLSNITIQIMDSANNVVLGEMSDM

SEQ ID NO: 103076 - protein, 32 aa, Artificial Sequence; identical to SEQ ID NO: 70410
  Cyclic GFR-binding peptide
  MOD_RES (6)..(7): Xaa is C or S

SEQ ID NO: 103077 - protein, 31 aa, Artificial Sequence; identical to SEQ ID NO: 70413
  Cyclic GFR-binding peptide
  MOD_RES (1)..(1): Xaa is C or S

SEQ ID NO: 103078 - protein, 39 aa, Artificial Sequence
  Cyclic GFR-binding peptide
  MOD_RES (5)..(6)..(38): Xaa is C or S
TPPTXXVPTRLSNITIQIMDSANNVVIGEMSDMVVESXG

SEQ ID NO: 103079 - protein, 37 aa, Artificial Sequence; identical to SEQ ID NO: 70415
  Cyclic GFR-binding peptide
  MOD_RES (5)..(6)..(37): Xaa is C or S

SEQ ID NO: 103080 - protein, 35 aa, Artificial Sequence
  Cyclic GFR-binding peptide
  MOD_RES (1)..(33)..(35): Xaa is C or S
XVPARLSNITIQIMDAANNVVLGEMSDMVVEAXGX

SEQ ID NO: 103081 - protein, 39 aa, Artificial Sequence
  Cyclic GFR-binding peptide
  MOD_RES (5)..(6)..(38): Xaa is C or S
SAGPXXTPTKMSNITMQIMNDKQQIILGEMSGMVVDRXG

SEQ ID NO: 103082 - protein, 30 aa, Artificial Sequence
  Cyclic GFR-binding peptide
VPQDLSNITIQIMVGRTPKVLGEMSMVVKS

SEQ ID NO: 103083 - protein, 38 aa, Artificial Sequence; identical to SEQ ID NO: 23427
  Cyclic GFR-binding peptide
  MOD_RES (5)..(5): Xaa is C or S

SEQ ID NO: 103084 - protein, 29 aa, Artificial Sequence
  Cyclic GFR-binding peptide
  MOD_RES (2)..(3): Xaa is C or S
TXXAPVKTSNITMQIMDNGRVLLLGEMSM

SEQ ID NO: 103085 - protein, 35 aa, Artificial Sequence
  Cyclic GFR-binding peptide
  MOD_RES (1)..(2)..(34): Xaa is C or S
XXVPTRLSNITIQIMDSANNVVLGEMSDMVVESXG

SEQ ID NO: 103086 - protein, 29 aa, Artificial Sequence
  Cyclic GFR-binding peptide
SNITVQIMEYVRKKPKLIGEMSRLEEHLE

SEQ ID NO: 103087 - protein, 23 aa, Artificial Sequence
  Cyclic GFR-binding peptide
TRLSNITIQIMDSANNVVIGEMS

SEQ ID NO: 103088 - protein, 26 aa, Artificial Sequence
  Cyclic GFR-binding peptide
TKMSNITMQIMNDKQQIILGEMSGMV

SEQ ID NO: 103089 - protein, 24 aa, Artificial Sequence
  Cyclic GFR-binding peptide
MSNITMQIMNDKQQIILGEMSGMV

SEQ ID NO: 103090 - protein, 28 aa, Artificial Sequence
  Cyclic GFR-binding peptide
  MOD_RES (2)..(3): Xaa is C or S
TXXVPTRLSNITIQIMDSANNVVLGEMS

SEQ ID NO: 103091 - protein, 38 aa, Artificial Sequence
  Cyclic GFR-binding peptide
  MOD_RES (2)..(3)..(35)..(37): Xaa is C or S
SXXVPARLSNITIQIMDAANNVVIGEMSDMVVEAXGXR

SEQ ID NO: 103092 - protein, 32 aa, Artificial Sequence; identical to SEQ ID NO: 23434
  Cyclic GFR-binding peptide
  MOD_RES (1)..(1): Xaa is C or S

SEQ ID NO: 103093 - protein, 30 aa, Artificial Sequence
  Cyclic GFR-binding peptide
  MOD_RES (30)..(30): Xaa is C or S
PQDLSNITIQIMVGRTPKVLGEMSMVVKSX

SEQ ID NO: 103094 - protein, 31 aa, Artificial Sequence
  Cyclic GFR-binding peptide
  MOD_RES (29)..(31): Xaa is C or S
RLSNITIQIMDAANNVVIGEMSDMVVEAXGX

SEQ ID NO: 103095 - protein, 24 aa, Artificial Sequence
  Cyclic GFR-binding peptide
DLSNITIQIMVGRTPKVLGEMSMV

SEQ ID NO: 103096 - protein, 34 aa, Artificial Sequence
  Cyclic GFR-binding peptide
  MOD_RES (4)..(5): Xaa is C or S
PSTXXAPVKTSNITMQIMDNGRVLLLGEMSMIVE

SEQ ID NO: 103097 - protein, 28 aa, Artificial Sequence
  Cyclic GFR-binding peptide
KLSNITVQIMDDSSNVILGEMSNMVVRS

SEQ ID NO: 103098 - protein, 29 aa, Artificial Sequence
  Cyclic GFR-binding peptide
  MOD_RES (1)..(1): Xaa is C or S
XVSQDLSNITIQIMIGKTPKILGEMSMIV

SEQ ID NO: 103099 - protein, 25 aa, Artificial Sequence
  Cyclic GFR-binding peptide
SNITIQIMDSANNVVLGEMSDMVVE

SEQ ID NO: 103100 - protein, 36 aa, Artificial Sequence; identical to SEQ ID NO: 23446
  Cyclic GFR-binding peptide
  MOD_RES (34)..(36): Xaa is C or S

SEQ ID NO: 103101 - protein, 29 aa, Artificial Sequence
  Cyclic GFR-binding peptide
  MOD_RES (29)..(29): Xaa is C or S
KLSNITVQIMDDSSNVIIGEMSNMVVRSX

SEQ ID NO: 103102 - protein, 28 aa, Artificial Sequence
  Cyclic GFR-binding peptide
VKTSNITMQIMDNGRVLLLGEMSMIVEE

SEQ ID NO: 103103 - protein, 30 aa, Artificial Sequence; identical to SEQ ID NO: 23453
  Cyclic GFR-binding peptide

SEQ ID NO: 103104 - protein, 38 aa, Artificial Sequence
  Cyclic GFR-binding peptide
  MOD_RES (3)..(4)..(36)..(38): Xaa is C or S
GPXXTPTKMSNITMQIMNDKQQIILGEMSGMVVDRXGX

SEQ ID NO: 103105 - protein, 44 aa, Artificial Sequence; identical to SEQ ID NO: 23458
  Cyclic GFR-binding peptide
  MOD_RES (4)..(41)..(43): Xaa is C or S

SEQ ID NO: 103106 - protein, 43 aa, Artificial Sequence; identical to SEQ ID NO: 23460
  Cyclic GFR-binding peptide
  MOD_RES (5)..(42): Xaa is C or S

SEQ ID NO: 103107 - protein, 28 aa, Artificial Sequence
  Cyclic GFR-binding peptide
  MOD_RES (27)..(27): Xaa is C or S
SNITMQIMNDKQQIILGEMSGMVVDRXG

SEQ ID NO: 103108 - protein, 30 aa, Artificial Sequence
  Cyclic GFR-binding peptide
  MOD_RES (1)..(1): Xaa is C or S
XAPVKTSNITMQIMDNGRVLLIGEMSMIVE

SEQ ID NO: 103109 - protein, 30 aa, Artificial Sequence; identical to SEQ ID NO: 23461
  Cyclic GFR-binding peptide

SEQ ID NO: 103110 - protein, 27 aa, Artificial Sequence
  Cyclic GFR-binding peptide
  MOD_RES (26)..(26): Xaa is C or S
SNITMQIMDNGRVLLLGEMSMIVEEXG

SEQ ID NO: 103111 - protein, 32 aa, Artificial Sequence
  Cyclic GFR-binding peptide
  MOD_RES (3)..(4): Xaa is C or S
ASXXVPARLSNITIQIMDAANNVVLGEMSDMV

SEQ ID NO: 103112 - protein, 27 aa, Artificial Sequence
  Cyclic GFR-binding peptide
  MOD_RES (1)..(2): Xaa is C or S
XXVPTRLSNITIQIMDSANNVVIGEMS

SEQ ID NO: 103113 - protein, 40 aa, Artificial Sequence
  Cyclic GFR-binding peptide
  MOD_RES (5)..(6)..(38)..(40): Xaa is C or S
SAGPXXTPTKMSNITMQIMNDKQQIILGEMSGMVVDRXGX

SEQ ID NO: 103114 - protein, 26 aa, Artificial Sequence
  Cyclic GFR-binding peptide
SNITIQIMDSANNVVLGEMSDMVVES

SEQ ID NO: 103115 - protein, 38 aa, Artificial Sequence
  Cyclic GFR-binding peptide
  MOD_RES (4)..(5)..(37): Xaa is C or S
PPTXXVPTRLSNITIQIMDSANNVVIGEMSDMVVESXG

SEQ ID NO: 103116 - protein, 35 aa, Artificial Sequence
  Cyclic GFR-binding peptide
  MOD_RES (1)..(33)..(35): Xaa is C or S
XAPTKLSNITVQIMDDSSNVILGEMSNMVVRSXGX

SEQ ID NO: 103117 - protein, 31 aa, Artificial Sequence; identical to SEQ ID NO: 70455
  Cyclic GFR-binding peptide
  MOD_RES (4)..(5): Xaa is C or S

SEQ ID NO: 103118 - protein, 30 aa, Artificial Sequence; identical to SEQ ID NO: 70456
  Cyclic GFR-binding peptide

SEQ ID NO: 103119 - protein, 28 aa, Artificial Sequence
  Cyclic GFR-binding peptide
HSNITVQIMEYVRKKPKLLGEMSRLEEH

SEQ ID NO: 103120 - protein, 25 aa, Artificial Sequence
  Cyclic GFR-binding peptide
VPTRLSNITIQIMDSANNVVLGEMS

SEQ ID NO: 103121 - protein, 32 aa, Artificial Sequence
  Cyclic GFR-binding peptide
  MOD_RES (31)..(31): Xaa is C or S
PARLSNITIQIMDAANNVVLGEMSDMVVEAXG

SEQ ID NO: 103122 - protein, 31 aa, Artificial Sequence; identical to SEQ ID NO: 23473
  Cyclic GFR-binding peptide
  MOD_RES (30)..(30): Xaa is C or S

SEQ ID NO: 103123 - protein, 32 aa, Artificial Sequence; identical to SEQ ID NO: 23474
  Cyclic GFR-binding peptide
  MOD_RES (1)..(1): Xaa is C or S

SEQ ID NO: 103124 - protein, 31 aa, Artificial Sequence
  Cyclic GFR-binding peptide
  MOD_RES (29)..(31): Xaa is C or S
QDLSNITIQIMIGKTPKILGEMSMIVKSXKX

SEQ ID NO: 103125 - protein, 23 aa, Artificial Sequence
  Cyclic GFR-binding peptide
TKMSNITMQIMNDKQQIILGEMS

SEQ ID NO: 103126 - protein, 26 aa, Artificial Sequence
  Cyclic GFR-binding peptide
VHHSNITVQIMEYVRKKPKLLGEMSR

SEQ ID NO: 103127 - protein, 29 aa, Artificial Sequence
  Cyclic GFR-binding peptide
  MOD_RES (2)..(2): Xaa is C or S
EXVPTGQSNITMQIMRIKPHQGQHIGEMS

SEQ ID NO: 103128 - protein, 34 aa, Artificial Sequence; identical to SEQ ID NO: 23483
  Cyclic GFR-binding peptide

SEQ ID NO: 103129 - protein, 33 aa, Artificial Sequence
  Cyclic GFR-binding peptide
  MOD_RES (5)..(6): Xaa is C or S
SAGPXXTPTKMSNITMQIMNDKQQIILGEMSGM

SEQ ID NO: 103130 - protein, 29 aa, Artificial Sequence
  Cyclic GFR-binding peptide
  MOD_RES (29)..(29): Xaa is C or S
SNITMQIMRIKPHQGQHIGEMSLEEHSQX

SEQ ID NO: 103131 - protein, 28 aa, Artificial Sequence
  Cyclic GFR-binding peptide
  MOD_RES (28)..(28): Xaa is C or S
DLSNITIQIMIGKTPKIIGEMSMIVKSX

SEQ ID NO: 103132 - protein, 39 aa, Artificial Sequence
  Cyclic GFR-binding peptide
  MOD_RES (6)..(7)..(39): Xaa is C or S
STPPTXXVPTRLSNITIQIMDSANNVVIGEMSDMVVESX

SEQ ID NO: 103133 - protein, 30 aa, Artificial Sequence
  Cyclic GFR-binding peptide
  MOD_RES (27)..(29): Xaa is C or S
LSNITIQIMVGRTPKVLGEMSMVVKSXKXS

SEQ ID NO: 103134 - protein, 20 aa, Artificial Sequence
  Cyclic GFR-binding peptide
SNITIQIMDAANNVVIGEMS

SEQ ID NO: 103135 - protein, 36 aa, Artificial Sequence
  Cyclic GFR-binding peptide
  MOD_RES (3)..(4)..(36): Xaa is C or S
GPXXTPTKMSNITMQIMNDKQQIIIGEMSGMVVDRX

SEQ ID NO: 103136 - protein, 36 aa, Artificial Sequence; identical to SEQ ID NO: 23491
  Cyclic GFR-binding peptide
  MOD_RES (5)..(5): Xaa is C or S

SEQ ID NO: 103137 - protein, 27 aa, Artificial Sequence
  Cyclic GFR-binding peptide
  MOD_RES (1)..(1): Xaa is C or S
XAPTKLSNITVQIMDDSSNVIIGEMSN

SEQ ID NO: 103138 - protein, 26 aa, Artificial Sequence
  Cyclic GFR-binding peptide
  MOD_RES (1)..(1): Xaa is C or S
XVPARLSNITIQIMDAANNVVIGEMS

SEQ ID NO: 103139 - protein, 34 aa, Artificial Sequence; identical to SEQ ID NO: 23493
  Cyclic GFR-binding peptide
  MOD_RES (33)..(33): Xaa is C or S

SEQ ID NO: 103140 - protein, 25 aa, Artificial Sequence
  Cyclic GFR-binding peptide
SNITVQIMDDSSNVILGEMSNMVVR

SEQ ID NO: 103141 - protein, 29 aa, Artificial Sequence
  Cyclic GFR-binding peptide
PARLSNITIQIMDAANNVVLGEMSDMVVE

SEQ ID NO: 103142 - protein, 35 aa, Artificial Sequence
  Cyclic GFR-binding peptide
  MOD_RES (3)..(4): Xaa is C or S
PTXXVPTRLSNITIQIMDSANNVVLGEMSDMVVES

SEQ ID NO: 103143 - protein, 34 aa, Artificial Sequence
  Cyclic GFR-binding peptide
  MOD_RES (4)..(5): Xaa is C or S
PPTXXVPTRLSNITIQIMDSANNVVIGEMSDMVV

SEQ ID NO: 103144 - protein, 27 aa, Artificial Sequence
  Cyclic GFR-binding peptide
QSNITMQIMRIKPHQGQHIGEMSLEEH

SEQ ID NO: 103145 - protein, 26 aa, Artificial Sequence
  Cyclic GFR-binding peptide
LSNITIQIMVGRTPKVIGEMSMVVKS

SEQ ID NO: 103146 - protein, 37 aa, Artificial Sequence; identical to SEQ ID NO: 23502
  Cyclic GFR-binding peptide
  MOD_RES (4)..(4): Xaa is C or S

SEQ ID NO: 103147 - protein, 35 aa, Artificial Sequence; identical to SEQ ID NO: 23505
  Cyclic GFR-binding peptide
  MOD_RES (33)..(35): Xaa is C or S

SEQ ID NO: 103148 - protein, 25 aa, Artificial Sequence
  Cyclic GFR-binding peptide
LSNITIQIMIGKTPKIIGEMSMIVK

SEQ ID NO: 103149 - protein, 35 aa, Artificial Sequence; identical to SEQ ID NO: 23507
  Cyclic GFR-binding peptide
  MOD_RES (35)..(35): Xaa is C or S

SEQ ID NO: 103150 - protein, 32 aa, Artificial Sequence; identical to SEQ ID NO: 23510
  Cyclic GFR-binding peptide

SEQ ID NO: 103151 - protein, 36 aa, Artificial Sequence; identical to SEQ ID NO: 23512
  Cyclic GFR-binding peptide
  MOD_RES (6)..(6): Xaa is C or S

SEQ ID NO: 103152 - protein, 30 aa, Artificial Sequence
  Cyclic GFR-binding peptide
  MOD_RES (28)..(30): Xaa is C or S
MSNITMQIMNDKQQIILGEMSGMVVDRXGX

SEQ ID NO: 103153 - protein, 20 aa, Artificial Sequence
  Cyclic GFR-binding peptide
SNITIQIMDSANNVVLGEMS

SEQ ID NO: 103154 - protein, 39 aa, Artificial Sequence
  Cyclic GFR-binding peptide
  MOD_RES (6)..(7)..(39): Xaa is C or S
AAPASXXVPARLSNITIQIMDAANNVVLGEMSDMVVEAX

SEQ ID NO: 103155 - protein, 38 aa, Artificial Sequence
  Cyclic GFR-binding peptide
  MOD_RES (4)..(5)..(36)..(38): Xaa is C or S
ASPXXVSQDLSNITIQIMIGKTPKILGEMSMIVKSXKX

SEQ ID NO: 103156 - protein, 36 aa, Artificial Sequence
  Cyclic GFR-binding peptide
  MOD_RES (1)..(2)..(34)..(36): Xaa is C or S
XXVPARLSNITIQIMDAANNVVIGEMSDMVVEAXGX

SEQ ID NO: 103157 - protein, 28 aa, Artificial Sequence
  Cyclic GFR-binding peptide
LSNITVQIMEIVRKKPIFLGEMSTLEDH

SEQ ID NO: 103158 - protein, 34 aa, Artificial Sequence; identical to SEQ ID NO: 23516
  Cyclic GFR-binding peptide

SEQ ID NO: 103159 - protein, 31 aa, Artificial Sequence
  Cyclic GFR-binding peptide
  MOD_RES (1)..(2): Xaa is C or S
XXAPTKLSNITVQIMDDSSNVILGEMSNMVV

SEQ ID NO: 103160 - protein, 23 aa, Artificial Sequence
  Cyclic GFR-binding peptide
LSNITVQIMEIVRKKPIFLGEMS

SEQ ID NO: 103161 - protein, 28 aa, Artificial Sequence
  Cyclic GFR-binding peptide
  MOD_RES (1)..(2): Xaa is C or S
XXVPQALSNITIQIMVGRKPKVLGEMSM

SEQ ID NO: 103162 - protein, 36 aa, Artificial Sequence
  Cyclic GFR-binding peptide
  MOD_RES (3)..(4)..(36): Xaa is C or S
ASXXVPARLSNITIQIMDAANNVVLGEMSDMVVEAX

SEQ ID NO: 103163 - protein, 35 aa, Artificial Sequence
  Cyclic GFR-binding peptide
  MOD_RES (4)..(5): Xaa is C or S
ASPXXVSQDLSNITIQIMIGKTPKILGEMSMIVKS

SEQ ID NO: 103164 - protein, 38 aa, Artificial Sequence; identical to SEQ ID NO: 73689
  Cyclic GFR-binding peptide
  MOD_RES (5)..(6)..(37): Xaa is C or S

SEQ ID NO: 103165 - protein, 27 aa, Artificial Sequence
  Cyclic GFR-binding peptide
  MOD_RES (27)..(27): Xaa is C or S
LSNITIQIMIGKTPKILGEMSMIVKSX

SEQ ID NO: 103166 - protein, 36 aa, Artificial Sequence; identical to SEQ ID NO: 73690
  Cyclic GFR-binding peptide
  MOD_RES (1)..(33)..(35): Xaa is C or S

SEQ ID NO: 103167 - protein, 31 aa, Artificial Sequence; identical to SEQ ID NO: 23523
  Cyclic GFR-binding peptide
  MOD_RES (1)..(1): Xaa is C or S

SEQ ID NO: 103168 - protein, 33 aa, Artificial Sequence; identical to SEQ ID NO: 73698
  Cyclic GFR-binding peptide
  MOD_RES (4)..(5): Xaa is C or S

SEQ ID NO: 103169 - protein, 35 aa, Artificial Sequence; identical to SEQ ID NO: 23531
  Cyclic GFR-binding peptide
  MOD_RES (4)..(4): Xaa is C or S

SEQ ID NO: 103170 - protein, 38 aa, Artificial Sequence; identical to SEQ ID NO: 23534
  Cyclic GFR-binding peptide
  MOD_RES (1)..(38): Xaa is C or S

SEQ ID NO: 103171 - protein, 28 aa, Artificial Sequence
  Cyclic GFR-binding peptide
APTKLSNITVQIMDDSSNVILGEMSNMV

SEQ ID NO: 103172 - protein, 32 aa, Artificial Sequence
  Cyclic GFR-binding peptide
  MOD_RES (2)..(3): Xaa is C or S
TXXVPTRLSNITIQIMDSANNVVLGEMSDMVV

SEQ ID NO: 103173 - protein, 29 aa, Artificial Sequence
  Cyclic GFR-binding peptide
VPQALSNITIQIMVGRKPKVIGEMSMIVR

SEQ ID NO: 103174 - protein, 33 aa, Artificial Sequence; identical to SEQ ID NO: 23536
  Cyclic GFR-binding peptide

SEQ ID NO: 103175 - protein, 34 aa, Artificial Sequence
  Cyclic GFR-binding peptide
  MOD_RES (6)..(7): Xaa is C or S
HVPKPXXAPTKLSNITVQIMDDSSNVIIGEMSNM

SEQ ID NO: 103176 - protein, 34 aa, Artificial Sequence; identical to SEQ ID NO: 23538
  Cyclic GFR-binding peptide
  MOD_RES (31)..(33): Xaa is C or S

SEQ ID NO: 103177 - protein, 37 aa, Artificial Sequence; identical to SEQ ID NO: 23540
  Cyclic GFR-binding peptide
  MOD_RES (34)..(36): Xaa is C or S

SEQ ID NO: 103178 - protein, 32 aa, Artificial Sequence; identical to SEQ ID NO: 73705
  Cyclic GFR-binding peptide
  MOD_RES (29)..(31): Xaa is C or S

SEQ ID NO: 103179 - protein, 31 aa, Artificial Sequence
  Cyclic GFR-binding peptide
  MOD_RES (31)..(31): Xaa is C or S
PTRLSNITIQIMDSANNVVLGEMSDMVVESX

SEQ ID NO: 103180 - protein, 34 aa, Artificial Sequence
  Cyclic GFR-binding peptide
  MOD_RES (4)..(5): Xaa is C or S
AGPXXTPTKMSNITMQIMNDKQQIILGEMSGMVV

SEQ ID NO: 103181 - protein, 24 aa, Artificial Sequence
  Cyclic GFR-binding peptide
TKLSNITVQIMDDSSNVIIGEMSN

SEQ ID NO: 103182 - protein, 31 aa, Artificial Sequence
  Cyclic GFR-binding peptide
  MOD_RES (29)..(31): Xaa is C or S
KMSNITMQIMNDKQQIIIGEMSGMVVDRXGX

SEQ ID NO: 103183 - protein, 25 aa, Artificial Sequence
  Cyclic GFR-binding peptide
DLSNITIQIMVGRTPKVLGEMSMVV

SEQ ID NO: 103184 - protein, 32 aa, Artificial Sequence; identical to SEQ ID NO: 23544
  Cyclic GFR-binding peptide
  MOD_RES (31)..(31): Xaa is C or S

SEQ ID NO: 103185 - protein, 25 aa, Artificial Sequence
  Cyclic GFR-binding peptide
QLSNITVQIMEIVRKKPIFLGEMST

SEQ ID NO: 103186 - protein, 34 aa, Artificial Sequence
  Cyclic GFR-binding peptide
  MOD_RES (1)..(32)..(34): Xaa is C or S
XVSQDLSNITIQIMIGKTPKILGEMSMIVKSXKX

SEQ ID NO: 103187 - protein, 24 aa, Artificial Sequence
  Cyclic GFR-binding peptide
SNITIQIMDAANNVVLGEMSDMVV

SEQ ID NO: 103188 - protein, 24 aa, Artificial Sequence
  Cyclic GFR-binding peptide
LSNITIQIMIGKTPKIIGEMSMIV

SEQ ID NO: 103189 - protein, 27 aa, Artificial Sequence
  Cyclic GFR-binding peptide
  MOD_RES (27)..(27): Xaa is C or S
SNITMQIMNDKQQIILGEMSGMVVDRX

SEQ ID NO: 103190 - protein, 23 aa, Artificial Sequence
  Cyclic GFR-binding peptide
ALSNITIQIMVGRKPKVIGEMSM

SEQ ID NO: 103191 - protein, 34 aa, Artificial Sequence; identical to SEQ ID NO: 23549
  Cyclic GFR-binding peptide
  MOD_RES (7)..(7): Xaa is C or S

SEQ ID NO: 103192 - protein, 42 aa, Artificial Sequence
  Cyclic GFR-binding peptide
  MOD_RES (6)..(7)..(39)..(41): Xaa is C or S
GSAGPXXTPTKMSNITMQIMNDKQQIILGEMSGMVVDRXGXS

SEQ ID NO: 103193 - protein, 29 aa, Artificial Sequence
  Cyclic GFR-binding peptide
PQALSNITIQIMVGRKPKVLGEMSMIVRS

SEQ ID NO: 103194 - protein, 27 aa, Artificial Sequence
  Cyclic GFR-binding peptide
QALSNITIQIMVGRKPKVLGEMSMIVR

SEQ ID NO: 103195 - protein, 37 aa, Artificial Sequence; identical to SEQ ID NO: 23560
  Cyclic GFR-binding peptide
  MOD_RES (1)..(35)..(37): Xaa is C or S

SEQ ID NO: 103196 - protein, 32 aa, Artificial Sequence; identical to SEQ ID NO: 23561
  Cyclic GFR-binding peptide
  MOD_RES (3)..(3): Xaa is C or S

SEQ ID NO: 103197 - protein, 29 aa, Artificial Sequence
  Cyclic GFR-binding peptide
  MOD_RES (2)..(3): Xaa is C or S
TXXVPTRLSNITIQIMDSANNVVIGEMSD

SEQ ID NO: 103198 - protein, 34 aa, Artificial Sequence; identical to SEQ ID NO: 23562
  Cyclic GFR-binding peptide

SEQ ID NO: 103199 - protein, 26 aa, Artificial Sequence
  Cyclic GFR-binding peptide
TPTKMSNITMQIMNDKQQIIIGEMSG

SEQ ID NO: 103200 - protein, 28 aa, Artificial Sequence
  Cyclic GFR-binding peptide
QVQLSNITVQIMEIVRKKPIFLGEMSTL

SEQ ID NO: 103201 - protein, 27 aa, Artificial Sequence
  Cyclic GFR-binding peptide
APVKTSNITMQIMDNGRVLLIGEMSMI

SEQ ID NO: 103202 - protein, 40 aa, Artificial Sequence; identical to SEQ ID NO: 23571
  Cyclic GFR-binding peptide
  MOD_RES (4)..(4): Xaa is C or S

SEQ ID NO: 103203 - protein, 33 aa, Artificial Sequence; identical to SEQ ID NO: 23572
  Cyclic GFR-binding peptide
  MOD_RES (5)..(5): Xaa is C or S

SEQ ID NO: 103204 - protein, 35 aa, Artificial Sequence; identical to SEQ ID NO: 23573
  Cyclic GFR-binding peptide
  MOD_RES (34)..(34): Xaa is C or S

SEQ ID NO: 103205 - protein, 30 aa, Artificial Sequence
  Cyclic GFR-binding peptide
  MOD_RES (1)..(1): Xaa is C or S
XVSQDLSNITIQIMIGKTPKILGEMSMIVK

SEQ ID NO: 103206 - protein, 34 aa, Artificial Sequence
  Cyclic GFR-binding peptide
  MOD_RES (1)..(2)..(34): Xaa is C or S
XXVPTRLSNITIQIMDSANNVVIGEMSDMVVESX

SEQ ID NO: 103207 - protein, 33 aa, Artificial Sequence; identical to SEQ ID NO: 23574
  Cyclic GFR-binding peptide
  MOD_RES (30)..(32): Xaa is C or S

SEQ ID NO: 103208 - protein, 27 aa, Artificial Sequence
  Cyclic GFR-binding peptide
  MOD_RES (1)..(2): Xaa is C or S
XXAPVKTSNITMQIMDNGRVLLLGEMS

SEQ ID NO: 103209 - protein, 34 aa, Artificial Sequence; identical to SEQ ID NO: 73735
  Cyclic GFR-binding peptide
  MOD_RES (31)..(33): Xaa is C or S

SEQ ID NO: 103210 - protein, 32 aa, Artificial Sequence
  Cyclic GFR-binding peptide
  MOD_RES (5)..(6): Xaa is C or S
TPPTXXVPTRLSNITIQIMDSANNVVLGEMSD

SEQ ID NO: 103211 - protein, 22 aa, Artificial Sequence
  Cyclic GFR-binding peptide
SNITVQIMEYVRKKPKLLGEMS

SEQ ID NO: 103212 - protein, 41 aa, Artificial Sequence
  Cyclic GFR-binding peptide
  MOD_RES (6)..(7)..(38)..(40): Xaa is C or S
RVPSTXXAPVKTSNITMQIMDNGRVLLIGEMSMIVEEXGXL

SEQ ID NO: 103213 - protein, 38 aa, Artificial Sequence; identical to SEQ ID NO: 23578
  Cyclic GFR-binding peptide
  MOD_RES (35)..(37): Xaa is C or S

SEQ ID NO: 103214 - protein, 22 aa, Artificial Sequence
  Cyclic GFR-binding peptide
LSNITIQIMDSANNVVIGEMSD

SEQ ID NO: 103215 - protein, 33 aa, Artificial Sequence; identical to SEQ ID NO: 23579
  Cyclic GFR-binding peptide

SEQ ID NO: 103216 - protein, 31 aa, Artificial Sequence
  Cyclic GFR-binding peptide
  MOD_RES (4)..(5): Xaa is C or S
PASXXVPARLSNITIQIMDAANNVVIGEMSD

SEQ ID NO: 103217 - protein, 36 aa, Artificial Sequence
  Cyclic GFR-binding peptide
  MOD_RES (6)..(7): Xaa is C or S
STPPTXXVPTRLSNITIQIMDSANNVVLGEMSDMVV

SEQ ID NO: 103218 - protein, 32 aa, Artificial Sequence; identical to SEQ ID NO: 23581
  Cyclic GFR-binding peptide
  MOD_RES (2)..(2): Xaa is C or S

SEQ ID NO: 103219 - protein, 25 aa, Artificial Sequence
  Cyclic GFR-binding peptide
PQALSNITIQIMVGRKPKVLGEMSM

SEQ ID NO: 103220 - protein, 33 aa, Artificial Sequence; identical to SEQ ID NO: 23582
  Cyclic GFR-binding peptide
  MOD_RES (1)..(1): Xaa is C or S

SEQ ID NO: 103221 - protein, 31 aa, Artificial Sequence
  Cyclic GFR-binding peptide
  MOD_RES (31)..(31): Xaa is C or S
PTKMSNITMQIMNDKQQIILGEMSGMVVDRX

SEQ ID NO: 103222 - protein, 39 aa, Artificial Sequence; identical to SEQ ID NO: 23583
  Cyclic GFR-binding peptide
  MOD_RES (4)..(4): Xaa is C or S

SEQ ID NO: 103223 - protein, 37 aa, Artificial Sequence; identical to SEQ ID NO: 23585
  Cyclic GFR-binding peptide
  MOD_RES (4)..(4): Xaa is C or S

SEQ ID NO: 103224 - protein, 32 aa, Artificial Sequence; identical to SEQ ID NO: 23588
  Cyclic GFR-binding peptide

SEQ ID NO: 103225 - protein, 20 aa, Artificial Sequence
  Cyclic GFR-binding peptide
SNITIQIMVGRTPKVLGEMS

SEQ ID NO: 103226 - protein, 32 aa, Artificial Sequence
  Cyclic GFR-binding peptide
  MOD_RES (2)..(3): Xaa is C or S
TXXAPVKTSNITMQIMDNGRVLLLGEMSMIVE

SEQ ID NO: 103227 - protein, 22 aa, Artificial Sequence
  Cyclic GFR-binding peptide
DLSNITIQIMIGKTPKIIGEMS

SEQ ID NO: 103228 - protein, 34 aa, Artificial Sequence; identical to SEQ ID NO: 23596
  Cyclic GFR-binding peptide
  MOD_RES (33)..(33): Xaa is C or S

SEQ ID NO: 103229 - protein, 30 aa, Artificial Sequence; identical to SEQ ID NO: 23598
  Cyclic GFR-binding peptide

SEQ ID NO: 103230 - protein, 38 aa, Artificial Sequence; identical to SEQ ID NO: 23602
  Cyclic GFR-binding peptide
  MOD_RES (3)..(3): Xaa is C or S

SEQ ID NO: 103231 - protein, 34 aa, Artificial Sequence; identical to SEQ ID NO: 23604
  Cyclic GFR-binding peptide

SEQ ID NO: 103232 - protein, 27 aa, Artificial Sequence
  Cyclic GFR-binding peptide
PQALSNITIQIMVGRKPKVLGEMSMIV

SEQ ID NO: 103233 - protein, 33 aa, Artificial Sequence
  Cyclic GFR-binding peptide
  MOD_RES (32)..(32): Xaa is C or S
VPTRLSNITIQIMDSANNVVIGEMSDMVVESXG

SEQ ID NO: 103234 - protein, 32 aa, Artificial Sequence; identical to SEQ ID NO: 23606
  Cyclic GFR-binding peptide
  MOD_RES (2)..(2): Xaa is C or S

SEQ ID NO: 103235 - protein, 39 aa, Artificial Sequence; identical to SEQ ID NO: 70581
  Cyclic GFR-binding peptide
  MOD_RES (5)..(6)..(38): Xaa is C or S

SEQ ID NO: 103236 - protein, 32 aa, Artificial Sequence; identical to SEQ ID NO: 23609
  Cyclic GFR-binding peptide

SEQ ID NO: 103237 - protein, 24 aa, Artificial Sequence
  Cyclic GFR-binding peptide
HHSNITVQIMEYVRKKPKLIGEMS

SEQ ID NO: 103238 - protein, 23 aa, Artificial Sequence
  Cyclic GFR-binding peptide
QDLSNITIQIMIGKTPKIIGEMS

SEQ ID NO: 103239 - protein, 26 aa, Artificial Sequence
  Cyclic GFR-binding peptide
  MOD_RES (1)..(1): Xaa is C or S
XVPTRLSNITIQIMDSANNVVLGEMS

SEQ ID NO: 103240 - protein, 26 aa, Artificial Sequence
  Cyclic GFR-binding peptide
SNITVQIMEYVRKKPKLIGEMSRLEE

SEQ ID NO: 103241 - protein, 27 aa, Artificial Sequence
  Cyclic GFR-binding peptide
DLSNITIQIMIGKTPKILGEMSMIVKS

SEQ ID NO: 103242 - protein, 38 aa, Artificial Sequence; identical to SEQ ID NO: 23616
  Cyclic GFR-binding peptide
  MOD_RES (4)..(4): Xaa is C or S

SEQ ID NO: 103243 - protein, 32 aa, Artificial Sequence
  Cyclic GFR-binding peptide
  MOD_RES (3)..(4): Xaa is C or S
SPXXVPQDLSNITIQIMVGRTPKVLGEMSMVV

SEQ ID NO: 103244 - protein, 36 aa, Artificial Sequence
  Cyclic GFR-binding peptide
  MOD_RES (5)..(6): Xaa is C or S
SAGPXXTPTKMSNITMQIMNDKQQIIIGEMSGMVVD

SEQ ID NO: 103245 - protein, 25 aa, Artificial Sequence
  Cyclic GFR-binding peptide
ESNITMQIMRIKPHQGQHLGEMSFL

SEQ ID NO: 103246 - protein, 36 aa, Artificial Sequence
  Cyclic GFR-binding peptide
  MOD_RES (4)..(5)..(36): Xaa is C or S
ASPXXVPQDLSNITIQIMVGRTPKVLGEMSMVVKSX

SEQ ID NO: 103247 - protein, 31 aa, Artificial Sequence
  Cyclic GFR-binding peptide
  MOD_RES (5)..(6): Xaa is C or S
SASPXXVSQDLSNITIQIMIGKTPKILGEMS

SEQ ID NO: 103248 - protein, 37 aa, Artificial Sequence; identical to SEQ ID NO: 23621
  Cyclic GFR-binding peptide
  MOD_RES (6)..(6): Xaa is C or S

SEQ ID NO: 103249 - protein, 28 aa, Artificial Sequence
  Cyclic GFR-binding peptide
QALSNITIQIMVGRKPKVLGEMSMIVRS

SEQ ID NO: 103250 - protein, 23 aa, Artificial Sequence
  Cyclic GFR-binding peptide
SNITIQIMDAANNVVIGEMSDMV

SEQ ID NO: 103251 - protein, 35 aa, Artificial Sequence
  Cyclic GFR-binding peptide
  MOD_RES (1)..(2)..(34): Xaa is C or S
XXAPTKLSNITVQIMDDSSNVILGEMSNMVVRSXG

SEQ ID NO: 103252 - protein, 22 aa, Artificial Sequence
  Cyclic GFR-binding peptide
LSNITIQIMDSANNVVLGEMSD

SEQ ID NO: 103253 - protein, 32 aa, Artificial Sequence; identical to SEQ ID NO: 70601
  Cyclic GFR-binding peptide
  MOD_RES (1)..(32): Xaa is C or S

SEQ ID NO: 103254 - protein, 30 aa, Artificial Sequence
  Cyclic GFR-binding peptide
  MOD_RES (30)..(30): Xaa is C or S
PVKTSNITMQIMDNGRVLLLGEMSMIVEEX

SEQ ID NO: 103255 - protein, 31 aa, Artificial Sequence
  Cyclic GFR-binding peptide
  MOD_RES (28)..(30): Xaa is C or S
LSNITIQIMDAANNVVIGEMSDMVVEAXGXR

SEQ ID NO: 103256 - protein, 27 aa, Artificial Sequence
  Cyclic GFR-binding peptide
VPTGQSNITMQIMRIKPHQGQHIGEMS

SEQ ID NO: 103257 - protein, 29 aa, Artificial Sequence
  Cyclic GFR-binding peptide
  MOD_RES (27)..(29): Xaa is C or S
SNITIQIMDAANNVVLGEMSDMVVEAXGX

SEQ ID NO: 103258 - protein, 23 aa, Artificial Sequence
  Cyclic GFR-binding peptide
SNITIQIMVGRKPKVLGEMSMIV

SEQ ID NO: 103259 - protein, 31 aa, Artificial Sequence
  Cyclic GFR-binding peptide
APTKLSNITVQIMDDSSNVILGEMSNMVVRS

SEQ ID NO: 103260 - protein, 34 aa, Artificial Sequence; identical to SEQ ID NO: 23636
  Cyclic GFR-binding peptide
  MOD_RES (2)..(2): Xaa is C or S

SEQ ID NO: 103261 - protein, 37 aa, Artificial Sequence; identical to SEQ ID NO: 73796
  Cyclic GFR-binding peptide
  MOD_RES (6)..(7): Xaa is C or S

SEQ ID NO: 103262 - protein, 34 aa, Artificial Sequence; identical to SEQ ID NO: 23639
  Cyclic GFR-binding peptide
  MOD_RES (34)..(34): Xaa is C or S

SEQ ID NO: 103263 - protein, 24 aa, Artificial Sequence
  Cyclic GFR-binding peptide
KTSNITMQIMDNGRVLLLGEMSMI

SEQ ID NO: 103264 - protein, 37 aa, Artificial Sequence
  Cyclic GFR-binding peptide
  MOD_RES (5)..(6)..(37): Xaa is C or S
SAAPXXVPQALSNITIQIMVGRKPKVLGEMSMIVRSX

SEQ ID NO: 103265 - protein, 36 aa, Artificial Sequence; identical to SEQ ID NO: 70611
  Cyclic GFR-binding peptide
  MOD_RES (5)..(6): Xaa is C or S

SEQ ID NO: 103266 - protein, 33 aa, Artificial Sequence; identical to SEQ ID NO: 23641
  Cyclic GFR-binding peptide
  MOD_RES (1)..(1): Xaa is C or S

SEQ ID NO: 103267 - protein, 31 aa, Artificial Sequence
  Cyclic GFR-binding peptide
  MOD_RES (30)..(30): Xaa is C or S
SQDLSNITIQIMIGKTPKILGEMSMIVKSXK

SEQ ID NO: 103268 - protein, 26 aa, Artificial Sequence
  Cyclic GFR-binding peptide
LSNITVQIMEIVRKKPIFIGEMSTLE

SEQ ID NO: 103269 - protein, 36 aa, Artificial Sequence; identical to SEQ ID NO: 73802
  Cyclic GFR-binding peptide
  MOD_RES (2)..(3)..(34)..(36): Xaa is C or S

SEQ ID NO: 103270 - protein, 37 aa, Artificial Sequence; identical to SEQ ID NO: 23645
  Cyclic GFR-binding peptide
  MOD_RES (36)..(36): Xaa is C or S

SEQ ID NO: 103271 - protein, 38 aa, Artificial Sequence
  Cyclic GFR-binding peptide
  MOD_RES (3)..(4)..(36)..(38): Xaa is C or S
PTXXVPTRLSNITIQIMDSANNVVLGEMSDMVVESXGX

SEQ ID NO: 103272 - protein, 38 aa, Artificial Sequence; identical to SEQ ID NO: 23647
  Cyclic GFR-binding peptide
  MOD_RES (2)..(2): Xaa is C or S

SEQ ID NO: 103273 - protein, 33 aa, Artificial Sequence; identical to SEQ ID NO: 23650
  Cyclic GFR-binding peptide
  MOD_RES (1)..(1): Xaa is C or S

SEQ ID NO: 103274 - protein, 29 aa, Artificial Sequence
  Cyclic GFR-binding peptide
  MOD_RES (1)..(2): Xaa is C or S
XXVPQALSNITIQIMVGRKPKVIGEMSMI

SEQ ID NO: 103275 - protein, 39 aa, Artificial Sequence; identical to SEQ ID NO: 23651
  Cyclic GFR-binding peptide
  MOD_RES (5)..(5): Xaa is C or S

SEQ ID NO: 103276 - protein, 39 aa, Artificial Sequence
  Cyclic GFR-binding peptide
  MOD_RES (6)..(7)..(39): Xaa is C or S
HVPKPXXAPTKLSNITVQIMDDSSNVIIGEMSNMVVRSX

SEQ ID NO: 103277 - protein, 25 aa, Artificial Sequence
  Cyclic GFR-binding peptide
MSNITMQIMNDKQQIILGEMSGMVV

SEQ ID NO: 103278 - protein, 42 aa, Artificial Sequence; identical to SEQ ID NO: 23653
  Cyclic GFR-binding peptide
  MOD_RES (4)..(41): Xaa is C or S

SEQ ID NO: 103279 - protein, 32 aa, Artificial Sequence
  Cyclic GFR-binding peptide
  MOD_RES (6)..(7): Xaa is C or S
ASASPXXVPQDLSNITIQIMVGRTPKVLGEMS

SEQ ID NO: 103280 - protein, 33 aa, Artificial Sequence; identical to SEQ ID NO: 23655
  Cyclic GFR-binding peptide
  MOD_RES (2)..(2): Xaa is C or S

SEQ ID NO: 103281 - protein, 32 aa, Artificial Sequence; identical to SEQ ID NO: 23657
  Cyclic GFR-binding peptide

SEQ ID NO: 103282 - protein, 38 aa, Artificial Sequence; identical to SEQ ID NO: 23658
  Cyclic GFR-binding peptide
  MOD_RES (5)..(5): Xaa is C or S

SEQ ID NO: 103283 - protein, 30 aa, Artificial Sequence; identical to SEQ ID NO: 23660
  Cyclic GFR-binding peptide

SEQ ID NO: 103284 - protein, 30 aa, Artificial Sequence; identical to SEQ ID NO: 70617
  Cyclic GFR-binding peptide
  MOD_RES (30)..(30): Xaa is C or S

SEQ ID NO: 103285 - protein, 26 aa, Artificial Sequence
  Cyclic GFR-binding peptide
PTGQSNITMQIMRIKPHQGQHIGEMS

SEQ ID NO: 103286 - protein, 24 aa, Artificial Sequence
  Cyclic GFR-binding peptide
SNITIQIMIGKTPKIIGEMSMIVK

SEQ ID NO: 103287 - protein, 33 aa, Artificial Sequence; identical to SEQ ID NO: 70622
  Cyclic GFR-binding peptide
  MOD_RES (30)..(32): Xaa is C or S

SEQ ID NO: 103288 - protein, 34 aa, Artificial Sequence; identical to SEQ ID NO: 73817
  Cyclic GFR-binding peptide
  MOD_RES (1)..(2)..(33): Xaa is C or S

SEQ ID NO: 103289 - protein, 22 aa, Artificial Sequence
  Cyclic GFR-binding peptide
SNITVQIMEIVRKKPIFIGEMS

SEQ ID NO: 103290 - protein, 29 aa, Artificial Sequence
  Cyclic GFR-binding peptide
QPSRVHHSNITVQIMEYVRKKPKLIGEMS

SEQ ID NO: 103291 - protein, 27 aa, Artificial Sequence
  Cyclic GFR-binding peptide
KLSNITVQIMDDSSNVILGEMSNMVVR

SEQ ID NO: 103292 - protein, 25 aa, Artificial Sequence
  Cyclic GFR-binding peptide
TSNITMQIMDNGRVLLIGEMSMIVE

SEQ ID NO: 103293 - protein, 29 aa, Artificial Sequence
  Cyclic GFR-binding peptide
  MOD_RES (1)..(1): Xaa is C or S
XVPTGQSNITMQIMRIKPHQGQHIGEMSL

SEQ ID NO: 103294 - protein, 30 aa, Artificial Sequence
  Cyclic GFR-binding peptide
PTKMSNITMQIMNDKQQIILGEMSGMVVDR

SEQ ID NO: 103295 - protein, 32 aa, Artificial Sequence
  Cyclic GFR-binding peptide
  MOD_RES (1)..(1): Xaa is C or S
XTPTKMSNITMQIMNDKQQIIIGEMSGMVVDR

SEQ ID NO: 103296 - protein, 32 aa, Artificial Sequence
  Cyclic GFR-binding peptide
  MOD_RES (31)..(31): Xaa is C or S
VSQDLSNITIQIMIGKTPKILGEMSMIVKSXK

SEQ ID NO: 103297 - protein, 29 aa, Artificial Sequence
  Cyclic GFR-binding peptide
  MOD_RES (1)..(1): Xaa is C or S
XVPQALSNITIQIMVGRKPKVIGEMSMIV

SEQ ID NO: 103298 - protein, 35 aa, Artificial Sequence; identical to SEQ ID NO: 70634
  Cyclic GFR-binding peptide
  MOD_RES (3)..(4)..(35): Xaa is C or S

SEQ ID NO: 103299 - protein, 28 aa, Artificial Sequence
  Cyclic GFR-binding peptide
  MOD_RES (1)..(2): Xaa is C or S
XXAPTKLSNITVQIMDDSSNVILGEMSN

SEQ ID NO: 103300 - protein, 36 aa, Artificial Sequence; identical to SEQ ID NO: 73829
  Cyclic GFR-binding peptide
  MOD_RES (5)..(6): Xaa is C or S

SEQ ID NO: 103301 - protein, 35 aa, Artificial Sequence
  Cyclic GFR-binding peptide
  MOD_RES (2)..(3)..(34): Xaa is C or S
TXXAPVKTSNITMQIMDNGRVLLIGEMSMIVEEXG

SEQ ID NO: 103302 - protein, 33 aa, Artificial Sequence
  Cyclic GFR-binding peptide
  MOD_RES (2)..(3): Xaa is C or S
TXXAPVKTSNITMQIMDNGRVLLIGEMSMIVEE

SEQ ID NO: 103303 - protein, 28 aa, Artificial Sequence
  Cyclic GFR-binding peptide
GQSNITMQIMRIKPHQGQHIGEMSLEEH

SEQ ID NO: 103304 - protein, 36 aa, Artificial Sequence; identical to SEQ ID NO: 70638
  Cyclic GFR-binding peptide
  MOD_RES (1)..(2)..(34)..(36): Xaa is C or S

SEQ ID NO: 103305 - protein, 30 aa, Artificial Sequence; identical to SEQ ID NO: 23681
  Cyclic GFR-binding peptide

SEQ ID NO: 103306 - protein, 23 aa, Artificial Sequence
  Cyclic GFR-binding peptide
LSNITVQIMDDSSNVIIGEMSNM

SEQ ID NO: 103307 - protein, 25 aa, Artificial Sequence
  Cyclic GFR-binding peptide
SNITIQIMVGRTPKVIGEMSMVVKS

SEQ ID NO: 103308 - protein, 28 aa, Artificial Sequence
  Cyclic GFR-binding peptide
  MOD_RES (27)..(27): Xaa is C or S
TSNITMQIMDNGRVLLIGEMSMIVEEXG

SEQ ID NO: 103309 - protein, 38 aa, Artificial Sequence; identical to SEQ ID NO: 23686
  Cyclic GFR-binding peptide
  MOD_RES (5)..(5): Xaa is C or S

SEQ ID NO: 103310 - protein, 32 aa, Artificial Sequence
  Cyclic GFR-binding peptide
  MOD_RES (5)..(6): Xaa is C or S
TPPTXXVPTRLSNITIQIMDSANNVVIGEMSD

SEQ ID NO: 103311 - protein, 29 aa, Artificial Sequence
  Cyclic GFR-binding peptide
VPTGQSNITMQIMRIKPHQGQHIGEMSLE

SEQ ID NO: 103312 - protein, 37 aa, Artificial Sequence
  Cyclic GFR-binding peptide
  MOD_RES (3)..(4)..(36): Xaa is C or S
PTXXVPTRLSNITIQIMDSANNVVIGEMSDMVVESXG

SEQ ID NO: 103313 - protein, 32 aa, Artificial Sequence
  Cyclic GFR-binding peptide
  MOD_RES (29)..(31): Xaa is C or S
RLSNITIQIMDAANNVVIGEMSDMVVEAXGXR

SEQ ID NO: 103314 - protein, 33 aa, Artificial Sequence
  Cyclic GFR-binding peptide
  MOD_RES (1)..(32): Xaa is C or S
XVPQALSNITIQIMVGRKPKVLGEMSMIVRSXK

SEQ ID NO: 103315 - protein, 23 aa, Artificial Sequence
  Cyclic GFR-binding peptide
LSNITIQIMDSANNVVIGEMSDM

SEQ ID NO: 103316 - protein, 37 aa, Artificial Sequence; identical to SEQ ID NO: 23693
  Cyclic GFR-binding peptide
  MOD_RES (5)..(5): Xaa is C or S

SEQ ID NO: 103317 - protein, 34 aa, Artificial Sequence
  Cyclic GFR-binding peptide
  MOD_RES (2)..(3)..(34): Xaa is C or S
TXXAPVKTSNITMQIMDNGRVLLIGEMSMIVEEX

SEQ ID NO: 103318 - protein, 21 aa, Artificial Sequence
  Cyclic GFR-binding peptide
LSNITIQIMVGRTPKVLGEMS

SEQ ID NO: 103319 - protein, 24 aa, Artificial Sequence
  Cyclic GFR-binding peptide
SQDLSNITIQIMIGKTPKIIGEMS

SEQ ID NO: 103320 - protein, 33 aa, Artificial Sequence
  Cyclic GFR-binding peptide
  MOD_RES (1)..(2): Xaa is C or S
XXTPTKMSNITMQIMNDKQQIILGEMSGMVVDR

SEQ ID NO: 103321 - protein, 39 aa, Artificial Sequence
  Cyclic GFR-binding peptide
  MOD_RES (3)..(4)..(36)..(38): Xaa is C or S
PTXXVPTRLSNITIQIMDSANNVVIGEMSDMVVESXGXR

SEQ ID NO: 103322 - protein, 29 aa, Artificial Sequence
  Cyclic GFR-binding peptide
  MOD_RES (1)..(1): Xaa is C or S
XTPTKMSNITMQIMNDKQQIIIGEMSGMV

SEQ ID NO: 103323 - protein, 37 aa, Artificial Sequence; identical to SEQ ID NO: 70663
  Cyclic GFR-binding peptide
  MOD_RES (2)..(3)..(34)..(36): Xaa is C or S

SEQ ID NO: 103324 - protein, 29 aa, Artificial Sequence
  Cyclic GFR-binding peptide
  MOD_RES (29)..(29): Xaa is C or S
RLSNITIQIMDSANNVVLGEMSDMVVESX

SEQ ID NO: 103325 - protein, 37 aa, Artificial Sequence
  Cyclic GFR-binding peptide
  MOD_RES (1)..(2)..(34)..(36): Xaa is C or S
XXTPTKMSNITMQIMNDKQQIIIGEMSGMVVDRXGXS

SEQ ID NO: 103326 - protein, 34 aa, Artificial Sequence; identical to SEQ ID NO: 23700
  Cyclic GFR-binding peptide

SEQ ID NO: 103327 - protein, 31 aa, Artificial Sequence
  Cyclic GFR-binding peptide
  MOD_RES (5)..(6): Xaa is C or S
SAGPXXTPTKMSNITMQIMNDKQQIIIGEMS

SEQ ID NO: 103328 - protein, 35 aa, Artificial Sequence; identical to SEQ ID NO: 23702
  Cyclic GFR-binding peptide
  MOD_RES (32)..(34): Xaa is C or S

SEQ ID NO: 103329 - protein, 33 aa, Artificial Sequence; identical to SEQ ID NO: 23703
  Cyclic GFR-binding peptide
  MOD_RES (30)..(32): Xaa is C or S

SEQ ID NO: 103330 - protein, 31 aa, Artificial Sequence
  Cyclic GFR-binding peptide
  MOD_RES (30)..(30): Xaa is C or S
TKLSNITVQIMDDSSNVILGEMSNMVVRSXG

SEQ ID NO: 103331 - protein, 26 aa, Artificial Sequence
  Cyclic GFR-binding peptide
HSNITVQIMEYVRKKPKLLGEMSRLE

SEQ ID NO: 103332 - protein, 34 aa, Artificial Sequence; identical to SEQ ID NO: 23711
  Cyclic GFR-binding peptide
  MOD_RES (5)..(5): Xaa is C or S

SEQ ID NO: 103333 - protein, 26 aa, Artificial Sequence
  Cyclic GFR-binding peptide
KTSNITMQIMDNGRVLLLGEMSMIVE

SEQ ID NO: 103334 - protein, 26 aa, Artificial Sequence
  Cyclic GFR-binding peptide
VKTSNITMQIMDNGRVLLLGEMSMIV

SEQ ID NO: 103335 - protein, 27 aa, Artificial Sequence
  Cyclic GFR-binding peptide
  MOD_RES (1)..(2): Xaa is C or S
XXVSQDLSNITIQIMIGKTPKILGEMS

SEQ ID NO: 103336 - protein, 34 aa, Artificial Sequence; identical to SEQ ID NO: 23714
  Cyclic GFR-binding peptide
  MOD_RES (2)..(2): Xaa is C or S

SEQ ID NO: 103337 - protein, 28 aa, Artificial Sequence
  Cyclic GFR-binding peptide
  MOD_RES (26)..(28): Xaa is C or S
SNITIQIMVGRKPKVLGEMSMIVRSXKX

SEQ ID NO: 103338 - protein, 30 aa, Artificial Sequence
  Cyclic GFR-binding peptide
  MOD_RES (2)..(3): Xaa is C or S
TXXAPVKTSNITMQIMDNGRVLLLGEMSMI

SEQ ID NO: 103339 - protein, 40 aa, Artificial Sequence; identical to SEQ ID NO: 23716
  Cyclic GFR-binding peptide
  MOD_RES (3)..(40): Xaa is C or S

SEQ ID NO: 103340 - protein, 41 aa, Artificial Sequence
  Cyclic GFR-binding peptide
  MOD_RES (5)..(6)..(38)..(40): Xaa is C or S
VPKPXXAPTKLSNITVQIMDDSSNVILGEMSNMVVRSXGXH

SEQ ID NO: 103341 - protein, 33 aa, Artificial Sequence
  Cyclic GFR-binding peptide
  MOD_RES (1)..(33): Xaa is C or S
XVPTRLSNITIQIMDSANNVVIGEMSDMVVESX

SEQ ID NO: 103342 - protein, 39 aa, Artificial Sequence
  Cyclic GFR-binding peptide
  MOD_RES (4)..(5)..(36)..(38): Xaa is C or S
PSTXXAPVKTSNITMQIMDNGRVLLLGEMSMIVEEXGXL

SEQ ID NO: 103343 - protein, 33 aa, Artificial Sequence
  Cyclic GFR-binding peptide
  MOD_RES (4)..(5): Xaa is C or S
PSTXXAPVKTSNITMQIMDNGRVLLIGEMSMIV

SEQ ID NO: 103344 - protein, 32 aa, Artificial Sequence
  Cyclic GFR-binding peptide
  MOD_RES (29)..(31): Xaa is C or S
RLSNITIQIMDSANNVVIGEMSDMVVESXGXR

SEQ ID NO: 103345 - protein, 32 aa, Artificial Sequence
  Cyclic GFR-binding peptide
  MOD_RES (6)..(7): Xaa is C or S
RVPSTXXAPVKTSNITMQIMDNGRVLLLGEMS

SEQ ID NO: 103346 - protein, 35 aa, Artificial Sequence
  Cyclic GFR-binding peptide
  MOD_RES (2)..(3)..(35): Xaa is C or S
PXXAPTKLSNITVQIMDDSSNVILGEMSNMVVRSX

SEQ ID NO: 103347 - protein, 34 aa, Artificial Sequence
  Cyclic GFR-binding peptide
  MOD_RES (4)..(5): Xaa is C or S
PASXXVPARLSNITIQIMDAANNVVIGEMSDMVV

SEQ ID NO: 103348 - protein, 27 aa, Artificial Sequence
  Cyclic GFR-binding peptide
SRVHHSNITVQIMEYVRKKPKLLGEMS

SEQ ID NO: 103349 - protein, 27 aa, Artificial Sequence
  Cyclic GFR-binding peptide
  MOD_RES (26)..(26): Xaa is C or S
SNITIQIMVGRTPKVLGEMSMVVKSXK

SEQ ID NO: 103350 - protein, 30 aa, Artificial Sequence; identical to SEQ ID NO: 23726
  Cyclic GFR-binding peptide
  MOD_RES (30)..(30): Xaa is C or S

SEQ ID NO: 103351 - protein, 26 aa, Artificial Sequence
  Cyclic GFR-binding peptide
QDLSNITIQIMIGKTPKILGEMSMIV

SEQ ID NO: 103352 - protein, 33 aa, Artificial Sequence
  Cyclic GFR-binding peptide
  MOD_RES (5)..(6): Xaa is C or S
SASPXXVSQDLSNITIQIMIGKTPKILGEMSMI

SEQ ID NO: 103353 - protein, 30 aa, Artificial Sequence; identical to SEQ ID NO: 23731
  Cyclic GFR-binding peptide
  MOD_RES (30)..(30): Xaa is C or S

SEQ ID NO: 103354 - protein, 38 aa, Artificial Sequence
  Cyclic GFR-binding peptide
  MOD_RES (6)..(7): Xaa is C or S
AAPASXXVPARLSNITIQIMDAANNVVIGEMSDMVVEA

SEQ ID NO: 103355 - protein, 36 aa, Artificial Sequence
  Cyclic GFR-binding peptide
  MOD_RES (5)..(6): Xaa is C or S
APASXXVPARLSNITIQIMDAANNVVIGEMSDMVVE

SEQ ID NO: 103356 - protein, 29 aa, Artificial Sequence
  Cyclic GFR-binding peptide
  MOD_RES (2)..(3): Xaa is C or S
PXXTPTKMSNITMQIMNDKQQIIIGEMSG

SEQ ID NO: 103357 - protein, 33 aa, Artificial Sequence
  Cyclic GFR-binding peptide
  MOD_RES (2)..(3): Xaa is C or S
PXXTPTKMSNITMQIMNDKQQIILGEMSGMVVD

SEQ ID NO: 103358 - protein, 29 aa, Artificial Sequence
  Cyclic GFR-binding peptide
VQLSNITVQIMEIVRKKPIFIGEMSTLED

SEQ ID NO: 103359 - protein, 39 aa, Artificial Sequence; identical to SEQ ID NO: 23742
  Cyclic GFR-binding peptide
  MOD_RES (37)..(39): Xaa is C or S

SEQ ID NO: 103360 - protein, 31 aa, Artificial Sequence; identical to SEQ ID NO: 23743
  Cyclic GFR-binding peptide
  MOD_RES (3)..(3): Xaa is C or S

SEQ ID NO: 103361 - protein, 24 aa, Artificial Sequence
  Cyclic GFR-binding peptide
KMSNITMQIMNDKQQIILGEMSGM

SEQ ID NO: 103362 - protein, 32 aa, Artificial Sequence; identical to SEQ ID NO: 23746
  Cyclic GFR-binding peptide

SEQ ID NO: 103363 - protein, 24 aa, Artificial Sequence
  Cyclic GFR-binding peptide
LSNITIQIMDSANNVVIGEMSDMV

SEQ ID NO: 103364 - protein, 39 aa, Artificial Sequence
  Cyclic GFR-binding peptide
  MOD_RES (4)..(5)..(37)..(39): Xaa is C or S
PASXXVPARLSNITIQIMDAANNVVLGEMSDMVVEAXGX

SEQ ID NO: 103365 - protein, 33 aa, Artificial Sequence
  Cyclic GFR-binding peptide
  MOD_RES (5)..(6): Xaa is C or S
SASPXXVPQDLSNITIQIMVGRTPKVLGEMSMV

SEQ ID NO: 103366 - protein, 35 aa, Artificial Sequence; identical to SEQ ID NO: 23756
  Cyclic GFR-binding peptide
  MOD_RES (5)..(5): Xaa is C or S

SEQ ID NO: 103367 - protein, 26 aa, Artificial Sequence
  Cyclic GFR-binding peptide
VPQDLSNITIQIMVGRTPKVLGEMSM

SEQ ID NO: 103368 - protein, 38 aa, Artificial Sequence; identical to SEQ ID NO: 70706
  Cyclic GFR-binding peptide
  MOD_RES (6)..(7)..(38): Xaa is C or S

SEQ ID NO: 103369 - protein, 30 aa, Artificial Sequence; identical to SEQ ID NO: 23759
  Cyclic GFR-binding peptide
  MOD_RES (1)..(1): Xaa is C or S

SEQ ID NO: 103370 - protein, 30 aa, Artificial Sequence; identical to SEQ ID NO: 23761
  Cyclic GFR-binding peptide

SEQ ID NO: 103371 - protein, 30 aa, Artificial Sequence; identical to SEQ ID NO: 23762
  Cyclic GFR-binding peptide
  MOD_RES (1)..(1): Xaa is C or S

SEQ ID NO: 103372 - protein, 32 aa, Artificial Sequence; identical to SEQ ID NO: 73915
  Cyclic GFR-binding peptide
  MOD_RES (2)..(3): Xaa is C or S

SEQ ID NO: 103373 - protein, 22 aa, Artificial Sequence
  Cyclic GFR-binding peptide
MSNITMQIMNDKQQIILGEMSG

SEQ ID NO: 103374 - protein, 39 aa, Artificial Sequence; identical to SEQ ID NO: 23765
  Cyclic GFR-binding peptide
  MOD_RES (5)..(5): Xaa is C or S

SEQ ID NO: 103375 - protein, 41 aa, Artificial Sequence; identical to SEQ ID NO: 23767
  Cyclic GFR-binding peptide
  MOD_RES (6)..(40): Xaa is C or S

SEQ ID NO: 103376 - protein, 32 aa, Artificial Sequence
  Cyclic GFR-binding peptide
  MOD_RES (1)..(2): Xaa is C or S
XXTPTKMSNITMQIMNDKQQIIIGEMSGMVVD

SEQ ID NO: 103377 - protein, 34 aa, Artificial Sequence
  Cyclic GFR-binding peptide
  MOD_RES (1)..(2)..(33): Xaa is C or S
XXVPQALSNITIQIMVGRKPKVLGEMSMIVRSXK

SEQ ID NO: 103378 - protein, 36 aa, Artificial Sequence
  Cyclic GFR-binding peptide
  MOD_RES (1)..(2)..(34)..(36): Xaa is C or S
XXTPTKMSNITMQIMNDKQQIIIGEMSGMVVDRXGX

SEQ ID NO: 103379 - protein, 27 aa, Artificial Sequence
  Cyclic GFR-binding peptide
  MOD_RES (27)..(27): Xaa is C or S
SNITVQIMDDSSNVILGEMSNMVVRSX

SEQ ID NO: 103380 - protein, 34 aa, Artificial Sequence
  Cyclic GFR-binding peptide
  MOD_RES (6)..(7): Xaa is C or S
STPPTXXVPTRLSNITIQIMDSANNVVIGEMSDM

SEQ ID NO: 103381 - protein, 23 aa, Artificial Sequence
  Cyclic GFR-binding peptide
SNITIQIMVGRTPKVIGEMSMVV

SEQ ID NO: 103382 - protein, 29 aa, Artificial Sequence
  Cyclic GFR-binding peptide
  MOD_RES (29)..(29): Xaa is C or S
KMSNITMQIMNDKQQIILGEMSGMVVDRX

SEQ ID NO: 103383 - protein, 34 aa, Artificial Sequence
  Cyclic GFR-binding peptide
  MOD_RES (31)..(33): Xaa is C or S
PTRLSNITIQIMDSANNVVLGEMSDMVVESXGXR

SEQ ID NO: 103384 - protein, 35 aa, Artificial Sequence
  Cyclic GFR-binding peptide
  MOD_RES (1)..(32)..(34): Xaa is C or S
XVPQDLSNITIQIMVGRTPKVLGEMSMVVKSXKXS

SEQ ID NO: 103385 - protein, 41 aa, Artificial Sequence
  Cyclic GFR-binding peptide
  MOD_RES (6)..(7)..(39)..(41): Xaa is C or S
HVPKPXXAPTKLSNITVQIMDDSSNVIIGEMSNMVVRSXGX

SEQ ID NO: 103386 - protein, 42 aa, Artificial Sequence; identical to SEQ ID NO: 23780
  Cyclic GFR-binding peptide
  MOD_RES (6)..(40)..(42): Xaa is C or S

SEQ ID NO: 103387 - protein, 38 aa, Artificial Sequence; identical to SEQ ID NO: 23781
  Cyclic GFR-binding peptide
  MOD_RES (4)..(4): Xaa is C or S

SEQ ID NO: 103388 - protein, 23 aa, Artificial Sequence
  Cyclic GFR-binding peptide
QSNITMQIMRIKPHQGQHIGEMS

SEQ ID NO: 103389 - protein, 33 aa, Artificial Sequence; identical to SEQ ID NO: 23783
  Cyclic GFR-binding peptide
  MOD_RES (3)..(3): Xaa is C or S

SEQ ID NO: 103390 - protein, 31 aa, Artificial Sequence; identical to SEQ ID NO: 23788
  Cyclic GFR-binding peptide

SEQ ID NO: 103391 - protein, 36 aa, Artificial Sequence
  Cyclic GFR-binding peptide
  MOD_RES (3)..(4)..(35): Xaa is C or S
APXXVPQALSNITIQIMVGRKPKVLGEMSMIVRSXK

SEQ ID NO: 103392 - protein, 30 aa, Artificial Sequence; identical to SEQ ID NO: 70734
  Cyclic GFR-binding peptide
  MOD_RES (29)..(29): Xaa is C or S

SEQ ID NO: 103393 - protein, 31 aa, Artificial Sequence; identical to SEQ ID NO: 73929
  Cyclic GFR-binding peptide
  MOD_RES (28)..(30): Xaa is C or S

SEQ ID NO: 103394 - protein, 32 aa, Artificial Sequence; identical to SEQ ID NO: 70738
  Cyclic GFR-binding peptide
  MOD_RES (6)..(7): Xaa is C or S

SEQ ID NO: 103395 - protein, 30 aa, Artificial Sequence
  Cyclic GFR-binding peptide
  MOD_RES (2)..(3): Xaa is C or S
PXXVSQDLSNITIQIMIGKTPKILGEMSMI

SEQ ID NO: 103396 - protein, 35 aa, Artificial Sequence
  Cyclic GFR-binding peptide
  MOD_RES (5)..(6): Xaa is C or S
SAGPXXTPTKMSNITMQIMNDKQQIIIGEMSGMVV

SEQ ID NO: 103397 - protein, 33 aa, Artificial Sequence; identical to SEQ ID NO: 23792
  Cyclic GFR-binding peptide
  MOD_RES (31)..(33): Xaa is C or S

SEQ ID NO: 103398 - protein, 33 aa, Artificial Sequence; identical to SEQ ID NO: 73938
  Cyclic GFR-binding peptide
  MOD_RES (2)..(3): Xaa is C or S

SEQ ID NO: 103399 - protein, 41 aa, Artificial Sequence; identical to SEQ ID NO: 23796
  Cyclic GFR-binding peptide
  MOD_RES (4)..(38)..(40): Xaa is C or S

SEQ ID NO: 103400 - protein, 23 aa, Artificial Sequence
  Cyclic GFR-binding peptide
LSNITIQIMVGRTPKVLGEMSMV

SEQ ID NO: 103401 - protein, 30 aa, Artificial Sequence; identical to SEQ ID NO: 23797
  Cyclic GFR-binding peptide

SEQ ID NO: 103402 - protein, 29 aa, Artificial Sequence
  Cyclic GFR-binding peptide
  MOD_RES (26)..(28): Xaa is C or S
SNITIQIMVGRTPKVIGEMSMVVKSXKXS

SEQ ID NO: 103403 - protein, 26 aa, Artificial Sequence
  Cyclic GFR-binding peptide
DLSNITIQIMVGRTPKVIGEMSMVVK

SEQ ID NO: 103404 - protein, 37 aa, Artificial Sequence; identical to SEQ ID NO: 23799
  Cyclic GFR-binding peptide
  MOD_RES (4)..(4): Xaa is C or S

SEQ ID NO: 103405 - protein, 42 aa, Artificial Sequence; identical to SEQ ID NO: 23804
  Cyclic GFR-binding peptide
  MOD_RES (2)..(39)..(41): Xaa is C or S

SEQ ID NO: 103406 - protein, 35 aa, Artificial Sequence
  Cyclic GFR-binding peptide
  MOD_RES (4)..(5): Xaa is C or S
PKPXXAPTKLSNITVQIMDDSSNVILGEMSNMVVR

SEQ ID NO: 103407 - protein, 30 aa, Artificial Sequence
  Cyclic GFR-binding peptide
  MOD_RES (1)..(2): Xaa is C or S
XXVPARLSNITIQIMDAANNVVIGEMSDMV

SEQ ID NO: 103408 - protein, 23 aa, Artificial Sequence
  Cyclic GFR-binding peptide
SNITVQIMEIVRKKPIFLGEMST

SEQ ID NO: 103409 - protein, 36 aa, Artificial Sequence; identical to SEQ ID NO: 73950
  Cyclic GFR-binding peptide
  MOD_RES (3)..(4)..(35): Xaa is C or S

SEQ ID NO: 103410 - protein, 34 aa, Artificial Sequence
  Cyclic GFR-binding peptide
  MOD_RES (31)..(33): Xaa is C or S
PARLSNITIQIMDAANNVVLGEMSDMVVEAXGXR

SEQ ID NO: 103411 - protein, 31 aa, Artificial Sequence; identical to SEQ ID NO: 23809
  Cyclic GFR-binding peptide
  MOD_RES (2)..(2): Xaa is C or S

SEQ ID NO: 103412 - protein, 34 aa, Artificial Sequence
  Cyclic GFR-binding peptide
  MOD_RES (31)..(33): Xaa is C or S
PARLSNITIQIMDAANNVVIGEMSDMVVEAXGXR

SEQ ID NO: 103413 - protein, 27 aa, Artificial Sequence
  Cyclic GFR-binding peptide
ALSNITIQIMVGRKPKVLGEMSMIVRS

SEQ ID NO: 103414 - protein, 31 aa, Artificial Sequence; identical to SEQ ID NO: 70756
  Cyclic GFR-binding peptide
  MOD_RES (2)..(3): Xaa is C or S

SEQ ID NO: 103415 - protein, 27 aa, Artificial Sequence
  Cyclic GFR-binding peptide
LSNITIQIMDAANNVVLGEMSDMVVEA

SEQ ID NO: 103416 - protein, 39 aa, Artificial Sequence; identical to SEQ ID NO: 23820
  Cyclic GFR-binding peptide
  MOD_RES (1)..(38): Xaa is C or S

SEQ ID NO: 103417 - protein, 43 aa, Artificial Sequence; identical to SEQ ID NO: 23823
  Cyclic GFR-binding peptide
  MOD_RES (3)..(40)..(42): Xaa is C or S

SEQ ID NO: 103418 - protein, 24 aa, Artificial Sequence
  Cyclic GFR-binding peptide
QSNITMQIMRIKPHQGQHIGEMSL

SEQ ID NO: 103419 - protein, 34 aa, Artificial Sequence
  Cyclic GFR-binding peptide
  MOD_RES (3)..(4): Xaa is C or S
PTXXVPTRLSNITIQIMDSANNVVIGEMSDMVVE

SEQ ID NO: 103420 - protein, 32 aa, Artificial Sequence; identical to SEQ ID NO: 23826
  Cyclic GFR-binding peptide
  MOD_RES (31)..(31): Xaa is C or S

SEQ ID NO: 103421 - protein, 30 aa, Artificial Sequence; identical to SEQ ID NO: 70769
  Cyclic GFR-binding peptide
  MOD_RES (1)..(1): Xaa is C or S

SEQ ID NO: 103422 - protein, 39 aa, Artificial Sequence
  Cyclic GFR-binding peptide
  MOD_RES (6)..(7)..(38): Xaa is C or S
RVPSTXXAPVKTSNITMQIMDNGRVLLIGEMSMIVEEXG

SEQ ID NO: 103423 - protein, 33 aa, Artificial Sequence; identical to SEQ ID NO: 23828
  Cyclic GFR-binding peptide
  MOD_RES (3)..(3): Xaa is C or S

SEQ ID NO: 103424 - protein, 37 aa, Artificial Sequence
  Cyclic GFR-binding peptide
  MOD_RES (5)..(6): Xaa is C or S
TPPTXXVPTRLSNITIQIMDSANNVVIGEMSDMVVES

SEQ ID NO: 103425 - protein, 39 aa, Artificial Sequence; identical to SEQ ID NO: 23830
  Cyclic GFR-binding peptide
  MOD_RES (4)..(4): Xaa is C or S

SEQ ID NO: 103426 - protein, 36 aa, Artificial Sequence
  Cyclic GFR-binding peptide
  MOD_RES (2)..(3)..(35): Xaa is C or S
SXXVPARLSNITIQIMDAANNVVLGEMSDMVVEAXG

SEQ ID NO: 103427 - protein, 31 aa, Artificial Sequence
  Cyclic GFR-binding peptide
  MOD_RES (1)..(1): Xaa is C or S
XAPTKLSNITVQIMDDSSNVILGEMSNMVVR

SEQ ID NO: 103428 - protein, 38 aa, Artificial Sequence; identical to SEQ ID NO: 23834
  Cyclic GFR-binding peptide
  MOD_RES (37)..(37): Xaa is C or S

SEQ ID NO: 103429 - protein, 31 aa, Artificial Sequence; identical to SEQ ID NO: 23842
  Cyclic GFR-binding peptide

SEQ ID NO: 103430 - protein, 40 aa, Artificial Sequence; identical to SEQ ID NO: 23845
  Cyclic GFR-binding peptide
  MOD_RES (3)..(40): Xaa is C or S

SEQ ID NO: 103431 - protein, 32 aa, Artificial Sequence; identical to SEQ ID NO: 73980
  Cyclic GFR-binding peptide
  MOD_RES (1)..(2): Xaa is C or S

SEQ ID NO: 103432 - protein, 29 aa, Artificial Sequence
  Cyclic GFR-binding peptide
QLSNITVQIMEIVRKKPIFIGEMSTLEDH

SEQ ID NO: 103433 - protein, 27 aa, Artificial Sequence
  Cyclic GFR-binding peptide
EESNITMQIMRIKPHQGQHLGEMSFLQ

SEQ ID NO: 103434 - protein, 36 aa, Artificial Sequence
  Cyclic GFR-binding peptide
  MOD_RES (5)..(6): Xaa is C or S
TPPTXXVPTRLSNITIQIMDSANNVVLGEMSDMVVE

SEQ ID NO: 103435 - protein, 25 aa, Artificial Sequence
  Cyclic GFR-binding peptide
LSNITVQIMEIVRKKPIFLGEMSTL

SEQ ID NO: 103436 - protein, 37 aa, Artificial Sequence; identical to SEQ ID NO: 23850
  Cyclic GFR-binding peptide
  MOD_RES (1)..(35)..(37): Xaa is C or S

SEQ ID NO: 103437 - protein, 36 aa, Artificial Sequence; identical to SEQ ID NO: 73983
  Cyclic GFR-binding peptide
  MOD_RES (4)..(5): Xaa is C or S

SEQ ID NO: 103438 - protein, 25 aa, Artificial Sequence
  Cyclic GFR-binding peptide
SNITIQIMDAANNVVLGEMSDMVVE

SEQ ID NO: 103439 - protein, 31 aa, Artificial Sequence
  Cyclic GFR-binding peptide
  MOD_RES (3)..(4): Xaa is C or S
SPXXVSQDLSNITIQIMIGKTPKILGEMSMI

SEQ ID NO: 103440 - protein, 32 aa, Artificial Sequence
  Cyclic GFR-binding peptide
  MOD_RES (1)..(1): Xaa is C or S
XTPTKMSNITMQIMNDKQQIILGEMSGMVVDR

SEQ ID NO: 103441 - protein, 30 aa, Artificial Sequence
  Cyclic GFR-binding peptide
PTKMSNITMQIMNDKQQIIIGEMSGMVVDR

SEQ ID NO: 103442 - protein, 29 aa, Artificial Sequence
  Cyclic GFR-binding peptide
PQDLSNITIQIMVGRTPKVIGEMSMVVKS

SEQ ID NO: 103443 - protein, 33 aa, Artificial Sequence; identical to SEQ ID NO: 73987
  Cyclic GFR-binding peptide
  MOD_RES (2)..(3): Xaa is C or S

SEQ ID NO: 103444 - protein, 35 aa, Artificial Sequence
  Cyclic GFR-binding peptide
  MOD_RES (6)..(7): Xaa is C or S
STPPTXXVPTRLSNITIQIMDSANNVVIGEMSDMV

SEQ ID NO: 103445 - protein, 34 aa, Artificial Sequence
  Cyclic GFR-binding peptide
  MOD_RES (32)..(34): Xaa is C or S
TPTKMSNITMQIMNDKQQIILGEMSGMVVDRXGX

SEQ ID NO: 103446 - protein, 26 aa, Artificial Sequence
  Cyclic GFR-binding peptide
QLSNITVQIMEIVRKKPIFLGEMSTL

SEQ ID NO: 103447 - protein, 39 aa, Artificial Sequence; identical to SEQ ID NO: 70789
  Cyclic GFR-binding peptide
  MOD_RES (6)..(7)..(38): Xaa is C or S

SEQ ID NO: 103448 - protein, 39 aa, Artificial Sequence; identical to SEQ ID NO: 23859
  Cyclic GFR-binding peptide
  MOD_RES (37)..(39): Xaa is C or S

SEQ ID NO: 103449 - protein, 37 aa, Artificial Sequence
  Cyclic GFR-binding peptide
  MOD_RES (2)..(3)..(35)..(37): Xaa is C or S
TXXVPTRLSNITIQIMDSANNVVIGEMSDMVVESXGX

SEQ ID NO: 103450 - protein, 44 aa, Artificial Sequence; identical to SEQ ID NO: 23864
  Cyclic GFR-binding peptide
  MOD_RES (5)..(42)..(44): Xaa is C or S

SEQ ID NO: 103451 - protein, 38 aa, Artificial Sequence
  Cyclic GFR-binding peptide
  MOD_RES (5)..(6)..(38): Xaa is C or S
APASXXVPARLSNITIQIMDAANNVVLGEMSDMVVEAX

SEQ ID NO: 103452 - protein, 34 aa, Artificial Sequence
  Cyclic GFR-binding peptide
  MOD_RES (3)..(4): Xaa is C or S
ASXXVPARLSNITIQIMDAANNVVIGEMSDMVVE

SEQ ID NO: 103453 - protein, 27 aa, Artificial Sequence
  Cyclic GFR-binding peptide
PTRLSNITIQIMDSANNVVLGEMSDMV

SEQ ID NO: 103454 - protein, 30 aa, Artificial Sequence
  Cyclic GFR-binding peptide
  MOD_RES (4)..(5): Xaa is C or S
PSTXXAPVKTSNITMQIMDNGRVLLIGEMS

SEQ ID NO: 103455 - protein, 22 aa, Artificial Sequence
  Cyclic GFR-binding peptide
SNITIQIMVGRTPKVLGEMSMV

SEQ ID NO: 103456 - protein, 33 aa, Artificial Sequence; identical to SEQ ID NO: 70794
  Cyclic GFR-binding peptide
  MOD_RES (3)..(4): Xaa is C or S

SEQ ID NO: 103457 - protein, 31 aa, Artificial Sequence; identical to SEQ ID NO: 70795
  Cyclic GFR-binding peptide
  MOD_RES (31)..(31): Xaa is C or S

SEQ ID NO: 103458 - protein, 39 aa, Artificial Sequence; identical to SEQ ID NO: 23870
  Cyclic GFR-binding peptide
  MOD_RES (36)..(38): Xaa is C or S

SEQ ID NO: 103459 - protein, 31 aa, Artificial Sequence; identical to SEQ ID NO: 23871
  Cyclic GFR-binding peptide

SEQ ID NO: 103460 - protein, 27 aa, Artificial Sequence
  Cyclic GFR-binding peptide
  MOD_RES (1)..(2): Xaa is C or S
XXVSQDLSNITIQIMIGKTPKIIGEMS

SEQ ID NO: 103461 - protein, 29 aa, Artificial Sequence
  Cyclic GFR-binding peptide
PTKMSNITMQIMNDKQQIIIGEMSGMVVD

SEQ ID NO: 103462 - protein, 29 aa, Artificial Sequence
  Cyclic GFR-binding peptide
  MOD_RES (1)..(2): Xaa is C or S
XXVPARLSNITIQIMDAANNVVIGEMSDM

SEQ ID NO: 103463 - protein, 34 aa, Artificial Sequence
  Cyclic GFR-binding peptide
  MOD_RES (6)..(7): Xaa is C or S
AAPASXXVPARLSNITIQIMDAANNVVLGEMSDM

SEQ ID NO: 103464 - protein, 34 aa, Artificial Sequence; identical to SEQ ID NO: 23875
  Cyclic GFR-binding peptide
  MOD_RES (1)..(1): Xaa is C or S

SEQ ID NO: 103465 - protein, 32 aa, Artificial Sequence; identical to SEQ ID NO: 23876
  Cyclic GFR-binding peptide
  MOD_RES (1)..(1): Xaa is C or S

SEQ ID NO: 103466 - protein, 24 aa, Artificial Sequence
  Cyclic GFR-binding peptide
PQDLSNITIQIMVGRTPKVIGEMS

SEQ ID NO: 103467 - protein, 24 aa, Artificial Sequence
  Cyclic GFR-binding peptide
ARLSNITIQIMDAANNVVIGEMSD

SEQ ID NO: 103468 - protein, 26 aa, Artificial Sequence
  Cyclic GFR-binding peptide
SNITMQIMNDKQQIIIGEMSGMVVDR

SEQ ID NO: 103469 - protein, 36 aa, Artificial Sequence; identical to SEQ ID NO: 70807
  Cyclic GFR-binding peptide
  MOD_RES (4)..(5)..(36): Xaa is C or S

SEQ ID NO: 103470 - protein, 39 aa, Artificial Sequence; identical to SEQ ID NO: 70808
  Cyclic GFR-binding peptide
  MOD_RES (4)..(5)..(36)..(38): Xaa is C or S

SEQ ID NO: 103471 - protein, 30 aa, Artificial Sequence; identical to SEQ ID NO: 23881
  Cyclic GFR-binding peptide
  MOD_RES (3)..(3): Xaa is C or S

SEQ ID NO: 103472 - protein, 36 aa, Artificial Sequence; identical to SEQ ID NO: 74010
  Cyclic GFR-binding peptide
  MOD_RES (2)..(3)..(35): Xaa is C or S

SEQ ID NO: 103473 - protein, 34 aa, Artificial Sequence
  Cyclic GFR-binding peptide
  MOD_RES (1)..(33): Xaa is C or S
XAPTKLSNITVQIMDDSSNVILGEMSNMVVRSXG

SEQ ID NO: 103474 - protein, 31 aa, Artificial Sequence
  Cyclic GFR-binding peptide
  MOD_RES (2)..(3): Xaa is C or S
PXXAPTKLSNITVQIMDDSSNVILGEMSNMV

SEQ ID NO: 103475 - protein, 35 aa, Artificial Sequence; identical to SEQ ID NO: 23885
  Cyclic GFR-binding peptide
  MOD_RES (32)..(34): Xaa is C or S

SEQ ID NO: 103476 - protein, 36 aa, Artificial Sequence
  Cyclic GFR-binding peptide
  MOD_RES (2)..(3)..(34)..(36): Xaa is C or S
PXXVPQALSNITIQIMVGRKPKVLGEMSMIVRSXKX

SEQ ID NO: 103477 - protein, 33 aa, Artificial Sequence
  Cyclic GFR-binding peptide
  MOD_RES (3)..(4): Xaa is C or S
KPXXAPTKLSNITVQIMDDSSNVILGEMSNMVV

SEQ ID NO: 103478 - protein, 29 aa, Artificial Sequence
  Cyclic GFR-binding peptide
  MOD_RES (27)..(29): Xaa is C or S
LSNITIQIMVGRTPKVLGEMSMVVKSXKX

SEQ ID NO: 103479 - protein, 32 aa, Artificial Sequence
  Cyclic GFR-binding peptide
  MOD_RES (4)..(5): Xaa is C or S
PSTXXAPVKTSNITMQIMDNGRVLLIGEMSMI

SEQ ID NO: 103480 - protein, 28 aa, Artificial Sequence
  Cyclic GFR-binding peptide
  MOD_RES (1)..(1): Xaa is C or S
XVPTRLSNITIQIMDSANNVVIGEMSDM

SEQ ID NO: 103481 - protein, 31 aa, Artificial Sequence
  Cyclic GFR-binding peptide
  MOD_RES (5)..(6): Xaa is C or S
SAGPXXTPTKMSNITMQIMNDKQQIILGEMS

SEQ ID NO: 103482 - protein, 35 aa, Artificial Sequence
  Cyclic GFR-binding peptide
  MOD_RES (32)..(34): Xaa is C or S
TPTKMSNITMQIMNDKQQIIIGEMSGMVVDRXGXS

SEQ ID NO: 103483 - protein, 25 aa, Artificial Sequence
  Cyclic GFR-binding peptide
QLSNITVQIMEIVRKKPIFIGEMST

SEQ ID NO: 103484 - protein, 24 aa, Artificial Sequence
  Cyclic GFR-binding peptide
TKLSNITVQIMDDSSNVILGEMSN

SEQ ID NO: 103485 - protein, 29 aa, Artificial Sequence
  Cyclic GFR-binding peptide
  MOD_RES (29)..(29): Xaa is C or S
QDLSNITIQIMVGRTPKVIGEMSMVVKSX

SEQ ID NO: 103486 - protein, 33 aa, Artificial Sequence
  Cyclic GFR-binding peptide
  MOD_RES (6)..(7): Xaa is C or S
HVPKPXXAPTKLSNITVQIMDDSSNVIIGEMSN

SEQ ID NO: 103487 - protein, 36 aa, Artificial Sequence
  Cyclic GFR-binding peptide
  MOD_RES (6)..(7): Xaa is C or S
ASASPXXVPQDLSNITIQIMVGRTPKVLGEMSMVVK

SEQ ID NO: 103488 - protein, 31 aa, Artificial Sequence
  Cyclic GFR-binding peptide
  MOD_RES (1)..(1): Xaa is C or S
XVSQDLSNITIQIMIGKTPKILGEMSMIVKS

SEQ ID NO: 103489 - protein, 35 aa, Artificial Sequence
  Cyclic GFR-binding peptide
  MOD_RES (2)..(3)..(35): Xaa is C or S
SXXVPARLSNITIQIMDAANNVVLGEMSDMVVEAX

SEQ ID NO: 103490 - protein, 35 aa, Artificial Sequence
  Cyclic GFR-binding peptide
  MOD_RES (5)..(6): Xaa is C or S
TPPTXXVPTRLSNITIQIMDSANNVVLGEMSDMVV

SEQ ID NO: 103491 - protein, 34 aa, Artificial Sequence
  Cyclic GFR-binding peptide
  MOD_RES (2)..(3)..(34): Xaa is C or S
PXXVPQALSNITIQIMVGRKPKVLGEMSMIVRSX

SEQ ID NO: 103492 - protein, 39 aa, Artificial Sequence; identical to SEQ ID NO: 23894
  Cyclic GFR-binding peptide
  MOD_RES (7)..(7): Xaa is C or S

SEQ ID NO: 103493 - protein, 36 aa, Artificial Sequence; identical to SEQ ID NO: 23895
  Cyclic GFR-binding peptide
  MOD_RES (1)..(35): Xaa is C or S

SEQ ID NO: 103494 - protein, 22 aa, Artificial Sequence
  Cyclic GFR-binding peptide
SNITIQIMIGKTPKIIGEMSMI

SEQ ID NO: 103495 - protein, 36 aa, Artificial Sequence
  Cyclic GFR-binding peptide
  MOD_RES (5)..(6): Xaa is C or S
TPPTXXVPTRLSNITIQIMDSANNVVIGEMSDMVVE

SEQ ID NO: 103496 - protein, 34 aa, Artificial Sequence; identical to SEQ ID NO: 70828
  Cyclic GFR-binding peptide
  MOD_RES (5)..(6): Xaa is C or S

SEQ ID NO: 103497 - protein, 28 aa, Artificial Sequence
  Cyclic GFR-binding peptide
SNITVQIMEIVRKKPIFLGEMSTLEDHL

SEQ ID NO: 103498 - protein, 37 aa, Artificial Sequence
  Cyclic GFR-binding peptide
  MOD_RES (6)..(7): Xaa is C or S
HVPKPXXAPTKLSNITVQIMDDSSNVIIGEMSNMVVR

SEQ ID NO: 103499 - protein, 37 aa, Artificial Sequence; identical to SEQ ID NO: 74022
  Cyclic GFR-binding peptide
  MOD_RES (2)..(3)..(34)..(36): Xaa is C or S

SEQ ID NO: 103500 - protein, 34 aa, Artificial Sequence
  Cyclic GFR-binding peptide
  MOD_RES (4)..(5): Xaa is C or S
AAPXXVPQALSNITIQIMVGRKPKVLGEMSMIVR

SEQ ID NO: 103501 - protein, 32 aa, Artificial Sequence
  Cyclic GFR-binding peptide
  MOD_RES (29)..(31): Xaa is C or S
KMSNITMQIMNDKQQIIIGEMSGMVVDRXGXS

SEQ ID NO: 103502 - protein, 35 aa, Artificial Sequence; identical to SEQ ID NO: 74024
  Cyclic GFR-binding peptide
  MOD_RES (5)..(6): Xaa is C or S

SEQ ID NO: 103503 - protein, 24 aa, Artificial Sequence
  Cyclic GFR-binding peptide
KLSNITVQIMDDSSNVILGEMSNM

SEQ ID NO: 103504 - protein, 33 aa, Artificial Sequence; identical to SEQ ID NO: 23900
  Cyclic GFR-binding peptide
  MOD_RES (4)..(4): Xaa is C or S

SEQ ID NO: 103505 - protein, 33 aa, Artificial Sequence
  Cyclic GFR-binding peptide
  MOD_RES (5)..(6): Xaa is C or S
SAAPXXVPQALSNITIQIMVGRKPKVLGEMSMI

SEQ ID NO: 103506 - protein, 35 aa, Artificial Sequence
  Cyclic GFR-binding peptide
  MOD_RES (1)..(2)..(34): Xaa is C or S
XXVPARLSNITIQIMDAANNVVLGEMSDMVVEAXG

SEQ ID NO: 103507 - protein, 29 aa, Artificial Sequence
  Cyclic GFR-binding peptide
QLSNITVQIMEIVRKKPIFLGEMSTLEDH

SEQ ID NO: 103508 - protein, 35 aa, Artificial Sequence; identical to SEQ ID NO: 23902
  Cyclic GFR-binding peptide
  MOD_RES (33)..(35): Xaa is C or S

SEQ ID NO: 103509 - protein, 25 aa, Artificial Sequence
  Cyclic GFR-binding peptide
SNITMQIMNDKQQIILGEMSGMVVD

SEQ ID NO: 103510 - protein, 27 aa, Artificial Sequence
  Cyclic GFR-binding peptide
VKTSNITMQIMDNGRVLLLGEMSMIVE

SEQ ID NO: 103511 - protein, 30 aa, Artificial Sequence; identical to SEQ ID NO: 23906
  Cyclic GFR-binding peptide

SEQ ID NO: 103512 - protein, 32 aa, Artificial Sequence; identical to SEQ ID NO: 23908
  Cyclic GFR-binding peptide
  MOD_RES (29)..(31): Xaa is C or S

SEQ ID NO: 103513 - protein, 33 aa, Artificial Sequence; identical to SEQ ID NO: 23911
  Cyclic GFR-binding peptide
  MOD_RES (33)..(33): Xaa is C or S

SEQ ID NO: 103514 - protein, 33 aa, Artificial Sequence
  Cyclic GFR-binding peptide
  MOD_RES (4)..(5): Xaa is C or S
AGPXXTPTKMSNITMQIMNDKQQIILGEMSGMV

SEQ ID NO: 103515 - protein, 26 aa, Artificial Sequence
  Cyclic GFR-binding peptide
TPTKMSNITMQIMNDKQQIILGEMSG

SEQ ID NO: 103516 - protein, 32 aa, Artificial Sequence
  Cyclic GFR-binding peptide
  MOD_RES (1)..(1): Xaa is C or S
XVPARLSNITIQIMDAANNVVIGEMSDMVVEA

SEQ ID NO: 103517 - protein, 41 aa, Artificial Sequence; identical to SEQ ID NO: 23914
  Cyclic GFR-binding peptide
  MOD_RES (1)..(38)..(40): Xaa is C or S

SEQ ID NO: 103518 - protein, 37 aa, Artificial Sequence; identical to SEQ ID NO: 23916
  Cyclic GFR-binding peptide
  MOD_RES (34)..(36): Xaa is C or S

SEQ ID NO: 103519 - protein, 34 aa, Artificial Sequence
  Cyclic GFR-binding peptide
  MOD_RES (1)..(32)..(34): Xaa is C or S
XVPQDLSNITIQIMVGRTPKVLGEMSMVVKSXKX

SEQ ID NO: 103520 - protein, 29 aa, Artificial Sequence
  Cyclic GFR-binding peptide
VPQDLSNITIQIMVGRTPKVIGEMSMVVK

SEQ ID NO: 103521 - protein, 32 aa, Artificial Sequence
  Cyclic GFR-binding peptide
  MOD_RES (31)..(31): Xaa is C or S
PTRLSNITIQIMDSANNVVLGEMSDMVVESXG

SEQ ID NO: 103522 - protein, 32 aa, Artificial Sequence; identical to SEQ ID NO: 70846
  Cyclic GFR-binding peptide
  MOD_RES (30)..(32): Xaa is C or S

SEQ ID NO: 103523 - protein, 37 aa, Artificial Sequence; identical to SEQ ID NO: 74041
  Cyclic GFR-binding peptide
  MOD_RES (2)..(3)..(35)..(37): Xaa is C or S

SEQ ID NO: 103524 - protein, 31 aa, Artificial Sequence
  Cyclic GFR-binding peptide
  MOD_RES (2)..(3): Xaa is C or S
TXXAPVKTSNITMQIMDNGRVLLLGEMSMIV

SEQ ID NO: 103525 - protein, 35 aa, Artificial Sequence; identical to SEQ ID NO: 23926
  Cyclic GFR-binding peptide
  MOD_RES (2)..(2): Xaa is C or S

SEQ ID NO: 103526 - protein, 27 aa, Artificial Sequence
  Cyclic GFR-binding peptide
ALSNITIQIMVGRKPKVIGEMSMIVRS

SEQ ID NO: 103527 - protein, 27 aa, Artificial Sequence
  Cyclic GFR-binding peptide
PTKLSNITVQIMDDSSNVILGEMSNMV

SEQ ID NO: 103528 - protein, 27 aa, Artificial Sequence
  Cyclic GFR-binding peptide
  MOD_RES (1)..(1): Xaa is C or S
XAPTKLSNITVQIMDDSSNVILGEMSN

SEQ ID NO: 103529 - protein, 41 aa, Artificial Sequence
  Cyclic GFR-binding peptide
  MOD_RES (6)..(7)..(38)..(40): Xaa is C or S
ASAAPXXVPQALSNITIQIMVGRKPKVLGEMSMIVRSXKXS

SEQ ID NO: 103530 - protein, 26 aa, Artificial Sequence
  Cyclic GFR-binding peptide
VSQDLSNITIQIMIGKTPKILGEMSM

SEQ ID NO: 103531 - protein, 25 aa, Artificial Sequence
  Cyclic GFR-binding peptide
SNITVQIMEIVRKKPIFIGEMSTLE

SEQ ID NO: 103532 - protein, 33 aa, Artificial Sequence; identical to SEQ ID NO: 23929
  Cyclic GFR-binding peptide
  MOD_RES (32)..(32): Xaa is C or S

SEQ ID NO: 103533 - protein, 28 aa, Artificial Sequence
  Cyclic GFR-binding peptide
VPQDLSNITIQIMVGRTPKVLGEMSMVV

SEQ ID NO: 103534 - protein, 25 aa, Artificial Sequence
  Cyclic GFR-binding peptide
LSNITIQIMDSANNVVLGEMSDMVV

SEQ ID NO: 103535 - protein, 29 aa, Artificial Sequence
  Cyclic GFR-binding peptide
  MOD_RES (3)..(4): Xaa is C or S
STXXAPVKTSNITMQIMDNGRVLLLGEMS

SEQ ID NO: 103536 - protein, 39 aa, Artificial Sequence; identical to SEQ ID NO: 23931
  Cyclic GFR-binding peptide
  MOD_RES (37)..(39): Xaa is C or S

SEQ ID NO: 103537 - protein, 33 aa, Artificial Sequence; identical to SEQ ID NO: 70861
  Cyclic GFR-binding peptide
  MOD_RES (4)..(5): Xaa is C or S

SEQ ID NO: 103538 - protein, 31 aa, Artificial Sequence
  Cyclic GFR-binding peptide
  MOD_RES (1)..(2): Xaa is C or S
XXTPTKMSNITMQIMNDKQQIILGEMSGMVV

SEQ ID NO: 103539 - protein, 29 aa, Artificial Sequence
  Cyclic GFR-binding peptide
EESNITMQIMRIKPHQGQHLGEMSFLQHN

SEQ ID NO: 103540 - protein, 37 aa, Artificial Sequence; identical to SEQ ID NO: 23936
  Cyclic GFR-binding peptide
  MOD_RES (5)..(5): Xaa is C or S

SEQ ID NO: 103541 - protein, 33 aa, Artificial Sequence
  Cyclic GFR-binding peptide
  MOD_RES (2)..(3): Xaa is C or S
PXXAPTKLSNITVQIMDDSSNVILGEMSNMVVR

SEQ ID NO: 103542 - protein, 29 aa, Artificial Sequence
  Cyclic GFR-binding peptide
VPTRLSNITIQIMDSANNVVIGEMSDMVV

SEQ ID NO: 103543 - protein, 32 aa, Artificial Sequence; identical to SEQ ID NO: 23938
  Cyclic GFR-binding peptide
  MOD_RES (30)..(32): Xaa is C or S

SEQ ID NO: 103544 - protein, 33 aa, Artificial Sequence; identical to SEQ ID NO: 23943
  Cyclic GFR-binding peptide

SEQ ID NO: 103545 - protein, 28 aa, Artificial Sequence
  Cyclic GFR-binding peptide
PQDLSNITIQIMVGRTPKVIGEMSMVVK

SEQ ID NO: 103546 - protein, 36 aa, Artificial Sequence; identical to SEQ ID NO: 70870
  Cyclic GFR-binding peptide
  MOD_RES (2)..(3)..(34)..(36): Xaa is C or S

SEQ ID NO: 103547 - protein, 28 aa, Artificial Sequence
  Cyclic GFR-binding peptide
  MOD_RES (1)..(1): Xaa is C or S
XAPTKLSNITVQIMDDSSNVILGEMSNM

SEQ ID NO: 103548 - protein, 33 aa, Artificial Sequence; identical to SEQ ID NO: 70872
  Cyclic GFR-binding peptide
  MOD_RES (2)..(3): Xaa is C or S

SEQ ID NO: 103549 - protein, 24 aa, Artificial Sequence
  Cyclic GFR-binding peptide
LSNITIQIMVGRKPKVLGEMSMIV

SEQ ID NO: 103550 - protein, 32 aa, Artificial Sequence
  Cyclic GFR-binding peptide
  MOD_RES (2)..(3): Xaa is C or S
PXXVPQDLSNITIQIMVGRTPKVLGEMSMVVK

SEQ ID NO: 103551 - protein, 36 aa, Artificial Sequence; identical to SEQ ID NO: 23951
  Cyclic GFR-binding peptide
  MOD_RES (35)..(35): Xaa is C or S

SEQ ID NO: 103552 - protein, 24 aa, Artificial Sequence
  Cyclic GFR-binding peptide
PTKMSNITMQIMNDKQQIIIGEMS

SEQ ID NO: 103553 - protein, 31 aa, Artificial Sequence
  Cyclic GFR-binding peptide
  MOD_RES (30)..(30): Xaa is C or S
TKMSNITMQIMNDKQQIIIGEMSGMVVDRXG

SEQ ID NO: 103554 - protein, 25 aa, Artificial Sequence
  Cyclic GFR-binding peptide
SNITMQIMDNGRVLLLGEMSMIVEE

SEQ ID NO: 103555 - protein, 25 aa, Artificial Sequence
  Cyclic GFR-binding peptide
SNITVQIMEYVRKKPKLLGEMSRLE

SEQ ID NO: 103556 - protein, 33 aa, Artificial Sequence
  Cyclic GFR-binding peptide
  MOD_RES (31)..(33): Xaa is C or S
VPQALSNITIQIMVGRKPKVLGEMSMIVRSXKX

SEQ ID NO: 103557 - protein, 33 aa, Artificial Sequence
  Cyclic GFR-binding peptide
  MOD_RES (31)..(33): Xaa is C or S
VSQDLSNITIQIMIGKTPKILGEMSMIVKSXKX

SEQ ID NO: 103558 - protein, 31 aa, Artificial Sequence
  Cyclic GFR-binding peptide
  MOD_RES (5)..(6): Xaa is C or S
SASPXXVPQDLSNITIQIMVGRTPKVLGEMS

SEQ ID NO: 103559 - protein, 32 aa, Artificial Sequence; identical to SEQ ID NO: 23961
  Cyclic GFR-binding peptide

SEQ ID NO: 103560 - protein, 39 aa, Artificial Sequence
  Cyclic GFR-binding peptide
  MOD_RES (6)..(7)..(38): Xaa is C or S
ASAAPXXVPQALSNITIQIMVGRKPKVLGEMSMIVRSXK

SEQ ID NO: 103561 - protein, 34 aa, Artificial Sequence; identical to SEQ ID NO: 23962
  Cyclic GFR-binding peptide
  MOD_RES (6)..(6): Xaa is C or S

SEQ ID NO: 103562 - protein, 38 aa, Artificial Sequence
  Cyclic GFR-binding peptide
  MOD_RES (5)..(6)..(38): Xaa is C or S
APASXXVPARLSNITIQIMDAANNVVIGEMSDMVVEAX

SEQ ID NO: 103563 - protein, 29 aa, Artificial Sequence
  Cyclic GFR-binding peptide
GQSNITMQIMRIKPHQGQHIGEMSLEEHS

SEQ ID NO: 103564 - protein, 30 aa, Artificial Sequence
  Cyclic GFR-binding peptide
  MOD_RES (30)..(30): Xaa is C or S
ARLSNITIQIMDAANNVVLGEMSDMVVEAX

SEQ ID NO: 103565 - protein, 21 aa, Artificial Sequence
  Cyclic GFR-binding peptide
SNITIQIMIGKTPKILGEMSM

SEQ ID NO: 103566 - protein, 39 aa, Artificial Sequence; identical to SEQ ID NO: 23964
  Cyclic GFR-binding peptide
  MOD_RES (7)..(7): Xaa is C or S

SEQ ID NO: 103567 - protein, 29 aa, Artificial Sequence
  Cyclic GFR-binding peptide
  MOD_RES (1)..(2): Xaa is C or S
XXVPTRLSNITIQIMDSANNVVIGEMSDM

SEQ ID NO: 103568 - protein, 32 aa, Artificial Sequence
  Cyclic GFR-binding peptide
  MOD_RES (31)..(31): Xaa is C or S
VPQALSNITIQIMVGRKPKVLGEMSMIVRSXK

SEQ ID NO: 103569 - protein, 31 aa, Artificial Sequence
  Cyclic GFR-binding peptide
  MOD_RES (1)..(1): Xaa is C or S
XVPQALSNITIQIMVGRKPKVLGEMSMIVRS

SEQ ID NO: 103570 - protein, 37 aa, Artificial Sequence; identical to SEQ ID NO: 74081
  Cyclic GFR-binding peptide
  MOD_RES (6)..(7): Xaa is C or S

SEQ ID NO: 103571 - protein, 30 aa, Artificial Sequence
  Cyclic GFR-binding peptide
  MOD_RES (1)..(1): Xaa is C or S
XVPTRLSNITIQIMDSANNVVIGEMSDMVV

SEQ ID NO: 103572 - protein, 33 aa, Artificial Sequence; identical to SEQ ID NO: 70887
  Cyclic GFR-binding peptide
  MOD_RES (31)..(33): Xaa is C or S

SEQ ID NO: 103573 - protein, 24 aa, Artificial Sequence
  Cyclic GFR-binding peptide
SQDLSNITIQIMIGKTPKILGEMS

SEQ ID NO: 103574 - protein, 34 aa, Artificial Sequence; identical to SEQ ID NO: 23969
  Cyclic GFR-binding peptide
  MOD_RES (3)..(3): Xaa is C or S

SEQ ID NO: 103575 - protein, 31 aa, Artificial Sequence
  Cyclic GFR-binding peptide
TPTKMSNITMQIMNDKQQIIIGEMSGMVVDR

SEQ ID NO: 103576 - protein, 26 aa, Artificial Sequence
  Cyclic GFR-binding peptide
GQSNITMQIMRIKPHQGQHIGEMSLE

SEQ ID NO: 103577 - protein, 37 aa, Artificial Sequence
  Cyclic GFR-binding peptide
  MOD_RES (4)..(5)..(37): Xaa is C or S
PPTXXVPTRLSNITIQIMDSANNVVLGEMSDMVVESX

SEQ ID NO: 103578 - protein, 35 aa, Artificial Sequence
  Cyclic GFR-binding peptide
  MOD_RES (3)..(4): Xaa is C or S
GPXXTPTKMSNITMQIMNDKQQIILGEMSGMVVDR

SEQ ID NO: 103579 - protein, 32 aa, Artificial Sequence
  Cyclic GFR-binding peptide
  MOD_RES (2)..(3): Xaa is C or S
SXXVPARLSNITIQIMDAANNVVIGEMSDMVV

SEQ ID NO: 103580 - protein, 28 aa, Artificial Sequence
  Cyclic GFR-binding peptide
  MOD_RES (2)..(3): Xaa is C or S
SXXVPARLSNITIQIMDAANNVVLGEMS

SEQ ID NO: 103581 - protein, 32 aa, Artificial Sequence
  Cyclic GFR-binding peptide
  MOD_RES (6)..(7): Xaa is C or S
ASASPXXVSQDLSNITIQIMIGKTPKILGEMS

SEQ ID NO: 103582 - protein, 38 aa, Artificial Sequence
  Cyclic GFR-binding peptide
  MOD_RES (6)..(7): Xaa is C or S
GSAGPXXTPTKMSNITMQIMNDKQQIIIGEMSGMVVDR

SEQ ID NO: 103583 - protein, 31 aa, Artificial Sequence
  Cyclic GFR-binding peptide
  MOD_RES (28)..(30): Xaa is C or S
LSNITIQIMDSANNVVIGEMSDMVVESXGXR

SEQ ID NO: 103584 - protein, 23 aa, Artificial Sequence
  Cyclic GFR-binding peptide
LSNITIQIMVGRKPKVIGEMSMI

SEQ ID NO: 103585 - protein, 30 aa, Artificial Sequence
  Cyclic GFR-binding peptide
  MOD_RES (2)..(3): Xaa is C or S
PXXVPQDLSNITIQIMVGRTPKVLGEMSMV

SEQ ID NO: 103586 - protein, 37 aa, Artificial Sequence; identical to SEQ ID NO: 23985
  Cyclic GFR-binding peptide
  MOD_RES (5)..(5): Xaa is C or S

SEQ ID NO: 103587 - protein, 30 aa, Artificial Sequence
  Cyclic GFR-binding peptide
  MOD_RES (4)..(5): Xaa is C or S
AGPXXTPTKMSNITMQIMNDKQQIILGEMS

SEQ ID NO: 103588 - protein, 28 aa, Artificial Sequence
  Cyclic GFR-binding peptide
QDLSNITIQIMVGRTPKVIGEMSMVVKS

SEQ ID NO: 103589 - protein, 32 aa, Artificial Sequence; identical to SEQ ID NO: 70901
  Cyclic GFR-binding peptide
  MOD_RES (3)..(4): Xaa is C or S

SEQ ID NO: 103590 - protein, 35 aa, Artificial Sequence
  Cyclic GFR-binding peptide
  MOD_RES (2)..(3)..(35): Xaa is C or S
SXXVPARLSNITIQIMDAANNVVIGEMSDMVVEAX

SEQ ID NO: 103591 - protein, 29 aa, Artificial Sequence
  Cyclic GFR-binding peptide
  MOD_RES (2)..(3): Xaa is C or S
PXXVPQDLSNITIQIMVGRTPKVLGEMSM

SEQ ID NO: 103592 - protein, 21 aa, Artificial Sequence
  Cyclic GFR-binding peptide
TSNITMQIMDNGRVLLIGEMS

SEQ ID NO: 103593 - protein, 36 aa, Artificial Sequence
  Cyclic GFR-binding peptide
  MOD_RES (4)..(5)..(36): Xaa is C or S
PSTXXAPVKTSNITMQIMDNGRVLLLGEMSMIVEEX

SEQ ID NO: 103594 - protein, 35 aa, Artificial Sequence
  Cyclic GFR-binding peptide
  MOD_RES (2)..(3)..(35): Xaa is C or S
TXXVPTRLSNITIQIMDSANNVVLGEMSDMVVESX

SEQ ID NO: 103595 - protein, 43 aa, Artificial Sequence; identical to SEQ ID NO: 23990
  Cyclic GFR-binding peptide
  MOD_RES (6)..(40)..(42): Xaa is C or S

SEQ ID NO: 103596 - protein, 35 aa, Artificial Sequence; identical to SEQ ID NO: 23995
  Cyclic GFR-binding peptide
  MOD_RES (6)..(6): Xaa is C or S

SEQ ID NO: 103597 - protein, 35 aa, Artificial Sequence
  Cyclic GFR-binding peptide
  MOD_RES (1)..(2)..(34): Xaa is C or S
XXTPTKMSNITMQIMNDKQQIIIGEMSGMVVDRXG

SEQ ID NO: 103598 - protein, 38 aa, Artificial Sequence; identical to SEQ ID NO: 23998
  Cyclic GFR-binding peptide
  MOD_RES (2)..(2): Xaa is C or S

SEQ ID NO: 103599 - protein, 36 aa, Artificial Sequence
  Cyclic GFR-binding peptide
  MOD_RES (2)..(3)..(34)..(36): Xaa is C or S
TXXAPVKTSNITMQIMDNGRVLLLGEMSMIVEEXGX

SEQ ID NO: 103600 - protein, 40 aa, Artificial Sequence
  Cyclic GFR-binding peptide
  MOD_RES (6)..(7)..(38)..(40): Xaa is C or S
ASASPXXVPQDLSNITIQIMVGRTPKVLGEMSMVVKSXKX

SEQ ID NO: 103601 - protein, 30 aa, Artificial Sequence; identical to SEQ ID NO: 70916
  Cyclic GFR-binding peptide
  MOD_RES (30)..(30): Xaa is C or S

SEQ ID NO: 103602 - protein, 32 aa, Artificial Sequence
  Cyclic GFR-binding peptide
  MOD_RES (30)..(32): Xaa is C or S
ARLSNITIQIMDAANNVVLGEMSDMVVEAXGX

SEQ ID NO: 103603 - protein, 32 aa, Artificial Sequence
  Cyclic GFR-binding peptide
  MOD_RES (4)..(5): Xaa is C or S
PASXXVPARLSNITIQIMDAANNVVLGEMSDM

SEQ ID NO: 103604 - protein, 37 aa, Artificial Sequence; identical to SEQ ID NO: 24006
  Cyclic GFR-binding peptide
  MOD_RES (35)..(37): Xaa is C or S

SEQ ID NO: 103605 - protein, 34 aa, Artificial Sequence
  Cyclic GFR-binding peptide
  MOD_RES (2)..(3)..(34): Xaa is C or S
PXXVSQDLSNITIQIMIGKTPKILGEMSMIVKSX

SEQ ID NO: 103606 - protein, 33 aa, Artificial Sequence
  Cyclic GFR-binding peptide
  MOD_RES (31)..(33): Xaa is C or S
PARLSNITIQIMDAANNVVLGEMSDMVVEAXGX

SEQ ID NO: 103607 - protein, 28 aa, Artificial Sequence
  Cyclic GFR-binding peptide
RLSNITIQIMDAANNVVLGEMSDMVVEA

SEQ ID NO: 103608 - protein, 25 aa, Artificial Sequence
  Cyclic GFR-binding peptide
QALSNITIQIMVGRKPKVLGEMSMI

SEQ ID NO: 103609 - protein, 30 aa, Artificial Sequence
  Cyclic GFR-binding peptide
  MOD_RES (27)..(29): Xaa is C or S
LSNITIQIMIGKTPKILGEMSMIVKSXKXS

SEQ ID NO: 103610 - protein, 24 aa, Artificial Sequence
  Cyclic GFR-binding peptide
QALSNITIQIMVGRKPKVLGEMSM

SEQ ID NO: 103611 - protein, 34 aa, Artificial Sequence; identical to SEQ ID NO: 24014
  Cyclic GFR-binding peptide
  MOD_RES (1)..(1): Xaa is C or S

SEQ ID NO: 103612 - protein, 20 aa, Artificial Sequence
  Cyclic GFR-binding peptide
SNITIQIMIGKTPKIIGEMS

SEQ ID NO: 103613 - protein, 32 aa, Artificial Sequence
  Cyclic GFR-binding peptide
  MOD_RES (2)..(3): Xaa is C or S
PXXVPQALSNITIQIMVGRKPKVLGEMSMIVR

SEQ ID NO: 103614 - protein, 25 aa, Artificial Sequence
  Cyclic GFR-binding peptide
PARLSNITIQIMDAANNVVIGEMSD

SEQ ID NO: 103615 - protein, 29 aa, Artificial Sequence
  Cyclic GFR-binding peptide
  MOD_RES (27)..(29): Xaa is C or S
SNITVQIMDDSSNVILGEMSNMVVRSXGX

SEQ ID NO: 103616 - protein, 39 aa, Artificial Sequence; identical to SEQ ID NO: 70922
  Cyclic GFR-binding peptide
  MOD_RES (5)..(6)..(37)..(39): Xaa is C or S

SEQ ID NO: 103617 - protein, 29 aa, Artificial Sequence
  Cyclic GFR-binding peptide
  MOD_RES (1)..(1): Xaa is C or S
XVPQDLSNITIQIMVGRTPKVIGEMSMVV

SEQ ID NO: 103618 - protein, 22 aa, Artificial Sequence
  Cyclic GFR-binding peptide
KTSNITMQIMDNGRVLLLGEMS

SEQ ID NO: 103619 - protein, 32 aa, Artificial Sequence; identical to SEQ ID NO: 24024
  Cyclic GFR-binding peptide

SEQ ID NO: 103620 - protein, 38 aa, Artificial Sequence; identical to SEQ ID NO: 70930
  Cyclic GFR-binding peptide
  MOD_RES (5)..(6)..(38): Xaa is C or S

SEQ ID NO: 103621 - protein, 34 aa, Artificial Sequence
  Cyclic GFR-binding peptide
  MOD_RES (32)..(34): Xaa is C or S
VPARLSNITIQIMDAANNVVLGEMSDMVVEAXGX

SEQ ID NO: 103622 - protein, 29 aa, Artificial Sequence
  Cyclic GFR-binding peptide
  MOD_RES (27)..(29): Xaa is C or S
LSNITIQIMIGKTPKIIGEMSMIVKSXKX

SEQ ID NO: 103623 - protein, 21 aa, Artificial Sequence
  Cyclic GFR-binding peptide
LSNITIQIMDSANNVVIGEMS

SEQ ID NO: 103624 - protein, 23 aa, Artificial Sequence
  Cyclic GFR-binding peptide
DLSNITIQIMIGKTPKILGEMSM

SEQ ID NO: 103625 - protein, 26 aa, Artificial Sequence
  Cyclic GFR-binding peptide
  MOD_RES (1)..(1): Xaa is C or S
XVPARLSNITIQIMDAANNVVLGEMS

SEQ ID NO: 103626 - protein, 26 aa, Artificial Sequence
  Cyclic GFR-binding peptide
  MOD_RES (1)..(1): Xaa is C or S
XVPQALSNITIQIMVGRKPKVIGEMS

SEQ ID NO: 103627 - protein, 33 aa, Artificial Sequence; identical to SEQ ID NO: 70942
  Cyclic GFR-binding peptide
  MOD_RES (6)..(7): Xaa is C or S

SEQ ID NO: 103628 - protein, 28 aa, Artificial Sequence
  Cyclic GFR-binding peptide
PQALSNITIQIMVGRKPKVIGEMSMIVR

SEQ ID NO: 103629 - protein, 27 aa, Artificial Sequence
  Cyclic GFR-binding peptide
ARLSNITIQIMDAANNVVLGEMSDMVV

SEQ ID NO: 103630 - protein, 32 aa, Artificial Sequence
  Cyclic GFR-binding peptide
  MOD_RES (5)..(6): Xaa is C or S
SAGPXXTPTKMSNITMQIMNDKQQIILGEMSG

SEQ ID NO: 103631 - protein, 31 aa, Artificial Sequence
  Cyclic GFR-binding peptide
  MOD_RES (1)..(2): Xaa is C or S
XXVPTRLSNITIQIMDSANNVVIGEMSDMVV

SEQ ID NO: 103632 - protein, 37 aa, Artificial Sequence; identical to SEQ ID NO: 70951
  Cyclic GFR-binding peptide
  MOD_RES (1)..(2)..(34)..(36): Xaa is C or S

SEQ ID NO: 103633 - protein, 35 aa, Artificial Sequence
  Cyclic GFR-binding peptide
  MOD_RES (2)..(3)..(34): Xaa is C or S
PXXVPQALSNITIQIMVGRKPKVLGEMSMIVRSXK

SEQ ID NO: 103634 - protein, 34 aa, Artificial Sequence
  Cyclic GFR-binding peptide
  MOD_RES (4)..(5): Xaa is C or S
PKPXXAPTKLSNITVQIMDDSSNVILGEMSNMVV

SEQ ID NO: 103635 - protein, 31 aa, Artificial Sequence
  Cyclic GFR-binding peptide
  MOD_RES (30)..(30): Xaa is C or S
TKMSNITMQIMNDKQQIILGEMSGMVVDRXG

SEQ ID NO: 103636 - protein, 26 aa, Artificial Sequence
  Cyclic GFR-binding peptide
LSNITIQIMDSANNVVLGEMSDMVVE

SEQ ID NO: 103637 - protein, 31 aa, Artificial Sequence
  Cyclic GFR-binding peptide
  MOD_RES (28)..(30): Xaa is C or S
KTSNITMQIMDNGRVLLLGEMSMIVEEXGXL

SEQ ID NO: 103638 - protein, 23 aa, Artificial Sequence
  Cyclic GFR-binding peptide
KMSNITMQIMNDKQQIILGEMSG

SEQ ID NO: 103639 - protein, 29 aa, Artificial Sequence
  Cyclic GFR-binding peptide
  MOD_RES (29)..(29): Xaa is C or S
VKTSNITMQIMDNGRVLLIGEMSMIVEEX

SEQ ID NO: 103640 - protein, 38 aa, Artificial Sequence
  Cyclic GFR-binding peptide
  MOD_RES (6)..(7): Xaa is C or S
HVPKPXXAPTKLSNITVQIMDDSSNVILGEMSNMVVRS

SEQ ID NO: 103641 - protein, 28 aa, Artificial Sequence
  Cyclic GFR-binding peptide
  MOD_RES (2)..(3): Xaa is C or S
PXXVPQALSNITIQIMVGRKPKVLGEMS

SEQ ID NO: 103642 - protein, 36 aa, Artificial Sequence; identical to SEQ ID NO: 24054
  Cyclic GFR-binding peptide
  MOD_RES (5)..(5): Xaa is C or S

SEQ ID NO: 103643 - protein, 29 aa, Artificial Sequence
  Cyclic GFR-binding peptide
HSNITVQIMEYVRKKPKLLGEMSRLEEHL

SEQ ID NO: 103644 - protein, 31 aa, Artificial Sequence
  Cyclic GFR-binding peptide
  MOD_RES (29)..(31): Xaa is C or S
RLSNITIQIMDSANNVVLGEMSDMVVESXGX

SEQ ID NO: 103645 - protein, 35 aa, Artificial Sequence
  Cyclic GFR-binding peptide
  MOD_RES (4)..(5): Xaa is C or S
PPTXXVPTRLSNITIQIMDSANNVVLGEMSDMVVE

SEQ ID NO: 103646 - protein, 35 aa, Artificial Sequence; identical to SEQ ID NO: 70966
  Cyclic GFR-binding peptide
  MOD_RES (2)..(3)..(34): Xaa is C or S

SEQ ID NO: 103647 - protein, 38 aa, Artificial Sequence
  Cyclic GFR-binding peptide
  MOD_RES (6)..(7)..(38): Xaa is C or S
RVPSTXXAPVKTSNITMQIMDNGRVLLLGEMSMIVEEX

SEQ ID NO: 103648 - protein, 37 aa, Artificial Sequence
  Cyclic GFR-binding peptide
  MOD_RES (2)..(3)..(35)..(37): Xaa is C or S
SXXVPARLSNITIQIMDAANNVVIGEMSDMVVEAXGX

SEQ ID NO: 103649 - protein, 32 aa, Artificial Sequence
  Cyclic GFR-binding peptide
  MOD_RES (3)..(4): Xaa is C or S
APXXVPQALSNITIQIMVGRKPKVLGEMSMIV

SEQ ID NO: 103650 - protein, 36 aa, Artificial Sequence
  Cyclic GFR-binding peptide
  MOD_RES (3)..(4)..(36): Xaa is C or S
ASXXVPARLSNITIQIMDAANNVVIGEMSDMVVEAX

SEQ ID NO: 103651 - protein, 35 aa, Artificial Sequence
  Cyclic GFR-binding peptide
  MOD_RES (6)..(7): Xaa is C or S
HVPKPXXAPTKLSNITVQIMDDSSNVIIGEMSNMV

SEQ ID NO: 103652 - protein, 24 aa, Artificial Sequence
  Cyclic GFR-binding peptide
ALSNITIQIMVGRKPKVIGEMSMI

SEQ ID NO: 103653 - protein, 25 aa, Artificial Sequence
  Cyclic GFR-binding peptide
EESNITMQIMRIKPHQGQHLGEMSF

SEQ ID NO: 103654 - protein, 32 aa, Artificial Sequence; identical to SEQ ID NO: 74162
  Cyclic GFR-binding peptide
  MOD_RES (1)..(2): Xaa is C or S

SEQ ID NO: 103655 - protein, 26 aa, Artificial Sequence
  Cyclic GFR-binding peptide
TRLSNITIQIMDSANNVVIGEMSDMV

SEQ ID NO: 103656 - protein, 29 aa, Artificial Sequence
  Cyclic GFR-binding peptide
  MOD_RES (1)..(2): Xaa is C or S
XXAPTKLSNITVQIMDDSSNVILGEMSNM

SEQ ID NO: 103657 - protein, 33 aa, Artificial Sequence; identical to SEQ ID NO: 24068
  Cyclic GFR-binding peptide
  MOD_RES (2)..(2): Xaa is C or S

SEQ ID NO: 103658 - protein, 24 aa, Artificial Sequence
  Cyclic GFR-binding peptide
ALSNITIQIMVGRKPKVLGEMSMI

SEQ ID NO: 103659 - protein, 26 aa, Artificial Sequence
  Cyclic GFR-binding peptide
  MOD_RES (26)..(26): Xaa is C or S
SNITIQIMVGRTPKVIGEMSMVVKSX

SEQ ID NO: 103660 - protein, 31 aa, Artificial Sequence
  Cyclic GFR-binding peptide
  MOD_RES (31)..(31): Xaa is C or S
APVKTSNITMQIMDNGRVLLLGEMSMIVEEX

SEQ ID NO: 103661 - protein, 38 aa, Artificial Sequence
  Cyclic GFR-binding peptide
  MOD_RES (5)..(6)..(37): Xaa is C or S
VPSTXXAPVKTSNITMQIMDNGRVLLLGEMSMIVEEXG

SEQ ID NO: 103662 - protein, 35 aa, Artificial Sequence
  Cyclic GFR-binding peptide
  MOD_RES (6)..(7): Xaa is C or S
GSAGPXXTPTKMSNITMQIMNDKQQIILGEMSGMV

SEQ ID NO: 103663 - protein, 25 aa, Artificial Sequence
  Cyclic GFR-binding peptide
DLSNITIQIMIGKTPKILGEMSMIV

SEQ ID NO: 103664 - protein, 28 aa, Artificial Sequence
  Cyclic GFR-binding peptide
  MOD_RES (26)..(28): Xaa is C or S
SNITMQIMDNGRVLLLGEMSMIVEEXGX

SEQ ID NO: 103665 - protein, 23 aa, Artificial Sequence
  Cyclic GFR-binding peptide
QDLSNITIQIMVGRTPKVLGEMS

SEQ ID NO: 103666 - protein, 31 aa, Artificial Sequence; identical to SEQ ID NO: 74187
  Cyclic GFR-binding peptide
  MOD_RES (1)..(1): Xaa is C or S

SEQ ID NO: 103667 - protein, 41 aa, Artificial Sequence
  Cyclic GFR-binding peptide
  MOD_RES (5)..(6)..(38)..(40): Xaa is C or S
TPPTXXVPTRLSNITIQIMDSANNVVLGEMSDMVVESXGXR

SEQ ID NO: 103668 - protein, 31 aa, Artificial Sequence
  Cyclic GFR-binding peptide
  MOD_RES (2)..(3): Xaa is C or S
SXXVPARLSNITIQIMDAANNVVLGEMSDMV

SEQ ID NO: 103669 - protein, 29 aa, Artificial Sequence
  Cyclic GFR-binding peptide
  MOD_RES (26)..(28): Xaa is C or S
SNITIQIMIGKTPKIIGEMSMIVKSXKXS

SEQ ID NO: 103670 - protein, 21 aa, Artificial Sequence
  Cyclic GFR-binding peptide
SNITIQIMIGKTPKIIGEMSM

SEQ ID NO: 103671 - protein, 36 aa, Artificial Sequence; identical to SEQ ID NO: 74197
  Cyclic GFR-binding peptide
  MOD_RES (5)..(6): Xaa is C or S

SEQ ID NO: 103672 - protein, 44 aa, Artificial Sequence; identical to SEQ ID NO: 24086
  Cyclic GFR-binding peptide
  MOD_RES (7)..(41)..(43): Xaa is C or S

SEQ ID NO: 103673 - protein, 26 aa, Artificial Sequence
  Cyclic GFR-binding peptide
PTKLSNITVQIMDDSSNVILGEMSNM

SEQ ID NO: 103674 - protein, 24 aa, Artificial Sequence
  Cyclic GFR-binding peptide
LSNITVQIMDDSSNVIIGEMSNMV

SEQ ID NO: 103675 - protein, 31 aa, Artificial Sequence
  Cyclic GFR-binding peptide
  MOD_RES (29)..(31): Xaa is C or S
RLSNITIQIMDSANNVVIGEMSDMVVESXGX

SEQ ID NO: 103676 - protein, 29 aa, Artificial Sequence
  Cyclic GFR-binding peptide
PTKMSNITMQIMNDKQQIILGEMSGMVVD

SEQ ID NO: 103677 - protein, 29 aa, Artificial Sequence
  Cyclic GFR-binding peptide
  MOD_RES (2)..(3): Xaa is C or S
TXXVPTRLSNITIQIMDSANNVVLGEMSD

SEQ ID NO: 103678 - protein, 41 aa, Artificial Sequence
  Cyclic GFR-binding peptide
  MOD_RES (6)..(7)..(39)..(41): Xaa is C or S
AAPASXXVPARLSNITIQIMDAANNVVLGEMSDMVVEAXGX

SEQ ID NO: 103679 - protein, 31 aa, Artificial Sequence
  Cyclic GFR-binding peptide
  MOD_RES (3)..(4): Xaa is C or S
SPXXVPQDLSNITIQIMVGRTPKVLGEMSMV

SEQ ID NO: 103680 - protein, 30 aa, Artificial Sequence
  Cyclic GFR-binding peptide
  MOD_RES (28)..(30): Xaa is C or S
KTSNITMQIMDNGRVLLIGEMSMIVEEXGX

SEQ ID NO: 103681 - protein, 28 aa, Artificial Sequence
  Cyclic GFR-binding peptide
  MOD_RES (27)..(27): Xaa is C or S
SNITIQIMDAANNVVLGEMSDMVVEAXG

SEQ ID NO: 103682 - protein, 33 aa, Artificial Sequence
  Cyclic GFR-binding peptide
  MOD_RES (30)..(32): Xaa is C or S
TKLSNITVQIMDDSSNVILGEMSNMVVRSXGXH

SEQ ID NO: 103683 - protein, 36 aa, Artificial Sequence; identical to SEQ ID NO: 24102
  Cyclic GFR-binding peptide
  MOD_RES (5)..(5): Xaa is C or S

SEQ ID NO: 103684 - protein, 36 aa, Artificial Sequence
  Cyclic GFR-binding peptide
  MOD_RES (3)..(4)..(35): Xaa is C or S
STXXAPVKTSNITMQIMDNGRVLLIGEMSMIVEEXG

SEQ ID NO: 103685 - protein, 31 aa, Artificial Sequence; identical to SEQ ID NO: 74219
  Cyclic GFR-binding peptide
  MOD_RES (1)..(2): Xaa is C or S

SEQ ID NO: 103686 - protein, 38 aa, Artificial Sequence; identical to SEQ ID NO: 24107
  Cyclic GFR-binding peptide
  MOD_RES (36)..(38): Xaa is C or S

SEQ ID NO: 103687 - protein, 23 aa, Artificial Sequence
  Cyclic GFR-binding peptide
SNITIQIMDSANNVVLGEMSDMV

SEQ ID NO: 103688 - protein, 28 aa, Artificial Sequence
  Cyclic GFR-binding peptide
APVKTSNITMQIMDNGRVLLIGEMSMIV

SEQ ID NO: 103689 - protein, 28 aa, Artificial Sequence
  Cyclic GFR-binding peptide
PTQVQLSNITVQIMEIVRKKPIFLGEMS

SEQ ID NO: 103690 - protein, 35 aa, Artificial Sequence
  Cyclic GFR-binding peptide
  MOD_RES (1)..(32)..(34): Xaa is C or S
XVSQDLSNITIQIMIGKTPKILGEMSMIVKSXKXS

SEQ ID NO: 103691 - protein, 28 aa, Artificial Sequence
  Cyclic GFR-binding peptide
  MOD_RES (1)..(2): Xaa is C or S
XXVPTRLSNITIQIMDSANNVVIGEMSD

SEQ ID NO: 103692 - protein, 28 aa, Artificial Sequence
  Cyclic GFR-binding peptide
  MOD_RES (2)..(3): Xaa is C or S
PXXTPTKMSNITMQIMNDKQQIILGEMS

SEQ ID NO: 103693 - protein, 33 aa, Artificial Sequence
  Cyclic GFR-binding peptide
  MOD_RES (3)..(4): Xaa is C or S
STXXAPVKTSNITMQIMDNGRVLLIGEMSMIVE

SEQ ID NO: 103694 - protein, 40 aa, Artificial Sequence
  Cyclic GFR-binding peptide
  MOD_RES (5)..(6)..(38)..(40): Xaa is C or S
TPPTXXVPTRLSNITIQIMDSANNVVIGEMSDMVVESXGX

SEQ ID NO: 103695 - protein, 35 aa, Artificial Sequence
  Cyclic GFR-binding peptide
  MOD_RES (3)..(4): Xaa is C or S
PTXXVPTRLSNITIQIMDSANNVVIGEMSDMVVES

SEQ ID NO: 103696 - protein, 20 aa, Artificial Sequence
  Cyclic GFR-binding peptide
SNITIQIMDSANNVVIGEMS

SEQ ID NO: 103697 - protein, 34 aa, Artificial Sequence
  Cyclic GFR-binding peptide
  MOD_RES (5)..(6): Xaa is C or S
TPPTXXVPTRLSNITIQIMDSANNVVLGEMSDMV

SEQ ID NO: 103698 - protein, 21 aa, Artificial Sequence
  Cyclic GFR-binding peptide
LSNITIQIMIGKTPKIIGEMS

SEQ ID NO: 103699 - protein, 28 aa, Artificial Sequence
  Cyclic GFR-binding peptide
TKMSNITMQIMNDKQQIIIGEMSGMVVD

SEQ ID NO: 103700 - protein, 32 aa, Artificial Sequence
  Cyclic GFR-binding peptide
  MOD_RES (30)..(32): Xaa is C or S
PVKTSNITMQIMDNGRVLLLGEMSMIVEEXGX

SEQ ID NO: 103701 - protein, 25 aa, Artificial Sequence
  Cyclic GFR-binding peptide
VHHSNITVQIMEYVRKKPKLLGEMS

SEQ ID NO: 103702 - protein, 32 aa, Artificial Sequence
  Cyclic GFR-binding peptide
  MOD_RES (1)..(2): Xaa is C or S
XXVPQDLSNITIQIMVGRTPKVLGEMSMVVKS

SEQ ID NO: 103703 - protein, 26 aa, Artificial Sequence
  Cyclic GFR-binding peptide
LSNITVQIMDDSSNVILGEMSNMVVR

SEQ ID NO: 103704 - protein, 32 aa, Artificial Sequence
  Cyclic GFR-binding peptide
  MOD_RES (29)..(31): Xaa is C or S
RLSNITIQIMDAANNVVLGEMSDMVVEAXGXR

SEQ ID NO: 103705 - protein, 39 aa, Artificial Sequence
  Cyclic GFR-binding peptide
  MOD_RES (5)..(6)..(38): Xaa is C or S
VPKPXXAPTKLSNITVQIMDDSSNVILGEMSNMVVRSXG

SEQ ID NO: 103706 - protein, 32 aa, Artificial Sequence; identical to SEQ ID NO: 24132
  Cyclic GFR-binding peptide
  MOD_RES (30)..(32): Xaa is C or S

SEQ ID NO: 103707 - protein, 36 aa, Artificial Sequence; identical to SEQ ID NO: 74246
  Cyclic GFR-binding peptide
  MOD_RES (3)..(4)..(36): Xaa is C or S

SEQ ID NO: 103708 - protein, 26 aa, Artificial Sequence
  Cyclic GFR-binding peptide
APTKLSNITVQIMDDSSNVIIGEMSN

SEQ ID NO: 103709 - protein, 36 aa, Artificial Sequence; identical to SEQ ID NO: 24139
  Cyclic GFR-binding peptide

SEQ ID NO: 103710 - protein, 28 aa, Artificial Sequence
  Cyclic GFR-binding peptide
  MOD_RES (28)..(28): Xaa is C or S
DLSNITIQIMVGRTPKVLGEMSMVVKSX

SEQ ID NO: 103711 - protein, 28 aa, Artificial Sequence
  Cyclic GFR-binding peptide
SQDLSNITIQIMIGKTPKILGEMSMIVK

SEQ ID NO: 103712 - protein, 29 aa, Artificial Sequence
  Cyclic GFR-binding peptide
  MOD_RES (28)..(28): Xaa is C or S
LSNITIQIMDSANNVVIGEMSDMVVESXG

SEQ ID NO: 103713 - protein, 44 aa, Artificial Sequence; identical to SEQ ID NO: 24140
  Cyclic GFR-binding peptide
  MOD_RES (4)..(41)..(43): Xaa is C or S

SEQ ID NO: 103714 - protein, 36 aa, Artificial Sequence
  Cyclic GFR-binding peptide
  MOD_RES (6)..(7): Xaa is C or S
ASAAPXXVPQALSNITIQIMVGRKPKVLGEMSMIVR

SEQ ID NO: 103715 - protein, 36 aa, Artificial Sequence; identical to SEQ ID NO: 24143
  Cyclic GFR-binding peptide
  MOD_RES (4)..(4): Xaa is C or S

SEQ ID NO: 103716 - protein, 30 aa, Artificial Sequence
  Cyclic GFR-binding peptide
  MOD_RES (29)..(29): Xaa is C or S
KLSNITVQIMDDSSNVILGEMSNMVVRSXG

SEQ ID NO: 103717 - protein, 31 aa, Artificial Sequence; identical to SEQ ID NO: 71052
  Cyclic GFR-binding peptide
  MOD_RES (31)..(31): Xaa is C or S

SEQ ID NO: 103718 - protein, 34 aa, Artificial Sequence
  Cyclic GFR-binding peptide
  MOD_RES (31)..(33): Xaa is C or S
APVKTSNITMQIMDNGRVLLIGEMSMIVEEXGXL

SEQ ID NO: 103719 - protein, 34 aa, Artificial Sequence; identical to SEQ ID NO: 24149
  Cyclic GFR-binding peptide
  MOD_RES (3)..(3): Xaa is C or S

SEQ ID NO: 103720 - protein, 38 aa, Artificial Sequence
  Cyclic GFR-binding peptide
  MOD_RES (4)..(5)..(36)..(38): Xaa is C or S
PSTXXAPVKTSNITMQIMDNGRVLLLGEMSMIVEEXGX

SEQ ID NO: 103721 - protein, 25 aa, Artificial Sequence
  Cyclic GFR-binding peptide
HSNITVQIMEYVRKKPKLLGEMSRL

SEQ ID NO: 103722 - protein, 24 aa, Artificial Sequence
  Cyclic GFR-binding peptide
SNITMQIMRIKPHQGQHLGEMSFL

SEQ ID NO: 103723 - protein, 37 aa, Artificial Sequence; identical to SEQ ID NO: 24152
  Cyclic GFR-binding peptide
  MOD_RES (2)..(2): Xaa is C or S

SEQ ID NO: 103724 - protein, 23 aa, Artificial Sequence
  Cyclic GFR-binding peptide
KMSNITMQIMNDKQQIIIGEMSG

SEQ ID NO: 103725 - protein, 35 aa, Artificial Sequence
  Cyclic GFR-binding peptide
  MOD_RES (1)..(2)..(34): Xaa is C or S
XXTPTKMSNITMQIMNDKQQIILGEMSGMVVDRXG

SEQ ID NO: 103726 - protein, 36 aa, Artificial Sequence; identical to SEQ ID NO: 24156
  Cyclic GFR-binding peptide
  MOD_RES (1)..(1): Xaa is C or S

SEQ ID NO: 103727 - protein, 26 aa, Artificial Sequence
  Cyclic GFR-binding peptide
QALSNITIQIMVGRKPKVIGEMSMIV

SEQ ID NO: 103728 - protein, 35 aa, Artificial Sequence; identical to SEQ ID NO: 24157
  Cyclic GFR-binding peptide
  MOD_RES (1)..(1): Xaa is C or S

SEQ ID NO: 103729 - protein, 33 aa, Artificial Sequence
  Cyclic GFR-binding peptide
  MOD_RES (31)..(33): Xaa is C or S
APVKTSNITMQIMDNGRVLLIGEMSMIVEEXGX

SEQ ID NO: 103730 - protein, 41 aa, Artificial Sequence
  Cyclic GFR-binding peptide
  MOD_RES (6)..(7)..(38)..(40): Xaa is C or S
ASASPXXVPQDLSNITIQIMVGRTPKVLGEMSMVVKSXKXS

SEQ ID NO: 103731 - protein, 31 aa, Artificial Sequence
  Cyclic GFR-binding peptide
  MOD_RES (5)..(6): Xaa is C or S
VPSTXXAPVKTSNITMQIMDNGRVLLIGEMS

SEQ ID NO: 103732 - protein, 42 aa, Artificial Sequence
  Cyclic GFR-binding peptide
  MOD_RES (6)..(7)..(39)..(41): Xaa is C or S
STPPTXXVPTRLSNITIQIMDSANNVVIGEMSDMVVESXGXR

SEQ ID NO: 103733 - protein, 26 aa, Artificial Sequence
  Cyclic GFR-binding peptide
ARLSNITIQIMDAANNVVLGEMSDMV

SEQ ID NO: 103734 - protein, 32 aa, Artificial Sequence; identical to SEQ ID NO: 74274
  Cyclic GFR-binding peptide
  MOD_RES (4)..(5): Xaa is C or S

SEQ ID NO: 103735 - protein, 28 aa, Artificial Sequence
  Cyclic GFR-binding peptide
QLSNITVQIMEIVRKKPIFIGEMSTLED

SEQ ID NO: 103736 - protein, 29 aa, Artificial Sequence
  Cyclic GFR-binding peptide
  MOD_RES (3)..(4): Xaa is C or S
APXXVPQALSNITIQIMVGRKPKVIGEMS

SEQ ID NO: 103737 - protein, 37 aa, Artificial Sequence
  Cyclic GFR-binding peptide
  MOD_RES (5)..(6): Xaa is C or S
VPKPXXAPTKLSNITVQIMDDSSNVILGEMSNMVVRS

SEQ ID NO: 103738 - protein, 31 aa, Artificial Sequence
  Cyclic GFR-binding peptide
  MOD_RES (28)..(30): Xaa is C or S
DLSNITIQIMIGKTPKILGEMSMIVKSXKXS

SEQ ID NO: 103739 - protein, 37 aa, Artificial Sequence; identical to SEQ ID NO: 24162
  Cyclic GFR-binding peptide
  MOD_RES (37)..(37): Xaa is C or S

SEQ ID NO: 103740 - protein, 30 aa, Artificial Sequence
  Cyclic GFR-binding peptide
  MOD_RES (29)..(29): Xaa is C or S
VKTSNITMQIMDNGRVLLLGEMSMIVEEXG

SEQ ID NO: 103741 - protein, 28 aa, Artificial Sequence
  Cyclic GFR-binding peptide
PTKLSNITVQIMDDSSNVIIGEMSNMVV

SEQ ID NO: 103742 - protein, 41 aa, Artificial Sequence
  Cyclic GFR-binding peptide
  MOD_RES (6)..(7)..(39)..(41): Xaa is C or S
STPPTXXVPTRLSNITIQIMDSANNVVLGEMSDMVVESXGX

SEQ ID NO: 103743 - protein, 26 aa, Artificial Sequence
  Cyclic GFR-binding peptide
RLSNITIQIMDAANNVVLGEMSDMVV

SEQ ID NO: 103744 - protein, 24 aa, Artificial Sequence
  Cyclic GFR-binding peptide
TSNITMQIMDNGRVLLLGEMSMIV

SEQ ID NO: 103745 - protein, 27 aa, Artificial Sequence
  Cyclic GFR-binding peptide
  MOD_RES (1)..(1): Xaa is C or S
XTPTKMSNITMQIMNDKQQIIIGEMSG

SEQ ID NO: 103746 - protein, 28 aa, Artificial Sequence
  Cyclic GFR-binding peptide
TKMSNITMQIMNDKQQIILGEMSGMVVD

SEQ ID NO: 103747 - protein, 27 aa, Artificial Sequence
  Cyclic GFR-binding peptide
  MOD_RES (26)..(26): Xaa is C or S
SNITIQIMIGKTPKILGEMSMIVKSXK

SEQ ID NO: 103748 - protein, 42 aa, Artificial Sequence; identical to SEQ ID NO: 24171
  Cyclic GFR-binding peptide
  MOD_RES (6)..(40)..(42): Xaa is C or S

SEQ ID NO: 103749 - protein, 39 aa, Artificial Sequence; identical to SEQ ID NO: 24172
  Cyclic GFR-binding peptide
  MOD_RES (37)..(39): Xaa is C or S

SEQ ID NO: 103750 - protein, 32 aa, Artificial Sequence
  Cyclic GFR-binding peptide
  MOD_RES (5)..(6): Xaa is C or S
SAGPXXTPTKMSNITMQIMNDKQQIIIGEMSG

SEQ ID NO: 103751 - protein, 26 aa, Artificial Sequence
  Cyclic GFR-binding peptide
RLSNITIQIMDSANNVVIGEMSDMVV

SEQ ID NO: 103752 - protein, 25 aa, Artificial Sequence
  Cyclic GFR-binding peptide
VPARLSNITIQIMDAANNVVIGEMS

SEQ ID NO: 103753 - protein, 36 aa, Artificial Sequence; identical to SEQ ID NO: 24177
  Cyclic GFR-binding peptide
  MOD_RES (4)..(4): Xaa is C or S

SEQ ID NO: 103754 - protein, 38 aa, Artificial Sequence
  Cyclic GFR-binding peptide
  MOD_RES (5)..(6)..(37): Xaa is C or S
VPSTXXAPVKTSNITMQIMDNGRVLLIGEMSMIVEEXG

SEQ ID NO: 103755 - protein, 34 aa, Artificial Sequence; identical to SEQ ID NO: 71089
  Cyclic GFR-binding peptide
  MOD_RES (3)..(4): Xaa is C or S

SEQ ID NO: 103756 - protein, 33 aa, Artificial Sequence; identical to SEQ ID NO: 74307
  Cyclic GFR-binding peptide
  MOD_RES (4)..(5): Xaa is C or S

SEQ ID NO: 103757 - protein, 38 aa, Artificial Sequence; identical to SEQ ID NO: 24184
  Cyclic GFR-binding peptide
  MOD_RES (3)..(3): Xaa is C or S

SEQ ID NO: 103758 - protein, 35 aa, Artificial Sequence; identical to SEQ ID NO: 24185
  Cyclic GFR-binding peptide

SEQ ID NO: 103759 - protein, 42 aa, Artificial Sequence; identical to SEQ ID NO: 24187
  Cyclic GFR-binding peptide
  MOD_RES (4)..(41): Xaa is C or S

SEQ ID NO: 103760 - protein, 23 aa, Artificial Sequence
  Cyclic GFR-binding peptide
SNITMQIMDNGRVLLIGEMSMIV

SEQ ID NO: 103761 - protein, 35 aa, Artificial Sequence
  Cyclic GFR-binding peptide
  MOD_RES (1)..(2)..(33)..(35): Xaa is C or S
XXVPQDLSNITIQIMVGRTPKVLGEMSMVVKSXKX

SEQ ID NO: 103762 - protein, 27 aa, Artificial Sequence
  Cyclic GFR-binding peptide
RVHHSNITVQIMEYVRKKPKLIGEMSR

SEQ ID NO: 103763 - protein, 25 aa, Artificial Sequence
  Cyclic GFR-binding peptide
HSNITVQIMEYVRKKPKLIGEMSRL

SEQ ID NO: 103764 - protein, 41 aa, Artificial Sequence; identical to SEQ ID NO: 24193
  Cyclic GFR-binding peptide
  MOD_RES (1)..(38)..(40): Xaa is C or S

SEQ ID NO: 103765 - protein, 32 aa, Artificial Sequence
  Cyclic GFR-binding peptide
  MOD_RES (31)..(31): Xaa is C or S
PTRLSNITIQIMDSANNVVIGEMSDMVVESXG

SEQ ID NO: 103766 - protein, 36 aa, Artificial Sequence
  Cyclic GFR-binding peptide
  MOD_RES (3)..(4)..(35): Xaa is C or S
STXXAPVKTSNITMQIMDNGRVLLLGEMSMIVEEXG

SEQ ID NO: 103767 - protein, 33 aa, Artificial Sequence
  Cyclic GFR-binding peptide
  MOD_RES (1)..(2): Xaa is C or S
XXVPARLSNITIQIMDAANNVVIGEMSDMVVEA

SEQ ID NO: 103768 - protein, 35 aa, Artificial Sequence
  Cyclic GFR-binding peptide
  MOD_RES (1)..(2)..(33)..(35): Xaa is C or S
XXVSQDLSNITIQIMIGKTPKILGEMSMIVKSXKX

SEQ ID NO: 103769 - protein, 31 aa, Artificial Sequence
  Cyclic GFR-binding peptide
  MOD_RES (29)..(31): Xaa is C or S
VKTSNITMQIMDNGRVLLIGEMSMIVEEXGX

SEQ ID NO: 103770 - protein, 36 aa, Artificial Sequence
  Cyclic GFR-binding peptide
  MOD_RES (6)..(7): Xaa is C or S
RVPSTXXAPVKTSNITMQIMDNGRVLLIGEMSMIVE

SEQ ID NO: 103771 - protein, 35 aa, Artificial Sequence
  Cyclic GFR-binding peptide
  MOD_RES (4)..(5): Xaa is C or S
PSTXXAPVKTSNITMQIMDNGRVLLLGEMSMIVEE

SEQ ID NO: 103772 - protein, 27 aa, Artificial Sequence
  Cyclic GFR-binding peptide
KMSNITMQIMNDKQQIIIGEMSGMVVD

SEQ ID NO: 103773 - protein, 31 aa, Artificial Sequence
  Cyclic GFR-binding peptide
  MOD_RES (28)..(30): Xaa is C or S
DLSNITIQIMVGRTPKVLGEMSMVVKSXKXS

SEQ ID NO: 103774 - protein, 26 aa, Artificial Sequence
  Cyclic GFR-binding peptide
KMSNITMQIMNDKQQIIIGEMSGMVV

SEQ ID NO: 103775 - protein, 27 aa, Artificial Sequence
  Cyclic GFR-binding peptide
PQDLSNITIQIMVGRTPKVIGEMSMVV

SEQ ID NO: 103776 - protein, 40 aa, Artificial Sequence
  Cyclic GFR-binding peptide
  MOD_RES (6)..(7)..(39): Xaa is C or S
HVPKPXXAPTKLSNITVQIMDDSSNVILGEMSNMVVRSXG

SEQ ID NO: 103777 - protein, 31 aa, Artificial Sequence; identical to SEQ ID NO: 24204
  Cyclic GFR-binding peptide

SEQ ID NO: 103778 - protein, 33 aa, Artificial Sequence
  Cyclic GFR-binding peptide
  MOD_RES (6)..(7): Xaa is C or S
HVPKPXXAPTKLSNITVQIMDDSSNVILGEMSN

SEQ ID NO: 103779 - protein, 26 aa, Artificial Sequence
  Cyclic GFR-binding peptide
  MOD_RES (1)..(1): Xaa is C or S
XTPTKMSNITMQIMNDKQQIIIGEMS

SEQ ID NO: 103780 - protein, 25 aa, Artificial Sequence
  Cyclic GFR-binding peptide
LSNITIQIMVGRKPKVIGEMSMIVR

SEQ ID NO: 103781 - protein, 27 aa, Artificial Sequence
  Cyclic GFR-binding peptide
  MOD_RES (27)..(27): Xaa is C or S
SNITIQIMDAANNVVLGEMSDMVVEAX

SEQ ID NO: 103782 - protein, 40 aa, Artificial Sequence; identical to SEQ ID NO: 71116
  Cyclic GFR-binding peptide
  MOD_RES (6)..(7)..(38)..(40): Xaa is C or S

SEQ ID NO: 103783 - protein, 33 aa, Artificial Sequence; identical to SEQ ID NO: 24209
  Cyclic GFR-binding peptide
  MOD_RES (30)..(32): Xaa is C or S

SEQ ID NO: 103784 - protein, 26 aa, Artificial Sequence
  Cyclic GFR-binding peptide
APTKLSNITVQIMDDSSNVILGEMSN

SEQ ID NO: 103785 - protein, 28 aa, Artificial Sequence
  Cyclic GFR-binding peptide
VPTEESNITMQIMRIKPHQGQHLGEMSF

SEQ ID NO: 103786 - protein, 27 aa, Artificial Sequence
  Cyclic GFR-binding peptide
  MOD_RES (27)..(27): Xaa is C or S
SNITMQIMNDKQQIIIGEMSGMVVDRX

SEQ ID NO: 103787 - protein, 24 aa, Artificial Sequence
  Cyclic GFR-binding peptide
RLSNITIQIMDSANNVVIGEMSDM

SEQ ID NO: 103788 - protein, 35 aa, Artificial Sequence; identical to SEQ ID NO: 24216
  Cyclic GFR-binding peptide

SEQ ID NO: 103789 - protein, 25 aa, Artificial Sequence
  Cyclic GFR-binding peptide
KLSNITVQIMDDSSNVIIGEMSNMV

SEQ ID NO: 103790 - protein, 28 aa, Artificial Sequence
  Cyclic GFR-binding peptide
  MOD_RES (1)..(2): Xaa is C or S
XXAPVKTSNITMQIMDNGRVLLLGEMSM

SEQ ID NO: 103791 - protein, 24 aa, Artificial Sequence
  Cyclic GFR-binding peptide
RLSNITIQIMDAANNVVIGEMSDM

SEQ ID NO: 103792 - protein, 29 aa, Artificial Sequence
  Cyclic GFR-binding peptide
  MOD_RES (2)..(3): Xaa is C or S
PXXVPQDLSNITIQIMVGRTPKVIGEMSM

SEQ ID NO: 103793 - protein, 36 aa, Artificial Sequence; identical to SEQ ID NO: 24224
  Cyclic GFR-binding peptide
  MOD_RES (3)..(3): Xaa is C or S

SEQ ID NO: 103794 - protein, 32 aa, Artificial Sequence
  Cyclic GFR-binding peptide
  MOD_RES (3)..(4): Xaa is C or S
GPXXTPTKMSNITMQIMNDKQQIILGEMSGMV

SEQ ID NO: 103795 - protein, 35 aa, Artificial Sequence; identical to SEQ ID NO: 24226
  Cyclic GFR-binding peptide
  MOD_RES (2)..(2): Xaa is C or S

SEQ ID NO: 103796 - protein, 32 aa, Artificial Sequence; identical to SEQ ID NO: 24227
  Cyclic GFR-binding peptide
  MOD_RES (3)..(3): Xaa is C or S

SEQ ID NO: 103797 - protein, 40 aa, Artificial Sequence; identical to SEQ ID NO: 74346
  Cyclic GFR-binding peptide
  MOD_RES (6)..(7)..(38)..(40): Xaa is C or S

SEQ ID NO: 103798 - protein, 34 aa, Artificial Sequence
  Cyclic GFR-binding peptide
  MOD_RES (6)..(7): Xaa is C or S
AAPASXXVPARLSNITIQIMDAANNVVIGEMSDM

SEQ ID NO: 103799 - protein, 32 aa, Artificial Sequence
  Cyclic GFR-binding peptide
  MOD_RES (1)..(2): Xaa is C or S
XXTPTKMSNITMQIMNDKQQIILGEMSGMVVD

SEQ ID NO: 103800 - protein, 36 aa, Artificial Sequence
  Cyclic GFR-binding peptide
  MOD_RES (4)..(5): Xaa is C or S
PASXXVPARLSNITIQIMDAANNVVIGEMSDMVVEA

SEQ ID NO: 103801 - protein, 23 aa, Artificial Sequence
  Cyclic GFR-binding peptide
MSNITMQIMNDKQQIILGEMSGM

SEQ ID NO: 103802 - protein, 28 aa, Artificial Sequence
  Cyclic GFR-binding peptide
HSNITVQIMEYVRKKPKLIGEMSRLEEH

SEQ ID NO: 103803 - protein, 35 aa, Artificial Sequence
  Cyclic GFR-binding peptide
  MOD_RES (1)..(2)..(34): Xaa is C or S
XXVPTRLSNITIQIMDSANNVVIGEMSDMVVESXG

SEQ ID NO: 103804 - protein, 34 aa, Artificial Sequence; identical to SEQ ID NO: 71144
  Cyclic GFR-binding peptide
  MOD_RES (6)..(7): Xaa is C or S

SEQ ID NO: 103805 - protein, 42 aa, Artificial Sequence; identical to SEQ ID NO: 24237
  Cyclic GFR-binding peptide
  MOD_RES (5)..(42): Xaa is C or S

SEQ ID NO: 103806 - protein, 36 aa, Artificial Sequence; identical to SEQ ID NO: 24238
  Cyclic GFR-binding peptide
  MOD_RES (3)..(3): Xaa is C or S

SEQ ID NO: 103807 - protein, 35 aa, Artificial Sequence; identical to SEQ ID NO: 24240
  Cyclic GFR-binding peptide
  MOD_RES (32)..(34): Xaa is C or S

SEQ ID NO: 103808 - protein, 36 aa, Artificial Sequence; identical to SEQ ID NO: 24242
  Cyclic GFR-binding peptide
  MOD_RES (34)..(36): Xaa is C or S

SEQ ID NO: 103809 - protein, 25 aa, Artificial Sequence
  Cyclic GFR-binding peptide
VKTSNITMQIMDNGRVLLLGEMSMI

SEQ ID NO: 103810 - protein, 30 aa, Artificial Sequence
  Cyclic GFR-binding peptide
APVKTSNITMQIMDNGRVLLLGEMSMIVEE

SEQ ID NO: 103811 - protein, 30 aa, Artificial Sequence
  Cyclic GFR-binding peptide
  MOD_RES (1)..(2): Xaa is C or S
XXVPTRLSNITIQIMDSANNVVIGEMSDMV

SEQ ID NO: 103812 - protein, 39 aa, Artificial Sequence
  Cyclic GFR-binding peptide
  MOD_RES (5)..(6)..(38): Xaa is C or S
APASXXVPARLSNITIQIMDAANNVVLGEMSDMVVEAXG

SEQ ID NO: 103813 - protein, 32 aa, Artificial Sequence
  Cyclic GFR-binding peptide
  MOD_RES (1)..(32): Xaa is C or S
XVPQALSNITIQIMVGRKPKVLGEMSMIVRSX

SEQ ID NO: 103814 - protein, 39 aa, Artificial Sequence
  Cyclic GFR-binding peptide
  MOD_RES (3)..(4)..(36)..(38): Xaa is C or S
KPXXAPTKLSNITVQIMDDSSNVILGEMSNMVVRSXGXH

SEQ ID NO: 103815 - protein, 24 aa, Artificial Sequence
  Cyclic GFR-binding peptide
SNITMQIMNDKQQIIIGEMSGMVV

SEQ ID NO: 103816 - protein, 37 aa, Artificial Sequence
  Cyclic GFR-binding peptide
  MOD_RES (2)..(3)..(35)..(37): Xaa is C or S
TXXVPTRLSNITIQIMDSANNVVLGEMSDMVVESXGX

SEQ ID NO: 103817 - protein, 29 aa, Artificial Sequence
  Cyclic GFR-binding peptide
  MOD_RES (28)..(28): Xaa is C or S
KTSNITMQIMDNGRVLLIGEMSMIVEEXG

SEQ ID NO: 103818 - protein, 34 aa, Artificial Sequence; identical to SEQ ID NO: 24246
  Cyclic GFR-binding peptide
  MOD_RES (31)..(33): Xaa is C or S

SEQ ID NO: 103819 - protein, 41 aa, Artificial Sequence; identical to SEQ ID NO: 24248
  Cyclic GFR-binding peptide
  MOD_RES (4)..(41): Xaa is C or S

SEQ ID NO: 103820 - protein, 27 aa, Artificial Sequence
  Cyclic GFR-binding peptide
  MOD_RES (1)..(2): Xaa is C or S
XXAPVKTSNITMQIMDNGRVLLIGEMS

SEQ ID NO: 103821 - protein, 23 aa, Artificial Sequence
  Cyclic GFR-binding peptide
TSNITMQIMDNGRVLLIGEMSMI

SEQ ID NO: 103822 - protein, 35 aa, Artificial Sequence; identical to SEQ ID NO: 24249
  Cyclic GFR-binding peptide

SEQ ID NO: 103823 - protein, 39 aa, Artificial Sequence; identical to SEQ ID NO: 24251
  Cyclic GFR-binding peptide
  MOD_RES (3)..(37)..(39): Xaa is C or S

SEQ ID NO: 103824 - protein, 31 aa, Artificial Sequence
  Cyclic GFR-binding peptide
  MOD_RES (2)..(3): Xaa is C or S
PXXTPTKMSNITMQIMNDKQQIIIGEMSGMV

SEQ ID NO: 103825 - protein, 31 aa, Artificial Sequence; identical to SEQ ID NO: 24254
  Cyclic GFR-binding peptide
  MOD_RES (30)..(30): Xaa is C or S

SEQ ID NO: 103826 - protein, 35 aa, Artificial Sequence; identical to SEQ ID NO: 24256
  Cyclic GFR-binding peptide
  MOD_RES (2)..(2): Xaa is C or S

SEQ ID NO: 103827 - protein, 28 aa, Artificial Sequence
  Cyclic GFR-binding peptide
  MOD_RES (1)..(2): Xaa is C or S
XXVPARLSNITIQIMDAANNVVIGEMSD

SEQ ID NO: 103828 - protein, 29 aa, Artificial Sequence
  Cyclic GFR-binding peptide
  MOD_RES (29)..(29): Xaa is C or S
QDLSNITIQIMIGKTPKIIGEMSMIVKSX

SEQ ID NO: 103829 - protein, 38 aa, Artificial Sequence; identical to SEQ ID NO: 24258
  Cyclic GFR-binding peptide
  MOD_RES (3)..(37): Xaa is C or S

SEQ ID NO: 103830 - protein, 39 aa, Artificial Sequence
  Cyclic GFR-binding peptide
  MOD_RES (5)..(6)..(37)..(39): Xaa is C or S
VPSTXXAPVKTSNITMQIMDNGRVLLLGEMSMIVEEXGX

SEQ ID NO: 103831 - protein, 39 aa, Artificial Sequence; identical to SEQ ID NO: 71161
  Cyclic GFR-binding peptide
  MOD_RES (5)..(6)..(37)..(39): Xaa is C or S

SEQ ID NO: 103832 - protein, 39 aa, Artificial Sequence
  Cyclic GFR-binding peptide
  MOD_RES (5)..(6)..(38): Xaa is C or S
TPPTXXVPTRLSNITIQIMDSANNVVLGEMSDMVVESXG

SEQ ID NO: 103833 - protein, 28 aa, Artificial Sequence
  Cyclic GFR-binding peptide
  MOD_RES (1)..(1): Xaa is C or S
XVPARLSNITIQIMDAANNVVLGEMSDM

SEQ ID NO: 103834 - protein, 28 aa, Artificial Sequence
  Cyclic GFR-binding peptide
QALSNITIQIMVGRKPKVIGEMSMIVRS

SEQ ID NO: 103835 - protein, 23 aa, Artificial Sequence
  Cyclic GFR-binding peptide
SNITVQIMDDSSNVILGEMSNMV

SEQ ID NO: 103836 - protein, 43 aa, Artificial Sequence; identical to SEQ ID NO: 24272
  Cyclic GFR-binding peptide
  MOD_RES (5)..(42): Xaa is C or S

SEQ ID NO: 103837 - protein, 29 aa, Artificial Sequence
  Cyclic GFR-binding peptide
  MOD_RES (2)..(3): Xaa is C or S
PXXAPTKLSNITVQIMDDSSNVILGEMSN

SEQ ID NO: 103838 - protein, 27 aa, Artificial Sequence
  Cyclic GFR-binding peptide
KLSNITVQIMDDSSNVIIGEMSNMVVR

SEQ ID NO: 103839 - protein, 25 aa, Artificial Sequence
  Cyclic GFR-binding peptide
VQLSNITVQIMEIVRKKPIFIGEMS

SEQ ID NO: 103840 - protein, 35 aa, Artificial Sequence
  Cyclic GFR-binding peptide
  MOD_RES (6)..(7): Xaa is C or S
HVPKPXXAPTKLSNITVQIMDDSSNVILGEMSNMV

SEQ ID NO: 103841 - protein, 28 aa, Artificial Sequence
  Cyclic GFR-binding peptide
  MOD_RES (27)..(27): Xaa is C or S
SNITMQIMNDKQQIIIGEMSGMVVDRXG

SEQ ID NO: 103842 - protein, 34 aa, Artificial Sequence; identical to SEQ ID NO: 24275
  Cyclic GFR-binding peptide

SEQ ID NO: 103843 - protein, 26 aa, Artificial Sequence
  Cyclic GFR-binding peptide
  MOD_RES (1)..(1): Xaa is C or S
XVPQALSNITIQIMVGRKPKVLGEMS

SEQ ID NO: 103844 - protein, 26 aa, Artificial Sequence
  Cyclic GFR-binding peptide
QLSNITVQIMEIVRKKPIFIGEMSTL

SEQ ID NO: 103845 - protein, 35 aa, Artificial Sequence
  Cyclic GFR-binding peptide
  MOD_RES (6)..(7): Xaa is C or S
GSAGPXXTPTKMSNITMQIMNDKQQIIIGEMSGMV

SEQ ID NO: 103846 - protein, 22 aa, Artificial Sequence
  Cyclic GFR-binding peptide
SNITVQIMDDSSNVIIGEMSNM

SEQ ID NO: 103847 - protein, 31 aa, Artificial Sequence
  Cyclic GFR-binding peptide
  MOD_RES (1)..(2): Xaa is C or S
XXVSQDLSNITIQIMIGKTPKILGEMSMIVK

SEQ ID NO: 103848 - protein, 28 aa, Artificial Sequence
  Cyclic GFR-binding peptide
ESNITMQIMRIKPHQGQHLGEMSFLQHN

SEQ ID NO: 103849 - protein, 30 aa, Artificial Sequence
  Cyclic GFR-binding peptide
  MOD_RES (1)..(1): Xaa is C or S
XVPARLSNITIQIMDAANNVVLGEMSDMVV

SEQ ID NO: 103850 - protein, 33 aa, Artificial Sequence
  Cyclic GFR-binding peptide
  MOD_RES (1)..(2): Xaa is C or S
XXVPTRLSNITIQIMDSANNVVIGEMSDMVVES

SEQ ID NO: 103851 - protein, 32 aa, Artificial Sequence
  Cyclic GFR-binding peptide
  MOD_RES (4)..(5): Xaa is C or S
AAPXXVPQALSNITIQIMVGRKPKVLGEMSMI

SEQ ID NO: 103852 - protein, 24 aa, Artificial Sequence
  Cyclic GFR-binding peptide
GQSNITMQIMRIKPHQGQHIGEMS

SEQ ID NO: 103853 - protein, 25 aa, Artificial Sequence
  Cyclic GFR-binding peptide
SNITIQIMVGRKPKVLGEMSMIVRS

SEQ ID NO: 103854 - protein, 31 aa, Artificial Sequence
  Cyclic GFR-binding peptide
  MOD_RES (1)..(1): Xaa is C or S
XVPQDLSNITIQIMVGRTPKVLGEMSMVVKS

SEQ ID NO: 103855 - protein, 40 aa, Artificial Sequence; identical to SEQ ID NO: 24292
  Cyclic GFR-binding peptide
  MOD_RES (5)..(39): Xaa is C or S

SEQ ID NO: 103856 - protein, 32 aa, Artificial Sequence
  Cyclic GFR-binding peptide
  MOD_RES (2)..(3): Xaa is C or S
PXXVSQDLSNITIQIMIGKTPKILGEMSMIVK

SEQ ID NO: 103857 - protein, 40 aa, Artificial Sequence
  Cyclic GFR-binding peptide
  MOD_RES (6)..(7)..(38)..(40): Xaa is C or S
RVPSTXXAPVKTSNITMQIMDNGRVLLIGEMSMIVEEXGX

SEQ ID NO: 103858 - protein, 41 aa, Artificial Sequence; identical to SEQ ID NO: 71196
  Cyclic GFR-binding peptide
  MOD_RES (6)..(7)..(38)..(40): Xaa is C or S

SEQ ID NO: 103859 - protein, 29 aa, Artificial Sequence
  Cyclic GFR-binding peptide
TPTKMSNITMQIMNDKQQIILGEMSGMVV

SEQ ID NO: 103860 - protein, 33 aa, Artificial Sequence; identical to SEQ ID NO: 24295
  Cyclic GFR-binding peptide
  MOD_RES (3)..(3): Xaa is C or S

SEQ ID NO: 103861 - protein, 31 aa, Artificial Sequence
  Cyclic GFR-binding peptide
  MOD_RES (29)..(31): Xaa is C or S
QDLSNITIQIMVGRTPKVLGEMSMVVKSXKX

SEQ ID NO: 103862 - protein, 41 aa, Artificial Sequence
  Cyclic GFR-binding peptide
  MOD_RES (5)..(6)..(38)..(40): Xaa is C or S
SAGPXXTPTKMSNITMQIMNDKQQIILGEMSGMVVDRXGXS

SEQ ID NO: 103863 - protein, 31 aa, Artificial Sequence; identical to SEQ ID NO: 71199
  Cyclic GFR-binding peptide
  MOD_RES (28)..(30): Xaa is C or S

SEQ ID NO: 103864 - protein, 24 aa, Artificial Sequence
  Cyclic GFR-binding peptide
QLSNITVQIMEIVRKKPIFLGEMS

SEQ ID NO: 103865 - protein, 26 aa, Artificial Sequence
  Cyclic GFR-binding peptide
QSNITMQIMRIKPHQGQHIGEMSLEE

SEQ ID NO: 103866 - protein, 29 aa, Artificial Sequence
  Cyclic GFR-binding peptide
  MOD_RES (3)..(4): Xaa is C or S
APXXVPQALSNITIQIMVGRKPKVLGEMS

SEQ ID NO: 103867 - protein, 35 aa, Artificial Sequence; identical to SEQ ID NO: 74400
  Cyclic GFR-binding peptide
  MOD_RES (1)..(32)..(34): Xaa is C or S

SEQ ID NO: 103868 - protein, 25 aa, Artificial Sequence
  Cyclic GFR-binding peptide
TEESNITMQIMRIKPHQGQHLGEMS

SEQ ID NO: 103869 - protein, 31 aa, Artificial Sequence; identical to SEQ ID NO: 24306
  Cyclic GFR-binding peptide

SEQ ID NO: 103870 - protein, 27 aa, Artificial Sequence
  Cyclic GFR-binding peptide
QLSNITVQIMEIVRKKPIFLGEMSTLE

SEQ ID NO: 103871 - protein, 27 aa, Artificial Sequence
  Cyclic GFR-binding peptide
QLSNITVQIMEIVRKKPIFIGEMSTLE

SEQ ID NO: 103872 - protein, 27 aa, Artificial Sequence
  Cyclic GFR-binding peptide
TKLSNITVQIMDDSSNVIIGEMSNMVV

SEQ ID NO: 103873 - protein, 25 aa, Artificial Sequence
  Cyclic GFR-binding peptide
SNITIQIMIGKTPKILGEMSMIVKS

SEQ ID NO: 103874 - protein, 37 aa, Artificial Sequence; identical to SEQ ID NO: 24310
  Cyclic GFR-binding peptide
  MOD_RES (2)..(2): Xaa is C or S

SEQ ID NO: 103875 - protein, 31 aa, Artificial Sequence; identical to SEQ ID NO: 24311
  Cyclic GFR-binding peptide
  MOD_RES (31)..(31): Xaa is C or S

SEQ ID NO: 103876 - protein, 33 aa, Artificial Sequence; identical to SEQ ID NO: 71217
  Cyclic GFR-binding peptide
  MOD_RES (2)..(3): Xaa is C or S

SEQ ID NO: 103877 - protein, 29 aa, Artificial Sequence
  Cyclic GFR-binding peptide
  MOD_RES (1)..(2): Xaa is C or S
XXVPQDLSNITIQIMVGRTPKVLGEMSMV

SEQ ID NO: 103878 - protein, 27 aa, Artificial Sequence
  Cyclic GFR-binding peptide
VQLSNITVQIMEIVRKKPIFIGEMSTL

SEQ ID NO: 103879 - protein, 22 aa, Artificial Sequence
  Cyclic GFR-binding peptide
LSNITIQIMDAANNVVIGEMSD

SEQ ID NO: 103880 - protein, 36 aa, Artificial Sequence; identical to SEQ ID NO: 24319
  Cyclic GFR-binding peptide
  MOD_RES (36)..(36): Xaa is C or S

SEQ ID NO: 103881 - protein, 25 aa, Artificial Sequence
  Cyclic GFR-binding peptide
PTRLSNITIQIMDSANNVVLGEMSD

SEQ ID NO: 103882 - protein, 38 aa, Artificial Sequence
  Cyclic GFR-binding peptide
  MOD_RES (6)..(7)..(38): Xaa is C or S
ASAAPXXVPQALSNITIQIMVGRKPKVLGEMSMIVRSX

SEQ ID NO: 103883 - protein, 31 aa, Artificial Sequence
  Cyclic GFR-binding peptide
  MOD_RES (30)..(30): Xaa is C or S
PQALSNITIQIMVGRKPKVLGEMSMIVRSXK

SEQ ID NO: 103884 - protein, 25 aa, Artificial Sequence
  Cyclic GFR-binding peptide
TPTKMSNITMQIMNDKQQIILGEMS

SEQ ID NO: 103885 - protein, 29 aa, Artificial Sequence
  Cyclic GFR-binding peptide
  MOD_RES (28)..(28): Xaa is C or S
LSNITIQIMDAANNVVIGEMSDMVVEAXG

SEQ ID NO: 103886 - protein, 27 aa, Artificial Sequence
  Cyclic GFR-binding peptide
TKLSNITVQIMDDSSNVILGEMSNMVV

SEQ ID NO: 103887 - protein, 27 aa, Artificial Sequence
  Cyclic GFR-binding peptide
  MOD_RES (27)..(27): Xaa is C or S
TSNITMQIMDNGRVLLIGEMSMIVEEX

SEQ ID NO: 103888 - protein, 29 aa, Artificial Sequence
  Cyclic GFR-binding peptide
TKMSNITMQIMNDKQQIIIGEMSGMVVDR

SEQ ID NO: 103889 - protein, 35 aa, Artificial Sequence
  Cyclic GFR-binding peptide
  MOD_RES (5)..(6): Xaa is C or S
SAAPXXVPQALSNITIQIMVGRKPKVLGEMSMIVR

SEQ ID NO: 103890 - protein, 23 aa, Artificial Sequence
  Cyclic GFR-binding peptide
KTSNITMQIMDNGRVLLLGEMSM

SEQ ID NO: 103891 - protein, 31 aa, Artificial Sequence; identical to SEQ ID NO: 24324
  Cyclic GFR-binding peptide

SEQ ID NO: 103892 - protein, 34 aa, Artificial Sequence
  Cyclic GFR-binding peptide
  MOD_RES (5)..(6): Xaa is C or S
SASPXXVPQDLSNITIQIMVGRTPKVLGEMSMVV

SEQ ID NO: 103893 - protein, 31 aa, Artificial Sequence; identical to SEQ ID NO: 24325
  Cyclic GFR-binding peptide

SEQ ID NO: 103894 - protein, 21 aa, Artificial Sequence
  Cyclic GFR-binding peptide
LSNITVQIMDDSSNVILGEMS

SEQ ID NO: 103895 - protein, 41 aa, Artificial Sequence; identical to SEQ ID NO: 24328
  Cyclic GFR-binding peptide
  MOD_RES (5)..(5): Xaa is C or S

SEQ ID NO: 103896 - protein, 24 aa, Artificial Sequence
  Cyclic GFR-binding peptide
QALSNITIQIMVGRKPKVIGEMSM

SEQ ID NO: 103897 - protein, 27 aa, Artificial Sequence
  Cyclic GFR-binding peptide
  MOD_RES (1)..(2): Xaa is C or S
XXTPTKMSNITMQIMNDKQQIIIGEMS

SEQ ID NO: 103898 - protein, 34 aa, Artificial Sequence; identical to SEQ ID NO: 24329
  Cyclic GFR-binding peptide
  MOD_RES (2)..(2): Xaa is C or S

SEQ ID NO: 103899 - protein, 42 aa, Artificial Sequence; identical to SEQ ID NO: 24332
  Cyclic GFR-binding peptide
  MOD_RES (5)..(42): Xaa is C or S

SEQ ID NO: 103900 - protein, 29 aa, Artificial Sequence
  Cyclic GFR-binding peptide
  MOD_RES (2)..(3): Xaa is C or S
PXXVSQDLSNITIQIMIGKTPKIIGEMSM

SEQ ID NO: 103901 - protein, 25 aa, Artificial Sequence
  Cyclic GFR-binding peptide
VPARLSNITIQIMDAANNVVLGEMS

SEQ ID NO: 103902 - protein, 34 aa, Artificial Sequence; identical to SEQ ID NO: 24335
  Cyclic GFR-binding peptide
  MOD_RES (34)..(34): Xaa is C or S

SEQ ID NO: 103903 - protein, 25 aa, Artificial Sequence
  Cyclic GFR-binding peptide
LSNITVQIMDDSSNVIIGEMSNMVV

SEQ ID NO: 103904 - protein, 37 aa, Artificial Sequence; identical to SEQ ID NO: 24339
  Cyclic GFR-binding peptide
  MOD_RES (34)..(36): Xaa is C or S

SEQ ID NO: 103905 - protein, 35 aa, Artificial Sequence; identical to SEQ ID NO: 24340
  Cyclic GFR-binding peptide
  MOD_RES (4)..(4): Xaa is C or S

SEQ ID NO: 103906 - protein, 27 aa, Artificial Sequence
  Cyclic GFR-binding peptide
VPQALSNITIQIMVGRKPKVLGEMSMI

SEQ ID NO: 103907 - protein, 31 aa, Artificial Sequence; identical to SEQ ID NO: 74438
  Cyclic GFR-binding peptide
  MOD_RES (2)..(3): Xaa is C or S

SEQ ID NO: 103908 - protein, 27 aa, Artificial Sequence
  Cyclic GFR-binding peptide
  MOD_RES (26)..(26): Xaa is C or S
SNITIQIMVGRKPKVLGEMSMIVRSXK

SEQ ID NO: 103909 - protein, 24 aa, Artificial Sequence
  Cyclic GFR-binding peptide
SNITIQIMDSANNVVIGEMSDMVV

SEQ ID NO: 103910 - protein, 25 aa, Artificial Sequence
  Cyclic GFR-binding peptide
KLSNITVQIMDDSSNVILGEMSNMV

SEQ ID NO: 103911 - protein, 21 aa, Artificial Sequence
  Cyclic GFR-binding peptide
SNITMQIMDNGRVLLLGEMSM

SEQ ID NO: 103912 - protein, 27 aa, Artificial Sequence
  Cyclic GFR-binding peptide
  MOD_RES (1)..(1): Xaa is C or S
XVPQALSNITIQIMVGRKPKVLGEMSM

SEQ ID NO: 103913 - protein, 26 aa, Artificial Sequence
  Cyclic GFR-binding peptide
SNITMQIMRIKPHQGQHLGEMSFLQH

SEQ ID NO: 103914 - protein, 39 aa, Artificial Sequence; identical to SEQ ID NO: 24353
  Cyclic GFR-binding peptide
  MOD_RES (6)..(6): Xaa is C or S

SEQ ID NO: 103915 - protein, 25 aa, Artificial Sequence
  Cyclic GFR-binding peptide
KMSNITMQIMNDKQQIIIGEMSGMV

SEQ ID NO: 103916 - protein, 31 aa, Artificial Sequence
  Cyclic GFR-binding peptide
  MOD_RES (31)..(31): Xaa is C or S
PTRLSNITIQIMDSANNVVIGEMSDMVVESX

SEQ ID NO: 103917 - protein, 37 aa, Artificial Sequence
  Cyclic GFR-binding peptide
  MOD_RES (6)..(7): Xaa is C or S
GSAGPXXTPTKMSNITMQIMNDKQQIILGEMSGMVVD

SEQ ID NO: 103918 - protein, 29 aa, Artificial Sequence
  Cyclic GFR-binding peptide
  MOD_RES (28)..(28): Xaa is C or S
LSNITVQIMDDSSNVIIGEMSNMVVRSXG

SEQ ID NO: 103919 - protein, 37 aa, Artificial Sequence
  Cyclic GFR-binding peptide
  MOD_RES (4)..(5)..(37): Xaa is C or S
AGPXXTPTKMSNITMQIMNDKQQIIIGEMSGMVVDRX

SEQ ID NO: 103920 - protein, 36 aa, Artificial Sequence; identical to SEQ ID NO: 24358
  Cyclic GFR-binding peptide
  MOD_RES (34)..(36): Xaa is C or S

SEQ ID NO: 103921 - protein, 34 aa, Artificial Sequence
  Cyclic GFR-binding peptide
  MOD_RES (6)..(7): Xaa is C or S
ASAAPXXVPQALSNITIQIMVGRKPKVLGEMSMI

SEQ ID NO: 103922 - protein, 36 aa, Artificial Sequence; identical to SEQ ID NO: 24361
  Cyclic GFR-binding peptide
  MOD_RES (33)..(35): Xaa is C or S

SEQ ID NO: 103923 - protein, 33 aa, Artificial Sequence; identical to SEQ ID NO: 24363
  Cyclic GFR-binding peptide

SEQ ID NO: 103924 - protein, 36 aa, Artificial Sequence
  Cyclic GFR-binding peptide
  MOD_RES (4)..(5): Xaa is C or S
AGPXXTPTKMSNITMQIMNDKQQIIIGEMSGMVVDR

SEQ ID NO: 103925 - protein, 27 aa, Artificial Sequence
  Cyclic GFR-binding peptide
APTKLSNITVQIMDDSSNVILGEMSNM

SEQ ID NO: 103926 - protein, 28 aa, Artificial Sequence
  Cyclic GFR-binding peptide
VPQALSNITIQIMVGRKPKVIGEMSMIV

SEQ ID NO: 103927 - protein, 34 aa, Artificial Sequence; identical to SEQ ID NO: 71257
  Cyclic GFR-binding peptide
  MOD_RES (31)..(33): Xaa is C or S

SEQ ID NO: 103928 - protein, 27 aa, Artificial Sequence
  Cyclic GFR-binding peptide
KTSNITMQIMDNGRVLLIGEMSMIVEE

SEQ ID NO: 103929 - protein, 24 aa, Artificial Sequence
  Cyclic GFR-binding peptide
SNITIQIMVGRKPKVIGEMSMIVR

SEQ ID NO: 103930 - protein, 24 aa, Artificial Sequence
  Cyclic GFR-binding peptide
HHSNITVQIMEYVRKKPKLLGEMS

SEQ ID NO: 103931 - protein, 37 aa, Artificial Sequence; identical to SEQ ID NO: 24367
  Cyclic GFR-binding peptide
  MOD_RES (2)..(2): Xaa is C or S

SEQ ID NO: 103932 - protein, 36 aa, Artificial Sequence
  Cyclic GFR-binding peptide
  MOD_RES (1)..(33)..(35): Xaa is C or S
XVPTRLSNITIQIMDSANNVVIGEMSDMVVESXGXR

SEQ ID NO: 103933 - protein, 30 aa, Artificial Sequence
  Cyclic GFR-binding peptide
  MOD_RES (30)..(30): Xaa is C or S
PVKTSNITMQIMDNGRVLLIGEMSMIVEEX

SEQ ID NO: 103934 - protein, 27 aa, Artificial Sequence
  Cyclic GFR-binding peptide
  MOD_RES (26)..(26): Xaa is C or S
SNITMQIMDNGRVLLIGEMSMIVEEXG

SEQ ID NO: 103935 - protein, 33 aa, Artificial Sequence; identical to SEQ ID NO: 24374
  Cyclic GFR-binding peptide
  MOD_RES (3)..(3): Xaa is C or S

SEQ ID NO: 103936 - protein, 38 aa, Artificial Sequence; identical to SEQ ID NO: 24379
  Cyclic GFR-binding peptide
  MOD_RES (3)..(3): Xaa is C or S

SEQ ID NO: 103937 - protein, 26 aa, Artificial Sequence
  Cyclic GFR-binding peptide
LSNITIQIMIGKTPKILGEMSMIVKS

SEQ ID NO: 103938 - protein, 36 aa, Artificial Sequence
  Cyclic GFR-binding peptide
  MOD_RES (3)..(4)..(36): Xaa is C or S
GPXXTPTKMSNITMQIMNDKQQIILGEMSGMVVDRX

SEQ ID NO: 103939 - protein, 32 aa, Artificial Sequence
  Cyclic GFR-binding peptide
  MOD_RES (4)..(5): Xaa is C or S
PASXXVPARLSNITIQIMDAANNVVIGEMSDM

SEQ ID NO: 103940 - protein, 33 aa, Artificial Sequence; identical to SEQ ID NO: 24380
  Cyclic GFR-binding peptide
  MOD_RES (4)..(4): Xaa is C or S

SEQ ID NO: 103941 - protein, 34 aa, Artificial Sequence; identical to SEQ ID NO: 24381
  Cyclic GFR-binding peptide

SEQ ID NO: 103942 - protein, 35 aa, Artificial Sequence
  Cyclic GFR-binding peptide
  MOD_RES (32)..(34): Xaa is C or S
VPARLSNITIQIMDAANNVVLGEMSDMVVEAXGXR

SEQ ID NO: 103943 - protein, 32 aa, Artificial Sequence; identical to SEQ ID NO: 24382
  Cyclic GFR-binding peptide

SEQ ID NO: 103944 - protein, 32 aa, Artificial Sequence; identical to SEQ ID NO: 24383
  Cyclic GFR-binding peptide

SEQ ID NO: 103945 - protein, 36 aa, Artificial Sequence
  Cyclic GFR-binding peptide
  MOD_RES (2)..(3)..(35): Xaa is C or S
PXXTPTKMSNITMQIMNDKQQIIIGEMSGMVVDRXG

SEQ ID NO: 103946 - protein, 36 aa, Artificial Sequence; identical to SEQ ID NO: 24385
  Cyclic GFR-binding peptide
  MOD_RES (5)..(5): Xaa is C or S

SEQ ID NO: 103947 - protein, 39 aa, Artificial Sequence
  Cyclic GFR-binding peptide
  MOD_RES (6)..(7)..(39): Xaa is C or S
STPPTXXVPTRLSNITIQIMDSANNVVLGEMSDMVVESX

SEQ ID NO: 103948 - protein, 25 aa, Artificial Sequence
  Cyclic GFR-binding peptide
VHHSNITVQIMEYVRKKPKLIGEMS

SEQ ID NO: 103949 - protein, 28 aa, Artificial Sequence
  Cyclic GFR-binding peptide
  MOD_RES (2)..(3): Xaa is C or S
TXXVPTRLSNITIQIMDSANNVVIGEMS

SEQ ID NO: 103950 - protein, 30 aa, Artificial Sequence
  Cyclic GFR-binding peptide
  MOD_RES (29)..(29): Xaa is C or S
RLSNITIQIMDSANNVVLGEMSDMVVESXG

SEQ ID NO: 103951 - protein, 29 aa, Artificial Sequence
  Cyclic GFR-binding peptide
TPTKMSNITMQIMNDKQQIIIGEMSGMVV

SEQ ID NO: 103952 - protein, 36 aa, Artificial Sequence; identical to SEQ ID NO: 71276
  Cyclic GFR-binding peptide
  MOD_RES (6)..(7): Xaa is C or S

SEQ ID NO: 103953 - protein, 30 aa, Artificial Sequence; identical to SEQ ID NO: 24392
  Cyclic GFR-binding peptide
  MOD_RES (2)..(2): Xaa is C or S

SEQ ID NO: 103954 - protein, 30 aa, Artificial Sequence
  Cyclic GFR-binding peptide
  MOD_RES (27)..(29): Xaa is C or S
SNITIQIMDSANNVVLGEMSDMVVESXGXR

SEQ ID NO: 103955 - protein, 25 aa, Artificial Sequence
  Cyclic GFR-binding peptide
PQALSNITIQIMVGRKPKVIGEMSM

SEQ ID NO: 103956 - protein, 33 aa, Artificial Sequence
  Cyclic GFR-binding peptide
  MOD_RES (1)..(32): Xaa is C or S
XVPQDLSNITIQIMVGRTPKVLGEMSMVVKSXK

SEQ ID NO: 103957 - protein, 26 aa, Artificial Sequence
  Cyclic GFR-binding peptide
  MOD_RES (1)..(1): Xaa is C or S
XVSQDLSNITIQIMIGKTPKILGEMS

SEQ ID NO: 103958 - protein, 34 aa, Artificial Sequence
  Cyclic GFR-binding peptide
  MOD_RES (2)..(3): Xaa is C or S
PXXAPTKLSNITVQIMDDSSNVILGEMSNMVVRS

SEQ ID NO: 103959 - protein, 37 aa, Artificial Sequence; identical to SEQ ID NO: 74492
  Cyclic GFR-binding peptide
  MOD_RES (3)..(4)..(35)..(37): Xaa is C or S

SEQ ID NO: 103960 - protein, 22 aa, Artificial Sequence
  Cyclic GFR-binding peptide
DLSNITIQIMVGRTPKVLGEMS

SEQ ID NO: 103961 - protein, 29 aa, Artificial Sequence
  Cyclic GFR-binding peptide
QVQLSNITVQIMEIVRKKPIFIGEMSTLE

SEQ ID NO: 103962 - protein, 27 aa, Artificial Sequence
  Cyclic GFR-binding peptide
  MOD_RES (1)..(1): Xaa is C or S
XVPQDLSNITIQIMVGRTPKVLGEMSM

SEQ ID NO: 103963 - protein, 28 aa, Artificial Sequence
  Cyclic GFR-binding peptide
KLSNITVQIMDDSSNVIIGEMSNMVVRS

SEQ ID NO: 103964 - protein, 32 aa, Artificial Sequence
  Cyclic GFR-binding peptide
  MOD_RES (31)..(31): Xaa is C or S
APVKTSNITMQIMDNGRVLLIGEMSMIVEEXG

SEQ ID NO: 103965 - protein, 31 aa, Artificial Sequence
  Cyclic GFR-binding peptide
  MOD_RES (3)..(4): Xaa is C or S
GPXXTPTKMSNITMQIMNDKQQIILGEMSGM

SEQ ID NO: 103966 - protein, 38 aa, Artificial Sequence; identical to SEQ ID NO: 24404
  Cyclic GFR-binding peptide
  MOD_RES (3)..(37): Xaa is C or S

SEQ ID NO: 103967 - protein, 29 aa, Artificial Sequence
  Cyclic GFR-binding peptide
PTEESNITMQIMRIKPHQGQHLGEMSFLQ

SEQ ID NO: 103968 - protein, 36 aa, Artificial Sequence
  Cyclic GFR-binding peptide
  MOD_RES (4)..(5): Xaa is C or S
PPTXXVPTRLSNITIQIMDSANNVVLGEMSDMVVES

SEQ ID NO: 103969 - protein, 27 aa, Artificial Sequence
  Cyclic GFR-binding peptide
PQDLSNITIQIMVGRTPKVLGEMSMVV

SEQ ID NO: 103970 - protein, 40 aa, Artificial Sequence; identical to SEQ ID NO: 74502
  Cyclic GFR-binding peptide
  MOD_RES (5)..(6)..(37)..(39): Xaa is C or S

SEQ ID NO: 103971 - protein, 32 aa, Artificial Sequence
  Cyclic GFR-binding peptide
  MOD_RES (30)..(32): Xaa is C or S
PQDLSNITIQIMVGRTPKVLGEMSMVVKSXKX

SEQ ID NO: 103972 - protein, 35 aa, Artificial Sequence; identical to SEQ ID NO: 24418
  Cyclic GFR-binding peptide
  MOD_RES (1)..(1): Xaa is C or S

SEQ ID NO: 103973 - protein, 27 aa, Artificial Sequence
  Cyclic GFR-binding peptide
TQVQLSNITVQIMEIVRKKPIFLGEMS

SEQ ID NO: 103974 - protein, 31 aa, Artificial Sequence; identical to SEQ ID NO: 24422
  Cyclic GFR-binding peptide

SEQ ID NO: 103975 - protein, 33 aa, Artificial Sequence
  Cyclic GFR-binding peptide
  MOD_RES (1)..(32): Xaa is C or S
XVSQDLSNITIQIMIGKTPKILGEMSMIVKSXK

SEQ ID NO: 103976 - protein, 40 aa, Artificial Sequence; identical to SEQ ID NO: 24424
  Cyclic GFR-binding peptide
  MOD_RES (4)..(38)..(40): Xaa is C or S

SEQ ID NO: 103977 - protein, 26 aa, Artificial Sequence
  Cyclic GFR-binding peptide
QDLSNITIQIMVGRTPKVIGEMSMVV

SEQ ID NO: 103978 - protein, 31 aa, Artificial Sequence
  Cyclic GFR-binding peptide
  MOD_RES (3)..(4): Xaa is C or S
STXXAPVKTSNITMQIMDNGRVLLLGEMSMI

SEQ ID NO: 103979 - protein, 24 aa, Artificial Sequence
  Cyclic GFR-binding peptide
ARLSNITIQIMDAANNVVLGEMSD

SEQ ID NO: 103980 - protein, 27 aa, Artificial Sequence
  Cyclic GFR-binding peptide
HHSNITVQIMEYVRKKPKLIGEMSRLE

SEQ ID NO: 103981 - protein, 36 aa, Artificial Sequence
  Cyclic GFR-binding peptide
  MOD_RES (6)..(7): Xaa is C or S
GSAGPXXTPTKMSNITMQIMNDKQQIILGEMSGMVV

SEQ ID NO: 103982 - protein, 33 aa, Artificial Sequence; identical to SEQ ID NO: 24429
  Cyclic GFR-binding peptide

SEQ ID NO: 103983 - protein, 37 aa, Artificial Sequence
  Cyclic GFR-binding peptide
  MOD_RES (3)..(4)..(36): Xaa is C or S
PTXXVPTRLSNITIQIMDSANNVVLGEMSDMVVESXG

SEQ ID NO: 103984 - protein, 40 aa, Artificial Sequence; identical to SEQ ID NO: 24435
  Cyclic GFR-binding peptide
  MOD_RES (2)..(39): Xaa is C or S

SEQ ID NO: 103985 - protein, 36 aa, Artificial Sequence
  Cyclic GFR-binding peptide
  MOD_RES (6)..(7): Xaa is C or S
HVPKPXXAPTKLSNITVQIMDDSSNVILGEMSNMVV

SEQ ID NO: 103986 - protein, 30 aa, Artificial Sequence
  Cyclic GFR-binding peptide
  MOD_RES (30)..(30): Xaa is C or S
SQDLSNITIQIMIGKTPKILGEMSMIVKSX

SEQ ID NO: 103987 - protein, 37 aa, Artificial Sequence
  Cyclic GFR-binding peptide
  MOD_RES (5)..(6)..(37): Xaa is C or S
SASPXXVPQDLSNITIQIMVGRTPKVLGEMSMVVKSX

SEQ ID NO: 103988 - protein, 34 aa, Artificial Sequence; identical to SEQ ID NO: 24441
  Cyclic GFR-binding peptide
  MOD_RES (33)..(33): Xaa is C or S

SEQ ID NO: 103989 - protein, 29 aa, Artificial Sequence
  Cyclic GFR-binding peptide
VPARLSNITIQIMDAANNVVLGEMSDMVV

SEQ ID NO: 103990 - protein, 34 aa, Artificial Sequence
  Cyclic GFR-binding peptide
  MOD_RES (1)..(32)..(34): Xaa is C or S
XVPQALSNITIQIMVGRKPKVLGEMSMIVRSXKX

SEQ ID NO: 103991 - protein, 30 aa, Artificial Sequence
  Cyclic GFR-binding peptide
  MOD_RES (3)..(4): Xaa is C or S
PTXXVPTRLSNITIQIMDSANNVVLGEMSD

SEQ ID NO: 103992 - protein, 27 aa, Artificial Sequence
  Cyclic GFR-binding peptide
  MOD_RES (1)..(2): Xaa is C or S
XXVPQDLSNITIQIMVGRTPKVIGEMS

SEQ ID NO: 103993 - protein, 30 aa, Artificial Sequence
  Cyclic GFR-binding peptide
  MOD_RES (3)..(4): Xaa is C or S
KPXXAPTKLSNITVQIMDDSSNVILGEMSN

SEQ ID NO: 103994 - protein, 35 aa, Artificial Sequence; identical to SEQ ID NO: 24447
  Cyclic GFR-binding peptide
  MOD_RES (33)..(35): Xaa is C or S

SEQ ID NO: 103995 - protein, 38 aa, Artificial Sequence; identical to SEQ ID NO: 24448
  Cyclic GFR-binding peptide
  MOD_RES (1)..(38): Xaa is C or S

SEQ ID NO: 103996 - protein, 29 aa, Artificial Sequence
  Cyclic GFR-binding peptide
TEESNITMQIMRIKPHQGQHLGEMSFLQH

SEQ ID NO: 103997 - protein, 26 aa, Artificial Sequence
  Cyclic GFR-binding peptide
PTKMSNITMQIMNDKQQIILGEMSGM

SEQ ID NO: 103998 - protein, 42 aa, Artificial Sequence; identical to SEQ ID NO: 24452
  Cyclic GFR-binding peptide
  MOD_RES (3)..(40)..(42): Xaa is C or S

SEQ ID NO: 103999 - protein, 35 aa, Artificial Sequence
  Cyclic GFR-binding peptide
  MOD_RES (3)..(4)..(35): Xaa is C or S
STXXAPVKTSNITMQIMDNGRVLLIGEMSMIVEEX

SEQ ID NO: 104000 - protein, 31 aa, Artificial Sequence
  Cyclic GFR-binding peptide
  MOD_RES (3)..(4): Xaa is C or S
ASXXVPARLSNITIQIMDAANNVVIGEMSDM

SEQ ID NO: 104001 - protein, 35 aa, Artificial Sequence; identical to SEQ ID NO: 24454
  Cyclic GFR-binding peptide
  MOD_RES (34)..(34): Xaa is C or S

SEQ ID NO: 104002 - protein, 25 aa, Artificial Sequence
  Cyclic GFR-binding peptide
VPQDLSNITIQIMVGRTPKVLGEMS

SEQ ID NO: 104003 - protein, 32 aa, Artificial Sequence
  Cyclic GFR-binding peptide
  MOD_RES (3)..(4): Xaa is C or S
GPXXTPTKMSNITMQIMNDKQQIIIGEMSGMV

SEQ ID NO: 104004 - protein, 25 aa, Artificial Sequence
  Cyclic GFR-binding peptide
RLSNITIQIMDSANNVVIGEMSDMV

SEQ ID NO: 104005 - protein, 31 aa, Artificial Sequence; identical to SEQ ID NO: 74535
  Cyclic GFR-binding peptide

SEQ ID NO: 104006 - protein, 33 aa, Artificial Sequence; identical to SEQ ID NO: 24458
  Cyclic GFR-binding peptide
  MOD_RES (32)..(32): Xaa is C or S

SEQ ID NO: 104007 - protein, 24 aa, Artificial Sequence
  Cyclic GFR-binding peptide
QDLSNITIQIMVGRTPKVIGEMSM

SEQ ID NO: 104008 - protein, 31 aa, Artificial Sequence
  Cyclic GFR-binding peptide
  MOD_RES (1)..(2): Xaa is C or S
XXVPQALSNITIQIMVGRKPKVLGEMSMIVR

SEQ ID NO: 104009 - protein, 37 aa, Artificial Sequence; identical to SEQ ID NO: 71325
  Cyclic GFR-binding peptide
  MOD_RES (3)..(4)..(36): Xaa is C or S

SEQ ID NO: 104010 - protein, 31 aa, Artificial Sequence; identical to SEQ ID NO: 24460
  Cyclic GFR-binding peptide

SEQ ID NO: 104011 - protein, 34 aa, Artificial Sequence
  Cyclic GFR-binding peptide
  MOD_RES (1)..(2)..(33): Xaa is C or S
XXVSQDLSNITIQIMIGKTPKILGEMSMIVKSXK

SEQ ID NO: 104012 - protein, 31 aa, Artificial Sequence; identical to SEQ ID NO: 74539
  Cyclic GFR-binding peptide
  MOD_RES (1)..(2): Xaa is C or S

SEQ ID NO: 104013 - protein, 38 aa, Artificial Sequence
  Cyclic GFR-binding peptide
  MOD_RES (3)..(4)..(36)..(38): Xaa is C or S
ASXXVPARLSNITIQIMDAANNVVIGEMSDMVVEAXGX

SEQ ID NO: 104014 - protein, 22 aa, Artificial Sequence
  Cyclic GFR-binding peptide
LSNITIQIMIGKTPKILGEMSM

SEQ ID NO: 104015 - protein, 33 aa, Artificial Sequence
  Cyclic GFR-binding peptide
  MOD_RES (30)..(32): Xaa is C or S
ARLSNITIQIMDAANNVVLGEMSDMVVEAXGXR

SEQ ID NO: 104016 - protein, 31 aa, Artificial Sequence
  Cyclic GFR-binding peptide
  MOD_RES (2)..(3): Xaa is C or S
PXXVSQDLSNITIQIMIGKTPKILGEMSMIV

SEQ ID NO: 104017 - protein, 30 aa, Artificial Sequence
  Cyclic GFR-binding peptide
  MOD_RES (2)..(3): Xaa is C or S
PXXTPTKMSNITMQIMNDKQQIIIGEMSGM

SEQ ID NO: 104018 - protein, 28 aa, Artificial Sequence
  Cyclic GFR-binding peptide
LSNITVQIMEIVRKKPIFIGEMSTLEDH

SEQ ID NO: 104019 - protein, 33 aa, Artificial Sequence
  Cyclic GFR-binding peptide
  MOD_RES (2)..(3): Xaa is C or S
PXXTPTKMSNITMQIMNDKQQIIIGEMSGMVVD

SEQ ID NO: 104020 - protein, 31 aa, Artificial Sequence; identical to SEQ ID NO: 24470
  Cyclic GFR-binding peptide
  MOD_RES (29)..(31): Xaa is C or S

SEQ ID NO: 104021 - protein, 37 aa, Artificial Sequence
  Cyclic GFR-binding peptide
  MOD_RES (4)..(5)..(36): Xaa is C or S
ASPXXVPQDLSNITIQIMVGRTPKVLGEMSMVVKSXK

SEQ ID NO: 104022 - protein, 31 aa, Artificial Sequence
  Cyclic GFR-binding peptide
  MOD_RES (1)..(2): Xaa is C or S
XXAPVKTSNITMQIMDNGRVLLIGEMSMIVE

SEQ ID NO: 104023 - protein, 29 aa, Artificial Sequence
  Cyclic GFR-binding peptide
  MOD_RES (3)..(4): Xaa is C or S
ASXXVPARLSNITIQIMDAANNVVLGEMS

SEQ ID NO: 104024 - protein, 27 aa, Artificial Sequence
  Cyclic GFR-binding peptide
LSNITIQIMDAANNVVIGEMSDMVVEA

SEQ ID NO: 104025 - protein, 40 aa, Artificial Sequence
  Cyclic GFR-binding peptide
  MOD_RES (6)..(7)..(39): Xaa is C or S
GSAGPXXTPTKMSNITMQIMNDKQQIIIGEMSGMVVDRXG

SEQ ID NO: 104026 - protein, 38 aa, Artificial Sequence
  Cyclic GFR-binding peptide
  MOD_RES (4)..(5)..(36)..(38): Xaa is C or S
PSTXXAPVKTSNITMQIMDNGRVLLIGEMSMIVEEXGX

SEQ ID NO: 104027 - protein, 40 aa, Artificial Sequence
  Cyclic GFR-binding peptide
  MOD_RES (5)..(6)..(38)..(40): Xaa is C or S
APASXXVPARLSNITIQIMDAANNVVLGEMSDMVVEAXGX

SEQ ID NO: 104028 - protein, 34 aa, Artificial Sequence; identical to SEQ ID NO: 24478
  Cyclic GFR-binding peptide
  MOD_RES (5)..(5): Xaa is C or S

SEQ ID NO: 104029 - protein, 35 aa, Artificial Sequence
  Cyclic GFR-binding peptide
  MOD_RES (3)..(4)..(35): Xaa is C or S
SPXXVSQDLSNITIQIMIGKTPKILGEMSMIVKSX

SEQ ID NO: 104030 - protein, 31 aa, Artificial Sequence
  Cyclic GFR-binding peptide
TPTKMSNITMQIMNDKQQIILGEMSGMVVDR

SEQ ID NO: 104031 - protein, 20 aa, Artificial Sequence
  Cyclic GFR-binding peptide
SNITMQIMNDKQQIIIGEMS

SEQ ID NO: 104032 - protein, 31 aa, Artificial Sequence
  Cyclic GFR-binding peptide
  MOD_RES (1)..(1): Xaa is C or S
XTPTKMSNITMQIMNDKQQIILGEMSGMVVD

SEQ ID NO: 104033 - protein, 33 aa, Artificial Sequence
  Cyclic GFR-binding peptide
  MOD_RES (3)..(4): Xaa is C or S
SPXXVPQDLSNITIQIMVGRTPKVLGEMSMVVK

SEQ ID NO: 104034 - protein, 38 aa, Artificial Sequence; identical to SEQ ID NO: 24480
  Cyclic GFR-binding peptide
  MOD_RES (36)..(38): Xaa is C or S

SEQ ID NO: 104035 - protein, 21 aa, Artificial Sequence
  Cyclic GFR-binding peptide
MSNITMQIMNDKQQIILGEMS

SEQ ID NO: 104036 - protein, 30 aa, Artificial Sequence; identical to SEQ ID NO: 24486
  Cyclic GFR-binding peptide
  MOD_RES (30)..(30): Xaa is C or S

SEQ ID NO: 104037 - protein, 28 aa, Artificial Sequence
  Cyclic GFR-binding peptide
  MOD_RES (2)..(3): Xaa is C or S
PXXAPTKLSNITVQIMDDSSNVIIGEMS

SEQ ID NO: 104038 - protein, 31 aa, Artificial Sequence; identical to SEQ ID NO: 24489
  Cyclic GFR-binding peptide
  MOD_RES (2)..(2): Xaa is C or S

SEQ ID NO: 104039 - protein, 34 aa, Artificial Sequence
  Cyclic GFR-binding peptide
  MOD_RES (1)..(33): Xaa is C or S
XVPARLSNITIQIMDAANNVVLGEMSDMVVEAXG

SEQ ID NO: 104040 - protein, 32 aa, Artificial Sequence; identical to SEQ ID NO: 71354
  Cyclic GFR-binding peptide
  MOD_RES (31)..(31): Xaa is C or S

SEQ ID NO: 104041 - protein, 33 aa, Artificial Sequence
  Cyclic GFR-binding peptide
  MOD_RES (3)..(4): Xaa is C or S
ASXXVPARLSNITIQIMDAANNVVLGEMSDMVV

SEQ ID NO: 104042 - protein, 34 aa, Artificial Sequence
  Cyclic GFR-binding peptide
  MOD_RES (31)..(33): Xaa is C or S
VSQDLSNITIQIMIGKTPKILGEMSMIVKSXKXS

SEQ ID NO: 104043 - protein, 28 aa, Artificial Sequence
  Cyclic GFR-binding peptide
VPQALSNITIQIMVGRKPKVLGEMSMIV

SEQ ID NO: 104044 - protein, 29 aa, Artificial Sequence
  Cyclic GFR-binding peptide
  MOD_RES (1)..(2): Xaa is C or S
XXVPARLSNITIQIMDAANNVVLGEMSDM

SEQ ID NO: 104045 - protein, 32 aa, Artificial Sequence
  Cyclic GFR-binding peptide
  MOD_RES (30)..(32): Xaa is C or S
ARLSNITIQIMDAANNVVIGEMSDMVVEAXGX

SEQ ID NO: 104046 - protein, 31 aa, Artificial Sequence
  Cyclic GFR-binding peptide
  MOD_RES (31)..(31): Xaa is C or S
VPQALSNITIQIMVGRKPKVLGEMSMIVRSX

SEQ ID NO: 104047 - protein, 39 aa, Artificial Sequence
  Cyclic GFR-binding peptide
  MOD_RES (4)..(5)..(36)..(38): Xaa is C or S
AAPXXVPQALSNITIQIMVGRKPKVLGEMSMIVRSXKXS

SEQ ID NO: 104048 - protein, 27 aa, Artificial Sequence
  Cyclic GFR-binding peptide
HSNITVQIMEYVRKKPKLLGEMSRLEE

SEQ ID NO: 104049 - protein, 24 aa, Artificial Sequence
  Cyclic GFR-binding peptide
LSNITVQIMEIVRKKPIFLGEMST

SEQ ID NO: 104050 - protein, 30 aa, Artificial Sequence
  Cyclic GFR-binding peptide
  MOD_RES (4)..(5): Xaa is C or S
PASXXVPARLSNITIQIMDAANNVVIGEMS

SEQ ID NO: 104051 - protein, 35 aa, Artificial Sequence; identical to SEQ ID NO: 71365
  Cyclic GFR-binding peptide
  MOD_RES (2)..(3)..(34): Xaa is C or S

SEQ ID NO: 104052 - protein, 22 aa, Artificial Sequence
  Cyclic GFR-binding peptide
ALSNITIQIMVGRKPKVIGEMS

SEQ ID NO: 104053 - protein, 30 aa, Artificial Sequence
  Cyclic GFR-binding peptide
  MOD_RES (3)..(4): Xaa is C or S
STXXAPVKTSNITMQIMDNGRVLLIGEMSM

SEQ ID NO: 104054 - protein, 34 aa, Artificial Sequence; identical to SEQ ID NO: 74589
  Cyclic GFR-binding peptide
  MOD_RES (4)..(5): Xaa is C or S

SEQ ID NO: 104055 - protein, 33 aa, Artificial Sequence
  Cyclic GFR-binding peptide
  MOD_RES (6)..(7): Xaa is C or S
GSAGPXXTPTKMSNITMQIMNDKQQIILGEMSG

SEQ ID NO: 104056 - protein, 36 aa, Artificial Sequence
  Cyclic GFR-binding peptide
  MOD_RES (6)..(7): Xaa is C or S
ASASPXXVSQDLSNITIQIMIGKTPKILGEMSMIVK

SEQ ID NO: 104057 - protein, 24 aa, Artificial Sequence
  Cyclic GFR-binding peptide
VKTSNITMQIMDNGRVLLIGEMSM

SEQ ID NO: 104058 - protein, 24 aa, Artificial Sequence
  Cyclic GFR-binding peptide
PTRLSNITIQIMDSANNVVLGEMS

SEQ ID NO: 104059 - protein, 36 aa, Artificial Sequence
  Cyclic GFR-binding peptide
  MOD_RES (5)..(6): Xaa is C or S
SAAPXXVPQALSNITIQIMVGRKPKVLGEMSMIVRS

SEQ ID NO: 104060 - protein, 24 aa, Artificial Sequence
  Cyclic GFR-binding peptide
SNITMQIMDNGRVLLLGEMSMIVE

SEQ ID NO: 104061 - protein, 29 aa, Artificial Sequence
  Cyclic GFR-binding peptide
PTRLSNITIQIMDSANNVVLGEMSDMVVE

SEQ ID NO: 104062 - protein, 30 aa, Artificial Sequence
  Cyclic GFR-binding peptide
  MOD_RES (30)..(30): Xaa is C or S
ARLSNITIQIMDAANNVVIGEMSDMVVEAX

SEQ ID NO: 104063 - protein, 30 aa, Artificial Sequence
  Cyclic GFR-binding peptide
  MOD_RES (27)..(29): Xaa is C or S
SNITVQIMDDSSNVILGEMSNMVVRSXGXH

SEQ ID NO: 104064 - protein, 37 aa, Artificial Sequence
  Cyclic GFR-binding peptide
  MOD_RES (5)..(6)..(37): Xaa is C or S
VPSTXXAPVKTSNITMQIMDNGRVLLLGEMSMIVEEX

SEQ ID NO: 104065 - protein, 27 aa, Artificial Sequence
  Cyclic GFR-binding peptide
ARLSNITIQIMDAANNVVIGEMSDMVV

SEQ ID NO: 104066 - protein, 23 aa, Artificial Sequence
  Cyclic GFR-binding peptide
LSNITIQIMIGKTPKILGEMSMI

SEQ ID NO: 104067 - protein, 32 aa, Artificial Sequence; identical to SEQ ID NO: 74614
  Cyclic GFR-binding peptide
  MOD_RES (3)..(4): Xaa is C or S

SEQ ID NO: 104068 - protein, 28 aa, Artificial Sequence
  Cyclic GFR-binding peptide
TKLSNITVQIMDDSSNVILGEMSNMVVR

SEQ ID NO: 104069 - protein, 32 aa, Artificial Sequence
  Cyclic GFR-binding peptide
  MOD_RES (6)..(7): Xaa is C or S
ASAAPXXVPQALSNITIQIMVGRKPKVLGEMS

SEQ ID NO: 104070 - protein, 30 aa, Artificial Sequence
  Cyclic GFR-binding peptide
  MOD_RES (28)..(30): Xaa is C or S
LSNITIQIMDAANNVVIGEMSDMVVEAXGX

SEQ ID NO: 104071 - protein, 40 aa, Artificial Sequence; identical to SEQ ID NO: 24530
  Cyclic GFR-binding peptide
  MOD_RES (5)..(39): Xaa is C or S

SEQ ID NO: 104072 - protein, 28 aa, Artificial Sequence
  Cyclic GFR-binding peptide
  MOD_RES (28)..(28): Xaa is C or S
MSNITMQIMNDKQQIIIGEMSGMVVDRX

SEQ ID NO: 104073 - protein, 29 aa, Artificial Sequence
  Cyclic GFR-binding peptide
  MOD_RES (29)..(29): Xaa is C or S
KMSNITMQIMNDKQQIIIGEMSGMVVDRX

SEQ ID NO: 104074 - protein, 30 aa, Artificial Sequence
  Cyclic GFR-binding peptide
  MOD_RES (30)..(30): Xaa is C or S
TRLSNITIQIMDSANNVVLGEMSDMVVESX

SEQ ID NO: 104075 - protein, 29 aa, Artificial Sequence
  Cyclic GFR-binding peptide
TQVQLSNITVQIMEIVRKKPIFLGEMSTL

SEQ ID NO: 104076 - protein, 25 aa, Artificial Sequence
  Cyclic GFR-binding peptide
PARLSNITIQIMDAANNVVLGEMSD

SEQ ID NO: 104077 - protein, 31 aa, Artificial Sequence; identical to SEQ ID NO: 71399
  Cyclic GFR-binding peptide
  MOD_RES (28)..(30): Xaa is C or S

SEQ ID NO: 104078 - protein, 27 aa, Artificial Sequence
  Cyclic GFR-binding peptide
SRVHHSNITVQIMEYVRKKPKLIGEMS

SEQ ID NO: 104079 - protein, 36 aa, Artificial Sequence; identical to SEQ ID NO: 24536
  Cyclic GFR-binding peptide
  MOD_RES (3)..(3): Xaa is C or S

SEQ ID NO: 104080 - protein, 38 aa, Artificial Sequence; identical to SEQ ID NO: 74630
  Cyclic GFR-binding peptide
  MOD_RES (6)..(7)..(38): Xaa is C or S

SEQ ID NO: 104081 - protein, 36 aa, Artificial Sequence; identical to SEQ ID NO: 24538
  Cyclic GFR-binding peptide
  MOD_RES (36)..(36): Xaa is C or S

SEQ ID NO: 104082 - protein, 23 aa, Artificial Sequence
  Cyclic GFR-binding peptide
TRLSNITIQIMDSANNVVLGEMS

SEQ ID NO: 104083 - protein, 27 aa, Artificial Sequence
  Cyclic GFR-binding peptide
DLSNITIQIMVGRTPKVIGEMSMVVKS

SEQ ID NO: 104084 - protein, 38 aa, Artificial Sequence; identical to SEQ ID NO: 24540
  Cyclic GFR-binding peptide
  MOD_RES (36)..(38): Xaa is C or S

SEQ ID NO: 104085 - protein, 32 aa, Artificial Sequence; identical to SEQ ID NO: 24541
  Cyclic GFR-binding peptide
  MOD_RES (32)..(32): Xaa is C or S

SEQ ID NO: 104086 - protein, 32 aa, Artificial Sequence
  Cyclic GFR-binding peptide
  MOD_RES (29)..(31): Xaa is C or S
QDLSNITIQIMVGRTPKVLGEMSMVVKSXKXS

SEQ ID NO: 104087 - protein, 32 aa, Artificial Sequence
  Cyclic GFR-binding peptide
  MOD_RES (5)..(6): Xaa is C or S
SASPXXVSQDLSNITIQIMIGKTPKILGEMSM

SEQ ID NO: 104088 - protein, 28 aa, Artificial Sequence
  Cyclic GFR-binding peptide
  MOD_RES (28)..(28): Xaa is C or S
ALSNITIQIMVGRKPKVIGEMSMIVRSX

SEQ ID NO: 104089 - protein, 31 aa, Artificial Sequence
  Cyclic GFR-binding peptide
  MOD_RES (1)..(2): Xaa is C or S
XXAPVKTSNITMQIMDNGRVLLLGEMSMIVE

SEQ ID NO: 104090 - protein, 34 aa, Artificial Sequence
  Cyclic GFR-binding peptide
  MOD_RES (2)..(3)..(34): Xaa is C or S
PXXVPQDLSNITIQIMVGRTPKVLGEMSMVVKSX

SEQ ID NO: 104091 - protein, 25 aa, Artificial Sequence
  Cyclic GFR-binding peptide
VPTRLSNITIQIMDSANNVVIGEMS

SEQ ID NO: 104092 - protein, 30 aa, Artificial Sequence; identical to SEQ ID NO: 71413
  Cyclic GFR-binding peptide

SEQ ID NO: 104093 - protein, 28 aa, Artificial Sequence
  Cyclic GFR-binding peptide
  MOD_RES (28)..(28): Xaa is C or S
LSNITIQIMDAANNVVIGEMSDMVVEAX

SEQ ID NO: 104094 - protein, 27 aa, Artificial Sequence
  Cyclic GFR-binding peptide
PTKMSNITMQIMNDKQQIIIGEMSGMV

SEQ ID NO: 104095 - protein, 32 aa, Artificial Sequence; identical to SEQ ID NO: 74642
  Cyclic GFR-binding peptide
  MOD_RES (31)..(31): Xaa is C or S

SEQ ID NO: 104096 - protein, 33 aa, Artificial Sequence; identical to SEQ ID NO: 24548
  Cyclic GFR-binding peptide
  MOD_RES (32)..(32): Xaa is C or S

SEQ ID NO: 104097 - protein, 30 aa, Artificial Sequence
  Cyclic GFR-binding peptide
  MOD_RES (27)..(29): Xaa is C or S
SNITIQIMDAANNVVLGEMSDMVVEAXGXR

SEQ ID NO: 104098 - protein, 26 aa, Artificial Sequence
  Cyclic GFR-binding peptide
MSNITMQIMNDKQQIILGEMSGMVVD

SEQ ID NO: 104099 - protein, 23 aa, Artificial Sequence
  Cyclic GFR-binding peptide
ALSNITIQIMVGRKPKVLGEMSM

SEQ ID NO: 104100 - protein, 32 aa, Artificial Sequence
  Cyclic GFR-binding peptide
  MOD_RES (5)..(6): Xaa is C or S
APASXXVPARLSNITIQIMDAANNVVIGEMSD

SEQ ID NO: 104101 - protein, 28 aa, Artificial Sequence
  Cyclic GFR-binding peptide
QVQLSNITVQIMEIVRKKPIFIGEMSTL

SEQ ID NO: 104102 - protein, 25 aa, Artificial Sequence
  Cyclic GFR-binding peptide
ARLSNITIQIMDAANNVVIGEMSDM

SEQ ID NO: 104103 - protein, 33 aa, Artificial Sequence; identical to SEQ ID NO: 71425
  Cyclic GFR-binding peptide
  MOD_RES (6)..(7): Xaa is C or S

SEQ ID NO: 104104 - protein, 36 aa, Artificial Sequence; identical to SEQ ID NO: 71426
  Cyclic GFR-binding peptide
  MOD_RES (5)..(6): Xaa is C or S

SEQ ID NO: 104105 - protein, 21 aa, Artificial Sequence
  Cyclic GFR-binding peptide
SNITIQIMDSANNVVLGEMSD

SEQ ID NO: 104106 - protein, 40 aa, Artificial Sequence
  Cyclic GFR-binding peptide
  MOD_RES (4)..(5)..(37)..(39): Xaa is C or S
PPTXXVPTRLSNITIQIMDSANNVVIGEMSDMVVESXGXR

SEQ ID NO: 104107 - protein, 38 aa, Artificial Sequence
  Cyclic GFR-binding peptide
  MOD_RES (3)..(4)..(36)..(38): Xaa is C or S
ASXXVPARLSNITIQIMDAANNVVLGEMSDMVVEAXGX

SEQ ID NO: 104108 - protein, 35 aa, Artificial Sequence; identical to SEQ ID NO: 24555
  Cyclic GFR-binding peptide
  MOD_RES (35)..(35): Xaa is C or S

SEQ ID NO: 104109 - protein, 41 aa, Artificial Sequence; identical to SEQ ID NO: 24557
  Cyclic GFR-binding peptide
  MOD_RES (5)..(39)..(41): Xaa is C or S

SEQ ID NO: 104110 - protein, 30 aa, Artificial Sequence; identical to SEQ ID NO: 71429
  Cyclic GFR-binding peptide
  MOD_RES (2)..(3): Xaa is C or S

SEQ ID NO: 104111 - protein, 37 aa, Artificial Sequence; identical to SEQ ID NO: 74648
  Cyclic GFR-binding peptide
  MOD_RES (5)..(6)..(37): Xaa is C or S

SEQ ID NO: 104112 - protein, 35 aa, Artificial Sequence
  Cyclic GFR-binding peptide
  MOD_RES (32)..(34): Xaa is C or S
APTKLSNITVQIMDDSSNVILGEMSNMVVRSXGXH

SEQ ID NO: 104113 - protein, 39 aa, Artificial Sequence; identical to SEQ ID NO: 24559
  Cyclic GFR-binding peptide
  MOD_RES (5)..(5): Xaa is C or S

SEQ ID NO: 104114 - protein, 38 aa, Artificial Sequence; identical to SEQ ID NO: 24560
  Cyclic GFR-binding peptide
  MOD_RES (37)..(37): Xaa is C or S

SEQ ID NO: 104115 - protein, 40 aa, Artificial Sequence; identical to SEQ ID NO: 24563
  Cyclic GFR-binding peptide
  MOD_RES (2)..(39): Xaa is C or S

SEQ ID NO: 104116 - protein, 29 aa, Artificial Sequence
  Cyclic GFR-binding peptide
PTQVQLSNITVQIMEIVRKKPIFIGEMST

SEQ ID NO: 104117 - protein, 35 aa, Artificial Sequence; identical to SEQ ID NO: 71433
  Cyclic GFR-binding peptide
  MOD_RES (6)..(7): Xaa is C or S

SEQ ID NO: 104118 - protein, 39 aa, Artificial Sequence; identical to SEQ ID NO: 24566
  Cyclic GFR-binding peptide
  MOD_RES (5)..(5): Xaa is C or S

SEQ ID NO: 104119 - protein, 31 aa, Artificial Sequence; identical to SEQ ID NO: 24567
  Cyclic GFR-binding peptide
  MOD_RES (1)..(1): Xaa is C or S

SEQ ID NO: 104120 - protein, 26 aa, Artificial Sequence
  Cyclic GFR-binding peptide
  MOD_RES (1)..(1): Xaa is C or S
XVPTRLSNITIQIMDSANNVVIGEMS

SEQ ID NO: 104121 - protein, 23 aa, Artificial Sequence
  Cyclic GFR-binding peptide
SNITVQIMDDSSNVIIGEMSNMV

SEQ ID NO: 104122 - protein, 35 aa, Artificial Sequence; identical to SEQ ID NO: 71440
  Cyclic GFR-binding peptide
  MOD_RES (5)..(6): Xaa is C or S

SEQ ID NO: 104123 - protein, 25 aa, Artificial Sequence
  Cyclic GFR-binding peptide
SQDLSNITIQIMIGKTPKIIGEMSM

SEQ ID NO: 104124 - protein, 30 aa, Artificial Sequence; identical to SEQ ID NO: 74659
  Cyclic GFR-binding peptide

SEQ ID NO: 104125 - protein, 26 aa, Artificial Sequence
  Cyclic GFR-binding peptide
SNITVQIMEIVRKKPIFLGEMSTLED

SEQ ID NO: 104126 - protein, 37 aa, Artificial Sequence; identical to SEQ ID NO: 24576
  Cyclic GFR-binding peptide
  MOD_RES (1)..(1): Xaa is C or S

SEQ ID NO: 104127 - protein, 31 aa, Artificial Sequence; identical to SEQ ID NO: 24577
  Cyclic GFR-binding peptide

SEQ ID NO: 104128 - protein, 30 aa, Artificial Sequence
  Cyclic GFR-binding peptide
PARLSNITIQIMDAANNVVIGEMSDMVVEA

SEQ ID NO: 104129 - protein, 33 aa, Artificial Sequence
  Cyclic GFR-binding peptide
  MOD_RES (1)..(2)..(33): Xaa is C or S
XXVPQALSNITIQIMVGRKPKVLGEMSMIVRSX

SEQ ID NO: 104130 - protein, 36 aa, Artificial Sequence
  Cyclic GFR-binding peptide
  MOD_RES (3)..(4)..(36): Xaa is C or S
PTXXVPTRLSNITIQIMDSANNVVIGEMSDMVVESX

SEQ ID NO: 104131 - protein, 30 aa, Artificial Sequence
  Cyclic GFR-binding peptide
  MOD_RES (1)..(2): Xaa is C or S
XXVPTRLSNITIQIMDSANNVVLGEMSDMV

SEQ ID NO: 104132 - protein, 33 aa, Artificial Sequence
  Cyclic GFR-binding peptide
  MOD_RES (5)..(6): Xaa is C or S
TPPTXXVPTRLSNITIQIMDSANNVVIGEMSDM

SEQ ID NO: 104133 - protein, 38 aa, Artificial Sequence; identical to SEQ ID NO: 74667
  Cyclic GFR-binding peptide
  MOD_RES (5)..(6)..(37): Xaa is C or S

SEQ ID NO: 104134 - protein, 35 aa, Artificial Sequence
  Cyclic GFR-binding peptide
  MOD_RES (3)..(4): Xaa is C or S
GPXXTPTKMSNITMQIMNDKQQIIIGEMSGMVVDR

SEQ ID NO: 104135 - protein, 38 aa, Artificial Sequence
  Cyclic GFR-binding peptide
  MOD_RES (5)..(6)..(38): Xaa is C or S
TPPTXXVPTRLSNITIQIMDSANNVVIGEMSDMVVESX

SEQ ID NO: 104136 - protein, 41 aa, Artificial Sequence; identical to SEQ ID NO: 24585
  Cyclic GFR-binding peptide
  MOD_RES (2)..(39)..(41): Xaa is C or S

SEQ ID NO: 104137 - protein, 34 aa, Artificial Sequence; identical to SEQ ID NO: 24586
  Cyclic GFR-binding peptide
  MOD_RES (34)..(34): Xaa is C or S

SEQ ID NO: 104138 - protein, 30 aa, Artificial Sequence; identical to SEQ ID NO: 71462
  Cyclic GFR-binding peptide
  MOD_RES (4)..(5): Xaa is C or S

SEQ ID NO: 104139 - protein, 39 aa, Artificial Sequence; identical to SEQ ID NO: 24588
  Cyclic GFR-binding peptide
  MOD_RES (36)..(38): Xaa is C or S

SEQ ID NO: 104140 - protein, 27 aa, Artificial Sequence
  Cyclic GFR-binding peptide
VPTRLSNITIQIMDSANNVVLGEMSDM

SEQ ID NO: 104141 - protein, 30 aa, Artificial Sequence
  Cyclic GFR-binding peptide
VPTRLSNITIQIMDSANNVVLGEMSDMVVE

SEQ ID NO: 104142 - protein, 36 aa, Artificial Sequence
  Cyclic GFR-binding peptide
  MOD_RES (1)..(2)..(34)..(36): Xaa is C or S
XXVPARLSNITIQIMDAANNVVLGEMSDMVVEAXGX

SEQ ID NO: 104143 - protein, 32 aa, Artificial Sequence; identical to SEQ ID NO: 24595
  Cyclic GFR-binding peptide
  MOD_RES (30)..(32): Xaa is C or S

SEQ ID NO: 104144 - protein, 34 aa, Artificial Sequence; identical to SEQ ID NO: 24597
  Cyclic GFR-binding peptide
  MOD_RES (1)..(1): Xaa is C or S

SEQ ID NO: 104145 - protein, 27 aa, Artificial Sequence
  Cyclic GFR-binding peptide
TPTKMSNITMQIMNDKQQIIIGEMSGM

SEQ ID NO: 104146 - protein, 38 aa, Artificial Sequence; identical to SEQ ID NO: 24599
  Cyclic GFR-binding peptide
  MOD_RES (1)..(38): Xaa is C or S

SEQ ID NO: 104147 - protein, 38 aa, Artificial Sequence; identical to SEQ ID NO: 24600
  Cyclic GFR-binding peptide
  MOD_RES (4)..(38): Xaa is C or S

SEQ ID NO: 104148 - protein, 32 aa, Artificial Sequence; identical to SEQ ID NO: 24603
  Cyclic GFR-binding peptide
  MOD_RES (32)..(32): Xaa is C or S

SEQ ID NO: 104149 - protein, 31 aa, Artificial Sequence; identical to SEQ ID NO: 24605
  Cyclic GFR-binding peptide

SEQ ID NO: 104150 - protein, 34 aa, Artificial Sequence; identical to SEQ ID NO: 24606
  Cyclic GFR-binding peptide
  MOD_RES (2)..(2): Xaa is C or S

SEQ ID NO: 104151 - protein, 38 aa, Artificial Sequence; identical to SEQ ID NO: 71475
  Cyclic GFR-binding peptide
  MOD_RES (6)..(7)..(38): Xaa is C or S

SEQ ID NO: 104152 - protein, 42 aa, Artificial Sequence
  Cyclic GFR-binding peptide
  MOD_RES (6)..(7)..(39)..(41): Xaa is C or S
STPPTXXVPTRLSNITIQIMDSANNVVLGEMSDMVVESXGXR

SEQ ID NO: 104153 - protein, 37 aa, Artificial Sequence; identical to SEQ ID NO: 24611
  Cyclic GFR-binding peptide
  MOD_RES (3)..(37): Xaa is C or S

SEQ ID NO: 104154 - protein, 35 aa, Artificial Sequence; identical to SEQ ID NO: 24613
  Cyclic GFR-binding peptide
  MOD_RES (1)..(35): Xaa is C or S

SEQ ID NO: 104155 - protein, 41 aa, Artificial Sequence; identical to SEQ ID NO: 24614
  Cyclic GFR-binding peptide
  MOD_RES (2)..(39)..(41): Xaa is C or S

SEQ ID NO: 104156 - protein, 32 aa, Artificial Sequence
  Cyclic GFR-binding peptide
  MOD_RES (6)..(7): Xaa is C or S
AAPASXXVPARLSNITIQIMDAANNVVIGEMS

SEQ ID NO: 104157 - protein, 34 aa, Artificial Sequence
  Cyclic GFR-binding peptide
  MOD_RES (1)..(33): Xaa is C or S
XTPTKMSNITMQIMNDKQQIIIGEMSGMVVDRXG

SEQ ID NO: 104158 - protein, 27 aa, Artificial Sequence
  Cyclic GFR-binding peptide
  MOD_RES (1)..(2): Xaa is C or S
XXVPTRLSNITIQIMDSANNVVLGEMS

SEQ ID NO: 104159 - protein, 24 aa, Artificial Sequence
  Cyclic GFR-binding peptide
HSNITVQIMEYVRKKPKLLGEMSR

SEQ ID NO: 104160 - protein, 28 aa, Artificial Sequence
  Cyclic GFR-binding peptide
SNITVQIMEYVRKKPKLLGEMSRLEEHL

SEQ ID NO: 104161 - protein, 33 aa, Artificial Sequence; identical to SEQ ID NO: 24623
  Cyclic GFR-binding peptide
  MOD_RES (30)..(32): Xaa is C or S

SEQ ID NO: 104162 - protein, 28 aa, Artificial Sequence
  Cyclic GFR-binding peptide
  MOD_RES (27)..(27): Xaa is C or S
SNITIQIMDSANNVVLGEMSDMVVESXG

SEQ ID NO: 104163 - protein, 38 aa, Artificial Sequence
  Cyclic GFR-binding peptide
  MOD_RES (2)..(3)..(35)..(37): Xaa is C or S
TXXVPTRLSNITIQIMDSANNVVIGEMSDMVVESXGXR

SEQ ID NO: 104164 - protein, 30 aa, Artificial Sequence; identical to SEQ ID NO: 74704
  Cyclic GFR-binding peptide
  MOD_RES (27)..(29): Xaa is C or S

SEQ ID NO: 104165 - protein, 25 aa, Artificial Sequence
  Cyclic GFR-binding peptide
RLSNITIQIMDSANNVVLGEMSDMV

SEQ ID NO: 104166 - protein, 37 aa, Artificial Sequence; identical to SEQ ID NO: 71494
  Cyclic GFR-binding peptide
  MOD_RES (3)..(4)..(35)..(37): Xaa is C or S

SEQ ID NO: 104167 - protein, 32 aa, Artificial Sequence
  Cyclic GFR-binding peptide
  MOD_RES (3)..(4): Xaa is C or S
SPXXVSQDLSNITIQIMIGKTPKILGEMSMIV

SEQ ID NO: 104168 - protein, 24 aa, Artificial Sequence
  Cyclic GFR-binding peptide
KMSNITMQIMNDKQQIIIGEMSGM

SEQ ID NO: 104169 - protein, 34 aa, Artificial Sequence; identical to SEQ ID NO: 24629
  Cyclic GFR-binding peptide
  MOD_RES (31)..(33): Xaa is C or S

SEQ ID NO: 104170 - protein, 23 aa, Artificial Sequence
  Cyclic GFR-binding peptide
SNITVQIMEIVRKKPIFIGEMST

SEQ ID NO: 104171 - protein, 34 aa, Artificial Sequence; identical to SEQ ID NO: 24633
  Cyclic GFR-binding peptide
  MOD_RES (33)..(33): Xaa is C or S

SEQ ID NO: 104172 - protein, 27 aa, Artificial Sequence
  Cyclic GFR-binding peptide
SNITMQIMRIKPHQGQHLGEMSFLQHN

SEQ ID NO: 104173 - protein, 29 aa, Artificial Sequence
  Cyclic GFR-binding peptide
  MOD_RES (29)..(29): Xaa is C or S
QDLSNITIQIMVGRTPKVLGEMSMVVKSX

SEQ ID NO: 104174 - protein, 32 aa, Artificial Sequence
  Cyclic GFR-binding peptide
  MOD_RES (1)..(1): Xaa is C or S
XVPTRLSNITIQIMDSANNVVLGEMSDMVVES

SEQ ID NO: 104175 - protein, 36 aa, Artificial Sequence
  Cyclic GFR-binding peptide
  MOD_RES (2)..(3)..(35): Xaa is C or S
TXXVPTRLSNITIQIMDSANNVVIGEMSDMVVESXG

SEQ ID NO: 104176 - protein, 37 aa, Artificial Sequence; identical to SEQ ID NO: 74713
  Cyclic GFR-binding peptide
  MOD_RES (3)..(4)..(35)..(37): Xaa is C or S

SEQ ID NO: 104177 - protein, 30 aa, Artificial Sequence; identical to SEQ ID NO: 74716
  Cyclic GFR-binding peptide
  MOD_RES (3)..(4): Xaa is C or S

SEQ ID NO: 104178 - protein, 39 aa, Artificial Sequence; identical to SEQ ID NO: 24639
  Cyclic GFR-binding peptide
  MOD_RES (3)..(3): Xaa is C or S

SEQ ID NO: 104179 - protein, 32 aa, Artificial Sequence
  Cyclic GFR-binding peptide
  MOD_RES (31)..(31): Xaa is C or S
PTKMSNITMQIMNDKQQIILGEMSGMVVDRXG

SEQ ID NO: 104180 - protein, 36 aa, Artificial Sequence
  Cyclic GFR-binding peptide
  MOD_RES (4)..(5)..(36): Xaa is C or S
AAPXXVPQALSNITIQIMVGRKPKVLGEMSMIVRSX

SEQ ID NO: 104181 - protein, 30 aa, Artificial Sequence
  Cyclic GFR-binding peptide
  MOD_RES (1)..(1): Xaa is C or S
XVPTRLSNITIQIMDSANNVVLGEMSDMVV

SEQ ID NO: 104182 - protein, 28 aa, Artificial Sequence
  Cyclic GFR-binding peptide
  MOD_RES (28)..(28): Xaa is C or S
LSNITIQIMDSANNVVIGEMSDMVVESX

SEQ ID NO: 104183 - protein, 34 aa, Artificial Sequence; identical to SEQ ID NO: 24644
  Cyclic GFR-binding peptide

SEQ ID NO: 104184 - protein, 25 aa, Artificial Sequence
  Cyclic GFR-binding peptide
KMSNITMQIMNDKQQIILGEMSGMV

SEQ ID NO: 104185 - protein, 42 aa, Artificial Sequence; identical to SEQ ID NO: 24649
  Cyclic GFR-binding peptide
  MOD_RES (2)..(39)..(41): Xaa is C or S

SEQ ID NO: 104186 - protein, 35 aa, Artificial Sequence; identical to SEQ ID NO: 24650
  Cyclic GFR-binding peptide
  MOD_RES (35)..(35): Xaa is C or S

SEQ ID NO: 104187 - protein, 36 aa, Artificial Sequence; identical to SEQ ID NO: 74728
  Cyclic GFR-binding peptide
  MOD_RES (4)..(5)..(36): Xaa is C or S

SEQ ID NO: 104188 - protein, 31 aa, Artificial Sequence
  Cyclic GFR-binding peptide
  MOD_RES (30)..(30): Xaa is C or S
TRLSNITIQIMDSANNVVIGEMSDMVVESXG

SEQ ID NO: 104189 - protein, 22 aa, Artificial Sequence
  Cyclic GFR-binding peptide
SNITIQIMDAANNVVIGEMSDM

SEQ ID NO: 104190 - protein, 33 aa, Artificial Sequence
  Cyclic GFR-binding peptide
  MOD_RES (2)..(3): Xaa is C or S
TXXAPVKTSNITMQIMDNGRVLLLGEMSMIVEE

SEQ ID NO: 104191 - protein, 29 aa, Artificial Sequence
  Cyclic GFR-binding peptide
ARLSNITIQIMDAANNVVLGEMSDMVVEA

SEQ ID NO: 104192 - protein, 26 aa, Artificial Sequence
  Cyclic GFR-binding peptide
  MOD_RES (26)..(26): Xaa is C or S
SNITIQIMVGRKPKVLGEMSMIVRSX

SEQ ID NO: 104193 - protein, 29 aa, Artificial Sequence
  Cyclic GFR-binding peptide
  MOD_RES (3)..(4): Xaa is C or S
STXXAPVKTSNITMQIMDNGRVLLIGEMS

SEQ ID NO: 104194 - protein, 38 aa, Artificial Sequence; identical to SEQ ID NO: 71515
  Cyclic GFR-binding peptide
  MOD_RES (4)..(5)..(36)..(38): Xaa is C or S

SEQ ID NO: 104195 - protein, 33 aa, Artificial Sequence
  Cyclic GFR-binding peptide
  MOD_RES (3)..(4): Xaa is C or S
GPXXTPTKMSNITMQIMNDKQQIIIGEMSGMVV

SEQ ID NO: 104196 - protein, 30 aa, Artificial Sequence; identical to SEQ ID NO: 24663
  Cyclic GFR-binding peptide

SEQ ID NO: 104197 - protein, 36 aa, Artificial Sequence
  Cyclic GFR-binding peptide
  MOD_RES (2)..(3)..(35): Xaa is C or S
TXXVPTRLSNITIQIMDSANNVVLGEMSDMVVESXG

SEQ ID NO: 104198 - protein, 36 aa, Artificial Sequence; identical to SEQ ID NO: 24670
  Cyclic GFR-binding peptide
  MOD_RES (7)..(7): Xaa is C or S

SEQ ID NO: 104199 - protein, 27 aa, Artificial Sequence
  Cyclic GFR-binding peptide
PTKMSNITMQIMNDKQQIILGEMSGMV

SEQ ID NO: 104200 - protein, 28 aa, Artificial Sequence
  Cyclic GFR-binding peptide
VQLSNITVQIMEIVRKKPIFIGEMSTLE

SEQ ID NO: 104201 - protein, 30 aa, Artificial Sequence; identical to SEQ ID NO: 71521
  Cyclic GFR-binding peptide
  MOD_RES (27)..(29): Xaa is C or S

SEQ ID NO: 104202 - protein, 30 aa, Artificial Sequence; identical to SEQ ID NO: 24672
  Cyclic GFR-binding peptide

SEQ ID NO: 104203 - protein, 30 aa, Artificial Sequence
  Cyclic GFR-binding peptide
  MOD_RES (2)..(3): Xaa is C or S
SXXVPARLSNITIQIMDAANNVVLGEMSDM

SEQ ID NO: 104204 - protein, 32 aa, Artificial Sequence
  Cyclic GFR-binding peptide
  MOD_RES (3)..(4): Xaa is C or S
PTXXVPTRLSNITIQIMDSANNVVLGEMSDMV

SEQ ID NO: 104205 - protein, 22 aa, Artificial Sequence
  Cyclic GFR-binding peptide
DLSNITIQIMIGKTPKILGEMS

SEQ ID NO: 104206 - protein, 36 aa, Artificial Sequence; identical to SEQ ID NO: 24678
  Cyclic GFR-binding peptide
  MOD_RES (35)..(35): Xaa is C or S

SEQ ID NO: 104207 - protein, 25 aa, Artificial Sequence
  Cyclic GFR-binding peptide
TGQSNITMQIMRIKPHQGQHIGEMS

SEQ ID NO: 104208 - protein, 38 aa, Artificial Sequence
  Cyclic GFR-binding peptide
  MOD_RES (6)..(7): Xaa is C or S
GSAGPXXTPTKMSNITMQIMNDKQQIILGEMSGMVVDR

SEQ ID NO: 104209 - protein, 30 aa, Artificial Sequence; identical to SEQ ID NO: 24684
  Cyclic GFR-binding peptide

SEQ ID NO: 104210 - protein, 26 aa, Artificial Sequence
  Cyclic GFR-binding peptide
DLSNITIQIMVGRTPKVLGEMSMVVK

SEQ ID NO: 104211 - protein, 33 aa, Artificial Sequence
  Cyclic GFR-binding peptide
  MOD_RES (30)..(32): Xaa is C or S
PVKTSNITMQIMDNGRVLLLGEMSMIVEEXGXL

SEQ ID NO: 104212 - protein, 34 aa, Artificial Sequence
  Cyclic GFR-binding peptide
  MOD_RES (1)..(33): Xaa is C or S
XVPTRLSNITIQIMDSANNVVLGEMSDMVVESXG

SEQ ID NO: 104213 - protein, 27 aa, Artificial Sequence
  Cyclic GFR-binding peptide
LSNITIQIMDSANNVVLGEMSDMVVES

SEQ ID NO: 104214 - protein, 32 aa, Artificial Sequence; identical to SEQ ID NO: 24690
  Cyclic GFR-binding peptide

SEQ ID NO: 104215 - protein, 31 aa, Artificial Sequence
  Cyclic GFR-binding peptide
  MOD_RES (5)..(6): Xaa is C or S
VPSTXXAPVKTSNITMQIMDNGRVLLLGEMS

SEQ ID NO: 104216 - protein, 24 aa, Artificial Sequence
  Cyclic GFR-binding peptide
PTKMSNITMQIMNDKQQIILGEMS

SEQ ID NO: 104217 - protein, 29 aa, Artificial Sequence
  Cyclic GFR-binding peptide
  MOD_RES (2)..(3): Xaa is C or S
TXXAPVKTSNITMQIMDNGRVLLIGEMSM

SEQ ID NO: 104218 - protein, 30 aa, Artificial Sequence; identical to SEQ ID NO: 24693
  Cyclic GFR-binding peptide

SEQ ID NO: 104219 - protein, 32 aa, Artificial Sequence; identical to SEQ ID NO: 24694
  Cyclic GFR-binding peptide
  MOD_RES (32)..(32): Xaa is C or S

SEQ ID NO: 104220 - protein, 31 aa, Artificial Sequence
  Cyclic GFR-binding peptide
  MOD_RES (30)..(30): Xaa is C or S
ARLSNITIQIMDAANNVVLGEMSDMVVEAXG

SEQ ID NO: 104221 - protein, 31 aa, Artificial Sequence; identical to SEQ ID NO: 24697
  Cyclic GFR-binding peptide

SEQ ID NO: 104222 - protein, 29 aa, Artificial Sequence
  Cyclic GFR-binding peptide
  MOD_RES (3)..(4): Xaa is C or S
PTXXVPTRLSNITIQIMDSANNVVIGEMS

SEQ ID NO: 104223 - protein, 32 aa, Artificial Sequence
  Cyclic GFR-binding peptide
  MOD_RES (29)..(31): Xaa is C or S
QDLSNITIQIMIGKTPKILGEMSMIVKSXKXS

SEQ ID NO: 104224 - protein, 31 aa, Artificial Sequence
  Cyclic GFR-binding peptide
  MOD_RES (31)..(31): Xaa is C or S
PARLSNITIQIMDAANNVVIGEMSDMVVEAX

SEQ ID NO: 104225 - protein, 27 aa, Artificial Sequence
  Cyclic GFR-binding peptide
PTEESNITMQIMRIKPHQGQHLGEMSF

SEQ ID NO: 104226 - protein, 31 aa, Artificial Sequence
  Cyclic GFR-binding peptide
  MOD_RES (31)..(31): Xaa is C or S
PARLSNITIQIMDAANNVVLGEMSDMVVEAX

SEQ ID NO: 104227 - protein, 24 aa, Artificial Sequence
  Cyclic GFR-binding peptide
PTRLSNITIQIMDSANNVVIGEMS

SEQ ID NO: 104228 - protein, 33 aa, Artificial Sequence
  Cyclic GFR-binding peptide
  MOD_RES (3)..(4): Xaa is C or S
SPXXVSQDLSNITIQIMIGKTPKILGEMSMIVK

SEQ ID NO: 104229 - protein, 34 aa, Artificial Sequence; identical to SEQ ID NO: 74775
  Cyclic GFR-binding peptide
  MOD_RES (5)..(6): Xaa is C or S

SEQ ID NO: 104230 - protein, 21 aa, Artificial Sequence
  Cyclic GFR-binding peptide
MSNITMQIMNDKQQIIIGEMS

SEQ ID NO: 104231 - protein, 26 aa, Artificial Sequence
  Cyclic GFR-binding peptide
  MOD_RES (26)..(26): Xaa is C or S
SNITIQIMVGRTPKVLGEMSMVVKSX

SEQ ID NO: 104232 - protein, 28 aa, Artificial Sequence
  Cyclic GFR-binding peptide
RVHHSNITVQIMEYVRKKPKLIGEMSRL

SEQ ID NO: 104233 - protein, 41 aa, Artificial Sequence
  Cyclic GFR-binding peptide
  MOD_RES (6)..(7)..(39)..(41): Xaa is C or S
GSAGPXXTPTKMSNITMQIMNDKQQIIIGEMSGMVVDRXGX

SEQ ID NO: 104234 - protein, 23 aa, Artificial Sequence
  Cyclic GFR-binding peptide
SNITIQIMIGKTPKILGEMSMIV

SEQ ID NO: 104235 - protein, 37 aa, Artificial Sequence; identical to SEQ ID NO: 24713
  Cyclic GFR-binding peptide
  MOD_RES (7)..(7): Xaa is C or S

SEQ ID NO: 104236 - protein, 21 aa, Artificial Sequence
  Cyclic GFR-binding peptide
LSNITIQIMDSANNVVLGEMS

SEQ ID NO: 104237 - protein, 25 aa, Artificial Sequence
  Cyclic GFR-binding peptide
HHSNITVQIMEYVRKKPKLIGEMSR

SEQ ID NO: 104238 - protein, 39 aa, Artificial Sequence
  Cyclic GFR-binding peptide
  MOD_RES (6)..(7)..(38): Xaa is C or S
ASASPXXVPQDLSNITIQIMVGRTPKVLGEMSMVVKSXK

SEQ ID NO: 104239 - protein, 34 aa, Artificial Sequence; identical to SEQ ID NO: 24723
  Cyclic GFR-binding peptide
  MOD_RES (3)..(3): Xaa is C or S

SEQ ID NO: 104240 - protein, 22 aa, Artificial Sequence
  Cyclic GFR-binding peptide
ALSNITIQIMVGRKPKVLGEMS

SEQ ID NO: 104241 - protein, 30 aa, Artificial Sequence
  Cyclic GFR-binding peptide
VPQALSNITIQIMVGRKPKVLGEMSMIVRS

SEQ ID NO: 104242 - protein, 30 aa, Artificial Sequence
  Cyclic GFR-binding peptide
  MOD_RES (29)..(29): Xaa is C or S
KMSNITMQIMNDKQQIILGEMSGMVVDRXG

SEQ ID NO: 104243 - protein, 20 aa, Artificial Sequence
  Cyclic GFR-binding peptide
SNITMQIMNDKQQIILGEMS

SEQ ID NO: 104244 - protein, 37 aa, Artificial Sequence; identical to SEQ ID NO: 24731
  Cyclic GFR-binding peptide
  MOD_RES (36)..(36): Xaa is C or S

SEQ ID NO: 104245 - protein, 25 aa, Artificial Sequence
  Cyclic GFR-binding peptide
KTSNITMQIMDNGRVLLLGEMSMIV

SEQ ID NO: 104246 - protein, 25 aa, Artificial Sequence
  Cyclic GFR-binding peptide
KTSNITMQIMDNGRVLLIGEMSMIV

SEQ ID NO: 104247 - protein, 32 aa, Artificial Sequence
  Cyclic GFR-binding peptide
  MOD_RES (1)..(2): Xaa is C or S
XXVPTRLSNITIQIMDSANNVVLGEMSDMVVE

SEQ ID NO: 104248 - protein, 36 aa, Artificial Sequence; identical to SEQ ID NO: 24733
  Cyclic GFR-binding peptide
  MOD_RES (4)..(4): Xaa is C or S

SEQ ID NO: 104249 - protein, 28 aa, Artificial Sequence
  Cyclic GFR-binding peptide
  MOD_RES (27)..(27): Xaa is C or S
LSNITIQIMVGRKPKVLGEMSMIVRSXK

SEQ ID NO: 104250 - protein, 30 aa, Artificial Sequence; identical to SEQ ID NO: 24736
  Cyclic GFR-binding peptide

SEQ ID NO: 104251 - protein, 38 aa, Artificial Sequence
  Cyclic GFR-binding peptide
  MOD_RES (4)..(5)..(37): Xaa is C or S
PKPXXAPTKLSNITVQIMDDSSNVILGEMSNMVVRSXG

SEQ ID NO: 104252 - protein, 30 aa, Artificial Sequence; identical to SEQ ID NO: 71585
  Cyclic GFR-binding peptide
  MOD_RES (28)..(30): Xaa is C or S

SEQ ID NO: 104253 - protein, 30 aa, Artificial Sequence; identical to SEQ ID NO: 71586
  Cyclic GFR-binding peptide
  MOD_RES (3)..(4): Xaa is C or S

SEQ ID NO: 104254 - protein, 30 aa, Artificial Sequence; identical to SEQ ID NO: 74795
  Cyclic GFR-binding peptide
  MOD_RES (28)..(30): Xaa is C or S

SEQ ID NO: 104255 - protein, 39 aa, Artificial Sequence; identical to SEQ ID NO: 24742
  Cyclic GFR-binding peptide
  MOD_RES (1)..(38): Xaa is C or S

SEQ ID NO: 104256 - protein, 26 aa, Artificial Sequence
  Cyclic GFR-binding peptide
VPQALSNITIQIMVGRKPKVLGEMSM

SEQ ID NO: 104257 - protein, 27 aa, Artificial Sequence
  Cyclic GFR-binding peptide
PQALSNITIQIMVGRKPKVIGEMSMIV

SEQ ID NO: 104258 - protein, 34 aa, Artificial Sequence; identical to SEQ ID NO: 74801
  Cyclic GFR-binding peptide
  MOD_RES (5)..(6): Xaa is C or S

SEQ ID NO: 104259 - protein, 25 aa, Artificial Sequence
  Cyclic GFR-binding peptide
VSQDLSNITIQIMIGKTPKILGEMS

SEQ ID NO: 104260 - protein, 34 aa, Artificial Sequence; identical to SEQ ID NO: 74803
  Cyclic GFR-binding peptide
  MOD_RES (2)..(3)..(34): Xaa is C or S

SEQ ID NO: 104261 - protein, 34 aa, Artificial Sequence
  Cyclic GFR-binding peptide
  MOD_RES (32)..(34): Xaa is C or S
APTKLSNITVQIMDDSSNVILGEMSNMVVRSXGX

SEQ ID NO: 104262 - protein, 24 aa, Artificial Sequence
  Cyclic GFR-binding peptide
EESNITMQIMRIKPHQGQHLGEMS

SEQ ID NO: 104263 - protein, 23 aa, Artificial Sequence
  Cyclic GFR-binding peptide
KLSNITVQIMDDSSNVILGEMSN

SEQ ID NO: 104264 - protein, 31 aa, Artificial Sequence; identical to SEQ ID NO: 24749
  Cyclic GFR-binding peptide
  MOD_RES (30)..(30): Xaa is C or S

SEQ ID NO: 104265 - protein, 32 aa, Artificial Sequence
  Cyclic GFR-binding peptide
  MOD_RES (6)..(7): Xaa is C or S
AAPASXXVPARLSNITIQIMDAANNVVLGEMS

SEQ ID NO: 104266 - protein, 25 aa, Artificial Sequence
  Cyclic GFR-binding peptide
PVKTSNITMQIMDNGRVLLIGEMSM

SEQ ID NO: 104267 - protein, 43 aa, Artificial Sequence; identical to SEQ ID NO: 24755
  Cyclic GFR-binding peptide
  MOD_RES (4)..(41)..(43): Xaa is C or S

SEQ ID NO: 104268 - protein, 30 aa, Artificial Sequence; identical to SEQ ID NO: 24756
  Cyclic GFR-binding peptide
  MOD_RES (30)..(30): Xaa is C or S

SEQ ID NO: 104269 - protein, 26 aa, Artificial Sequence
  Cyclic GFR-binding peptide
APVKTSNITMQIMDNGRVLLLGEMSM

SEQ ID NO: 104270 - protein, 28 aa, Artificial Sequence
  Cyclic GFR-binding peptide
RLSNITIQIMDAANNVVIGEMSDMVVEA

SEQ ID NO: 104271 - protein, 35 aa, Artificial Sequence; identical to SEQ ID NO: 24760
  Cyclic GFR-binding peptide
  MOD_RES (2)..(2): Xaa is C or S

SEQ ID NO: 104272 - protein, 29 aa, Artificial Sequence
  Cyclic GFR-binding peptide
  MOD_RES (28)..(28): Xaa is C or S
ALSNITIQIMVGRKPKVIGEMSMIVRSXK

SEQ ID NO: 104273 - protein, 33 aa, Artificial Sequence; identical to SEQ ID NO: 74822
  Cyclic GFR-binding peptide
  MOD_RES (6)..(7): Xaa is C or S

SEQ ID NO: 104274 - protein, 30 aa, Artificial Sequence
  Cyclic GFR-binding peptide
VPARLSNITIQIMDAANNVVLGEMSDMVVE

SEQ ID NO: 104275 - protein, 30 aa, Artificial Sequence; identical to SEQ ID NO: 24764
  Cyclic GFR-binding peptide

SEQ ID NO: 104276 - protein, 39 aa, Artificial Sequence
  Cyclic GFR-binding peptide
  MOD_RES (6)..(7)..(38): Xaa is C or S
ASASPXXVSQDLSNITIQIMIGKTPKILGEMSMIVKSXK

SEQ ID NO: 104277 - protein, 40 aa, Artificial Sequence; identical to SEQ ID NO: 24766
  Cyclic GFR-binding peptide
  MOD_RES (37)..(39): Xaa is C or S

SEQ ID NO: 104278 - protein, 34 aa, Artificial Sequence; identical to SEQ ID NO: 74828
  Cyclic GFR-binding peptide
  MOD_RES (4)..(5): Xaa is C or S

SEQ ID NO: 104279 - protein, 34 aa, Artificial Sequence
  Cyclic GFR-binding peptide
  MOD_RES (5)..(6): Xaa is C or S
VPSTXXAPVKTSNITMQIMDNGRVLLIGEMSMIV

SEQ ID NO: 104280 - protein, 38 aa, Artificial Sequence
  Cyclic GFR-binding peptide
  MOD_RES (6)..(7)..(38): Xaa is C or S
ASASPXXVSQDLSNITIQIMIGKTPKILGEMSMIVKSX

SEQ ID NO: 104281 - protein, 21 aa, Artificial Sequence
  Cyclic GFR-binding peptide
SNITMQIMNDKQQIIIGEMSG

SEQ ID NO: 104282 - protein, 33 aa, Artificial Sequence
  Cyclic GFR-binding peptide
  MOD_RES (5)..(6): Xaa is C or S
VPSTXXAPVKTSNITMQIMDNGRVLLLGEMSMI

SEQ ID NO: 104283 - protein, 33 aa, Artificial Sequence
  Cyclic GFR-binding peptide
  MOD_RES (32)..(32): Xaa is C or S
VPARLSNITIQIMDAANNVVIGEMSDMVVEAXG

SEQ ID NO: 104284 - protein, 35 aa, Artificial Sequence; identical to SEQ ID NO: 24771
  Cyclic GFR-binding peptide

SEQ ID NO: 104285 - protein, 31 aa, Artificial Sequence; identical to SEQ ID NO: 24773
  Cyclic GFR-binding peptide

SEQ ID NO: 104286 - protein, 32 aa, Artificial Sequence
  Cyclic GFR-binding peptide
  MOD_RES (6)..(7): Xaa is C or S
HVPKPXXAPTKLSNITVQIMDDSSNVIIGEMS

SEQ ID NO: 104287 - protein, 40 aa, Artificial Sequence; identical to SEQ ID NO: 24776
  Cyclic GFR-binding peptide
  MOD_RES (1)..(38)..(40): Xaa is C or S

SEQ ID NO: 104288 - protein, 36 aa, Artificial Sequence; identical to SEQ ID NO: 24778
  Cyclic GFR-binding peptide
  MOD_RES (1)..(1): Xaa is C or S

SEQ ID NO: 104289 - protein, 24 aa, Artificial Sequence
  Cyclic GFR-binding peptide
SNITVQIMEYVRKKPKLIGEMSRL

SEQ ID NO: 104290 - protein, 31 aa, Artificial Sequence
  Cyclic GFR-binding peptide
  MOD_RES (4)..(5): Xaa is C or S
ASPXXVPQDLSNITIQIMVGRTPKVLGEMSM

SEQ ID NO: 104291 - protein, 28 aa, Artificial Sequence
  Cyclic GFR-binding peptide
VQLSNITVQIMEIVRKKPIFLGEMSTLE

SEQ ID NO: 104292 - protein, 26 aa, Artificial Sequence
  Cyclic GFR-binding peptide
SQDLSNITIQIMIGKTPKILGEMSMI

SEQ ID NO: 104293 - protein, 34 aa, Artificial Sequence; identical to SEQ ID NO: 24786
  Cyclic GFR-binding peptide

SEQ ID NO: 104294 - protein, 35 aa, Artificial Sequence; identical to SEQ ID NO: 24787
  Cyclic GFR-binding peptide
  MOD_RES (5)..(5): Xaa is C or S

SEQ ID NO: 104295 - protein, 28 aa, Artificial Sequence
  Cyclic GFR-binding peptide
  MOD_RES (1)..(1): Xaa is C or S
XAPVKTSNITMQIMDNGRVLLLGEMSMI

SEQ ID NO: 104296 - protein, 40 aa, Artificial Sequence; identical to SEQ ID NO: 24789
  Cyclic GFR-binding peptide
  MOD_RES (4)..(4): Xaa is C or S

SEQ ID NO: 104297 - protein, 27 aa, Artificial Sequence
  Cyclic GFR-binding peptide
  MOD_RES (27)..(27): Xaa is C or S
SNITIQIMDSANNVVLGEMSDMVVESX

SEQ ID NO: 104298 - protein, 39 aa, Artificial Sequence; identical to SEQ ID NO: 74848
  Cyclic GFR-binding peptide
  MOD_RES (5)..(6)..(37)..(39): Xaa is C or S

SEQ ID NO: 104299 - protein, 38 aa, Artificial Sequence
  Cyclic GFR-binding peptide
  MOD_RES (4)..(5)..(37): Xaa is C or S
PASXXVPARLSNITIQIMDAANNVVIGEMSDMVVEAXG

SEQ ID NO: 104300 - protein, 40 aa, Artificial Sequence; identical to SEQ ID NO: 71626
  Cyclic GFR-binding peptide
  MOD_RES (6)..(7)..(38)..(40): Xaa is C or S

SEQ ID NO: 104301 - protein, 34 aa, Artificial Sequence
  Cyclic GFR-binding peptide
  MOD_RES (5)..(6): Xaa is C or S
SAAPXXVPQALSNITIQIMVGRKPKVLGEMSMIV

SEQ ID NO: 104302 - protein, 26 aa, Artificial Sequence
  Cyclic GFR-binding peptide
  MOD_RES (1)..(1): Xaa is C or S
XTPTKMSNITMQIMNDKQQIILGEMS

SEQ ID NO: 104303 - protein, 34 aa, Artificial Sequence; identical to SEQ ID NO: 24792
  Cyclic GFR-binding peptide
  MOD_RES (34)..(34): Xaa is C or S

SEQ ID NO: 104304 - protein, 31 aa, Artificial Sequence
  Cyclic GFR-binding peptide
  MOD_RES (1)..(1): Xaa is C or S
XVPARLSNITIQIMDAANNVVLGEMSDMVVE

SEQ ID NO: 104305 - protein, 29 aa, Artificial Sequence
  Cyclic GFR-binding peptide
TKLSNITVQIMDDSSNVILGEMSNMVVRS

SEQ ID NO: 104306 - protein, 27 aa, Artificial Sequence
  Cyclic GFR-binding peptide
QVQLSNITVQIMEIVRKKPIFIGEMST

SEQ ID NO: 104307 - protein, 28 aa, Artificial Sequence
  Cyclic GFR-binding peptide
  MOD_RES (27)..(27): Xaa is C or S
TSNITMQIMDNGRVLLLGEMSMIVEEXG

SEQ ID NO: 104308 - protein, 36 aa, Artificial Sequence; identical to SEQ ID NO: 24797
  Cyclic GFR-binding peptide
  MOD_RES (2)..(2): Xaa is C or S

SEQ ID NO: 104309 - protein, 28 aa, Artificial Sequence
  Cyclic GFR-binding peptide
PTKMSNITMQIMNDKQQIILGEMSGMVV

SEQ ID NO: 104310 - protein, 33 aa, Artificial Sequence
  Cyclic GFR-binding peptide
  MOD_RES (32)..(32): Xaa is C or S
TPTKMSNITMQIMNDKQQIIIGEMSGMVVDRXG

SEQ ID NO: 104311 - protein, 25 aa, Artificial Sequence
  Cyclic GFR-binding peptide
LSNITIQIMVGRKPKVLGEMSMIVR

SEQ ID NO: 104312 - protein, 31 aa, Artificial Sequence
  Cyclic GFR-binding peptide
  MOD_RES (4)..(5): Xaa is C or S
PASXXVPARLSNITIQIMDAANNVVLGEMSD

SEQ ID NO: 104313 - protein, 30 aa, Artificial Sequence
  Cyclic GFR-binding peptide
PTRLSNITIQIMDSANNVVLGEMSDMVVES

SEQ ID NO: 104314 - protein, 26 aa, Artificial Sequence
  Cyclic GFR-binding peptide
VQLSNITVQIMEIVRKKPIFLGEMST

SEQ ID NO: 104315 - protein, 26 aa, Artificial Sequence
  Cyclic GFR-binding peptide
PTRLSNITIQIMDSANNVVLGEMSDM

SEQ ID NO: 104316 - protein, 24 aa, Artificial Sequence
  Cyclic GFR-binding peptide
LSNITIQIMDSANNVVLGEMSDMV

SEQ ID NO: 104317 - protein, 33 aa, Artificial Sequence
  Cyclic GFR-binding peptide
  MOD_RES (30)..(32): Xaa is C or S
TRLSNITIQIMDSANNVVLGEMSDMVVESXGXR

SEQ ID NO: 104318 - protein, 32 aa, Artificial Sequence; identical to SEQ ID NO: 24808
  Cyclic GFR-binding peptide
  MOD_RES (30)..(32): Xaa is C or S

SEQ ID NO: 104319 - protein, 32 aa, Artificial Sequence
  Cyclic GFR-binding peptide
  MOD_RES (6)..(7): Xaa is C or S
RVPSTXXAPVKTSNITMQIMDNGRVLLIGEMS

SEQ ID NO: 104320 - protein, 43 aa, Artificial Sequence; identical to SEQ ID NO: 24815
  Cyclic GFR-binding peptide
  MOD_RES (4)..(41)..(43): Xaa is C or S

SEQ ID NO: 104321 - protein, 35 aa, Artificial Sequence
  Cyclic GFR-binding peptide
  MOD_RES (2)..(3)..(34): Xaa is C or S
PXXVPQDLSNITIQIMVGRTPKVLGEMSMVVKSXK

SEQ ID NO: 104322 - protein, 25 aa, Artificial Sequence
  Cyclic GFR-binding peptide
VPQALSNITIQIMVGRKPKVIGEMS

SEQ ID NO: 104323 - protein, 30 aa, Artificial Sequence
  Cyclic GFR-binding peptide
  MOD_RES (28)..(30): Xaa is C or S
LSNITIQIMDAANNVVLGEMSDMVVEAXGX

SEQ ID NO: 104324 - protein, 34 aa, Artificial Sequence
  Cyclic GFR-binding peptide
  MOD_RES (2)..(3): Xaa is C or S
TXXVPTRLSNITIQIMDSANNVVLGEMSDMVVES

SEQ ID NO: 104325 - protein, 34 aa, Artificial Sequence
  Cyclic GFR-binding peptide
  MOD_RES (5)..(6): Xaa is C or S
VPKPXXAPTKLSNITVQIMDDSSNVILGEMSNMV

SEQ ID NO: 104326 - protein, 33 aa, Artificial Sequence
  Cyclic GFR-binding peptide
  MOD_RES (32)..(32): Xaa is C or S
VPARLSNITIQIMDAANNVVLGEMSDMVVEAXG

SEQ ID NO: 104327 - protein, 33 aa, Artificial Sequence; identical to SEQ ID NO: 24819
  Cyclic GFR-binding peptide

SEQ ID NO: 104328 - protein, 31 aa, Artificial Sequence
  Cyclic GFR-binding peptide
  MOD_RES (2)..(3): Xaa is C or S
TXXVPTRLSNITIQIMDSANNVVIGEMSDMV

SEQ ID NO: 104329 - protein, 32 aa, Artificial Sequence
  Cyclic GFR-binding peptide
  MOD_RES (30)..(32): Xaa is C or S
TKMSNITMQIMNDKQQIIIGEMSGMVVDRXGX

SEQ ID NO: 104330 - protein, 28 aa, Artificial Sequence
  Cyclic GFR-binding peptide
VHHSNITVQIMEYVRKKPKLIGEMSRLE

SEQ ID NO: 104331 - protein, 32 aa, Artificial Sequence; identical to SEQ ID NO: 74868
  Cyclic GFR-binding peptide
  MOD_RES (29)..(31): Xaa is C or S

SEQ ID NO: 104332 - protein, 35 aa, Artificial Sequence
  Cyclic GFR-binding peptide
  MOD_RES (4)..(5): Xaa is C or S
AGPXXTPTKMSNITMQIMNDKQQIILGEMSGMVVD

SEQ ID NO: 104333 - protein, 36 aa, Artificial Sequence; identical to SEQ ID NO: 71660
  Cyclic GFR-binding peptide
  MOD_RES (2)..(3)..(34)..(36): Xaa is C or S

SEQ ID NO: 104334 - protein, 22 aa, Artificial Sequence
  Cyclic GFR-binding peptide
SNITMQIMNDKQQIIIGEMSGM

SEQ ID NO: 104335 - protein, 35 aa, Artificial Sequence; identical to SEQ ID NO: 71662
  Cyclic GFR-binding peptide
  MOD_RES (2)..(3)..(34): Xaa is C or S

SEQ ID NO: 104336 - protein, 30 aa, Artificial Sequence; identical to SEQ ID NO: 71663
  Cyclic GFR-binding peptide

SEQ ID NO: 104337 - protein, 39 aa, Artificial Sequence; identical to SEQ ID NO: 71664
  Cyclic GFR-binding peptide
  MOD_RES (6)..(7)..(38): Xaa is C or S

SEQ ID NO: 104338 - protein, 33 aa, Artificial Sequence; identical to SEQ ID NO: 24835
  Cyclic GFR-binding peptide
  MOD_RES (31)..(33): Xaa is C or S

SEQ ID NO: 104339 - protein, 24 aa, Artificial Sequence
  Cyclic GFR-binding peptide
SNITVQIMEIVRKKPIFIGEMSTL

SEQ ID NO: 104340 - protein, 28 aa, Artificial Sequence
  Cyclic GFR-binding peptide
  MOD_RES (28)..(28): Xaa is C or S
LSNITIQIMDAANNVVLGEMSDMVVEAX

SEQ ID NO: 104341 - protein, 30 aa, Artificial Sequence; identical to SEQ ID NO: 24844
  Cyclic GFR-binding peptide

SEQ ID NO: 104342 - protein, 35 aa, Artificial Sequence; identical to SEQ ID NO: 24845
  Cyclic GFR-binding peptide
  MOD_RES (32)..(34): Xaa is C or S

SEQ ID NO: 104343 - protein, 28 aa, Artificial Sequence
  Cyclic GFR-binding peptide
  MOD_RES (27)..(27): Xaa is C or S
LSNITIQIMVGRKPKVIGEMSMIVRSXK

SEQ ID NO: 104344 - protein, 26 aa, Artificial Sequence
  Cyclic GFR-binding peptide
VPARLSNITIQIMDAANNVVIGEMSD

SEQ ID NO: 104345 - protein, 34 aa, Artificial Sequence; identical to SEQ ID NO: 24846
  Cyclic GFR-binding peptide
  MOD_RES (32)..(34): Xaa is C or S

SEQ ID NO: 104346 - protein, 34 aa, Artificial Sequence; identical to SEQ ID NO: 71672
  Cyclic GFR-binding peptide
  MOD_RES (3)..(4): Xaa is C or S

SEQ ID NO: 104347 - protein, 28 aa, Artificial Sequence
  Cyclic GFR-binding peptide
RLSNITIQIMDSANNVVLGEMSDMVVES

SEQ ID NO: 104348 - protein, 30 aa, Artificial Sequence
  Cyclic GFR-binding peptide
  MOD_RES (4)..(5): Xaa is C or S
PASXXVPARLSNITIQIMDAANNVVLGEMS

SEQ ID NO: 104349 - protein, 25 aa, Artificial Sequence
  Cyclic GFR-binding peptide
SNITIQIMDSANNVVIGEMSDMVVE

SEQ ID NO: 104350 - protein, 34 aa, Artificial Sequence; identical to SEQ ID NO: 71675
  Cyclic GFR-binding peptide
  MOD_RES (2)..(3)..(34): Xaa is C or S

SEQ ID NO: 104351 - protein, 27 aa, Artificial Sequence
  Cyclic GFR-binding peptide
RLSNITIQIMDSANNVVLGEMSDMVVE

SEQ ID NO: 104352 - protein, 26 aa, Artificial Sequence
  Cyclic GFR-binding peptide
RLSNITIQIMDSANNVVLGEMSDMVV

SEQ ID NO: 104353 - protein, 40 aa, Artificial Sequence; identical to SEQ ID NO: 24850
  Cyclic GFR-binding peptide
  MOD_RES (5)..(5): Xaa is C or S

SEQ ID NO: 104354 - protein, 28 aa, Artificial Sequence
  Cyclic GFR-binding peptide
TRLSNITIQIMDSANNVVIGEMSDMVVE

SEQ ID NO: 104355 - protein, 31 aa, Artificial Sequence
  Cyclic GFR-binding peptide
  MOD_RES (29)..(31): Xaa is C or S
QALSNITIQIMVGRKPKVLGEMSMIVRSXKX

SEQ ID NO: 104356 - protein, 39 aa, Artificial Sequence
  Cyclic GFR-binding peptide
  MOD_RES (3)..(4)..(36)..(38): Xaa is C or S
ASXXVPARLSNITIQIMDAANNVVIGEMSDMVVEAXGXR

SEQ ID NO: 104357 - protein, 22 aa, Artificial Sequence
  Cyclic GFR-binding peptide
SNITIQIMDSANNVVIGEMSDM

SEQ ID NO: 104358 - protein, 38 aa, Artificial Sequence; identical to SEQ ID NO: 71681
  Cyclic GFR-binding peptide
  MOD_RES (4)..(5)..(36)..(38): Xaa is C or S

SEQ ID NO: 104359 - protein, 31 aa, Artificial Sequence
  Cyclic GFR-binding peptide
  MOD_RES (4)..(5): Xaa is C or S
PSTXXAPVKTSNITMQIMDNGRVLLLGEMSM

SEQ ID NO: 104360 - protein, 42 aa, Artificial Sequence; identical to SEQ ID NO: 24861
  Cyclic GFR-binding peptide
  MOD_RES (2)..(39)..(41): Xaa is C or S

SEQ ID NO: 104361 - protein, 28 aa, Artificial Sequence
  Cyclic GFR-binding peptide
  MOD_RES (28)..(28): Xaa is C or S
DLSNITIQIMIGKTPKILGEMSMIVKSX

SEQ ID NO: 104362 - protein, 32 aa, Artificial Sequence; identical to SEQ ID NO: 24863
  Cyclic GFR-binding peptide
  MOD_RES (32)..(32): Xaa is C or S

SEQ ID NO: 104363 - protein, 30 aa, Artificial Sequence
  Cyclic GFR-binding peptide
  MOD_RES (27)..(29): Xaa is C or S
SNITMQIMNDKQQIIIGEMSGMVVDRXGXS

SEQ ID NO: 104364 - protein, 26 aa, Artificial Sequence
  Cyclic GFR-binding peptide
LSNITIQIMDAANNVVIGEMSDMVVE

SEQ ID NO: 104365 - protein, 35 aa, Artificial Sequence; identical to SEQ ID NO: 24869
  Cyclic GFR-binding peptide
  MOD_RES (4)..(4): Xaa is C or S

SEQ ID NO: 104366 - protein, 30 aa, Artificial Sequence
  Cyclic GFR-binding peptide
TPTKMSNITMQIMNDKQQIILGEMSGMVVD

SEQ ID NO: 104367 - protein, 34 aa, Artificial Sequence
  Cyclic GFR-binding peptide
  MOD_RES (1)..(2)..(33): Xaa is C or S
XXVPQDLSNITIQIMVGRTPKVLGEMSMVVKSXK

SEQ ID NO: 104368 - protein, 32 aa, Artificial Sequence
  Cyclic GFR-binding peptide
  MOD_RES (5)..(6): Xaa is C or S
SAAPXXVPQALSNITIQIMVGRKPKVLGEMSM

SEQ ID NO: 104369 - protein, 30 aa, Artificial Sequence
  Cyclic GFR-binding peptide
  MOD_RES (30)..(30): Xaa is C or S
TRLSNITIQIMDSANNVVIGEMSDMVVESX

SEQ ID NO: 104370 - protein, 33 aa, Artificial Sequence
  Cyclic GFR-binding peptide
  MOD_RES (6)..(7): Xaa is C or S
STPPTXXVPTRLSNITIQIMDSANNVVLGEMSD

SEQ ID NO: 104371 - protein, 28 aa, Artificial Sequence
  Cyclic GFR-binding peptide
  MOD_RES (28)..(28): Xaa is C or S
MSNITMQIMNDKQQIILGEMSGMVVDRX

SEQ ID NO: 104372 - protein, 33 aa, Artificial Sequence; identical to SEQ ID NO: 74920
  Cyclic GFR-binding peptide
  MOD_RES (30)..(32): Xaa is C or S

SEQ ID NO: 104373 - protein, 26 aa, Artificial Sequence
  Cyclic GFR-binding peptide
TKLSNITVQIMDDSSNVIIGEMSNMV

SEQ ID NO: 104374 - protein, 28 aa, Artificial Sequence
  Cyclic GFR-binding peptide
PTQVQLSNITVQIMEIVRKKPIFIGEMS

SEQ ID NO: 104375 - protein, 32 aa, Artificial Sequence
  Cyclic GFR-binding peptide
  MOD_RES (4)..(5): Xaa is C or S
AGPXXTPTKMSNITMQIMNDKQQIIIGEMSGM

SEQ ID NO: 104376 - protein, 39 aa, Artificial Sequence; identical to SEQ ID NO: 71704
  Cyclic GFR-binding peptide
  MOD_RES (6)..(7)..(38): Xaa is C or S

SEQ ID NO: 104377 - protein, 34 aa, Artificial Sequence
  Cyclic GFR-binding peptide
  MOD_RES (6)..(7): Xaa is C or S
GSAGPXXTPTKMSNITMQIMNDKQQIIIGEMSGM

SEQ ID NO: 104378 - protein, 29 aa, Artificial Sequence
  Cyclic GFR-binding peptide
  MOD_RES (2)..(3): Xaa is C or S
SXXVPARLSNITIQIMDAANNVVLGEMSD

SEQ ID NO: 104379 - protein, 30 aa, Artificial Sequence; identical to SEQ ID NO: 24878
  Cyclic GFR-binding peptide

SEQ ID NO: 104380 - protein, 35 aa, Artificial Sequence; identical to SEQ ID NO: 24879
  Cyclic GFR-binding peptide
  MOD_RES (3)..(3): Xaa is C or S

SEQ ID NO: 104381 - protein, 33 aa, Artificial Sequence; identical to SEQ ID NO: 74925
  Cyclic GFR-binding peptide
  MOD_RES (30)..(32): Xaa is C or S

SEQ ID NO: 104382 - protein, 27 aa, Artificial Sequence
  Cyclic GFR-binding peptide
  MOD_RES (27)..(27): Xaa is C or S
SNITIQIMDSANNVVIGEMSDMVVESX

SEQ ID NO: 104383 - protein, 34 aa, Artificial Sequence
  Cyclic GFR-binding peptide
  MOD_RES (5)..(6): Xaa is C or S
APASXXVPARLSNITIQIMDAANNVVLGEMSDMV

SEQ ID NO: 104384 - protein, 37 aa, Artificial Sequence
  Cyclic GFR-binding peptide
  MOD_RES (2)..(3)..(34)..(36): Xaa is C or S
PXXVPQDLSNITIQIMVGRTPKVLGEMSMVVKSXKXS

SEQ ID NO: 104385 - protein, 34 aa, Artificial Sequence
  Cyclic GFR-binding peptide
  MOD_RES (3)..(4): Xaa is C or S
APXXVPQALSNITIQIMVGRKPKVLGEMSMIVRS

SEQ ID NO: 104386 - protein, 41 aa, Artificial Sequence
  Cyclic GFR-binding peptide
  MOD_RES (6)..(7)..(38)..(40): Xaa is C or S
RVPSTXXAPVKTSNITMQIMDNGRVLLLGEMSMIVEEXGXL

SEQ ID NO: 104387 - protein, 32 aa, Artificial Sequence
  Cyclic GFR-binding peptide
  MOD_RES (30)..(32): Xaa is C or S
PQALSNITIQIMVGRKPKVLGEMSMIVRSXKX

SEQ ID NO: 104388 - protein, 32 aa, Artificial Sequence
  Cyclic GFR-binding peptide
  MOD_RES (30)..(32): Xaa is C or S
SQDLSNITIQIMIGKTPKILGEMSMIVKSXKX

SEQ ID NO: 104389 - protein, 32 aa, Artificial Sequence; identical to SEQ ID NO: 24886
  Cyclic GFR-binding peptide
  MOD_RES (32)..(32): Xaa is C or S

SEQ ID NO: 104390 - protein, 34 aa, Artificial Sequence
  Cyclic GFR-binding peptide
  MOD_RES (2)..(3): Xaa is C or S
PXXTPTKMSNITMQIMNDKQQIILGEMSGMVVDR

SEQ ID NO: 104391 - protein, 32 aa, Artificial Sequence; identical to SEQ ID NO: 24888
  Cyclic GFR-binding peptide
  MOD_RES (5)..(5): Xaa is C or S

SEQ ID NO: 104392 - protein, 33 aa, Artificial Sequence; identical to SEQ ID NO: 24890
  Cyclic GFR-binding peptide

SEQ ID NO: 104393 - protein, 26 aa, Artificial Sequence
  Cyclic GFR-binding peptide
HHSNITVQIMEYVRKKPKLIGEMSRL

SEQ ID NO: 104394 - protein, 33 aa, Artificial Sequence
  Cyclic GFR-binding peptide
  MOD_RES (5)..(6): Xaa is C or S
SAGPXXTPTKMSNITMQIMNDKQQIIIGEMSGM

SEQ ID NO: 104395 - protein, 23 aa, Artificial Sequence
  Cyclic GFR-binding peptide
SNITVQIMEYVRKKPKLIGEMSR

SEQ ID NO: 104396 - protein, 25 aa, Artificial Sequence
  Cyclic GFR-binding peptide
TPTKMSNITMQIMNDKQQIIIGEMS

SEQ ID NO: 104397 - protein, 36 aa, Artificial Sequence; identical to SEQ ID NO: 24896
  Cyclic GFR-binding peptide
  MOD_RES (36)..(36): Xaa is C or S

SEQ ID NO: 104398 - protein, 26 aa, Artificial Sequence
  Cyclic GFR-binding peptide
TKMSNITMQIMNDKQQIIIGEMSGMV

SEQ ID NO: 104399 - protein, 30 aa, Artificial Sequence; identical to SEQ ID NO: 71721
  Cyclic GFR-binding peptide
  MOD_RES (1)..(2): Xaa is C or S

SEQ ID NO: 104400 - protein, 22 aa, Artificial Sequence
  Cyclic GFR-binding peptide
LSNITVQIMDDSSNVILGEMSN

SEQ ID NO: 104401 - protein, 25 aa, Artificial Sequence
  Cyclic GFR-binding peptide
LSNITIQIMDAANNVVLGEMSDMVV

SEQ ID NO: 104402 - protein, 34 aa, Artificial Sequence
  Cyclic GFR-binding peptide
  MOD_RES (1)..(2)..(33): Xaa is C or S
XXAPVKTSNITMQIMDNGRVLLLGEMSMIVEEXG

SEQ ID NO: 104403 - protein, 29 aa, Artificial Sequence
  Cyclic GFR-binding peptide
HHSNITVQIMEYVRKKPKLIGEMSRLEEH

SEQ ID NO: 104404 - protein, 21 aa, Artificial Sequence
  Cyclic GFR-binding peptide
SNITIQIMVGRTPKVLGEMSM

SEQ ID NO: 104405 - protein, 34 aa, Artificial Sequence
  Cyclic GFR-binding peptide
  MOD_RES (1)..(2)..(33): Xaa is C or S
XXAPVKTSNITMQIMDNGRVLLIGEMSMIVEEXG

SEQ ID NO: 104406 - protein, 27 aa, Artificial Sequence
  Cyclic GFR-binding peptide
TEESNITMQIMRIKPHQGQHLGEMSFL

SEQ ID NO: 104407 - protein, 20 aa, Artificial Sequence
  Cyclic GFR-binding peptide
SNITVQIMDDSSNVILGEMS

SEQ ID NO: 104408 - protein, 32 aa, Artificial Sequence; identical to SEQ ID NO: 74955
  Cyclic GFR-binding peptide
  MOD_RES (31)..(31): Xaa is C or S

SEQ ID NO: 104409 - protein, 26 aa, Artificial Sequence
  Cyclic GFR-binding peptide
KMSNITMQIMNDKQQIILGEMSGMVV

SEQ ID NO: 104410 - protein, 25 aa, Artificial Sequence
  Cyclic GFR-binding peptide
TSNITMQIMDNGRVLLLGEMSMIVE

SEQ ID NO: 104411 - protein, 34 aa, Artificial Sequence
  Cyclic GFR-binding peptide
  MOD_RES (5)..(6): Xaa is C or S
SAGPXXTPTKMSNITMQIMNDKQQIIIGEMSGMV

SEQ ID NO: 104412 - protein, 29 aa, Artificial Sequence
  Cyclic GFR-binding peptide
  MOD_RES (27)..(29): Xaa is C or S
SNITIQIMDAANNVVIGEMSDMVVEAXGX

SEQ ID NO: 104413 - protein, 33 aa, Artificial Sequence
  Cyclic GFR-binding peptide
  MOD_RES (2)..(3): Xaa is C or S
SXXVPARLSNITIQIMDAANNVVLGEMSDMVVE

SEQ ID NO: 104414 - protein, 31 aa, Artificial Sequence; identical to SEQ ID NO: 24918
  Cyclic GFR-binding peptide
  MOD_RES (2)..(2): Xaa is C or S

SEQ ID NO: 104415 - protein, 35 aa, Artificial Sequence
  Cyclic GFR-binding peptide
  MOD_RES (5)..(6): Xaa is C or S
VPSTXXAPVKTSNITMQIMDNGRVLLIGEMSMIVE

SEQ ID NO: 104416 - protein, 37 aa, Artificial Sequence
  Cyclic GFR-binding peptide
  MOD_RES (3)..(4)..(36): Xaa is C or S
ASXXVPARLSNITIQIMDAANNVVLGEMSDMVVEAXG

SEQ ID NO: 104417 - protein, 40 aa, Artificial Sequence
  Cyclic GFR-binding peptide
  MOD_RES (4)..(5)..(37)..(39): Xaa is C or S
PASXXVPARLSNITIQIMDAANNVVLGEMSDMVVEAXGXR

SEQ ID NO: 104418 - protein, 29 aa, Artificial Sequence
  Cyclic GFR-binding peptide
  MOD_RES (1)..(2): Xaa is C or S
XXAPVKTSNITMQIMDNGRVLLLGEMSMI

SEQ ID NO: 104419 - protein, 35 aa, Artificial Sequence; identical to SEQ ID NO: 24931
  Cyclic GFR-binding peptide
  MOD_RES (35)..(35): Xaa is C or S

SEQ ID NO: 104420 - protein, 30 aa, Artificial Sequence
  Cyclic GFR-binding peptide
  MOD_RES (1)..(1): Xaa is C or S
XTPTKMSNITMQIMNDKQQIIIGEMSGMVV

SEQ ID NO: 104421 - protein, 31 aa, Artificial Sequence
  Cyclic GFR-binding peptide
  MOD_RES (3)..(4): Xaa is C or S
KPXXAPTKLSNITVQIMDDSSNVILGEMSNM

SEQ ID NO: 104422 - protein, 34 aa, Artificial Sequence; identical to SEQ ID NO: 24933
  Cyclic GFR-binding peptide
  MOD_RES (1)..(1): Xaa is C or S

SEQ ID NO: 104423 - protein, 35 aa, Artificial Sequence
  Cyclic GFR-binding peptide
  MOD_RES (5)..(6): Xaa is C or S
APASXXVPARLSNITIQIMDAANNVVLGEMSDMVV

SEQ ID NO: 104424 - protein, 31 aa, Artificial Sequence
  Cyclic GFR-binding peptide
  MOD_RES (1)..(2): Xaa is C or S
XXVPARLSNITIQIMDAANNVVIGEMSDMVV

SEQ ID NO: 104425 - protein, 30 aa, Artificial Sequence; identical to SEQ ID NO: 24936
  Cyclic GFR-binding peptide

SEQ ID NO: 104426 - protein, 26 aa, Artificial Sequence
  Cyclic GFR-binding peptide
DLSNITIQIMIGKTPKILGEMSMIVK

SEQ ID NO: 104427 - protein, 33 aa, Artificial Sequence; identical to SEQ ID NO: 74973
  Cyclic GFR-binding peptide
  MOD_RES (1)..(32): Xaa is C or S

SEQ ID NO: 104428 - protein, 24 aa, Artificial Sequence
  Cyclic GFR-binding peptide
TRLSNITIQIMDSANNVVLGEMSD

SEQ ID NO: 104429 - protein, 35 aa, Artificial Sequence; identical to SEQ ID NO: 24939
  Cyclic GFR-binding peptide
  MOD_RES (33)..(35): Xaa is C or S

SEQ ID NO: 104430 - protein, 32 aa, Artificial Sequence; identical to SEQ ID NO: 71746
  Cyclic GFR-binding peptide
  MOD_RES (29)..(31): Xaa is C or S

SEQ ID NO: 104431 - protein, 25 aa, Artificial Sequence
  Cyclic GFR-binding peptide
VPQDLSNITIQIMVGRTPKVIGEMS

SEQ ID NO: 104432 - protein, 36 aa, Artificial Sequence; identical to SEQ ID NO: 24941
  Cyclic GFR-binding peptide
  MOD_RES (36)..(36): Xaa is C or S

SEQ ID NO: 104433 - protein, 36 aa, Artificial Sequence; identical to SEQ ID NO: 24944
  Cyclic GFR-binding peptide
  MOD_RES (2)..(2): Xaa is C or S

SEQ ID NO: 104434 - protein, 33 aa, Artificial Sequence; identical to SEQ ID NO: 24945
  Cyclic GFR-binding peptide

SEQ ID NO: 104435 - protein, 37 aa, Artificial Sequence
  Cyclic GFR-binding peptide
  MOD_RES (3)..(4)..(36): Xaa is C or S
KPXXAPTKLSNITVQIMDDSSNVILGEMSNMVVRSXG

SEQ ID NO: 104436 - protein, 25 aa, Artificial Sequence
  Cyclic GFR-binding peptide
PQDLSNITIQIMVGRTPKVIGEMSM

SEQ ID NO: 104437 - protein, 34 aa, Artificial Sequence
  Cyclic GFR-binding peptide
  MOD_RES (1)..(33): Xaa is C or S
XTPTKMSNITMQIMNDKQQIILGEMSGMVVDRXG

SEQ ID NO: 104438 - protein, 29 aa, Artificial Sequence
  Cyclic GFR-binding peptide
LSNITVQIMEIVRKKPIFLGEMSTLEDHL

SEQ ID NO: 104439 - protein, 37 aa, Artificial Sequence; identical to SEQ ID NO: 74980
  Cyclic GFR-binding peptide
  MOD_RES (4)..(5)..(36): Xaa is C or S

SEQ ID NO: 104440 - protein, 26 aa, Artificial Sequence
  Cyclic GFR-binding peptide
PARLSNITIQIMDAANNVVLGEMSDM

SEQ ID NO: 104441 - protein, 37 aa, Artificial Sequence
  Cyclic GFR-binding peptide
  MOD_RES (4)..(5)..(36): Xaa is C or S
AAPXXVPQALSNITIQIMVGRKPKVLGEMSMIVRSXK

SEQ ID NO: 104442 - protein, 33 aa, Artificial Sequence; identical to SEQ ID NO: 24954
  Cyclic GFR-binding peptide
  MOD_RES (2)..(2): Xaa is C or S

SEQ ID NO: 104443 - protein, 36 aa, Artificial Sequence
  Cyclic GFR-binding peptide
  MOD_RES (6)..(7): Xaa is C or S
STPPTXXVPTRLSNITIQIMDSANNVVIGEMSDMVV

SEQ ID NO: 104444 - protein, 35 aa, Artificial Sequence
  Cyclic GFR-binding peptide
  MOD_RES (1)..(32)..(34): Xaa is C or S
XAPVKTSNITMQIMDNGRVLLIGEMSMIVEEXGXL

SEQ ID NO: 104445 - protein, 32 aa, Artificial Sequence
  Cyclic GFR-binding peptide
  MOD_RES (30)..(32): Xaa is C or S
TKMSNITMQIMNDKQQIILGEMSGMVVDRXGX

SEQ ID NO: 104446 - protein, 26 aa, Artificial Sequence
  Cyclic GFR-binding peptide
PVKTSNITMQIMDNGRVLLIGEMSMI

SEQ ID NO: 104447 - protein, 29 aa, Artificial Sequence
  Cyclic GFR-binding peptide
  MOD_RES (1)..(2): Xaa is C or S
XXVSQDLSNITIQIMIGKTPKILGEMSMI

SEQ ID NO: 104448 - protein, 35 aa, Artificial Sequence; identical to SEQ ID NO: 24960
  Cyclic GFR-binding peptide
  MOD_RES (2)..(2): Xaa is C or S

SEQ ID NO: 104449 - protein, 27 aa, Artificial Sequence
  Cyclic GFR-binding peptide
LSNITVQIMDDSSNVILGEMSNMVVRS

SEQ ID NO: 104450 - protein, 30 aa, Artificial Sequence
  Cyclic GFR-binding peptide
  MOD_RES (29)..(29): Xaa is C or S
RLSNITIQIMDSANNVVIGEMSDMVVESXG

SEQ ID NO: 104451 - protein, 28 aa, Artificial Sequence
  Cyclic GFR-binding peptide
VKTSNITMQIMDNGRVLLIGEMSMIVEE

SEQ ID NO: 104452 - protein, 29 aa, Artificial Sequence
  Cyclic GFR-binding peptide
  MOD_RES (28)..(28): Xaa is C or S
LSNITIQIMDAANNVVLGEMSDMVVEAXG

SEQ ID NO: 104453 - protein, 36 aa, Artificial Sequence; identical to SEQ ID NO: 24965
  Cyclic GFR-binding peptide
  MOD_RES (4)..(4): Xaa is C or S

SEQ ID NO: 104454 - protein, 24 aa, Artificial Sequence
  Cyclic GFR-binding peptide
PQALSNITIQIMVGRKPKVLGEMS

SEQ ID NO: 104455 - protein, 37 aa, Artificial Sequence; identical to SEQ ID NO: 24970
  Cyclic GFR-binding peptide
  MOD_RES (35)..(37): Xaa is C or S

SEQ ID NO: 104456 - protein, 28 aa, Artificial Sequence
  Cyclic GFR-binding peptide
QLSNITVQIMEIVRKKPIFLGEMSTLED

SEQ ID NO: 104457 - protein, 27 aa, Artificial Sequence
  Cyclic GFR-binding peptide
VPQDLSNITIQIMVGRTPKVLGEMSMV

SEQ ID NO: 104458 - protein, 43 aa, Artificial Sequence; identical to SEQ ID NO: 24975
  Cyclic GFR-binding peptide
  MOD_RES (7)..(41)..(43): Xaa is C or S

SEQ ID NO: 104459 - protein, 33 aa, Artificial Sequence; identical to SEQ ID NO: 24976
  Cyclic GFR-binding peptide
  MOD_RES (5)..(5): Xaa is C or S

SEQ ID NO: 104460 - protein, 45 aa, Artificial Sequence; identical to SEQ ID NO: 24977
  Cyclic GFR-binding peptide
  MOD_RES (5)..(42)..(44): Xaa is C or S

SEQ ID NO: 104461 - protein, 28 aa, Artificial Sequence
  Cyclic GFR-binding peptide
VHHSNITVQIMEYVRKKPKLLGEMSRLE

SEQ ID NO: 104462 - protein, 37 aa, Artificial Sequence
  Cyclic GFR-binding peptide
  MOD_RES (3)..(4)..(36): Xaa is C or S
ASXXVPARLSNITIQIMDAANNVVIGEMSDMVVEAXG

SEQ ID NO: 104463 - protein, 34 aa, Artificial Sequence; identical to SEQ ID NO: 24983
  Cyclic GFR-binding peptide

SEQ ID NO: 104464 - protein, 32 aa, Artificial Sequence; identical to SEQ ID NO: 24985
  Cyclic GFR-binding peptide

SEQ ID NO: 104465 - protein, 26 aa, Artificial Sequence
  Cyclic GFR-binding peptide
  MOD_RES (26)..(26): Xaa is C or S
SNITIQIMIGKTPKIIGEMSMIVKSX

SEQ ID NO: 104466 - protein, 33 aa, Artificial Sequence; identical to SEQ ID NO: 24987
  Cyclic GFR-binding peptide
  MOD_RES (30)..(32): Xaa is C or S

SEQ ID NO: 104467 - protein, 21 aa, Artificial Sequence
  Cyclic GFR-binding peptide
SNITIQIMVGRKPKVIGEMSM

SEQ ID NO: 104468 - protein, 35 aa, Artificial Sequence; identical to SEQ ID NO: 71781
  Cyclic GFR-binding peptide
  MOD_RES (4)..(5): Xaa is C or S

SEQ ID NO: 104469 - protein, 28 aa, Artificial Sequence
  Cyclic GFR-binding peptide
TQVQLSNITVQIMEIVRKKPIFLGEMST

SEQ ID NO: 104470 - protein, 34 aa, Artificial Sequence; identical to SEQ ID NO: 75021
  Cyclic GFR-binding peptide
  MOD_RES (31)..(33): Xaa is C or S

SEQ ID NO: 104471 - protein, 31 aa, Artificial Sequence
  Cyclic GFR-binding peptide
  MOD_RES (1)..(1): Xaa is C or S
XVPTRLSNITIQIMDSANNVVLGEMSDMVVE

SEQ ID NO: 104472 - protein, 33 aa, Artificial Sequence
  Cyclic GFR-binding peptide
  MOD_RES (1)..(32): Xaa is C or S
XAPVKTSNITMQIMDNGRVLLLGEMSMIVEEXG

SEQ ID NO: 104473 - protein, 33 aa, Artificial Sequence; identical to SEQ ID NO: 71788
  Cyclic GFR-binding peptide
  MOD_RES (1)..(2)..(33): Xaa is C or S

SEQ ID NO: 104474 - protein, 28 aa, Artificial Sequence
  Cyclic GFR-binding peptide
PTRLSNITIQIMDSANNVVLGEMSDMVV

SEQ ID NO: 104475 - protein, 41 aa, Artificial Sequence; identical to SEQ ID NO: 24996
  Cyclic GFR-binding peptide
  MOD_RES (3)..(40): Xaa is C or S

SEQ ID NO: 104476 - protein, 29 aa, Artificial Sequence
  Cyclic GFR-binding peptide
  MOD_RES (3)..(4): Xaa is C or S
SPXXVSQDLSNITIQIMIGKTPKIIGEMS

SEQ ID NO: 104477 - protein, 30 aa, Artificial Sequence
  Cyclic GFR-binding peptide
  MOD_RES (29)..(29): Xaa is C or S
KMSNITMQIMNDKQQIIIGEMSGMVVDRXG

SEQ ID NO: 104478 - protein, 34 aa, Artificial Sequence; identical to SEQ ID NO: 75033
  Cyclic GFR-binding peptide
  MOD_RES (1)..(2)..(33): Xaa is C or S

SEQ ID NO: 104479 - protein, 30 aa, Artificial Sequence
  Cyclic GFR-binding peptide
  MOD_RES (3)..(4): Xaa is C or S
ASXXVPARLSNITIQIMDAANNVVIGEMSD

SEQ ID NO: 104480 - protein, 25 aa, Artificial Sequence
  Cyclic GFR-binding peptide
QDLSNITIQIMVGRTPKVIGEMSMV

SEQ ID NO: 104481 - protein, 25 aa, Artificial Sequence
  Cyclic GFR-binding peptide
LSNITIQIMDSANNVVIGEMSDMVV

SEQ ID NO: 104482 - protein, 35 aa, Artificial Sequence
  Cyclic GFR-binding peptide
  MOD_RES (1)..(32)..(34): Xaa is C or S
XAPVKTSNITMQIMDNGRVLLLGEMSMIVEEXGXL

SEQ ID NO: 104483 - protein, 39 aa, Artificial Sequence; identical to SEQ ID NO: 25004
  Cyclic GFR-binding peptide
  MOD_RES (2)..(39): Xaa is C or S

SEQ ID NO: 104484 - protein, 42 aa, Artificial Sequence; identical to SEQ ID NO: 25007
  Cyclic GFR-binding peptide
  MOD_RES (5)..(42): Xaa is C or S

SEQ ID NO: 104485 - protein, 30 aa, Artificial Sequence
  Cyclic GFR-binding peptide
  MOD_RES (1)..(2): Xaa is C or S
XXVPQDLSNITIQIMVGRTPKVLGEMSMVV

SEQ ID NO: 104486 - protein, 37 aa, Artificial Sequence; identical to SEQ ID NO: 25010
  Cyclic GFR-binding peptide
  MOD_RES (34)..(36): Xaa is C or S

SEQ ID NO: 104487 - protein, 31 aa, Artificial Sequence; identical to SEQ ID NO: 25011
  Cyclic GFR-binding peptide
  MOD_RES (31)..(31): Xaa is C or S

SEQ ID NO: 104488 - protein, 31 aa, Artificial Sequence
  Cyclic GFR-binding peptide
  MOD_RES (30)..(30): Xaa is C or S
ARLSNITIQIMDAANNVVIGEMSDMVVEAXG

SEQ ID NO: 104489 - protein, 27 aa, Artificial Sequence
  Cyclic GFR-binding peptide
VHHSNITVQIMEYVRKKPKLIGEMSRL

SEQ ID NO: 104490 - protein, 28 aa, Artificial Sequence
  Cyclic GFR-binding peptide
PQDLSNITIQIMVGRTPKVLGEMSMVVK

SEQ ID NO: 104491 - protein, 30 aa, Artificial Sequence; identical to SEQ ID NO: 75048
  Cyclic GFR-binding peptide
  MOD_RES (28)..(30): Xaa is C or S

SEQ ID NO: 104492 - protein, 32 aa, Artificial Sequence; identical to SEQ ID NO: 25020
  Cyclic GFR-binding peptide
  MOD_RES (4)..(4): Xaa is C or S

SEQ ID NO: 104493 - protein, 38 aa, Artificial Sequence; identical to SEQ ID NO: 75050
  Cyclic GFR-binding peptide
  MOD_RES (4)..(5)..(37): Xaa is C or S

SEQ ID NO: 104494 - protein, 29 aa, Artificial Sequence
  Cyclic GFR-binding peptide
  MOD_RES (29)..(29): Xaa is C or S
KLSNITVQIMDDSSNVILGEMSNMVVRSX

SEQ ID NO: 104495 - protein, 36 aa, Artificial Sequence; identical to SEQ ID NO: 25021
  Cyclic GFR-binding peptide
  MOD_RES (6)..(6): Xaa is C or S

SEQ ID NO: 104496 - protein, 34 aa, Artificial Sequence
  Cyclic GFR-binding peptide
  MOD_RES (5)..(6): Xaa is C or S
APASXXVPARLSNITIQIMDAANNVVIGEMSDMV

SEQ ID NO: 104497 - protein, 39 aa, Artificial Sequence; identical to SEQ ID NO: 25024
  Cyclic GFR-binding peptide
  MOD_RES (2)..(36)..(38): Xaa is C or S

SEQ ID NO: 104498 - protein, 34 aa, Artificial Sequence
  Cyclic GFR-binding peptide
  MOD_RES (5)..(6): Xaa is C or S
VPSTXXAPVKTSNITMQIMDNGRVLLLGEMSMIV

SEQ ID NO: 104499 - protein, 38 aa, Artificial Sequence
  Cyclic GFR-binding peptide
  MOD_RES (3)..(4)..(35)..(37): Xaa is C or S
SPXXVPQDLSNITIQIMVGRTPKVLGEMSMVVKSXKXS

SEQ ID NO: 104500 - protein, 35 aa, Artificial Sequence; identical to SEQ ID NO: 71819
  Cyclic GFR-binding peptide
  MOD_RES (5)..(6): Xaa is C or S

SEQ ID NO: 104501 - protein, 34 aa, Artificial Sequence; identical to SEQ ID NO: 71822
  Cyclic GFR-binding peptide
  MOD_RES (5)..(6): Xaa is C or S

SEQ ID NO: 104502 - protein, 28 aa, Artificial Sequence
  Cyclic GFR-binding peptide
  MOD_RES (26)..(28): Xaa is C or S
SNITIQIMVGRTPKVLGEMSMVVKSXKX

SEQ ID NO: 104503 - protein, 35 aa, Artificial Sequence; identical to SEQ ID NO: 25030
  Cyclic GFR-binding peptide
  MOD_RES (3)..(3): Xaa is C or S

SEQ ID NO: 104504 - protein, 40 aa, Artificial Sequence; identical to SEQ ID NO: 25031
  Cyclic GFR-binding peptide
  MOD_RES (1)..(38)..(40): Xaa is C or S

SEQ ID NO: 104505 - protein, 31 aa, Artificial Sequence
  Cyclic GFR-binding peptide
  MOD_RES (2)..(3): Xaa is C or S
PXXTPTKMSNITMQIMNDKQQIILGEMSGMV

SEQ ID NO: 104506 - protein, 39 aa, Artificial Sequence
  Cyclic GFR-binding peptide
  MOD_RES (5)..(6)..(38): Xaa is C or S
APASXXVPARLSNITIQIMDAANNVVIGEMSDMVVEAXG

SEQ ID NO: 104507 - protein, 33 aa, Artificial Sequence; identical to SEQ ID NO: 25033
  Cyclic GFR-binding peptide
  MOD_RES (32)..(32): Xaa is C or S

SEQ ID NO: 104508 - protein, 33 aa, Artificial Sequence
  Cyclic GFR-binding peptide
  MOD_RES (6)..(7): Xaa is C or S
AAPASXXVPARLSNITIQIMDAANNVVLGEMSD

SEQ ID NO: 104509 - protein, 26 aa, Artificial Sequence
  Cyclic GFR-binding peptide
RVHHSNITVQIMEYVRKKPKLLGEMS

SEQ ID NO: 104510 - protein, 28 aa, Artificial Sequence
  Cyclic GFR-binding peptide
  MOD_RES (1)..(1): Xaa is C or S
XVSQDLSNITIQIMIGKTPKILGEMSMI

SEQ ID NO: 104511 - protein, 37 aa, Artificial Sequence
  Cyclic GFR-binding peptide
  MOD_RES (1)..(2)..(34)..(36): Xaa is C or S
XXTPTKMSNITMQIMNDKQQIILGEMSGMVVDRXGXS

SEQ ID NO: 104512 - protein, 37 aa, Artificial Sequence; identical to SEQ ID NO: 25039
  Cyclic GFR-binding peptide
  MOD_RES (3)..(3): Xaa is C or S

SEQ ID NO: 104513 - protein, 35 aa, Artificial Sequence
  Cyclic GFR-binding peptide
  MOD_RES (5)..(6): Xaa is C or S
SASPXXVPQDLSNITIQIMVGRTPKVLGEMSMVVK

SEQ ID NO: 104514 - protein, 27 aa, Artificial Sequence
  Cyclic GFR-binding peptide
  MOD_RES (1)..(2): Xaa is C or S
XXTPTKMSNITMQIMNDKQQIILGEMS

SEQ ID NO: 104515 - protein, 37 aa, Artificial Sequence
  Cyclic GFR-binding peptide
  MOD_RES (3)..(4)..(35)..(37): Xaa is C or S
STXXAPVKTSNITMQIMDNGRVLLLGEMSMIVEEXGX

SEQ ID NO: 104516 - protein, 23 aa, Artificial Sequence
  Cyclic GFR-binding peptide
SNITIQIMIGKTPKIIGEMSMIV

SEQ ID NO: 104517 - protein, 36 aa, Artificial Sequence
  Cyclic GFR-binding peptide
  MOD_RES (1)..(2)..(33)..(35): Xaa is C or S
XXVPQDLSNITIQIMVGRTPKVLGEMSMVVKSXKXS

SEQ ID NO: 104518 - protein, 27 aa, Artificial Sequence
  Cyclic GFR-binding peptide
  MOD_RES (1)..(1): Xaa is C or S
XVPARLSNITIQIMDAANNVVIGEMSD

SEQ ID NO: 104519 - protein, 27 aa, Artificial Sequence
  Cyclic GFR-binding peptide
HHSNITVQIMEYVRKKPKLLGEMSRLE

SEQ ID NO: 104520 - protein, 26 aa, Artificial Sequence
  Cyclic GFR-binding peptide
QDLSNITIQIMVGRTPKVLGEMSMVV

SEQ ID NO: 104521 - protein, 38 aa, Artificial Sequence; identical to SEQ ID NO: 25054
  Cyclic GFR-binding peptide
  MOD_RES (4)..(38): Xaa is C or S

SEQ ID NO: 104522 - protein, 31 aa, Artificial Sequence
  Cyclic GFR-binding peptide
  MOD_RES (4)..(5): Xaa is C or S
AGPXXTPTKMSNITMQIMNDKQQIILGEMSG

SEQ ID NO: 104523 - protein, 27 aa, Artificial Sequence
  Cyclic GFR-binding peptide
VSQDLSNITIQIMIGKTPKILGEMSMI

SEQ ID NO: 104524 - protein, 24 aa, Artificial Sequence
  Cyclic GFR-binding peptide
PQDLSNITIQIMVGRTPKVLGEMS

SEQ ID NO: 104525 - protein, 35 aa, Artificial Sequence; identical to SEQ ID NO: 25058
  Cyclic GFR-binding peptide

SEQ ID NO: 104526 - protein, 35 aa, Artificial Sequence; identical to SEQ ID NO: 71853
  Cyclic GFR-binding peptide
  MOD_RES (1)..(2)..(33)..(35): Xaa is C or S

SEQ ID NO: 104527 - protein, 29 aa, Artificial Sequence
  Cyclic GFR-binding peptide
QVQLSNITVQIMEIVRKKPIFLGEMSTLE

SEQ ID NO: 104528 - protein, 33 aa, Artificial Sequence
  Cyclic GFR-binding peptide
  MOD_RES (30)..(32): Xaa is C or S
SQDLSNITIQIMIGKTPKILGEMSMIVKSXKXS

SEQ ID NO: 104529 - protein, 26 aa, Artificial Sequence
  Cyclic GFR-binding peptide
  MOD_RES (1)..(1): Xaa is C or S
XVPQDLSNITIQIMVGRTPKVLGEMS

SEQ ID NO: 104530 - protein, 38 aa, Artificial Sequence; identical to SEQ ID NO: 75086
  Cyclic GFR-binding peptide
  MOD_RES (5)..(6)..(37): Xaa is C or S

SEQ ID NO: 104531 - protein, 33 aa, Artificial Sequence
  Cyclic GFR-binding peptide
  MOD_RES (3)..(4): Xaa is C or S
PTXXVPTRLSNITIQIMDSANNVVIGEMSDMVV

SEQ ID NO: 104532 - protein, 34 aa, Artificial Sequence; identical to SEQ ID NO: 71858
  Cyclic GFR-binding peptide
  MOD_RES (6)..(7): Xaa is C or S

SEQ ID NO: 104533 - protein, 35 aa, Artificial Sequence
  Cyclic GFR-binding peptide
  MOD_RES (1)..(33)..(35): Xaa is C or S
XTPTKMSNITMQIMNDKQQIIIGEMSGMVVDRXGX

SEQ ID NO: 104534 - protein, 40 aa, Artificial Sequence
  Cyclic GFR-binding peptide
  MOD_RES (6)..(7)..(39): Xaa is C or S
GSAGPXXTPTKMSNITMQIMNDKQQIILGEMSGMVVDRXG

SEQ ID NO: 104535 - protein, 39 aa, Artificial Sequence; identical to SEQ ID NO: 25065
  Cyclic GFR-binding peptide
  MOD_RES (4)..(4): Xaa is C or S

SEQ ID NO: 104536 - protein, 38 aa, Artificial Sequence
  Cyclic GFR-binding peptide
  MOD_RES (4)..(5)..(37): Xaa is C or S
PPTXXVPTRLSNITIQIMDSANNVVLGEMSDMVVESXG

SEQ ID NO: 104537 - protein, 32 aa, Artificial Sequence
  Cyclic GFR-binding peptide
  MOD_RES (31)..(31): Xaa is C or S
PTKLSNITVQIMDDSSNVILGEMSNMVVRSXG

SEQ ID NO: 104538 - protein, 31 aa, Artificial Sequence; identical to SEQ ID NO: 25067
  Cyclic GFR-binding peptide

SEQ ID NO: 104539 - protein, 34 aa, Artificial Sequence; identical to SEQ ID NO: 25072
  Cyclic GFR-binding peptide
  MOD_RES (4)..(4): Xaa is C or S

SEQ ID NO: 104540 - protein, 25 aa, Artificial Sequence
  Cyclic GFR-binding peptide
DLSNITIQIMVGRTPKVIGEMSMVV

SEQ ID NO: 104541 - protein, 22 aa, Artificial Sequence
  Cyclic GFR-binding peptide
KTSNITMQIMDNGRVLLIGEMS

SEQ ID NO: 104542 - protein, 28 aa, Artificial Sequence
  Cyclic GFR-binding peptide
ARLSNITIQIMDAANNVVIGEMSDMVVE

SEQ ID NO: 104543 - protein, 28 aa, Artificial Sequence
  Cyclic GFR-binding peptide
  MOD_RES (1)..(1): Xaa is C or S
XVPQDLSNITIQIMVGRTPKVLGEMSMV

SEQ ID NO: 104544 - protein, 35 aa, Artificial Sequence; identical to SEQ ID NO: 71866
  Cyclic GFR-binding peptide
  MOD_RES (3)..(4): Xaa is C or S

SEQ ID NO: 104545 - protein, 31 aa, Artificial Sequence; identical to SEQ ID NO: 25077
  Cyclic GFR-binding peptide

SEQ ID NO: 104546 - protein, 31 aa, Artificial Sequence
  Cyclic GFR-binding peptide
  MOD_RES (2)..(3): Xaa is C or S
TXXVPTRLSNITIQIMDSANNVVLGEMSDMV

SEQ ID NO: 104547 - protein, 24 aa, Artificial Sequence
  Cyclic GFR-binding peptide
DLSNITIQIMIGKTPKILGEMSMI

SEQ ID NO: 104548 - protein, 30 aa, Artificial Sequence
  Cyclic GFR-binding peptide
  MOD_RES (2)..(3): Xaa is C or S
PXXVPQALSNITIQIMVGRKPKVLGEMSMI

SEQ ID NO: 104549 - protein, 31 aa, Artificial Sequence; identical to SEQ ID NO: 75102
  Cyclic GFR-binding peptide
  MOD_RES (3)..(4): Xaa is C or S

SEQ ID NO: 104550 - protein, 29 aa, Artificial Sequence
  Cyclic GFR-binding peptide
PVKTSNITMQIMDNGRVLLLGEMSMIVEE

SEQ ID NO: 104551 - protein, 33 aa, Artificial Sequence
  Cyclic GFR-binding peptide
  MOD_RES (1)..(32): Xaa is C or S
XAPVKTSNITMQIMDNGRVLLIGEMSMIVEEXG

SEQ ID NO: 104552 - protein, 40 aa, Artificial Sequence
  Cyclic GFR-binding peptide
  MOD_RES (5)..(6)..(37)..(39): Xaa is C or S
SAAPXXVPQALSNITIQIMVGRKPKVLGEMSMIVRSXKXS

SEQ ID NO: 104553 - protein, 32 aa, Artificial Sequence; identical to SEQ ID NO: 71878
  Cyclic GFR-binding peptide
  MOD_RES (2)..(3): Xaa is C or S

SEQ ID NO: 104554 - protein, 37 aa, Artificial Sequence
  Cyclic GFR-binding peptide
  MOD_RES (6)..(7): Xaa is C or S
STPPTXXVPTRLSNITIQIMDSANNVVLGEMSDMVVE

SEQ ID NO: 104555 - protein, 28 aa, Artificial Sequence
  Cyclic GFR-binding peptide
SRVHHSNITVQIMEYVRKKPKLIGEMSR

SEQ ID NO: 104556 - protein, 26 aa, Artificial Sequence
  Cyclic GFR-binding peptide
TKLSNITVQIMDDSSNVILGEMSNMV

SEQ ID NO: 104557 - protein, 34 aa, Artificial Sequence; identical to SEQ ID NO: 25090
  Cyclic GFR-binding peptide
  MOD_RES (6)..(6): Xaa is C or S

SEQ ID NO: 104558 - protein, 22 aa, Artificial Sequence
  Cyclic GFR-binding peptide
SNITIQIMVGRKPKVIGEMSMI

SEQ ID NO: 104559 - protein, 32 aa, Artificial Sequence
  Cyclic GFR-binding peptide
  MOD_RES (30)..(32): Xaa is C or S
TRLSNITIQIMDSANNVVLGEMSDMVVESXGX

SEQ ID NO: 104560 - protein, 32 aa, Artificial Sequence
  Cyclic GFR-binding peptide
  MOD_RES (31)..(31): Xaa is C or S
VPQDLSNITIQIMVGRTPKVLGEMSMVVKSXK

SEQ ID NO: 104561 - protein, 32 aa, Artificial Sequence; identical to SEQ ID NO: 25093
  Cyclic GFR-binding peptide
  MOD_RES (2)..(2): Xaa is C or S

SEQ ID NO: 104562 - protein, 27 aa, Artificial Sequence
  Cyclic GFR-binding peptide
SNITVQIMEYVRKKPKLLGEMSRLEEH

SEQ ID NO: 104563 - protein, 34 aa, Artificial Sequence; identical to SEQ ID NO: 75110
  Cyclic GFR-binding peptide
  MOD_RES (3)..(4): Xaa is C or S

SEQ ID NO: 104564 - protein, 35 aa, Artificial Sequence; identical to SEQ ID NO: 25098
  Cyclic GFR-binding peptide
  MOD_RES (34)..(34): Xaa is C or S

SEQ ID NO: 104565 - protein, 23 aa, Artificial Sequence
  Cyclic GFR-binding peptide
DLSNITIQIMVGRTPKVLGEMSM

SEQ ID NO: 104566 - protein, 20 aa, Artificial Sequence
  Cyclic GFR-binding peptide
SNITMQIMDNGRVLLLGEMS

SEQ ID NO: 104567 - protein, 33 aa, Artificial Sequence; identical to SEQ ID NO: 25103
  Cyclic GFR-binding peptide
  MOD_RES (31)..(33): Xaa is C or S

SEQ ID NO: 104568 - protein, 27 aa, Artificial Sequence
  Cyclic GFR-binding peptide
  MOD_RES (1)..(2): Xaa is C or S
XXVPQALSNITIQIMVGRKPKVLGEMS

SEQ ID NO: 104569 - protein, 32 aa, Artificial Sequence; identical to SEQ ID NO: 25104
  Cyclic GFR-binding peptide

SEQ ID NO: 104570 - protein, 39 aa, Artificial Sequence; identical to SEQ ID NO: 25105
  Cyclic GFR-binding peptide
  MOD_RES (3)..(3): Xaa is C or S

SEQ ID NO: 104571 - protein, 29 aa, Artificial Sequence
  Cyclic GFR-binding peptide
PSRVHHSNITVQIMEYVRKKPKLLGEMSR

SEQ ID NO: 104572 - protein, 25 aa, Artificial Sequence
  Cyclic GFR-binding peptide
TKMSNITMQIMNDKQQIIIGEMSGM

SEQ ID NO: 104573 - protein, 35 aa, Artificial Sequence
  Cyclic GFR-binding peptide
  MOD_RES (4)..(5): Xaa is C or S
ASPXXVPQDLSNITIQIMVGRTPKVLGEMSMVVKS

SEQ ID NO: 104574 - protein, 34 aa, Artificial Sequence; identical to SEQ ID NO: 25111
  Cyclic GFR-binding peptide
  MOD_RES (34)..(34): Xaa is C or S

SEQ ID NO: 104575 - protein, 28 aa, Artificial Sequence
  Cyclic GFR-binding peptide
  MOD_RES (1)..(1): Xaa is C or S
XSRVVMNQYNKLIVNSSDDLYLVSIASL

SEQ ID NO: 104576 - protein, 38 aa, Artificial Sequence; identical to SEQ ID NO: 749
  Cyclic GFR-binding peptide
  MOD_RES (32)..(33): Xaa is C or S

SEQ ID NO: 104577 - protein, 32 aa, Artificial Sequence; identical to SEQ ID NO: 75125
  Cyclic GFR-binding peptide
  MOD_RES (2)..(4): Xaa is C or S

SEQ ID NO: 104578 - protein, 35 aa, Artificial Sequence; identical to SEQ ID NO: 752
  Cyclic GFR-binding peptide
  MOD_RES (2)..(4): Xaa is C or S

SEQ ID NO: 104579 - protein, 24 aa, Artificial Sequence
  Cyclic GFR-binding peptide
MRYKKLIKPTKGIFYLISIANLDQ

SEQ ID NO: 104580 - protein, 29 aa, Artificial Sequence
  Cyclic GFR-binding peptide
  MOD_RES (1)..(1): Xaa is C or S
XSKVVMRYKKLVKPTRGVFYLISIANLDQ

SEQ ID NO: 104581 - protein, 30 aa, Artificial Sequence; identical to SEQ ID NO: 757
  Cyclic GFR-binding peptide
  MOD_RES (1)..(1): Xaa is C or S

SEQ ID NO: 104582 - protein, 25 aa, Artificial Sequence
  Cyclic GFR-binding peptide
QYNKLIKPTKGILYLISIASLDQSV

SEQ ID NO: 104583 - protein, 31 aa, Artificial Sequence; identical to SEQ ID NO: 83207
  Cyclic GFR-binding peptide
  MOD_RES (31)..(31): Xaa is C or S

SEQ ID NO: 104584 - protein, 37 aa, Artificial Sequence
  Cyclic GFR-binding peptide
  MOD_RES (31)..(32): Xaa is C or S
DVVMGQYNKLIIQQKDNLYLMSIASMKTPTXXPGASG

SEQ ID NO: 104585 - protein, 33 aa, Artificial Sequence; identical to SEQ ID NO: 760
  Cyclic GFR-binding peptide
  MOD_RES (2)..(2): Xaa is C or S

SEQ ID NO: 104586 - protein, 28 aa, Artificial Sequence
  Cyclic GFR-binding peptide
RVIMRYKKLVKPKRGVFYLISIANLAQP

SEQ ID NO: 104587 - protein, 26 aa, Artificial Sequence
  Cyclic GFR-binding peptide
SKVIMQYNKLIKPTKGILYLISIASL

SEQ ID NO: 104588 - protein, 29 aa, Artificial Sequence
  Cyclic GFR-binding peptide
  MOD_RES (1)..(1): Xaa is C or S
XAEVVMDQYNKLVVNNAADLYLISIASLR

SEQ ID NO: 104589 - protein, 25 aa, Artificial Sequence
  Cyclic GFR-binding peptide
VVMDRYKKLVVKENEDFYLMSIANL

SEQ ID NO: 104590 - protein, 33 aa, Artificial Sequence; identical to SEQ ID NO: 764
  Cyclic GFR-binding peptide
  MOD_RES (2)..(4): Xaa is C or S

SEQ ID NO: 104591 - protein, 32 aa, Artificial Sequence
  Cyclic GFR-binding peptide
  MOD_RES (26)..(27): Xaa is C or S
QYNKLVVNNAADLYLISIASLRAPVXXSAPAA

SEQ ID NO: 104592 - protein, 39 aa, Artificial Sequence; identical to SEQ ID NO: 78050
  Cyclic GFR-binding peptide
  MOD_RES (1)..(33)..(34): Xaa is C or S

SEQ ID NO: 104593 - protein, 25 aa, Artificial Sequence
  Cyclic GFR-binding peptide
RYKKLVVNNASDFYLISIANLRTPV

SEQ ID NO: 104594 - protein, 30 aa, Artificial Sequence
  Cyclic GFR-binding peptide
  MOD_RES (26)..(27): Xaa is C or S
QYNKLIIQQKDNLYLMSIASMKTPTXXPGA

SEQ ID NO: 104595 - protein, 27 aa, Artificial Sequence
  Cyclic GFR-binding peptide
  MOD_RES (27)..(27): Xaa is C or S
NRYKKLIVNNSSDFYLVSIANLKTPAX

SEQ ID NO: 104596 - protein, 38 aa, Artificial Sequence; identical to SEQ ID NO: 770
  Cyclic GFR-binding peptide
  MOD_RES (1)..(3)..(34)..(35): Xaa is C or S

SEQ ID NO: 104597 - protein, 32 aa, Artificial Sequence; identical to SEQ ID NO: 28874
  Cyclic GFR-binding peptide
  MOD_RES (30)..(31): Xaa is C or S

SEQ ID NO: 104598 - protein, 34 aa, Artificial Sequence; identical to SEQ ID NO: 83226
  Cyclic GFR-binding peptide
  MOD_RES (2)..(4): Xaa is C or S

SEQ ID NO: 104599 - protein, 22 aa, Artificial Sequence
  Cyclic GFR-binding peptide
MRYKKLVKPKRGVFYLISIANL

SEQ ID NO: 104600 - protein, 35 aa, Artificial Sequence; identical to SEQ ID NO: 775
  Cyclic GFR-binding peptide
  MOD_RES (31)..(32): Xaa is C or S

SEQ ID NO: 104601 - protein, 34 aa, Artificial Sequence; identical to SEQ ID NO: 776
  Cyclic GFR-binding peptide
  MOD_RES (1)..(3): Xaa is C or S

SEQ ID NO: 104602 - protein, 42 aa, Artificial Sequence; identical to SEQ ID NO: 777
  Cyclic GFR-binding peptide
  MOD_RES (2)..(4)..(36)..(37): Xaa is C or S

SEQ ID NO: 104603 - protein, 30 aa, Artificial Sequence; identical to SEQ ID NO: 778
  Cyclic GFR-binding peptide

SEQ ID NO: 104604 - protein, 32 aa, Artificial Sequence; identical to SEQ ID NO: 11357
  Cyclic GFR-binding peptide
  MOD_RES (26)..(27): Xaa is C or S

SEQ ID NO: 104605 - protein, 29 aa, Artificial Sequence
  Cyclic GFR-binding peptide
  MOD_RES (28)..(29): Xaa is C or S
MNRYKKLIVNNSSDFYLVSIANLKTPAXX

SEQ ID NO: 104606 - protein, 23 aa, Artificial Sequence
  Cyclic GFR-binding peptide
MNRYKKLIVNSSDDFYLVSIANL

SEQ ID NO: 104607 - protein, 35 aa, Artificial Sequence
  Cyclic GFR-binding peptide
  MOD_RES (29)..(30): Xaa is C or S
VMGQYNKLIIQQKDNLYLMSIASMKTPTXXPGASG

SEQ ID NO: 104608 - protein, 28 aa, Artificial Sequence
  Cyclic GFR-binding peptide
ESVAMGQYNKLYTVVGKDLYLISIASLK

SEQ ID NO: 104609 - protein, 35 aa, Artificial Sequence; identical to SEQ ID NO: 28892
  Cyclic GFR-binding peptide
  MOD_RES (29)..(30): Xaa is C or S

SEQ ID NO: 104610 - protein, 22 aa, Artificial Sequence
  Cyclic GFR-binding peptide
QYNKLYTVVGKDLYLISIASLK

SEQ ID NO: 104611 - protein, 35 aa, Artificial Sequence; identical to SEQ ID NO: 783
  Cyclic GFR-binding peptide
  MOD_RES (30)..(31): Xaa is C or S

SEQ ID NO: 104612 - protein, 39 aa, Artificial Sequence; identical to SEQ ID NO: 784
  Cyclic GFR-binding peptide
  MOD_RES (1)..(3)..(35)..(36): Xaa is C or S

SEQ ID NO: 104613 - protein, 38 aa, Artificial Sequence; identical to SEQ ID NO: 785
  Cyclic GFR-binding peptide
  MOD_RES (1)..(33): Xaa is C or S

SEQ ID NO: 104614 - protein, 27 aa, Artificial Sequence
  Cyclic GFR-binding peptide
  MOD_RES (27)..(27): Xaa is C or S
DRYKKLVVNNASDFYLISIANLRTPVX

SEQ ID NO: 104615 - protein, 35 aa, Artificial Sequence; identical to SEQ ID NO: 786
  Cyclic GFR-binding peptide
  MOD_RES (1)..(32)..(33): Xaa is C or S

SEQ ID NO: 104616 - protein, 24 aa, Artificial Sequence
  Cyclic GFR-binding peptide
MDQYNKLVVKENEDLYLMSIASLE

SEQ ID NO: 104617 - protein, 38 aa, Artificial Sequence
  Cyclic GFR-binding peptide
  MOD_RES (2)..(4)..(36)..(37): Xaa is C or S
RXAXSEVTMNQYNKLVVNKNEDLYLISIASMKEPVXXP

SEQ ID NO: 104618 - protein, 31 aa, Artificial Sequence; identical to SEQ ID NO: 794
  Cyclic GFR-binding peptide
  MOD_RES (26)..(27): Xaa is C or S

SEQ ID NO: 104619 - protein, 37 aa, Artificial Sequence; identical to SEQ ID NO: 796
  Cyclic GFR-binding peptide
  MOD_RES (31)..(32): Xaa is C or S

SEQ ID NO: 104620 - protein, 37 aa, Artificial Sequence; identical to SEQ ID NO: 78088
  Cyclic GFR-binding peptide
  MOD_RES (32)..(33): Xaa is C or S

SEQ ID NO: 104621 - protein, 29 aa, Artificial Sequence
  Cyclic GFR-binding peptide
SRVIMRYKKLVKPKRGVFYLISIANLAQP

SEQ ID NO: 104622 - protein, 31 aa, Artificial Sequence; identical to SEQ ID NO: 28907
  Cyclic GFR-binding peptide
  MOD_RES (31)..(31): Xaa is C or S

SEQ ID NO: 104623 - protein, 38 aa, Artificial Sequence; identical to SEQ ID NO: 804
  Cyclic GFR-binding peptide
  MOD_RES (32)..(32): Xaa is C or S

SEQ ID NO: 104624 - protein, 34 aa, Artificial Sequence; identical to SEQ ID NO: 11381
  Cyclic GFR-binding peptide
  MOD_RES (2)..(4): Xaa is C or S

SEQ ID NO: 104625 - protein, 30 aa, Artificial Sequence; identical to SEQ ID NO: 807
  Cyclic GFR-binding peptide
  MOD_RES (27)..(28): Xaa is C or S

SEQ ID NO: 104626 - protein, 30 aa, Artificial Sequence; identical to SEQ ID NO: 808
  Cyclic GFR-binding peptide
  MOD_RES (2)..(2): Xaa is C or S

SEQ ID NO: 104627 - protein, 41 aa, Artificial Sequence; identical to SEQ ID NO: 83256
  Cyclic GFR-binding peptide
  MOD_RES (1)..(3)..(35)..(36): Xaa is C or S

SEQ ID NO: 104628 - protein, 30 aa, Artificial Sequence; identical to SEQ ID NO: 83257
  Cyclic GFR-binding peptide
  MOD_RES (2)..(4): Xaa is C or S

SEQ ID NO: 104629 - protein, 40 aa, Artificial Sequence; identical to SEQ ID NO: 811
  Cyclic GFR-binding peptide
  MOD_RES (2)..(35)..(36): Xaa is C or S

SEQ ID NO: 104630 - protein, 41 aa, Artificial Sequence; identical to SEQ ID NO: 75163
  Cyclic GFR-binding peptide
  MOD_RES (1)..(3)..(35)..(36): Xaa is C or S

SEQ ID NO: 104631 - protein, 29 aa, Artificial Sequence
  Cyclic GFR-binding peptide
  MOD_RES (26)..(27): Xaa is C or S
QYNKLLLVRGNDLYLMSIASTKVPAXXTS

SEQ ID NO: 104632 - protein, 33 aa, Artificial Sequence; identical to SEQ ID NO: 813
  Cyclic GFR-binding peptide
  MOD_RES (30)..(31): Xaa is C or S

SEQ ID NO: 104633 - protein, 36 aa, Artificial Sequence
  Cyclic GFR-binding peptide
  MOD_RES (2)..(34)..(35): Xaa is C or S
AXSEVTMNQYNKLVVNKNEDLYLISIASMKEPVXXP

SEQ ID NO: 104634 - protein, 25 aa, Artificial Sequence
  Cyclic GFR-binding peptide
NRYKKLIVNNSSDFYLVSIANLKTP

SEQ ID NO: 104635 - protein, 22 aa, Artificial Sequence
  Cyclic GFR-binding peptide
MQYNKLIKPTKGILYLISIASL

SEQ ID NO: 104636 - protein, 33 aa, Artificial Sequence; identical to SEQ ID NO: 818
  Cyclic GFR-binding peptide
  MOD_RES (29)..(30): Xaa is C or S

SEQ ID NO: 104637 - protein, 41 aa, Artificial Sequence; identical to SEQ ID NO: 11392
  Cyclic GFR-binding peptide
  MOD_RES (1)..(3)..(35)..(36): Xaa is C or S

SEQ ID NO: 104638 - protein, 31 aa, Artificial Sequence; identical to SEQ ID NO: 28927
  Cyclic GFR-binding peptide
  MOD_RES (30)..(31): Xaa is C or S

SEQ ID NO: 104639 - protein, 34 aa, Artificial Sequence; identical to SEQ ID NO: 75173
  Cyclic GFR-binding peptide
  MOD_RES (1)..(32)..(33): Xaa is C or S

SEQ ID NO: 104640 - protein, 35 aa, Artificial Sequence; identical to SEQ ID NO: 11395
  Cyclic GFR-binding peptide
  MOD_RES (30)..(31): Xaa is C or S

SEQ ID NO: 104641 - protein, 35 aa, Artificial Sequence; identical to SEQ ID NO: 819
  Cyclic GFR-binding peptide
  MOD_RES (2)..(4)..(35): Xaa is C or S

SEQ ID NO: 104642 - protein, 26 aa, Artificial Sequence
  Cyclic GFR-binding peptide
  MOD_RES (26)..(26): Xaa is C or S
RYKKLVVKDYEDFYLMSIANLETPVX

SEQ ID NO: 104643 - protein, 40 aa, Artificial Sequence; identical to SEQ ID NO: 823
  Cyclic GFR-binding peptide
  MOD_RES (1)..(3)..(36)..(37): Xaa is C or S

SEQ ID NO: 104644 - protein, 37 aa, Artificial Sequence; identical to SEQ ID NO: 28933
  Cyclic GFR-binding peptide
  MOD_RES (1)..(33)..(34): Xaa is C or S

SEQ ID NO: 104645 - protein, 40 aa, Artificial Sequence; identical to SEQ ID NO: 824
  Cyclic GFR-binding peptide
  MOD_RES (1)..(3)..(35): Xaa is C or S

SEQ ID NO: 104646 - protein, 32 aa, Artificial Sequence; identical to SEQ ID NO: 825
  Cyclic GFR-binding peptide
  MOD_RES (28)..(29): Xaa is C or S

SEQ ID NO: 104647 - protein, 28 aa, Artificial Sequence
  Cyclic GFR-binding peptide
  MOD_RES (2)..(2): Xaa is C or S
GXSRVVMNQYNKLIVNSSDDLYLVSIAS

SEQ ID NO: 104648 - protein, 37 aa, Artificial Sequence; identical to SEQ ID NO: 830
  Cyclic GFR-binding peptide
  MOD_RES (1)..(3)..(35)..(36): Xaa is C or S

SEQ ID NO: 104649 - protein, 25 aa, Artificial Sequence
  Cyclic GFR-binding peptide
IMRYKKLIKPTKGIFYLISIANLDQ

SEQ ID NO: 104650 - protein, 25 aa, Artificial Sequence
  Cyclic GFR-binding peptide
EVIMRYKKLLLVRGNDFYLMSIANT

SEQ ID NO: 104651 - protein, 37 aa, Artificial Sequence; identical to SEQ ID NO: 836
  Cyclic GFR-binding peptide
  MOD_RES (1)..(33)..(34): Xaa is C or S

SEQ ID NO: 104652 - protein, 26 aa, Artificial Sequence
  Cyclic GFR-binding peptide
NRYKKLVVNKNEDFYLISIANMKEPV

SEQ ID NO: 104653 - protein, 36 aa, Artificial Sequence
  Cyclic GFR-binding peptide
  MOD_RES (1)..(33)..(34): Xaa is C or S
XSEVTMNQYNKLVVNKNEDLYLISIASMKEPVXXPE

SEQ ID NO: 104654 - protein, 33 aa, Artificial Sequence; identical to SEQ ID NO: 839
  Cyclic GFR-binding peptide
  MOD_RES (2)..(4): Xaa is C or S

SEQ ID NO: 104655 - protein, 26 aa, Artificial Sequence
  Cyclic GFR-binding peptide
SRVIMQYNKLVKPKRGVLYLISIASL

SEQ ID NO: 104656 - protein, 35 aa, Artificial Sequence; identical to SEQ ID NO: 841
  Cyclic GFR-binding peptide
  MOD_RES (29)..(30): Xaa is C or S

SEQ ID NO: 104657 - protein, 35 aa, Artificial Sequence
  Cyclic GFR-binding peptide
  MOD_RES (32)..(33): Xaa is C or S
SEVTMNQYNKLVVNKNEDLYLISIASMKEPVXXPE

SEQ ID NO: 104658 - protein, 34 aa, Artificial Sequence; identical to SEQ ID NO: 843
  Cyclic GFR-binding peptide
  MOD_RES (31)..(32): Xaa is C or S

SEQ ID NO: 104659 - protein, 32 aa, Artificial Sequence; identical to SEQ ID NO: 845
  Cyclic GFR-binding peptide
  MOD_RES (2)..(4): Xaa is C or S

SEQ ID NO: 104660 - protein, 30 aa, Artificial Sequence; identical to SEQ ID NO: 11429
  Cyclic GFR-binding peptide
  MOD_RES (29)..(30): Xaa is C or S

SEQ ID NO: 104661 - protein, 34 aa, Artificial Sequence
  Cyclic GFR-binding peptide
  MOD_RES (1)..(32)..(33): Xaa is C or S
XEEVIMQYNKLLLVRGNDLYLMSIASTKVPAXXT

SEQ ID NO: 104662 - protein, 39 aa, Artificial Sequence; identical to SEQ ID NO: 846
  Cyclic GFR-binding peptide
  MOD_RES (2)..(4)..(36)..(37): Xaa is C or S

SEQ ID NO: 104663 - protein, 34 aa, Artificial Sequence
  Cyclic GFR-binding peptide
  MOD_RES (32)..(33): Xaa is C or S
AEVVMDQYNKLVVNNAADLYLISIASLRAPVXXS

SEQ ID NO: 104664 - protein, 30 aa, Artificial Sequence; identical to SEQ ID NO: 851
  Cyclic GFR-binding peptide
  MOD_RES (29)..(30): Xaa is C or S

SEQ ID NO: 104665 - protein, 27 aa, Artificial Sequence
  Cyclic GFR-binding peptide
GEVVMERYKKLVVKDYEDFYLMSIANL

SEQ ID NO: 104666 - protein, 28 aa, Artificial Sequence
  Cyclic GFR-binding peptide
VVMEQYNKLVVKDYEDLYLMSIASLETP

SEQ ID NO: 104667 - protein, 31 aa, Artificial Sequence; identical to SEQ ID NO: 855
  Cyclic GFR-binding peptide
  MOD_RES (29)..(30): Xaa is C or S

SEQ ID NO: 104668 - protein, 27 aa, Artificial Sequence
  Cyclic GFR-binding peptide
  MOD_RES (2)..(2): Xaa is C or S
KXSKVIMRYKKLIKPTKGIFYLISIAN

SEQ ID NO: 104669 - protein, 29 aa, Artificial Sequence
  Cyclic GFR-binding peptide
  MOD_RES (1)..(1): Xaa is C or S
XEEVIMQYNKLLLVRGNDLYLMSIASTKV

SEQ ID NO: 104670 - protein, 35 aa, Artificial Sequence
  Cyclic GFR-binding peptide
  MOD_RES (29)..(30): Xaa is C or S
VIMQYNKLLLVRGNDLYLMSIASTKVPAXXTSPVR

SEQ ID NO: 104671 - protein, 21 aa, Artificial Sequence
  Cyclic GFR-binding peptide
MQYNKLVKPKRGVLYLISIAS

SEQ ID NO: 104672 - protein, 32 aa, Artificial Sequence; identical to SEQ ID NO: 859
  Cyclic GFR-binding peptide
  MOD_RES (2)..(2): Xaa is C or S

SEQ ID NO: 104673 - protein, 34 aa, Artificial Sequence; identical to SEQ ID NO: 75195
  Cyclic GFR-binding peptide
  MOD_RES (2)..(4): Xaa is C or S

SEQ ID NO: 104674 - protein, 34 aa, Artificial Sequence; identical to SEQ ID NO: 861
  Cyclic GFR-binding peptide
  MOD_RES (1)..(33)..(34): Xaa is C or S

SEQ ID NO: 104675 - protein, 32 aa, Artificial Sequence; identical to SEQ ID NO: 11450
  Cyclic GFR-binding peptide
  MOD_RES (1)..(3): Xaa is C or S

SEQ ID NO: 104676 - protein, 30 aa, Artificial Sequence; identical to SEQ ID NO: 864
  Cyclic GFR-binding peptide
  MOD_RES (29)..(30): Xaa is C or S

SEQ ID NO: 104677 - protein, 20 aa, Artificial Sequence
  Cyclic GFR-binding peptide
QYNKLIIQQKDNLYLMSIAS

SEQ ID NO: 104678 - protein, 34 aa, Artificial Sequence; identical to SEQ ID NO: 866
  Cyclic GFR-binding peptide
  MOD_RES (32)..(33): Xaa is C or S

SEQ ID NO: 104679 - protein, 30 aa, Artificial Sequence; identical to SEQ ID NO: 867
  Cyclic GFR-binding peptide
  MOD_RES (30)..(30): Xaa is C or S

SEQ ID NO: 104680 - protein, 31 aa, Artificial Sequence; identical to SEQ ID NO: 868
  Cyclic GFR-binding peptide

SEQ ID NO: 104681 - protein, 34 aa, Artificial Sequence; identical to SEQ ID NO: 872
  Cyclic GFR-binding peptide
  MOD_RES (28)..(29): Xaa is C or S

SEQ ID NO: 104682 - protein, 30 aa, Artificial Sequence; identical to SEQ ID NO: 11457
  Cyclic GFR-binding peptide
  MOD_RES (1)..(3): Xaa is C or S

SEQ ID NO: 104683 - protein, 34 aa, Artificial Sequence; identical to SEQ ID NO: 873
  Cyclic GFR-binding peptide
  MOD_RES (30)..(30): Xaa is C or S

SEQ ID NO: 104684 - protein, 29 aa, Artificial Sequence
  Cyclic GFR-binding peptide
  MOD_RES (2)..(2): Xaa is C or S
GXSRVVMNQYNKLIVNSSDDLYLVSIASL

SEQ ID NO: 104685 - protein, 31 aa, Artificial Sequence; identical to SEQ ID NO: 877
  Cyclic GFR-binding peptide
  MOD_RES (27)..(28): Xaa is C or S

SEQ ID NO: 104686 - protein, 28 aa, Artificial Sequence
  Cyclic GFR-binding peptide
  MOD_RES (26)..(27): Xaa is C or S
QYNKLIIQQKDNLYLMSIASMKTPTXXP

SEQ ID NO: 104687 - protein, 31 aa, Artificial Sequence; identical to SEQ ID NO: 878
  Cyclic GFR-binding peptide
  MOD_RES (28)..(29): Xaa is C or S

SEQ ID NO: 104688 - protein, 37 aa, Artificial Sequence; identical to SEQ ID NO: 880
  Cyclic GFR-binding peptide
  MOD_RES (1)..(33)..(34): Xaa is C or S

SEQ ID NO: 104689 - protein, 30 aa, Artificial Sequence; identical to SEQ ID NO: 28980
  Cyclic GFR-binding peptide

SEQ ID NO: 104690 - protein, 28 aa, Artificial Sequence
  Cyclic GFR-binding peptide
  MOD_RES (26)..(27): Xaa is C or S
RYKKLIVNSSDDFYLVSIANLKTPAXXP

SEQ ID NO: 104691 - protein, 30 aa, Artificial Sequence; identical to SEQ ID NO: 75208
  Cyclic GFR-binding peptide
  MOD_RES (2)..(4): Xaa is C or S

SEQ ID NO: 104692 - protein, 30 aa, Artificial Sequence; identical to SEQ ID NO: 886
  Cyclic GFR-binding peptide
  MOD_RES (28)..(29): Xaa is C or S

SEQ ID NO: 104693 - protein, 23 aa, Artificial Sequence
  Cyclic GFR-binding peptide
QYNKLTPVGMDDLYLVSIASLKT

SEQ ID NO: 104694 - protein, 29 aa, Artificial Sequence
  Cyclic GFR-binding peptide
  MOD_RES (26)..(27): Xaa is C or S
QYNKLVVKENEDLYLMSIASLETPVXXAK

SEQ ID NO: 104695 - protein, 28 aa, Artificial Sequence
  Cyclic GFR-binding peptide
SRVIMRYKKLVKPKRGVFYLISIANLAQ

SEQ ID NO: 104696 - protein, 27 aa, Artificial Sequence
  Cyclic GFR-binding peptide
  MOD_RES (1)..(1): Xaa is C or S
XAKVVMNRYKKLIVNNSSDFYLVSIAN

SEQ ID NO: 104697 - protein, 33 aa, Artificial Sequence; identical to SEQ ID NO: 75213
  Cyclic GFR-binding peptide
  MOD_RES (28)..(29): Xaa is C or S

SEQ ID NO: 104698 - protein, 26 aa, Artificial Sequence
  Cyclic GFR-binding peptide
VSMGEQYNKLTPVGMDDLYLVSIASL

SEQ ID NO: 104699 - protein, 35 aa, Artificial Sequence; identical to SEQ ID NO: 897
  Cyclic GFR-binding peptide
  MOD_RES (1)..(32)..(33): Xaa is C or S

SEQ ID NO: 104700 - protein, 31 aa, Artificial Sequence; identical to SEQ ID NO: 902
  Cyclic GFR-binding peptide

SEQ ID NO: 104701 - protein, 32 aa, Artificial Sequence; identical to SEQ ID NO: 904
  Cyclic GFR-binding peptide
  MOD_RES (2)..(2): Xaa is C or S

SEQ ID NO: 104702 - protein, 25 aa, Artificial Sequence
  Cyclic GFR-binding peptide
VMNQYNKLIVNSSDDLYLVSIASLK

SEQ ID NO: 104703 - protein, 38 aa, Artificial Sequence; identical to SEQ ID NO: 11486
  Cyclic GFR-binding peptide
  MOD_RES (1)..(33)..(34): Xaa is C or S

SEQ ID NO: 104704 - protein, 26 aa, Artificial Sequence
  Cyclic GFR-binding peptide
  MOD_RES (26)..(26): Xaa is C or S
QYNKLVVNKNEDLYLISIASMKEPVX

SEQ ID NO: 104705 - protein, 38 aa, Artificial Sequence; identical to SEQ ID NO: 911
  Cyclic GFR-binding peptide
  MOD_RES (2)..(4)..(36)..(37): Xaa is C or S

SEQ ID NO: 104706 - protein, 35 aa, Artificial Sequence
  Cyclic GFR-binding peptide
  MOD_RES (1)..(33)..(34): Xaa is C or S
XRDVVMGQYNKLIIQQKDNLYLMSIASMKTPTXXP

SEQ ID NO: 104707 - protein, 27 aa, Artificial Sequence
  Cyclic GFR-binding peptide
VVMNQYNKLIVNNSSDLYLVSIASLKT

SEQ ID NO: 104708 - protein, 30 aa, Artificial Sequence; identical to SEQ ID NO: 29015
  Cyclic GFR-binding peptide
  MOD_RES (1)..(1): Xaa is C or S

SEQ ID NO: 104709 - protein, 23 aa, Artificial Sequence
  Cyclic GFR-binding peptide
MDRYKKLVVKENEDFYLMSIANL

SEQ ID NO: 104710 - protein, 32 aa, Artificial Sequence; identical to SEQ ID NO: 919
  Cyclic GFR-binding peptide
  MOD_RES (30)..(31): Xaa is C or S

SEQ ID NO: 104711 - protein, 29 aa, Artificial Sequence
  Cyclic GFR-binding peptide
KVVMRYKKLVKPTRGVFYLISIANLDQPV

SEQ ID NO: 104712 - protein, 29 aa, Artificial Sequence
  Cyclic GFR-binding peptide
  MOD_RES (2)..(2): Xaa is C or S
KXSRVIMQYNKLVKPKRGVLYLISIASLA

SEQ ID NO: 104713 - protein, 30 aa, Artificial Sequence; identical to SEQ ID NO: 11499
  Cyclic GFR-binding peptide
  MOD_RES (1)..(1): Xaa is C or S

SEQ ID NO: 104714 - protein, 32 aa, Artificial Sequence; identical to SEQ ID NO: 924
  Cyclic GFR-binding peptide
  MOD_RES (31)..(31): Xaa is C or S

SEQ ID NO: 104715 - protein, 41 aa, Artificial Sequence; identical to SEQ ID NO: 925
  Cyclic GFR-binding peptide
  MOD_RES (1)..(3)..(35)..(36): Xaa is C or S

SEQ ID NO: 104716 - protein, 30 aa, Artificial Sequence; identical to SEQ ID NO: 928
  Cyclic GFR-binding peptide
  MOD_RES (1)..(3): Xaa is C or S

SEQ ID NO: 104717 - protein, 29 aa, Artificial Sequence
  Cyclic GFR-binding peptide
SRVVMNRYKKLIVNSSDDFYLVSIANLKT

SEQ ID NO: 104718 - protein, 25 aa, Artificial Sequence
  Cyclic GFR-binding peptide
RYKKLVVNKNEDFYLISIANMKEPV

SEQ ID NO: 104719 - protein, 33 aa, Artificial Sequence
  Cyclic GFR-binding peptide
  MOD_RES (2)..(33): Xaa is C or S
GXEEVIMQYNKLLLVRGNDLYLMSIASTKVPAX

SEQ ID NO: 104720 - protein, 40 aa, Artificial Sequence; identical to SEQ ID NO: 11508
  Cyclic GFR-binding peptide
  MOD_RES (2)..(34)..(35): Xaa is C or S

SEQ ID NO: 104721 - protein, 31 aa, Artificial Sequence
  Cyclic GFR-binding peptide
  MOD_RES (30)..(31): Xaa is C or S
VTMNQYNKLVVNKNEDLYLISIASMKEPVXX

SEQ ID NO: 104722 - protein, 29 aa, Artificial Sequence
  Cyclic GFR-binding peptide
  MOD_RES (1)..(3): Xaa is C or S
XGXSRVVMNQYNKLIVNSSDDLYLVSIAS

SEQ ID NO: 104723 - protein, 37 aa, Artificial Sequence; identical to SEQ ID NO: 29033
  Cyclic GFR-binding peptide
  MOD_RES (2)..(34)..(35): Xaa is C or S

SEQ ID NO: 104724 - protein, 32 aa, Artificial Sequence; identical to SEQ ID NO: 935
  Cyclic GFR-binding peptide
  MOD_RES (31)..(32): Xaa is C or S

SEQ ID NO: 104725 - protein, 36 aa, Artificial Sequence; identical to SEQ ID NO: 938
  Cyclic GFR-binding peptide
  MOD_RES (1)..(32)..(33): Xaa is C or S

SEQ ID NO: 104726 - protein, 26 aa, Artificial Sequence
  Cyclic GFR-binding peptide
MDRYKKLVVKENEDFYLMSIANLETP

SEQ ID NO: 104727 - protein, 38 aa, Artificial Sequence; identical to SEQ ID NO: 29043
  Cyclic GFR-binding peptide
  MOD_RES (2)..(34)..(35): Xaa is C or S

SEQ ID NO: 104728 - protein, 35 aa, Artificial Sequence; identical to SEQ ID NO: 944
  Cyclic GFR-binding peptide
  MOD_RES (29)..(30): Xaa is C or S

SEQ ID NO: 104729 - protein, 29 aa, Artificial Sequence
  Cyclic GFR-binding peptide
ARVVMNQYNKLIVNSSDDLYLVSIASLQT

SEQ ID NO: 104730 - protein, 24 aa, Artificial Sequence
  Cyclic GFR-binding peptide
SMGEQYNKLTPVGMDDLYLVSIAS

SEQ ID NO: 104731 - protein, 30 aa, Artificial Sequence; identical to SEQ ID NO: 75240
  Cyclic GFR-binding peptide
  MOD_RES (30)..(30): Xaa is C or S

SEQ ID NO: 104732 - protein, 38 aa, Artificial Sequence; identical to SEQ ID NO: 75241
  Cyclic GFR-binding peptide
  MOD_RES (2)..(34)..(35): Xaa is C or S

SEQ ID NO: 104733 - protein, 26 aa, Artificial Sequence
  Cyclic GFR-binding peptide
MRYKKLLLVRGNDFYLMSIANTKVPA

SEQ ID NO: 104734 - protein, 34 aa, Artificial Sequence; identical to SEQ ID NO: 83387
  Cyclic GFR-binding peptide
  MOD_RES (28)..(29): Xaa is C or S

SEQ ID NO: 104735 - protein, 21 aa, Artificial Sequence
  Cyclic GFR-binding peptide
GRYKKLIIQQKDNFYLMSIAN

SEQ ID NO: 104736 - protein, 32 aa, Artificial Sequence; identical to SEQ ID NO: 951
  Cyclic GFR-binding peptide
  MOD_RES (1)..(3): Xaa is C or S

SEQ ID NO: 104737 - protein, 25 aa, Artificial Sequence
  Cyclic GFR-binding peptide
VIMQYNKLIKPTKGILYLISIASLD

SEQ ID NO: 104738 - protein, 27 aa, Artificial Sequence
  Cyclic GFR-binding peptide
  MOD_RES (26)..(27): Xaa is C or S
RYKKLVKPTRGVFYLISIANLDQPVXX

SEQ ID NO: 104739 - protein, 33 aa, Artificial Sequence; identical to SEQ ID NO: 29061
  Cyclic GFR-binding peptide
  MOD_RES (31)..(32): Xaa is C or S

SEQ ID NO: 104740 - protein, 23 aa, Artificial Sequence
  Cyclic GFR-binding peptide
NRYKKLIVNSSDDFYLVSIANLK

SEQ ID NO: 104741 - protein, 25 aa, Artificial Sequence
  Cyclic GFR-binding peptide
SRVIMQYNKLVKPKRGVLYLISIAS

SEQ ID NO: 104742 - protein, 40 aa, Artificial Sequence; identical to SEQ ID NO: 78238
  Cyclic GFR-binding peptide
  MOD_RES (2)..(34)..(35): Xaa is C or S

SEQ ID NO: 104743 - protein, 20 aa, Artificial Sequence
  Cyclic GFR-binding peptide
RYKKLVVNNASDFYLISIAN

SEQ ID NO: 104744 - protein, 28 aa, Artificial Sequence
  Cyclic GFR-binding peptide
  MOD_RES (26)..(27): Xaa is C or S
QYNKLVVNNAADLYLISIASLRAPVXXS

SEQ ID NO: 104745 - protein, 29 aa, Artificial Sequence
  Cyclic GFR-binding peptide
  MOD_RES (1)..(1): Xaa is C or S
XEEVIMRYKKLLLVRGNDFYLMSIANTKV

SEQ ID NO: 104746 - protein, 31 aa, Artificial Sequence; identical to SEQ ID NO: 966
  Cyclic GFR-binding peptide
  MOD_RES (2)..(4): Xaa is C or S

SEQ ID NO: 104747 - protein, 33 aa, Artificial Sequence; identical to SEQ ID NO: 967
  Cyclic GFR-binding peptide
  MOD_RES (31)..(32): Xaa is C or S

SEQ ID NO: 104748 - protein, 34 aa, Artificial Sequence; identical to SEQ ID NO: 969
  Cyclic GFR-binding peptide
  MOD_RES (1)..(3)..(34): Xaa is C or S

SEQ ID NO: 104749 - protein, 35 aa, Artificial Sequence; identical to SEQ ID NO: 970
  Cyclic GFR-binding peptide
  MOD_RES (29)..(30): Xaa is C or S

SEQ ID NO: 104750 - protein, 29 aa, Artificial Sequence
  Cyclic GFR-binding peptide
KVIMQYNKLIKPTKGILYLISIASLDQSV

SEQ ID NO: 104751 - protein, 22 aa, Artificial Sequence
  Cyclic GFR-binding peptide
IMQYNKLLLVRGNDLYLMSIAS

SEQ ID NO: 104752 - protein, 30 aa, Artificial Sequence; identical to SEQ ID NO: 975
  Cyclic GFR-binding peptide
  MOD_RES (2)..(2): Xaa is C or S

SEQ ID NO: 104753 - protein, 32 aa, Artificial Sequence; identical to SEQ ID NO: 29071
  Cyclic GFR-binding peptide
  MOD_RES (27)..(28): Xaa is C or S

SEQ ID NO: 104754 - protein, 25 aa, Artificial Sequence
  Cyclic GFR-binding peptide
SKVIMQYNKLIKPTKGILYLISIAS

SEQ ID NO: 104755 - protein, 28 aa, Artificial Sequence
  Cyclic GFR-binding peptide
EVVMDQYNKLVVNNASDLYLISIASLRT

SEQ ID NO: 104756 - protein, 25 aa, Artificial Sequence
  Cyclic GFR-binding peptide
VVMNQYNKLIVNNSSDLYLVSIASL

SEQ ID NO: 104757 - protein, 28 aa, Artificial Sequence
  Cyclic GFR-binding peptide
  MOD_RES (28)..(28): Xaa is C or S
GERYKKLTPVGMDDFYLVSIANLKTPVX

SEQ ID NO: 104758 - protein, 22 aa, Artificial Sequence
  Cyclic GFR-binding peptide
QYNKLVVNNAADLYLISIASLR

SEQ ID NO: 104759 - protein, 34 aa, Artificial Sequence; identical to SEQ ID NO: 29078
  Cyclic GFR-binding peptide
  MOD_RES (2)..(4): Xaa is C or S

SEQ ID NO: 104760 - protein, 29 aa, Artificial Sequence
  Cyclic GFR-binding peptide
  MOD_RES (26)..(27): Xaa is C or S
RYKKLYTVVGKDFYLISIANLKTPVXXAK

SEQ ID NO: 104761 - protein, 30 aa, Artificial Sequence
  Cyclic GFR-binding peptide
  MOD_RES (2)..(2): Xaa is C or S
GXAEVVMDQYNKLVVNNAADLYLISIASLR

SEQ ID NO: 104762 - protein, 25 aa, Artificial Sequence
  Cyclic GFR-binding peptide
VSMGEQYNKLTPVGMDDLYLVSIAS

SEQ ID NO: 104763 - protein, 31 aa, Artificial Sequence; identical to SEQ ID NO: 986
  Cyclic GFR-binding peptide
  MOD_RES (31)..(31): Xaa is C or S

SEQ ID NO: 104764 - protein, 34 aa, Artificial Sequence
  Cyclic GFR-binding peptide
  MOD_RES (1)..(33)..(34): Xaa is C or S
XSEVTMNQYNKLVVNKNEDLYLISIASMKEPVXX

SEQ ID NO: 104765 - protein, 34 aa, Artificial Sequence; identical to SEQ ID NO: 11558
  Cyclic GFR-binding peptide
  MOD_RES (32)..(33): Xaa is C or S

SEQ ID NO: 104766 - protein, 26 aa, Artificial Sequence
  Cyclic GFR-binding peptide
MQYNKLIKPTKGILYLISIASLDQSV

SEQ ID NO: 104767 - protein, 31 aa, Artificial Sequence; identical to SEQ ID NO: 988
  Cyclic GFR-binding peptide
  MOD_RES (27)..(28): Xaa is C or S

SEQ ID NO: 104768 - protein, 27 aa, Artificial Sequence
  Cyclic GFR-binding peptide
RVVMNRYKKLIVNSSDDFYLVSIANLK

SEQ ID NO: 104769 - protein, 34 aa, Artificial Sequence; identical to SEQ ID NO: 991
  Cyclic GFR-binding peptide
  MOD_RES (31)..(32): Xaa is C or S

SEQ ID NO: 104770 - protein, 35 aa, Artificial Sequence; identical to SEQ ID NO: 83416
  Cyclic GFR-binding peptide
  MOD_RES (29)..(30): Xaa is C or S

SEQ ID NO: 104771 - protein, 40 aa, Artificial Sequence; identical to SEQ ID NO: 993
  Cyclic GFR-binding peptide
  MOD_RES (2)..(4)..(36)..(37): Xaa is C or S

SEQ ID NO: 104772 - protein, 24 aa, Artificial Sequence
  Cyclic GFR-binding peptide
IMQYNKLIKPTKGILYLISIASLD

SEQ ID NO: 104773 - protein, 29 aa, Artificial Sequence
  Cyclic GFR-binding peptide
VVMDRYKKLVVNNASDFYLISIANLRTPV

SEQ ID NO: 104774 - protein, 28 aa, Artificial Sequence
  Cyclic GFR-binding peptide
  MOD_RES (28)..(28): Xaa is C or S
IMRYKKLVKPKRGVFYLISIANLAQPVX

SEQ ID NO: 104775 - protein, 33 aa, Artificial Sequence; identical to SEQ ID NO: 998
  Cyclic GFR-binding peptide
  MOD_RES (29)..(30): Xaa is C or S

SEQ ID NO: 104776 - protein, 34 aa, Artificial Sequence; identical to SEQ ID NO: 999
  Cyclic GFR-binding peptide
  MOD_RES (28)..(29): Xaa is C or S

SEQ ID NO: 104777 - protein, 32 aa, Artificial Sequence; identical to SEQ ID NO: 1000
  Cyclic GFR-binding peptide
  MOD_RES (31)..(32): Xaa is C or S

SEQ ID NO: 104778 - protein, 30 aa, Artificial Sequence; identical to SEQ ID NO: 1001
  Cyclic GFR-binding peptide
  MOD_RES (26)..(27): Xaa is C or S

SEQ ID NO: 104779 - protein, 27 aa, Artificial Sequence
  Cyclic GFR-binding peptide
TMNRYKKLVVNKNEDFYLISIANMKEP

SEQ ID NO: 104780 - protein, 25 aa, Artificial Sequence
  Cyclic GFR-binding peptide
VMNQYNKLIVNNSSDLYLVSIASLK

SEQ ID NO: 104781 - protein, 38 aa, Artificial Sequence; identical to SEQ ID NO: 1005
  Cyclic GFR-binding peptide
  MOD_RES (1)..(32)..(33): Xaa is C or S

SEQ ID NO: 104782 - protein, 27 aa, Artificial Sequence
  Cyclic GFR-binding peptide
VMDQYNKLVVKENEDLYLMSIASLETP

SEQ ID NO: 104783 - protein, 32 aa, Artificial Sequence; identical to SEQ ID NO: 1012
  Cyclic GFR-binding peptide
  MOD_RES (1)..(32): Xaa is C or S

SEQ ID NO: 104784 - protein, 27 aa, Artificial Sequence
  Cyclic GFR-binding peptide
VMNQYNKLIVNSSDDLYLVSIASLKTP

SEQ ID NO: 104785 - protein, 28 aa, Artificial Sequence
  Cyclic GFR-binding peptide
  MOD_RES (26)..(27): Xaa is C or S
RYKKLVVNNASDFYLISIANLRTPVXXT

SEQ ID NO: 104786 - protein, 29 aa, Artificial Sequence
  Cyclic GFR-binding peptide
  MOD_RES (28)..(29): Xaa is C or S
MGQYNKLYTVVGKDLYLISIASLKTPVXX

SEQ ID NO: 104787 - protein, 30 aa, Artificial Sequence; identical to SEQ ID NO: 1017
  Cyclic GFR-binding peptide
  MOD_RES (1)..(1): Xaa is C or S

SEQ ID NO: 104788 - protein, 31 aa, Artificial Sequence; identical to SEQ ID NO: 1018
  Cyclic GFR-binding peptide
  MOD_RES (1)..(1): Xaa is C or S

SEQ ID NO: 104789 - protein, 40 aa, Artificial Sequence; identical to SEQ ID NO: 1022
  Cyclic GFR-binding peptide
  MOD_RES (2)..(34)..(35): Xaa is C or S

SEQ ID NO: 104790 - protein, 25 aa, Artificial Sequence
  Cyclic GFR-binding peptide
KVIMRYKKLIKPTKGIFYLISIANL

SEQ ID NO: 104791 - protein, 36 aa, Artificial Sequence
  Cyclic GFR-binding peptide
  MOD_RES (32)..(33): Xaa is C or S
AEVVMDQYNKLVVNNAADLYLISIASLRAPVXXSAP

SEQ ID NO: 104792 - protein, 41 aa, Artificial Sequence; identical to SEQ ID NO: 1026
  Cyclic GFR-binding peptide
  MOD_RES (2)..(4)..(36)..(37): Xaa is C or S

SEQ ID NO: 104793 - protein, 27 aa, Artificial Sequence
  Cyclic GFR-binding peptide
SEVVMDQYNKLVVNNASDLYLISIASL

SEQ ID NO: 104794 - protein, 38 aa, Artificial Sequence; identical to SEQ ID NO: 1027
  Cyclic GFR-binding peptide
  MOD_RES (32)..(33): Xaa is C or S

SEQ ID NO: 104795 - protein, 33 aa, Artificial Sequence; identical to SEQ ID NO: 1028
  Cyclic GFR-binding peptide
  MOD_RES (1)..(33): Xaa is C or S

SEQ ID NO: 104796 - protein, 39 aa, Artificial Sequence; identical to SEQ ID NO: 1029
  Cyclic GFR-binding peptide
  MOD_RES (2)..(4)..(35)..(36): Xaa is C or S

SEQ ID NO: 104797 - protein, 30 aa, Artificial Sequence; identical to SEQ ID NO: 78302
  Cyclic GFR-binding peptide
  MOD_RES (28)..(29): Xaa is C or S

SEQ ID NO: 104798 - protein, 31 aa, Artificial Sequence; identical to SEQ ID NO: 78303
  Cyclic GFR-binding peptide
  MOD_RES (28)..(29): Xaa is C or S

SEQ ID NO: 104799 - protein, 27 aa, Artificial Sequence
  Cyclic GFR-binding peptide
SEVTMNRYKKLVVNKNEDFYLISIANM

SEQ ID NO: 104800 - protein, 31 aa, Artificial Sequence; identical to SEQ ID NO: 1035
  Cyclic GFR-binding peptide
  MOD_RES (1)..(3): Xaa is C or S

SEQ ID NO: 104801 - protein, 28 aa, Artificial Sequence
  Cyclic GFR-binding peptide
SMGERYKKLTPVGMDDFYLVSIANLKTP

SEQ ID NO: 104802 - protein, 40 aa, Artificial Sequence; identical to SEQ ID NO: 1037
  Cyclic GFR-binding peptide
  MOD_RES (2)..(34): Xaa is C or S

SEQ ID NO: 104803 - protein, 25 aa, Artificial Sequence
  Cyclic GFR-binding peptide
MRYKKLLLVRGNDFYLMSIANTKVP

SEQ ID NO: 104804 - protein, 34 aa, Artificial Sequence; identical to SEQ ID NO: 1042
  Cyclic GFR-binding peptide
  MOD_RES (1)..(3): Xaa is C or S

SEQ ID NO: 104805 - protein, 41 aa, Artificial Sequence; identical to SEQ ID NO: 11624
  Cyclic GFR-binding peptide
  MOD_RES (2)..(4)..(36)..(37): Xaa is C or S

SEQ ID NO: 104806 - protein, 38 aa, Artificial Sequence; identical to SEQ ID NO: 1044
  Cyclic GFR-binding peptide
  MOD_RES (2)..(4)..(35)..(36): Xaa is C or S

SEQ ID NO: 104807 - protein, 36 aa, Artificial Sequence; identical to SEQ ID NO: 1048
  Cyclic GFR-binding peptide
  MOD_RES (31)..(32): Xaa is C or S

SEQ ID NO: 104808 - protein, 33 aa, Artificial Sequence; identical to SEQ ID NO: 11630
  Cyclic GFR-binding peptide
  MOD_RES (31)..(32): Xaa is C or S

SEQ ID NO: 104809 - protein, 31 aa, Artificial Sequence; identical to SEQ ID NO: 75304
  Cyclic GFR-binding peptide
  MOD_RES (1)..(3): Xaa is C or S

SEQ ID NO: 104810 - protein, 29 aa, Artificial Sequence
  Cyclic GFR-binding peptide
  MOD_RES (29)..(29): Xaa is C or S
VIMQYNKLLLVRGNDLYLMSIASTKVPAX

SEQ ID NO: 104811 - protein, 33 aa, Artificial Sequence
  Cyclic GFR-binding peptide
  MOD_RES (30)..(31): Xaa is C or S
VVMDQYNKLVVNNAADLYLISIASLRAPVXXSA

SEQ ID NO: 104812 - protein, 32 aa, Artificial Sequence; identical to SEQ ID NO: 1052
  Cyclic GFR-binding peptide
  MOD_RES (29)..(29): Xaa is C or S

SEQ ID NO: 104813 - protein, 31 aa, Artificial Sequence; identical to SEQ ID NO: 1053
  Cyclic GFR-binding peptide
  MOD_RES (2)..(2): Xaa is C or S

SEQ ID NO: 104814 - protein, 25 aa, Artificial Sequence
  Cyclic GFR-binding peptide
VMDRYKKLVVKENEDFYLMSIANLE

SEQ ID NO: 104815 - protein, 41 aa, Artificial Sequence
  Cyclic GFR-binding peptide
  MOD_RES (1)..(3)..(35)..(36): Xaa is C or S
XGXAEVVMDQYNKLVVNNAADLYLISIASLRAPVXXSAPAA

SEQ ID NO: 104816 - protein, 35 aa, Artificial Sequence; identical to SEQ ID NO: 1056
  Cyclic GFR-binding peptide
  MOD_RES (29)..(30): Xaa is C or S

SEQ ID NO: 104817 - protein, 38 aa, Artificial Sequence; identical to SEQ ID NO: 1057
  Cyclic GFR-binding peptide
  MOD_RES (2)..(35)..(36): Xaa is C or S

SEQ ID NO: 104818 - protein, 34 aa, Artificial Sequence; identical to SEQ ID NO: 75308
  Cyclic GFR-binding peptide
  MOD_RES (32)..(33): Xaa is C or S

SEQ ID NO: 104819 - protein, 33 aa, Artificial Sequence; identical to SEQ ID NO: 1067
  Cyclic GFR-binding peptide
  MOD_RES (32)..(32): Xaa is C or S

SEQ ID NO: 104820 - protein, 28 aa, Artificial Sequence
  Cyclic GFR-binding peptide
SEVVMDRYKKLVVNNASDFYLISIANLR

SEQ ID NO: 104821 - protein, 34 aa, Artificial Sequence
  Cyclic GFR-binding peptide
  MOD_RES (1)..(3): Xaa is C or S
XGXRDVVMGQYNKLIIQQKDNLYLMSIASMKTPT

SEQ ID NO: 104822 - protein, 31 aa, Artificial Sequence; identical to SEQ ID NO: 1069
  Cyclic GFR-binding peptide
  MOD_RES (26)..(27): Xaa is C or S

SEQ ID NO: 104823 - protein, 23 aa, Artificial Sequence
  Cyclic GFR-binding peptide
VIMRYKKLLLVRGNDFYLMSIAN

SEQ ID NO: 104824 - protein, 29 aa, Artificial Sequence
  Cyclic GFR-binding peptide
  MOD_RES (26)..(27): Xaa is C or S
RYKKLIVNNSSDFYLVSIANLKTPAXXAK

SEQ ID NO: 104825 - protein, 32 aa, Artificial Sequence; identical to SEQ ID NO: 83480
  Cyclic GFR-binding peptide
  MOD_RES (2)..(4): Xaa is C or S

SEQ ID NO: 104826 - protein, 23 aa, Artificial Sequence
  Cyclic GFR-binding peptide
MQYNKLIKPTKGILYLISIASLD

SEQ ID NO: 104827 - protein, 34 aa, Artificial Sequence; identical to SEQ ID NO: 11652
  Cyclic GFR-binding peptide
  MOD_RES (1)..(3): Xaa is C or S

SEQ ID NO: 104828 - protein, 39 aa, Artificial Sequence; identical to SEQ ID NO: 1077
  Cyclic GFR-binding peptide
  MOD_RES (1)..(3)..(34)..(35): Xaa is C or S

SEQ ID NO: 104829 - protein, 32 aa, Artificial Sequence; identical to SEQ ID NO: 1079
  Cyclic GFR-binding peptide
  MOD_RES (26)..(27): Xaa is C or S

SEQ ID NO: 104830 - protein, 28 aa, Artificial Sequence
  Cyclic GFR-binding peptide
MGERYKKLTPVGMDDFYLVSIANLKTPV

SEQ ID NO: 104831 - protein, 28 aa, Artificial Sequence
  Cyclic GFR-binding peptide
  MOD_RES (27)..(28): Xaa is C or S
MRYKKLIKPTKGIFYLISIANLDQSVXX

SEQ ID NO: 104832 - protein, 37 aa, Artificial Sequence
  Cyclic GFR-binding peptide
  MOD_RES (2)..(33)..(34): Xaa is C or S
GXEEVIMQYNKLLLVRGNDLYLMSIASTKVPAXXTSP

SEQ ID NO: 104833 - protein, 30 aa, Artificial Sequence; identical to SEQ ID NO: 1087
  Cyclic GFR-binding peptide

SEQ ID NO: 104834 - protein, 33 aa, Artificial Sequence; identical to SEQ ID NO: 29171
  Cyclic GFR-binding peptide
  MOD_RES (29)..(30): Xaa is C or S

SEQ ID NO: 104835 - protein, 29 aa, Artificial Sequence
  Cyclic GFR-binding peptide
RDVVMGQYNKLIIQQKDNLYLMSIASMKT

SEQ ID NO: 104836 - protein, 35 aa, Artificial Sequence; identical to SEQ ID NO: 11662
  Cyclic GFR-binding peptide
  MOD_RES (1)..(33)..(34): Xaa is C or S

SEQ ID NO: 104837 - protein, 21 aa, Artificial Sequence
  Cyclic GFR-binding peptide
RYKKLLLVRGNDFYLMSIANT

SEQ ID NO: 104838 - protein, 28 aa, Artificial Sequence
  Cyclic GFR-binding peptide
EVVMERYKKLVVKDYEDFYLMSIANLET

SEQ ID NO: 104839 - protein, 32 aa, Artificial Sequence; identical to SEQ ID NO: 75331
  Cyclic GFR-binding peptide
  MOD_RES (30)..(31): Xaa is C or S

SEQ ID NO: 104840 - protein, 34 aa, Artificial Sequence; identical to SEQ ID NO: 1092
  Cyclic GFR-binding peptide
  MOD_RES (29)..(30): Xaa is C or S

SEQ ID NO: 104841 - protein, 33 aa, Artificial Sequence; identical to SEQ ID NO: 1096
  Cyclic GFR-binding peptide
  MOD_RES (2)..(2): Xaa is C or S

SEQ ID NO: 104842 - protein, 36 aa, Artificial Sequence; identical to SEQ ID NO: 1098
  Cyclic GFR-binding peptide
  MOD_RES (1)..(3)..(35)..(36): Xaa is C or S

SEQ ID NO: 104843 - protein, 32 aa, Artificial Sequence; identical to SEQ ID NO: 11674
  Cyclic GFR-binding peptide
  MOD_RES (31)..(32): Xaa is C or S

SEQ ID NO: 104844 - protein, 37 aa, Artificial Sequence; identical to SEQ ID NO: 1101
  Cyclic GFR-binding peptide
  MOD_RES (2)..(33)..(34): Xaa is C or S

SEQ ID NO: 104845 - protein, 36 aa, Artificial Sequence; identical to SEQ ID NO: 75341
  Cyclic GFR-binding peptide
  MOD_RES (30)..(31): Xaa is C or S

SEQ ID NO: 104846 - protein, 40 aa, Artificial Sequence; identical to SEQ ID NO: 1103
  Cyclic GFR-binding peptide
  MOD_RES (1)..(3)..(35)..(36): Xaa is C or S

SEQ ID NO: 104847 - protein, 26 aa, Artificial Sequence
  Cyclic GFR-binding peptide
  MOD_RES (1)..(1): Xaa is C or S
XSKVVMRYKKLVKPTRGVFYLISIAN

SEQ ID NO: 104848 - protein, 28 aa, Artificial Sequence
  Cyclic GFR-binding peptide
VIMRYKKLLLVRGNDFYLMSIANTKVPA

SEQ ID NO: 104849 - protein, 41 aa, Artificial Sequence; identical to SEQ ID NO: 1105
  Cyclic GFR-binding peptide
  MOD_RES (2)..(4)..(36)..(37): Xaa is C or S

SEQ ID NO: 104850 - protein, 24 aa, Artificial Sequence
  Cyclic GFR-binding peptide
VIMRYKKLIKPTKGIFYLISIANL

SEQ ID NO: 104851 - protein, 29 aa, Artificial Sequence
  Cyclic GFR-binding peptide
VAMGQYNKLYTVVGKDLYLISIASLKTPV

SEQ ID NO: 104852 - protein, 34 aa, Artificial Sequence; identical to SEQ ID NO: 11684
  Cyclic GFR-binding peptide
  MOD_RES (28)..(29): Xaa is C or S

SEQ ID NO: 104853 - protein, 34 aa, Artificial Sequence; identical to SEQ ID NO: 1111
  Cyclic GFR-binding peptide
  MOD_RES (1)..(33): Xaa is C or S

SEQ ID NO: 104854 - protein, 33 aa, Artificial Sequence
  Cyclic GFR-binding peptide
  MOD_RES (1)..(3): Xaa is C or S
XGXAEVVMDQYNKLVVNNAADLYLISIASLRAP

SEQ ID NO: 104855 - protein, 28 aa, Artificial Sequence
  Cyclic GFR-binding peptide
  MOD_RES (2)..(2): Xaa is C or S
KXSKVVMQYNKLVKPTRGVLYLISIASL

SEQ ID NO: 104856 - protein, 36 aa, Artificial Sequence
  Cyclic GFR-binding peptide
  MOD_RES (30)..(31): Xaa is C or S
VVMGQYNKLIIQQKDNLYLMSIASMKTPTXXPGASG

SEQ ID NO: 104857 - protein, 34 aa, Artificial Sequence
  Cyclic GFR-binding peptide
  MOD_RES (2)..(33)..(34): Xaa is C or S
GXEEVIMQYNKLLLVRGNDLYLMSIASTKVPAXX

SEQ ID NO: 104858 - protein, 33 aa, Artificial Sequence; identical to SEQ ID NO: 75346
  Cyclic GFR-binding peptide
  MOD_RES (1)..(3): Xaa is C or S

SEQ ID NO: 104859 - protein, 30 aa, Artificial Sequence; identical to SEQ ID NO: 1114
  Cyclic GFR-binding peptide
  MOD_RES (30)..(30): Xaa is C or S

SEQ ID NO: 104860 - protein, 28 aa, Artificial Sequence
  Cyclic GFR-binding peptide
  MOD_RES (27)..(28): Xaa is C or S
EQYNKLVVKDYEDLYLMSIASLETPVXX

SEQ ID NO: 104861 - protein, 33 aa, Artificial Sequence; identical to SEQ ID NO: 75347
  Cyclic GFR-binding peptide
  MOD_RES (31)..(32): Xaa is C or S

SEQ ID NO: 104862 - protein, 36 aa, Artificial Sequence; identical to SEQ ID NO: 1117
  Cyclic GFR-binding peptide
  MOD_RES (32)..(33): Xaa is C or S

SEQ ID NO: 104863 - protein, 27 aa, Artificial Sequence
  Cyclic GFR-binding peptide
GEQYNKLTPVGMDDLYLVSIASLKTPV

SEQ ID NO: 104864 - protein, 34 aa, Artificial Sequence; identical to SEQ ID NO: 1122
  Cyclic GFR-binding peptide
  MOD_RES (2)..(4): Xaa is C or S

SEQ ID NO: 104865 - protein, 38 aa, Artificial Sequence; identical to SEQ ID NO: 1123
  Cyclic GFR-binding peptide
  MOD_RES (33)..(34): Xaa is C or S

SEQ ID NO: 104866 - protein, 29 aa, Artificial Sequence
  Cyclic GFR-binding peptide
KVVMNQYNKLIVNNSSDLYLVSIASLKTP

SEQ ID NO: 104867 - protein, 31 aa, Artificial Sequence; identical to SEQ ID NO: 1129
  Cyclic GFR-binding peptide
  MOD_RES (1)..(3): Xaa is C or S

SEQ ID NO: 104868 - protein, 27 aa, Artificial Sequence
  Cyclic GFR-binding peptide
  MOD_RES (27)..(27): Xaa is C or S
GRYKKLYTVVGKDFYLISIANLKTPVX

SEQ ID NO: 104869 - protein, 25 aa, Artificial Sequence
  Cyclic GFR-binding peptide
RVVMNRYKKLIVNSSDDFYLVSIAN

SEQ ID NO: 104870 - protein, 26 aa, Artificial Sequence
  Cyclic GFR-binding peptide
MQYNKLVKPTRGVLYLISIASLDQPV

SEQ ID NO: 104871 - protein, 27 aa, Artificial Sequence
  Cyclic GFR-binding peptide
  MOD_RES (27)..(27): Xaa is C or S
MQYNKLIKPTKGILYLISIASLDQSVX

SEQ ID NO: 104872 - protein, 29 aa, Artificial Sequence
  Cyclic GFR-binding peptide
  MOD_RES (28)..(29): Xaa is C or S
IMRYKKLVKPKRGVFYLISIANLAQPVXX

SEQ ID NO: 104873 - protein, 35 aa, Artificial Sequence; identical to SEQ ID NO: 1142
  Cyclic GFR-binding peptide
  MOD_RES (1)..(33)..(34): Xaa is C or S

SEQ ID NO: 104874 - protein, 31 aa, Artificial Sequence; identical to SEQ ID NO: 83551
  Cyclic GFR-binding peptide
  MOD_RES (2)..(2): Xaa is C or S

SEQ ID NO: 104875 - protein, 27 aa, Artificial Sequence
  Cyclic GFR-binding peptide
KVIMRYKKLIKPTKGIFYLISIANLDQ

SEQ ID NO: 104876 - protein, 39 aa, Artificial Sequence
  Cyclic GFR-binding peptide
  MOD_RES (1)..(3)..(35)..(36): Xaa is C or S
XGXAEVVMDQYNKLVVNNAADLYLISIASLRAPVXXSAP

SEQ ID NO: 104877 - protein, 35 aa, Artificial Sequence; identical to SEQ ID NO: 1144
  Cyclic GFR-binding peptide
  MOD_RES (31)..(31): Xaa is C or S

SEQ ID NO: 104878 - protein, 39 aa, Artificial Sequence; identical to SEQ ID NO: 1145
  Cyclic GFR-binding peptide
  MOD_RES (1)..(3)..(34)..(35): Xaa is C or S

SEQ ID NO: 104879 - protein, 37 aa, Artificial Sequence
  Cyclic GFR-binding peptide
  MOD_RES (2)..(34)..(35): Xaa is C or S
GXAEVVMDQYNKLVVNNAADLYLISIASLRAPVXXSA

SEQ ID NO: 104880 - protein, 31 aa, Artificial Sequence
  Cyclic GFR-binding peptide
  MOD_RES (28)..(29): Xaa is C or S
MDQYNKLVVNNAADLYLISIASLRAPVXXSA

SEQ ID NO: 104881 - protein, 36 aa, Artificial Sequence; identical to SEQ ID NO: 1148
  Cyclic GFR-binding peptide
  MOD_RES (30)..(31): Xaa is C or S

SEQ ID NO: 104882 - protein, 37 aa, Artificial Sequence; identical to SEQ ID NO: 75368
  Cyclic GFR-binding peptide
  MOD_RES (1)..(3)..(35)..(36): Xaa is C or S

SEQ ID NO: 104883 - protein, 30 aa, Artificial Sequence
  Cyclic GFR-binding peptide
SVAMGQYNKLYTVVGKDLYLISIASLKTPV

SEQ ID NO: 104884 - protein, 30 aa, Artificial Sequence; identical to SEQ ID NO: 1151
  Cyclic GFR-binding peptide
  MOD_RES (2)..(2): Xaa is C or S

SEQ ID NO: 104885 - protein, 36 aa, Artificial Sequence
  Cyclic GFR-binding peptide
  MOD_RES (30)..(31): Xaa is C or S
VVMNQYNKLIVNSSDDLYLVSIASLKTPAXXPKPVH

SEQ ID NO: 104886 - protein, 23 aa, Artificial Sequence
  Cyclic GFR-binding peptide
DQYNKLVVKENEDLYLMSIASLE

SEQ ID NO: 104887 - protein, 31 aa, Artificial Sequence; identical to SEQ ID NO: 1154
  Cyclic GFR-binding peptide
  MOD_RES (27)..(28): Xaa is C or S

SEQ ID NO: 104888 - protein, 36 aa, Artificial Sequence; identical to SEQ ID NO: 1155
  Cyclic GFR-binding peptide
  MOD_RES (1)..(32)..(33): Xaa is C or S

SEQ ID NO: 104889 - protein, 37 aa, Artificial Sequence
  Cyclic GFR-binding peptide
  MOD_RES (32)..(33): Xaa is C or S
ESVAMGQYNKLYTVVGKDLYLISIASLKTPVXXAKSA

SEQ ID NO: 104890 - protein, 33 aa, Artificial Sequence; identical to SEQ ID NO: 1159
  Cyclic GFR-binding peptide
  MOD_RES (31)..(32): Xaa is C or S

SEQ ID NO: 104891 - protein, 33 aa, Artificial Sequence; identical to SEQ ID NO: 1160
  Cyclic GFR-binding peptide
  MOD_RES (27)..(28): Xaa is C or S

SEQ ID NO: 104892 - protein, 42 aa, Artificial Sequence; identical to SEQ ID NO: 1163
  Cyclic GFR-binding peptide
  MOD_RES (2)..(4)..(36): Xaa is C or S

SEQ ID NO: 104893 - protein, 27 aa, Artificial Sequence
  Cyclic GFR-binding peptide
RDVVMGRYKKLIIQQKDNFYLMSIANM

SEQ ID NO: 104894 - protein, 26 aa, Artificial Sequence
  Cyclic GFR-binding peptide
AEVVMDRYKKLVVNNAADFYLISIAN

SEQ ID NO: 104895 - protein, 32 aa, Artificial Sequence; identical to SEQ ID NO: 1165
  Cyclic GFR-binding peptide
  MOD_RES (1)..(3): Xaa is C or S

SEQ ID NO: 104896 - protein, 32 aa, Artificial Sequence; identical to SEQ ID NO: 1166
  Cyclic GFR-binding peptide
  MOD_RES (30)..(31): Xaa is C or S

SEQ ID NO: 104897 - protein, 32 aa, Artificial Sequence; identical to SEQ ID NO: 1167
  Cyclic GFR-binding peptide
  MOD_RES (30)..(31): Xaa is C or S

SEQ ID NO: 104898 - protein, 27 aa, Artificial Sequence
  Cyclic GFR-binding peptide
IMQYNKLVKPKRGVLYLISIASLAQPV

SEQ ID NO: 104899 - protein, 30 aa, Artificial Sequence; identical to SEQ ID NO: 1169
  Cyclic GFR-binding peptide
  MOD_RES (27)..(28): Xaa is C or S

SEQ ID NO: 104900 - protein, 34 aa, Artificial Sequence; identical to SEQ ID NO: 1171
  Cyclic GFR-binding peptide
  MOD_RES (29)..(30): Xaa is C or S

SEQ ID NO: 104901 - protein, 29 aa, Artificial Sequence
  Cyclic GFR-binding peptide
  MOD_RES (1)..(1): Xaa is C or S
XEAVSMGERYKKLTPVGMDDFYLVSIANL

SEQ ID NO: 104902 - protein, 30 aa, Artificial Sequence; identical to SEQ ID NO: 75383
  Cyclic GFR-binding peptide
  MOD_RES (1)..(3): Xaa is C or S

SEQ ID NO: 104903 - protein, 29 aa, Artificial Sequence
  Cyclic GFR-binding peptide
VVMNQYNKLIVNSSDDLYLVSIASLQTPA

SEQ ID NO: 104904 - protein, 32 aa, Artificial Sequence; identical to SEQ ID NO: 1176
  Cyclic GFR-binding peptide
  MOD_RES (27)..(28): Xaa is C or S

SEQ ID NO: 104905 - protein, 27 aa, Artificial Sequence
  Cyclic GFR-binding peptide
GEVVMDRYKKLVVKENEDFYLMSIANL

SEQ ID NO: 104906 - protein, 34 aa, Artificial Sequence; identical to SEQ ID NO: 1179
  Cyclic GFR-binding peptide
  MOD_RES (1)..(33)..(34): Xaa is C or S

SEQ ID NO: 104907 - protein, 23 aa, Artificial Sequence
  Cyclic GFR-binding peptide
VMDRYKKLVVNNAADFYLISIAN

SEQ ID NO: 104908 - protein, 27 aa, Artificial Sequence
  Cyclic GFR-binding peptide
  MOD_RES (27)..(27): Xaa is C or S
DRYKKLVVKENEDFYLMSIANLETPVX

SEQ ID NO: 104909 - protein, 39 aa, Artificial Sequence
  Cyclic GFR-binding peptide
  MOD_RES (2)..(4)..(35)..(36): Xaa is C or S
LXGXEEVIMQYNKLLLVRGNDLYLMSIASTKVPAXXTSP

SEQ ID NO: 104910 - protein, 37 aa, Artificial Sequence; identical to SEQ ID NO: 75387
  Cyclic GFR-binding peptide
  MOD_RES (31)..(32): Xaa is C or S

SEQ ID NO: 104911 - protein, 32 aa, Artificial Sequence
  Cyclic GFR-binding peptide
  MOD_RES (29)..(30): Xaa is C or S
VMGQYNKLIIQQKDNLYLMSIASMKTPTXXPG

SEQ ID NO: 104912 - protein, 35 aa, Artificial Sequence
  Cyclic GFR-binding peptide
  MOD_RES (1)..(33)..(34): Xaa is C or S
XESVAMGQYNKLYTVVGKDLYLISIASLKTPVXXA

SEQ ID NO: 104913 - protein, 35 aa, Artificial Sequence; identical to SEQ ID NO: 1183
  Cyclic GFR-binding peptide
  MOD_RES (31)..(32): Xaa is C or S

SEQ ID NO: 104914 - protein, 23 aa, Artificial Sequence
  Cyclic GFR-binding peptide
MGRYKKLYTVVGKDFYLISIANL

SEQ ID NO: 104915 - protein, 26 aa, Artificial Sequence
  Cyclic GFR-binding peptide
DRYKKLVVNNASDFYLISIANLRTPV

SEQ ID NO: 104916 - protein, 28 aa, Artificial Sequence
  Cyclic GFR-binding peptide
  MOD_RES (28)..(28): Xaa is C or S
MNRYKKLIVNNSSDFYLVSIANLKTPAX

SEQ ID NO: 104917 - protein, 27 aa, Artificial Sequence
  Cyclic GFR-binding peptide
VMNQYNKLIVNNSSDLYLVSIASLKTP

SEQ ID NO: 104918 - protein, 30 aa, Artificial Sequence; identical to SEQ ID NO: 1192
  Cyclic GFR-binding peptide
  MOD_RES (1)..(1): Xaa is C or S

SEQ ID NO: 104919 - protein, 29 aa, Artificial Sequence
  Cyclic GFR-binding peptide
  MOD_RES (28)..(29): Xaa is C or S
GERYKKLTPVGMDDFYLVSIANLKTPVXX

SEQ ID NO: 104920 - protein, 29 aa, Artificial Sequence
  Cyclic GFR-binding peptide
EAVSMGERYKKLTPVGMDDFYLVSIANLK

SEQ ID NO: 104921 - protein, 31 aa, Artificial Sequence
  Cyclic GFR-binding peptide
  MOD_RES (31)..(31): Xaa is C or S
DVVMGQYNKLIIQQKDNLYLMSIASMKTPTX

SEQ ID NO: 104922 - protein, 37 aa, Artificial Sequence; identical to SEQ ID NO: 1197
  Cyclic GFR-binding peptide
  MOD_RES (1)..(3)..(35)..(36): Xaa is C or S

SEQ ID NO: 104923 - protein, 26 aa, Artificial Sequence
  Cyclic GFR-binding peptide
SMGERYKKLTPVGMDDFYLVSIANLK

SEQ ID NO: 104924 - protein, 28 aa, Artificial Sequence
  Cyclic GFR-binding peptide
  MOD_RES (2)..(2): Xaa is C or S
GXGEVVMDRYKKLVVKENEDFYLMSIAN

SEQ ID NO: 104925 - protein, 20 aa, Artificial Sequence
  Cyclic GFR-binding peptide
RYKKLTPVGMDDFYLVSIAN

SEQ ID NO: 104926 - protein, 28 aa, Artificial Sequence
  Cyclic GFR-binding peptide
EEVIMRYKKLLLVRGNDFYLMSIANTKV

SEQ ID NO: 104927 - protein, 29 aa, Artificial Sequence
  Cyclic GFR-binding peptide
  MOD_RES (28)..(29): Xaa is C or S
MDRYKKLVVNNAADFYLISIANLRAPVXX

SEQ ID NO: 104928 - protein, 32 aa, Artificial Sequence; identical to SEQ ID NO: 83615
  Cyclic GFR-binding peptide
  MOD_RES (32)..(32): Xaa is C or S

SEQ ID NO: 104929 - protein, 22 aa, Artificial Sequence
  Cyclic GFR-binding peptide
GQYNKLIIQQKDNLYLMSIASM

SEQ ID NO: 104930 - protein, 30 aa, Artificial Sequence; identical to SEQ ID NO: 1206
  Cyclic GFR-binding peptide
  MOD_RES (28)..(29): Xaa is C or S

SEQ ID NO: 104931 - protein, 31 aa, Artificial Sequence
  Cyclic GFR-binding peptide
  MOD_RES (2)..(2): Xaa is C or S
GXESVAMGQYNKLYTVVGKDLYLISIASLKT

SEQ ID NO: 104932 - protein, 30 aa, Artificial Sequence; identical to SEQ ID NO: 75406
  Cyclic GFR-binding peptide
  MOD_RES (1)..(1): Xaa is C or S

SEQ ID NO: 104933 - protein, 32 aa, Artificial Sequence; identical to SEQ ID NO: 1211
  Cyclic GFR-binding peptide
  MOD_RES (2)..(2): Xaa is C or S

SEQ ID NO: 104934 - protein, 40 aa, Artificial Sequence; identical to SEQ ID NO: 1212
  Cyclic GFR-binding peptide
  MOD_RES (2)..(4)..(35)..(36): Xaa is C or S

SEQ ID NO: 104935 - protein, 30 aa, Artificial Sequence; identical to SEQ ID NO: 1215
  Cyclic GFR-binding peptide
  MOD_RES (26)..(26): Xaa is C or S

SEQ ID NO: 104936 - protein, 31 aa, Artificial Sequence; identical to SEQ ID NO: 1216
  Cyclic GFR-binding peptide
  MOD_RES (1)..(3): Xaa is C or S

SEQ ID NO: 104937 - protein, 41 aa, Artificial Sequence; identical to SEQ ID NO: 75411
  Cyclic GFR-binding peptide
  MOD_RES (2)..(4)..(35)..(36): Xaa is C or S

SEQ ID NO: 104938 - protein, 27 aa, Artificial Sequence
  Cyclic GFR-binding peptide
  MOD_RES (27)..(27): Xaa is C or S
NRYKKLVVNKNEDFYLISIANMKEPVX

SEQ ID NO: 104939 - protein, 41 aa, Artificial Sequence; identical to SEQ ID NO: 1219
  Cyclic GFR-binding peptide
  MOD_RES (1)..(3)..(35)..(36): Xaa is C or S

SEQ ID NO: 104940 - protein, 30 aa, Artificial Sequence; identical to SEQ ID NO: 1220
  Cyclic GFR-binding peptide
  MOD_RES (30)..(30): Xaa is C or S

SEQ ID NO: 104941 - protein, 28 aa, Artificial Sequence
  Cyclic GFR-binding peptide
  MOD_RES (27)..(28): Xaa is C or S
NQYNKLIVNSSDDLYLVSIASLKTPAXX

SEQ ID NO: 104942 - protein, 33 aa, Artificial Sequence; identical to SEQ ID NO: 1223
  Cyclic GFR-binding peptide
  MOD_RES (1)..(33): Xaa is C or S

SEQ ID NO: 104943 - protein, 31 aa, Artificial Sequence; identical to SEQ ID NO: 1225
  Cyclic GFR-binding peptide
  MOD_RES (26)..(27): Xaa is C or S

SEQ ID NO: 104944 - protein, 33 aa, Artificial Sequence; identical to SEQ ID NO: 1226
  Cyclic GFR-binding peptide
  MOD_RES (30)..(31): Xaa is C or S

SEQ ID NO: 104945 - protein, 23 aa, Artificial Sequence
  Cyclic GFR-binding peptide
QYNKLVKPTRGVLYLISIASLDQ

SEQ ID NO: 104946 - protein, 28 aa, Artificial Sequence
  Cyclic GFR-binding peptide
  MOD_RES (27)..(28): Xaa is C or S
GQYNKLIIQQKDNLYLMSIASMKTPTXX

SEQ ID NO: 104947 - protein, 37 aa, Artificial Sequence; identical to SEQ ID NO: 1229
  Cyclic GFR-binding peptide
  MOD_RES (32)..(32): Xaa is C or S

SEQ ID NO: 104948 - protein, 31 aa, Artificial Sequence; identical to SEQ ID NO: 1231
  Cyclic GFR-binding peptide
  MOD_RES (31)..(31): Xaa is C or S

SEQ ID NO: 104949 - protein, 34 aa, Artificial Sequence; identical to SEQ ID NO: 75420
  Cyclic GFR-binding peptide
  MOD_RES (1)..(3)..(34): Xaa is C or S

SEQ ID NO: 104950 - protein, 41 aa, Artificial Sequence; identical to SEQ ID NO: 1233
  Cyclic GFR-binding peptide
  MOD_RES (2)..(4)..(36)..(37): Xaa is C or S

SEQ ID NO: 104951 - protein, 25 aa, Artificial Sequence
  Cyclic GFR-binding peptide
MDQYNKLVVNNAADLYLISIASLRA

SEQ ID NO: 104952 - protein, 25 aa, Artificial Sequence
  Cyclic GFR-binding peptide
EVVMDRYKKLVVNNASDFYLISIAN

SEQ ID NO: 104953 - protein, 26 aa, Artificial Sequence
  Cyclic GFR-binding peptide
KVIMQYNKLIKPTKGILYLISIASLD

SEQ ID NO: 104954 - protein, 37 aa, Artificial Sequence; identical to SEQ ID NO: 1237
  Cyclic GFR-binding peptide
  MOD_RES (1)..(33)..(34): Xaa is C or S

SEQ ID NO: 104955 - protein, 32 aa, Artificial Sequence; identical to SEQ ID NO: 1241
  Cyclic GFR-binding peptide
  MOD_RES (2)..(2): Xaa is C or S

SEQ ID NO: 104956 - protein, 33 aa, Artificial Sequence; identical to SEQ ID NO: 1242
  Cyclic GFR-binding peptide
  MOD_RES (28)..(29): Xaa is C or S

SEQ ID NO: 104957 - protein, 31 aa, Artificial Sequence; identical to SEQ ID NO: 29339
  Cyclic GFR-binding peptide

SEQ ID NO: 104958 - protein, 37 aa, Artificial Sequence; identical to SEQ ID NO: 1243
  Cyclic GFR-binding peptide
  MOD_RES (31)..(32): Xaa is C or S

SEQ ID NO: 104959 - protein, 35 aa, Artificial Sequence; identical to SEQ ID NO: 75428
  Cyclic GFR-binding peptide
  MOD_RES (1)..(3)..(34)..(35): Xaa is C or S

SEQ ID NO: 104960 - protein, 32 aa, Artificial Sequence; identical to SEQ ID NO: 1246
  Cyclic GFR-binding peptide
  MOD_RES (1)..(1): Xaa is C or S

SEQ ID NO: 104961 - protein, 31 aa, Artificial Sequence
  Cyclic GFR-binding peptide
  MOD_RES (27)..(28): Xaa is C or S
MQYNKLLLVRGNDLYLMSIASTKVPAXXTSP

SEQ ID NO: 104962 - protein, 37 aa, Artificial Sequence; identical to SEQ ID NO: 1247
  Cyclic GFR-binding peptide
  MOD_RES (1)..(33): Xaa is C or S

SEQ ID NO: 104963 - protein, 29 aa, Artificial Sequence
  Cyclic GFR-binding peptide
  MOD_RES (27)..(28): Xaa is C or S
GRYKKLYTVVGKDFYLISIANLKTPVXXA

SEQ ID NO: 104964 - protein, 33 aa, Artificial Sequence
  Cyclic GFR-binding peptide
  MOD_RES (2)..(4): Xaa is C or S
LXGXEEVIMQYNKLLLVRGNDLYLMSIASTKVP

SEQ ID NO: 104965 - protein, 31 aa, Artificial Sequence; identical to SEQ ID NO: 1250
  Cyclic GFR-binding peptide
  MOD_RES (28)..(29): Xaa is C or S

SEQ ID NO: 104966 - protein, 39 aa, Artificial Sequence; identical to SEQ ID NO: 1251
  Cyclic GFR-binding peptide
  MOD_RES (2)..(4)..(35)..(36): Xaa is C or S

SEQ ID NO: 104967 - protein, 27 aa, Artificial Sequence
  Cyclic GFR-binding peptide
MDQYNKLVVNNAADLYLISIASLRAPV

SEQ ID NO: 104968 - protein, 33 aa, Artificial Sequence; identical to SEQ ID NO: 1252
  Cyclic GFR-binding peptide
  MOD_RES (27)..(28): Xaa is C or S

SEQ ID NO: 104969 - protein, 36 aa, Artificial Sequence; identical to SEQ ID NO: 11828
  Cyclic GFR-binding peptide
  MOD_RES (2)..(34)..(35): Xaa is C or S

SEQ ID NO: 104970 - protein, 31 aa, Artificial Sequence; identical to SEQ ID NO: 1255
  Cyclic GFR-binding peptide
  MOD_RES (2)..(4): Xaa is C or S

SEQ ID NO: 104971 - protein, 30 aa, Artificial Sequence; identical to SEQ ID NO: 11831
  Cyclic GFR-binding peptide
  MOD_RES (28)..(29): Xaa is C or S

SEQ ID NO: 104972 - protein, 30 aa, Artificial Sequence
  Cyclic GFR-binding peptide
  MOD_RES (30)..(30): Xaa is C or S
VVMDQYNKLVVNNAADLYLISIASLRAPVX

SEQ ID NO: 104973 - protein, 35 aa, Artificial Sequence; identical to SEQ ID NO: 1258
  Cyclic GFR-binding peptide
  MOD_RES (2)..(4)..(35): Xaa is C or S

SEQ ID NO: 104974 - protein, 42 aa, Artificial Sequence
  Cyclic GFR-binding peptide
  MOD_RES (2)..(4)..(36)..(37): Xaa is C or S
SXGXRDVVMGQYNKLIIQQKDNLYLMSIASMKTPTXXPGASG

SEQ ID NO: 104975 - protein, 35 aa, Artificial Sequence; identical to SEQ ID NO: 1259
  Cyclic GFR-binding peptide
  MOD_RES (1)..(3)..(34)..(35): Xaa is C or S

SEQ ID NO: 104976 - protein, 28 aa, Artificial Sequence
  Cyclic GFR-binding peptide
  MOD_RES (27)..(28): Xaa is C or S
MRYKKLVKPTRGVFYLISIANLDQPVXX

SEQ ID NO: 104977 - protein, 37 aa, Artificial Sequence; identical to SEQ ID NO: 1261
  Cyclic GFR-binding peptide
  MOD_RES (2)..(33)..(34): Xaa is C or S

SEQ ID NO: 104978 - protein, 28 aa, Artificial Sequence
  Cyclic GFR-binding peptide
VIMQYNKLIKPTKGILYLISIASLDQSV

SEQ ID NO: 104979 - protein, 37 aa, Artificial Sequence; identical to SEQ ID NO: 1264
  Cyclic GFR-binding peptide
  MOD_RES (32)..(33): Xaa is C or S

SEQ ID NO: 104980 - protein, 33 aa, Artificial Sequence
  Cyclic GFR-binding peptide
  MOD_RES (32)..(33): Xaa is C or S
SEVTMNQYNKLVVNKNEDLYLISIASMKEPVXX

SEQ ID NO: 104981 - protein, 34 aa, Artificial Sequence; identical to SEQ ID NO: 29367
  Cyclic GFR-binding peptide
  MOD_RES (2)..(4): Xaa is C or S

SEQ ID NO: 104982 - protein, 32 aa, Artificial Sequence; identical to SEQ ID NO: 75438
  Cyclic GFR-binding peptide
  MOD_RES (27)..(28): Xaa is C or S

SEQ ID NO: 104983 - protein, 24 aa, Artificial Sequence
  Cyclic GFR-binding peptide
VVMNQYNKLIVNNSSDLYLVSIAS

SEQ ID NO: 104984 - protein, 34 aa, Artificial Sequence; identical to SEQ ID NO: 1270
  Cyclic GFR-binding peptide
  MOD_RES (31)..(31): Xaa is C or S

SEQ ID NO: 104985 - protein, 24 aa, Artificial Sequence
  Cyclic GFR-binding peptide
MQYNKLVKPKRGVLYLISIASLAQ

SEQ ID NO: 104986 - protein, 22 aa, Artificial Sequence
  Cyclic GFR-binding peptide
MRYKKLLLVRGNDFYLMSIANT

SEQ ID NO: 104987 - protein, 39 aa, Artificial Sequence; identical to SEQ ID NO: 1273
  Cyclic GFR-binding peptide
  MOD_RES (1)..(33)..(34): Xaa is C or S

SEQ ID NO: 104988 - protein, 32 aa, Artificial Sequence; identical to SEQ ID NO: 1277
  Cyclic GFR-binding peptide
  MOD_RES (2)..(2): Xaa is C or S

SEQ ID NO: 104989 - protein, 24 aa, Artificial Sequence
  Cyclic GFR-binding peptide
MNQYNKLIVNNSSDLYLVSIASLK

SEQ ID NO: 104990 - protein, 32 aa, Artificial Sequence; identical to SEQ ID NO: 1279
  Cyclic GFR-binding peptide
  MOD_RES (1)..(3): Xaa is C or S

SEQ ID NO: 104991 - protein, 30 aa, Artificial Sequence; identical to SEQ ID NO: 1280
  Cyclic GFR-binding peptide
  MOD_RES (30)..(30): Xaa is C or S

SEQ ID NO: 104992 - protein, 34 aa, Artificial Sequence; identical to SEQ ID NO: 1281
  Cyclic GFR-binding peptide
  MOD_RES (28)..(29): Xaa is C or S

SEQ ID NO: 104993 - protein, 34 aa, Artificial Sequence; identical to SEQ ID NO: 1282
  Cyclic GFR-binding peptide
  MOD_RES (29)..(30): Xaa is C or S

SEQ ID NO: 104994 - protein, 30 aa, Artificial Sequence; identical to SEQ ID NO: 1284
  Cyclic GFR-binding peptide
  MOD_RES (1)..(1): Xaa is C or S

SEQ ID NO: 104995 - protein, 28 aa, Artificial Sequence
  Cyclic GFR-binding peptide
  MOD_RES (1)..(1): Xaa is C or S
XSRVIMQYNKLVKPKRGVLYLISIASLA

SEQ ID NO: 104996 - protein, 29 aa, Artificial Sequence
  Cyclic GFR-binding peptide
  MOD_RES (1)..(1): Xaa is C or S
XSKVVMQYNKLVKPTRGVLYLISIASLDQ

SEQ ID NO: 104997 - protein, 29 aa, Artificial Sequence
  Cyclic GFR-binding peptide
  MOD_RES (27)..(27): Xaa is C or S
NQYNKLIVNSSDDLYLVSIASLKTPAXTP

SEQ ID NO: 104998 - protein, 35 aa, Artificial Sequence; identical to SEQ ID NO: 1292
  Cyclic GFR-binding peptide
  MOD_RES (1)..(3)..(35): Xaa is C or S

SEQ ID NO: 104999 - protein, 36 aa, Artificial Sequence; identical to SEQ ID NO: 1294
  Cyclic GFR-binding peptide
  MOD_RES (32)..(33): Xaa is C or S

SEQ ID NO: 105000 - protein, 29 aa, Artificial Sequence
  Cyclic GFR-binding peptide
  MOD_RES (2)..(2): Xaa is C or S
GXGEVVMDRYKKLVVKENEDFYLMSIANL

SEQ ID NO: 105001 - protein, 32 aa, Artificial Sequence; identical to SEQ ID NO: 1300
  Cyclic GFR-binding peptide
  MOD_RES (29)..(30): Xaa is C or S

SEQ ID NO: 105002 - protein, 40 aa, Artificial Sequence
  Cyclic GFR-binding peptide
  MOD_RES (1)..(3)..(35)..(36): Xaa is C or S
XGXAEVVMDQYNKLVVNNAADLYLISIASLRAPVXXSAPA

SEQ ID NO: 105003 - protein, 26 aa, Artificial Sequence
  Cyclic GFR-binding peptide
  MOD_RES (1)..(1): Xaa is C or S
XSRVIMQYNKLVKPKRGVLYLISIAS

SEQ ID NO: 105004 - protein, 33 aa, Artificial Sequence
  Cyclic GFR-binding peptide
  MOD_RES (1)..(3): Xaa is C or S
XGXEEVIMQYNKLLLVRGNDLYLMSIASTKVPA

SEQ ID NO: 105005 - protein, 35 aa, Artificial Sequence; identical to SEQ ID NO: 1304
  Cyclic GFR-binding peptide
  MOD_RES (32)..(32): Xaa is C or S

SEQ ID NO: 105006 - protein, 36 aa, Artificial Sequence; identical to SEQ ID NO: 1307
  Cyclic GFR-binding peptide
  MOD_RES (30)..(31): Xaa is C or S

SEQ ID NO: 105007 - protein, 40 aa, Artificial Sequence; identical to SEQ ID NO: 1310
  Cyclic GFR-binding peptide
  MOD_RES (2)..(34): Xaa is C or S

SEQ ID NO: 105008 - protein, 21 aa, Artificial Sequence
  Cyclic GFR-binding peptide
DRYKKLVVKENEDFYLMSIAN

SEQ ID NO: 105009 - protein, 37 aa, Artificial Sequence; identical to SEQ ID NO: 1313
  Cyclic GFR-binding peptide
  MOD_RES (2)..(4)..(36)..(37): Xaa is C or S

SEQ ID NO: 105010 - protein, 26 aa, Artificial Sequence
  Cyclic GFR-binding peptide
EVTMNQYNKLVVNKNEDLYLISIASM

SEQ ID NO: 105011 - protein, 27 aa, Artificial Sequence
  Cyclic GFR-binding peptide
EVVMDQYNKLVVNNAADLYLISIASLR

SEQ ID NO: 105012 - protein, 36 aa, Artificial Sequence; identical to SEQ ID NO: 1319
  Cyclic GFR-binding peptide
  MOD_RES (32)..(33): Xaa is C or S

SEQ ID NO: 105013 - protein, 31 aa, Artificial Sequence; identical to SEQ ID NO: 11894
  Cyclic GFR-binding peptide
  MOD_RES (2)..(2): Xaa is C or S

SEQ ID NO: 105014 - protein, 30 aa, Artificial Sequence; identical to SEQ ID NO: 1320
  Cyclic GFR-binding peptide
  MOD_RES (27)..(28): Xaa is C or S

SEQ ID NO: 105015 - protein, 29 aa, Artificial Sequence
  Cyclic GFR-binding peptide
  MOD_RES (27)..(28): Xaa is C or S
MQYNKLVKPTRGVLYLISIASLDQPVXXP

SEQ ID NO: 105016 - protein, 27 aa, Artificial Sequence
  Cyclic GFR-binding peptide
MNQYNKLIVNNSSDLYLVSIASLKTPA

SEQ ID NO: 105017 - protein, 24 aa, Artificial Sequence
  Cyclic GFR-binding peptide
MERYKKLVVKDYEDFYLMSIANLE

SEQ ID NO: 105018 - protein, 34 aa, Artificial Sequence; identical to SEQ ID NO: 1327
  Cyclic GFR-binding peptide
  MOD_RES (2)..(4): Xaa is C or S

SEQ ID NO: 105019 - protein, 33 aa, Artificial Sequence; identical to SEQ ID NO: 1328
  Cyclic GFR-binding peptide
  MOD_RES (32)..(33): Xaa is C or S

SEQ ID NO: 105020 - protein, 28 aa, Artificial Sequence
  Cyclic GFR-binding peptide
  MOD_RES (1)..(1): Xaa is C or S
XGEVVMEQYNKLVVKDYEDLYLMSIASL

SEQ ID NO: 105021 - protein, 26 aa, Artificial Sequence
  Cyclic GFR-binding peptide
VVMDRYKKLVVNNASDFYLISIANLR

SEQ ID NO: 105022 - protein, 28 aa, Artificial Sequence
  Cyclic GFR-binding peptide
  MOD_RES (26)..(27): Xaa is C or S
QYNKLVKPKRGVLYLISIASLAQPVXXP

SEQ ID NO: 105023 - protein, 28 aa, Artificial Sequence
  Cyclic GFR-binding peptide
  MOD_RES (1)..(1): Xaa is C or S
XGEVVMDRYKKLVVKENEDFYLMSIANL

SEQ ID NO: 105024 - protein, 30 aa, Artificial Sequence; identical to SEQ ID NO: 1334
  Cyclic GFR-binding peptide

SEQ ID NO: 105025 - protein, 35 aa, Artificial Sequence; identical to SEQ ID NO: 1336
  Cyclic GFR-binding peptide
  MOD_RES (2)..(34)..(35): Xaa is C or S

SEQ ID NO: 105026 - protein, 33 aa, Artificial Sequence; identical to SEQ ID NO: 11912
  Cyclic GFR-binding peptide
  MOD_RES (32)..(33): Xaa is C or S

SEQ ID NO: 105027 - protein, 22 aa, Artificial Sequence
  Cyclic GFR-binding peptide
MNRYKKLVVNKNEDFYLISIAN

SEQ ID NO: 105028 - protein, 21 aa, Artificial Sequence
  Cyclic GFR-binding peptide
DRYKKLVVNNAADFYLISIAN

SEQ ID NO: 105029 - protein, 30 aa, Artificial Sequence; identical to SEQ ID NO: 1342
  Cyclic GFR-binding peptide
  MOD_RES (26)..(26): Xaa is C or S

SEQ ID NO: 105030 - protein, 34 aa, Artificial Sequence; identical to SEQ ID NO: 1343
  Cyclic GFR-binding peptide
  MOD_RES (30)..(31): Xaa is C or S

SEQ ID NO: 105031 - protein, 25 aa, Artificial Sequence
  Cyclic GFR-binding peptide
RYKKLVVKENEDFYLMSIANLETPV

SEQ ID NO: 105032 - protein, 39 aa, Artificial Sequence; identical to SEQ ID NO: 1346
  Cyclic GFR-binding peptide
  MOD_RES (1)..(3)..(35)..(36): Xaa is C or S

SEQ ID NO: 105033 - protein, 30 aa, Artificial Sequence; identical to SEQ ID NO: 1349
  Cyclic GFR-binding peptide
  MOD_RES (29)..(30): Xaa is C or S

SEQ ID NO: 105034 - protein, 27 aa, Artificial Sequence
  Cyclic GFR-binding peptide
VVMNQYNKLIVNSSDDLYLVSIASLKT

SEQ ID NO: 105035 - protein, 34 aa, Artificial Sequence; identical to SEQ ID NO: 1351
  Cyclic GFR-binding peptide
  MOD_RES (1)..(34): Xaa is C or S

SEQ ID NO: 105036 - protein, 31 aa, Artificial Sequence; identical to SEQ ID NO: 11922
  Cyclic GFR-binding peptide
  MOD_RES (29)..(30): Xaa is C or S

SEQ ID NO: 105037 - protein, 27 aa, Artificial Sequence
  Cyclic GFR-binding peptide
  MOD_RES (1)..(1): Xaa is C or S
XESVAMGRYKKLYTVVGKDFYLISIAN

SEQ ID NO: 105038 - protein, 29 aa, Artificial Sequence
  Cyclic GFR-binding peptide
  MOD_RES (27)..(28): Xaa is C or S
DRYKKLVVNNAADFYLISIANLRAPVXXS

SEQ ID NO: 105039 - protein, 32 aa, Artificial Sequence; identical to SEQ ID NO: 1356
  Cyclic GFR-binding peptide
  MOD_RES (27)..(28): Xaa is C or S

SEQ ID NO: 105040 - protein, 36 aa, Artificial Sequence
  Cyclic GFR-binding peptide
  MOD_RES (32)..(33): Xaa is C or S
RDVVMGQYNKLIIQQKDNLYLMSIASMKTPTXXPGA

SEQ ID NO: 105041 - protein, 32 aa, Artificial Sequence; identical to SEQ ID NO: 11928
  Cyclic GFR-binding peptide
  MOD_RES (32)..(32): Xaa is C or S

SEQ ID NO: 105042 - protein, 34 aa, Artificial Sequence
  Cyclic GFR-binding peptide
  MOD_RES (30)..(31): Xaa is C or S
VVMGQYNKLIIQQKDNLYLMSIASMKTPTXXPGA

SEQ ID NO: 105043 - protein, 25 aa, Artificial Sequence
  Cyclic GFR-binding peptide
EVVMDRYKKLVVKENEDFYLMSIAN

SEQ ID NO: 105044 - protein, 28 aa, Artificial Sequence
  Cyclic GFR-binding peptide
VIMRYKKLIKPTKGIFYLISIANLDQSV

SEQ ID NO: 105045 - protein, 29 aa, Artificial Sequence
  Cyclic GFR-binding peptide
EVVMDQYNKLVVNNASDLYLISIASLRTP

SEQ ID NO: 105046 - protein, 33 aa, Artificial Sequence; identical to SEQ ID NO: 1365
  Cyclic GFR-binding peptide
  MOD_RES (32)..(33): Xaa is C or S

SEQ ID NO: 105047 - protein, 28 aa, Artificial Sequence
  Cyclic GFR-binding peptide
  MOD_RES (28)..(28): Xaa is C or S
MDRYKKLVVNNAADFYLISIANLRAPVX

SEQ ID NO: 105048 - protein, 35 aa, Artificial Sequence; identical to SEQ ID NO: 1366
  Cyclic GFR-binding peptide
  MOD_RES (30)..(30): Xaa is C or S

SEQ ID NO: 105049 - protein, 29 aa, Artificial Sequence
  Cyclic GFR-binding peptide
  MOD_RES (2)..(2): Xaa is C or S
KXSKVIMQYNKLIKPTKGILYLISIASLD

SEQ ID NO: 105050 - protein, 34 aa, Artificial Sequence; identical to SEQ ID NO: 1371
  Cyclic GFR-binding peptide
  MOD_RES (30)..(31): Xaa is C or S

SEQ ID NO: 105051 - protein, 39 aa, Artificial Sequence; identical to SEQ ID NO: 75492
  Cyclic GFR-binding peptide
  MOD_RES (1)..(33)..(34): Xaa is C or S

SEQ ID NO: 105052 - protein, 33 aa, Artificial Sequence; identical to SEQ ID NO: 11945
  Cyclic GFR-binding peptide
  MOD_RES (30)..(31): Xaa is C or S

SEQ ID NO: 105053 - protein, 35 aa, Artificial Sequence; identical to SEQ ID NO: 29460
  Cyclic GFR-binding peptide
  MOD_RES (1)..(3)..(35): Xaa is C or S

SEQ ID NO: 105054 - protein, 26 aa, Artificial Sequence
  Cyclic GFR-binding peptide
AMGQYNKLYTVVGKDLYLISIASLKT

SEQ ID NO: 105055 - protein, 31 aa, Artificial Sequence
  Cyclic GFR-binding peptide
RDVVMGQYNKLIIQQKDNLYLMSIASMKTPT

SEQ ID NO: 105056 - protein, 36 aa, Artificial Sequence; identical to SEQ ID NO: 1375
  Cyclic GFR-binding peptide
  MOD_RES (2)..(34)..(35): Xaa is C or S

SEQ ID NO: 105057 - protein, 26 aa, Artificial Sequence
  Cyclic GFR-binding peptide
VMNQYNKLIVNSSDDLYLVSIASLQT

SEQ ID NO: 105058 - protein, 36 aa, Artificial Sequence; identical to SEQ ID NO: 1378
  Cyclic GFR-binding peptide
  MOD_RES (2)..(34)..(35): Xaa is C or S

SEQ ID NO: 105059 - protein, 32 aa, Artificial Sequence; identical to SEQ ID NO: 1379
  Cyclic GFR-binding peptide
  MOD_RES (31)..(32): Xaa is C or S

SEQ ID NO: 105060 - protein, 32 aa, Artificial Sequence; identical to SEQ ID NO: 1380
  Cyclic GFR-binding peptide
  MOD_RES (27)..(28): Xaa is C or S

SEQ ID NO: 105061 - protein, 30 aa, Artificial Sequence; identical to SEQ ID NO: 1382
  Cyclic GFR-binding peptide

SEQ ID NO: 105062 - protein, 20 aa, Artificial Sequence
  Cyclic GFR-binding peptide
RYKKLVVNKNEDFYLISIAN

SEQ ID NO: 105063 - protein, 40 aa, Artificial Sequence; identical to SEQ ID NO: 1383
  Cyclic GFR-binding peptide
  MOD_RES (2)..(4)..(36)..(37): Xaa is C or S

SEQ ID NO: 105064 - protein, 23 aa, Artificial Sequence
  Cyclic GFR-binding peptide
MQYNKLLLVRGNDLYLMSIASTK

SEQ ID NO: 105065 - protein, 33 aa, Artificial Sequence; identical to SEQ ID NO: 1384
  Cyclic GFR-binding peptide
  MOD_RES (32)..(33): Xaa is C or S

SEQ ID NO: 105066 - protein, 30 aa, Artificial Sequence
  Cyclic GFR-binding peptide
  MOD_RES (28)..(29): Xaa is C or S
MGQYNKLIIQQKDNLYLMSIASMKTPTXXP

SEQ ID NO: 105067 - protein, 33 aa, Artificial Sequence; identical to SEQ ID NO: 1385
  Cyclic GFR-binding peptide
  MOD_RES (30)..(31): Xaa is C or S

SEQ ID NO: 105068 - protein, 33 aa, Artificial Sequence; identical to SEQ ID NO: 1386
  Cyclic GFR-binding peptide
  MOD_RES (1)..(33): Xaa is C or S

SEQ ID NO: 105069 - protein, 36 aa, Artificial Sequence
  Cyclic GFR-binding peptide
  MOD_RES (32)..(33): Xaa is C or S
ESVAMGQYNKLYTVVGKDLYLISIASLKTPVXXAKS

SEQ ID NO: 105070 - protein, 31 aa, Artificial Sequence; identical to SEQ ID NO: 1390
  Cyclic GFR-binding peptide
  MOD_RES (31)..(31): Xaa is C or S

SEQ ID NO: 105071 - protein, 35 aa, Artificial Sequence; identical to SEQ ID NO: 1393
  Cyclic GFR-binding peptide
  MOD_RES (1)..(33)..(34): Xaa is C or S

SEQ ID NO: 105072 - protein, 31 aa, Artificial Sequence; identical to SEQ ID NO: 1394
  Cyclic GFR-binding peptide
  MOD_RES (1)..(1): Xaa is C or S

SEQ ID NO: 105073 - protein, 28 aa, Artificial Sequence
  Cyclic GFR-binding peptide
  MOD_RES (26)..(27): Xaa is C or S
RYKKLVKPKRGVFYLISIANLAQPVXXP

SEQ ID NO: 105074 - protein, 21 aa, Artificial Sequence
  Cyclic GFR-binding peptide
NRYKKLIVNSSDDFYLVSIAN

SEQ ID NO: 105075 - protein, 26 aa, Artificial Sequence
  Cyclic GFR-binding peptide
VVMGRYKKLIIQQKDNFYLMSIANMK

SEQ ID NO: 105076 - protein, 25 aa, Artificial Sequence
  Cyclic GFR-binding peptide
VVMDQYNKLVVNNASDLYLISIASL

SEQ ID NO: 105077 - protein, 36 aa, Artificial Sequence; identical to SEQ ID NO: 1405
  Cyclic GFR-binding peptide
  MOD_RES (2)..(4): Xaa is C or S

SEQ ID NO: 105078 - protein, 30 aa, Artificial Sequence; identical to SEQ ID NO: 75512
  Cyclic GFR-binding peptide
  MOD_RES (26)..(27): Xaa is C or S

SEQ ID NO: 105079 - protein, 37 aa, Artificial Sequence; identical to SEQ ID NO: 1408
  Cyclic GFR-binding peptide
  MOD_RES (1)..(33)..(34): Xaa is C or S

SEQ ID NO: 105080 - protein, 37 aa, Artificial Sequence; identical to SEQ ID NO: 1409
  Cyclic GFR-binding peptide
  MOD_RES (2)..(35)..(36): Xaa is C or S

SEQ ID NO: 105081 - protein, 32 aa, Artificial Sequence
  Cyclic GFR-binding peptide
  MOD_RES (32)..(32): Xaa is C or S
AEVVMDQYNKLVVNNAADLYLISIASLRAPVX

SEQ ID NO: 105082 - protein, 33 aa, Artificial Sequence; identical to SEQ ID NO: 1412
  Cyclic GFR-binding peptide
  MOD_RES (2)..(4): Xaa is C or S

SEQ ID NO: 105083 - protein, 27 aa, Artificial Sequence
  Cyclic GFR-binding peptide
SRVIMRYKKLVKPKRGVFYLISIANLA

SEQ ID NO: 105084 - protein, 24 aa, Artificial Sequence
  Cyclic GFR-binding peptide
RYKKLVKPTRGVFYLISIANLDQP

SEQ ID NO: 105085 - protein, 33 aa, Artificial Sequence; identical to SEQ ID NO: 1417
  Cyclic GFR-binding peptide
  MOD_RES (31)..(32): Xaa is C or S

SEQ ID NO: 105086 - protein, 28 aa, Artificial Sequence
  Cyclic GFR-binding peptide
  MOD_RES (27)..(28): Xaa is C or S
EQYNKLTPVGMDDLYLVSIASLKTPVXX

SEQ ID NO: 105087 - protein, 35 aa, Artificial Sequence; identical to SEQ ID NO: 75524
  Cyclic GFR-binding peptide
  MOD_RES (31)..(32): Xaa is C or S

SEQ ID NO: 105088 - protein, 33 aa, Artificial Sequence; identical to SEQ ID NO: 75525
  Cyclic GFR-binding peptide
  MOD_RES (2)..(33): Xaa is C or S

SEQ ID NO: 105089 - protein, 33 aa, Artificial Sequence; identical to SEQ ID NO: 1430
  Cyclic GFR-binding peptide
  MOD_RES (1)..(33): Xaa is C or S

SEQ ID NO: 105090 - protein, 30 aa, Artificial Sequence; identical to SEQ ID NO: 1435
  Cyclic GFR-binding peptide
  MOD_RES (2)..(4): Xaa is C or S

SEQ ID NO: 105091 - protein, 31 aa, Artificial Sequence
  Cyclic GFR-binding peptide
  MOD_RES (28)..(29): Xaa is C or S
MGQYNKLIIQQKDNLYLMSIASMKTPTXXPG

SEQ ID NO: 105092 - protein, 25 aa, Artificial Sequence
  Cyclic GFR-binding peptide
MQYNKLVKPKRGVLYLISIASLAQP

SEQ ID NO: 105093 - protein, 32 aa, Artificial Sequence; identical to SEQ ID NO: 29526
  Cyclic GFR-binding peptide
  MOD_RES (2)..(4): Xaa is C or S

SEQ ID NO: 105094 - protein, 34 aa, Artificial Sequence
  Cyclic GFR-binding peptide
  MOD_RES (28)..(29): Xaa is C or S
IMQYNKLLLVRGNDLYLMSIASTKVPAXXTSPVR

SEQ ID NO: 105095 - protein, 35 aa, Artificial Sequence
  Cyclic GFR-binding peptide
  MOD_RES (31)..(32): Xaa is C or S
EVTMNQYNKLVVNKNEDLYLISIASMKEPVXXPEP

SEQ ID NO: 105096 - protein, 22 aa, Artificial Sequence
  Cyclic GFR-binding peptide
MGRYKKLIIQQKDNFYLMSIAN

SEQ ID NO: 105097 - protein, 35 aa, Artificial Sequence; identical to SEQ ID NO: 1444
  Cyclic GFR-binding peptide
  MOD_RES (2)..(4): Xaa is C or S

SEQ ID NO: 105098 - protein, 23 aa, Artificial Sequence
  Cyclic GFR-binding peptide
IMQYNKLIKPTKGILYLISIASL

SEQ ID NO: 105099 - protein, 32 aa, Artificial Sequence; identical to SEQ ID NO: 1453
  Cyclic GFR-binding peptide
  MOD_RES (2)..(4): Xaa is C or S

SEQ ID NO: 105100 - protein, 28 aa, Artificial Sequence
  Cyclic GFR-binding peptide
  MOD_RES (1)..(1): Xaa is C or S
XGEVVMDQYNKLVVKENEDLYLMSIASL

SEQ ID NO: 105101 - protein, 37 aa, Artificial Sequence; identical to SEQ ID NO: 1456
  Cyclic GFR-binding peptide
  MOD_RES (1)..(3)..(34)..(35): Xaa is C or S

SEQ ID NO: 105102 - protein, 36 aa, Artificial Sequence; identical to SEQ ID NO: 1457
  Cyclic GFR-binding peptide
  MOD_RES (32)..(33): Xaa is C or S

SEQ ID NO: 105103 - protein, 31 aa, Artificial Sequence; identical to SEQ ID NO: 12021
  Cyclic GFR-binding peptide
  MOD_RES (30)..(31): Xaa is C or S

SEQ ID NO: 105104 - protein, 32 aa, Artificial Sequence; identical to SEQ ID NO: 1458
  Cyclic GFR-binding peptide
  MOD_RES (31)..(32): Xaa is C or S

SEQ ID NO: 105105 - protein, 30 aa, Artificial Sequence; identical to SEQ ID NO: 1460
  Cyclic GFR-binding peptide
  MOD_RES (2)..(4): Xaa is C or S

SEQ ID NO: 105106 - protein, 32 aa, Artificial Sequence
  Cyclic GFR-binding peptide
  MOD_RES (2)..(4): Xaa is C or S
RXAXSEVTMNQYNKLVVNKNEDLYLISIASMK

SEQ ID NO: 105107 - protein, 26 aa, Artificial Sequence
  Cyclic GFR-binding peptide
VMQYNKLVKPTRGVLYLISIASLDQP

SEQ ID NO: 105108 - protein, 35 aa, Artificial Sequence
  Cyclic GFR-binding peptide
  MOD_RES (29)..(30): Xaa is C or S
AMGQYNKLYTVVGKDLYLISIASLKTPVXXAKSAK

SEQ ID NO: 105109 - protein, 30 aa, Artificial Sequence
  Cyclic GFR-binding peptide
  MOD_RES (1)..(1): Xaa is C or S
XESVAMGQYNKLYTVVGKDLYLISIASLKT

SEQ ID NO: 105110 - protein, 29 aa, Artificial Sequence
  Cyclic GFR-binding peptide
VVMDQYNKLVVNNAADLYLISIASLRAPV

SEQ ID NO: 105111 - protein, 26 aa, Artificial Sequence
  Cyclic GFR-binding peptide
VTMNQYNKLVVNKNEDLYLISIASMK

SEQ ID NO: 105112 - protein, 37 aa, Artificial Sequence; identical to SEQ ID NO: 1468
  Cyclic GFR-binding peptide
  MOD_RES (33)..(34): Xaa is C or S

SEQ ID NO: 105113 - protein, 23 aa, Artificial Sequence
  Cyclic GFR-binding peptide
NRYKKLVVNKNEDFYLISIANMK

SEQ ID NO: 105114 - protein, 32 aa, Artificial Sequence; identical to SEQ ID NO: 1474
  Cyclic GFR-binding peptide
  MOD_RES (26)..(27): Xaa is C or S

SEQ ID NO: 105115 - protein, 35 aa, Artificial Sequence; identical to SEQ ID NO: 1475
  Cyclic GFR-binding peptide
  MOD_RES (29)..(30): Xaa is C or S

SEQ ID NO: 105116 - protein, 28 aa, Artificial Sequence
  Cyclic GFR-binding peptide
VVMDRYKKLVVNNASDFYLISIANLRTP

SEQ ID NO: 105117 - protein, 22 aa, Artificial Sequence
  Cyclic GFR-binding peptide
GRYKKLYTVVGKDFYLISIANL

SEQ ID NO: 105118 - protein, 25 aa, Artificial Sequence
  Cyclic GFR-binding peptide
VVMEQYNKLVVKDYEDLYLMSIASL

SEQ ID NO: 105119 - protein, 23 aa, Artificial Sequence
  Cyclic GFR-binding peptide
MGRYKKLIIQQKDNFYLMSIANM

SEQ ID NO: 105120 - protein, 25 aa, Artificial Sequence
  Cyclic GFR-binding peptide
IMRYKKLLLVRGNDFYLMSIANTKV

SEQ ID NO: 105121 - protein, 29 aa, Artificial Sequence
  Cyclic GFR-binding peptide
  MOD_RES (1)..(3): Xaa is C or S
XGXAKVVMNQYNKLIVNNSSDLYLVSIAS

SEQ ID NO: 105122 - protein, 35 aa, Artificial Sequence; identical to SEQ ID NO: 1483
  Cyclic GFR-binding peptide
  MOD_RES (32)..(33): Xaa is C or S

SEQ ID NO: 105123 - protein, 40 aa, Artificial Sequence
  Cyclic GFR-binding peptide
  MOD_RES (1)..(3)..(35)..(36): Xaa is C or S
XGXRDVVMGQYNKLIIQQKDNLYLMSIASMKTPTXXPGAS

SEQ ID NO: 105124 - protein, 25 aa, Artificial Sequence
  Cyclic GFR-binding peptide
EEVIMQYNKLLLVRGNDLYLMSIAS

SEQ ID NO: 105125 - protein, 38 aa, Artificial Sequence; identical to SEQ ID NO: 12049
  Cyclic GFR-binding peptide
  MOD_RES (32)..(33): Xaa is C or S

SEQ ID NO: 105126 - protein, 32 aa, Artificial Sequence; identical to SEQ ID NO: 1484
  Cyclic GFR-binding peptide
  MOD_RES (2)..(4): Xaa is C or S

SEQ ID NO: 105127 - protein, 40 aa, Artificial Sequence
  Cyclic GFR-binding peptide
  MOD_RES (1)..(3)..(35)..(36): Xaa is C or S
XAXSEVTMNQYNKLVVNKNEDLYLISIASMKEPVXXPEPI

SEQ ID NO: 105128 - protein, 29 aa, Artificial Sequence
  Cyclic GFR-binding peptide
GEVVMDQYNKLVVKENEDLYLMSIASLET

SEQ ID NO: 105129 - protein, 25 aa, Artificial Sequence
  Cyclic GFR-binding peptide
DVVMGQYNKLIIQQKDNLYLMSIAS

SEQ ID NO: 105130 - protein, 27 aa, Artificial Sequence
  Cyclic GFR-binding peptide
VMQYNKLVKPTRGVLYLISIASLDQPV

SEQ ID NO: 105131 - protein, 40 aa, Artificial Sequence
  Cyclic GFR-binding peptide
  MOD_RES (2)..(4)..(36)..(37): Xaa is C or S
SXGXRDVVMGQYNKLIIQQKDNLYLMSIASMKTPTXXPGA

SEQ ID NO: 105132 - protein, 29 aa, Artificial Sequence
  Cyclic GFR-binding peptide
VTMNQYNKLVVNKNEDLYLISIASMKEPV

SEQ ID NO: 105133 - protein, 26 aa, Artificial Sequence
  Cyclic GFR-binding peptide
  MOD_RES (26)..(26): Xaa is C or S
RYKKLVVNKNEDFYLISIANMKEPVX

SEQ ID NO: 105134 - protein, 24 aa, Artificial Sequence
  Cyclic GFR-binding peptide
NQYNKLIVNSSDDLYLVSIASLQT

SEQ ID NO: 105135 - protein, 30 aa, Artificial Sequence
  Cyclic GFR-binding peptide
  MOD_RES (29)..(30): Xaa is C or S
VMGQYNKLIIQQKDNLYLMSIASMKTPTXX

SEQ ID NO: 105136 - protein, 32 aa, Artificial Sequence; identical to SEQ ID NO: 12060
  Cyclic GFR-binding peptide
  MOD_RES (28)..(29): Xaa is C or S

SEQ ID NO: 105137 - protein, 33 aa, Artificial Sequence; identical to SEQ ID NO: 1496
  Cyclic GFR-binding peptide
  MOD_RES (32)..(33): Xaa is C or S

SEQ ID NO: 105138 - protein, 26 aa, Artificial Sequence
  Cyclic GFR-binding peptide
  MOD_RES (1)..(1): Xaa is C or S
XSRVIMRYKKLVKPKRGVFYLISIAN

SEQ ID NO: 105139 - protein, 29 aa, Artificial Sequence
  Cyclic GFR-binding peptide
DVVMGRYKKLIIQQKDNFYLMSIANMKTP

SEQ ID NO: 105140 - protein, 25 aa, Artificial Sequence
  Cyclic GFR-binding peptide
KVVMNRYKKLIVNNSSDFYLVSIAN

SEQ ID NO: 105141 - protein, 38 aa, Artificial Sequence
  Cyclic GFR-binding peptide
  MOD_RES (1)..(3)..(35)..(36): Xaa is C or S
XGXRDVVMGQYNKLIIQQKDNLYLMSIASMKTPTXXPG

SEQ ID NO: 105142 - protein, 29 aa, Artificial Sequence
  Cyclic GFR-binding peptide
VSMGEQYNKLTPVGMDDLYLVSIASLKTP

SEQ ID NO: 105143 - protein, 24 aa, Artificial Sequence
  Cyclic GFR-binding peptide
VVMDQYNKLVVNNAADLYLISIAS

SEQ ID NO: 105144 - protein, 36 aa, Artificial Sequence; identical to SEQ ID NO: 12073
  Cyclic GFR-binding peptide
  MOD_RES (2)..(34)..(35): Xaa is C or S

SEQ ID NO: 105145 - protein, 28 aa, Artificial Sequence
  Cyclic GFR-binding peptide
KVVMRYKKLVKPTRGVFYLISIANLDQP

SEQ ID NO: 105146 - protein, 30 aa, Artificial Sequence; identical to SEQ ID NO: 1519
  Cyclic GFR-binding peptide
  MOD_RES (26)..(27): Xaa is C or S

SEQ ID NO: 105147 - protein, 36 aa, Artificial Sequence; identical to SEQ ID NO: 83922
  Cyclic GFR-binding peptide
  MOD_RES (1)..(33)..(34): Xaa is C or S

SEQ ID NO: 105148 - protein, 21 aa, Artificial Sequence
  Cyclic GFR-binding peptide
QYNKLYTVVGKDLYLISIASL

SEQ ID NO: 105149 - protein, 30 aa, Artificial Sequence; identical to SEQ ID NO: 1521
  Cyclic GFR-binding peptide

SEQ ID NO: 105150 - protein, 22 aa, Artificial Sequence
  Cyclic GFR-binding peptide
MDRYKKLVVNNASDFYLISIAN

SEQ ID NO: 105151 - protein, 27 aa, Artificial Sequence
  Cyclic GFR-binding peptide
  MOD_RES (1)..(1): Xaa is C or S
XESVAMGQYNKLYTVVGKDLYLISIAS

SEQ ID NO: 105152 - protein, 33 aa, Artificial Sequence; identical to SEQ ID NO: 1526
  Cyclic GFR-binding peptide
  MOD_RES (1)..(3): Xaa is C or S

SEQ ID NO: 105153 - protein, 26 aa, Artificial Sequence
  Cyclic GFR-binding peptide
  MOD_RES (26)..(26): Xaa is C or S
RYKKLIIQQKDNFYLMSIANMKTPTX

SEQ ID NO: 105154 - protein, 32 aa, Artificial Sequence; identical to SEQ ID NO: 1527
  Cyclic GFR-binding peptide
  MOD_RES (27)..(28): Xaa is C or S

SEQ ID NO: 105155 - protein, 31 aa, Artificial Sequence; identical to SEQ ID NO: 1528
  Cyclic GFR-binding peptide
  MOD_RES (2)..(2): Xaa is C or S

SEQ ID NO: 105156 - protein, 28 aa, Artificial Sequence
  Cyclic GFR-binding peptide
  MOD_RES (1)..(1): Xaa is C or S
XGEVVMERYKKLVVKDYEDFYLMSIANL

SEQ ID NO: 105157 - protein, 32 aa, Artificial Sequence; identical to SEQ ID NO: 1535
  Cyclic GFR-binding peptide
  MOD_RES (28)..(29): Xaa is C or S

SEQ ID NO: 105158 - protein, 34 aa, Artificial Sequence; identical to SEQ ID NO: 1536
  Cyclic GFR-binding peptide
  MOD_RES (28)..(29): Xaa is C or S

SEQ ID NO: 105159 - protein, 32 aa, Artificial Sequence; identical to SEQ ID NO: 1538
  Cyclic GFR-binding peptide
  MOD_RES (2)..(4): Xaa is C or S

SEQ ID NO: 105160 - protein, 26 aa, Artificial Sequence
  Cyclic GFR-binding peptide
MDQYNKLVVNNAADLYLISIASLRAP

SEQ ID NO: 105161 - protein, 38 aa, Artificial Sequence; identical to SEQ ID NO: 1542
  Cyclic GFR-binding peptide
  MOD_RES (2)..(4)..(36)..(37): Xaa is C or S

SEQ ID NO: 105162 - protein, 26 aa, Artificial Sequence
  Cyclic GFR-binding peptide
EVVMDRYKKLVVNNASDFYLISIANL

SEQ ID NO: 105163 - protein, 35 aa, Artificial Sequence; identical to SEQ ID NO: 75588
  Cyclic GFR-binding peptide
  MOD_RES (30)..(31): Xaa is C or S

SEQ ID NO: 105164 - protein, 21 aa, Artificial Sequence
  Cyclic GFR-binding peptide
QYNKLIVNSSDDLYLVSIASL

SEQ ID NO: 105165 - protein, 38 aa, Artificial Sequence; identical to SEQ ID NO: 1551
  Cyclic GFR-binding peptide
  MOD_RES (1)..(3)..(35)..(36): Xaa is C or S

SEQ ID NO: 105166 - protein, 28 aa, Artificial Sequence
  Cyclic GFR-binding peptide
RVVMNQYNKLIVNSSDDLYLVSIASLKT

SEQ ID NO: 105167 - protein, 37 aa, Artificial Sequence; identical to SEQ ID NO: 1553
  Cyclic GFR-binding peptide
  MOD_RES (1)..(33)..(34): Xaa is C or S

SEQ ID NO: 105168 - protein, 33 aa, Artificial Sequence
  Cyclic GFR-binding peptide
  MOD_RES (2)..(4): Xaa is C or S
RXGXESVAMGQYNKLYTVVGKDLYLISIASLKT

SEQ ID NO: 105169 - protein, 35 aa, Artificial Sequence; identical to SEQ ID NO: 1557
  Cyclic GFR-binding peptide
  MOD_RES (2)..(4)..(35): Xaa is C or S

SEQ ID NO: 105170 - protein, 29 aa, Artificial Sequence
  Cyclic GFR-binding peptide
  MOD_RES (2)..(2): Xaa is C or S
GXRDVVMGRYKKLIIQQKDNFYLMSIANM

SEQ ID NO: 105171 - protein, 32 aa, Artificial Sequence
  Cyclic GFR-binding peptide
  MOD_RES (2)..(4): Xaa is C or S
SXGXRDVVMGQYNKLIIQQKDNLYLMSIASMK

SEQ ID NO: 105172 - protein, 29 aa, Artificial Sequence
  Cyclic GFR-binding peptide
  MOD_RES (2)..(2): Xaa is C or S
GXSRVVMNRYKKLIVNSSDDFYLVSIANL

SEQ ID NO: 105173 - protein, 38 aa, Artificial Sequence
  Cyclic GFR-binding peptide
  MOD_RES (1)..(3)..(35)..(36): Xaa is C or S
XGXESVAMGQYNKLYTVVGKDLYLISIASLKTPVXXAK

SEQ ID NO: 105174 - protein, 25 aa, Artificial Sequence
  Cyclic GFR-binding peptide
ERYKKLTPVGMDDFYLVSIANLKTP

SEQ ID NO: 105175 - protein, 39 aa, Artificial Sequence; identical to SEQ ID NO: 29652
  Cyclic GFR-binding peptide
  MOD_RES (1)..(33)..(34): Xaa is C or S

SEQ ID NO: 105176 - protein, 34 aa, Artificial Sequence; identical to SEQ ID NO: 1564
  Cyclic GFR-binding peptide
  MOD_RES (32)..(33): Xaa is C or S

SEQ ID NO: 105177 - protein, 33 aa, Artificial Sequence; identical to SEQ ID NO: 1565
  Cyclic GFR-binding peptide
  MOD_RES (32)..(33): Xaa is C or S

SEQ ID NO: 105178 - protein, 36 aa, Artificial Sequence
  Cyclic GFR-binding peptide
  MOD_RES (1)..(3)..(35)..(36): Xaa is C or S
XAXSEVTMNQYNKLVVNKNEDLYLISIASMKEPVXX

SEQ ID NO: 105179 - protein, 33 aa, Artificial Sequence; identical to SEQ ID NO: 1568
  Cyclic GFR-binding peptide
  MOD_RES (1)..(33): Xaa is C or S

SEQ ID NO: 105180 - protein, 33 aa, Artificial Sequence; identical to SEQ ID NO: 29658
  Cyclic GFR-binding peptide
  MOD_RES (28)..(29): Xaa is C or S

SEQ ID NO: 105181 - protein, 24 aa, Artificial Sequence
  Cyclic GFR-binding peptide
MGEQYNKLTPVGMDDLYLVSIASL

SEQ ID NO: 105182 - protein, 31 aa, Artificial Sequence
  Cyclic GFR-binding peptide
  MOD_RES (29)..(30): Xaa is C or S
AMGQYNKLYTVVGKDLYLISIASLKTPVXXA

SEQ ID NO: 105183 - protein, 29 aa, Artificial Sequence
  Cyclic GFR-binding peptide
  MOD_RES (28)..(29): Xaa is C or S
VMRYKKLVKPTRGVFYLISIANLDQPVXX

SEQ ID NO: 105184 - protein, 25 aa, Artificial Sequence
  Cyclic GFR-binding peptide
VAMGRYKKLYTVVGKDFYLISIANL

SEQ ID NO: 105185 - protein, 28 aa, Artificial Sequence
  Cyclic GFR-binding peptide
  MOD_RES (26)..(27): Xaa is C or S
QYNKLVVNNASDLYLISIASLRTPVXXT

SEQ ID NO: 105186 - protein, 35 aa, Artificial Sequence; identical to SEQ ID NO: 78817
  Cyclic GFR-binding peptide
  MOD_RES (29)..(30): Xaa is C or S

SEQ ID NO: 105187 - protein, 29 aa, Artificial Sequence
  Cyclic GFR-binding peptide
  MOD_RES (2)..(2): Xaa is C or S
KXSKVIMRYKKLIKPTKGIFYLISIANLD

SEQ ID NO: 105188 - protein, 36 aa, Artificial Sequence; identical to SEQ ID NO: 12140
  Cyclic GFR-binding peptide
  MOD_RES (1)..(33)..(34): Xaa is C or S

SEQ ID NO: 105189 - protein, 38 aa, Artificial Sequence; identical to SEQ ID NO: 1576
  Cyclic GFR-binding peptide
  MOD_RES (32)..(33): Xaa is C or S

SEQ ID NO: 105190 - protein, 35 aa, Artificial Sequence
  Cyclic GFR-binding peptide
  MOD_RES (29)..(30): Xaa is C or S
TMNQYNKLVVNKNEDLYLISIASMKEPVXXPEPIG

SEQ ID NO: 105191 - protein, 30 aa, Artificial Sequence; identical to SEQ ID NO: 83989
  Cyclic GFR-binding peptide
  MOD_RES (27)..(28): Xaa is C or S

SEQ ID NO: 105192 - protein, 36 aa, Artificial Sequence; identical to SEQ ID NO: 1578
  Cyclic GFR-binding peptide
  MOD_RES (1)..(3)..(35)..(36): Xaa is C or S

SEQ ID NO: 105193 - protein, 32 aa, Artificial Sequence; identical to SEQ ID NO: 1579
  Cyclic GFR-binding peptide
  MOD_RES (1)..(3): Xaa is C or S

SEQ ID NO: 105194 - protein, 36 aa, Artificial Sequence; identical to SEQ ID NO: 1581
  Cyclic GFR-binding peptide
  MOD_RES (1)..(3)..(35): Xaa is C or S

SEQ ID NO: 105195 - protein, 39 aa, Artificial Sequence
  Cyclic GFR-binding peptide
  MOD_RES (1)..(33)..(34): Xaa is C or S
XRDVVMGQYNKLIIQQKDNLYLMSIASMKTPTXXPGASG

SEQ ID NO: 105196 - protein, 28 aa, Artificial Sequence
  Cyclic GFR-binding peptide
VVMGRYKKLIIQQKDNFYLMSIANMKTP

SEQ ID NO: 105197 - protein, 24 aa, Artificial Sequence
  Cyclic GFR-binding peptide
GQYNKLIIQQKDNLYLMSIASMKT

SEQ ID NO: 105198 - protein, 37 aa, Artificial Sequence
  Cyclic GFR-binding peptide
  MOD_RES (32)..(33): Xaa is C or S
RDVVMGQYNKLIIQQKDNLYLMSIASMKTPTXXPGAS

SEQ ID NO: 105199 - protein, 31 aa, Artificial Sequence; identical to SEQ ID NO: 1584
  Cyclic GFR-binding peptide
  MOD_RES (28)..(29): Xaa is C or S

SEQ ID NO: 105200 - protein, 29 aa, Artificial Sequence
  Cyclic GFR-binding peptide
  MOD_RES (1)..(3): Xaa is C or S
XGXRDVVMGQYNKLIIQQKDNLYLMSIAS

SEQ ID NO: 105201 - protein, 31 aa, Artificial Sequence
  Cyclic GFR-binding peptide
  MOD_RES (2)..(2): Xaa is C or S
AXSEVTMNQYNKLVVNKNEDLYLISIASMKE

SEQ ID NO: 105202 - protein, 33 aa, Artificial Sequence
  Cyclic GFR-binding peptide
  MOD_RES (32)..(33): Xaa is C or S
ESVAMGQYNKLYTVVGKDLYLISIASLKTPVXX

SEQ ID NO: 105203 - protein, 23 aa, Artificial Sequence
  Cyclic GFR-binding peptide
TMNRYKKLVVNKNEDFYLISIAN

SEQ ID NO: 105204 - protein, 23 aa, Artificial Sequence
  Cyclic GFR-binding peptide
QYNKLIIQQKDNLYLMSIASMKT

SEQ ID NO: 105205 - protein, 31 aa, Artificial Sequence; identical to SEQ ID NO: 1590
  Cyclic GFR-binding peptide
  MOD_RES (26)..(27): Xaa is C or S

SEQ ID NO: 105206 - protein, 32 aa, Artificial Sequence; identical to SEQ ID NO: 1591
  Cyclic GFR-binding peptide
  MOD_RES (2)..(2): Xaa is C or S

SEQ ID NO: 105207 - protein, 28 aa, Artificial Sequence
  Cyclic GFR-binding peptide
VMDQYNKLVVNNAADLYLISIASLRAPV

SEQ ID NO: 105208 - protein, 33 aa, Artificial Sequence; identical to SEQ ID NO: 1594
  Cyclic GFR-binding peptide
  MOD_RES (27)..(28): Xaa is C or S

SEQ ID NO: 105209 - protein, 25 aa, Artificial Sequence
  Cyclic GFR-binding peptide
QYNKLVVNNASDLYLISIASLRTPV

SEQ ID NO: 105210 - protein, 37 aa, Artificial Sequence; identical to SEQ ID NO: 1595
  Cyclic GFR-binding peptide
  MOD_RES (2)..(4)..(35)..(36): Xaa is C or S

SEQ ID NO: 105211 - protein, 32 aa, Artificial Sequence; identical to SEQ ID NO: 1598
  Cyclic GFR-binding peptide
  MOD_RES (27)..(27): Xaa is C or S

SEQ ID NO: 105212 - protein, 27 aa, Artificial Sequence
  Cyclic GFR-binding peptide
VTMNRYKKLVVNKNEDFYLISIANMKE

SEQ ID NO: 105213 - protein, 38 aa, Artificial Sequence; identical to SEQ ID NO: 12163
  Cyclic GFR-binding peptide
  MOD_RES (32)..(33): Xaa is C or S

SEQ ID NO: 105214 - protein, 41 aa, Artificial Sequence; identical to SEQ ID NO: 1600
  Cyclic GFR-binding peptide
  MOD_RES (2)..(4)..(36): Xaa is C or S

SEQ ID NO: 105215 - protein, 32 aa, Artificial Sequence; identical to SEQ ID NO: 1605
  Cyclic GFR-binding peptide
  MOD_RES (2)..(4): Xaa is C or S

SEQ ID NO: 105216 - protein, 24 aa, Artificial Sequence
  Cyclic GFR-binding peptide
RYKKLIKPTKGIFYLISIANLDQS

SEQ ID NO: 105217 - protein, 28 aa, Artificial Sequence
  Cyclic GFR-binding peptide
AKVVMNQYNKLIVNNSSDLYLVSIASLK

SEQ ID NO: 105218 - protein, 28 aa, Artificial Sequence
  Cyclic GFR-binding peptide
EVIMQYNKLLLVRGNDLYLMSIASTKVP

SEQ ID NO: 105219 - protein, 26 aa, Artificial Sequence
  Cyclic GFR-binding peptide
RVVMNRYKKLIVNSSDDFYLVSIANL

SEQ ID NO: 105220 - protein, 33 aa, Artificial Sequence; identical to SEQ ID NO: 29704
  Cyclic GFR-binding peptide
  MOD_RES (1)..(3): Xaa is C or S

SEQ ID NO: 105221 - protein, 32 aa, Artificial Sequence; identical to SEQ ID NO: 1610
  Cyclic GFR-binding peptide
  MOD_RES (32)..(32): Xaa is C or S

SEQ ID NO: 105222 - protein, 32 aa, Artificial Sequence; identical to SEQ ID NO: 1611
  Cyclic GFR-binding peptide
  MOD_RES (32)..(32): Xaa is C or S

SEQ ID NO: 105223 - protein, 29 aa, Artificial Sequence
  Cyclic GFR-binding peptide
  MOD_RES (29)..(29): Xaa is C or S
VMEQYNKLVVKDYEDLYLMSIASLETPVX

SEQ ID NO: 105224 - protein, 23 aa, Artificial Sequence
  Cyclic GFR-binding peptide
RYKKLIVNNSSDFYLVSIANLKT

SEQ ID NO: 105225 - protein, 26 aa, Artificial Sequence
  Cyclic GFR-binding peptide
  MOD_RES (26)..(26): Xaa is C or S
QYNKLIKPTKGILYLISIASLDQSVX

SEQ ID NO: 105226 - protein, 35 aa, Artificial Sequence; identical to SEQ ID NO: 1622
  Cyclic GFR-binding peptide
  MOD_RES (31)..(32): Xaa is C or S

SEQ ID NO: 105227 - protein, 31 aa, Artificial Sequence; identical to SEQ ID NO: 75631
  Cyclic GFR-binding peptide
  MOD_RES (26)..(27): Xaa is C or S

SEQ ID NO: 105228 - protein, 28 aa, Artificial Sequence
  Cyclic GFR-binding peptide
DVVMGRYKKLIIQQKDNFYLMSIANMKT

SEQ ID NO: 105229 - protein, 30 aa, Artificial Sequence; identical to SEQ ID NO: 75633
  Cyclic GFR-binding peptide
  MOD_RES (26)..(27): Xaa is C or S

SEQ ID NO: 105230 - protein, 36 aa, Artificial Sequence; identical to SEQ ID NO: 12187
  Cyclic GFR-binding peptide
  MOD_RES (31)..(32): Xaa is C or S

SEQ ID NO: 105231 - protein, 23 aa, Artificial Sequence
  Cyclic GFR-binding peptide
MGEQYNKLTPVGMDDLYLVSIAS

SEQ ID NO: 105232 - protein, 27 aa, Artificial Sequence
  Cyclic GFR-binding peptide
  MOD_RES (26)..(27): Xaa is C or S
RYKKLTPVGMDDFYLVSIANLKTPVXX

SEQ ID NO: 105233 - protein, 30 aa, Artificial Sequence; identical to SEQ ID NO: 1625
  Cyclic GFR-binding peptide
  MOD_RES (29)..(30): Xaa is C or S

SEQ ID NO: 105234 - protein, 40 aa, Artificial Sequence; identical to SEQ ID NO: 1626
  Cyclic GFR-binding peptide
  MOD_RES (1)..(3)..(36)..(37): Xaa is C or S

SEQ ID NO: 105235 - protein, 33 aa, Artificial Sequence; identical to SEQ ID NO: 1627
  Cyclic GFR-binding peptide
  MOD_RES (33)..(33): Xaa is C or S

SEQ ID NO: 105236 - protein, 31 aa, Artificial Sequence; identical to SEQ ID NO: 1628
  Cyclic GFR-binding peptide
  MOD_RES (26)..(27): Xaa is C or S

SEQ ID NO: 105237 - protein, 31 aa, Artificial Sequence; identical to SEQ ID NO: 1629
  Cyclic GFR-binding peptide
  MOD_RES (1)..(3): Xaa is C or S

SEQ ID NO: 105238 - protein, 24 aa, Artificial Sequence
  Cyclic GFR-binding peptide
KVVMQYNKLVKPTRGVLYLISIAS

SEQ ID NO: 105239 - protein, 23 aa, Artificial Sequence
  Cyclic GFR-binding peptide
RYKKLVVNNASDFYLISIANLRT

SEQ ID NO: 105240 - protein, 41 aa, Artificial Sequence; identical to SEQ ID NO: 1633
  Cyclic GFR-binding peptide
  MOD_RES (2)..(35)..(36): Xaa is C or S

SEQ ID NO: 105241 - protein, 32 aa, Artificial Sequence; identical to SEQ ID NO: 1636
  Cyclic GFR-binding peptide
  MOD_RES (30)..(31): Xaa is C or S

SEQ ID NO: 105242 - protein, 30 aa, Artificial Sequence; identical to SEQ ID NO: 1637
  Cyclic GFR-binding peptide
  MOD_RES (2)..(2): Xaa is C or S

SEQ ID NO: 105243 - protein, 37 aa, Artificial Sequence
  Cyclic GFR-binding peptide
  MOD_RES (1)..(33)..(34): Xaa is C or S
XESVAMGQYNKLYTVVGKDLYLISIASLKTPVXXAKS

SEQ ID NO: 105244 - protein, 36 aa, Artificial Sequence; identical to SEQ ID NO: 1639
  Cyclic GFR-binding peptide
  MOD_RES (30)..(31): Xaa is C or S

SEQ ID NO: 105245 - protein, 36 aa, Artificial Sequence; identical to SEQ ID NO: 29742
  Cyclic GFR-binding peptide
  MOD_RES (1)..(3)..(35)..(36): Xaa is C or S

SEQ ID NO: 105246 - protein, 40 aa, Artificial Sequence; identical to SEQ ID NO: 1642
  Cyclic GFR-binding peptide
  MOD_RES (1)..(3)..(34)..(35): Xaa is C or S

SEQ ID NO: 105247 - protein, 38 aa, Artificial Sequence
  Cyclic GFR-binding peptide
  MOD_RES (1)..(33)..(34): Xaa is C or S
XESVAMGQYNKLYTVVGKDLYLISIASLKTPVXXAKSA

SEQ ID NO: 105248 - protein, 34 aa, Artificial Sequence; identical to SEQ ID NO: 1643
  Cyclic GFR-binding peptide
  MOD_RES (1)..(3): Xaa is C or S

SEQ ID NO: 105249 - protein, 35 aa, Artificial Sequence; identical to SEQ ID NO: 1644
  Cyclic GFR-binding peptide
  MOD_RES (1)..(34)..(35): Xaa is C or S

SEQ ID NO: 105250 - protein, 32 aa, Artificial Sequence; identical to SEQ ID NO: 1645
  Cyclic GFR-binding peptide
  MOD_RES (28)..(29): Xaa is C or S

SEQ ID NO: 105251 - protein, 26 aa, Artificial Sequence
  Cyclic GFR-binding peptide
VMDRYKKLVVNNASDFYLISIANLRT

SEQ ID NO: 105252 - protein, 24 aa, Artificial Sequence
  Cyclic GFR-binding peptide
GRYKKLIIQQKDNFYLMSIANMKT

SEQ ID NO: 105253 - protein, 30 aa, Artificial Sequence; identical to SEQ ID NO: 1651
  Cyclic GFR-binding peptide
  MOD_RES (2)..(4): Xaa is C or S

SEQ ID NO: 105254 - protein, 37 aa, Artificial Sequence; identical to SEQ ID NO: 1652
  Cyclic GFR-binding peptide
  MOD_RES (1)..(33)..(34): Xaa is C or S

SEQ ID NO: 105255 - protein, 32 aa, Artificial Sequence; identical to SEQ ID NO: 1654
  Cyclic GFR-binding peptide
  MOD_RES (28)..(29): Xaa is C or S

SEQ ID NO: 105256 - protein, 35 aa, Artificial Sequence; identical to SEQ ID NO: 1657
  Cyclic GFR-binding peptide
  MOD_RES (32)..(33): Xaa is C or S

SEQ ID NO: 105257 - protein, 33 aa, Artificial Sequence; identical to SEQ ID NO: 84071
  Cyclic GFR-binding peptide
  MOD_RES (2)..(2): Xaa is C or S

SEQ ID NO: 105258 - protein, 37 aa, Artificial Sequence; identical to SEQ ID NO: 1660
  Cyclic GFR-binding peptide
  MOD_RES (2)..(4)..(36)..(37): Xaa is C or S

SEQ ID NO: 105259 - protein, 28 aa, Artificial Sequence
  Cyclic GFR-binding peptide
  MOD_RES (26)..(27): Xaa is C or S
QYNKLYTVVGKDLYLISIASLKTPVXXA

SEQ ID NO: 105260 - protein, 30 aa, Artificial Sequence; identical to SEQ ID NO: 1662
  Cyclic GFR-binding peptide
  MOD_RES (28)..(28): Xaa is C or S

SEQ ID NO: 105261 - protein, 27 aa, Artificial Sequence
  Cyclic GFR-binding peptide
SMGEQYNKLTPVGMDDLYLVSIASLKT

SEQ ID NO: 105262 - protein, 21 aa, Artificial Sequence
  Cyclic GFR-binding peptide
EQYNKLVVKDYEDLYLMSIAS

SEQ ID NO: 105263 - protein, 27 aa, Artificial Sequence
  Cyclic GFR-binding peptide
IMRYKKLLLVRGNDFYLMSIANTKVPA

SEQ ID NO: 105264 - protein, 35 aa, Artificial Sequence; identical to SEQ ID NO: 1669
  Cyclic GFR-binding peptide
  MOD_RES (1)..(33)..(34): Xaa is C or S

SEQ ID NO: 105265 - protein, 30 aa, Artificial Sequence; identical to SEQ ID NO: 29767
  Cyclic GFR-binding peptide
  MOD_RES (2)..(2): Xaa is C or S

SEQ ID NO: 105266 - protein, 32 aa, Artificial Sequence
  Cyclic GFR-binding peptide
  MOD_RES (31)..(32): Xaa is C or S
EEVIMQYNKLLLVRGNDLYLMSIASTKVPAXX

SEQ ID NO: 105267 - protein, 31 aa, Artificial Sequence; identical to SEQ ID NO: 1672
  Cyclic GFR-binding peptide
  MOD_RES (31)..(31): Xaa is C or S

SEQ ID NO: 105268 - protein, 33 aa, Artificial Sequence; identical to SEQ ID NO: 84082
  Cyclic GFR-binding peptide
  MOD_RES (30)..(31): Xaa is C or S

SEQ ID NO: 105269 - protein, 34 aa, Artificial Sequence; identical to SEQ ID NO: 1675
  Cyclic GFR-binding peptide
  MOD_RES (29)..(30): Xaa is C or S

SEQ ID NO: 105270 - protein, 25 aa, Artificial Sequence
  Cyclic GFR-binding peptide
EVVMERYKKLVVKDYEDFYLMSIAN

SEQ ID NO: 105271 - protein, 41 aa, Artificial Sequence; identical to SEQ ID NO: 75673
  Cyclic GFR-binding peptide
  MOD_RES (2)..(4)..(36)..(37): Xaa is C or S

SEQ ID NO: 105272 - protein, 28 aa, Artificial Sequence
  Cyclic GFR-binding peptide
MGEQYNKLTPVGMDDLYLVSIASLKTPV

SEQ ID NO: 105273 - protein, 31 aa, Artificial Sequence; identical to SEQ ID NO: 1680
  Cyclic GFR-binding peptide
  MOD_RES (31)..(31): Xaa is C or S

SEQ ID NO: 105274 - protein, 37 aa, Artificial Sequence; identical to SEQ ID NO: 75674
  Cyclic GFR-binding peptide
  MOD_RES (32)..(33): Xaa is C or S

SEQ ID NO: 105275 - protein, 33 aa, Artificial Sequence
  Cyclic GFR-binding peptide
  MOD_RES (2)..(4): Xaa is C or S
RXGXAEVVMDQYNKLVVNNAADLYLISIASLRA

SEQ ID NO: 105276 - protein, 34 aa, Artificial Sequence; identical to SEQ ID NO: 1687
  Cyclic GFR-binding peptide
  MOD_RES (32)..(33): Xaa is C or S

SEQ ID NO: 105277 - protein, 33 aa, Artificial Sequence
  Cyclic GFR-binding peptide
  MOD_RES (29)..(30): Xaa is C or S
VMDQYNKLVVNNAADLYLISIASLRAPVXXSAP

SEQ ID NO: 105278 - protein, 32 aa, Artificial Sequence; identical to SEQ ID NO: 1688
  Cyclic GFR-binding peptide
  MOD_RES (1)..(3): Xaa is C or S

SEQ ID NO: 105279 - protein, 41 aa, Artificial Sequence; identical to SEQ ID NO: 1691
  Cyclic GFR-binding peptide
  MOD_RES (2)..(4)..(36)..(37): Xaa is C or S

SEQ ID NO: 105280 - protein, 26 aa, Artificial Sequence
  Cyclic GFR-binding peptide
GRYKKLYTVVGKDFYLISIANLKTPV

SEQ ID NO: 105281 - protein, 20 aa, Artificial Sequence
  Cyclic GFR-binding peptide
QYNKLVVNNASDLYLISIAS

SEQ ID NO: 105282 - protein, 32 aa, Artificial Sequence; identical to SEQ ID NO: 29796
  Cyclic GFR-binding peptide
  MOD_RES (30)..(31): Xaa is C or S

SEQ ID NO: 105283 - protein, 23 aa, Artificial Sequence
  Cyclic GFR-binding peptide
VVMRYKKLVKPTRGVFYLISIAN

SEQ ID NO: 105284 - protein, 26 aa, Artificial Sequence
  Cyclic GFR-binding peptide
VMGQYNKLIIQQKDNLYLMSIASMKT

SEQ ID NO: 105285 - protein, 23 aa, Artificial Sequence
  Cyclic GFR-binding peptide
GQYNKLYTVVGKDLYLISIASLK

SEQ ID NO: 105286 - protein, 29 aa, Artificial Sequence
  Cyclic GFR-binding peptide
  MOD_RES (26)..(27): Xaa is C or S
RYKKLVVKENEDFYLMSIANLETPVXXAK

SEQ ID NO: 105287 - protein, 24 aa, Artificial Sequence
  Cyclic GFR-binding peptide
VTMNQYNKLVVNKNEDLYLISIAS

SEQ ID NO: 105288 - protein, 36 aa, Artificial Sequence; identical to SEQ ID NO: 12266
  Cyclic GFR-binding peptide
  MOD_RES (32)..(33): Xaa is C or S

SEQ ID NO: 105289 - protein, 26 aa, Artificial Sequence
  Cyclic GFR-binding peptide
VIMRYKKLVKPKRGVFYLISIANLAQ

SEQ ID NO: 105290 - protein, 27 aa, Artificial Sequence
  Cyclic GFR-binding peptide
  MOD_RES (26)..(27): Xaa is C or S
RYKKLLLVRGNDFYLMSIANTKVPAXX

SEQ ID NO: 105291 - protein, 23 aa, Artificial Sequence
  Cyclic GFR-binding peptide
AMGQYNKLYTVVGKDLYLISIAS

SEQ ID NO: 105292 - protein, 29 aa, Artificial Sequence
  Cyclic GFR-binding peptide
  MOD_RES (26)..(27): Xaa is C or S
QYNKLIIQQKDNLYLMSIASMKTPTXXPG

SEQ ID NO: 105293 - protein, 40 aa, Artificial Sequence; identical to SEQ ID NO: 1707
  Cyclic GFR-binding peptide
  MOD_RES (1)..(3)..(34)..(35): Xaa is C or S

SEQ ID NO: 105294 - protein, 28 aa, Artificial Sequence
  Cyclic GFR-binding peptide
KVIMQYNKLIKPTKGILYLISIASLDQS

SEQ ID NO: 105295 - protein, 23 aa, Artificial Sequence
  Cyclic GFR-binding peptide
RYKKLVKPTRGVFYLISIANLDQ

SEQ ID NO: 105296 - protein, 34 aa, Artificial Sequence; identical to SEQ ID NO: 1715
  Cyclic GFR-binding peptide
  MOD_RES (30)..(31): Xaa is C or S

SEQ ID NO: 105297 - protein, 28 aa, Artificial Sequence
  Cyclic GFR-binding peptide
  MOD_RES (1)..(1): Xaa is C or S
XSRVIMRYKKLVKPKRGVFYLISIANLA

SEQ ID NO: 105298 - protein, 29 aa, Artificial Sequence
  Cyclic GFR-binding peptide
  MOD_RES (26)..(27): Xaa is C or S
RYKKLVVNNAADFYLISIANLRAPVXXSA

SEQ ID NO: 105299 - protein, 28 aa, Artificial Sequence
  Cyclic GFR-binding peptide
VSMGEQYNKLTPVGMDDLYLVSIASLKT

SEQ ID NO: 105300 - protein, 32 aa, Artificial Sequence
  Cyclic GFR-binding peptide
  MOD_RES (32)..(32): Xaa is C or S
SEVTMNQYNKLVVNKNEDLYLISIASMKEPVX

SEQ ID NO: 105301 - protein, 27 aa, Artificial Sequence
  Cyclic GFR-binding peptide
SKVIMRYKKLIKPTKGIFYLISIANLD

SEQ ID NO: 105302 - protein, 30 aa, Artificial Sequence; identical to SEQ ID NO: 1724
  Cyclic GFR-binding peptide
  MOD_RES (1)..(3): Xaa is C or S

SEQ ID NO: 105303 - protein, 36 aa, Artificial Sequence; identical to SEQ ID NO: 75696
  Cyclic GFR-binding peptide
  MOD_RES (2)..(34)..(35): Xaa is C or S

SEQ ID NO: 105304 - protein, 34 aa, Artificial Sequence; identical to SEQ ID NO: 12292
  Cyclic GFR-binding peptide
  MOD_RES (30)..(31): Xaa is C or S

SEQ ID NO: 105305 - protein, 27 aa, Artificial Sequence
  Cyclic GFR-binding peptide
VVMRYKKLVKPTRGVFYLISIANLDQP

SEQ ID NO: 105306 - protein, 23 aa, Artificial Sequence
  Cyclic GFR-binding peptide
GRYKKLYTVVGKDFYLISIANLK

SEQ ID NO: 105307 - protein, 33 aa, Artificial Sequence; identical to SEQ ID NO: 75699
  Cyclic GFR-binding peptide
  MOD_RES (29)..(30): Xaa is C or S

SEQ ID NO: 105308 - protein, 33 aa, Artificial Sequence; identical to SEQ ID NO: 1732
  Cyclic GFR-binding peptide
  MOD_RES (1)..(32)..(33): Xaa is C or S

SEQ ID NO: 105309 - protein, 26 aa, Artificial Sequence
  Cyclic GFR-binding peptide
  MOD_RES (26)..(26): Xaa is C or S
QYNKLVVKDYEDLYLMSIASLETPVX

SEQ ID NO: 105310 - protein, 27 aa, Artificial Sequence
  Cyclic GFR-binding peptide
GEVVMDQYNKLVVKENEDLYLMSIASL

SEQ ID NO: 105311 - protein, 37 aa, Artificial Sequence; identical to SEQ ID NO: 29841
  Cyclic GFR-binding peptide
  MOD_RES (2)..(34)..(35): Xaa is C or S

SEQ ID NO: 105312 - protein, 30 aa, Artificial Sequence; identical to SEQ ID NO: 1737
  Cyclic GFR-binding peptide

SEQ ID NO: 105313 - protein, 32 aa, Artificial Sequence
  Cyclic GFR-binding peptide
  MOD_RES (29)..(30): Xaa is C or S
VMDQYNKLVVNNAADLYLISIASLRAPVXXSA

SEQ ID NO: 105314 - protein, 40 aa, Artificial Sequence; identical to SEQ ID NO: 75703
  Cyclic GFR-binding peptide
  MOD_RES (2)..(4)..(35)..(36): Xaa is C or S

SEQ ID NO: 105315 - protein, 21 aa, Artificial Sequence
  Cyclic GFR-binding peptide
RYKKLVVNNASDFYLISIANL

SEQ ID NO: 105316 - protein, 26 aa, Artificial Sequence
  Cyclic GFR-binding peptide
EVVMDRYKKLVVKENEDFYLMSIANL

SEQ ID NO: 105317 - protein, 27 aa, Artificial Sequence
  Cyclic GFR-binding peptide
  MOD_RES (1)..(1): Xaa is C or S
XAKVVMNQYNKLIVNNSSDLYLVSIAS

SEQ ID NO: 105318 - protein, 32 aa, Artificial Sequence; identical to SEQ ID NO: 84138
  Cyclic GFR-binding peptide
  MOD_RES (1)..(3): Xaa is C or S

SEQ ID NO: 105319 - protein, 27 aa, Artificial Sequence
  Cyclic GFR-binding peptide
RVIMQYNKLVKPKRGVLYLISIASLAQ

SEQ ID NO: 105320 - protein, 25 aa, Artificial Sequence
  Cyclic GFR-binding peptide
MDQYNKLVVKENEDLYLMSIASLET

SEQ ID NO: 105321 - protein, 32 aa, Artificial Sequence; identical to SEQ ID NO: 75708
  Cyclic GFR-binding peptide
  MOD_RES (29)..(30): Xaa is C or S

SEQ ID NO: 105322 - protein, 26 aa, Artificial Sequence
  Cyclic GFR-binding peptide
  MOD_RES (26)..(26): Xaa is C or S
RYKKLYTVVGKDFYLISIANLKTPVX

SEQ ID NO: 105323 - protein, 32 aa, Artificial Sequence; identical to SEQ ID NO: 1750
  Cyclic GFR-binding peptide
  MOD_RES (29)..(30): Xaa is C or S

SEQ ID NO: 105324 - protein, 36 aa, Artificial Sequence; identical to SEQ ID NO: 1754
  Cyclic GFR-binding peptide
  MOD_RES (2)..(34)..(35): Xaa is C or S

SEQ ID NO: 105325 - protein, 31 aa, Artificial Sequence; identical to SEQ ID NO: 12315
  Cyclic GFR-binding peptide
  MOD_RES (26)..(27): Xaa is C or S

SEQ ID NO: 105326 - protein, 30 aa, Artificial Sequence
  Cyclic GFR-binding peptide
  MOD_RES (28)..(29): Xaa is C or S
MGQYNKLYTVVGKDLYLISIASLKTPVXXA

SEQ ID NO: 105327 - protein, 27 aa, Artificial Sequence
  Cyclic GFR-binding peptide
  MOD_RES (2)..(2): Xaa is C or S
KXSKVIMQYNKLIKPTKGILYLISIAS

SEQ ID NO: 105328 - protein, 33 aa, Artificial Sequence; identical to SEQ ID NO: 1761
  Cyclic GFR-binding peptide
  MOD_RES (2)..(2): Xaa is C or S

SEQ ID NO: 105329 - protein, 25 aa, Artificial Sequence
  Cyclic GFR-binding peptide
GRYKKLIIQQKDNFYLMSIANMKTP

SEQ ID NO: 105330 - protein, 27 aa, Artificial Sequence
  Cyclic GFR-binding peptide
  MOD_RES (26)..(27): Xaa is C or S
RYKKLIKPTKGIFYLISIANLDQSVXX

SEQ ID NO: 105331 - protein, 27 aa, Artificial Sequence
  Cyclic GFR-binding peptide
  MOD_RES (26)..(27): Xaa is C or S
QYNKLTPVGMDDLYLVSIASLKTPVXX

SEQ ID NO: 105332 - protein, 29 aa, Artificial Sequence
  Cyclic GFR-binding peptide
  MOD_RES (2)..(2): Xaa is C or S
GXAKVVMNRYKKLIVNNSSDFYLVSIANL

SEQ ID NO: 105333 - protein, 26 aa, Artificial Sequence
  Cyclic GFR-binding peptide
VVMDQYNKLVVNNAADLYLISIASLR

SEQ ID NO: 105334 - protein, 26 aa, Artificial Sequence
  Cyclic GFR-binding peptide
KVVMNQYNKLIVNNSSDLYLVSIASL

SEQ ID NO: 105335 - protein, 31 aa, Artificial Sequence; identical to SEQ ID NO: 29880
  Cyclic GFR-binding peptide
  MOD_RES (2)..(4): Xaa is C or S

SEQ ID NO: 105336 - protein, 26 aa, Artificial Sequence
  Cyclic GFR-binding peptide
MDRYKKLVVNNAADFYLISIANLRAP

SEQ ID NO: 105337 - protein, 24 aa, Artificial Sequence
  Cyclic GFR-binding peptide
VMNRYKKLIVNSSDDFYLVSIANL

SEQ ID NO: 105338 - protein, 39 aa, Artificial Sequence; identical to SEQ ID NO: 75724
  Cyclic GFR-binding peptide
  MOD_RES (1)..(3)..(34)..(35): Xaa is C or S

SEQ ID NO: 105339 - protein, 29 aa, Artificial Sequence
  Cyclic GFR-binding peptide
SMGERYKKLTPVGMDDFYLVSIANLKTPV

SEQ ID NO: 105340 - protein, 35 aa, Artificial Sequence; identical to SEQ ID NO: 1779
  Cyclic GFR-binding peptide
  MOD_RES (1)..(3)..(35): Xaa is C or S

SEQ ID NO: 105341 - protein, 34 aa, Artificial Sequence
  Cyclic GFR-binding peptide
  MOD_RES (2)..(34): Xaa is C or S
GXAEVVMDQYNKLVVNNAADLYLISIASLRAPVX

SEQ ID NO: 105342 - protein, 28 aa, Artificial Sequence
  Cyclic GFR-binding peptide
  MOD_RES (27)..(28): Xaa is C or S
DRYKKLVVKENEDFYLMSIANLETPVXX

SEQ ID NO: 105343 - protein, 35 aa, Artificial Sequence; identical to SEQ ID NO: 1784
  Cyclic GFR-binding peptide
  MOD_RES (32)..(33): Xaa is C or S

SEQ ID NO: 105344 - protein, 24 aa, Artificial Sequence
  Cyclic GFR-binding peptide
VMDRYKKLVVKENEDFYLMSIANL

SEQ ID NO: 105345 - protein, 23 aa, Artificial Sequence
  Cyclic GFR-binding peptide
RYKKLVVKENEDFYLMSIANLET

SEQ ID NO: 105346 - protein, 25 aa, Artificial Sequence
  Cyclic GFR-binding peptide
MNRYKKLIVNNSSDFYLVSIANLKT

SEQ ID NO: 105347 - protein, 35 aa, Artificial Sequence; identical to SEQ ID NO: 1795
  Cyclic GFR-binding peptide
  MOD_RES (2)..(33)..(34): Xaa is C or S

SEQ ID NO: 105348 - protein, 24 aa, Artificial Sequence
  Cyclic GFR-binding peptide
VVMQYNKLVKPTRGVLYLISIASL

SEQ ID NO: 105349 - protein, 24 aa, Artificial Sequence
  Cyclic GFR-binding peptide
VVMDRYKKLVVKENEDFYLMSIAN

SEQ ID NO: 105350 - protein, 28 aa, Artificial Sequence
  Cyclic GFR-binding peptide
  MOD_RES (28)..(28): Xaa is C or S
MGQYNKLYTVVGKDLYLISIASLKTPVX

SEQ ID NO: 105351 - protein, 34 aa, Artificial Sequence; identical to SEQ ID NO: 29906
  Cyclic GFR-binding peptide
  MOD_RES (29)..(30): Xaa is C or S

SEQ ID NO: 105352 - protein, 30 aa, Artificial Sequence; identical to SEQ ID NO: 1804
  Cyclic GFR-binding peptide
  MOD_RES (29)..(30): Xaa is C or S

SEQ ID NO: 105353 - protein, 38 aa, Artificial Sequence; identical to SEQ ID NO: 1811
  Cyclic GFR-binding peptide
  MOD_RES (1)..(3)..(35): Xaa is C or S

SEQ ID NO: 105354 - protein, 35 aa, Artificial Sequence; identical to SEQ ID NO: 1812
  Cyclic GFR-binding peptide
  MOD_RES (32)..(33): Xaa is C or S

SEQ ID NO: 105355 - protein, 28 aa, Artificial Sequence
  Cyclic GFR-binding peptide
VVMDQYNKLVVNNAADLYLISIASLRAP

SEQ ID NO: 105356 - protein, 25 aa, Artificial Sequence
  Cyclic GFR-binding peptide
EEVIMRYKKLLLVRGNDFYLMSIAN

SEQ ID NO: 105357 - protein, 32 aa, Artificial Sequence; identical to SEQ ID NO: 1815
  Cyclic GFR-binding peptide
  MOD_RES (2)..(2): Xaa is C or S

SEQ ID NO: 105358 - protein, 32 aa, Artificial Sequence; identical to SEQ ID NO: 1817
  Cyclic GFR-binding peptide
  MOD_RES (26)..(27): Xaa is C or S

SEQ ID NO: 105359 - protein, 34 aa, Artificial Sequence; identical to SEQ ID NO: 1822
  Cyclic GFR-binding peptide
  MOD_RES (29)..(30): Xaa is C or S

SEQ ID NO: 105360 - protein, 29 aa, Artificial Sequence
  Cyclic GFR-binding peptide
SEVVMDQYNKLVVNNASDLYLISIASLRT

SEQ ID NO: 105361 - protein, 29 aa, Artificial Sequence
  Cyclic GFR-binding peptide
  MOD_RES (28)..(29): Xaa is C or S
IMRYKKLLLVRGNDFYLMSIANTKVPAXX

SEQ ID NO: 105362 - protein, 31 aa, Artificial Sequence; identical to SEQ ID NO: 1823
  Cyclic GFR-binding peptide
  MOD_RES (27)..(28): Xaa is C or S

SEQ ID NO: 105363 - protein, 28 aa, Artificial Sequence
  Cyclic GFR-binding peptide
  MOD_RES (27)..(28): Xaa is C or S
ERYKKLVVKDYEDFYLMSIANLETPVXX

SEQ ID NO: 105364 - protein, 32 aa, Artificial Sequence; identical to SEQ ID NO: 75751
  Cyclic GFR-binding peptide
  MOD_RES (1)..(32): Xaa is C or S

SEQ ID NO: 105365 - protein, 37 aa, Artificial Sequence; identical to SEQ ID NO: 1826
  Cyclic GFR-binding peptide
  MOD_RES (2)..(33)..(34): Xaa is C or S

SEQ ID NO: 105366 - protein, 35 aa, Artificial Sequence
  Cyclic GFR-binding peptide
  MOD_RES (32)..(33): Xaa is C or S
ESVAMGQYNKLYTVVGKDLYLISIASLKTPVXXAK

SEQ ID NO: 105367 - protein, 32 aa, Artificial Sequence
  Cyclic GFR-binding peptide
  MOD_RES (32)..(32): Xaa is C or S
ESVAMGQYNKLYTVVGKDLYLISIASLKTPVX

SEQ ID NO: 105368 - protein, 41 aa, Artificial Sequence; identical to SEQ ID NO: 1827
  Cyclic GFR-binding peptide
  MOD_RES (2)..(4)..(35)..(36): Xaa is C or S

SEQ ID NO: 105369 - protein, 29 aa, Artificial Sequence
  Cyclic GFR-binding peptide
  MOD_RES (29)..(29): Xaa is C or S
VIMRYKKLLLVRGNDFYLMSIANTKVPAX

SEQ ID NO: 105370 - protein, 27 aa, Artificial Sequence
  Cyclic GFR-binding peptide
  MOD_RES (26)..(27): Xaa is C or S
RYKKLVVNKNEDFYLISIANMKEPVXX

SEQ ID NO: 105371 - protein, 27 aa, Artificial Sequence
  Cyclic GFR-binding peptide
IMQYNKLIKPTKGILYLISIASLDQSV

SEQ ID NO: 105372 - protein, 31 aa, Artificial Sequence; identical to SEQ ID NO: 1830
  Cyclic GFR-binding peptide
  MOD_RES (30)..(31): Xaa is C or S

SEQ ID NO: 105373 - protein, 35 aa, Artificial Sequence; identical to SEQ ID NO: 29939
  Cyclic GFR-binding peptide
  MOD_RES (32)..(33): Xaa is C or S

SEQ ID NO: 105374 - protein, 25 aa, Artificial Sequence
  Cyclic GFR-binding peptide
GQYNKLIIQQKDNLYLMSIASMKTP

SEQ ID NO: 105375 - protein, 27 aa, Artificial Sequence
  Cyclic GFR-binding peptide
VSMGEQYNKLTPVGMDDLYLVSIASLK

SEQ ID NO: 105376 - protein, 42 aa, Artificial Sequence
  Cyclic GFR-binding peptide
  MOD_RES (2)..(4)..(36)..(37): Xaa is C or S
RXGXESVAMGQYNKLYTVVGKDLYLISIASLKTPVXXAKSAK

SEQ ID NO: 105377 - protein, 35 aa, Artificial Sequence
  Cyclic GFR-binding peptide
  MOD_RES (1)..(3)..(34)..(35): Xaa is C or S
XGXEEVIMQYNKLLLVRGNDLYLMSIASTKVPAXX

SEQ ID NO: 105378 - protein, 27 aa, Artificial Sequence
  Cyclic GFR-binding peptide
KVVMNRYKKLIVNNSSDFYLVSIANLK

SEQ ID NO: 105379 - protein, 35 aa, Artificial Sequence; identical to SEQ ID NO: 1842
  Cyclic GFR-binding peptide
  MOD_RES (32)..(33): Xaa is C or S

SEQ ID NO: 105380 - protein, 35 aa, Artificial Sequence; identical to SEQ ID NO: 75764
  Cyclic GFR-binding peptide
  MOD_RES (2)..(4)..(35): Xaa is C or S

SEQ ID NO: 105381 - protein, 28 aa, Artificial Sequence
  Cyclic GFR-binding peptide
  MOD_RES (27)..(28): Xaa is C or S
GRYKKLIIQQKDNFYLMSIANMKTPTXX

SEQ ID NO: 105382 - protein, 32 aa, Artificial Sequence; identical to SEQ ID NO: 1846
  Cyclic GFR-binding peptide
  MOD_RES (26)..(27): Xaa is C or S

SEQ ID NO: 105383 - protein, 37 aa, Artificial Sequence
  Cyclic GFR-binding peptide
  MOD_RES (1)..(3)..(35)..(36): Xaa is C or S
XAXSEVTMNQYNKLVVNKNEDLYLISIASMKEPVXXP

SEQ ID NO: 105384 - protein, 31 aa, Artificial Sequence
  Cyclic GFR-binding peptide
  MOD_RES (28)..(29): Xaa is C or S
MGQYNKLYTVVGKDLYLISIASLKTPVXXAK

SEQ ID NO: 105385 - protein, 36 aa, Artificial Sequence; identical to SEQ ID NO: 1849
  Cyclic GFR-binding peptide
  MOD_RES (2)..(34)..(35): Xaa is C or S

SEQ ID NO: 105386 - protein, 31 aa, Artificial Sequence; identical to SEQ ID NO: 1852
  Cyclic GFR-binding peptide
  MOD_RES (31)..(31): Xaa is C or S

SEQ ID NO: 105387 - protein, 27 aa, Artificial Sequence
  Cyclic GFR-binding peptide
  MOD_RES (26)..(27): Xaa is C or S
QYNKLLLVRGNDLYLMSIASTKVPAXX

SEQ ID NO: 105388 - protein, 32 aa, Artificial Sequence; identical to SEQ ID NO: 79077
  Cyclic GFR-binding peptide
  MOD_RES (26)..(27): Xaa is C or S

SEQ ID NO: 105389 - protein, 26 aa, Artificial Sequence
  Cyclic GFR-binding peptide
VVMERYKKLVVKDYEDFYLMSIANLE

SEQ ID NO: 105390 - protein, 31 aa, Artificial Sequence; identical to SEQ ID NO: 29973
  Cyclic GFR-binding peptide
  MOD_RES (27)..(28): Xaa is C or S

SEQ ID NO: 105391 - protein, 27 aa, Artificial Sequence
  Cyclic GFR-binding peptide
  MOD_RES (27)..(27): Xaa is C or S
NQYNKLIVNSSDDLYLVSIASLQTPAX

SEQ ID NO: 105392 - protein, 35 aa, Artificial Sequence; identical to SEQ ID NO: 1861
  Cyclic GFR-binding peptide
  MOD_RES (30)..(31): Xaa is C or S

SEQ ID NO: 105393 - protein, 32 aa, Artificial Sequence; identical to SEQ ID NO: 12405
  Cyclic GFR-binding peptide
  MOD_RES (2)..(4): Xaa is C or S

SEQ ID NO: 105394 - protein, 33 aa, Artificial Sequence
  Cyclic GFR-binding peptide
  MOD_RES (27)..(28): Xaa is C or S
NQYNKLIVNSSDDLYLVSIASLKTPAXXPKPVH

SEQ ID NO: 105395 - protein, 29 aa, Artificial Sequence
  Cyclic GFR-binding peptide
  MOD_RES (28)..(29): Xaa is C or S
IMRYKKLIKPTKGIFYLISIANLDQSVXX

SEQ ID NO: 105396 - protein, 35 aa, Artificial Sequence; identical to SEQ ID NO: 1863
  Cyclic GFR-binding peptide
  MOD_RES (1)..(33)..(34): Xaa is C or S

SEQ ID NO: 105397 - protein, 32 aa, Artificial Sequence; identical to SEQ ID NO: 1864
  Cyclic GFR-binding peptide
  MOD_RES (27)..(28): Xaa is C or S

SEQ ID NO: 105398 - protein, 22 aa, Artificial Sequence
  Cyclic GFR-binding peptide
MEQYNKLVVKDYEDLYLMSIAS

SEQ ID NO: 105399 - protein, 35 aa, Artificial Sequence; identical to SEQ ID NO: 75781
  Cyclic GFR-binding peptide
  MOD_RES (31)..(32): Xaa is C or S

SEQ ID NO: 105400 - protein, 26 aa, Artificial Sequence
  Cyclic GFR-binding peptide
IMQYNKLIKPTKGILYLISIASLDQS

SEQ ID NO: 105401 - protein, 25 aa, Artificial Sequence
  Cyclic GFR-binding peptide
VMQYNKLVKPTRGVLYLISIASLDQ

SEQ ID NO: 105402 - protein, 34 aa, Artificial Sequence; identical to SEQ ID NO: 1874
  Cyclic GFR-binding peptide
  MOD_RES (1)..(32)..(33): Xaa is C or S

SEQ ID NO: 105403 - protein, 28 aa, Artificial Sequence
  Cyclic GFR-binding peptide
AMGRYKKLYTVVGKDFYLISIANLKTPV

SEQ ID NO: 105404 - protein, 28 aa, Artificial Sequence
  Cyclic GFR-binding peptide
KVVMNQYNKLIVNNSSDLYLVSIASLKT

SEQ ID NO: 105405 - protein, 35 aa, Artificial Sequence
  Cyclic GFR-binding peptide
  MOD_RES (30)..(31): Xaa is C or S
VAMGQYNKLYTVVGKDLYLISIASLKTPVXXAKSA

SEQ ID NO: 105406 - protein, 33 aa, Artificial Sequence; identical to SEQ ID NO: 75785
  Cyclic GFR-binding peptide
  MOD_RES (27)..(28): Xaa is C or S

SEQ ID NO: 105407 - protein, 38 aa, Artificial Sequence; identical to SEQ ID NO: 1878
  Cyclic GFR-binding peptide
  MOD_RES (1)..(32)..(33): Xaa is C or S

SEQ ID NO: 105408 - protein, 23 aa, Artificial Sequence
  Cyclic GFR-binding peptide
MRYKKLLLVRGNDFYLMSIANTK

SEQ ID NO: 105409 - protein, 26 aa, Artificial Sequence
  Cyclic GFR-binding peptide
MGQYNKLIIQQKDNLYLMSIASMKTP

SEQ ID NO: 105410 - protein, 26 aa, Artificial Sequence
  Cyclic GFR-binding peptide
DQYNKLVVNNASDLYLISIASLRTPV

SEQ ID NO: 105411 - protein, 39 aa, Artificial Sequence; identical to SEQ ID NO: 1881
  Cyclic GFR-binding peptide
  MOD_RES (2)..(4)..(36): Xaa is C or S

SEQ ID NO: 105412 - protein, 31 aa, Artificial Sequence; identical to SEQ ID NO: 30000
  Cyclic GFR-binding peptide
  MOD_RES (1)..(1): Xaa is C or S

SEQ ID NO: 105413 - protein, 27 aa, Artificial Sequence
  Cyclic GFR-binding peptide
IMQYNKLLLVRGNDLYLMSIASTKVPA

SEQ ID NO: 105414 - protein, 37 aa, Artificial Sequence; identical to SEQ ID NO: 1884
  Cyclic GFR-binding peptide
  MOD_RES (31)..(31): Xaa is C or S

SEQ ID NO: 105415 - protein, 29 aa, Artificial Sequence
  Cyclic GFR-binding peptide
EVVMERYKKLVVKDYEDFYLMSIANLETP

SEQ ID NO: 105416 - protein, 37 aa, Artificial Sequence; identical to SEQ ID NO: 1889
  Cyclic GFR-binding peptide
  MOD_RES (1)..(3)..(35)..(36): Xaa is C or S

SEQ ID NO: 105417 - protein, 32 aa, Artificial Sequence; identical to SEQ ID NO: 75797
  Cyclic GFR-binding peptide
  MOD_RES (2)..(2): Xaa is C or S

SEQ ID NO: 105418 - protein, 37 aa, Artificial Sequence; identical to SEQ ID NO: 1891
  Cyclic GFR-binding peptide
  MOD_RES (31)..(32): Xaa is C or S

SEQ ID NO: 105419 - protein, 29 aa, Artificial Sequence
  Cyclic GFR-binding peptide
  MOD_RES (2)..(2): Xaa is C or S
KXSKVVMRYKKLVKPTRGVFYLISIANLD

SEQ ID NO: 105420 - protein, 32 aa, Artificial Sequence; identical to SEQ ID NO: 1894
  Cyclic GFR-binding peptide
  MOD_RES (2)..(2): Xaa is C or S

SEQ ID NO: 105421 - protein, 40 aa, Artificial Sequence; identical to SEQ ID NO: 1895
  Cyclic GFR-binding peptide
  MOD_RES (1)..(3)..(34)..(35): Xaa is C or S

SEQ ID NO: 105422 - protein, 27 aa, Artificial Sequence
  Cyclic GFR-binding peptide
  MOD_RES (27)..(27): Xaa is C or S
MRYKKLIKPTKGIFYLISIANLDQSVX

SEQ ID NO: 105423 - protein, 26 aa, Artificial Sequence
  Cyclic GFR-binding peptide
DQYNKLVVKENEDLYLMSIASLETPV

SEQ ID NO: 105424 - protein, 31 aa, Artificial Sequence; identical to SEQ ID NO: 30024
  Cyclic GFR-binding peptide
  MOD_RES (30)..(31): Xaa is C or S

SEQ ID NO: 105425 - protein, 39 aa, Artificial Sequence; identical to SEQ ID NO: 1899
  Cyclic GFR-binding peptide
  MOD_RES (1)..(3)..(35)..(36): Xaa is C or S

SEQ ID NO: 105426 - protein, 31 aa, Artificial Sequence; identical to SEQ ID NO: 1901
  Cyclic GFR-binding peptide
  MOD_RES (27)..(28): Xaa is C or S

SEQ ID NO: 105427 - protein, 29 aa, Artificial Sequence
  Cyclic GFR-binding peptide
  MOD_RES (28)..(28): Xaa is C or S
MNRYKKLIVNSSDDFYLVSIANLKTPAXT

SEQ ID NO: 105428 - protein, 25 aa, Artificial Sequence
  Cyclic GFR-binding peptide
EVVMDQYNKLVVNNAADLYLISIAS

SEQ ID NO: 105429 - protein, 32 aa, Artificial Sequence; identical to SEQ ID NO: 1907
  Cyclic GFR-binding peptide
  MOD_RES (26)..(27): Xaa is C or S

SEQ ID NO: 105430 - protein, 33 aa, Artificial Sequence; identical to SEQ ID NO: 1909
  Cyclic GFR-binding peptide
  MOD_RES (2)..(2): Xaa is C or S

SEQ ID NO: 105431 - protein, 33 aa, Artificial Sequence; identical to SEQ ID NO: 1911
  Cyclic GFR-binding peptide
  MOD_RES (28)..(28): Xaa is C or S

SEQ ID NO: 105432 - protein, 29 aa, Artificial Sequence
  Cyclic GFR-binding peptide
  MOD_RES (26)..(27): Xaa is C or S
RYKKLLLVRGNDFYLMSIANTKVPAXXTS

SEQ ID NO: 105433 - protein, 33 aa, Artificial Sequence; identical to SEQ ID NO: 12461
  Cyclic GFR-binding peptide
  MOD_RES (1)..(3): Xaa is C or S

SEQ ID NO: 105434 - protein, 32 aa, Artificial Sequence; identical to SEQ ID NO: 1913
  Cyclic GFR-binding peptide
  MOD_RES (1)..(1): Xaa is C or S

SEQ ID NO: 105435 - protein, 28 aa, Artificial Sequence
  Cyclic GFR-binding peptide
  MOD_RES (1)..(1): Xaa is C or S
XAEVVMDRYKKLVVNNAADFYLISIANL

SEQ ID NO: 105436 - protein, 25 aa, Artificial Sequence
  Cyclic GFR-binding peptide
EVVMDRYKKLVVNNAADFYLISIAN

SEQ ID NO: 105437 - protein, 29 aa, Artificial Sequence
  Cyclic GFR-binding peptide
  MOD_RES (1)..(3): Xaa is C or S
XGXGEVVMEQYNKLVVKDYEDLYLMSIAS

SEQ ID NO: 105438 - protein, 33 aa, Artificial Sequence; identical to SEQ ID NO: 79137
  Cyclic GFR-binding peptide
  MOD_RES (29)..(30): Xaa is C or S

SEQ ID NO: 105439 - protein, 30 aa, Artificial Sequence; identical to SEQ ID NO: 1916
  Cyclic GFR-binding peptide
  MOD_RES (29)..(30): Xaa is C or S

SEQ ID NO: 105440 - protein, 27 aa, Artificial Sequence
  Cyclic GFR-binding peptide
VMRYKKLVKPTRGVFYLISIANLDQPV

SEQ ID NO: 105441 - protein, 32 aa, Artificial Sequence; identical to SEQ ID NO: 1920
  Cyclic GFR-binding peptide
  MOD_RES (26)..(27): Xaa is C or S

SEQ ID NO: 105442 - protein, 36 aa, Artificial Sequence; identical to SEQ ID NO: 1924
  Cyclic GFR-binding peptide
  MOD_RES (30)..(31): Xaa is C or S

SEQ ID NO: 105443 - protein, 30 aa, Artificial Sequence
  Cyclic GFR-binding peptide
  MOD_RES (1)..(3): Xaa is C or S
XGXRDVVMGQYNKLIIQQKDNLYLMSIASM

SEQ ID NO: 105444 - protein, 27 aa, Artificial Sequence
  Cyclic GFR-binding peptide
  MOD_RES (27)..(27): Xaa is C or S
DQYNKLVVKENEDLYLMSIASLETPVX

SEQ ID NO: 105445 - protein, 23 aa, Artificial Sequence
  Cyclic GFR-binding peptide
RYKKLIIQQKDNFYLMSIANMKT

SEQ ID NO: 105446 - protein, 31 aa, Artificial Sequence; identical to SEQ ID NO: 1933
  Cyclic GFR-binding peptide
  MOD_RES (2)..(4): Xaa is C or S

SEQ ID NO: 105447 - protein, 37 aa, Artificial Sequence; identical to SEQ ID NO: 1934
  Cyclic GFR-binding peptide
  MOD_RES (1)..(3)..(35)..(36): Xaa is C or S

SEQ ID NO: 105448 - protein, 29 aa, Artificial Sequence
  Cyclic GFR-binding peptide
  MOD_RES (27)..(28): Xaa is C or S
NRYKKLVVNKNEDFYLISIANMKEPVXXP

SEQ ID NO: 105449 - protein, 30 aa, Artificial Sequence; identical to SEQ ID NO: 1935
  Cyclic GFR-binding peptide
  MOD_RES (27)..(28): Xaa is C or S

SEQ ID NO: 105450 - protein, 27 aa, Artificial Sequence
  Cyclic GFR-binding peptide
  MOD_RES (2)..(2): Xaa is C or S
KXSKVVMRYKKLVKPTRGVFYLISIAN

SEQ ID NO: 105451 - protein, 26 aa, Artificial Sequence
  Cyclic GFR-binding peptide
VIMQYNKLLLVRGNDLYLMSIASTKV

SEQ ID NO: 105452 - protein, 24 aa, Artificial Sequence
  Cyclic GFR-binding peptide
QYNKLTPVGMDDLYLVSIASLKTP

SEQ ID NO: 105453 - protein, 27 aa, Artificial Sequence
  Cyclic GFR-binding peptide
VAMGRYKKLYTVVGKDFYLISIANLKT

SEQ ID NO: 105454 - protein, 34 aa, Artificial Sequence; identical to SEQ ID NO: 1944
  Cyclic GFR-binding peptide
  MOD_RES (31)..(32): Xaa is C or S

SEQ ID NO: 105455 - protein, 28 aa, Artificial Sequence
  Cyclic GFR-binding peptide
VVMDRYKKLVVKENEDFYLMSIANLETP

SEQ ID NO: 105456 - protein, 26 aa, Artificial Sequence
  Cyclic GFR-binding peptide
  MOD_RES (1)..(1): Xaa is C or S
XSKVIMQYNKLIKPTKGILYLISIAS

SEQ ID NO: 105457 - protein, 32 aa, Artificial Sequence
  Cyclic GFR-binding peptide
  MOD_RES (1)..(32): Xaa is C or S
XEEVIMQYNKLLLVRGNDLYLMSIASTKVPAX

SEQ ID NO: 105458 - protein, 31 aa, Artificial Sequence; identical to SEQ ID NO: 1951
  Cyclic GFR-binding peptide
  MOD_RES (31)..(31): Xaa is C or S

SEQ ID NO: 105459 - protein, 29 aa, Artificial Sequence
  Cyclic GFR-binding peptide
GEVVMDRYKKLVVKENEDFYLMSIANLET

SEQ ID NO: 105460 - protein, 33 aa, Artificial Sequence; identical to SEQ ID NO: 1953
  Cyclic GFR-binding peptide
  MOD_RES (27)..(28): Xaa is C or S

SEQ ID NO: 105461 - protein, 29 aa, Artificial Sequence
  Cyclic GFR-binding peptide
  MOD_RES (27)..(28): Xaa is C or S
GQYNKLYTVVGKDLYLISIASLKTPVXXA

SEQ ID NO: 105462 - protein, 29 aa, Artificial Sequence
  Cyclic GFR-binding peptide
  MOD_RES (1)..(1): Xaa is C or S
XAEVVMDRYKKLVVNNAADFYLISIANLR

SEQ ID NO: 105463 - protein, 31 aa, Artificial Sequence; identical to SEQ ID NO: 1954
  Cyclic GFR-binding peptide
  MOD_RES (27)..(27): Xaa is C or S

SEQ ID NO: 105464 - protein, 25 aa, Artificial Sequence
  Cyclic GFR-binding peptide
EVVMEQYNKLVVKDYEDLYLMSIAS

SEQ ID NO: 105465 - protein, 30 aa, Artificial Sequence; identical to SEQ ID NO: 12503
  Cyclic GFR-binding peptide
  MOD_RES (29)..(30): Xaa is C or S

SEQ ID NO: 105466 - protein, 25 aa, Artificial Sequence
  Cyclic GFR-binding peptide
MDRYKKLVVKENEDFYLMSIANLET

SEQ ID NO: 105467 - protein, 32 aa, Artificial Sequence; identical to SEQ ID NO: 1958
  Cyclic GFR-binding peptide
  MOD_RES (29)..(30): Xaa is C or S

SEQ ID NO: 105468 - protein, 24 aa, Artificial Sequence
  Cyclic GFR-binding peptide
VVMNQYNKLIVNSSDDLYLVSIAS

SEQ ID NO: 105469 - protein, 25 aa, Artificial Sequence
  Cyclic GFR-binding peptide
SMGEQYNKLTPVGMDDLYLVSIASL

SEQ ID NO: 105470 - protein, 33 aa, Artificial Sequence; identical to SEQ ID NO: 1966
  Cyclic GFR-binding peptide
  MOD_RES (29)..(30): Xaa is C or S

SEQ ID NO: 105471 - protein, 29 aa, Artificial Sequence
  Cyclic GFR-binding peptide
  MOD_RES (27)..(28): Xaa is C or S
NRYKKLIVNNSSDFYLVSIANLKTPAXXA

SEQ ID NO: 105472 - protein, 38 aa, Artificial Sequence; identical to SEQ ID NO: 1972
  Cyclic GFR-binding peptide
  MOD_RES (32)..(33): Xaa is C or S

SEQ ID NO: 105473 - protein, 28 aa, Artificial Sequence
  Cyclic GFR-binding peptide
  MOD_RES (27)..(28): Xaa is C or S
NQYNKLIVNSSDDLYLVSIASLQTPAXX

SEQ ID NO: 105474 - protein, 27 aa, Artificial Sequence
  Cyclic GFR-binding peptide
  MOD_RES (26)..(27): Xaa is C or S
QYNKLIKPTKGILYLISIASLDQSVXX

SEQ ID NO: 105475 - protein, 31 aa, Artificial Sequence
  Cyclic GFR-binding peptide
  MOD_RES (29)..(30): Xaa is C or S
VIMQYNKLLLVRGNDLYLMSIASTKVPAXXT

SEQ ID NO: 105476 - protein, 28 aa, Artificial Sequence
  Cyclic GFR-binding peptide
VMEQYNKLVVKDYEDLYLMSIASLETPV

SEQ ID NO: 105477 - protein, 27 aa, Artificial Sequence
  Cyclic GFR-binding peptide
VMDQYNKLVVNNASDLYLISIASLRTP

SEQ ID NO: 105478 - protein, 30 aa, Artificial Sequence; identical to SEQ ID NO: 1982
  Cyclic GFR-binding peptide
  MOD_RES (2)..(4): Xaa is C or S

SEQ ID NO: 105479 - protein, 34 aa, Artificial Sequence; identical to SEQ ID NO: 30122
  Cyclic GFR-binding peptide
  MOD_RES (30)..(31): Xaa is C or S

SEQ ID NO: 105480 - protein, 29 aa, Artificial Sequence
  Cyclic GFR-binding peptide
GEVVMERYKKLVVKDYEDFYLMSIANLET

SEQ ID NO: 105481 - protein, 28 aa, Artificial Sequence
  Cyclic GFR-binding peptide
  MOD_RES (28)..(28): Xaa is C or S
IMRYKKLIKPTKGIFYLISIANLDQSVX

SEQ ID NO: 105482 - protein, 36 aa, Artificial Sequence; identical to SEQ ID NO: 1990
  Cyclic GFR-binding peptide
  MOD_RES (2)..(4)..(35)..(36): Xaa is C or S

SEQ ID NO: 105483 - protein, 40 aa, Artificial Sequence; identical to SEQ ID NO: 1991
  Cyclic GFR-binding peptide
  MOD_RES (2)..(4)..(37)..(38): Xaa is C or S

SEQ ID NO: 105484 - protein, 34 aa, Artificial Sequence; identical to SEQ ID NO: 1995
  Cyclic GFR-binding peptide
  MOD_RES (1)..(32)..(33): Xaa is C or S

SEQ ID NO: 105485 - protein, 27 aa, Artificial Sequence
  Cyclic GFR-binding peptide
IMRYKKLIKPTKGIFYLISIANLDQSV

SEQ ID NO: 105486 - protein, 21 aa, Artificial Sequence
  Cyclic GFR-binding peptide
NQYNKLVVNKNEDLYLISIAS

SEQ ID NO: 105487 - protein, 33 aa, Artificial Sequence; identical to SEQ ID NO: 12548
  Cyclic GFR-binding peptide
  MOD_RES (29)..(30): Xaa is C or S

SEQ ID NO: 105488 - protein, 34 aa, Artificial Sequence
  Cyclic GFR-binding peptide
  MOD_RES (1)..(3): Xaa is C or S
XGXAEVVMDQYNKLVVNNAADLYLISIASLRAPV

SEQ ID NO: 105489 - protein, 22 aa, Artificial Sequence
  Cyclic GFR-binding peptide
NQYNKLIVNNSSDLYLVSIASL

SEQ ID NO: 105490 - protein, 35 aa, Artificial Sequence; identical to SEQ ID NO: 12551
  Cyclic GFR-binding peptide
  MOD_RES (1)..(3)..(35): Xaa is C or S

SEQ ID NO: 105491 - protein, 37 aa, Artificial Sequence; identical to SEQ ID NO: 2002
  Cyclic GFR-binding peptide
  MOD_RES (2)..(4)..(36)..(37): Xaa is C or S

SEQ ID NO: 105492 - protein, 36 aa, Artificial Sequence; identical to SEQ ID NO: 2003
  Cyclic GFR-binding peptide
  MOD_RES (1)..(34)..(35): Xaa is C or S

SEQ ID NO: 105493 - protein, 34 aa, Artificial Sequence; identical to SEQ ID NO: 30150
  Cyclic GFR-binding peptide
  MOD_RES (2)..(34): Xaa is C or S

SEQ ID NO: 105494 - protein, 35 aa, Artificial Sequence
  Cyclic GFR-binding peptide
  MOD_RES (31)..(32): Xaa is C or S
EEVIMQYNKLLLVRGNDLYLMSIASTKVPAXXTSP

SEQ ID NO: 105495 - protein, 20 aa, Artificial Sequence
  Cyclic GFR-binding peptide
RYKKLVVKENEDFYLMSIAN

SEQ ID NO: 105496 - protein, 28 aa, Artificial Sequence
  Cyclic GFR-binding peptide
  MOD_RES (26)..(27): Xaa is C or S
RYKKLTPVGMDDFYLVSIANLKTPVXXA

SEQ ID NO: 105497 - protein, 33 aa, Artificial Sequence; identical to SEQ ID NO: 2009
  Cyclic GFR-binding peptide
  MOD_RES (28)..(29): Xaa is C or S

SEQ ID NO: 105498 - protein, 37 aa, Artificial Sequence
  Cyclic GFR-binding peptide
  MOD_RES (2)..(34)..(35): Xaa is C or S
GXESVAMGQYNKLYTVVGKDLYLISIASLKTPVXXAK

SEQ ID NO: 105499 - protein, 27 aa, Artificial Sequence
  Cyclic GFR-binding peptide
  MOD_RES (27)..(27): Xaa is C or S
MQYNKLVKPTRGVLYLISIASLDQPVX

SEQ ID NO: 105500 - protein, 22 aa, Artificial Sequence
  Cyclic GFR-binding peptide
RYKKLIKPTKGIFYLISIANLD

SEQ ID NO: 105501 - protein, 36 aa, Artificial Sequence; identical to SEQ ID NO: 2013
  Cyclic GFR-binding peptide
  MOD_RES (1)..(3)..(35)..(36): Xaa is C or S

SEQ ID NO: 105502 - protein, 24 aa, Artificial Sequence
  Cyclic GFR-binding peptide
VMDRYKKLVVNNAADFYLISIANL

SEQ ID NO: 105503 - protein, 33 aa, Artificial Sequence; identical to SEQ ID NO: 2016
  Cyclic GFR-binding peptide
  MOD_RES (2)..(4): Xaa is C or S

SEQ ID NO: 105504 - protein, 32 aa, Artificial Sequence; identical to SEQ ID NO: 2018
  Cyclic GFR-binding peptide
  MOD_RES (27)..(28): Xaa is C or S

SEQ ID NO: 105505 - protein, 31 aa, Artificial Sequence; identical to SEQ ID NO: 75878
  Cyclic GFR-binding peptide
  MOD_RES (26)..(27): Xaa is C or S

SEQ ID NO: 105506 - protein, 25 aa, Artificial Sequence
  Cyclic GFR-binding peptide
DRYKKLVVNNAADFYLISIANLRAP

SEQ ID NO: 105507 - protein, 30 aa, Artificial Sequence; identical to SEQ ID NO: 2022
  Cyclic GFR-binding peptide
  MOD_RES (1)..(3): Xaa is C or S

SEQ ID NO: 105508 - protein, 31 aa, Artificial Sequence; identical to SEQ ID NO: 2023
  Cyclic GFR-binding peptide
  MOD_RES (28)..(29): Xaa is C or S

SEQ ID NO: 105509 - protein, 38 aa, Artificial Sequence; identical to SEQ ID NO: 2024
  Cyclic GFR-binding peptide
  MOD_RES (33)..(34): Xaa is C or S

SEQ ID NO: 105510 - protein, 24 aa, Artificial Sequence
  Cyclic GFR-binding peptide
MDRYKKLVVNNASDFYLISIANLR

SEQ ID NO: 105511 - protein, 23 aa, Artificial Sequence
  Cyclic GFR-binding peptide
VIMQYNKLVKPKRGVLYLISIAS

SEQ ID NO: 105512 - protein, 36 aa, Artificial Sequence; identical to SEQ ID NO: 2028
  Cyclic GFR-binding peptide
  MOD_RES (30)..(30): Xaa is C or S

SEQ ID NO: 105513 - protein, 27 aa, Artificial Sequence
  Cyclic GFR-binding peptide
MDRYKKLVVKENEDFYLMSIANLETPV

SEQ ID NO: 105514 - protein, 29 aa, Artificial Sequence
  Cyclic GFR-binding peptide
GEVVMEQYNKLVVKDYEDLYLMSIASLET

SEQ ID NO: 105515 - protein, 40 aa, Artificial Sequence; identical to SEQ ID NO: 2034
  Cyclic GFR-binding peptide
  MOD_RES (2)..(4)..(36)..(37): Xaa is C or S

SEQ ID NO: 105516 - protein, 36 aa, Artificial Sequence
  Cyclic GFR-binding peptide
  MOD_RES (30)..(31): Xaa is C or S
VTMNQYNKLVVNKNEDLYLISIASMKEPVXXPEPIG

SEQ ID NO: 105517 - protein, 36 aa, Artificial Sequence
  Cyclic GFR-binding peptide
  MOD_RES (2)..(34)..(35): Xaa is C or S
GXRDVVMGQYNKLIIQQKDNLYLMSIASMKTPTXXP

SEQ ID NO: 105518 - protein, 26 aa, Artificial Sequence
  Cyclic GFR-binding peptide
  MOD_RES (26)..(26): Xaa is C or S
QYNKLLLVRGNDLYLMSIASTKVPAX

SEQ ID NO: 105519 - protein, 31 aa, Artificial Sequence; identical to SEQ ID NO: 2039
  Cyclic GFR-binding peptide
  MOD_RES (30)..(31): Xaa is C or S

SEQ ID NO: 105520 - protein, 37 aa, Artificial Sequence; identical to SEQ ID NO: 12589
  Cyclic GFR-binding peptide
  MOD_RES (1)..(33)..(34): Xaa is C or S

SEQ ID NO: 105521 - protein, 32 aa, Artificial Sequence; identical to SEQ ID NO: 30197
  Cyclic GFR-binding peptide
  MOD_RES (32)..(32): Xaa is C or S

SEQ ID NO: 105522 - protein, 34 aa, Artificial Sequence; identical to SEQ ID NO: 84432
  Cyclic GFR-binding peptide
  MOD_RES (30)..(31): Xaa is C or S

SEQ ID NO: 105523 - protein, 30 aa, Artificial Sequence
  Cyclic GFR-binding peptide
EVTMNQYNKLVVNKNEDLYLISIASMKEPV

SEQ ID NO: 105524 - protein, 35 aa, Artificial Sequence; identical to SEQ ID NO: 2041
  Cyclic GFR-binding peptide
  MOD_RES (1)..(34)..(35): Xaa is C or S

SEQ ID NO: 105525 - protein, 40 aa, Artificial Sequence; identical to SEQ ID NO: 2042
  Cyclic GFR-binding peptide
  MOD_RES (1)..(3)..(35)..(36): Xaa is C or S

SEQ ID NO: 105526 - protein, 32 aa, Artificial Sequence
  Cyclic GFR-binding peptide
  MOD_RES (26)..(27): Xaa is C or S
QYNKLVVNKNEDLYLISIASMKEPVXXPEPIG

SEQ ID NO: 105527 - protein, 40 aa, Artificial Sequence
  Cyclic GFR-binding peptide
  MOD_RES (2)..(34)..(35): Xaa is C or S
AXSEVTMNQYNKLVVNKNEDLYLISIASMKEPVXXPEPIG

SEQ ID NO: 105528 - protein, 33 aa, Artificial Sequence; identical to SEQ ID NO: 84436
  Cyclic GFR-binding peptide
  MOD_RES (1)..(33): Xaa is C or S

SEQ ID NO: 105529 - protein, 34 aa, Artificial Sequence
  Cyclic GFR-binding peptide
  MOD_RES (2)..(4): Xaa is C or S
RXGXESVAMGQYNKLYTVVGKDLYLISIASLKTP

SEQ ID NO: 105530 - protein, 27 aa, Artificial Sequence
  Cyclic GFR-binding peptide
ESVAMGQYNKLYTVVGKDLYLISIASL

SEQ ID NO: 105531 - protein, 26 aa, Artificial Sequence
  Cyclic GFR-binding peptide
AKVVMNRYKKLIVNNSSDFYLVSIAN

SEQ ID NO: 105532 - protein, 33 aa, Artificial Sequence
  Cyclic GFR-binding peptide
  MOD_RES (2)..(2): Xaa is C or S
AXSEVTMNQYNKLVVNKNEDLYLISIASMKEPV

SEQ ID NO: 105533 - protein, 22 aa, Artificial Sequence
  Cyclic GFR-binding peptide
MRYKKLVKPTRGVFYLISIANL

SEQ ID NO: 105534 - protein, 34 aa, Artificial Sequence; identical to SEQ ID NO: 84447
  Cyclic GFR-binding peptide
  MOD_RES (1)..(33)..(34): Xaa is C or S

SEQ ID NO: 105535 - protein, 26 aa, Artificial Sequence
  Cyclic GFR-binding peptide
RVVMNQYNKLIVNSSDDLYLVSIASL

SEQ ID NO: 105536 - protein, 32 aa, Artificial Sequence; identical to SEQ ID NO: 2059
  Cyclic GFR-binding peptide
  MOD_RES (29)..(30): Xaa is C or S

SEQ ID NO: 105537 - protein, 42 aa, Artificial Sequence; identical to SEQ ID NO: 2061
  Cyclic GFR-binding peptide
  MOD_RES (2)..(4)..(36)..(37): Xaa is C or S

SEQ ID NO: 105538 - protein, 24 aa, Artificial Sequence
  Cyclic GFR-binding peptide
ERYKKLTPVGMDDFYLVSIANLKT

SEQ ID NO: 105539 - protein, 33 aa, Artificial Sequence; identical to SEQ ID NO: 2064
  Cyclic GFR-binding peptide
  MOD_RES (27)..(28): Xaa is C or S

SEQ ID NO: 105540 - protein, 25 aa, Artificial Sequence
  Cyclic GFR-binding peptide
NQYNKLIVNSSDDLYLVSIASLQTP

SEQ ID NO: 105541 - protein, 36 aa, Artificial Sequence
  Cyclic GFR-binding peptide
  MOD_RES (31)..(32): Xaa is C or S
EEVIMQYNKLLLVRGNDLYLMSIASTKVPAXXTSPV

SEQ ID NO: 105542 - protein, 30 aa, Artificial Sequence
  Cyclic GFR-binding peptide
  MOD_RES (2)..(2): Xaa is C or S
GXESVAMGQYNKLYTVVGKDLYLISIASLK

SEQ ID NO: 105543 - protein, 33 aa, Artificial Sequence; identical to SEQ ID NO: 2067
  Cyclic GFR-binding peptide
  MOD_RES (1)..(32)..(33): Xaa is C or S

SEQ ID NO: 105544 - protein, 28 aa, Artificial Sequence
  Cyclic GFR-binding peptide
  MOD_RES (26)..(27): Xaa is C or S
QYNKLIVNSSDDLYLVSIASLKTPAXXP

SEQ ID NO: 105545 - protein, 27 aa, Artificial Sequence
  Cyclic GFR-binding peptide
RVVMNQYNKLIVNSSDDLYLVSIASLQ

SEQ ID NO: 105546 - protein, 33 aa, Artificial Sequence; identical to SEQ ID NO: 2075
  Cyclic GFR-binding peptide
  MOD_RES (29)..(30): Xaa is C or S

SEQ ID NO: 105547 - protein, 22 aa, Artificial Sequence
  Cyclic GFR-binding peptide
IMRYKKLVKPKRGVFYLISIAN

SEQ ID NO: 105548 - protein, 33 aa, Artificial Sequence; identical to SEQ ID NO: 2078
  Cyclic GFR-binding peptide
  MOD_RES (33)..(33): Xaa is C or S

SEQ ID NO: 105549 - protein, 30 aa, Artificial Sequence; identical to SEQ ID NO: 2080
  Cyclic GFR-binding peptide
  MOD_RES (1)..(1): Xaa is C or S

SEQ ID NO: 105550 - protein, 32 aa, Artificial Sequence
  Cyclic GFR-binding peptide
  MOD_RES (28)..(29): Xaa is C or S
MGQYNKLIIQQKDNLYLMSIASMKTPTXXPGA

SEQ ID NO: 105551 - protein, 32 aa, Artificial Sequence; identical to SEQ ID NO: 2081
  Cyclic GFR-binding peptide
  MOD_RES (30)..(30): Xaa is C or S

SEQ ID NO: 105552 - protein, 27 aa, Artificial Sequence
  Cyclic GFR-binding peptide
  MOD_RES (2)..(2): Xaa is C or S
KXSRVIMRYKKLVKPKRGVFYLISIAN

SEQ ID NO: 105553 - protein, 33 aa, Artificial Sequence; identical to SEQ ID NO: 2084
  Cyclic GFR-binding peptide
  MOD_RES (31)..(32): Xaa is C or S

SEQ ID NO: 105554 - protein, 33 aa, Artificial Sequence; identical to SEQ ID NO: 2086
  Cyclic GFR-binding peptide
  MOD_RES (31)..(32): Xaa is C or S

SEQ ID NO: 105555 - protein, 27 aa, Artificial Sequence
  Cyclic GFR-binding peptide
VIMQYNKLVKPKRGVLYLISIASLAQP

SEQ ID NO: 105556 - protein, 35 aa, Artificial Sequence; identical to SEQ ID NO: 2090
  Cyclic GFR-binding peptide
  MOD_RES (31)..(32): Xaa is C or S

SEQ ID NO: 105557 - protein, 32 aa, Artificial Sequence; identical to SEQ ID NO: 2091
  Cyclic GFR-binding peptide
  MOD_RES (2)..(2): Xaa is C or S

SEQ ID NO: 105558 - protein, 30 aa, Artificial Sequence; identical to SEQ ID NO: 2092
  Cyclic GFR-binding peptide
  MOD_RES (28)..(29): Xaa is C or S

SEQ ID NO: 105559 - protein, 33 aa, Artificial Sequence; identical to SEQ ID NO: 2094
  Cyclic GFR-binding peptide
  MOD_RES (29)..(30): Xaa is C or S

SEQ ID NO: 105560 - protein, 25 aa, Artificial Sequence
  Cyclic GFR-binding peptide
VMDRYKKLVVNNASDFYLISIANLR

SEQ ID NO: 105561 - protein, 33 aa, Artificial Sequence; identical to SEQ ID NO: 2095
  Cyclic GFR-binding peptide
  MOD_RES (2)..(4): Xaa is C or S

SEQ ID NO: 105562 - protein, 31 aa, Artificial Sequence
  Cyclic GFR-binding peptide
  MOD_RES (2)..(4): Xaa is C or S
LXGXEEVIMQYNKLLLVRGNDLYLMSIASTK

SEQ ID NO: 105563 - protein, 38 aa, Artificial Sequence; identical to SEQ ID NO: 2096
  Cyclic GFR-binding peptide
  MOD_RES (1)..(3)..(35)..(36): Xaa is C or S

SEQ ID NO: 105564 - protein, 34 aa, Artificial Sequence; identical to SEQ ID NO: 2097
  Cyclic GFR-binding peptide
  MOD_RES (30)..(31): Xaa is C or S

SEQ ID NO: 105565 - protein, 36 aa, Artificial Sequence; identical to SEQ ID NO: 2098
  Cyclic GFR-binding peptide
  MOD_RES (2)..(4)..(36): Xaa is C or S

SEQ ID NO: 105566 - protein, 28 aa, Artificial Sequence
  Cyclic GFR-binding peptide
AVSMGERYKKLTPVGMDDFYLVSIANLK

SEQ ID NO: 105567 - protein, 24 aa, Artificial Sequence
  Cyclic GFR-binding peptide
RYKKLTPVGMDDFYLVSIANLKTP

SEQ ID NO: 105568 - protein, 33 aa, Artificial Sequence; identical to SEQ ID NO: 75925
  Cyclic GFR-binding peptide
  MOD_RES (30)..(31): Xaa is C or S

SEQ ID NO: 105569 - protein, 33 aa, Artificial Sequence; identical to SEQ ID NO: 2103
  Cyclic GFR-binding peptide
  MOD_RES (29)..(30): Xaa is C or S

SEQ ID NO: 105570 - protein, 32 aa, Artificial Sequence
  Cyclic GFR-binding peptide
  MOD_RES (27)..(28): Xaa is C or S
MQYNKLLLVRGNDLYLMSIASTKVPAXXTSPV

SEQ ID NO: 105571 - protein, 32 aa, Artificial Sequence; identical to SEQ ID NO: 2105
  Cyclic GFR-binding peptide
  MOD_RES (29)..(30): Xaa is C or S

SEQ ID NO: 105572 - protein, 35 aa, Artificial Sequence; identical to SEQ ID NO: 12658
  Cyclic GFR-binding peptide
  MOD_RES (31)..(32): Xaa is C or S

SEQ ID NO: 105573 - protein, 42 aa, Artificial Sequence; identical to SEQ ID NO: 2108
  Cyclic GFR-binding peptide
  MOD_RES (2)..(4)..(36)..(37): Xaa is C or S

SEQ ID NO: 105574 - protein, 28 aa, Artificial Sequence
  Cyclic GFR-binding peptide
  MOD_RES (28)..(28): Xaa is C or S
VMRYKKLVKPTRGVFYLISIANLDQPVX

SEQ ID NO: 105575 - protein, 32 aa, Artificial Sequence; identical to SEQ ID NO: 2113
  Cyclic GFR-binding peptide
  MOD_RES (30)..(31): Xaa is C or S

SEQ ID NO: 105576 - protein, 31 aa, Artificial Sequence; identical to SEQ ID NO: 75928
  Cyclic GFR-binding peptide
  MOD_RES (31)..(31): Xaa is C or S

SEQ ID NO: 105577 - protein, 28 aa, Artificial Sequence
  Cyclic GFR-binding peptide
  MOD_RES (28)..(28): Xaa is C or S
MGRYKKLYTVVGKDFYLISIANLKTPVX

SEQ ID NO: 105578 - protein, 42 aa, Artificial Sequence; identical to SEQ ID NO: 2114
  Cyclic GFR-binding peptide
  MOD_RES (2)..(4)..(36)..(37): Xaa is C or S

SEQ ID NO: 105579 - protein, 39 aa, Artificial Sequence
  Cyclic GFR-binding peptide
  MOD_RES (2)..(33)..(34): Xaa is C or S
GXEEVIMQYNKLLLVRGNDLYLMSIASTKVPAXXTSPVR

SEQ ID NO: 105580 - protein, 41 aa, Artificial Sequence; identical to SEQ ID NO: 2121
  Cyclic GFR-binding peptide
  MOD_RES (2)..(35)..(36): Xaa is C or S

SEQ ID NO: 105581 - protein, 28 aa, Artificial Sequence
  Cyclic GFR-binding peptide
EEVIMQYNKLLLVRGNDLYLMSIASTKV

SEQ ID NO: 105582 - protein, 32 aa, Artificial Sequence; identical to SEQ ID NO: 2124
  Cyclic GFR-binding peptide
  MOD_RES (1)..(1): Xaa is C or S

SEQ ID NO: 105583 - protein, 33 aa, Artificial Sequence; identical to SEQ ID NO: 2126
  Cyclic GFR-binding peptide
  MOD_RES (2)..(33): Xaa is C or S

SEQ ID NO: 105584 - protein, 31 aa, Artificial Sequence; identical to SEQ ID NO: 2127
  Cyclic GFR-binding peptide
  MOD_RES (2)..(2): Xaa is C or S

SEQ ID NO: 105585 - protein, 30 aa, Artificial Sequence; identical to SEQ ID NO: 2128
  Cyclic GFR-binding peptide
  MOD_RES (29)..(30): Xaa is C or S

SEQ ID NO: 105586 - protein, 38 aa, Artificial Sequence; identical to SEQ ID NO: 75938
  Cyclic GFR-binding peptide
  MOD_RES (32)..(33): Xaa is C or S

SEQ ID NO: 105587 - protein, 32 aa, Artificial Sequence; identical to SEQ ID NO: 2131
  Cyclic GFR-binding peptide
  MOD_RES (30)..(31): Xaa is C or S

SEQ ID NO: 105588 - protein, 29 aa, Artificial Sequence
  Cyclic GFR-binding peptide
  MOD_RES (26)..(27): Xaa is C or S
QYNKLIVNSSDDLYLVSIASLQTPAXXPK

SEQ ID NO: 105589 - protein, 34 aa, Artificial Sequence; identical to SEQ ID NO: 2137
  Cyclic GFR-binding peptide
  MOD_RES (30)..(31): Xaa is C or S

SEQ ID NO: 105590 - protein, 36 aa, Artificial Sequence; identical to SEQ ID NO: 2138
  Cyclic GFR-binding peptide
  MOD_RES (2)..(4)..(36): Xaa is C or S

SEQ ID NO: 105591 - protein, 27 aa, Artificial Sequence
  Cyclic GFR-binding peptide
SEVVMDRYKKLVVNNASDFYLISIANL

SEQ ID NO: 105592 - protein, 24 aa, Artificial Sequence
  Cyclic GFR-binding peptide
VIMQYNKLLLVRGNDLYLMSIAST

SEQ ID NO: 105593 - protein, 26 aa, Artificial Sequence
  Cyclic GFR-binding peptide
  MOD_RES (26)..(26): Xaa is C or S
RYKKLVKPKRGVFYLISIANLAQPVX

SEQ ID NO: 105594 - protein, 27 aa, Artificial Sequence
  Cyclic GFR-binding peptide
  MOD_RES (27)..(27): Xaa is C or S
DQYNKLVVNNASDLYLISIASLRTPVX

SEQ ID NO: 105595 - protein, 26 aa, Artificial Sequence
  Cyclic GFR-binding peptide
KVIMRYKKLIKPTKGIFYLISIANLD

SEQ ID NO: 105596 - protein, 23 aa, Artificial Sequence
  Cyclic GFR-binding peptide
VVMQYNKLVKPTRGVLYLISIAS

SEQ ID NO: 105597 - protein, 27 aa, Artificial Sequence
  Cyclic GFR-binding peptide
MGQYNKLYTVVGKDLYLISIASLKTPV

SEQ ID NO: 105598 - protein, 31 aa, Artificial Sequence; identical to SEQ ID NO: 2151
  Cyclic GFR-binding peptide
  MOD_RES (29)..(30): Xaa is C or S

SEQ ID NO: 105599 - protein, 32 aa, Artificial Sequence
  Cyclic GFR-binding peptide
  MOD_RES (29)..(30): Xaa is C or S
AMGQYNKLYTVVGKDLYLISIASLKTPVXXAK

SEQ ID NO: 105600 - protein, 28 aa, Artificial Sequence
  Cyclic GFR-binding peptide
  MOD_RES (28)..(28): Xaa is C or S
GEQYNKLTPVGMDDLYLVSIASLKTPVX

SEQ ID NO: 105601 - protein, 26 aa, Artificial Sequence
  Cyclic GFR-binding peptide
VVMDRYKKLVVKENEDFYLMSIANLE

SEQ ID NO: 105602 - protein, 30 aa, Artificial Sequence; identical to SEQ ID NO: 12703
  Cyclic GFR-binding peptide
  MOD_RES (2)..(4): Xaa is C or S

SEQ ID NO: 105603 - protein, 29 aa, Artificial Sequence
  Cyclic GFR-binding peptide
  MOD_RES (28)..(29): Xaa is C or S
MNQYNKLIVNSSDDLYLVSIASLQTPAXX

SEQ ID NO: 105604 - protein, 30 aa, Artificial Sequence; identical to SEQ ID NO: 2158
  Cyclic GFR-binding peptide
  MOD_RES (1)..(1): Xaa is C or S

SEQ ID NO: 105605 - protein, 32 aa, Artificial Sequence
  Cyclic GFR-binding peptide
  MOD_RES (30)..(31): Xaa is C or S
VVMGQYNKLIIQQKDNLYLMSIASMKTPTXXP

SEQ ID NO: 105606 - protein, 31 aa, Artificial Sequence
  Cyclic GFR-binding peptide
  MOD_RES (27)..(28): Xaa is C or S
NQYNKLVVNKNEDLYLISIASMKEPVXXPEP

SEQ ID NO: 105607 - protein, 31 aa, Artificial Sequence; identical to SEQ ID NO: 2160
  Cyclic GFR-binding peptide
  MOD_RES (30)..(31): Xaa is C or S

SEQ ID NO: 105608 - protein, 29 aa, Artificial Sequence
  Cyclic GFR-binding peptide
SKVIMRYKKLIKPTKGIFYLISIANLDQS

SEQ ID NO: 105609 - protein, 36 aa, Artificial Sequence; identical to SEQ ID NO: 2164
  Cyclic GFR-binding peptide
  MOD_RES (2)..(34)..(35): Xaa is C or S

SEQ ID NO: 105610 - protein, 28 aa, Artificial Sequence
  Cyclic GFR-binding peptide
  MOD_RES (28)..(28): Xaa is C or S
MNQYNKLIVNSSDDLYLVSIASLKTPAX

SEQ ID NO: 105611 - protein, 25 aa, Artificial Sequence
  Cyclic GFR-binding peptide
RYKKLIIQQKDNFYLMSIANMKTPT

SEQ ID NO: 105612 - protein, 37 aa, Artificial Sequence; identical to SEQ ID NO: 2167
  Cyclic GFR-binding peptide
  MOD_RES (31)..(31): Xaa is C or S

SEQ ID NO: 105613 - protein, 28 aa, Artificial Sequence
  Cyclic GFR-binding peptide
  MOD_RES (27)..(28): Xaa is C or S
NRYKKLIVNNSSDFYLVSIANLKTPAXX

SEQ ID NO: 105614 - protein, 37 aa, Artificial Sequence; identical to SEQ ID NO: 75953
  Cyclic GFR-binding peptide
  MOD_RES (2)..(34)..(35): Xaa is C or S

SEQ ID NO: 105615 - protein, 30 aa, Artificial Sequence; identical to SEQ ID NO: 30326
  Cyclic GFR-binding peptide

SEQ ID NO: 105616 - protein, 32 aa, Artificial Sequence; identical to SEQ ID NO: 12716
  Cyclic GFR-binding peptide
  MOD_RES (32)..(32): Xaa is C or S

SEQ ID NO: 105617 - protein, 31 aa, Artificial Sequence; identical to SEQ ID NO: 2175
  Cyclic GFR-binding peptide
  MOD_RES (27)..(28): Xaa is C or S

SEQ ID NO: 105618 - protein, 29 aa, Artificial Sequence
  Cyclic GFR-binding peptide
SEVTMNQYNKLVVNKNEDLYLISIASMKE

SEQ ID NO: 105619 - protein, 24 aa, Artificial Sequence
  Cyclic GFR-binding peptide
QYNKLIIQQKDNLYLMSIASMKTP

SEQ ID NO: 105620 - protein, 29 aa, Artificial Sequence
  Cyclic GFR-binding peptide
KVVMNRYKKLIVNNSSDFYLVSIANLKTP

SEQ ID NO: 105621 - protein, 34 aa, Artificial Sequence; identical to SEQ ID NO: 2187
  Cyclic GFR-binding peptide
  MOD_RES (2)..(2): Xaa is C or S

SEQ ID NO: 105622 - protein, 40 aa, Artificial Sequence; identical to SEQ ID NO: 75961
  Cyclic GFR-binding peptide
  MOD_RES (2)..(4)..(36)..(37): Xaa is C or S

SEQ ID NO: 105623 - protein, 27 aa, Artificial Sequence
  Cyclic GFR-binding peptide
EVVMDRYKKLVVNNAADFYLISIANLR

SEQ ID NO: 105624 - protein, 36 aa, Artificial Sequence
  Cyclic GFR-binding peptide
  MOD_RES (32)..(33): Xaa is C or S
SEVTMNQYNKLVVNKNEDLYLISIASMKEPVXXPEP

SEQ ID NO: 105625 - protein, 21 aa, Artificial Sequence
  Cyclic GFR-binding peptide
MQYNKLIKPTKGILYLISIAS

SEQ ID NO: 105626 - protein, 27 aa, Artificial Sequence
  Cyclic GFR-binding peptide
KVVMNQYNKLIVNNSSDLYLVSIASLK

SEQ ID NO: 105627 - protein, 32 aa, Artificial Sequence; identical to SEQ ID NO: 2194
  Cyclic GFR-binding peptide
  MOD_RES (2)..(4): Xaa is C or S

SEQ ID NO: 105628 - protein, 34 aa, Artificial Sequence; identical to SEQ ID NO: 12734
  Cyclic GFR-binding peptide
  MOD_RES (28)..(29): Xaa is C or S

SEQ ID NO: 105629 - protein, 22 aa, Artificial Sequence
  Cyclic GFR-binding peptide
MQYNKLVKPKRGVLYLISIASL

SEQ ID NO: 105630 - protein, 33 aa, Artificial Sequence; identical to SEQ ID NO: 12736
  Cyclic GFR-binding peptide
  MOD_RES (30)..(31): Xaa is C or S

SEQ ID NO: 105631 - protein, 29 aa, Artificial Sequence
  Cyclic GFR-binding peptide
  MOD_RES (1)..(3): Xaa is C or S
XKXSRVIMQYNKLVKPKRGVLYLISIASL

SEQ ID NO: 105632 - protein, 40 aa, Artificial Sequence
  Cyclic GFR-binding peptide
  MOD_RES (2)..(4)..(35)..(36): Xaa is C or S
LXGXEEVIMQYNKLLLVRGNDLYLMSIASTKVPAXXTSPV

SEQ ID NO: 105633 - protein, 30 aa, Artificial Sequence; identical to SEQ ID NO: 75968
  Cyclic GFR-binding peptide
  MOD_RES (30)..(30): Xaa is C or S

SEQ ID NO: 105634 - protein, 29 aa, Artificial Sequence
  Cyclic GFR-binding peptide
  MOD_RES (1)..(1): Xaa is C or S
XSEVVMDRYKKLVVNNASDFYLISIANLR

SEQ ID NO: 105635 - protein, 36 aa, Artificial Sequence; identical to SEQ ID NO: 2198
  Cyclic GFR-binding peptide
  MOD_RES (2)..(4)..(36): Xaa is C or S

SEQ ID NO: 105636 - protein, 32 aa, Artificial Sequence; identical to SEQ ID NO: 2200
  Cyclic GFR-binding peptide
  MOD_RES (29)..(30): Xaa is C or S

SEQ ID NO: 105637 - protein, 39 aa, Artificial Sequence; identical to SEQ ID NO: 2202
  Cyclic GFR-binding peptide
  MOD_RES (33)..(34): Xaa is C or S

SEQ ID NO: 105638 - protein, 23 aa, Artificial Sequence
  Cyclic GFR-binding peptide
MRYKKLIKPTKGIFYLISIANLD

SEQ ID NO: 105639 - protein, 41 aa, Artificial Sequence
  Cyclic GFR-binding peptide
  MOD_RES (2)..(4)..(36)..(37): Xaa is C or S
RXGXAEVVMDQYNKLVVNNAADLYLISIASLRAPVXXSAPA

SEQ ID NO: 105640 - protein, 39 aa, Artificial Sequence; identical to SEQ ID NO: 2205
  Cyclic GFR-binding peptide
  MOD_RES (1)..(33)..(34): Xaa is C or S

SEQ ID NO: 105641 - protein, 37 aa, Artificial Sequence; identical to SEQ ID NO: 12746
  Cyclic GFR-binding peptide
  MOD_RES (2)..(34)..(35): Xaa is C or S

SEQ ID NO: 105642 - protein, 25 aa, Artificial Sequence
  Cyclic GFR-binding peptide
RYKKLVKPTRGVFYLISIANLDQPV

SEQ ID NO: 105643 - protein, 37 aa, Artificial Sequence; identical to SEQ ID NO: 84574
  Cyclic GFR-binding peptide
  MOD_RES (1)..(33)..(34): Xaa is C or S

SEQ ID NO: 105644 - protein, 27 aa, Artificial Sequence
  Cyclic GFR-binding peptide
AEVVMDRYKKLVVNNAADFYLISIANL

SEQ ID NO: 105645 - protein, 30 aa, Artificial Sequence; identical to SEQ ID NO: 12750
  Cyclic GFR-binding peptide
  MOD_RES (28)..(29): Xaa is C or S

SEQ ID NO: 105646 - protein, 39 aa, Artificial Sequence
  Cyclic GFR-binding peptide
  MOD_RES (2)..(34)..(35): Xaa is C or S
GXAEVVMDQYNKLVVNNAADLYLISIASLRAPVXXSAPA

SEQ ID NO: 105647 - protein, 32 aa, Artificial Sequence
  Cyclic GFR-binding peptide
  MOD_RES (27)..(28): Xaa is C or S
GQYNKLIIQQKDNLYLMSIASMKTPTXXPGAS

SEQ ID NO: 105648 - protein, 32 aa, Artificial Sequence; identical to SEQ ID NO: 2213
  Cyclic GFR-binding peptide
  MOD_RES (27)..(28): Xaa is C or S

SEQ ID NO: 105649 - protein, 29 aa, Artificial Sequence
  Cyclic GFR-binding peptide
  MOD_RES (26)..(27): Xaa is C or S
QYNKLIKPTKGILYLISIASLDQSVXXPS

SEQ ID NO: 105650 - protein, 36 aa, Artificial Sequence; identical to SEQ ID NO: 75980
  Cyclic GFR-binding peptide
  MOD_RES (30)..(31): Xaa is C or S

SEQ ID NO: 105651 - protein, 23 aa, Artificial Sequence
  Cyclic GFR-binding peptide
VIMRYKKLIKPTKGIFYLISIAN

SEQ ID NO: 105652 - protein, 32 aa, Artificial Sequence; identical to SEQ ID NO: 2217
  Cyclic GFR-binding peptide
  MOD_RES (29)..(30): Xaa is C or S

SEQ ID NO: 105653 - protein, 37 aa, Artificial Sequence; identical to SEQ ID NO: 2218
  Cyclic GFR-binding peptide
  MOD_RES (1)..(32)..(33): Xaa is C or S

SEQ ID NO: 105654 - protein, 37 aa, Artificial Sequence; identical to SEQ ID NO: 2221
  Cyclic GFR-binding peptide
  MOD_RES (1)..(32)..(33): Xaa is C or S

SEQ ID NO: 105655 - protein, 21 aa, Artificial Sequence
  Cyclic GFR-binding peptide
QYNKLVVNNASDLYLISIASL

SEQ ID NO: 105656 - protein, 34 aa, Artificial Sequence; identical to SEQ ID NO: 2226
  Cyclic GFR-binding peptide
  MOD_RES (32)..(33): Xaa is C or S

SEQ ID NO: 105657 - protein, 33 aa, Artificial Sequence
  Cyclic GFR-binding peptide
  MOD_RES (31)..(32): Xaa is C or S
DVVMGQYNKLIIQQKDNLYLMSIASMKTPTXXP

SEQ ID NO: 105658 - protein, 27 aa, Artificial Sequence
  Cyclic GFR-binding peptide
EVIMQYNKLLLVRGNDLYLMSIASTKV

SEQ ID NO: 105659 - protein, 30 aa, Artificial Sequence; identical to SEQ ID NO: 2231
  Cyclic GFR-binding peptide
  MOD_RES (2)..(4): Xaa is C or S

SEQ ID NO: 105660 - protein, 37 aa, Artificial Sequence
  Cyclic GFR-binding peptide
  MOD_RES (32)..(33): Xaa is C or S
SEVTMNQYNKLVVNKNEDLYLISIASMKEPVXXPEPI

SEQ ID NO: 105661 - protein, 25 aa, Artificial Sequence
  Cyclic GFR-binding peptide
RYKKLVVNNAADFYLISIANLRAPV

SEQ ID NO: 105662 - protein, 34 aa, Artificial Sequence; identical to SEQ ID NO: 2236
  Cyclic GFR-binding peptide
  MOD_RES (29)..(30): Xaa is C or S

SEQ ID NO: 105663 - protein, 24 aa, Artificial Sequence
  Cyclic GFR-binding peptide
RVIMRYKKLVKPKRGVFYLISIAN

SEQ ID NO: 105664 - protein, 28 aa, Artificial Sequence
  Cyclic GFR-binding peptide
VMNQYNKLIVNNSSDLYLVSIASLKTPA

SEQ ID NO: 105665 - protein, 35 aa, Artificial Sequence; identical to SEQ ID NO: 2241
  Cyclic GFR-binding peptide
  MOD_RES (2)..(4): Xaa is C or S

SEQ ID NO: 105666 - protein, 35 aa, Artificial Sequence; identical to SEQ ID NO: 30392
  Cyclic GFR-binding peptide
  MOD_RES (31)..(32): Xaa is C or S

SEQ ID NO: 105667 - protein, 29 aa, Artificial Sequence
  Cyclic GFR-binding peptide
  MOD_RES (27)..(28): Xaa is C or S
DQYNKLVVNNAADLYLISIASLRAPVXXS

SEQ ID NO: 105668 - protein, 32 aa, Artificial Sequence
  Cyclic GFR-binding peptide
  MOD_RES (26)..(27): Xaa is C or S
QYNKLYTVVGKDLYLISIASLKTPVXXAKSAK

SEQ ID NO: 105669 - protein, 30 aa, Artificial Sequence; identical to SEQ ID NO: 2246
  Cyclic GFR-binding peptide
  MOD_RES (27)..(28): Xaa is C or S

SEQ ID NO: 105670 - protein, 39 aa, Artificial Sequence; identical to SEQ ID NO: 30395
  Cyclic GFR-binding peptide
  MOD_RES (1)..(33)..(34): Xaa is C or S

SEQ ID NO: 105671 - protein, 22 aa, Artificial Sequence
  Cyclic GFR-binding peptide
MNRYKKLIVNSSDDFYLVSIAN

SEQ ID NO: 105672 - protein, 28 aa, Artificial Sequence
  Cyclic GFR-binding peptide
VIMQYNKLLLVRGNDLYLMSIASTKVPA

SEQ ID NO: 105673 - protein, 33 aa, Artificial Sequence; identical to SEQ ID NO: 2251
  Cyclic GFR-binding peptide
  MOD_RES (31)..(32): Xaa is C or S

SEQ ID NO: 105674 - protein, 24 aa, Artificial Sequence
  Cyclic GFR-binding peptide
VIMQYNKLIKPTKGILYLISIASL

SEQ ID NO: 105675 - protein, 32 aa, Artificial Sequence; identical to SEQ ID NO: 2253
  Cyclic GFR-binding peptide
  MOD_RES (26)..(27): Xaa is C or S

SEQ ID NO: 105676 - protein, 36 aa, Artificial Sequence; identical to SEQ ID NO: 2255
  Cyclic GFR-binding peptide
  MOD_RES (1)..(3)..(35)..(36): Xaa is C or S

SEQ ID NO: 105677 - protein, 29 aa, Artificial Sequence
  Cyclic GFR-binding peptide
  MOD_RES (2)..(4): Xaa is C or S
SXKXSKVVMRYKKLVKPTRGVFYLISIAN

SEQ ID NO: 105678 - protein, 31 aa, Artificial Sequence; identical to SEQ ID NO: 76002
  Cyclic GFR-binding peptide
  MOD_RES (30)..(31): Xaa is C or S

SEQ ID NO: 105679 - protein, 37 aa, Artificial Sequence; identical to SEQ ID NO: 2258
  Cyclic GFR-binding peptide
  MOD_RES (2)..(4)..(36)..(37): Xaa is C or S

SEQ ID NO: 105680 - protein, 35 aa, Artificial Sequence; identical to SEQ ID NO: 2260
  Cyclic GFR-binding peptide
  MOD_RES (29)..(30): Xaa is C or S

SEQ ID NO: 105681 - protein, 41 aa, Artificial Sequence; identical to SEQ ID NO: 30409
  Cyclic GFR-binding peptide
  MOD_RES (1)..(3)..(35)..(36): Xaa is C or S

SEQ ID NO: 105682 - protein, 31 aa, Artificial Sequence; identical to SEQ ID NO: 2262
  Cyclic GFR-binding peptide
  MOD_RES (2)..(4): Xaa is C or S

SEQ ID NO: 105683 - protein, 37 aa, Artificial Sequence; identical to SEQ ID NO: 2265
  Cyclic GFR-binding peptide
  MOD_RES (1)..(3)..(34)..(35): Xaa is C or S

SEQ ID NO: 105684 - protein, 32 aa, Artificial Sequence; identical to SEQ ID NO: 2266
  Cyclic GFR-binding peptide
  MOD_RES (27)..(28): Xaa is C or S

SEQ ID NO: 105685 - protein, 28 aa, Artificial Sequence
  Cyclic GFR-binding peptide
ESVAMGRYKKLYTVVGKDFYLISIANLK

SEQ ID NO: 105686 - protein, 34 aa, Artificial Sequence; identical to SEQ ID NO: 76010
  Cyclic GFR-binding peptide
  MOD_RES (29)..(30): Xaa is C or S

SEQ ID NO: 105687 - protein, 38 aa, Artificial Sequence; identical to SEQ ID NO: 2267
  Cyclic GFR-binding peptide
  MOD_RES (32)..(33): Xaa is C or S

SEQ ID NO: 105688 - protein, 36 aa, Artificial Sequence; identical to SEQ ID NO: 2269
  Cyclic GFR-binding peptide
  MOD_RES (2)..(33)..(34): Xaa is C or S

SEQ ID NO: 105689 - protein, 34 aa, Artificial Sequence; identical to SEQ ID NO: 2270
  Cyclic GFR-binding peptide
  MOD_RES (29)..(30): Xaa is C or S

SEQ ID NO: 105690 - protein, 32 aa, Artificial Sequence; identical to SEQ ID NO: 12805
  Cyclic GFR-binding peptide
  MOD_RES (27)..(28): Xaa is C or S

SEQ ID NO: 105691 - protein, 31 aa, Artificial Sequence; identical to SEQ ID NO: 12806
  Cyclic GFR-binding peptide
  MOD_RES (2)..(4): Xaa is C or S

SEQ ID NO: 105692 - protein, 26 aa, Artificial Sequence
  Cyclic GFR-binding peptide
EVVMDQYNKLVVNNASDLYLISIASL

SEQ ID NO: 105693 - protein, 26 aa, Artificial Sequence
  Cyclic GFR-binding peptide
NQYNKLIVNSSDDLYLVSIASLQTPA

SEQ ID NO: 105694 - protein, 29 aa, Artificial Sequence
  Cyclic GFR-binding peptide
VVMDQYNKLVVNNASDLYLISIASLRTPV

SEQ ID NO: 105695 - protein, 36 aa, Artificial Sequence; identical to SEQ ID NO: 2276
  Cyclic GFR-binding peptide
  MOD_RES (1)..(3)..(34)..(35): Xaa is C or S

SEQ ID NO: 105696 - protein, 25 aa, Artificial Sequence
  Cyclic GFR-binding peptide
RYKKLIVNNSSDFYLVSIANLKTPA

SEQ ID NO: 105697 - protein, 30 aa, Artificial Sequence; identical to SEQ ID NO: 2279
  Cyclic GFR-binding peptide
  MOD_RES (30)..(30): Xaa is C or S

SEQ ID NO: 105698 - protein, 32 aa, Artificial Sequence; identical to SEQ ID NO: 2281
  Cyclic GFR-binding peptide
  MOD_RES (29)..(30): Xaa is C or S

SEQ ID NO: 105699 - protein, 25 aa, Artificial Sequence
  Cyclic GFR-binding peptide
VIMRYKKLLLVRGNDFYLMSIANTK

SEQ ID NO: 105700 - protein, 40 aa, Artificial Sequence; identical to SEQ ID NO: 12818
  Cyclic GFR-binding peptide
  MOD_RES (1)..(3)..(35)..(36): Xaa is C or S

SEQ ID NO: 105701 - protein, 30 aa, Artificial Sequence; identical to SEQ ID NO: 2284
  Cyclic GFR-binding peptide
  MOD_RES (27)..(28): Xaa is C or S

SEQ ID NO: 105702 - protein, 36 aa, Artificial Sequence; identical to SEQ ID NO: 2285
  Cyclic GFR-binding peptide
  MOD_RES (2)..(4)..(36): Xaa is C or S

SEQ ID NO: 105703 - protein, 30 aa, Artificial Sequence
  Cyclic GFR-binding peptide
  MOD_RES (1)..(3): Xaa is C or S
XGXEEVIMQYNKLLLVRGNDLYLMSIASTK

SEQ ID NO: 105704 - protein, 28 aa, Artificial Sequence
  Cyclic GFR-binding peptide
EVVMDQYNKLVVNNAADLYLISIASLRA

SEQ ID NO: 105705 - protein, 40 aa, Artificial Sequence; identical to SEQ ID NO: 84643
  Cyclic GFR-binding peptide
  MOD_RES (1)..(3)..(35)..(36): Xaa is C or S

SEQ ID NO: 105706 - protein, 28 aa, Artificial Sequence
  Cyclic GFR-binding peptide
  MOD_RES (2)..(2): Xaa is C or S
KXSKVVMRYKKLVKPTRGVFYLISIANL

SEQ ID NO: 105707 - protein, 27 aa, Artificial Sequence
  Cyclic GFR-binding peptide
  MOD_RES (1)..(1): Xaa is C or S
XSRVVMNRYKKLIVNSSDDFYLVSIAN

SEQ ID NO: 105708 - protein, 29 aa, Artificial Sequence
  Cyclic GFR-binding peptide
  MOD_RES (28)..(29): Xaa is C or S
MGQYNKLIIQQKDNLYLMSIASMKTPTXX

SEQ ID NO: 105709 - protein, 23 aa, Artificial Sequence
  Cyclic GFR-binding peptide
QYNKLIVNSSDDLYLVSIASLQT

SEQ ID NO: 105710 - protein, 25 aa, Artificial Sequence
  Cyclic GFR-binding peptide
EVVMDQYNKLVVNNASDLYLISIAS

SEQ ID NO: 105711 - protein, 29 aa, Artificial Sequence
  Cyclic GFR-binding peptide
  MOD_RES (1)..(1): Xaa is C or S
XAKVVMNRYKKLIVNNSSDFYLVSIANLK

SEQ ID NO: 105712 - protein, 31 aa, Artificial Sequence; identical to SEQ ID NO: 2298
  Cyclic GFR-binding peptide
  MOD_RES (26)..(27): Xaa is C or S

SEQ ID NO: 105713 - protein, 31 aa, Artificial Sequence; identical to SEQ ID NO: 2300
  Cyclic GFR-binding peptide
  MOD_RES (31)..(31): Xaa is C or S

SEQ ID NO: 105714 - protein, 29 aa, Artificial Sequence
  Cyclic GFR-binding peptide
RVVMNQYNKLIVNSSDDLYLVSIASLQTP

SEQ ID NO: 105715 - protein, 36 aa, Artificial Sequence; identical to SEQ ID NO: 2302
  Cyclic GFR-binding peptide
  MOD_RES (33)..(34): Xaa is C or S

SEQ ID NO: 105716 - protein, 30 aa, Artificial Sequence; identical to SEQ ID NO: 2303
  Cyclic GFR-binding peptide
  MOD_RES (30)..(30): Xaa is C or S

SEQ ID NO: 105717 - protein, 36 aa, Artificial Sequence
  Cyclic GFR-binding peptide
  MOD_RES (2)..(4)..(36): Xaa is C or S
RXGXAEVVMDQYNKLVVNNAADLYLISIASLRAPVX

SEQ ID NO: 105718 - protein, 25 aa, Artificial Sequence
  Cyclic GFR-binding peptide
SKVVMRYKKLVKPTRGVFYLISIAN

SEQ ID NO: 105719 - protein, 24 aa, Artificial Sequence
  Cyclic GFR-binding peptide
MNRYKKLIVNSSDDFYLVSIANLK

SEQ ID NO: 105720 - protein, 29 aa, Artificial Sequence
  Cyclic GFR-binding peptide
  MOD_RES (29)..(29): Xaa is C or S
VIMQYNKLVKPKRGVLYLISIASLAQPVX

SEQ ID NO: 105721 - protein, 34 aa, Artificial Sequence; identical to SEQ ID NO: 2308
  Cyclic GFR-binding peptide
  MOD_RES (1)..(33)..(34): Xaa is C or S

SEQ ID NO: 105722 - protein, 28 aa, Artificial Sequence
  Cyclic GFR-binding peptide
SKVIMRYKKLIKPTKGIFYLISIANLDQ

SEQ ID NO: 105723 - protein, 40 aa, Artificial Sequence; identical to SEQ ID NO: 79482
  Cyclic GFR-binding peptide
  MOD_RES (2)..(34)..(35): Xaa is C or S

SEQ ID NO: 105724 - protein, 32 aa, Artificial Sequence; identical to SEQ ID NO: 30451
  Cyclic GFR-binding peptide
  MOD_RES (27)..(28): Xaa is C or S

SEQ ID NO: 105725 - protein, 27 aa, Artificial Sequence
  Cyclic GFR-binding peptide
VMGRYKKLIIQQKDNFYLMSIANMKTP

SEQ ID NO: 105726 - protein, 30 aa, Artificial Sequence; identical to SEQ ID NO: 2311
  Cyclic GFR-binding peptide
  MOD_RES (1)..(1): Xaa is C or S

SEQ ID NO: 105727 - protein, 35 aa, Artificial Sequence; identical to SEQ ID NO: 2312
  Cyclic GFR-binding peptide
  MOD_RES (29)..(30): Xaa is C or S

SEQ ID NO: 105728 - protein, 33 aa, Artificial Sequence; identical to SEQ ID NO: 12847
  Cyclic GFR-binding peptide
  MOD_RES (28)..(29): Xaa is C or S

SEQ ID NO: 105729 - protein, 39 aa, Artificial Sequence; identical to SEQ ID NO: 2313
  Cyclic GFR-binding peptide
  MOD_RES (2)..(34)..(35): Xaa is C or S

SEQ ID NO: 105730 - protein, 27 aa, Artificial Sequence
  Cyclic GFR-binding peptide
TMNQYNKLVVNKNEDLYLISIASMKEP

SEQ ID NO: 105731 - protein, 27 aa, Artificial Sequence
  Cyclic GFR-binding peptide
VVMNRYKKLIVNSSDDFYLVSIANLKT

SEQ ID NO: 105732 - protein, 27 aa, Artificial Sequence
  Cyclic GFR-binding peptide
  MOD_RES (1)..(1): Xaa is C or S
XGEVVMERYKKLVVKDYEDFYLMSIAN

SEQ ID NO: 105733 - protein, 29 aa, Artificial Sequence
  Cyclic GFR-binding peptide
KVVMQYNKLVKPTRGVLYLISIASLDQPV

SEQ ID NO: 105734 - protein, 34 aa, Artificial Sequence; identical to SEQ ID NO: 2319
  Cyclic GFR-binding peptide
  MOD_RES (29)..(30): Xaa is C or S

SEQ ID NO: 105735 - protein, 32 aa, Artificial Sequence; identical to SEQ ID NO: 2320
  Cyclic GFR-binding peptide
  MOD_RES (30)..(31): Xaa is C or S

SEQ ID NO: 105736 - protein, 28 aa, Artificial Sequence
  Cyclic GFR-binding peptide
  MOD_RES (26)..(27): Xaa is C or S
QYNKLVVKDYEDLYLMSIASLETPVXXA

SEQ ID NO: 105737 - protein, 24 aa, Artificial Sequence
  Cyclic GFR-binding peptide
VMDRYKKLVVNNASDFYLISIANL

SEQ ID NO: 105738 - protein, 23 aa, Artificial Sequence
  Cyclic GFR-binding peptide
VMDQYNKLVVNNAADLYLISIAS

SEQ ID NO: 105739 - protein, 34 aa, Artificial Sequence; identical to SEQ ID NO: 76049
  Cyclic GFR-binding peptide
  MOD_RES (31)..(32): Xaa is C or S

SEQ ID NO: 105740 - protein, 26 aa, Artificial Sequence
  Cyclic GFR-binding peptide
EVIMQYNKLLLVRGNDLYLMSIASTK

SEQ ID NO: 105741 - protein, 29 aa, Artificial Sequence
  Cyclic GFR-binding peptide
  MOD_RES (27)..(28): Xaa is C or S
NQYNKLVVNKNEDLYLISIASMKEPVXXP

SEQ ID NO: 105742 - protein, 26 aa, Artificial Sequence
  Cyclic GFR-binding peptide
MQYNKLLLVRGNDLYLMSIASTKVPA

SEQ ID NO: 105743 - protein, 34 aa, Artificial Sequence
  Cyclic GFR-binding peptide
  MOD_RES (31)..(32): Xaa is C or S
EVVMDQYNKLVVNNAADLYLISIASLRAPVXXSA

SEQ ID NO: 105744 - protein, 25 aa, Artificial Sequence
  Cyclic GFR-binding peptide
EVVMDQYNKLVVKENEDLYLMSIAS

SEQ ID NO: 105745 - protein, 32 aa, Artificial Sequence; identical to SEQ ID NO: 2334
  Cyclic GFR-binding peptide
  MOD_RES (2)..(2): Xaa is C or S

SEQ ID NO: 105746 - protein, 36 aa, Artificial Sequence; identical to SEQ ID NO: 2336
  Cyclic GFR-binding peptide
  MOD_RES (2)..(33)..(34): Xaa is C or S

SEQ ID NO: 105747 - protein, 40 aa, Artificial Sequence; identical to SEQ ID NO: 2337
  Cyclic GFR-binding peptide
  MOD_RES (2)..(34)..(35): Xaa is C or S

SEQ ID NO: 105748 - protein, 27 aa, Artificial Sequence
  Cyclic GFR-binding peptide
GEVVMEQYNKLVVKDYEDLYLMSIASL

SEQ ID NO: 105749 - protein, 30 aa, Artificial Sequence; identical to SEQ ID NO: 2340
  Cyclic GFR-binding peptide
  MOD_RES (26)..(27): Xaa is C or S

SEQ ID NO: 105750 - protein, 30 aa, Artificial Sequence; identical to SEQ ID NO: 12881
  Cyclic GFR-binding peptide

SEQ ID NO: 105751 - protein, 26 aa, Artificial Sequence
  Cyclic GFR-binding peptide
VIMQYNKLVKPKRGVLYLISIASLAQ

SEQ ID NO: 105752 - protein, 32 aa, Artificial Sequence; identical to SEQ ID NO: 76062
  Cyclic GFR-binding peptide
  MOD_RES (28)..(29): Xaa is C or S

SEQ ID NO: 105753 - protein, 31 aa, Artificial Sequence; identical to SEQ ID NO: 30496
  Cyclic GFR-binding peptide
  MOD_RES (26)..(27): Xaa is C or S

SEQ ID NO: 105754 - protein, 22 aa, Artificial Sequence
  Cyclic GFR-binding peptide
RYKKLVVKDYEDFYLMSIANLE

SEQ ID NO: 105755 - protein, 33 aa, Artificial Sequence; identical to SEQ ID NO: 12890
  Cyclic GFR-binding peptide
  MOD_RES (1)..(3): Xaa is C or S

SEQ ID NO: 105756 - protein, 35 aa, Artificial Sequence; identical to SEQ ID NO: 2358
  Cyclic GFR-binding peptide
  MOD_RES (1)..(33)..(34): Xaa is C or S

SEQ ID NO: 105757 - protein, 35 aa, Artificial Sequence; identical to SEQ ID NO: 2361
  Cyclic GFR-binding peptide
  MOD_RES (1)..(33)..(34): Xaa is C or S

SEQ ID NO: 105758 - protein, 31 aa, Artificial Sequence; identical to SEQ ID NO: 2362
  Cyclic GFR-binding peptide
  MOD_RES (27)..(28): Xaa is C or S

SEQ ID NO: 105759 - protein, 31 aa, Artificial Sequence; identical to SEQ ID NO: 2364
  Cyclic GFR-binding peptide
  MOD_RES (28)..(29): Xaa is C or S

SEQ ID NO: 105760 - protein, 38 aa, Artificial Sequence; identical to SEQ ID NO: 2365
  Cyclic GFR-binding peptide
  MOD_RES (2)..(34)..(35): Xaa is C or S

SEQ ID NO: 105761 - protein, 38 aa, Artificial Sequence
  Cyclic GFR-binding peptide
  MOD_RES (2)..(4)..(36)..(37): Xaa is C or S
SXGXRDVVMGQYNKLIIQQKDNLYLMSIASMKTPTXXP

SEQ ID NO: 105762 - protein, 36 aa, Artificial Sequence; identical to SEQ ID NO: 76069
  Cyclic GFR-binding peptide
  MOD_RES (31)..(32): Xaa is C or S

SEQ ID NO: 105763 - protein, 31 aa, Artificial Sequence; identical to SEQ ID NO: 2366
  Cyclic GFR-binding peptide
  MOD_RES (1)..(3): Xaa is C or S

SEQ ID NO: 105764 - protein, 32 aa, Artificial Sequence; identical to SEQ ID NO: 2368
  Cyclic GFR-binding peptide
  MOD_RES (1)..(1): Xaa is C or S

SEQ ID NO: 105765 - protein, 40 aa, Artificial Sequence; identical to SEQ ID NO: 30516
  Cyclic GFR-binding peptide
  MOD_RES (1)..(3)..(35)..(36): Xaa is C or S

SEQ ID NO: 105766 - protein, 40 aa, Artificial Sequence; identical to SEQ ID NO: 2370
  Cyclic GFR-binding peptide
  MOD_RES (2)..(4)..(35)..(36): Xaa is C or S

SEQ ID NO: 105767 - protein, 22 aa, Artificial Sequence
  Cyclic GFR-binding peptide
RYKKLVKPTRGVFYLISIANLD

SEQ ID NO: 105768 - protein, 28 aa, Artificial Sequence
  Cyclic GFR-binding peptide
SMGEQYNKLTPVGMDDLYLVSIASLKTP

SEQ ID NO: 105769 - protein, 30 aa, Artificial Sequence; identical to SEQ ID NO: 2374
  Cyclic GFR-binding peptide

SEQ ID NO: 105770 - protein, 32 aa, Artificial Sequence; identical to SEQ ID NO: 2375
  Cyclic GFR-binding peptide
  MOD_RES (1)..(1): Xaa is C or S

SEQ ID NO: 105771 - protein, 24 aa, Artificial Sequence
  Cyclic GFR-binding peptide
VAMGRYKKLYTVVGKDFYLISIAN

SEQ ID NO: 105772 - protein, 34 aa, Artificial Sequence; identical to SEQ ID NO: 2376
  Cyclic GFR-binding peptide
  MOD_RES (1)..(33): Xaa is C or S

SEQ ID NO: 105773 - protein, 27 aa, Artificial Sequence
  Cyclic GFR-binding peptide
VMDQYNKLVVNNAADLYLISIASLRAP

SEQ ID NO: 105774 - protein, 37 aa, Artificial Sequence
  Cyclic GFR-binding peptide
  MOD_RES (31)..(32): Xaa is C or S
EVTMNQYNKLVVNKNEDLYLISIASMKEPVXXPEPIG

SEQ ID NO: 105775 - protein, 29 aa, Artificial Sequence
  Cyclic GFR-binding peptide
VVMGRYKKLIIQQKDNFYLMSIANMKTPT

SEQ ID NO: 105776 - protein, 30 aa, Artificial Sequence
  Cyclic GFR-binding peptide
  MOD_RES (2)..(4): Xaa is C or S
RXGXAEVVMDQYNKLVVNNAADLYLISIAS

SEQ ID NO: 105777 - protein, 40 aa, Artificial Sequence; identical to SEQ ID NO: 2379
  Cyclic GFR-binding peptide
  MOD_RES (2)..(4)..(37)..(38): Xaa is C or S

SEQ ID NO: 105778 - protein, 42 aa, Artificial Sequence
  Cyclic GFR-binding peptide
  MOD_RES (2)..(4)..(36)..(37): Xaa is C or S
RXAXSEVTMNQYNKLVVNKNEDLYLISIASMKEPVXXPEPIG

SEQ ID NO: 105779 - protein, 32 aa, Artificial Sequence; identical to SEQ ID NO: 2382
  Cyclic GFR-binding peptide
  MOD_RES (1)..(3): Xaa is C or S

SEQ ID NO: 105780 - protein, 29 aa, Artificial Sequence
  Cyclic GFR-binding peptide
RVVMNRYKKLIVNSSDDFYLVSIANLKTP

SEQ ID NO: 105781 - protein, 28 aa, Artificial Sequence
  Cyclic GFR-binding peptide
  MOD_RES (2)..(2): Xaa is C or S
GXAKVVMNQYNKLIVNNSSDLYLVSIAS

SEQ ID NO: 105782 - protein, 26 aa, Artificial Sequence
  Cyclic GFR-binding peptide
  MOD_RES (26)..(26): Xaa is C or S
QYNKLIIQQKDNLYLMSIASMKTPTX

SEQ ID NO: 105783 - protein, 32 aa, Artificial Sequence; identical to SEQ ID NO: 30545
  Cyclic GFR-binding peptide
  MOD_RES (1)..(1): Xaa is C or S

SEQ ID NO: 105784 - protein, 38 aa, Artificial Sequence; identical to SEQ ID NO: 2391
  Cyclic GFR-binding peptide
  MOD_RES (1)..(32)..(33): Xaa is C or S

SEQ ID NO: 105785 - protein, 34 aa, Artificial Sequence; identical to SEQ ID NO: 2393
  Cyclic GFR-binding peptide
  MOD_RES (30)..(31): Xaa is C or S

SEQ ID NO: 105786 - protein, 39 aa, Artificial Sequence; identical to SEQ ID NO: 2394
  Cyclic GFR-binding peptide
  MOD_RES (1)..(33)..(34): Xaa is C or S

SEQ ID NO: 105787 - protein, 20 aa, Artificial Sequence
  Cyclic GFR-binding peptide
QYNKLTPVGMDDLYLVSIAS

SEQ ID NO: 105788 - protein, 33 aa, Artificial Sequence; identical to SEQ ID NO: 76087
  Cyclic GFR-binding peptide
  MOD_RES (1)..(3): Xaa is C or S

SEQ ID NO: 105789 - protein, 28 aa, Artificial Sequence
  Cyclic GFR-binding peptide
KVVMQYNKLVKPTRGVLYLISIASLDQP

SEQ ID NO: 105790 - protein, 21 aa, Artificial Sequence
  Cyclic GFR-binding peptide
RYKKLTPVGMDDFYLVSIANL

SEQ ID NO: 105791 - protein, 33 aa, Artificial Sequence
  Cyclic GFR-binding peptide
  MOD_RES (1)..(33): Xaa is C or S
XAEVVMDQYNKLVVNNAADLYLISIASLRAPVX

SEQ ID NO: 105792 - protein, 34 aa, Artificial Sequence; identical to SEQ ID NO: 2399
  Cyclic GFR-binding peptide
  MOD_RES (31)..(32): Xaa is C or S

SEQ ID NO: 105793 - protein, 35 aa, Artificial Sequence; identical to SEQ ID NO: 30557
  Cyclic GFR-binding peptide
  MOD_RES (30)..(31): Xaa is C or S

SEQ ID NO: 105794 - protein, 39 aa, Artificial Sequence; identical to SEQ ID NO: 2403
  Cyclic GFR-binding peptide
  MOD_RES (2)..(34)..(35): Xaa is C or S

SEQ ID NO: 105795 - protein, 30 aa, Artificial Sequence; identical to SEQ ID NO: 12940
  Cyclic GFR-binding peptide
  MOD_RES (30)..(30): Xaa is C or S

SEQ ID NO: 105796 - protein, 36 aa, Artificial Sequence; identical to SEQ ID NO: 2404
  Cyclic GFR-binding peptide
  MOD_RES (1)..(34)..(35): Xaa is C or S

SEQ ID NO: 105797 - protein, 34 aa, Artificial Sequence; identical to SEQ ID NO: 30567
  Cyclic GFR-binding peptide
  MOD_RES (32)..(33): Xaa is C or S

SEQ ID NO: 105798 - protein, 33 aa, Artificial Sequence; identical to SEQ ID NO: 2410
  Cyclic GFR-binding peptide
  MOD_RES (2)..(2): Xaa is C or S

SEQ ID NO: 105799 - protein, 29 aa, Artificial Sequence
  Cyclic GFR-binding peptide
  MOD_RES (28)..(29): Xaa is C or S
MDRYKKLVVNNASDFYLISIANLRTPVXX

SEQ ID NO: 105800 - protein, 25 aa, Artificial Sequence
  Cyclic GFR-binding peptide
VVMDQYNKLVVNNAADLYLISIASL

SEQ ID NO: 105801 - protein, 35 aa, Artificial Sequence; identical to SEQ ID NO: 76100
  Cyclic GFR-binding peptide
  MOD_RES (32)..(33): Xaa is C or S

SEQ ID NO: 105802 - protein, 31 aa, Artificial Sequence; identical to SEQ ID NO: 2414
  Cyclic GFR-binding peptide
  MOD_RES (27)..(28): Xaa is C or S

SEQ ID NO: 105803 - protein, 34 aa, Artificial Sequence; identical to SEQ ID NO: 2416
  Cyclic GFR-binding peptide
  MOD_RES (2)..(4): Xaa is C or S

SEQ ID NO: 105804 - protein, 35 aa, Artificial Sequence; identical to SEQ ID NO: 2419
  Cyclic GFR-binding peptide
  MOD_RES (31)..(32): Xaa is C or S

SEQ ID NO: 105805 - protein, 33 aa, Artificial Sequence; identical to SEQ ID NO: 2420
  Cyclic GFR-binding peptide
  MOD_RES (29)..(30): Xaa is C or S

SEQ ID NO: 105806 - protein, 35 aa, Artificial Sequence; identical to SEQ ID NO: 2421
  Cyclic GFR-binding peptide
  MOD_RES (1)..(3): Xaa is C or S

SEQ ID NO: 105807 - protein, 27 aa, Artificial Sequence
  Cyclic GFR-binding peptide
EVVMERYKKLVVKDYEDFYLMSIANLE

SEQ ID NO: 105808 - protein, 32 aa, Artificial Sequence; identical to SEQ ID NO: 2423
  Cyclic GFR-binding peptide
  MOD_RES (26)..(27): Xaa is C or S

SEQ ID NO: 105809 - protein, 34 aa, Artificial Sequence; identical to SEQ ID NO: 2424
  Cyclic GFR-binding peptide
  MOD_RES (31)..(31): Xaa is C or S

SEQ ID NO: 105810 - protein, 28 aa, Artificial Sequence
  Cyclic GFR-binding peptide
  MOD_RES (27)..(28): Xaa is C or S
DRYKKLVVNNASDFYLISIANLRTPVXX

SEQ ID NO: 105811 - protein, 37 aa, Artificial Sequence; identical to SEQ ID NO: 2427
  Cyclic GFR-binding peptide
  MOD_RES (1)..(33): Xaa is C or S

SEQ ID NO: 105812 - protein, 32 aa, Artificial Sequence; identical to SEQ ID NO: 12967
  Cyclic GFR-binding peptide
  MOD_RES (1)..(1): Xaa is C or S

SEQ ID NO: 105813 - protein, 29 aa, Artificial Sequence
  Cyclic GFR-binding peptide
  MOD_RES (28)..(29): Xaa is C or S
MDRYKKLVVKENEDFYLMSIANLETPVXX

SEQ ID NO: 105814 - protein, 35 aa, Artificial Sequence; identical to SEQ ID NO: 2435
  Cyclic GFR-binding peptide
  MOD_RES (29)..(30): Xaa is C or S

SEQ ID NO: 105815 - protein, 35 aa, Artificial Sequence; identical to SEQ ID NO: 30605
  Cyclic GFR-binding peptide
  MOD_RES (1)..(33)..(34): Xaa is C or S

SEQ ID NO: 105816 - protein, 33 aa, Artificial Sequence
  Cyclic GFR-binding peptide
  MOD_RES (28)..(29): Xaa is C or S
IMQYNKLLLVRGNDLYLMSIASTKVPAXXTSPV

SEQ ID NO: 105817 - protein, 29 aa, Artificial Sequence
  Cyclic GFR-binding peptide
  MOD_RES (1)..(1): Xaa is C or S
XSEVTMNRYKKLVVNKNEDFYLISIANMK

SEQ ID NO: 105818 - protein, 37 aa, Artificial Sequence; identical to SEQ ID NO: 76124
  Cyclic GFR-binding peptide
  MOD_RES (1)..(33)..(34): Xaa is C or S

SEQ ID NO: 105819 - protein, 31 aa, Artificial Sequence; identical to SEQ ID NO: 2438
  Cyclic GFR-binding peptide
  MOD_RES (1)..(3): Xaa is C or S

SEQ ID NO: 105820 - protein, 31 aa, Artificial Sequence; identical to SEQ ID NO: 2439
  Cyclic GFR-binding peptide
  MOD_RES (2)..(2): Xaa is C or S

SEQ ID NO: 105821 - protein, 23 aa, Artificial Sequence
  Cyclic GFR-binding peptide
MERYKKLVVKDYEDFYLMSIANL

SEQ ID NO: 105822 - protein, 40 aa, Artificial Sequence; identical to SEQ ID NO: 2444
  Cyclic GFR-binding peptide
  MOD_RES (1)..(3)..(35)..(36): Xaa is C or S

SEQ ID NO: 105823 - protein, 28 aa, Artificial Sequence
  Cyclic GFR-binding peptide
  MOD_RES (28)..(28): Xaa is C or S
MGQYNKLIIQQKDNLYLMSIASMKTPTX

SEQ ID NO: 105824 - protein, 35 aa, Artificial Sequence; identical to SEQ ID NO: 12994
  Cyclic GFR-binding peptide
  MOD_RES (31)..(32): Xaa is C or S

SEQ ID NO: 105825 - protein, 29 aa, Artificial Sequence
  Cyclic GFR-binding peptide
VVMERYKKLVVKDYEDFYLMSIANLETPV

SEQ ID NO: 105826 - protein, 34 aa, Artificial Sequence
  Cyclic GFR-binding peptide
  MOD_RES (1)..(33)..(34): Xaa is C or S
XRDVVMGQYNKLIIQQKDNLYLMSIASMKTPTXX

SEQ ID NO: 105827 - protein, 31 aa, Artificial Sequence
  Cyclic GFR-binding peptide
  MOD_RES (26)..(27): Xaa is C or S
QYNKLLLVRGNDLYLMSIASTKVPAXXTSPV

SEQ ID NO: 105828 - protein, 32 aa, Artificial Sequence; identical to SEQ ID NO: 2448
  Cyclic GFR-binding peptide
  MOD_RES (28)..(29): Xaa is C or S

SEQ ID NO: 105829 - protein, 27 aa, Artificial Sequence
  Cyclic GFR-binding peptide
EVTMNRYKKLVVNKNEDFYLISIANMK

SEQ ID NO: 105830 - protein, 34 aa, Artificial Sequence; identical to SEQ ID NO: 2451
  Cyclic GFR-binding peptide
  MOD_RES (32)..(32): Xaa is C or S

SEQ ID NO: 105831 - protein, 33 aa, Artificial Sequence; identical to SEQ ID NO: 84816
  Cyclic GFR-binding peptide
  MOD_RES (1)..(3): Xaa is C or S

SEQ ID NO: 105832 - protein, 37 aa, Artificial Sequence; identical to SEQ ID NO: 2452
  Cyclic GFR-binding peptide
  MOD_RES (2)..(4)..(35)..(36): Xaa is C or S

SEQ ID NO: 105833 - protein, 30 aa, Artificial Sequence; identical to SEQ ID NO: 2453
  Cyclic GFR-binding peptide
  MOD_RES (28)..(29): Xaa is C or S

SEQ ID NO: 105834 - protein, 30 aa, Artificial Sequence
  Cyclic GFR-binding peptide
ESVAMGQYNKLYTVVGKDLYLISIASLKTP

SEQ ID NO: 105835 - protein, 34 aa, Artificial Sequence; identical to SEQ ID NO: 2456
  Cyclic GFR-binding peptide
  MOD_RES (2)..(34): Xaa is C or S

SEQ ID NO: 105836 - protein, 23 aa, Artificial Sequence
  Cyclic GFR-binding peptide
NQYNKLIVNSSDDLYLVSIASLK

SEQ ID NO: 105837 - protein, 42 aa, Artificial Sequence; identical to SEQ ID NO: 2461
  Cyclic GFR-binding peptide
  MOD_RES (2)..(4)..(36): Xaa is C or S

SEQ ID NO: 105838 - protein, 40 aa, Artificial Sequence; identical to SEQ ID NO: 2462
  Cyclic GFR-binding peptide
  MOD_RES (2)..(34)..(35): Xaa is C or S

SEQ ID NO: 105839 - protein, 41 aa, Artificial Sequence
  Cyclic GFR-binding peptide
  MOD_RES (2)..(4)..(36)..(37): Xaa is C or S
SXGXRDVVMGQYNKLIIQQKDNLYLMSIASMKTPTXXPGAS

SEQ ID NO: 105840 - protein, 26 aa, Artificial Sequence
  Cyclic GFR-binding peptide
SRVIMRYKKLVKPKRGVFYLISIANL

SEQ ID NO: 105841 - protein, 34 aa, Artificial Sequence
  Cyclic GFR-binding peptide
  MOD_RES (1)..(3)..(34): Xaa is C or S
XGXEEVIMQYNKLLLVRGNDLYLMSIASTKVPAX

SEQ ID NO: 105842 - protein, 34 aa, Artificial Sequence; identical to SEQ ID NO: 2465
  Cyclic GFR-binding peptide
  MOD_RES (1)..(32)..(33): Xaa is C or S

SEQ ID NO: 105843 - protein, 38 aa, Artificial Sequence; identical to SEQ ID NO: 30649
  Cyclic GFR-binding peptide
  MOD_RES (2)..(4)..(36)..(37): Xaa is C or S

SEQ ID NO: 105844 - protein, 32 aa, Artificial Sequence; identical to SEQ ID NO: 30651
  Cyclic GFR-binding peptide
  MOD_RES (1)..(3): Xaa is C or S

SEQ ID NO: 105845 - protein, 36 aa, Artificial Sequence; identical to SEQ ID NO: 2468
  Cyclic GFR-binding peptide
  MOD_RES (1)..(3)..(34)..(35): Xaa is C or S

SEQ ID NO: 105846 - protein, 35 aa, Artificial Sequence; identical to SEQ ID NO: 30653
  Cyclic GFR-binding peptide
  MOD_RES (1)..(33)..(34): Xaa is C or S

SEQ ID NO: 105847 - protein, 38 aa, Artificial Sequence; identical to SEQ ID NO: 2469
  Cyclic GFR-binding peptide
  MOD_RES (2)..(4)..(35)..(36): Xaa is C or S

SEQ ID NO: 105848 - protein, 26 aa, Artificial Sequence
  Cyclic GFR-binding peptide
DRYKKLVVNNAADFYLISIANLRAPV

SEQ ID NO: 105849 - protein, 32 aa, Artificial Sequence; identical to SEQ ID NO: 2472
  Cyclic GFR-binding peptide
  MOD_RES (2)..(4): Xaa is C or S

SEQ ID NO: 105850 - protein, 32 aa, Artificial Sequence; identical to SEQ ID NO: 2473
  Cyclic GFR-binding peptide
  MOD_RES (28)..(29): Xaa is C or S

SEQ ID NO: 105851 - protein, 36 aa, Artificial Sequence; identical to SEQ ID NO: 2474
  Cyclic GFR-binding peptide
  MOD_RES (32)..(33): Xaa is C or S

SEQ ID NO: 105852 - protein, 35 aa, Artificial Sequence; identical to SEQ ID NO: 2475
  Cyclic GFR-binding peptide
  MOD_RES (29)..(30): Xaa is C or S

SEQ ID NO: 105853 - protein, 43 aa, Artificial Sequence; identical to SEQ ID NO: 2476
  Cyclic GFR-binding peptide
  MOD_RES (2)..(4)..(37)..(38): Xaa is C or S

SEQ ID NO: 105854 - protein, 30 aa, Artificial Sequence; identical to SEQ ID NO: 2477
  Cyclic GFR-binding peptide
  MOD_RES (26)..(27): Xaa is C or S

SEQ ID NO: 105855 - protein, 34 aa, Artificial Sequence
  Cyclic GFR-binding peptide
  MOD_RES (28)..(29): Xaa is C or S
MNQYNKLVVNKNEDLYLISIASMKEPVXXPEPIG

SEQ ID NO: 105856 - protein, 34 aa, Artificial Sequence; identical to SEQ ID NO: 30668
  Cyclic GFR-binding peptide
  MOD_RES (31)..(32): Xaa is C or S

SEQ ID NO: 105857 - protein, 25 aa, Artificial Sequence
  Cyclic GFR-binding peptide
VVMDQYNKLVVKENEDLYLMSIASL

SEQ ID NO: 105858 - protein, 36 aa, Artificial Sequence; identical to SEQ ID NO: 2481
  Cyclic GFR-binding peptide
  MOD_RES (32)..(33): Xaa is C or S

SEQ ID NO: 105859 - protein, 38 aa, Artificial Sequence; identical to SEQ ID NO: 30669
  Cyclic GFR-binding peptide
  MOD_RES (2)..(34)..(35): Xaa is C or S

SEQ ID NO: 105860 - protein, 34 aa, Artificial Sequence; identical to SEQ ID NO: 76152
  Cyclic GFR-binding peptide
  MOD_RES (2)..(4): Xaa is C or S

SEQ ID NO: 105861 - protein, 34 aa, Artificial Sequence; identical to SEQ ID NO: 2483
  Cyclic GFR-binding peptide
  MOD_RES (2)..(4): Xaa is C or S

SEQ ID NO: 105862 - protein, 30 aa, Artificial Sequence; identical to SEQ ID NO: 2485
  Cyclic GFR-binding peptide
  MOD_RES (30)..(30): Xaa is C or S

SEQ ID NO: 105863 - protein, 31 aa, Artificial Sequence; identical to SEQ ID NO: 76154
  Cyclic GFR-binding peptide

SEQ ID NO: 105864 - protein, 33 aa, Artificial Sequence; identical to SEQ ID NO: 2486
  Cyclic GFR-binding peptide
  MOD_RES (30)..(31): Xaa is C or S

SEQ ID NO: 105865 - protein, 28 aa, Artificial Sequence
  Cyclic GFR-binding peptide
EVVMDRYKKLVVKENEDFYLMSIANLET

SEQ ID NO: 105866 - protein, 37 aa, Artificial Sequence; identical to SEQ ID NO: 2490
  Cyclic GFR-binding peptide
  MOD_RES (2)..(35)..(36): Xaa is C or S

SEQ ID NO: 105867 - protein, 38 aa, Artificial Sequence
  Cyclic GFR-binding peptide
  MOD_RES (1)..(33)..(34): Xaa is C or S
XRDVVMGQYNKLIIQQKDNLYLMSIASMKTPTXXPGAS

SEQ ID NO: 105868 - protein, 33 aa, Artificial Sequence; identical to SEQ ID NO: 2492
  Cyclic GFR-binding peptide
  MOD_RES (1)..(3): Xaa is C or S

SEQ ID NO: 105869 - protein, 25 aa, Artificial Sequence
  Cyclic GFR-binding peptide
MNQYNKLIVNSSDDLYLVSIASLQT

SEQ ID NO: 105870 - protein, 30 aa, Artificial Sequence; identical to SEQ ID NO: 2497
  Cyclic GFR-binding peptide
  MOD_RES (2)..(4): Xaa is C or S

SEQ ID NO: 105871 - protein, 38 aa, Artificial Sequence; identical to SEQ ID NO: 2498
  Cyclic GFR-binding peptide
  MOD_RES (1)..(3)..(35)..(36): Xaa is C or S

SEQ ID NO: 105872 - protein, 34 aa, Artificial Sequence; identical to SEQ ID NO: 2500
  Cyclic GFR-binding peptide
  MOD_RES (2)..(33)..(34): Xaa is C or S

SEQ ID NO: 105873 - protein, 30 aa, Artificial Sequence; identical to SEQ ID NO: 76159
  Cyclic GFR-binding peptide
  MOD_RES (2)..(2): Xaa is C or S

SEQ ID NO: 105874 - protein, 30 aa, Artificial Sequence; identical to SEQ ID NO: 2501
  Cyclic GFR-binding peptide
  MOD_RES (28)..(29): Xaa is C or S

SEQ ID NO: 105875 - protein, 31 aa, Artificial Sequence; identical to SEQ ID NO: 2502
  Cyclic GFR-binding peptide
  MOD_RES (29)..(29): Xaa is C or S

SEQ ID NO: 105876 - protein, 22 aa, Artificial Sequence
  Cyclic GFR-binding peptide
QYNKLVVKENEDLYLMSIASLE

SEQ ID NO: 105877 - protein, 26 aa, Artificial Sequence
  Cyclic GFR-binding peptide
AVSMGEQYNKLTPVGMDDLYLVSIAS

SEQ ID NO: 105878 - protein, 26 aa, Artificial Sequence
  Cyclic GFR-binding peptide
  MOD_RES (1)..(1): Xaa is C or S
XSKVIMRYKKLIKPTKGIFYLISIAN

SEQ ID NO: 105879 - protein, 28 aa, Artificial Sequence
  Cyclic GFR-binding peptide
AKVVMNRYKKLIVNNSSDFYLVSIANLK

SEQ ID NO: 105880 - protein, 29 aa, Artificial Sequence
  Cyclic GFR-binding peptide
  MOD_RES (1)..(1): Xaa is C or S
XEAVSMGEQYNKLTPVGMDDLYLVSIASL

SEQ ID NO: 105881 - protein, 24 aa, Artificial Sequence
  Cyclic GFR-binding peptide
RYKKLIVNNSSDFYLVSIANLKTP

SEQ ID NO: 105882 - protein, 22 aa, Artificial Sequence
  Cyclic GFR-binding peptide
DRYKKLVVNNAADFYLISIANL

SEQ ID NO: 105883 - protein, 27 aa, Artificial Sequence
  Cyclic GFR-binding peptide
  MOD_RES (27)..(27): Xaa is C or S
MQYNKLLLVRGNDLYLMSIASTKVPAX

SEQ ID NO: 105884 - protein, 32 aa, Artificial Sequence; identical to SEQ ID NO: 13072
  Cyclic GFR-binding peptide
  MOD_RES (30)..(31): Xaa is C or S

SEQ ID NO: 105885 - protein, 26 aa, Artificial Sequence
  Cyclic GFR-binding peptide
  MOD_RES (26)..(26): Xaa is C or S
QYNKLVKPTRGVLYLISIASLDQPVX

SEQ ID NO: 105886 - protein, 29 aa, Artificial Sequence
  Cyclic GFR-binding peptide
SRVVMNQYNKLIVNSSDDLYLVSIASLKT

SEQ ID NO: 105887 - protein, 34 aa, Artificial Sequence; identical to SEQ ID NO: 2520
  Cyclic GFR-binding peptide
  MOD_RES (32)..(33): Xaa is C or S

SEQ ID NO: 105888 - protein, 26 aa, Artificial Sequence
  Cyclic GFR-binding peptide
VVMGQYNKLIIQQKDNLYLMSIASMK

SEQ ID NO: 105889 - protein, 37 aa, Artificial Sequence; identical to SEQ ID NO: 2521
  Cyclic GFR-binding peptide
  MOD_RES (2)..(4)..(37): Xaa is C or S

SEQ ID NO: 105890 - protein, 27 aa, Artificial Sequence
  Cyclic GFR-binding peptide
RVVMNQYNKLIVNSSDDLYLVSIASLK

SEQ ID NO: 105891 - protein, 33 aa, Artificial Sequence; identical to SEQ ID NO: 2526
  Cyclic GFR-binding peptide
  MOD_RES (27)..(28): Xaa is C or S

SEQ ID NO: 105892 - protein, 41 aa, Artificial Sequence; identical to SEQ ID NO: 2527
  Cyclic GFR-binding peptide
  MOD_RES (1)..(3)..(36)..(37): Xaa is C or S

SEQ ID NO: 105893 - protein, 39 aa, Artificial Sequence; identical to SEQ ID NO: 2529
  Cyclic GFR-binding peptide
  MOD_RES (2)..(33)..(34): Xaa is C or S

SEQ ID NO: 105894 - protein, 21 aa, Artificial Sequence
  Cyclic GFR-binding peptide
RYKKLIVNSSDDFYLVSIANL

SEQ ID NO: 105895 - protein, 23 aa, Artificial Sequence
  Cyclic GFR-binding peptide
EQYNKLTPVGMDDLYLVSIASLK

SEQ ID NO: 105896 - protein, 24 aa, Artificial Sequence
  Cyclic GFR-binding peptide
QYNKLVKPKRGVLYLISIASLAQP

SEQ ID NO: 105897 - protein, 35 aa, Artificial Sequence; identical to SEQ ID NO: 2538
  Cyclic GFR-binding peptide
  MOD_RES (2)..(4): Xaa is C or S

SEQ ID NO: 105898 - protein, 36 aa, Artificial Sequence; identical to SEQ ID NO: 2539
  Cyclic GFR-binding peptide
  MOD_RES (31)..(32): Xaa is C or S

SEQ ID NO: 105899 - protein, 33 aa, Artificial Sequence; identical to SEQ ID NO: 13094
  Cyclic GFR-binding peptide
  MOD_RES (32)..(33): Xaa is C or S

SEQ ID NO: 105900 - protein, 28 aa, Artificial Sequence
  Cyclic GFR-binding peptide
  MOD_RES (27)..(28): Xaa is C or S
MQYNKLVKPKRGVLYLISIASLAQPVXX

SEQ ID NO: 105901 - protein, 20 aa, Artificial Sequence
  Cyclic GFR-binding peptide
RYKKLLLVRGNDFYLMSIAN

SEQ ID NO: 105902 - protein, 31 aa, Artificial Sequence
  Cyclic GFR-binding peptide
  MOD_RES (1)..(3): Xaa is C or S
XAXSEVTMNQYNKLVVNKNEDLYLISIASMK

SEQ ID NO: 105903 - protein, 32 aa, Artificial Sequence; identical to SEQ ID NO: 2546
  Cyclic GFR-binding peptide
  MOD_RES (27)..(28): Xaa is C or S

SEQ ID NO: 105904 - protein, 30 aa, Artificial Sequence; identical to SEQ ID NO: 30734
  Cyclic GFR-binding peptide
  MOD_RES (28)..(29): Xaa is C or S

SEQ ID NO: 105905 - protein, 23 aa, Artificial Sequence
  Cyclic GFR-binding peptide
TMNQYNKLVVNKNEDLYLISIAS

SEQ ID NO: 105906 - protein, 27 aa, Artificial Sequence
  Cyclic GFR-binding peptide
MDRYKKLVVNNAADFYLISIANLRAPV

SEQ ID NO: 105907 - protein, 30 aa, Artificial Sequence; identical to SEQ ID NO: 2554
  Cyclic GFR-binding peptide

SEQ ID NO: 105908 - protein, 38 aa, Artificial Sequence
  Cyclic GFR-binding peptide
  MOD_RES (1)..(33)..(34): Xaa is C or S
XSEVTMNQYNKLVVNKNEDLYLISIASMKEPVXXPEPI

SEQ ID NO: 105909 - protein, 33 aa, Artificial Sequence
  Cyclic GFR-binding peptide
  MOD_RES (27)..(28): Xaa is C or S
MQYNKLLLVRGNDLYLMSIASTKVPAXXTSPVR

SEQ ID NO: 105910 - protein, 21 aa, Artificial Sequence
  Cyclic GFR-binding peptide
QYNKLIVNNSSDLYLVSIASL

SEQ ID NO: 105911 - protein, 38 aa, Artificial Sequence; identical to SEQ ID NO: 2558
  Cyclic GFR-binding peptide
  MOD_RES (2)..(4)..(35)..(36): Xaa is C or S

SEQ ID NO: 105912 - protein, 20 aa, Artificial Sequence
  Cyclic GFR-binding peptide
QYNKLIVNSSDDLYLVSIAS

SEQ ID NO: 105913 - protein, 29 aa, Artificial Sequence
  Cyclic GFR-binding peptide
  MOD_RES (26)..(27): Xaa is C or S
QYNKLIVNNSSDLYLVSIASLKTPAXXAK

SEQ ID NO: 105914 - protein, 40 aa, Artificial Sequence; identical to SEQ ID NO: 30747
  Cyclic GFR-binding peptide
  MOD_RES (2)..(34)..(35): Xaa is C or S

SEQ ID NO: 105915 - protein, 32 aa, Artificial Sequence; identical to SEQ ID NO: 30749
  Cyclic GFR-binding peptide
  MOD_RES (1)..(3): Xaa is C or S

SEQ ID NO: 105916 - protein, 36 aa, Artificial Sequence
  Cyclic GFR-binding peptide
  MOD_RES (2)..(4)..(35)..(36): Xaa is C or S
LXGXEEVIMQYNKLLLVRGNDLYLMSIASTKVPAXX

SEQ ID NO: 105917 - protein, 22 aa, Artificial Sequence
  Cyclic GFR-binding peptide
QYNKLVVNKNEDLYLISIASMK

SEQ ID NO: 105918 - protein, 30 aa, Artificial Sequence; identical to SEQ ID NO: 2563
  Cyclic GFR-binding peptide
  MOD_RES (2)..(4): Xaa is C or S

SEQ ID NO: 105919 - protein, 33 aa, Artificial Sequence
  Cyclic GFR-binding peptide
  MOD_RES (27)..(28): Xaa is C or S
GQYNKLYTVVGKDLYLISIASLKTPVXXAKSAK

SEQ ID NO: 105920 - protein, 30 aa, Artificial Sequence
  Cyclic GFR-binding peptide
  MOD_RES (2)..(4): Xaa is C or S
LXGXEEVIMQYNKLLLVRGNDLYLMSIAST

SEQ ID NO: 105921 - protein, 34 aa, Artificial Sequence
  Cyclic GFR-binding peptide
  MOD_RES (2)..(4): Xaa is C or S
SXGXRDVVMGQYNKLIIQQKDNLYLMSIASMKTP

SEQ ID NO: 105922 - protein, 39 aa, Artificial Sequence; identical to SEQ ID NO: 2571
  Cyclic GFR-binding peptide
  MOD_RES (2)..(34)..(35): Xaa is C or S

SEQ ID NO: 105923 - protein, 22 aa, Artificial Sequence
  Cyclic GFR-binding peptide
RYKKLLLVRGNDFYLMSIANTK

SEQ ID NO: 105924 - protein, 41 aa, Artificial Sequence; identical to SEQ ID NO: 2573
  Cyclic GFR-binding peptide
  MOD_RES (1)..(3)..(36)..(37): Xaa is C or S

SEQ ID NO: 105925 - protein, 33 aa, Artificial Sequence; identical to SEQ ID NO: 2574
  Cyclic GFR-binding peptide
  MOD_RES (30)..(30): Xaa is C or S

SEQ ID NO: 105926 - protein, 25 aa, Artificial Sequence
  Cyclic GFR-binding peptide
QYNKLIVNSSDDLYLVSIASLQTPA

SEQ ID NO: 105927 - protein, 35 aa, Artificial Sequence; identical to SEQ ID NO: 76200
  Cyclic GFR-binding peptide
  MOD_RES (29)..(30): Xaa is C or S

SEQ ID NO: 105928 - protein, 23 aa, Artificial Sequence
  Cyclic GFR-binding peptide
EQYNKLVVKDYEDLYLMSIASLE

SEQ ID NO: 105929 - protein, 36 aa, Artificial Sequence; identical to SEQ ID NO: 30767
  Cyclic GFR-binding peptide
  MOD_RES (32)..(33): Xaa is C or S

SEQ ID NO: 105930 - protein, 34 aa, Artificial Sequence; identical to SEQ ID NO: 2579
  Cyclic GFR-binding peptide
  MOD_RES (2)..(4): Xaa is C or S

SEQ ID NO: 105931 - protein, 38 aa, Artificial Sequence; identical to SEQ ID NO: 2581
  Cyclic GFR-binding peptide
  MOD_RES (2)..(4)..(36): Xaa is C or S

SEQ ID NO: 105932 - protein, 31 aa, Artificial Sequence
  Cyclic GFR-binding peptide
  MOD_RES (2)..(2): Xaa is C or S
GXRDVVMGQYNKLIIQQKDNLYLMSIASMKT

SEQ ID NO: 105933 - protein, 32 aa, Artificial Sequence; identical to SEQ ID NO: 2585
  Cyclic GFR-binding peptide
  MOD_RES (31)..(32): Xaa is C or S

SEQ ID NO: 105934 - protein, 27 aa, Artificial Sequence
  Cyclic GFR-binding peptide
  MOD_RES (1)..(1): Xaa is C or S
XAEVVMDRYKKLVVNNAADFYLISIAN

SEQ ID NO: 105935 - protein, 33 aa, Artificial Sequence; identical to SEQ ID NO: 2588
  Cyclic GFR-binding peptide
  MOD_RES (1)..(3): Xaa is C or S

SEQ ID NO: 105936 - protein, 28 aa, Artificial Sequence
  Cyclic GFR-binding peptide
  MOD_RES (1)..(1): Xaa is C or S
XSEVTMNQYNKLVVNKNEDLYLISIASM

SEQ ID NO: 105937 - protein, 23 aa, Artificial Sequence
  Cyclic GFR-binding peptide
IMRYKKLLLVRGNDFYLMSIANT

SEQ ID NO: 105938 - protein, 28 aa, Artificial Sequence
  Cyclic GFR-binding peptide
SRVIMQYNKLVKPKRGVLYLISIASLAQ

SEQ ID NO: 105939 - protein, 30 aa, Artificial Sequence; identical to SEQ ID NO: 2591
  Cyclic GFR-binding peptide

SEQ ID NO: 105940 - protein, 38 aa, Artificial Sequence; identical to SEQ ID NO: 2592
  Cyclic GFR-binding peptide
  MOD_RES (1)..(34)..(35): Xaa is C or S

SEQ ID NO: 105941 - protein, 41 aa, Artificial Sequence; identical to SEQ ID NO: 2594
  Cyclic GFR-binding peptide
  MOD_RES (1)..(3)..(35)..(36): Xaa is C or S

SEQ ID NO: 105942 - protein, 25 aa, Artificial Sequence
  Cyclic GFR-binding peptide
VVMDRYKKLVVNNASDFYLISIANL

SEQ ID NO: 105943 - protein, 29 aa, Artificial Sequence
  Cyclic GFR-binding peptide
  MOD_RES (1)..(1): Xaa is C or S
XSKVIMQYNKLIKPTKGILYLISIASLDQ

SEQ ID NO: 105944 - protein, 39 aa, Artificial Sequence; identical to SEQ ID NO: 2597
  Cyclic GFR-binding peptide
  MOD_RES (1)..(3)..(34)..(35): Xaa is C or S

SEQ ID NO: 105945 - protein, 30 aa, Artificial Sequence; identical to SEQ ID NO: 2599
  Cyclic GFR-binding peptide
  MOD_RES (2)..(2): Xaa is C or S

SEQ ID NO: 105946 - protein, 31 aa, Artificial Sequence; identical to SEQ ID NO: 2600
  Cyclic GFR-binding peptide

SEQ ID NO: 105947 - protein, 30 aa, Artificial Sequence; identical to SEQ ID NO: 2602
  Cyclic GFR-binding peptide
  MOD_RES (27)..(27): Xaa is C or S

SEQ ID NO: 105948 - protein, 34 aa, Artificial Sequence; identical to SEQ ID NO: 2606
  Cyclic GFR-binding peptide
  MOD_RES (31)..(32): Xaa is C or S

SEQ ID NO: 105949 - protein, 38 aa, Artificial Sequence; identical to SEQ ID NO: 13163
  Cyclic GFR-binding peptide
  MOD_RES (2)..(34)..(35): Xaa is C or S

SEQ ID NO: 105950 - protein, 35 aa, Artificial Sequence; identical to SEQ ID NO: 2608
  Cyclic GFR-binding peptide
  MOD_RES (30)..(31): Xaa is C or S

SEQ ID NO: 105951 - protein, 34 aa, Artificial Sequence; identical to SEQ ID NO: 2609
  Cyclic GFR-binding peptide
  MOD_RES (30)..(31): Xaa is C or S

SEQ ID NO: 105952 - protein, 34 aa, Artificial Sequence
  Cyclic GFR-binding peptide
  MOD_RES (32)..(33): Xaa is C or S
SEVTMNQYNKLVVNKNEDLYLISIASMKEPVXXP

SEQ ID NO: 105953 - protein, 29 aa, Artificial Sequence
  Cyclic GFR-binding peptide
  MOD_RES (1)..(3): Xaa is C or S
XKXSKVIMRYKKLIKPTKGIFYLISIANL

SEQ ID NO: 105954 - protein, 34 aa, Artificial Sequence
  Cyclic GFR-binding peptide
  MOD_RES (32)..(33): Xaa is C or S
RDVVMGQYNKLIIQQKDNLYLMSIASMKTPTXXP

SEQ ID NO: 105955 - protein, 37 aa, Artificial Sequence
  Cyclic GFR-binding peptide
  MOD_RES (1)..(33)..(34): Xaa is C or S
XAEVVMDQYNKLVVNNAADLYLISIASLRAPVXXSAP

SEQ ID NO: 105956 - protein, 31 aa, Artificial Sequence; identical to SEQ ID NO: 2615
  Cyclic GFR-binding peptide
  MOD_RES (27)..(28): Xaa is C or S

SEQ ID NO: 105957 - protein, 33 aa, Artificial Sequence; identical to SEQ ID NO: 2617
  Cyclic GFR-binding peptide
  MOD_RES (28)..(29): Xaa is C or S

SEQ ID NO: 105958 - protein, 27 aa, Artificial Sequence
  Cyclic GFR-binding peptide
  MOD_RES (27)..(27): Xaa is C or S
EQYNKLTPVGMDDLYLVSIASLKTPVX

SEQ ID NO: 105959 - protein, 36 aa, Artificial Sequence; identical to SEQ ID NO: 30812
  Cyclic GFR-binding peptide
  MOD_RES (31)..(32): Xaa is C or S

SEQ ID NO: 105960 - protein, 32 aa, Artificial Sequence
  Cyclic GFR-binding peptide
  MOD_RES (2)..(4): Xaa is C or S
LXGXEEVIMQYNKLLLVRGNDLYLMSIASTKV

SEQ ID NO: 105961 - protein, 29 aa, Artificial Sequence
  Cyclic GFR-binding peptide
  MOD_RES (27)..(28): Xaa is C or S
MRYKKLIKPTKGIFYLISIANLDQSVXXP

SEQ ID NO: 105962 - protein, 35 aa, Artificial Sequence; identical to SEQ ID NO: 2620
  Cyclic GFR-binding peptide
  MOD_RES (2)..(35): Xaa is C or S

SEQ ID NO: 105963 - protein, 31 aa, Artificial Sequence
  Cyclic GFR-binding peptide
  MOD_RES (1)..(3): Xaa is C or S
XGXESVAMGQYNKLYTVVGKDLYLISIASLK

SEQ ID NO: 105964 - protein, 31 aa, Artificial Sequence; identical to SEQ ID NO: 2625
  Cyclic GFR-binding peptide
  MOD_RES (2)..(2): Xaa is C or S

SEQ ID NO: 105965 - protein, 33 aa, Artificial Sequence; identical to SEQ ID NO: 2627
  Cyclic GFR-binding peptide
  MOD_RES (2)..(2): Xaa is C or S

SEQ ID NO: 105966 - protein, 29 aa, Artificial Sequence
  Cyclic GFR-binding peptide
  MOD_RES (2)..(2): Xaa is C or S
GXSEVVMDQYNKLVVNNASDLYLISIASL

SEQ ID NO: 105967 - protein, 33 aa, Artificial Sequence; identical to SEQ ID NO: 2628
  Cyclic GFR-binding peptide
  MOD_RES (1)..(33): Xaa is C or S

SEQ ID NO: 105968 - protein, 31 aa, Artificial Sequence; identical to SEQ ID NO: 2630
  Cyclic GFR-binding peptide
  MOD_RES (2)..(2): Xaa is C or S

SEQ ID NO: 105969 - protein, 39 aa, Artificial Sequence
  Cyclic GFR-binding peptide
  MOD_RES (1)..(33)..(34): Xaa is C or S
XSEVTMNQYNKLVVNKNEDLYLISIASMKEPVXXPEPIG

SEQ ID NO: 105970 - protein, 32 aa, Artificial Sequence; identical to SEQ ID NO: 2631
  Cyclic GFR-binding peptide
  MOD_RES (27)..(27): Xaa is C or S

SEQ ID NO: 105971 - protein, 32 aa, Artificial Sequence; identical to SEQ ID NO: 2632
  Cyclic GFR-binding peptide
  MOD_RES (27)..(28): Xaa is C or S

SEQ ID NO: 105972 - protein, 34 aa, Artificial Sequence; identical to SEQ ID NO: 2634
  Cyclic GFR-binding peptide
  MOD_RES (1)..(33)..(34): Xaa is C or S

SEQ ID NO: 105973 - protein, 39 aa, Artificial Sequence
  Cyclic GFR-binding peptide
  MOD_RES (1)..(3)..(35)..(36): Xaa is C or S
XGXRDVVMGQYNKLIIQQKDNLYLMSIASMKTPTXXPGA

SEQ ID NO: 105974 - protein, 39 aa, Artificial Sequence; identical to SEQ ID NO: 2635
  Cyclic GFR-binding peptide
  MOD_RES (33)..(34): Xaa is C or S

SEQ ID NO: 105975 - protein, 31 aa, Artificial Sequence; identical to SEQ ID NO: 2636
  Cyclic GFR-binding peptide
  MOD_RES (29)..(30): Xaa is C or S

SEQ ID NO: 105976 - protein, 24 aa, Artificial Sequence
  Cyclic GFR-binding peptide
RYKKLVKPKRGVFYLISIANLAQP

SEQ ID NO: 105977 - protein, 24 aa, Artificial Sequence
  Cyclic GFR-binding peptide
EVIMQYNKLLLVRGNDLYLMSIAS

SEQ ID NO: 105978 - protein, 25 aa, Artificial Sequence
  Cyclic GFR-binding peptide
IMQYNKLVKPKRGVLYLISIASLAQ

SEQ ID NO: 105979 - protein, 30 aa, Artificial Sequence; identical to SEQ ID NO: 76230
  Cyclic GFR-binding peptide
  MOD_RES (28)..(29): Xaa is C or S

SEQ ID NO: 105980 - protein, 27 aa, Artificial Sequence
  Cyclic GFR-binding peptide
SKVVMQYNKLVKPTRGVLYLISIASLD

SEQ ID NO: 105981 - protein, 30 aa, Artificial Sequence; identical to SEQ ID NO: 76231
  Cyclic GFR-binding peptide
  MOD_RES (2)..(4): Xaa is C or S

SEQ ID NO: 105982 - protein, 36 aa, Artificial Sequence; identical to SEQ ID NO: 2643
  Cyclic GFR-binding peptide
  MOD_RES (30)..(31): Xaa is C or S

SEQ ID NO: 105983 - protein, 27 aa, Artificial Sequence
  Cyclic GFR-binding peptide
  MOD_RES (27)..(27): Xaa is C or S
NQYNKLIVNSSDDLYLVSIASLKTPAX

SEQ ID NO: 105984 - protein, 32 aa, Artificial Sequence; identical to SEQ ID NO: 13207
  Cyclic GFR-binding peptide
  MOD_RES (28)..(29): Xaa is C or S

SEQ ID NO: 105985 - protein, 36 aa, Artificial Sequence; identical to SEQ ID NO: 2647
  Cyclic GFR-binding peptide
  MOD_RES (2)..(4)..(35)..(36): Xaa is C or S

SEQ ID NO: 105986 - protein, 28 aa, Artificial Sequence
  Cyclic GFR-binding peptide
  MOD_RES (1)..(1): Xaa is C or S
XSRVVMNRYKKLIVNSSDDFYLVSIANL

SEQ ID NO: 105987 - protein, 24 aa, Artificial Sequence
  Cyclic GFR-binding peptide
NQYNKLIVNNSSDLYLVSIASLKT

SEQ ID NO: 105988 - protein, 26 aa, Artificial Sequence
  Cyclic GFR-binding peptide
  MOD_RES (26)..(26): Xaa is C or S
RYKKLVKPTRGVFYLISIANLDQPVX

SEQ ID NO: 105989 - protein, 29 aa, Artificial Sequence
  Cyclic GFR-binding peptide
  MOD_RES (26)..(27): Xaa is C or S
RYKKLVKPKRGVFYLISIANLAQPVXXPA

SEQ ID NO: 105990 - protein, 39 aa, Artificial Sequence
  Cyclic GFR-binding peptide
  MOD_RES (2)..(34)..(35): Xaa is C or S
AXSEVTMNQYNKLVVNKNEDLYLISIASMKEPVXXPEPI

SEQ ID NO: 105991 - protein, 32 aa, Artificial Sequence; identical to SEQ ID NO: 2652
  Cyclic GFR-binding peptide
  MOD_RES (1)..(1): Xaa is C or S

SEQ ID NO: 105992 - protein, 26 aa, Artificial Sequence
  Cyclic GFR-binding peptide
AMGRYKKLYTVVGKDFYLISIANLKT

SEQ ID NO: 105993 - protein, 31 aa, Artificial Sequence; identical to SEQ ID NO: 79806
  Cyclic GFR-binding peptide
  MOD_RES (30)..(31): Xaa is C or S

SEQ ID NO: 105994 - protein, 38 aa, Artificial Sequence; identical to SEQ ID NO: 2655
  Cyclic GFR-binding peptide
  MOD_RES (1)..(33)..(34): Xaa is C or S

SEQ ID NO: 105995 - protein, 37 aa, Artificial Sequence; identical to SEQ ID NO: 2656
  Cyclic GFR-binding peptide
  MOD_RES (31)..(32): Xaa is C or S

SEQ ID NO: 105996 - protein, 27 aa, Artificial Sequence
  Cyclic GFR-binding peptide
  MOD_RES (1)..(1): Xaa is C or S
XSEVTMNRYKKLVVNKNEDFYLISIAN

SEQ ID NO: 105997 - protein, 33 aa, Artificial Sequence; identical to SEQ ID NO: 13221
  Cyclic GFR-binding peptide
  MOD_RES (27)..(28): Xaa is C or S

SEQ ID NO: 105998 - protein, 26 aa, Artificial Sequence
  Cyclic GFR-binding peptide
VVMDQYNKLVVNNASDLYLISIASLR

SEQ ID NO: 105999 - protein, 37 aa, Artificial Sequence; identical to SEQ ID NO: 76243
  Cyclic GFR-binding peptide
  MOD_RES (2)..(33)..(34): Xaa is C or S

SEQ ID NO: 106000 - protein, 24 aa, Artificial Sequence
  Cyclic GFR-binding peptide
QYNKLVKPTRGVLYLISIASLDQP

SEQ ID NO: 106001 - protein, 31 aa, Artificial Sequence; identical to SEQ ID NO: 2665
  Cyclic GFR-binding peptide

SEQ ID NO: 106002 - protein, 26 aa, Artificial Sequence
  Cyclic GFR-binding peptide
AEVVMDQYNKLVVNNAADLYLISIAS

SEQ ID NO: 106003 - protein, 37 aa, Artificial Sequence; identical to SEQ ID NO: 2666
  Cyclic GFR-binding peptide
  MOD_RES (2)..(34)..(35): Xaa is C or S

SEQ ID NO: 106004 - protein, 32 aa, Artificial Sequence; identical to SEQ ID NO: 2667
  Cyclic GFR-binding peptide
  MOD_RES (26)..(27): Xaa is C or S

SEQ ID NO: 106005 - protein, 27 aa, Artificial Sequence
  Cyclic GFR-binding peptide
  MOD_RES (26)..(27): Xaa is C or S
QYNKLVKPKRGVLYLISIASLAQPVXX

SEQ ID NO: 106006 - protein, 29 aa, Artificial Sequence
  Cyclic GFR-binding peptide
  MOD_RES (29)..(29): Xaa is C or S
VIMQYNKLIKPTKGILYLISIASLDQSVX

SEQ ID NO: 106007 - protein, 31 aa, Artificial Sequence; identical to SEQ ID NO: 2675
  Cyclic GFR-binding peptide
  MOD_RES (30)..(31): Xaa is C or S

SEQ ID NO: 106008 - protein, 26 aa, Artificial Sequence
  Cyclic GFR-binding peptide
MDQYNKLVVNNASDLYLISIASLRTP

SEQ ID NO: 106009 - protein, 36 aa, Artificial Sequence; identical to SEQ ID NO: 2678
  Cyclic GFR-binding peptide
  MOD_RES (32)..(33): Xaa is C or S

SEQ ID NO: 106010 - protein, 31 aa, Artificial Sequence; identical to SEQ ID NO: 76254
  Cyclic GFR-binding peptide
  MOD_RES (29)..(30): Xaa is C or S

SEQ ID NO: 106011 - protein, 30 aa, Artificial Sequence
  Cyclic GFR-binding peptide
  MOD_RES (2)..(4): Xaa is C or S
SXGXRDVVMGQYNKLIIQQKDNLYLMSIAS

SEQ ID NO: 106012 - protein, 32 aa, Artificial Sequence; identical to SEQ ID NO: 2682
  Cyclic GFR-binding peptide
  MOD_RES (27)..(28): Xaa is C or S

SEQ ID NO: 106013 - protein, 25 aa, Artificial Sequence
  Cyclic GFR-binding peptide
DVVMGRYKKLIIQQKDNFYLMSIAN

SEQ ID NO: 106014 - protein, 23 aa, Artificial Sequence
  Cyclic GFR-binding peptide
MQYNKLVKPKRGVLYLISIASLA

SEQ ID NO: 106015 - protein, 32 aa, Artificial Sequence; identical to SEQ ID NO: 2685
  Cyclic GFR-binding peptide
  MOD_RES (28)..(29): Xaa is C or S

SEQ ID NO: 106016 - protein, 24 aa, Artificial Sequence
  Cyclic GFR-binding peptide
MGERYKKLTPVGMDDFYLVSIANL

SEQ ID NO: 106017 - protein, 35 aa, Artificial Sequence; identical to SEQ ID NO: 79827
  Cyclic GFR-binding peptide
  MOD_RES (31)..(32): Xaa is C or S

SEQ ID NO: 106018 - protein, 36 aa, Artificial Sequence; identical to SEQ ID NO: 2687
  Cyclic GFR-binding peptide
  MOD_RES (1)..(3)..(35)..(36): Xaa is C or S

SEQ ID NO: 106019 - protein, 29 aa, Artificial Sequence
  Cyclic GFR-binding peptide
  MOD_RES (27)..(28): Xaa is C or S
EQYNKLVVKDYEDLYLMSIASLETPVXXA

SEQ ID NO: 106020 - protein, 26 aa, Artificial Sequence
  Cyclic GFR-binding peptide
DRYKKLVVKENEDFYLMSIANLETPV

SEQ ID NO: 106021 - protein, 34 aa, Artificial Sequence
  Cyclic GFR-binding peptide
  MOD_RES (30)..(31): Xaa is C or S
EVIMQYNKLLLVRGNDLYLMSIASTKVPAXXTSP

SEQ ID NO: 106022 - protein, 29 aa, Artificial Sequence
  Cyclic GFR-binding peptide
  MOD_RES (28)..(29): Xaa is C or S
GEQYNKLTPVGMDDLYLVSIASLKTPVXX

SEQ ID NO: 106023 - protein, 40 aa, Artificial Sequence; identical to SEQ ID NO: 30893
  Cyclic GFR-binding peptide
  MOD_RES (2)..(34)..(35): Xaa is C or S

SEQ ID NO: 106024 - protein, 38 aa, Artificial Sequence
  Cyclic GFR-binding peptide
  MOD_RES (32)..(33): Xaa is C or S
ESVAMGQYNKLYTVVGKDLYLISIASLKTPVXXAKSAK

SEQ ID NO: 106025 - protein, 41 aa, Artificial Sequence; identical to SEQ ID NO: 2695
  Cyclic GFR-binding peptide
  MOD_RES (1)..(3)..(35)..(36): Xaa is C or S

SEQ ID NO: 106026 - protein, 31 aa, Artificial Sequence; identical to SEQ ID NO: 2696
  Cyclic GFR-binding peptide
  MOD_RES (30)..(30): Xaa is C or S

SEQ ID NO: 106027 - protein, 35 aa, Artificial Sequence; identical to SEQ ID NO: 2700
  Cyclic GFR-binding peptide
  MOD_RES (2)..(34)..(35): Xaa is C or S

SEQ ID NO: 106028 - protein, 37 aa, Artificial Sequence; identical to SEQ ID NO: 2701
  Cyclic GFR-binding peptide
  MOD_RES (2)..(4)..(36): Xaa is C or S

SEQ ID NO: 106029 - protein, 33 aa, Artificial Sequence
  Cyclic GFR-binding peptide
  MOD_RES (28)..(29): Xaa is C or S
MNQYNKLVVNKNEDLYLISIASMKEPVXXPEPI

SEQ ID NO: 106030 - protein, 24 aa, Artificial Sequence
  Cyclic GFR-binding peptide
VVMNRYKKLIVNNSSDFYLVSIAN

SEQ ID NO: 106031 - protein, 27 aa, Artificial Sequence
  Cyclic GFR-binding peptide
AKVVMNQYNKLIVNNSSDLYLVSIASL

SEQ ID NO: 106032 - protein, 24 aa, Artificial Sequence
  Cyclic GFR-binding peptide
MDRYKKLVVKENEDFYLMSIANLE

SEQ ID NO: 106033 - protein, 34 aa, Artificial Sequence; identical to SEQ ID NO: 2709
  Cyclic GFR-binding peptide
  MOD_RES (1)..(32)..(33): Xaa is C or S

SEQ ID NO: 106034 - protein, 33 aa, Artificial Sequence; identical to SEQ ID NO: 76269
  Cyclic GFR-binding peptide
  MOD_RES (1)..(33): Xaa is C or S

SEQ ID NO: 106035 - protein, 29 aa, Artificial Sequence
  Cyclic GFR-binding peptide
  MOD_RES (29)..(29): Xaa is C or S
VMNQYNKLIVNSSDDLYLVSIASLQTPAX

SEQ ID NO: 106036 - protein, 28 aa, Artificial Sequence
  Cyclic GFR-binding peptide
  MOD_RES (2)..(2): Xaa is C or S
GXGEVVMERYKKLVVKDYEDFYLMSIAN

SEQ ID NO: 106037 - protein, 30 aa, Artificial Sequence
  Cyclic GFR-binding peptide
  MOD_RES (28)..(29): Xaa is C or S
MDQYNKLVVNNAADLYLISIASLRAPVXXS

SEQ ID NO: 106038 - protein, 39 aa, Artificial Sequence; identical to SEQ ID NO: 76272
  Cyclic GFR-binding peptide
  MOD_RES (2)..(4)..(36)..(37): Xaa is C or S

SEQ ID NO: 106039 - protein, 26 aa, Artificial Sequence
  Cyclic GFR-binding peptide
VVMRYKKLVKPTRGVFYLISIANLDQ

SEQ ID NO: 106040 - protein, 31 aa, Artificial Sequence; identical to SEQ ID NO: 2721
  Cyclic GFR-binding peptide
  MOD_RES (2)..(4): Xaa is C or S

SEQ ID NO: 106041 - protein, 30 aa, Artificial Sequence
  Cyclic GFR-binding peptide
  MOD_RES (1)..(1): Xaa is C or S
XSEVTMNQYNKLVVNKNEDLYLISIASMKE

SEQ ID NO: 106042 - protein, 41 aa, Artificial Sequence; identical to SEQ ID NO: 2722
  Cyclic GFR-binding peptide
  MOD_RES (2)..(4)..(35)..(36): Xaa is C or S

SEQ ID NO: 106043 - protein, 25 aa, Artificial Sequence
  Cyclic GFR-binding peptide
RVIMRYKKLVKPKRGVFYLISIANL

SEQ ID NO: 106044 - protein, 30 aa, Artificial Sequence
  Cyclic GFR-binding peptide
  MOD_RES (1)..(1): Xaa is C or S
XRDVVMGQYNKLIIQQKDNLYLMSIASMKT

SEQ ID NO: 106045 - protein, 28 aa, Artificial Sequence
  Cyclic GFR-binding peptide
  MOD_RES (27)..(28): Xaa is C or S
NRYKKLVVNKNEDFYLISIANMKEPVXX

SEQ ID NO: 106046 - protein, 40 aa, Artificial Sequence; identical to SEQ ID NO: 2726
  Cyclic GFR-binding peptide
  MOD_RES (1)..(3)..(34)..(35): Xaa is C or S

SEQ ID NO: 106047 - protein, 34 aa, Artificial Sequence; identical to SEQ ID NO: 2727
  Cyclic GFR-binding peptide
  MOD_RES (2)..(34): Xaa is C or S

SEQ ID NO: 106048 - protein, 30 aa, Artificial Sequence; identical to SEQ ID NO: 2728
  Cyclic GFR-binding peptide
  MOD_RES (30)..(30): Xaa is C or S

SEQ ID NO: 106049 - protein, 37 aa, Artificial Sequence; identical to SEQ ID NO: 2734
  Cyclic GFR-binding peptide
  MOD_RES (31)..(32): Xaa is C or S

SEQ ID NO: 106050 - protein, 29 aa, Artificial Sequence
  Cyclic GFR-binding peptide
  MOD_RES (28)..(29): Xaa is C or S
MEQYNKLVVKDYEDLYLMSIASLETPVXX

SEQ ID NO: 106051 - protein, 33 aa, Artificial Sequence
  Cyclic GFR-binding peptide
  MOD_RES (2)..(4): Xaa is C or S
RXAXSEVTMNQYNKLVVNKNEDLYLISIASMKE

SEQ ID NO: 106052 - protein, 41 aa, Artificial Sequence; identical to SEQ ID NO: 2737
  Cyclic GFR-binding peptide
  MOD_RES (2)..(4)..(37)..(38): Xaa is C or S

SEQ ID NO: 106053 - protein, 29 aa, Artificial Sequence
  Cyclic GFR-binding peptide
VVMDRYKKLVVKENEDFYLMSIANLETPV

SEQ ID NO: 106054 - protein, 36 aa, Artificial Sequence; identical to SEQ ID NO: 2739
  Cyclic GFR-binding peptide
  MOD_RES (2)..(4)..(35)..(36): Xaa is C or S

SEQ ID NO: 106055 - protein, 36 aa, Artificial Sequence; identical to SEQ ID NO: 2740
  Cyclic GFR-binding peptide
  MOD_RES (31)..(32): Xaa is C or S

SEQ ID NO: 106056 - protein, 33 aa, Artificial Sequence; identical to SEQ ID NO: 2743
  Cyclic GFR-binding peptide
  MOD_RES (27)..(28): Xaa is C or S

SEQ ID NO: 106057 - protein, 40 aa, Artificial Sequence; identical to SEQ ID NO: 2745
  Cyclic GFR-binding peptide
  MOD_RES (2)..(34)..(35): Xaa is C or S

SEQ ID NO: 106058 - protein, 33 aa, Artificial Sequence; identical to SEQ ID NO: 2746
  Cyclic GFR-binding peptide
  MOD_RES (32)..(33): Xaa is C or S

SEQ ID NO: 106059 - protein, 29 aa, Artificial Sequence
  Cyclic GFR-binding peptide
  MOD_RES (27)..(28): Xaa is C or S
EQYNKLTPVGMDDLYLVSIASLKTPVXXA

SEQ ID NO: 106060 - protein, 32 aa, Artificial Sequence; identical to SEQ ID NO: 2749
  Cyclic GFR-binding peptide
  MOD_RES (30)..(31): Xaa is C or S

SEQ ID NO: 106061 - protein, 38 aa, Artificial Sequence
  Cyclic GFR-binding peptide
  MOD_RES (2)..(4)..(35)..(36): Xaa is C or S
LXGXEEVIMQYNKLLLVRGNDLYLMSIASTKVPAXXTS

SEQ ID NO: 106062 - protein, 30 aa, Artificial Sequence; identical to SEQ ID NO: 13297
  Cyclic GFR-binding peptide
  MOD_RES (2)..(2): Xaa is C or S

SEQ ID NO: 106063 - protein, 28 aa, Artificial Sequence
  Cyclic GFR-binding peptide
  MOD_RES (1)..(1): Xaa is C or S
XEAVSMGEQYNKLTPVGMDDLYLVSIAS

SEQ ID NO: 106064 - protein, 33 aa, Artificial Sequence
  Cyclic GFR-binding peptide
  MOD_RES (28)..(29): Xaa is C or S
MDQYNKLVVNNAADLYLISIASLRAPVXXSAPA

SEQ ID NO: 106065 - protein, 27 aa, Artificial Sequence
  Cyclic GFR-binding peptide
MGRYKKLIIQQKDNFYLMSIANMKTPT

SEQ ID NO: 106066 - protein, 33 aa, Artificial Sequence; identical to SEQ ID NO: 2753
  Cyclic GFR-binding peptide
  MOD_RES (2)..(4): Xaa is C or S

SEQ ID NO: 106067 - protein, 33 aa, Artificial Sequence
  Cyclic GFR-binding peptide
  MOD_RES (2)..(2): Xaa is C or S
GXAEVVMDQYNKLVVNNAADLYLISIASLRAPV

SEQ ID NO: 106068 - protein, 26 aa, Artificial Sequence
  Cyclic GFR-binding peptide
KVVMNRYKKLIVNNSSDFYLVSIANL

SEQ ID NO: 106069 - protein, 26 aa, Artificial Sequence
  Cyclic GFR-binding peptide
SEVVMDQYNKLVVNNASDLYLISIAS

SEQ ID NO: 106070 - protein, 35 aa, Artificial Sequence
  Cyclic GFR-binding peptide
  MOD_RES (29)..(30): Xaa is C or S
VMDQYNKLVVNNAADLYLISIASLRAPVXXSAPAA

SEQ ID NO: 106071 - protein, 37 aa, Artificial Sequence; identical to SEQ ID NO: 2755
  Cyclic GFR-binding peptide
  MOD_RES (2)..(4)..(36)..(37): Xaa is C or S

SEQ ID NO: 106072 - protein, 31 aa, Artificial Sequence; identical to SEQ ID NO: 2756
  Cyclic GFR-binding peptide

SEQ ID NO: 106073 - protein, 32 aa, Artificial Sequence; identical to SEQ ID NO: 2758
  Cyclic GFR-binding peptide
  MOD_RES (28)..(28): Xaa is C or S

SEQ ID NO: 106074 - protein, 36 aa, Artificial Sequence; identical to SEQ ID NO: 2764
  Cyclic GFR-binding peptide
  MOD_RES (31)..(32): Xaa is C or S

SEQ ID NO: 106075 - protein, 34 aa, Artificial Sequence; identical to SEQ ID NO: 85095
  Cyclic GFR-binding peptide
  MOD_RES (2)..(34): Xaa is C or S

SEQ ID NO: 106076 - protein, 32 aa, Artificial Sequence; identical to SEQ ID NO: 2768
  Cyclic GFR-binding peptide
  MOD_RES (29)..(30): Xaa is C or S

SEQ ID NO: 106077 - protein, 34 aa, Artificial Sequence; identical to SEQ ID NO: 13317
  Cyclic GFR-binding peptide
  MOD_RES (29)..(30): Xaa is C or S

SEQ ID NO: 106078 - protein, 20 aa, Artificial Sequence
  Cyclic GFR-binding peptide
QYNKLLLVRGNDLYLMSIAS

SEQ ID NO: 106079 - protein, 26 aa, Artificial Sequence
  Cyclic GFR-binding peptide
VVMNRYKKLIVNNSSDFYLVSIANLK

SEQ ID NO: 106080 - protein, 31 aa, Artificial Sequence; identical to SEQ ID NO: 2773
  Cyclic GFR-binding peptide
  MOD_RES (27)..(28): Xaa is C or S

SEQ ID NO: 106081 - protein, 26 aa, Artificial Sequence
  Cyclic GFR-binding peptide
KVVMRYKKLVKPTRGVFYLISIANLD

SEQ ID NO: 106082 - protein, 30 aa, Artificial Sequence
  Cyclic GFR-binding peptide
  MOD_RES (29)..(30): Xaa is C or S
VIMQYNKLLLVRGNDLYLMSIASTKVPAXX

SEQ ID NO: 106083 - protein, 29 aa, Artificial Sequence
  Cyclic GFR-binding peptide
  MOD_RES (2)..(2): Xaa is C or S
GXAKVVMNQYNKLIVNNSSDLYLVSIASL

SEQ ID NO: 106084 - protein, 22 aa, Artificial Sequence
  Cyclic GFR-binding peptide
NRYKKLIVNNSSDFYLVSIANL

SEQ ID NO: 106085 - protein, 37 aa, Artificial Sequence; identical to SEQ ID NO: 2783
  Cyclic GFR-binding peptide
  MOD_RES (32)..(33): Xaa is C or S

SEQ ID NO: 106086 - protein, 22 aa, Artificial Sequence
  Cyclic GFR-binding peptide
MNRYKKLIVNNSSDFYLVSIAN

SEQ ID NO: 106087 - protein, 29 aa, Artificial Sequence
  Cyclic GFR-binding peptide
AKVVMNRYKKLIVNNSSDFYLVSIANLKT

SEQ ID NO: 106088 - protein, 33 aa, Artificial Sequence; identical to SEQ ID NO: 2787
  Cyclic GFR-binding peptide
  MOD_RES (30)..(31): Xaa is C or S

SEQ ID NO: 106089 - protein, 30 aa, Artificial Sequence
  Cyclic GFR-binding peptide
  MOD_RES (27)..(28): Xaa is C or S
GQYNKLYTVVGKDLYLISIASLKTPVXXAK

SEQ ID NO: 106090 - protein, 35 aa, Artificial Sequence
  Cyclic GFR-binding peptide
  MOD_RES (2)..(34)..(35): Xaa is C or S
AXSEVTMNQYNKLVVNKNEDLYLISIASMKEPVXX

SEQ ID NO: 106091 - protein, 33 aa, Artificial Sequence
  Cyclic GFR-binding peptide
  MOD_RES (29)..(30): Xaa is C or S
AMGQYNKLYTVVGKDLYLISIASLKTPVXXAKS

SEQ ID NO: 106092 - protein, 27 aa, Artificial Sequence
  Cyclic GFR-binding peptide
SKVIMQYNKLIKPTKGILYLISIASLD

SEQ ID NO: 106093 - protein, 24 aa, Artificial Sequence
  Cyclic GFR-binding peptide
MGRYKKLIIQQKDNFYLMSIANMK

SEQ ID NO: 106094 - protein, 29 aa, Artificial Sequence
  Cyclic GFR-binding peptide
  MOD_RES (2)..(4): Xaa is C or S
SXKXSRVIMQYNKLVKPKRGVLYLISIAS

SEQ ID NO: 106095 - protein, 33 aa, Artificial Sequence
  Cyclic GFR-binding peptide
  MOD_RES (2)..(2): Xaa is C or S
GXESVAMGQYNKLYTVVGKDLYLISIASLKTPV

SEQ ID NO: 106096 - protein, 24 aa, Artificial Sequence
  Cyclic GFR-binding peptide
VMNRYKKLIVNNSSDFYLVSIANL

SEQ ID NO: 106097 - protein, 29 aa, Artificial Sequence
  Cyclic GFR-binding peptide
AEVVMDRYKKLVVNNAADFYLISIANLRA

SEQ ID NO: 106098 - protein, 37 aa, Artificial Sequence; identical to SEQ ID NO: 2798
  Cyclic GFR-binding peptide
  MOD_RES (1)..(3)..(35): Xaa is C or S

SEQ ID NO: 106099 - protein, 34 aa, Artificial Sequence; identical to SEQ ID NO: 2799
  Cyclic GFR-binding peptide
  MOD_RES (28)..(29): Xaa is C or S

SEQ ID NO: 106100 - protein, 30 aa, Artificial Sequence; identical to SEQ ID NO: 2800
  Cyclic GFR-binding peptide
  MOD_RES (28)..(29): Xaa is C or S

SEQ ID NO: 106101 - protein, 28 aa, Artificial Sequence
  Cyclic GFR-binding peptide
  MOD_RES (1)..(3): Xaa is C or S
XKXSKVIMQYNKLIKPTKGILYLISIAS

SEQ ID NO: 106102 - protein, 33 aa, Artificial Sequence; identical to SEQ ID NO: 2803
  Cyclic GFR-binding peptide
  MOD_RES (1)..(1): Xaa is C or S

SEQ ID NO: 106103 - protein, 40 aa, Artificial Sequence; identical to SEQ ID NO: 2806
  Cyclic GFR-binding peptide
  MOD_RES (1)..(34)..(35): Xaa is C or S

SEQ ID NO: 106104 - protein, 29 aa, Artificial Sequence
  Cyclic GFR-binding peptide
SKVVMQYNKLVKPTRGVLYLISIASLDQP

SEQ ID NO: 106105 - protein, 34 aa, Artificial Sequence; identical to SEQ ID NO: 2808
  Cyclic GFR-binding peptide
  MOD_RES (30)..(31): Xaa is C or S

SEQ ID NO: 106106 - protein, 25 aa, Artificial Sequence
  Cyclic GFR-binding peptide
EVTMNRYKKLVVNKNEDFYLISIAN

SEQ ID NO: 106107 - protein, 25 aa, Artificial Sequence
  Cyclic GFR-binding peptide
NQYNKLIVNNSSDLYLVSIASLKTP

SEQ ID NO: 106108 - protein, 26 aa, Artificial Sequence
  Cyclic GFR-binding peptide
VMNRYKKLIVNSSDDFYLVSIANLKT

SEQ ID NO: 106109 - protein, 37 aa, Artificial Sequence; identical to SEQ ID NO: 31022
  Cyclic GFR-binding peptide
  MOD_RES (31)..(32): Xaa is C or S

SEQ ID NO: 106110 - protein, 36 aa, Artificial Sequence; identical to SEQ ID NO: 2816
  Cyclic GFR-binding peptide
  MOD_RES (31)..(32): Xaa is C or S

SEQ ID NO: 106111 - protein, 38 aa, Artificial Sequence; identical to SEQ ID NO: 2817
  Cyclic GFR-binding peptide
  MOD_RES (32)..(33): Xaa is C or S

SEQ ID NO: 106112 - protein, 28 aa, Artificial Sequence
  Cyclic GFR-binding peptide
  MOD_RES (1)..(3): Xaa is C or S
XKXSRVIMQYNKLVKPKRGVLYLISIAS

SEQ ID NO: 106113 - protein, 31 aa, Artificial Sequence; identical to SEQ ID NO: 31030
  Cyclic GFR-binding peptide

SEQ ID NO: 106114 - protein, 25 aa, Artificial Sequence
  Cyclic GFR-binding peptide
AMGRYKKLYTVVGKDFYLISIANLK

SEQ ID NO: 106115 - protein, 35 aa, Artificial Sequence; identical to SEQ ID NO: 2823
  Cyclic GFR-binding peptide
  MOD_RES (30)..(31): Xaa is C or S

SEQ ID NO: 106116 - protein, 31 aa, Artificial Sequence
  Cyclic GFR-binding peptide
  MOD_RES (2)..(2): Xaa is C or S
GXAEVVMDQYNKLVVNNAADLYLISIASLRA

SEQ ID NO: 106117 - protein, 31 aa, Artificial Sequence; identical to SEQ ID NO: 13374
  Cyclic GFR-binding peptide
  MOD_RES (27)..(28): Xaa is C or S

SEQ ID NO: 106118 - protein, 32 aa, Artificial Sequence; identical to SEQ ID NO: 2827
  Cyclic GFR-binding peptide
  MOD_RES (28)..(29): Xaa is C or S

SEQ ID NO: 106119 - protein, 39 aa, Artificial Sequence; identical to SEQ ID NO: 2828
  Cyclic GFR-binding peptide
  MOD_RES (1)..(3)..(34)..(35): Xaa is C or S

SEQ ID NO: 106120 - protein, 30 aa, Artificial Sequence; identical to SEQ ID NO: 2831
  Cyclic GFR-binding peptide
  MOD_RES (26)..(27): Xaa is C or S

SEQ ID NO: 106121 - protein, 22 aa, Artificial Sequence
  Cyclic GFR-binding peptide
RYKKLVKPKRGVFYLISIANLA

SEQ ID NO: 106122 - protein, 31 aa, Artificial Sequence
  Cyclic GFR-binding peptide
  MOD_RES (28)..(29): Xaa is C or S
IMQYNKLLLVRGNDLYLMSIASTKVPAXXTS

SEQ ID NO: 106123 - protein, 27 aa, Artificial Sequence
  Cyclic GFR-binding peptide
  MOD_RES (1)..(1): Xaa is C or S
XSEVTMNQYNKLVVNKNEDLYLISIAS

SEQ ID NO: 106124 - protein, 34 aa, Artificial Sequence; identical to SEQ ID NO: 76335
  Cyclic GFR-binding peptide
  MOD_RES (1)..(3): Xaa is C or S

SEQ ID NO: 106125 - protein, 37 aa, Artificial Sequence; identical to SEQ ID NO: 31050
  Cyclic GFR-binding peptide
  MOD_RES (32)..(33): Xaa is C or S

SEQ ID NO: 106126 - protein, 21 aa, Artificial Sequence
  Cyclic GFR-binding peptide
MQYNKLVKPTRGVLYLISIAS

SEQ ID NO: 106127 - protein, 28 aa, Artificial Sequence
  Cyclic GFR-binding peptide
SEVTMNQYNKLVVNKNEDLYLISIASMK

SEQ ID NO: 106128 - protein, 30 aa, Artificial Sequence; identical to SEQ ID NO: 31052
  Cyclic GFR-binding peptide
  MOD_RES (2)..(2): Xaa is C or S

SEQ ID NO: 106129 - protein, 37 aa, Artificial Sequence; identical to SEQ ID NO: 2837
  Cyclic GFR-binding peptide
  MOD_RES (31)..(32): Xaa is C or S

SEQ ID NO: 106130 - protein, 32 aa, Artificial Sequence; identical to SEQ ID NO: 76339
  Cyclic GFR-binding peptide
  MOD_RES (29)..(30): Xaa is C or S

SEQ ID NO: 106131 - protein, 24 aa, Artificial Sequence
  Cyclic GFR-binding peptide
DQYNKLVVNNASDLYLISIASLRT

SEQ ID NO: 106132 - protein, 35 aa, Artificial Sequence; identical to SEQ ID NO: 2838
  Cyclic GFR-binding peptide
  MOD_RES (2)..(4): Xaa is C or S

SEQ ID NO: 106133 - protein, 30 aa, Artificial Sequence; identical to SEQ ID NO: 31056
  Cyclic GFR-binding peptide
  MOD_RES (27)..(28): Xaa is C or S

SEQ ID NO: 106134 - protein, 25 aa, Artificial Sequence
  Cyclic GFR-binding peptide
QYNKLVVNKNEDLYLISIASMKEPV

SEQ ID NO: 106135 - protein, 28 aa, Artificial Sequence
  Cyclic GFR-binding peptide
  MOD_RES (1)..(1): Xaa is C or S
XSKVIMQYNKLIKPTKGILYLISIASLD

SEQ ID NO: 106136 - protein, 31 aa, Artificial Sequence; identical to SEQ ID NO: 2844
  Cyclic GFR-binding peptide
  MOD_RES (30)..(31): Xaa is C or S

SEQ ID NO: 106137 - protein, 38 aa, Artificial Sequence; identical to SEQ ID NO: 2845
  Cyclic GFR-binding peptide
  MOD_RES (2)..(34)..(35): Xaa is C or S

SEQ ID NO: 106138 - protein, 26 aa, Artificial Sequence
  Cyclic GFR-binding peptide
GEVVMEQYNKLVVKDYEDLYLMSIAS

SEQ ID NO: 106139 - protein, 32 aa, Artificial Sequence; identical to SEQ ID NO: 2847
  Cyclic GFR-binding peptide
  MOD_RES (30)..(31): Xaa is C or S

SEQ ID NO: 106140 - protein, 31 aa, Artificial Sequence; identical to SEQ ID NO: 2848
  Cyclic GFR-binding peptide
  MOD_RES (30)..(31): Xaa is C or S

SEQ ID NO: 106141 - protein, 31 aa, Artificial Sequence; identical to SEQ ID NO: 2849
  Cyclic GFR-binding peptide
  MOD_RES (2)..(2): Xaa is C or S

SEQ ID NO: 106142 - protein, 33 aa, Artificial Sequence; identical to SEQ ID NO: 2851
  Cyclic GFR-binding peptide
  MOD_RES (31)..(32): Xaa is C or S

SEQ ID NO: 106143 - protein, 29 aa, Artificial Sequence
  Cyclic GFR-binding peptide
SMGEQYNKLTPVGMDDLYLVSIASLKTPV

SEQ ID NO: 106144 - protein, 27 aa, Artificial Sequence
  Cyclic GFR-binding peptide
  MOD_RES (26)..(27): Xaa is C or S
QYNKLVVNNASDLYLISIASLRTPVXX

SEQ ID NO: 106145 - protein, 23 aa, Artificial Sequence
  Cyclic GFR-binding peptide
GERYKKLTPVGMDDFYLVSIANL

SEQ ID NO: 106146 - protein, 39 aa, Artificial Sequence
  Cyclic GFR-binding peptide
  MOD_RES (2)..(4)..(36)..(37): Xaa is C or S
RXGXAEVVMDQYNKLVVNNAADLYLISIASLRAPVXXSA

SEQ ID NO: 106147 - protein, 31 aa, Artificial Sequence; identical to SEQ ID NO: 2860
  Cyclic GFR-binding peptide
  MOD_RES (1)..(1): Xaa is C or S

SEQ ID NO: 106148 - protein, 22 aa, Artificial Sequence
  Cyclic GFR-binding peptide
QYNKLVVKDYEDLYLMSIASLE

SEQ ID NO: 106149 - protein, 35 aa, Artificial Sequence; identical to SEQ ID NO: 2865
  Cyclic GFR-binding peptide
  MOD_RES (32)..(33): Xaa is C or S

SEQ ID NO: 106150 - protein, 29 aa, Artificial Sequence
  Cyclic GFR-binding peptide
  MOD_RES (29)..(29): Xaa is C or S
VMGQYNKLIIQQKDNLYLMSIASMKTPTX

SEQ ID NO: 106151 - protein, 34 aa, Artificial Sequence; identical to SEQ ID NO: 2867
  Cyclic GFR-binding peptide
  MOD_RES (1)..(34): Xaa is C or S

SEQ ID NO: 106152 - protein, 26 aa, Artificial Sequence
  Cyclic GFR-binding peptide
MNRYKKLIVNNSSDFYLVSIANLKTP

SEQ ID NO: 106153 - protein, 29 aa, Artificial Sequence
  Cyclic GFR-binding peptide
  MOD_RES (1)..(3): Xaa is C or S
XGXSEVVMDQYNKLVVNNASDLYLISIAS

SEQ ID NO: 106154 - protein, 22 aa, Artificial Sequence
  Cyclic GFR-binding peptide
GQYNKLYTVVGKDLYLISIASL

SEQ ID NO: 106155 - protein, 28 aa, Artificial Sequence
  Cyclic GFR-binding peptide
VMGQYNKLIIQQKDNLYLMSIASMKTPT

SEQ ID NO: 106156 - protein, 29 aa, Artificial Sequence
  Cyclic GFR-binding peptide
  MOD_RES (28)..(29): Xaa is C or S
MDQYNKLVVNNAADLYLISIASLRAPVXX

SEQ ID NO: 106157 - protein, 30 aa, Artificial Sequence; identical to SEQ ID NO: 13411
  Cyclic GFR-binding peptide
  MOD_RES (1)..(3): Xaa is C or S

SEQ ID NO: 106158 - protein, 41 aa, Artificial Sequence; identical to SEQ ID NO: 2877
  Cyclic GFR-binding peptide
  MOD_RES (2)..(4)..(36)..(37): Xaa is C or S

SEQ ID NO: 106159 - protein, 28 aa, Artificial Sequence
  Cyclic GFR-binding peptide
EVVMDRYKKLVVNNASDFYLISIANLRT

SEQ ID NO: 106160 - protein, 34 aa, Artificial Sequence; identical to SEQ ID NO: 2879
  Cyclic GFR-binding peptide
  MOD_RES (28)..(29): Xaa is C or S

SEQ ID NO: 106161 - protein, 21 aa, Artificial Sequence
  Cyclic GFR-binding peptide
GRYKKLYTVVGKDFYLISIAN

SEQ ID NO: 106162 - protein, 23 aa, Artificial Sequence
  Cyclic GFR-binding peptide
VMNRYKKLIVNSSDDFYLVSIAN

SEQ ID NO: 106163 - protein, 30 aa, Artificial Sequence; identical to SEQ ID NO: 2882
  Cyclic GFR-binding peptide
  MOD_RES (27)..(28): Xaa is C or S

SEQ ID NO: 106164 - protein, 33 aa, Artificial Sequence; identical to SEQ ID NO: 2883
  Cyclic GFR-binding peptide
  MOD_RES (1)..(33): Xaa is C or S

SEQ ID NO: 106165 - protein, 31 aa, Artificial Sequence; identical to SEQ ID NO: 2884
  Cyclic GFR-binding peptide

SEQ ID NO: 106166 - protein, 26 aa, Artificial Sequence
  Cyclic GFR-binding peptide
SMGEQYNKLTPVGMDDLYLVSIASLK

SEQ ID NO: 106167 - protein, 36 aa, Artificial Sequence; identical to SEQ ID NO: 2886
  Cyclic GFR-binding peptide
  MOD_RES (2)..(4)..(36): Xaa is C or S

SEQ ID NO: 106168 - protein, 31 aa, Artificial Sequence; identical to SEQ ID NO: 2889
  Cyclic GFR-binding peptide
  MOD_RES (30)..(31): Xaa is C or S

SEQ ID NO: 106169 - protein, 27 aa, Artificial Sequence
  Cyclic GFR-binding peptide
  MOD_RES (26)..(27): Xaa is C or S
QYNKLVKPTRGVLYLISIASLDQPVXX

SEQ ID NO: 106170 - protein, 36 aa, Artificial Sequence
  Cyclic GFR-binding peptide
  MOD_RES (31)..(32): Xaa is C or S
DVVMGQYNKLIIQQKDNLYLMSIASMKTPTXXPGAS

SEQ ID NO: 106171 - protein, 31 aa, Artificial Sequence
  Cyclic GFR-binding peptide
SEVTMNQYNKLVVNKNEDLYLISIASMKEPV

SEQ ID NO: 106172 - protein, 26 aa, Artificial Sequence
  Cyclic GFR-binding peptide
SRVVMNRYKKLIVNSSDDFYLVSIAN

SEQ ID NO: 106173 - protein, 31 aa, Artificial Sequence
  Cyclic GFR-binding peptide
  MOD_RES (1)..(1): Xaa is C or S
XSEVTMNQYNKLVVNKNEDLYLISIASMKEP

SEQ ID NO: 106174 - protein, 30 aa, Artificial Sequence; identical to SEQ ID NO: 2892
  Cyclic GFR-binding peptide
  MOD_RES (29)..(29): Xaa is C or S

SEQ ID NO: 106175 - protein, 35 aa, Artificial Sequence; identical to SEQ ID NO: 85191
  Cyclic GFR-binding peptide
  MOD_RES (30)..(31): Xaa is C or S

SEQ ID NO: 106176 - protein, 25 aa, Artificial Sequence
  Cyclic GFR-binding peptide
MRYKKLIKPTKGIFYLISIANLDQS

SEQ ID NO: 106177 - protein, 34 aa, Artificial Sequence; identical to SEQ ID NO: 2898
  Cyclic GFR-binding peptide
  MOD_RES (1)..(33)..(34): Xaa is C or S

SEQ ID NO: 106178 - protein, 30 aa, Artificial Sequence; identical to SEQ ID NO: 31107
  Cyclic GFR-binding peptide
  MOD_RES (26)..(27): Xaa is C or S

SEQ ID NO: 106179 - protein, 34 aa, Artificial Sequence; identical to SEQ ID NO: 2900
  Cyclic GFR-binding peptide
  MOD_RES (28)..(28): Xaa is C or S

SEQ ID NO: 106180 - protein, 33 aa, Artificial Sequence; identical to SEQ ID NO: 2902
  Cyclic GFR-binding peptide
  MOD_RES (29)..(29): Xaa is C or S

SEQ ID NO: 106181 - protein, 27 aa, Artificial Sequence
  Cyclic GFR-binding peptide
  MOD_RES (1)..(1): Xaa is C or S
XEEVIMQYNKLLLVRGNDLYLMSIAST

SEQ ID NO: 106182 - protein, 39 aa, Artificial Sequence
  Cyclic GFR-binding peptide
  MOD_RES (1)..(33)..(34): Xaa is C or S
XAEVVMDQYNKLVVNNAADLYLISIASLRAPVXXSAPAA

SEQ ID NO: 106183 - protein, 32 aa, Artificial Sequence
  Cyclic GFR-binding peptide
  MOD_RES (28)..(29): Xaa is C or S
IMQYNKLLLVRGNDLYLMSIASTKVPAXXTSP

SEQ ID NO: 106184 - protein, 23 aa, Artificial Sequence
  Cyclic GFR-binding peptide
RYKKLYTVVGKDFYLISIANLKT

SEQ ID NO: 106185 - protein, 32 aa, Artificial Sequence; identical to SEQ ID NO: 31113
  Cyclic GFR-binding peptide
  MOD_RES (2)..(2): Xaa is C or S

SEQ ID NO: 106186 - protein, 22 aa, Artificial Sequence
  Cyclic GFR-binding peptide
MNQYNKLIVNNSSDLYLVSIAS

SEQ ID NO: 106187 - protein, 30 aa, Artificial Sequence; identical to SEQ ID NO: 85202
  Cyclic GFR-binding peptide
  MOD_RES (2)..(2): Xaa is C or S

SEQ ID NO: 106188 - protein, 36 aa, Artificial Sequence
  Cyclic GFR-binding peptide
  MOD_RES (30)..(31): Xaa is C or S
EVIMQYNKLLLVRGNDLYLMSIASTKVPAXXTSPVR

SEQ ID NO: 106189 - protein, 29 aa, Artificial Sequence
  Cyclic GFR-binding peptide
RVVMNQYNKLIVNSSDDLYLVSIASLKTP

SEQ ID NO: 106190 - protein, 34 aa, Artificial Sequence; identical to SEQ ID NO: 13447
  Cyclic GFR-binding peptide
  MOD_RES (1)..(3): Xaa is C or S

SEQ ID NO: 106191 - protein, 23 aa, Artificial Sequence
  Cyclic GFR-binding peptide
MNQYNKLIVNNSSDLYLVSIASL

SEQ ID NO: 106192 - protein, 38 aa, Artificial Sequence; identical to SEQ ID NO: 2913
  Cyclic GFR-binding peptide
  MOD_RES (2)..(4)..(36)..(37): Xaa is C or S

SEQ ID NO: 106193 - protein, 24 aa, Artificial Sequence
  Cyclic GFR-binding peptide
MRYKKLVKPTRGVFYLISIANLDQ

SEQ ID NO: 106194 - protein, 23 aa, Artificial Sequence
  Cyclic GFR-binding peptide
MQYNKLVKPTRGVLYLISIASLD

SEQ ID NO: 106195 - protein, 22 aa, Artificial Sequence
  Cyclic GFR-binding peptide
RYKKLVVNKNEDFYLISIANMK

SEQ ID NO: 106196 - protein, 24 aa, Artificial Sequence
  Cyclic GFR-binding peptide
MGRYKKLYTVVGKDFYLISIANLK

SEQ ID NO: 106197 - protein, 29 aa, Artificial Sequence
  Cyclic GFR-binding peptide
  MOD_RES (27)..(28): Xaa is C or S
DRYKKLVVKENEDFYLMSIANLETPVXXA

SEQ ID NO: 106198 - protein, 30 aa, Artificial Sequence; identical to SEQ ID NO: 2918
  Cyclic GFR-binding peptide
  MOD_RES (1)..(3): Xaa is C or S

SEQ ID NO: 106199 - protein, 30 aa, Artificial Sequence; identical to SEQ ID NO: 76386
  Cyclic GFR-binding peptide
  MOD_RES (27)..(28): Xaa is C or S

SEQ ID NO: 106200 - protein, 39 aa, Artificial Sequence; identical to SEQ ID NO: 2920
  Cyclic GFR-binding peptide
  MOD_RES (1)..(33)..(34): Xaa is C or S

SEQ ID NO: 106201 - protein, 25 aa, Artificial Sequence
  Cyclic GFR-binding peptide
SKVVMQYNKLVKPTRGVLYLISIAS

SEQ ID NO: 106202 - protein, 35 aa, Artificial Sequence; identical to SEQ ID NO: 2922
  Cyclic GFR-binding peptide
  MOD_RES (2)..(33)..(34): Xaa is C or S

SEQ ID NO: 106203 - protein, 32 aa, Artificial Sequence
  Cyclic GFR-binding peptide
  MOD_RES (1)..(1): Xaa is C or S
XESVAMGQYNKLYTVVGKDLYLISIASLKTPV

SEQ ID NO: 106204 - protein, 31 aa, Artificial Sequence; identical to SEQ ID NO: 2923
  Cyclic GFR-binding peptide

SEQ ID NO: 106205 - protein, 36 aa, Artificial Sequence; identical to SEQ ID NO: 2925
  Cyclic GFR-binding peptide
  MOD_RES (2)..(4)..(36): Xaa is C or S

SEQ ID NO: 106206 - protein, 35 aa, Artificial Sequence; identical to SEQ ID NO: 2927
  Cyclic GFR-binding peptide
  MOD_RES (31)..(32): Xaa is C or S

SEQ ID NO: 106207 - protein, 25 aa, Artificial Sequence
  Cyclic GFR-binding peptide
MNRYKKLIVNSSDDFYLVSIANLKT

SEQ ID NO: 106208 - protein, 34 aa, Artificial Sequence; identical to SEQ ID NO: 2930
  Cyclic GFR-binding peptide
  MOD_RES (30)..(31): Xaa is C or S

SEQ ID NO: 106209 - protein, 36 aa, Artificial Sequence; identical to SEQ ID NO: 76395
  Cyclic GFR-binding peptide
  MOD_RES (2)..(33)..(34): Xaa is C or S

SEQ ID NO: 106210 - protein, 31 aa, Artificial Sequence; identical to SEQ ID NO: 2932
  Cyclic GFR-binding peptide
  MOD_RES (29)..(30): Xaa is C or S

SEQ ID NO: 106211 - protein, 30 aa, Artificial Sequence; identical to SEQ ID NO: 2934
  Cyclic GFR-binding peptide
  MOD_RES (1)..(3): Xaa is C or S

SEQ ID NO: 106212 - protein, 32 aa, Artificial Sequence; identical to SEQ ID NO: 2936
  Cyclic GFR-binding peptide
  MOD_RES (28)..(29): Xaa is C or S

SEQ ID NO: 106213 - protein, 35 aa, Artificial Sequence; identical to SEQ ID NO: 2937
  Cyclic GFR-binding peptide
  MOD_RES (29)..(30): Xaa is C or S

SEQ ID NO: 106214 - protein, 27 aa, Artificial Sequence
  Cyclic GFR-binding peptide
RVIMRYKKLVKPKRGVFYLISIANLAQ

SEQ ID NO: 106215 - protein, 28 aa, Artificial Sequence
  Cyclic GFR-binding peptide
VVMNRYKKLIVNNSSDFYLVSIANLKTP

SEQ ID NO: 106216 - protein, 32 aa, Artificial Sequence; identical to SEQ ID NO: 2942
  Cyclic GFR-binding peptide
  MOD_RES (1)..(1): Xaa is C or S

SEQ ID NO: 106217 - protein, 28 aa, Artificial Sequence
  Cyclic GFR-binding peptide
  MOD_RES (28)..(28): Xaa is C or S
MDQYNKLVVNNASDLYLISIASLRTPVX

SEQ ID NO: 106218 - protein, 26 aa, Artificial Sequence
  Cyclic GFR-binding peptide
GQYNKLYTVVGKDLYLISIASLKTPV

SEQ ID NO: 106219 - protein, 30 aa, Artificial Sequence; identical to SEQ ID NO: 2944
  Cyclic GFR-binding peptide
  MOD_RES (1)..(3): Xaa is C or S

SEQ ID NO: 106220 - protein, 34 aa, Artificial Sequence
  Cyclic GFR-binding peptide
  MOD_RES (31)..(32): Xaa is C or S
DVVMGQYNKLIIQQKDNLYLMSIASMKTPTXXPG

SEQ ID NO: 106221 - protein, 27 aa, Artificial Sequence
  Cyclic GFR-binding peptide
EEVIMQYNKLLLVRGNDLYLMSIASTK

SEQ ID NO: 106222 - protein, 29 aa, Artificial Sequence
  Cyclic GFR-binding peptide
  MOD_RES (28)..(29): Xaa is C or S
MNQYNKLVVNKNEDLYLISIASMKEPVXX

SEQ ID NO: 106223 - protein, 31 aa, Artificial Sequence; identical to SEQ ID NO: 2948
  Cyclic GFR-binding peptide
  MOD_RES (28)..(29): Xaa is C or S

SEQ ID NO: 106224 - protein, 35 aa, Artificial Sequence; identical to SEQ ID NO: 2949
  Cyclic GFR-binding peptide
  MOD_RES (30)..(31): Xaa is C or S

SEQ ID NO: 106225 - protein, 28 aa, Artificial Sequence
  Cyclic GFR-binding peptide
  MOD_RES (2)..(2): Xaa is C or S
GXSRVVMNRYKKLIVNSSDDFYLVSIAN

SEQ ID NO: 106226 - protein, 35 aa, Artificial Sequence; identical to SEQ ID NO: 2952
  Cyclic GFR-binding peptide
  MOD_RES (32)..(33): Xaa is C or S

SEQ ID NO: 106227 - protein, 25 aa, Artificial Sequence
  Cyclic GFR-binding peptide
MRYKKLVKPTRGVFYLISIANLDQP

SEQ ID NO: 106228 - protein, 25 aa, Artificial Sequence
  Cyclic GFR-binding peptide
QYNKLIIQQKDNLYLMSIASMKTPT

SEQ ID NO: 106229 - protein, 29 aa, Artificial Sequence
  Cyclic GFR-binding peptide
  MOD_RES (1)..(1): Xaa is C or S
XSKVIMRYKKLIKPTKGIFYLISIANLDQ

SEQ ID NO: 106230 - protein, 35 aa, Artificial Sequence
  Cyclic GFR-binding peptide
  MOD_RES (2)..(34)..(35): Xaa is C or S
GXRDVVMGQYNKLIIQQKDNLYLMSIASMKTPTXX

SEQ ID NO: 106231 - protein, 34 aa, Artificial Sequence; identical to SEQ ID NO: 2957
  Cyclic GFR-binding peptide
  MOD_RES (2)..(4): Xaa is C or S

SEQ ID NO: 106232 - protein, 36 aa, Artificial Sequence
  Cyclic GFR-binding peptide
  MOD_RES (31)..(32): Xaa is C or S
EVVMDQYNKLVVNNAADLYLISIASLRAPVXXSAPA

SEQ ID NO: 106233 - protein, 31 aa, Artificial Sequence; identical to SEQ ID NO: 2958
  Cyclic GFR-binding peptide
  MOD_RES (2)..(4): Xaa is C or S

SEQ ID NO: 106234 - protein, 28 aa, Artificial Sequence
  Cyclic GFR-binding peptide
  MOD_RES (28)..(28): Xaa is C or S
MEQYNKLVVKDYEDLYLMSIASLETPVX

SEQ ID NO: 106235 - protein, 40 aa, Artificial Sequence; identical to SEQ ID NO: 2961
  Cyclic GFR-binding peptide
  MOD_RES (1)..(3)..(35)..(36): Xaa is C or S

SEQ ID NO: 106236 - protein, 24 aa, Artificial Sequence
  Cyclic GFR-binding peptide
RYKKLIIQQKDNFYLMSIANMKTP

SEQ ID NO: 106237 - protein, 30 aa, Artificial Sequence; identical to SEQ ID NO: 2964
  Cyclic GFR-binding peptide
  MOD_RES (28)..(29): Xaa is C or S

SEQ ID NO: 106238 - protein, 39 aa, Artificial Sequence; identical to SEQ ID NO: 2965
  Cyclic GFR-binding peptide
  MOD_RES (2)..(34): Xaa is C or S

SEQ ID NO: 106239 - protein, 34 aa, Artificial Sequence; identical to SEQ ID NO: 13518
  Cyclic GFR-binding peptide
  MOD_RES (2)..(4): Xaa is C or S

SEQ ID NO: 106240 - protein, 27 aa, Artificial Sequence
  Cyclic GFR-binding peptide
  MOD_RES (27)..(27): Xaa is C or S
DRYKKLVVNNAADFYLISIANLRAPVX

SEQ ID NO: 106241 - protein, 31 aa, Artificial Sequence; identical to SEQ ID NO: 76414
  Cyclic GFR-binding peptide
  MOD_RES (2)..(4): Xaa is C or S

SEQ ID NO: 106242 - protein, 33 aa, Artificial Sequence; identical to SEQ ID NO: 80084
  Cyclic GFR-binding peptide
  MOD_RES (28)..(29): Xaa is C or S

SEQ ID NO: 106243 - protein, 24 aa, Artificial Sequence
  Cyclic GFR-binding peptide
AMGQYNKLYTVVGKDLYLISIASL

SEQ ID NO: 106244 - protein, 34 aa, Artificial Sequence; identical to SEQ ID NO: 13519
  Cyclic GFR-binding peptide
  MOD_RES (30)..(31): Xaa is C or S

SEQ ID NO: 106245 - protein, 40 aa, Artificial Sequence; identical to SEQ ID NO: 2976
  Cyclic GFR-binding peptide
  MOD_RES (2)..(34)..(35): Xaa is C or S

SEQ ID NO: 106246 - protein, 37 aa, Artificial Sequence
  Cyclic GFR-binding peptide
  MOD_RES (32)..(33): Xaa is C or S
AEVVMDQYNKLVVNNAADLYLISIASLRAPVXXSAPA

SEQ ID NO: 106247 - protein, 26 aa, Artificial Sequence
  Cyclic GFR-binding peptide
EVVMDQYNKLVVNNAADLYLISIASL

SEQ ID NO: 106248 - protein, 28 aa, Artificial Sequence
  Cyclic GFR-binding peptide
EVTMNRYKKLVVNKNEDFYLISIANMKE

SEQ ID NO: 106249 - protein, 34 aa, Artificial Sequence; identical to SEQ ID NO: 2977
  Cyclic GFR-binding peptide
  MOD_RES (2)..(33)..(34): Xaa is C or S

SEQ ID NO: 106250 - protein, 21 aa, Artificial Sequence
  Cyclic GFR-binding peptide
MQYNKLLLVRGNDLYLMSIAS

SEQ ID NO: 106251 - protein, 29 aa, Artificial Sequence
  Cyclic GFR-binding peptide
  MOD_RES (26)..(27): Xaa is C or S
QYNKLTPVGMDDLYLVSIASLKTPVXXAK

SEQ ID NO: 106252 - protein, 28 aa, Artificial Sequence
  Cyclic GFR-binding peptide
SKVIMQYNKLIKPTKGILYLISIASLDQ

SEQ ID NO: 106253 - protein, 36 aa, Artificial Sequence; identical to SEQ ID NO: 2982
  Cyclic GFR-binding peptide
  MOD_RES (30)..(31): Xaa is C or S

SEQ ID NO: 106254 - protein, 34 aa, Artificial Sequence; identical to SEQ ID NO: 2983
  Cyclic GFR-binding peptide
  MOD_RES (29)..(30): Xaa is C or S

SEQ ID NO: 106255 - protein, 38 aa, Artificial Sequence
  Cyclic GFR-binding peptide
  MOD_RES (2)..(34)..(35): Xaa is C or S
GXAEVVMDQYNKLVVNNAADLYLISIASLRAPVXXSAP

SEQ ID NO: 106256 - protein, 33 aa, Artificial Sequence; identical to SEQ ID NO: 2985
  Cyclic GFR-binding peptide
  MOD_RES (2)..(4): Xaa is C or S

SEQ ID NO: 106257 - protein, 35 aa, Artificial Sequence; identical to SEQ ID NO: 85277
  Cyclic GFR-binding peptide
  MOD_RES (1)..(3)..(35): Xaa is C or S

SEQ ID NO: 106258 - protein, 31 aa, Artificial Sequence; identical to SEQ ID NO: 2988
  Cyclic GFR-binding peptide
  MOD_RES (29)..(30): Xaa is C or S

SEQ ID NO: 106259 - protein, 30 aa, Artificial Sequence
  Cyclic GFR-binding peptide
  MOD_RES (30)..(30): Xaa is C or S
VAMGQYNKLYTVVGKDLYLISIASLKTPVX

SEQ ID NO: 106260 - protein, 24 aa, Artificial Sequence
  Cyclic GFR-binding peptide
VVMDQYNKLVVKENEDLYLMSIAS

SEQ ID NO: 106261 - protein, 27 aa, Artificial Sequence
  Cyclic GFR-binding peptide
VVMDRYKKLVVNNAADFYLISIANLRA

SEQ ID NO: 106262 - protein, 31 aa, Artificial Sequence
  Cyclic GFR-binding peptide
  MOD_RES (28)..(29): Xaa is C or S
MNQYNKLVVNKNEDLYLISIASMKEPVXXPE

SEQ ID NO: 106263 - protein, 33 aa, Artificial Sequence; identical to SEQ ID NO: 2994
  Cyclic GFR-binding peptide
  MOD_RES (27)..(27): Xaa is C or S

SEQ ID NO: 106264 - protein, 25 aa, Artificial Sequence
  Cyclic GFR-binding peptide
MNQYNKLIVNSSDDLYLVSIASLKT

SEQ ID NO: 106265 - protein, 36 aa, Artificial Sequence; identical to SEQ ID NO: 2998
  Cyclic GFR-binding peptide
  MOD_RES (1)..(3)..(34)..(35): Xaa is C or S

SEQ ID NO: 106266 - protein, 27 aa, Artificial Sequence
  Cyclic GFR-binding peptide
AVSMGEQYNKLTPVGMDDLYLVSIASL

SEQ ID NO: 106267 - protein, 22 aa, Artificial Sequence
  Cyclic GFR-binding peptide
RYKKLYTVVGKDFYLISIANLK

SEQ ID NO: 106268 - protein, 33 aa, Artificial Sequence
  Cyclic GFR-binding peptide
  MOD_RES (1)..(3): Xaa is C or S
XGXRDVVMGQYNKLIIQQKDNLYLMSIASMKTP

SEQ ID NO: 106269 - protein, 35 aa, Artificial Sequence; identical to SEQ ID NO: 3001
  Cyclic GFR-binding peptide
  MOD_RES (29)..(29): Xaa is C or S

SEQ ID NO: 106270 - protein, 28 aa, Artificial Sequence
  Cyclic GFR-binding peptide
  MOD_RES (28)..(28): Xaa is C or S
MDRYKKLVVNNASDFYLISIANLRTPVX

SEQ ID NO: 106271 - protein, 26 aa, Artificial Sequence
  Cyclic GFR-binding peptide
MNQYNKLVVNKNEDLYLISIASMKEP

SEQ ID NO: 106272 - protein, 35 aa, Artificial Sequence; identical to SEQ ID NO: 3007
  Cyclic GFR-binding peptide
  MOD_RES (1)..(33): Xaa is C or S

SEQ ID NO: 106273 - protein, 36 aa, Artificial Sequence; identical to SEQ ID NO: 3008
  Cyclic GFR-binding peptide
  MOD_RES (30)..(31): Xaa is C or S

SEQ ID NO: 106274 - protein, 29 aa, Artificial Sequence
  Cyclic GFR-binding peptide
VVMEQYNKLVVKDYEDLYLMSIASLETPV

SEQ ID NO: 106275 - protein, 30 aa, Artificial Sequence; identical to SEQ ID NO: 3010
  Cyclic GFR-binding peptide
  MOD_RES (28)..(29): Xaa is C or S

SEQ ID NO: 106276 - protein, 25 aa, Artificial Sequence
  Cyclic GFR-binding peptide
QYNKLVKPTRGVLYLISIASLDQPV

SEQ ID NO: 106277 - protein, 26 aa, Artificial Sequence
  Cyclic GFR-binding peptide
SEVTMNRYKKLVVNKNEDFYLISIAN

SEQ ID NO: 106278 - protein, 39 aa, Artificial Sequence; identical to SEQ ID NO: 13560
  Cyclic GFR-binding peptide
  MOD_RES (1)..(3)..(35)..(36): Xaa is C or S

SEQ ID NO: 106279 - protein, 37 aa, Artificial Sequence
  Cyclic GFR-binding peptide
  MOD_RES (1)..(3)..(35)..(36): Xaa is C or S
XGXRDVVMGQYNKLIIQQKDNLYLMSIASMKTPTXXP

SEQ ID NO: 106280 - protein, 31 aa, Artificial Sequence; identical to SEQ ID NO: 3016
  Cyclic GFR-binding peptide
  MOD_RES (29)..(30): Xaa is C or S

SEQ ID NO: 106281 - protein, 32 aa, Artificial Sequence
  Cyclic GFR-binding peptide
  MOD_RES (28)..(29): Xaa is C or S
MNQYNKLVVNKNEDLYLISIASMKEPVXXPEP

SEQ ID NO: 106282 - protein, 32 aa, Artificial Sequence; identical to SEQ ID NO: 3017
  Cyclic GFR-binding peptide
  MOD_RES (26)..(27): Xaa is C or S

SEQ ID NO: 106283 - protein, 38 aa, Artificial Sequence; identical to SEQ ID NO: 3018
  Cyclic GFR-binding peptide
  MOD_RES (1)..(3)..(35)..(36): Xaa is C or S

SEQ ID NO: 106284 - protein, 25 aa, Artificial Sequence
  Cyclic GFR-binding peptide
RYKKLVKPKRGVFYLISIANLAQPV

SEQ ID NO: 106285 - protein, 37 aa, Artificial Sequence
  Cyclic GFR-binding peptide
  MOD_RES (1)..(33)..(34): Xaa is C or S
XSEVTMNQYNKLVVNKNEDLYLISIASMKEPVXXPEP

SEQ ID NO: 106286 - protein, 31 aa, Artificial Sequence; identical to SEQ ID NO: 76433
  Cyclic GFR-binding peptide
  MOD_RES (2)..(2): Xaa is C or S

SEQ ID NO: 106287 - protein, 31 aa, Artificial Sequence; identical to SEQ ID NO: 3024
  Cyclic GFR-binding peptide
  MOD_RES (27)..(28): Xaa is C or S

SEQ ID NO: 106288 - protein, 31 aa, Artificial Sequence; identical to SEQ ID NO: 85310
  Cyclic GFR-binding peptide

SEQ ID NO: 106289 - protein, 41 aa, Artificial Sequence
  Cyclic GFR-binding peptide
  MOD_RES (1)..(3)..(35)..(36): Xaa is C or S
XAXSEVTMNQYNKLVVNKNEDLYLISIASMKEPVXXPEPIG

SEQ ID NO: 106290 - protein, 26 aa, Artificial Sequence
  Cyclic GFR-binding peptide
GEVVMERYKKLVVKDYEDFYLMSIAN

SEQ ID NO: 106291 - protein, 22 aa, Artificial Sequence
  Cyclic GFR-binding peptide
MQYNKLLLVRGNDLYLMSIAST

SEQ ID NO: 106292 - protein, 29 aa, Artificial Sequence
  Cyclic GFR-binding peptide
VVMNRYKKLIVNNSSDFYLVSIANLKTPA

SEQ ID NO: 106293 - protein, 27 aa, Artificial Sequence
  Cyclic GFR-binding peptide
VTMNQYNKLVVNKNEDLYLISIASMKE

SEQ ID NO: 106294 - protein, 31 aa, Artificial Sequence
  Cyclic GFR-binding peptide
  MOD_RES (27)..(28): Xaa is C or S
GQYNKLIIQQKDNLYLMSIASMKTPTXXPGA

SEQ ID NO: 106295 - protein, 39 aa, Artificial Sequence; identical to SEQ ID NO: 85322
  Cyclic GFR-binding peptide
  MOD_RES (1)..(33)..(34): Xaa is C or S

SEQ ID NO: 106296 - protein, 25 aa, Artificial Sequence
  Cyclic GFR-binding peptide
RYKKLIKPTKGIFYLISIANLDQSV

SEQ ID NO: 106297 - protein, 34 aa, Artificial Sequence; identical to SEQ ID NO: 3034
  Cyclic GFR-binding peptide
  MOD_RES (28)..(29): Xaa is C or S

SEQ ID NO: 106298 - protein, 31 aa, Artificial Sequence; identical to SEQ ID NO: 3035
  Cyclic GFR-binding peptide
  MOD_RES (26)..(27): Xaa is C or S

SEQ ID NO: 106299 - protein, 28 aa, Artificial Sequence
  Cyclic GFR-binding peptide
  MOD_RES (28)..(28): Xaa is C or S
MDQYNKLVVNNAADLYLISIASLRAPVX

SEQ ID NO: 106300 - protein, 30 aa, Artificial Sequence; identical to SEQ ID NO: 3039
  Cyclic GFR-binding peptide
  MOD_RES (2)..(2): Xaa is C or S

SEQ ID NO: 106301 - protein, 37 aa, Artificial Sequence; identical to SEQ ID NO: 3040
  Cyclic GFR-binding peptide
  MOD_RES (1)..(34)..(35): Xaa is C or S

SEQ ID NO: 106302 - protein, 35 aa, Artificial Sequence; identical to SEQ ID NO: 13582
  Cyclic GFR-binding peptide
  MOD_RES (32)..(33): Xaa is C or S

SEQ ID NO: 106303 - protein, 36 aa, Artificial Sequence; identical to SEQ ID NO: 85334
  Cyclic GFR-binding peptide
  MOD_RES (2)..(34)..(35): Xaa is C or S

SEQ ID NO: 106304 - protein, 24 aa, Artificial Sequence
  Cyclic GFR-binding peptide
MRYKKLLLVRGNDFYLMSIANTKV

SEQ ID NO: 106305 - protein, 23 aa, Artificial Sequence
  Cyclic GFR-binding peptide
AMGRYKKLYTVVGKDFYLISIAN

SEQ ID NO: 106306 - protein, 32 aa, Artificial Sequence
  Cyclic GFR-binding peptide
  MOD_RES (31)..(32): Xaa is C or S
SVAMGQYNKLYTVVGKDLYLISIASLKTPVXX

SEQ ID NO: 106307 - protein, 36 aa, Artificial Sequence; identical to SEQ ID NO: 3047
  Cyclic GFR-binding peptide
  MOD_RES (31)..(32): Xaa is C or S

SEQ ID NO: 106308 - protein, 28 aa, Artificial Sequence
  Cyclic GFR-binding peptide
  MOD_RES (28)..(28): Xaa is C or S
MERYKKLVVKDYEDFYLMSIANLETPVX

SEQ ID NO: 106309 - protein, 27 aa, Artificial Sequence
  Cyclic GFR-binding peptide
MNRYKKLIVNSSDDFYLVSIANLKTPA

SEQ ID NO: 106310 - protein, 39 aa, Artificial Sequence; identical to SEQ ID NO: 3051
  Cyclic GFR-binding peptide
  MOD_RES (1)..(3)..(35)..(36): Xaa is C or S

SEQ ID NO: 106311 - protein, 30 aa, Artificial Sequence; identical to SEQ ID NO: 80150
  Cyclic GFR-binding peptide
  MOD_RES (1)..(3): Xaa is C or S

SEQ ID NO: 106312 - protein, 31 aa, Artificial Sequence
  Cyclic GFR-binding peptide
AEVVMDQYNKLVVNNAADLYLISIASLRAPV

SEQ ID NO: 106313 - protein, 32 aa, Artificial Sequence; identical to SEQ ID NO: 3056
  Cyclic GFR-binding peptide
  MOD_RES (29)..(30): Xaa is C or S

SEQ ID NO: 106314 - protein, 38 aa, Artificial Sequence; identical to SEQ ID NO: 3057
  Cyclic GFR-binding peptide
  MOD_RES (1)..(3)..(34)..(35): Xaa is C or S

SEQ ID NO: 106315 - protein, 30 aa, Artificial Sequence; identical to SEQ ID NO: 31290
  Cyclic GFR-binding peptide
  MOD_RES (29)..(30): Xaa is C or S

SEQ ID NO: 106316 - protein, 26 aa, Artificial Sequence
  Cyclic GFR-binding peptide
NRYKKLIVNNSSDFYLVSIANLKTPA

SEQ ID NO: 106317 - protein, 28 aa, Artificial Sequence
  Cyclic GFR-binding peptide
TMNQYNKLVVNKNEDLYLISIASMKEPV

SEQ ID NO: 106318 - protein, 26 aa, Artificial Sequence
  Cyclic GFR-binding peptide
VMGRYKKLIIQQKDNFYLMSIANMKT

SEQ ID NO: 106319 - protein, 38 aa, Artificial Sequence; identical to SEQ ID NO: 76464
  Cyclic GFR-binding peptide
  MOD_RES (1)..(3)..(34)..(35): Xaa is C or S

SEQ ID NO: 106320 - protein, 32 aa, Artificial Sequence; identical to SEQ ID NO: 85355
  Cyclic GFR-binding peptide
  MOD_RES (26)..(27): Xaa is C or S

SEQ ID NO: 106321 - protein, 35 aa, Artificial Sequence
  Cyclic GFR-binding peptide
  MOD_RES (31)..(32): Xaa is C or S
EVVMDQYNKLVVNNAADLYLISIASLRAPVXXSAP

SEQ ID NO: 106322 - protein, 40 aa, Artificial Sequence; identical to SEQ ID NO: 3063
  Cyclic GFR-binding peptide
  MOD_RES (1)..(3)..(35)..(36): Xaa is C or S

SEQ ID NO: 106323 - protein, 34 aa, Artificial Sequence; identical to SEQ ID NO: 3067
  Cyclic GFR-binding peptide
  MOD_RES (1)..(3): Xaa is C or S

SEQ ID NO: 106324 - protein, 28 aa, Artificial Sequence
  Cyclic GFR-binding peptide
VMNQYNKLIVNSSDDLYLVSIASLQTPA

SEQ ID NO: 106325 - protein, 34 aa, Artificial Sequence; identical to SEQ ID NO: 3069
  Cyclic GFR-binding peptide
  MOD_RES (2)..(4): Xaa is C or S

SEQ ID NO: 106326 - protein, 42 aa, Artificial Sequence; identical to SEQ ID NO: 3070
  Cyclic GFR-binding peptide
  MOD_RES (2)..(4)..(36)..(37): Xaa is C or S

SEQ ID NO: 106327 - protein, 30 aa, Artificial Sequence; identical to SEQ ID NO: 3072
  Cyclic GFR-binding peptide
  MOD_RES (2)..(2): Xaa is C or S

SEQ ID NO: 106328 - protein, 33 aa, Artificial Sequence
  Cyclic GFR-binding peptide
  MOD_RES (27)..(28): Xaa is C or S
DQYNKLVVNNAADLYLISIASLRAPVXXSAPAA

SEQ ID NO: 106329 - protein, 30 aa, Artificial Sequence; identical to SEQ ID NO: 3074
  Cyclic GFR-binding peptide
  MOD_RES (30)..(30): Xaa is C or S

SEQ ID NO: 106330 - protein, 25 aa, Artificial Sequence
  Cyclic GFR-binding peptide
VMNRYKKLIVNSSDDFYLVSIANLK

SEQ ID NO: 106331 - protein, 36 aa, Artificial Sequence; identical to SEQ ID NO: 3076
  Cyclic GFR-binding peptide
  MOD_RES (2)..(34)..(35): Xaa is C or S

SEQ ID NO: 106332 - protein, 27 aa, Artificial Sequence
  Cyclic GFR-binding peptide
GERYKKLTPVGMDDFYLVSIANLKTPV

SEQ ID NO: 106333 - protein, 32 aa, Artificial Sequence; identical to SEQ ID NO: 31322
  Cyclic GFR-binding peptide
  MOD_RES (28)..(29): Xaa is C or S

SEQ ID NO: 106334 - protein, 37 aa, Artificial Sequence; identical to SEQ ID NO: 3078
  Cyclic GFR-binding peptide
  MOD_RES (2)..(4)..(35)..(36): Xaa is C or S

SEQ ID NO: 106335 - protein, 37 aa, Artificial Sequence; identical to SEQ ID NO: 76478
  Cyclic GFR-binding peptide
  MOD_RES (1)..(32)..(33): Xaa is C or S

SEQ ID NO: 106336 - protein, 34 aa, Artificial Sequence; identical to SEQ ID NO: 3079
  Cyclic GFR-binding peptide
  MOD_RES (30)..(31): Xaa is C or S

SEQ ID NO: 106337 - protein, 32 aa, Artificial Sequence; identical to SEQ ID NO: 31326
  Cyclic GFR-binding peptide
  MOD_RES (1)..(1): Xaa is C or S

SEQ ID NO: 106338 - protein, 23 aa, Artificial Sequence
  Cyclic GFR-binding peptide
DQYNKLVVNNAADLYLISIASLR

SEQ ID NO: 106339 - protein, 35 aa, Artificial Sequence; identical to SEQ ID NO: 3087
  Cyclic GFR-binding peptide
  MOD_RES (29)..(30): Xaa is C or S

SEQ ID NO: 106340 - protein, 32 aa, Artificial Sequence; identical to SEQ ID NO: 3090
  Cyclic GFR-binding peptide
  MOD_RES (2)..(4): Xaa is C or S

SEQ ID NO: 106341 - protein, 34 aa, Artificial Sequence; identical to SEQ ID NO: 3091
  Cyclic GFR-binding peptide
  MOD_RES (32)..(33): Xaa is C or S

SEQ ID NO: 106342 - protein, 35 aa, Artificial Sequence; identical to SEQ ID NO: 3092
  Cyclic GFR-binding peptide
  MOD_RES (31)..(32): Xaa is C or S

SEQ ID NO: 106343 - protein, 40 aa, Artificial Sequence; identical to SEQ ID NO: 3094
  Cyclic GFR-binding peptide
  MOD_RES (2)..(35)..(36): Xaa is C or S

SEQ ID NO: 106344 - protein, 24 aa, Artificial Sequence
  Cyclic GFR-binding peptide
VMNQYNKLIVNSSDDLYLVSIASL

SEQ ID NO: 106345 - protein, 30 aa, Artificial Sequence; identical to SEQ ID NO: 13637
  Cyclic GFR-binding peptide
  MOD_RES (30)..(30): Xaa is C or S

SEQ ID NO: 106346 - protein, 31 aa, Artificial Sequence; identical to SEQ ID NO: 76495
  Cyclic GFR-binding peptide
  MOD_RES (28)..(29): Xaa is C or S

SEQ ID NO: 106347 - protein, 37 aa, Artificial Sequence; identical to SEQ ID NO: 3098
  Cyclic GFR-binding peptide
  MOD_RES (32)..(32): Xaa is C or S

SEQ ID NO: 106348 - protein, 34 aa, Artificial Sequence
  Cyclic GFR-binding peptide
  MOD_RES (31)..(32): Xaa is C or S
SVAMGQYNKLYTVVGKDLYLISIASLKTPVXXAK

SEQ ID NO: 106349 - protein, 30 aa, Artificial Sequence
  Cyclic GFR-binding peptide
  MOD_RES (28)..(29): Xaa is C or S
IMQYNKLLLVRGNDLYLMSIASTKVPAXXT

SEQ ID NO: 106350 - protein, 32 aa, Artificial Sequence; identical to SEQ ID NO: 31355
  Cyclic GFR-binding peptide
  MOD_RES (29)..(30): Xaa is C or S

SEQ ID NO: 106351 - protein, 37 aa, Artificial Sequence; identical to SEQ ID NO: 3101
  Cyclic GFR-binding peptide
  MOD_RES (2)..(4)..(36): Xaa is C or S

SEQ ID NO: 106352 - protein, 27 aa, Artificial Sequence
  Cyclic GFR-binding peptide
  MOD_RES (2)..(2): Xaa is C or S
KXSKVVMQYNKLVKPTRGVLYLISIAS

SEQ ID NO: 106353 - protein, 41 aa, Artificial Sequence
  Cyclic GFR-binding peptide
  MOD_RES (2)..(4)..(36)..(37): Xaa is C or S
RXAXSEVTMNQYNKLVVNKNEDLYLISIASMKEPVXXPEPI

SEQ ID NO: 106354 - protein, 25 aa, Artificial Sequence
  Cyclic GFR-binding peptide
VTMNRYKKLVVNKNEDFYLISIANM

SEQ ID NO: 106355 - protein, 29 aa, Artificial Sequence
  Cyclic GFR-binding peptide
  MOD_RES (1)..(3): Xaa is C or S
XGXSRVVMNRYKKLIVNSSDDFYLVSIAN

SEQ ID NO: 106356 - protein, 33 aa, Artificial Sequence
  Cyclic GFR-binding peptide
  MOD_RES (1)..(33): Xaa is C or S
XRDVVMGQYNKLIIQQKDNLYLMSIASMKTPTX

SEQ ID NO: 106357 - protein, 35 aa, Artificial Sequence
  Cyclic GFR-binding peptide
  MOD_RES (1)..(3)..(35): Xaa is C or S
XGXAEVVMDQYNKLVVNNAADLYLISIASLRAPVX

SEQ ID NO: 106358 - protein, 30 aa, Artificial Sequence; identical to SEQ ID NO: 76501
  Cyclic GFR-binding peptide
  MOD_RES (27)..(28): Xaa is C or S

SEQ ID NO: 106359 - protein, 27 aa, Artificial Sequence
  Cyclic GFR-binding peptide
MDQYNKLVVNNASDLYLISIASLRTPV

SEQ ID NO: 106360 - protein, 35 aa, Artificial Sequence; identical to SEQ ID NO: 3111
  Cyclic GFR-binding peptide
  MOD_RES (1)..(33)..(34): Xaa is C or S

SEQ ID NO: 106361 - protein, 27 aa, Artificial Sequence
  Cyclic GFR-binding peptide
VVMNQYNKLIVNSSDDLYLVSIASLQT

SEQ ID NO: 106362 - protein, 36 aa, Artificial Sequence; identical to SEQ ID NO: 31367
  Cyclic GFR-binding peptide
  MOD_RES (2)..(4)..(36): Xaa is C or S

SEQ ID NO: 106363 - protein, 23 aa, Artificial Sequence
  Cyclic GFR-binding peptide
MGERYKKLTPVGMDDFYLVSIAN

SEQ ID NO: 106364 - protein, 35 aa, Artificial Sequence; identical to SEQ ID NO: 3117
  Cyclic GFR-binding peptide
  MOD_RES (1)..(3)..(34)..(35): Xaa is C or S

SEQ ID NO: 106365 - protein, 29 aa, Artificial Sequence
  Cyclic GFR-binding peptide
SKVIMQYNKLIKPTKGILYLISIASLDQS

SEQ ID NO: 106366 - protein, 27 aa, Artificial Sequence
  Cyclic GFR-binding peptide
MEQYNKLVVKDYEDLYLMSIASLETPV

SEQ ID NO: 106367 - protein, 35 aa, Artificial Sequence; identical to SEQ ID NO: 13664
  Cyclic GFR-binding peptide
  MOD_RES (32)..(33): Xaa is C or S

SEQ ID NO: 106368 - protein, 31 aa, Artificial Sequence
  Cyclic GFR-binding peptide
  MOD_RES (26)..(27): Xaa is C or S
QYNKLYTVVGKDLYLISIASLKTPVXXAKSA

SEQ ID NO: 106369 - protein, 25 aa, Artificial Sequence
  Cyclic GFR-binding peptide
EVTMNQYNKLVVNKNEDLYLISIAS

SEQ ID NO: 106370 - protein, 30 aa, Artificial Sequence
  Cyclic GFR-binding peptide
  MOD_RES (2)..(2): Xaa is C or S
GXRDVVMGQYNKLIIQQKDNLYLMSIASMK

SEQ ID NO: 106371 - protein, 27 aa, Artificial Sequence
  Cyclic GFR-binding peptide
AVSMGERYKKLTPVGMDDFYLVSIANL

SEQ ID NO: 106372 - protein, 38 aa, Artificial Sequence; identical to SEQ ID NO: 3126
  Cyclic GFR-binding peptide
  MOD_RES (1)..(33): Xaa is C or S

SEQ ID NO: 106373 - protein, 25 aa, Artificial Sequence
  Cyclic GFR-binding peptide
DQYNKLVVNNASDLYLISIASLRTP

SEQ ID NO: 106374 - protein, 20 aa, Artificial Sequence
  Cyclic GFR-binding peptide
RYKKLIVNNSSDFYLVSIAN

SEQ ID NO: 106375 - protein, 35 aa, Artificial Sequence; identical to SEQ ID NO: 3128
  Cyclic GFR-binding peptide
  MOD_RES (1)..(3)..(34)..(35): Xaa is C or S

SEQ ID NO: 106376 - protein, 22 aa, Artificial Sequence
  Cyclic GFR-binding peptide
QYNKLLLVRGNDLYLMSIASTK

SEQ ID NO: 106377 - protein, 25 aa, Artificial Sequence
  Cyclic GFR-binding peptide
VVMRYKKLVKPTRGVFYLISIANLD

SEQ ID NO: 106378 - protein, 32 aa, Artificial Sequence; identical to SEQ ID NO: 3132
  Cyclic GFR-binding peptide
  MOD_RES (26)..(27): Xaa is C or S

SEQ ID NO: 106379 - protein, 23 aa, Artificial Sequence
  Cyclic GFR-binding peptide
MNRYKKLIVNNSSDFYLVSIANL

SEQ ID NO: 106380 - protein, 34 aa, Artificial Sequence
  Cyclic GFR-binding peptide
  MOD_RES (1)..(33)..(34): Xaa is C or S
XAEVVMDQYNKLVVNNAADLYLISIASLRAPVXX

SEQ ID NO: 106381 - protein, 23 aa, Artificial Sequence
  Cyclic GFR-binding peptide
MNRYKKLVVNKNEDFYLISIANM

SEQ ID NO: 106382 - protein, 34 aa, Artificial Sequence; identical to SEQ ID NO: 85436
  Cyclic GFR-binding peptide
  MOD_RES (29)..(30): Xaa is C or S

SEQ ID NO: 106383 - protein, 24 aa, Artificial Sequence
  Cyclic GFR-binding peptide
VIMQYNKLVKPKRGVLYLISIASL

SEQ ID NO: 106384 - protein, 25 aa, Artificial Sequence
  Cyclic GFR-binding peptide
VMDQYNKLVVNNAADLYLISIASLR

SEQ ID NO: 106385 - protein, 41 aa, Artificial Sequence; identical to SEQ ID NO: 3142
  Cyclic GFR-binding peptide
  MOD_RES (1)..(3)..(35): Xaa is C or S

SEQ ID NO: 106386 - protein, 34 aa, Artificial Sequence; identical to SEQ ID NO: 3143
  Cyclic GFR-binding peptide
  MOD_RES (1)..(3): Xaa is C or S

SEQ ID NO: 106387 - protein, 22 aa, Artificial Sequence
  Cyclic GFR-binding peptide
QYNKLVKPTRGVLYLISIASLD

SEQ ID NO: 106388 - protein, 26 aa, Artificial Sequence
  Cyclic GFR-binding peptide
SEVTMNQYNKLVVNKNEDLYLISIAS

SEQ ID NO: 106389 - protein, 34 aa, Artificial Sequence; identical to SEQ ID NO: 3145
  Cyclic GFR-binding peptide
  MOD_RES (28)..(28): Xaa is C or S

SEQ ID NO: 106390 - protein, 20 aa, Artificial Sequence
  Cyclic GFR-binding peptide
RYKKLIIQQKDNFYLMSIAN

SEQ ID NO: 106391 - protein, 38 aa, Artificial Sequence; identical to SEQ ID NO: 13692
  Cyclic GFR-binding peptide
  MOD_RES (1)..(3)..(35)..(36): Xaa is C or S

SEQ ID NO: 106392 - protein, 39 aa, Artificial Sequence; identical to SEQ ID NO: 3150
  Cyclic GFR-binding peptide
  MOD_RES (2)..(4)..(36)..(37): Xaa is C or S

SEQ ID NO: 106393 - protein, 25 aa, Artificial Sequence
  Cyclic GFR-binding peptide
QYNKLTPVGMDDLYLVSIASLKTPV

SEQ ID NO: 106394 - protein, 34 aa, Artificial Sequence; identical to SEQ ID NO: 31411
  Cyclic GFR-binding peptide
  MOD_RES (28)..(29): Xaa is C or S

SEQ ID NO: 106395 - protein, 27 aa, Artificial Sequence
  Cyclic GFR-binding peptide
SRVVMNQYNKLIVNSSDDLYLVSIASL

SEQ ID NO: 106396 - protein, 28 aa, Artificial Sequence
  Cyclic GFR-binding peptide
VAMGQYNKLYTVVGKDLYLISIASLKTP

SEQ ID NO: 106397 - protein, 34 aa, Artificial Sequence; identical to SEQ ID NO: 3156
  Cyclic GFR-binding peptide
  MOD_RES (2)..(4): Xaa is C or S

SEQ ID NO: 106398 - protein, 38 aa, Artificial Sequence; identical to SEQ ID NO: 3157
  Cyclic GFR-binding peptide
  MOD_RES (2)..(4)..(36): Xaa is C or S

SEQ ID NO: 106399 - protein, 37 aa, Artificial Sequence
  Cyclic GFR-binding peptide
  MOD_RES (31)..(32): Xaa is C or S
SVAMGQYNKLYTVVGKDLYLISIASLKTPVXXAKSAK

SEQ ID NO: 106400 - protein, 34 aa, Artificial Sequence; identical to SEQ ID NO: 85459
  Cyclic GFR-binding peptide
  MOD_RES (32)..(33): Xaa is C or S

SEQ ID NO: 106401 - protein, 37 aa, Artificial Sequence; identical to SEQ ID NO: 3164
  Cyclic GFR-binding peptide
  MOD_RES (2)..(4)..(36)..(37): Xaa is C or S

SEQ ID NO: 106402 - protein, 27 aa, Artificial Sequence
  Cyclic GFR-binding peptide
ARVVMNQYNKLIVNSSDDLYLVSIASL

SEQ ID NO: 106403 - protein, 27 aa, Artificial Sequence
  Cyclic GFR-binding peptide
SVAMGQYNKLYTVVGKDLYLISIASLK

SEQ ID NO: 106404 - protein, 33 aa, Artificial Sequence
  Cyclic GFR-binding peptide
  MOD_RES (31)..(32): Xaa is C or S
EVTMNQYNKLVVNKNEDLYLISIASMKEPVXXP

SEQ ID NO: 106405 - protein, 33 aa, Artificial Sequence; identical to SEQ ID NO: 3168
  Cyclic GFR-binding peptide
  MOD_RES (28)..(29): Xaa is C or S

SEQ ID NO: 106406 - protein, 28 aa, Artificial Sequence
  Cyclic GFR-binding peptide
  MOD_RES (28)..(28): Xaa is C or S
MNQYNKLVVNKNEDLYLISIASMKEPVX

SEQ ID NO: 106407 - protein, 34 aa, Artificial Sequence; identical to SEQ ID NO: 3170
  Cyclic GFR-binding peptide
  MOD_RES (1)..(33)..(34): Xaa is C or S

SEQ ID NO: 106408 - protein, 34 aa, Artificial Sequence; identical to SEQ ID NO: 3171
  Cyclic GFR-binding peptide
  MOD_RES (28)..(29): Xaa is C or S

SEQ ID NO: 106409 - protein, 31 aa, Artificial Sequence; identical to SEQ ID NO: 3172
  Cyclic GFR-binding peptide
  MOD_RES (28)..(29): Xaa is C or S

SEQ ID NO: 106410 - protein, 26 aa, Artificial Sequence
  Cyclic GFR-binding peptide
  MOD_RES (1)..(1): Xaa is C or S
XSKVVMQYNKLVKPTRGVLYLISIAS

SEQ ID NO: 106411 - protein, 31 aa, Artificial Sequence; identical to SEQ ID NO: 3174
  Cyclic GFR-binding peptide
  MOD_RES (28)..(28): Xaa is C or S

SEQ ID NO: 106412 - protein, 32 aa, Artificial Sequence
  Cyclic GFR-binding peptide
  MOD_RES (30)..(31): Xaa is C or S
VAMGQYNKLYTVVGKDLYLISIASLKTPVXXA

SEQ ID NO: 106413 - protein, 38 aa, Artificial Sequence; identical to SEQ ID NO: 3176
  Cyclic GFR-binding peptide
  MOD_RES (2)..(34): Xaa is C or S

SEQ ID NO: 106414 - protein, 34 aa, Artificial Sequence; identical to SEQ ID NO: 13722
  Cyclic GFR-binding peptide
  MOD_RES (1)..(33)..(34): Xaa is C or S

SEQ ID NO: 106415 - protein, 29 aa, Artificial Sequence
  Cyclic GFR-binding peptide
  MOD_RES (2)..(4): Xaa is C or S
SXKXSKVIMRYKKLIKPTKGIFYLISIAN

SEQ ID NO: 106416 - protein, 24 aa, Artificial Sequence
  Cyclic GFR-binding peptide
NQYNKLVVNKNEDLYLISIASMKE

SEQ ID NO: 106417 - protein, 34 aa, Artificial Sequence; identical to SEQ ID NO: 3180
  Cyclic GFR-binding peptide
  MOD_RES (31)..(32): Xaa is C or S

SEQ ID NO: 106418 - protein, 32 aa, Artificial Sequence; identical to SEQ ID NO: 3183
  Cyclic GFR-binding peptide
  MOD_RES (30)..(31): Xaa is C or S

SEQ ID NO: 106419 - protein, 36 aa, Artificial Sequence; identical to SEQ ID NO: 3184
  Cyclic GFR-binding peptide
  MOD_RES (1)..(3)..(34)..(35): Xaa is C or S

SEQ ID NO: 106420 - protein, 39 aa, Artificial Sequence; identical to SEQ ID NO: 76549
  Cyclic GFR-binding peptide
  MOD_RES (2)..(34)..(35): Xaa is C or S

SEQ ID NO: 106421 - protein, 34 aa, Artificial Sequence; identical to SEQ ID NO: 3185
  Cyclic GFR-binding peptide
  MOD_RES (1)..(3): Xaa is C or S

SEQ ID NO: 106422 - protein, 29 aa, Artificial Sequence
  Cyclic GFR-binding peptide
  MOD_RES (1)..(1): Xaa is C or S
XESVAMGRYKKLYTVVGKDFYLISIANLK

SEQ ID NO: 106423 - protein, 26 aa, Artificial Sequence
  Cyclic GFR-binding peptide
EVVMDRYKKLVVNNAADFYLISIANL

SEQ ID NO: 106424 - protein, 29 aa, Artificial Sequence
  Cyclic GFR-binding peptide
AVSMGERYKKLTPVGMDDFYLVSIANLKT

SEQ ID NO: 106425 - protein, 34 aa, Artificial Sequence; identical to SEQ ID NO: 31455
  Cyclic GFR-binding peptide
  MOD_RES (29)..(30): Xaa is C or S

SEQ ID NO: 106426 - protein, 35 aa, Artificial Sequence; identical to SEQ ID NO: 3190
  Cyclic GFR-binding peptide
  MOD_RES (31)..(32): Xaa is C or S

SEQ ID NO: 106427 - protein, 31 aa, Artificial Sequence; identical to SEQ ID NO: 13738
  Cyclic GFR-binding peptide
  MOD_RES (2)..(2): Xaa is C or S

SEQ ID NO: 106428 - protein, 31 aa, Artificial Sequence; identical to SEQ ID NO: 3192
  Cyclic GFR-binding peptide
  MOD_RES (29)..(30): Xaa is C or S

SEQ ID NO: 106429 - protein, 23 aa, Artificial Sequence
  Cyclic GFR-binding peptide
DRYKKLVVKENEDFYLMSIANLE

SEQ ID NO: 106430 - protein, 31 aa, Artificial Sequence
  Cyclic GFR-binding peptide
  MOD_RES (1)..(1): Xaa is C or S
XRDVVMGQYNKLIIQQKDNLYLMSIASMKTP

SEQ ID NO: 106431 - protein, 33 aa, Artificial Sequence; identical to SEQ ID NO: 3194
  Cyclic GFR-binding peptide
  MOD_RES (31)..(32): Xaa is C or S

SEQ ID NO: 106432 - protein, 32 aa, Artificial Sequence
  Cyclic GFR-binding peptide
  MOD_RES (26)..(27): Xaa is C or S
QYNKLLLVRGNDLYLMSIASTKVPAXXTSPVR

SEQ ID NO: 106433 - protein, 25 aa, Artificial Sequence
  Cyclic GFR-binding peptide
VIMQYNKLVKPKRGVLYLISIASLA

SEQ ID NO: 106434 - protein, 30 aa, Artificial Sequence; identical to SEQ ID NO: 3196
  Cyclic GFR-binding peptide
  MOD_RES (26)..(27): Xaa is C or S

SEQ ID NO: 106435 - protein, 33 aa, Artificial Sequence; identical to SEQ ID NO: 3197
  Cyclic GFR-binding peptide
  MOD_RES (2)..(4): Xaa is C or S

SEQ ID NO: 106436 - protein, 27 aa, Artificial Sequence
  Cyclic GFR-binding peptide
  MOD_RES (27)..(27): Xaa is C or S
GQYNKLYTVVGKDLYLISIASLKTPVX

SEQ ID NO: 106437 - protein, 35 aa, Artificial Sequence; identical to SEQ ID NO: 76562
  Cyclic GFR-binding peptide
  MOD_RES (1)..(33)..(34): Xaa is C or S

SEQ ID NO: 106438 - protein, 42 aa, Artificial Sequence; identical to SEQ ID NO: 31468
  Cyclic GFR-binding peptide
  MOD_RES (2)..(4)..(36)..(37): Xaa is C or S

SEQ ID NO: 106439 - protein, 31 aa, Artificial Sequence; identical to SEQ ID NO: 3203
  Cyclic GFR-binding peptide
  MOD_RES (28)..(28): Xaa is C or S

SEQ ID NO: 106440 - protein, 30 aa, Artificial Sequence; identical to SEQ ID NO: 3204
  Cyclic GFR-binding peptide
  MOD_RES (1)..(1): Xaa is C or S

SEQ ID NO: 106441 - protein, 29 aa, Artificial Sequence
  Cyclic GFR-binding peptide
  MOD_RES (2)..(2): Xaa is C or S
GXESVAMGRYKKLYTVVGKDFYLISIANL

SEQ ID NO: 106442 - protein, 32 aa, Artificial Sequence; identical to SEQ ID NO: 3207
  Cyclic GFR-binding peptide
  MOD_RES (29)..(30): Xaa is C or S

SEQ ID NO: 106443 - protein, 33 aa, Artificial Sequence; identical to SEQ ID NO: 3209
  Cyclic GFR-binding peptide
  MOD_RES (28)..(29): Xaa is C or S

SEQ ID NO: 106444 - protein, 28 aa, Artificial Sequence
  Cyclic GFR-binding peptide
  MOD_RES (1)..(3): Xaa is C or S
XKXSKVVMQYNKLVKPTRGVLYLISIAS

SEQ ID NO: 106445 - protein, 37 aa, Artificial Sequence; identical to SEQ ID NO: 3211
  Cyclic GFR-binding peptide
  MOD_RES (1)..(3)..(35)..(36): Xaa is C or S

SEQ ID NO: 106446 - protein, 32 aa, Artificial Sequence; identical to SEQ ID NO: 76566
  Cyclic GFR-binding peptide
  MOD_RES (28)..(29): Xaa is C or S

SEQ ID NO: 106447 - protein, 23 aa, Artificial Sequence
  Cyclic GFR-binding peptide
MNQYNKLVVNKNEDLYLISIASM

SEQ ID NO: 106448 - protein, 30 aa, Artificial Sequence; identical to SEQ ID NO: 13761
  Cyclic GFR-binding peptide

SEQ ID NO: 106449 - protein, 25 aa, Artificial Sequence
  Cyclic GFR-binding peptide
VVMGQYNKLIIQQKDNLYLMSIASM

SEQ ID NO: 106450 - protein, 39 aa, Artificial Sequence; identical to SEQ ID NO: 3217
  Cyclic GFR-binding peptide
  MOD_RES (1)..(3)..(35)..(36): Xaa is C or S

SEQ ID NO: 106451 - protein, 22 aa, Artificial Sequence
  Cyclic GFR-binding peptide
IMRYKKLLLVRGNDFYLMSIAN

SEQ ID NO: 106452 - protein, 25 aa, Artificial Sequence
  Cyclic GFR-binding peptide
RYKKLTPVGMDDFYLVSIANLKTPV

SEQ ID NO: 106453 - protein, 32 aa, Artificial Sequence; identical to SEQ ID NO: 3220
  Cyclic GFR-binding peptide
  MOD_RES (26)..(27): Xaa is C or S

SEQ ID NO: 106454 - protein, 24 aa, Artificial Sequence
  Cyclic GFR-binding peptide
MNQYNKLIVNSSDDLYLVSIASLQ

SEQ ID NO: 106455 - protein, 24 aa, Artificial Sequence
  Cyclic GFR-binding peptide
VVMEQYNKLVVKDYEDLYLMSIAS

SEQ ID NO: 106456 - protein, 39 aa, Artificial Sequence; identical to SEQ ID NO: 31492
  Cyclic GFR-binding peptide
  MOD_RES (2)..(34)..(35): Xaa is C or S

SEQ ID NO: 106457 - protein, 33 aa, Artificial Sequence
  Cyclic GFR-binding peptide
  MOD_RES (2)..(2): Xaa is C or S
GXRDVVMGQYNKLIIQQKDNLYLMSIASMKTPT

SEQ ID NO: 106458 - protein, 36 aa, Artificial Sequence; identical to SEQ ID NO: 3224
  Cyclic GFR-binding peptide
  MOD_RES (1)..(32)..(33): Xaa is C or S

SEQ ID NO: 106459 - protein, 29 aa, Artificial Sequence
  Cyclic GFR-binding peptide
  MOD_RES (2)..(2): Xaa is C or S
KXSKVVMQYNKLVKPTRGVLYLISIASLD

SEQ ID NO: 106460 - protein, 32 aa, Artificial Sequence; identical to SEQ ID NO: 3228
  Cyclic GFR-binding peptide
  MOD_RES (29)..(29): Xaa is C or S

SEQ ID NO: 106461 - protein, 30 aa, Artificial Sequence; identical to SEQ ID NO: 3229
  Cyclic GFR-binding peptide
  MOD_RES (30)..(30): Xaa is C or S

SEQ ID NO: 106462 - protein, 27 aa, Artificial Sequence
  Cyclic GFR-binding peptide
MNQYNKLIVNSSDDLYLVSIASLKTPA

SEQ ID NO: 106463 - protein, 28 aa, Artificial Sequence
  Cyclic GFR-binding peptide
  MOD_RES (1)..(1): Xaa is C or S
XESVAMGQYNKLYTVVGKDLYLISIASL

SEQ ID NO: 106464 - protein, 38 aa, Artificial Sequence; identical to SEQ ID NO: 85533
  Cyclic GFR-binding peptide
  MOD_RES (1)..(3)..(35)..(36): Xaa is C or S

SEQ ID NO: 106465 - protein, 33 aa, Artificial Sequence; identical to SEQ ID NO: 3233
  Cyclic GFR-binding peptide
  MOD_RES (1)..(3): Xaa is C or S

SEQ ID NO: 106466 - protein, 28 aa, Artificial Sequence
  Cyclic GFR-binding peptide
VVMDQYNKLVVNNASDLYLISIASLRTP

SEQ ID NO: 106467 - protein, 36 aa, Artificial Sequence; identical to SEQ ID NO: 3235
  Cyclic GFR-binding peptide
  MOD_RES (2)..(34)..(35): Xaa is C or S

SEQ ID NO: 106468 - protein, 34 aa, Artificial Sequence
  Cyclic GFR-binding peptide
  MOD_RES (28)..(29): Xaa is C or S
MNQYNKLIVNSSDDLYLVSIASLKTPAXXPKPVH

SEQ ID NO: 106469 - protein, 38 aa, Artificial Sequence; identical to SEQ ID NO: 3237
  Cyclic GFR-binding peptide
  MOD_RES (1)..(3)..(35)..(36): Xaa is C or S

SEQ ID NO: 106470 - protein, 34 aa, Artificial Sequence; identical to SEQ ID NO: 31506
  Cyclic GFR-binding peptide
  MOD_RES (30)..(31): Xaa is C or S

SEQ ID NO: 106471 - protein, 26 aa, Artificial Sequence
  Cyclic GFR-binding peptide
MERYKKLVVKDYEDFYLMSIANLETP

SEQ ID NO: 106472 - protein, 28 aa, Artificial Sequence
  Cyclic GFR-binding peptide
  MOD_RES (2)..(2): Xaa is C or S
GXSEVVMDQYNKLVVNNASDLYLISIAS

SEQ ID NO: 106473 - protein, 28 aa, Artificial Sequence
  Cyclic GFR-binding peptide
VIMRYKKLVKPKRGVFYLISIANLAQPV

SEQ ID NO: 106474 - protein, 37 aa, Artificial Sequence; identical to SEQ ID NO: 3242
  Cyclic GFR-binding peptide
  MOD_RES (1)..(32)..(33): Xaa is C or S

SEQ ID NO: 106475 - protein, 29 aa, Artificial Sequence
  Cyclic GFR-binding peptide
  MOD_RES (29)..(29): Xaa is C or S
VIMRYKKLVKPKRGVFYLISIANLAQPVX

SEQ ID NO: 106476 - protein, 39 aa, Artificial Sequence; identical to SEQ ID NO: 13800
  Cyclic GFR-binding peptide
  MOD_RES (2)..(4)..(36)..(37): Xaa is C or S

SEQ ID NO: 106477 - protein, 32 aa, Artificial Sequence; identical to SEQ ID NO: 3245
  Cyclic GFR-binding peptide
  MOD_RES (29)..(30): Xaa is C or S

SEQ ID NO: 106478 - protein, 32 aa, Artificial Sequence
  Cyclic GFR-binding peptide
  MOD_RES (29)..(30): Xaa is C or S
VIMQYNKLLLVRGNDLYLMSIASTKVPAXXTS

SEQ ID NO: 106479 - protein, 29 aa, Artificial Sequence
  Cyclic GFR-binding peptide
  MOD_RES (28)..(29): Xaa is C or S
MNRYKKLVVNKNEDFYLISIANMKEPVXX

SEQ ID NO: 106480 - protein, 36 aa, Artificial Sequence; identical to SEQ ID NO: 85545
  Cyclic GFR-binding peptide
  MOD_RES (2)..(4)..(36): Xaa is C or S

SEQ ID NO: 106481 - protein, 32 aa, Artificial Sequence
  Cyclic GFR-binding peptide
  MOD_RES (29)..(30): Xaa is C or S
TMNQYNKLVVNKNEDLYLISIASMKEPVXXPE

SEQ ID NO: 106482 - protein, 24 aa, Artificial Sequence
  Cyclic GFR-binding peptide
ERYKKLVVKDYEDFYLMSIANLET

SEQ ID NO: 106483 - protein, 42 aa, Artificial Sequence; identical to SEQ ID NO: 3249
  Cyclic GFR-binding peptide
  MOD_RES (2)..(4)..(36)..(37): Xaa is C or S

SEQ ID NO: 106484 - protein, 24 aa, Artificial Sequence
  Cyclic GFR-binding peptide
RYKKLVVNNASDFYLISIANLRTP

SEQ ID NO: 106485 - protein, 28 aa, Artificial Sequence
  Cyclic GFR-binding peptide
  MOD_RES (2)..(2): Xaa is C or S
AXSEVTMNRYKKLVVNKNEDFYLISIAN

SEQ ID NO: 106486 - protein, 23 aa, Artificial Sequence
  Cyclic GFR-binding peptide
NRYKKLIVNNSSDFYLVSIANLK

SEQ ID NO: 106487 - protein, 33 aa, Artificial Sequence; identical to SEQ ID NO: 3255
  Cyclic GFR-binding peptide
  MOD_RES (1)..(3): Xaa is C or S

SEQ ID NO: 106488 - protein, 32 aa, Artificial Sequence; identical to SEQ ID NO: 3256
  Cyclic GFR-binding peptide
  MOD_RES (1)..(1): Xaa is C or S

SEQ ID NO: 106489 - protein, 38 aa, Artificial Sequence; identical to SEQ ID NO: 13816
  Cyclic GFR-binding peptide
  MOD_RES (2)..(4)..(36)..(37): Xaa is C or S

SEQ ID NO: 106490 - protein, 31 aa, Artificial Sequence
  Cyclic GFR-binding peptide
  MOD_RES (2)..(4): Xaa is C or S
RXGXESVAMGQYNKLYTVVGKDLYLISIASL

SEQ ID NO: 106491 - protein, 21 aa, Artificial Sequence
  Cyclic GFR-binding peptide
QYNKLIIQQKDNLYLMSIASM

SEQ ID NO: 106492 - protein, 32 aa, Artificial Sequence; identical to SEQ ID NO: 80348
  Cyclic GFR-binding peptide
  MOD_RES (28)..(29): Xaa is C or S

SEQ ID NO: 106493 - protein, 29 aa, Artificial Sequence
  Cyclic GFR-binding peptide
  MOD_RES (28)..(29): Xaa is C or S
MNRYKKLIVNSSDDFYLVSIANLKTPAXX

SEQ ID NO: 106494 - protein, 26 aa, Artificial Sequence
  Cyclic GFR-binding peptide
GEQYNKLTPVGMDDLYLVSIASLKTP

SEQ ID NO: 106495 - protein, 27 aa, Artificial Sequence
  Cyclic GFR-binding peptide
VIMQYNKLLLVRGNDLYLMSIASTKVP

SEQ ID NO: 106496 - protein, 39 aa, Artificial Sequence; identical to SEQ ID NO: 3263
  Cyclic GFR-binding peptide
  MOD_RES (1)..(34)..(35): Xaa is C or S

SEQ ID NO: 106497 - protein, 28 aa, Artificial Sequence
  Cyclic GFR-binding peptide
  MOD_RES (28)..(28): Xaa is C or S
MNQYNKLIVNSSDDLYLVSIASLQTPAX

SEQ ID NO: 106498 - protein, 32 aa, Artificial Sequence; identical to SEQ ID NO: 3265
  Cyclic GFR-binding peptide
  MOD_RES (2)..(2): Xaa is C or S

SEQ ID NO: 106499 - protein, 27 aa, Artificial Sequence
  Cyclic GFR-binding peptide
  MOD_RES (26)..(26): Xaa is C or S
QYNKLIVNSSDDLYLVSIASLKTPAXT

SEQ ID NO: 106500 - protein, 34 aa, Artificial Sequence
  Cyclic GFR-binding peptide
  MOD_RES (30)..(31): Xaa is C or S
VTMNQYNKLVVNKNEDLYLISIASMKEPVXXPEP

SEQ ID NO: 106501 - protein, 28 aa, Artificial Sequence
  Cyclic GFR-binding peptide
GEVVMEQYNKLVVKDYEDLYLMSIASLE

SEQ ID NO: 106502 - protein, 39 aa, Artificial Sequence; identical to SEQ ID NO: 85566
  Cyclic GFR-binding peptide
  MOD_RES (1)..(3)..(35)..(36): Xaa is C or S

SEQ ID NO: 106503 - protein, 39 aa, Artificial Sequence; identical to SEQ ID NO: 31543
  Cyclic GFR-binding peptide
  MOD_RES (1)..(3)..(35)..(36): Xaa is C or S

SEQ ID NO: 106504 - protein, 37 aa, Artificial Sequence
  Cyclic GFR-binding peptide
  MOD_RES (1)..(3)..(34)..(35): Xaa is C or S
XGXEEVIMQYNKLLLVRGNDLYLMSIASTKVPAXXTS

SEQ ID NO: 106505 - protein, 24 aa, Artificial Sequence
  Cyclic GFR-binding peptide
QYNKLIVNSSDDLYLVSIASLQTP

SEQ ID NO: 106506 - protein, 28 aa, Artificial Sequence
  Cyclic GFR-binding peptide
EAVSMGEQYNKLTPVGMDDLYLVSIASL

SEQ ID NO: 106507 - protein, 31 aa, Artificial Sequence
  Cyclic GFR-binding peptide
  MOD_RES (31)..(31): Xaa is C or S
SVAMGQYNKLYTVVGKDLYLISIASLKTPVX

SEQ ID NO: 106508 - protein, 35 aa, Artificial Sequence; identical to SEQ ID NO: 31549
  Cyclic GFR-binding peptide
  MOD_RES (29)..(30): Xaa is C or S

SEQ ID NO: 106509 - protein, 36 aa, Artificial Sequence; identical to SEQ ID NO: 3278
  Cyclic GFR-binding peptide
  MOD_RES (30)..(31): Xaa is C or S

SEQ ID NO: 106510 - protein, 35 aa, Artificial Sequence
  Cyclic GFR-binding peptide
  MOD_RES (1)..(32)..(33): Xaa is C or S
XEEVIMQYNKLLLVRGNDLYLMSIASTKVPAXXTS

SEQ ID NO: 106511 - protein, 30 aa, Artificial Sequence; identical to SEQ ID NO: 3281
  Cyclic GFR-binding peptide
  MOD_RES (28)..(29): Xaa is C or S

SEQ ID NO: 106512 - protein, 34 aa, Artificial Sequence; identical to SEQ ID NO: 3283
  Cyclic GFR-binding peptide
  MOD_RES (29)..(30): Xaa is C or S

SEQ ID NO: 106513 - protein, 38 aa, Artificial Sequence; identical to SEQ ID NO: 3284
  Cyclic GFR-binding peptide
  MOD_RES (2)..(4)..(36)..(37): Xaa is C or S

SEQ ID NO: 106514 - protein, 35 aa, Artificial Sequence; identical to SEQ ID NO: 3285
  Cyclic GFR-binding peptide
  MOD_RES (2)..(34): Xaa is C or S

SEQ ID NO: 106515 - protein, 29 aa, Artificial Sequence
  Cyclic GFR-binding peptide
  MOD_RES (1)..(3): Xaa is C or S
XGXEEVIMRYKKLLLVRGNDFYLMSIANT

SEQ ID NO: 106516 - protein, 26 aa, Artificial Sequence
  Cyclic GFR-binding peptide
VAMGQYNKLYTVVGKDLYLISIASLK

SEQ ID NO: 106517 - protein, 26 aa, Artificial Sequence
  Cyclic GFR-binding peptide
EQYNKLTPVGMDDLYLVSIASLKTPV

SEQ ID NO: 106518 - protein, 33 aa, Artificial Sequence; identical to SEQ ID NO: 13855
  Cyclic GFR-binding peptide
  MOD_RES (1)..(33): Xaa is C or S

SEQ ID NO: 106519 - protein, 32 aa, Artificial Sequence; identical to SEQ ID NO: 3289
  Cyclic GFR-binding peptide
  MOD_RES (2)..(2): Xaa is C or S

SEQ ID NO: 106520 - protein, 26 aa, Artificial Sequence
  Cyclic GFR-binding peptide
  MOD_RES (26)..(26): Xaa is C or S
QYNKLVVNNASDLYLISIASLRTPVX

SEQ ID NO: 106521 - protein, 34 aa, Artificial Sequence; identical to SEQ ID NO: 3291
  Cyclic GFR-binding peptide
  MOD_RES (30)..(31): Xaa is C or S

SEQ ID NO: 106522 - protein, 23 aa, Artificial Sequence
  Cyclic GFR-binding peptide
GEQYNKLTPVGMDDLYLVSIASL

SEQ ID NO: 106523 - protein, 28 aa, Artificial Sequence
  Cyclic GFR-binding peptide
EVVMDRYKKLVVNNAADFYLISIANLRA

SEQ ID NO: 106524 - protein, 31 aa, Artificial Sequence; identical to SEQ ID NO: 3297
  Cyclic GFR-binding peptide
  MOD_RES (1)..(3): Xaa is C or S

SEQ ID NO: 106525 - protein, 35 aa, Artificial Sequence; identical to SEQ ID NO: 3298
  Cyclic GFR-binding peptide
  MOD_RES (32)..(33): Xaa is C or S

SEQ ID NO: 106526 - protein, 35 aa, Artificial Sequence; identical to SEQ ID NO: 76627
  Cyclic GFR-binding peptide
  MOD_RES (1)..(32)..(33): Xaa is C or S

SEQ ID NO: 106527 - protein, 33 aa, Artificial Sequence; identical to SEQ ID NO: 3300
  Cyclic GFR-binding peptide
  MOD_RES (27)..(28): Xaa is C or S

SEQ ID NO: 106528 - protein, 30 aa, Artificial Sequence; identical to SEQ ID NO: 3302
  Cyclic GFR-binding peptide
  MOD_RES (26)..(27): Xaa is C or S

SEQ ID NO: 106529 - protein, 36 aa, Artificial Sequence
  Cyclic GFR-binding peptide
  MOD_RES (30)..(31): Xaa is C or S
VAMGQYNKLYTVVGKDLYLISIASLKTPVXXAKSAK

SEQ ID NO: 106530 - protein, 39 aa, Artificial Sequence; identical to SEQ ID NO: 3304
  Cyclic GFR-binding peptide
  MOD_RES (1)..(33)..(34): Xaa is C or S

SEQ ID NO: 106531 - protein, 35 aa, Artificial Sequence
  Cyclic GFR-binding peptide
  MOD_RES (2)..(33)..(34): Xaa is C or S
GXEEVIMQYNKLLLVRGNDLYLMSIASTKVPAXXT

SEQ ID NO: 106532 - protein, 24 aa, Artificial Sequence
  Cyclic GFR-binding peptide
QYNKLVVNNASDLYLISIASLRTP

SEQ ID NO: 106533 - protein, 26 aa, Artificial Sequence
  Cyclic GFR-binding peptide
VSMGERYKKLTPVGMDDFYLVSIANL

SEQ ID NO: 106534 - protein, 24 aa, Artificial Sequence
  Cyclic GFR-binding peptide
VMGQYNKLIIQQKDNLYLMSIASM

SEQ ID NO: 106535 - protein, 31 aa, Artificial Sequence; identical to SEQ ID NO: 3308
  Cyclic GFR-binding peptide
  MOD_RES (28)..(29): Xaa is C or S

SEQ ID NO: 106536 - protein, 22 aa, Artificial Sequence
  Cyclic GFR-binding peptide
ERYKKLVVKDYEDFYLMSIANL

SEQ ID NO: 106537 - protein, 25 aa, Artificial Sequence
  Cyclic GFR-binding peptide
VVMNRYKKLIVNNSSDFYLVSIANL

SEQ ID NO: 106538 - protein, 32 aa, Artificial Sequence; identical to SEQ ID NO: 85589
  Cyclic GFR-binding peptide
  MOD_RES (30)..(31): Xaa is C or S

SEQ ID NO: 106539 - protein, 32 aa, Artificial Sequence; identical to SEQ ID NO: 13883
  Cyclic GFR-binding peptide
  MOD_RES (1)..(1): Xaa is C or S

SEQ ID NO: 106540 - protein, 31 aa, Artificial Sequence; identical to SEQ ID NO: 76635
  Cyclic GFR-binding peptide
  MOD_RES (1)..(3): Xaa is C or S

SEQ ID NO: 106541 - protein, 28 aa, Artificial Sequence
  Cyclic GFR-binding peptide
SEVVMDQYNKLVVNNASDLYLISIASLR

SEQ ID NO: 106542 - protein, 35 aa, Artificial Sequence
  Cyclic GFR-binding peptide
  MOD_RES (30)..(31): Xaa is C or S
VVMDQYNKLVVNNAADLYLISIASLRAPVXXSAPA

SEQ ID NO: 106543 - protein, 29 aa, Artificial Sequence
  Cyclic GFR-binding peptide
SVAMGRYKKLYTVVGKDFYLISIANLKTP

SEQ ID NO: 106544 - protein, 28 aa, Artificial Sequence
  Cyclic GFR-binding peptide
EAVSMGERYKKLTPVGMDDFYLVSIANL

SEQ ID NO: 106545 - protein, 39 aa, Artificial Sequence
  Cyclic GFR-binding peptide
  MOD_RES (1)..(3)..(34)..(35): Xaa is C or S
XGXEEVIMQYNKLLLVRGNDLYLMSIASTKVPAXXTSPV

SEQ ID NO: 106546 - protein, 27 aa, Artificial Sequence
  Cyclic GFR-binding peptide
MNQYNKLVVNKNEDLYLISIASMKEPV

SEQ ID NO: 106547 - protein, 40 aa, Artificial Sequence; identical to SEQ ID NO: 3316
  Cyclic GFR-binding peptide
  MOD_RES (2)..(4)..(36)..(37): Xaa is C or S

SEQ ID NO: 106548 - protein, 27 aa, Artificial Sequence
  Cyclic GFR-binding peptide
SRVVMNRYKKLIVNSSDDFYLVSIANL

SEQ ID NO: 106549 - protein, 23 aa, Artificial Sequence
  Cyclic GFR-binding peptide
VIMRYKKLVKPKRGVFYLISIAN

SEQ ID NO: 106550 - protein, 30 aa, Artificial Sequence; identical to SEQ ID NO: 3320
  Cyclic GFR-binding peptide

SEQ ID NO: 106551 - protein, 38 aa, Artificial Sequence; identical to SEQ ID NO: 3327
  Cyclic GFR-binding peptide
  MOD_RES (2)..(34)..(35): Xaa is C or S

SEQ ID NO: 106552 - protein, 29 aa, Artificial Sequence
  Cyclic GFR-binding peptide
  MOD_RES (1)..(3): Xaa is C or S
XKXSKVVMRYKKLVKPTRGVFYLISIANL

SEQ ID NO: 106553 - protein, 28 aa, Artificial Sequence
  Cyclic GFR-binding peptide
  MOD_RES (1)..(1): Xaa is C or S
XSKVIMRYKKLIKPTKGIFYLISIANLD

SEQ ID NO: 106554 - protein, 40 aa, Artificial Sequence; identical to SEQ ID NO: 3331
  Cyclic GFR-binding peptide
  MOD_RES (1)..(3)..(34)..(35): Xaa is C or S

SEQ ID NO: 106555 - protein, 38 aa, Artificial Sequence; identical to SEQ ID NO: 3332
  Cyclic GFR-binding peptide
  MOD_RES (1)..(33)..(34): Xaa is C or S

SEQ ID NO: 106556 - protein, 38 aa, Artificial Sequence; identical to SEQ ID NO: 3333
  Cyclic GFR-binding peptide
  MOD_RES (1)..(32)..(33): Xaa is C or S

SEQ ID NO: 106557 - protein, 27 aa, Artificial Sequence
  Cyclic GFR-binding peptide
  MOD_RES (26)..(27): Xaa is C or S
RYKKLVVNNASDFYLISIANLRTPVXX

SEQ ID NO: 106558 - protein, 39 aa, Artificial Sequence; identical to SEQ ID NO: 3336
  Cyclic GFR-binding peptide
  MOD_RES (1)..(3)..(34)..(35): Xaa is C or S

SEQ ID NO: 106559 - protein, 38 aa, Artificial Sequence; identical to SEQ ID NO: 3337
  Cyclic GFR-binding peptide
  MOD_RES (2)..(35)..(36): Xaa is C or S

SEQ ID NO: 106560 - protein, 28 aa, Artificial Sequence
  Cyclic GFR-binding peptide
  MOD_RES (27)..(28): Xaa is C or S
DRYKKLVVNNAADFYLISIANLRAPVXX

SEQ ID NO: 106561 - protein, 26 aa, Artificial Sequence
  Cyclic GFR-binding peptide
GERYKKLTPVGMDDFYLVSIANLKTP

SEQ ID NO: 106562 - protein, 26 aa, Artificial Sequence
  Cyclic GFR-binding peptide
SRVVMNQYNKLIVNSSDDLYLVSIAS

SEQ ID NO: 106563 - protein, 34 aa, Artificial Sequence; identical to SEQ ID NO: 3345
  Cyclic GFR-binding peptide
  MOD_RES (31)..(32): Xaa is C or S

SEQ ID NO: 106564 - protein, 32 aa, Artificial Sequence
  Cyclic GFR-binding peptide
  MOD_RES (27)..(28): Xaa is C or S
NQYNKLVVNKNEDLYLISIASMKEPVXXPEPI

SEQ ID NO: 106565 - protein, 26 aa, Artificial Sequence
  Cyclic GFR-binding peptide
  MOD_RES (26)..(26): Xaa is C or S
RYKKLVVNNASDFYLISIANLRTPVX

SEQ ID NO: 106566 - protein, 31 aa, Artificial Sequence; identical to SEQ ID NO: 3350
  Cyclic GFR-binding peptide
  MOD_RES (2)..(4): Xaa is C or S

SEQ ID NO: 106567 - protein, 36 aa, Artificial Sequence; identical to SEQ ID NO: 3353
  Cyclic GFR-binding peptide
  MOD_RES (2)..(4)..(35)..(36): Xaa is C or S

SEQ ID NO: 106568 - protein, 36 aa, Artificial Sequence; identical to SEQ ID NO: 3355
  Cyclic GFR-binding peptide
  MOD_RES (1)..(33)..(34): Xaa is C or S

SEQ ID NO: 106569 - protein, 32 aa, Artificial Sequence; identical to SEQ ID NO: 76657
  Cyclic GFR-binding peptide
  MOD_RES (26)..(27): Xaa is C or S

SEQ ID NO: 106570 - protein, 36 aa, Artificial Sequence; identical to SEQ ID NO: 3359
  Cyclic GFR-binding peptide
  MOD_RES (31)..(32): Xaa is C or S

SEQ ID NO: 106571 - protein, 28 aa, Artificial Sequence
  Cyclic GFR-binding peptide
  MOD_RES (27)..(27): Xaa is C or S
NRYKKLIVNSSDDFYLVSIANLKTPAXT

SEQ ID NO: 106572 - protein, 26 aa, Artificial Sequence
  Cyclic GFR-binding peptide
MEQYNKLVVKDYEDLYLMSIASLETP

SEQ ID NO: 106573 - protein, 34 aa, Artificial Sequence
  Cyclic GFR-binding peptide
  MOD_RES (28)..(29): Xaa is C or S
MGQYNKLYTVVGKDLYLISIASLKTPVXXAKSAK

SEQ ID NO: 106574 - protein, 35 aa, Artificial Sequence; identical to SEQ ID NO: 3364
  Cyclic GFR-binding peptide
  MOD_RES (31)..(32): Xaa is C or S

SEQ ID NO: 106575 - protein, 37 aa, Artificial Sequence; identical to SEQ ID NO: 3366
  Cyclic GFR-binding peptide
  MOD_RES (1)..(32)..(33): Xaa is C or S

SEQ ID NO: 106576 - protein, 39 aa, Artificial Sequence; identical to SEQ ID NO: 3367
  Cyclic GFR-binding peptide
  MOD_RES (2)..(4)..(37)..(38): Xaa is C or S

SEQ ID NO: 106577 - protein, 39 aa, Artificial Sequence
  Cyclic GFR-binding peptide
  MOD_RES (1)..(33)..(34): Xaa is C or S
XESVAMGQYNKLYTVVGKDLYLISIASLKTPVXXAKSAK

SEQ ID NO: 106578 - protein, 32 aa, Artificial Sequence; identical to SEQ ID NO: 3368
  Cyclic GFR-binding peptide
  MOD_RES (30)..(31): Xaa is C or S

SEQ ID NO: 106579 - protein, 33 aa, Artificial Sequence
  Cyclic GFR-binding peptide
  MOD_RES (1)..(33): Xaa is C or S
XESVAMGQYNKLYTVVGKDLYLISIASLKTPVX

SEQ ID NO: 106580 - protein, 28 aa, Artificial Sequence
  Cyclic GFR-binding peptide
  MOD_RES (28)..(28): Xaa is C or S
MNRYKKLVVNKNEDFYLISIANMKEPVX

SEQ ID NO: 106581 - protein, 37 aa, Artificial Sequence; identical to SEQ ID NO: 3370
  Cyclic GFR-binding peptide
  MOD_RES (1)..(33)..(34): Xaa is C or S

SEQ ID NO: 106582 - protein, 37 aa, Artificial Sequence; identical to SEQ ID NO: 80448
  Cyclic GFR-binding peptide
  MOD_RES (31)..(32): Xaa is C or S

SEQ ID NO: 106583 - protein, 29 aa, Artificial Sequence
  Cyclic GFR-binding peptide
AVSMGEQYNKLTPVGMDDLYLVSIASLKT

SEQ ID NO: 106584 - protein, 30 aa, Artificial Sequence; identical to SEQ ID NO: 3378
  Cyclic GFR-binding peptide

SEQ ID NO: 106585 - protein, 28 aa, Artificial Sequence
  Cyclic GFR-binding peptide
VVMGQYNKLIIQQKDNLYLMSIASMKTP

SEQ ID NO: 106586 - protein, 27 aa, Artificial Sequence
  Cyclic GFR-binding peptide
MNRYKKLVVNKNEDFYLISIANMKEPV

SEQ ID NO: 106587 - protein, 27 aa, Artificial Sequence
  Cyclic GFR-binding peptide
VIMRYKKLVKPKRGVFYLISIANLAQP

SEQ ID NO: 106588 - protein, 32 aa, Artificial Sequence; identical to SEQ ID NO: 80460
  Cyclic GFR-binding peptide
  MOD_RES (2)..(2): Xaa is C or S

SEQ ID NO: 106589 - protein, 28 aa, Artificial Sequence
  Cyclic GFR-binding peptide
SEVTMNRYKKLVVNKNEDFYLISIANMK

SEQ ID NO: 106590 - protein, 29 aa, Artificial Sequence
  Cyclic GFR-binding peptide
  MOD_RES (1)..(1): Xaa is C or S
XSEVTMNQYNKLVVNKNEDLYLISIASMK

SEQ ID NO: 106591 - protein, 37 aa, Artificial Sequence; identical to SEQ ID NO: 3384
  Cyclic GFR-binding peptide
  MOD_RES (2)..(4)..(36)..(37): Xaa is C or S

SEQ ID NO: 106592 - protein, 23 aa, Artificial Sequence
  Cyclic GFR-binding peptide
QYNKLVVKDYEDLYLMSIASLET

SEQ ID NO: 106593 - protein, 29 aa, Artificial Sequence
  Cyclic GFR-binding peptide
  MOD_RES (2)..(4): Xaa is C or S
LXGXEEVIMQYNKLLLVRGNDLYLMSIAS

SEQ ID NO: 106594 - protein, 23 aa, Artificial Sequence
  Cyclic GFR-binding peptide
MEQYNKLVVKDYEDLYLMSIASL

SEQ ID NO: 106595 - protein, 29 aa, Artificial Sequence
  Cyclic GFR-binding peptide
  MOD_RES (2)..(2): Xaa is C or S
GXEAVSMGERYKKLTPVGMDDFYLVSIAN

SEQ ID NO: 106596 - protein, 35 aa, Artificial Sequence; identical to SEQ ID NO: 3392
  Cyclic GFR-binding peptide
  MOD_RES (1)..(3)..(35): Xaa is C or S

SEQ ID NO: 106597 - protein, 34 aa, Artificial Sequence; identical to SEQ ID NO: 76676
  Cyclic GFR-binding peptide
  MOD_RES (29)..(30): Xaa is C or S

SEQ ID NO: 106598 - protein, 26 aa, Artificial Sequence
  Cyclic GFR-binding peptide
ARVVMNQYNKLIVNSSDDLYLVSIAS

SEQ ID NO: 106599 - protein, 38 aa, Artificial Sequence; identical to SEQ ID NO: 3399
  Cyclic GFR-binding peptide
  MOD_RES (2)..(4)..(36)..(37): Xaa is C or S

SEQ ID NO: 106600 - protein, 36 aa, Artificial Sequence; identical to SEQ ID NO: 3402
  Cyclic GFR-binding peptide
  MOD_RES (31)..(32): Xaa is C or S

SEQ ID NO: 106601 - protein, 31 aa, Artificial Sequence
  Cyclic GFR-binding peptide
  MOD_RES (27)..(28): Xaa is C or S
DQYNKLVVNNAADLYLISIASLRAPVXXSAP

SEQ ID NO: 106602 - protein, 32 aa, Artificial Sequence; identical to SEQ ID NO: 31684
  Cyclic GFR-binding peptide
  MOD_RES (26)..(27): Xaa is C or S

SEQ ID NO: 106603 - protein, 28 aa, Artificial Sequence
  Cyclic GFR-binding peptide
VVMDQYNKLVVKENEDLYLMSIASLETP

SEQ ID NO: 106604 - protein, 39 aa, Artificial Sequence; identical to SEQ ID NO: 3406
  Cyclic GFR-binding peptide
  MOD_RES (2)..(4)..(36): Xaa is C or S

SEQ ID NO: 106605 - protein, 42 aa, Artificial Sequence; identical to SEQ ID NO: 3408
  Cyclic GFR-binding peptide
  MOD_RES (2)..(4)..(36)..(37): Xaa is C or S

SEQ ID NO: 106606 - protein, 31 aa, Artificial Sequence; identical to SEQ ID NO: 3409
  Cyclic GFR-binding peptide
  MOD_RES (28)..(29): Xaa is C or S

SEQ ID NO: 106607 - protein, 34 aa, Artificial Sequence; identical to SEQ ID NO: 13970
  Cyclic GFR-binding peptide
  MOD_RES (32)..(33): Xaa is C or S

SEQ ID NO: 106608 - protein, 29 aa, Artificial Sequence
  Cyclic GFR-binding peptide
  MOD_RES (28)..(29): Xaa is C or S
MDQYNKLVVNNASDLYLISIASLRTPVXX

SEQ ID NO: 106609 - protein, 27 aa, Artificial Sequence
  Cyclic GFR-binding peptide
MERYKKLVVKDYEDFYLMSIANLETPV

SEQ ID NO: 106610 - protein, 29 aa, Artificial Sequence
  Cyclic GFR-binding peptide
  MOD_RES (28)..(29): Xaa is C or S
MNQYNKLIVNSSDDLYLVSIASLKTPAXX

SEQ ID NO: 106611 - protein, 26 aa, Artificial Sequence
  Cyclic GFR-binding peptide
VVMEQYNKLVVKDYEDLYLMSIASLE

SEQ ID NO: 106612 - protein, 30 aa, Artificial Sequence; identical to SEQ ID NO: 3422
  Cyclic GFR-binding peptide

SEQ ID NO: 106613 - protein, 28 aa, Artificial Sequence
  Cyclic GFR-binding peptide
  MOD_RES (2)..(2): Xaa is C or S
GXRDVVMGQYNKLIIQQKDNLYLMSIAS

SEQ ID NO: 106614 - protein, 33 aa, Artificial Sequence; identical to SEQ ID NO: 3424
  Cyclic GFR-binding peptide
  MOD_RES (31)..(32): Xaa is C or S

SEQ ID NO: 106615 - protein, 27 aa, Artificial Sequence
  Cyclic GFR-binding peptide
EVTMNQYNKLVVNKNEDLYLISIASMK

SEQ ID NO: 106616 - protein, 27 aa, Artificial Sequence
  Cyclic GFR-binding peptide
EVIMRYKKLLLVRGNDFYLMSIANTKV

SEQ ID NO: 106617 - protein, 34 aa, Artificial Sequence; identical to SEQ ID NO: 3426
  Cyclic GFR-binding peptide
  MOD_RES (33)..(34): Xaa is C or S

SEQ ID NO: 106618 - protein, 30 aa, Artificial Sequence; identical to SEQ ID NO: 3429
  Cyclic GFR-binding peptide
  MOD_RES (28)..(29): Xaa is C or S

SEQ ID NO: 106619 - protein, 26 aa, Artificial Sequence
  Cyclic GFR-binding peptide
MQYNKLVKPKRGVLYLISIASLAQPV

SEQ ID NO: 106620 - protein, 35 aa, Artificial Sequence; identical to SEQ ID NO: 3431
  Cyclic GFR-binding peptide
  MOD_RES (32)..(33): Xaa is C or S

SEQ ID NO: 106621 - protein, 37 aa, Artificial Sequence; identical to SEQ ID NO: 3432
  Cyclic GFR-binding peptide
  MOD_RES (31)..(32): Xaa is C or S

SEQ ID NO: 106622 - protein, 28 aa, Artificial Sequence
  Cyclic GFR-binding peptide
  MOD_RES (1)..(1): Xaa is C or S
XAKVVMNQYNKLIVNNSSDLYLVSIASL

SEQ ID NO: 106623 - protein, 38 aa, Artificial Sequence; identical to SEQ ID NO: 3440
  Cyclic GFR-binding peptide
  MOD_RES (2)..(4)..(35)..(36): Xaa is C or S

SEQ ID NO: 106624 - protein, 30 aa, Artificial Sequence; identical to SEQ ID NO: 3441
  Cyclic GFR-binding peptide
  MOD_RES (1)..(1): Xaa is C or S

SEQ ID NO: 106625 - protein, 25 aa, Artificial Sequence
  Cyclic GFR-binding peptide
EVIMQYNKLLLVRGNDLYLMSIAST

SEQ ID NO: 106626 - protein, 21 aa, Artificial Sequence
  Cyclic GFR-binding peptide
RYKKLIIQQKDNFYLMSIANM

SEQ ID NO: 106627 - protein, 37 aa, Artificial Sequence; identical to SEQ ID NO: 3446
  Cyclic GFR-binding peptide
  MOD_RES (2)..(34): Xaa is C or S

SEQ ID NO: 106628 - protein, 34 aa, Artificial Sequence
  Cyclic GFR-binding peptide
  MOD_RES (1)..(3): Xaa is C or S
XAXSEVTMNQYNKLVVNKNEDLYLISIASMKEPV

SEQ ID NO: 106629 - protein, 29 aa, Artificial Sequence
  Cyclic GFR-binding peptide
  MOD_RES (27)..(28): Xaa is C or S
NQYNKLIVNSSDDLYLVSIASLKTPAXXP

SEQ ID NO: 106630 - protein, 38 aa, Artificial Sequence; identical to SEQ ID NO: 3450
  Cyclic GFR-binding peptide
  MOD_RES (1)..(32)..(33): Xaa is C or S

SEQ ID NO: 106631 - protein, 33 aa, Artificial Sequence; identical to SEQ ID NO: 13998
  Cyclic GFR-binding peptide
  MOD_RES (2)..(2): Xaa is C or S

SEQ ID NO: 106632 - protein, 34 aa, Artificial Sequence; identical to SEQ ID NO: 3452
  Cyclic GFR-binding peptide
  MOD_RES (32)..(33): Xaa is C or S

SEQ ID NO: 106633 - protein, 28 aa, Artificial Sequence
  Cyclic GFR-binding peptide
  MOD_RES (27)..(28): Xaa is C or S
GQYNKLYTVVGKDLYLISIASLKTPVXX

SEQ ID NO: 106634 - protein, 27 aa, Artificial Sequence
  Cyclic GFR-binding peptide
  MOD_RES (1)..(1): Xaa is C or S
XEEVIMRYKKLLLVRGNDFYLMSIANT

SEQ ID NO: 106635 - protein, 23 aa, Artificial Sequence
  Cyclic GFR-binding peptide
DRYKKLVVNNASDFYLISIANLR

SEQ ID NO: 106636 - protein, 24 aa, Artificial Sequence
  Cyclic GFR-binding peptide
VVMDRYKKLVVNNAADFYLISIAN

SEQ ID NO: 106637 - protein, 31 aa, Artificial Sequence; identical to SEQ ID NO: 14004
  Cyclic GFR-binding peptide
  MOD_RES (1)..(3): Xaa is C or S

SEQ ID NO: 106638 - protein, 31 aa, Artificial Sequence; identical to SEQ ID NO: 3456
  Cyclic GFR-binding peptide
  MOD_RES (28)..(29): Xaa is C or S

SEQ ID NO: 106639 - protein, 21 aa, Artificial Sequence
  Cyclic GFR-binding peptide
MRYKKLVKPKRGVFYLISIAN

SEQ ID NO: 106640 - protein, 31 aa, Artificial Sequence; identical to SEQ ID NO: 3458
  Cyclic GFR-binding peptide
  MOD_RES (29)..(30): Xaa is C or S

SEQ ID NO: 106641 - protein, 32 aa, Artificial Sequence; identical to SEQ ID NO: 31734
  Cyclic GFR-binding peptide
  MOD_RES (26)..(27): Xaa is C or S

SEQ ID NO: 106642 - protein, 35 aa, Artificial Sequence
  Cyclic GFR-binding peptide
  MOD_RES (2)..(34)..(35): Xaa is C or S
GXESVAMGQYNKLYTVVGKDLYLISIASLKTPVXX

SEQ ID NO: 106643 - protein, 30 aa, Artificial Sequence; identical to SEQ ID NO: 3463
  Cyclic GFR-binding peptide
  MOD_RES (2)..(4): Xaa is C or S

SEQ ID NO: 106644 - protein, 37 aa, Artificial Sequence; identical to SEQ ID NO: 3464
  Cyclic GFR-binding peptide
  MOD_RES (1)..(3)..(35)..(36): Xaa is C or S

SEQ ID NO: 106645 - protein, 33 aa, Artificial Sequence; identical to SEQ ID NO: 80518
  Cyclic GFR-binding peptide
  MOD_RES (31)..(32): Xaa is C or S

SEQ ID NO: 106646 - protein, 34 aa, Artificial Sequence; identical to SEQ ID NO: 3466
  Cyclic GFR-binding peptide
  MOD_RES (2)..(4): Xaa is C or S

SEQ ID NO: 106647 - protein, 30 aa, Artificial Sequence; identical to SEQ ID NO: 3468
  Cyclic GFR-binding peptide
  MOD_RES (27)..(28): Xaa is C or S

SEQ ID NO: 106648 - protein, 41 aa, Artificial Sequence; identical to SEQ ID NO: 3470
  Cyclic GFR-binding peptide
  MOD_RES (2)..(4)..(35)..(36): Xaa is C or S

SEQ ID NO: 106649 - protein, 32 aa, Artificial Sequence
  Cyclic GFR-binding peptide
  MOD_RES (28)..(29): Xaa is C or S
MGQYNKLYTVVGKDLYLISIASLKTPVXXAKS

SEQ ID NO: 106650 - protein, 25 aa, Artificial Sequence
  Cyclic GFR-binding peptide
VMGRYKKLIIQQKDNFYLMSIANMK

SEQ ID NO: 106651 - protein, 33 aa, Artificial Sequence; identical to SEQ ID NO: 14023
  Cyclic GFR-binding peptide
  MOD_RES (29)..(30): Xaa is C or S

SEQ ID NO: 106652 - protein, 28 aa, Artificial Sequence
  Cyclic GFR-binding peptide
GEVVMERYKKLVVKDYEDFYLMSIANLE

SEQ ID NO: 106653 - protein, 31 aa, Artificial Sequence; identical to SEQ ID NO: 3479
  Cyclic GFR-binding peptide
  MOD_RES (27)..(28): Xaa is C or S

SEQ ID NO: 106654 - protein, 38 aa, Artificial Sequence
  Cyclic GFR-binding peptide
  MOD_RES (32)..(33): Xaa is C or S
RDVVMGQYNKLIIQQKDNLYLMSIASMKTPTXXPGASG

SEQ ID NO: 106655 - protein, 35 aa, Artificial Sequence; identical to SEQ ID NO: 14029
  Cyclic GFR-binding peptide
  MOD_RES (1)..(3)..(35): Xaa is C or S

SEQ ID NO: 106656 - protein, 29 aa, Artificial Sequence
  Cyclic GFR-binding peptide
  MOD_RES (27)..(28): Xaa is C or S
MRYKKLLLVRGNDFYLMSIANTKVPAXXT

SEQ ID NO: 106657 - protein, 27 aa, Artificial Sequence
  Cyclic GFR-binding peptide
SVAMGRYKKLYTVVGKDFYLISIANLK

SEQ ID NO: 106658 - protein, 27 aa, Artificial Sequence
  Cyclic GFR-binding peptide
MNQYNKLIVNSSDDLYLVSIASLQTPA

SEQ ID NO: 106659 - protein, 35 aa, Artificial Sequence
  Cyclic GFR-binding peptide
  MOD_RES (2)..(34)..(35): Xaa is C or S
GXAEVVMDQYNKLVVNNAADLYLISIASLRAPVXX

SEQ ID NO: 106660 - protein, 31 aa, Artificial Sequence; identical to SEQ ID NO: 3484
  Cyclic GFR-binding peptide
  MOD_RES (2)..(4): Xaa is C or S

SEQ ID NO: 106661 - protein, 36 aa, Artificial Sequence; identical to SEQ ID NO: 3489
  Cyclic GFR-binding peptide
  MOD_RES (1)..(3)..(35)..(36): Xaa is C or S

SEQ ID NO: 106662 - protein, 35 aa, Artificial Sequence
  Cyclic GFR-binding peptide
  MOD_RES (2)..(4): Xaa is C or S
RXGXESVAMGQYNKLYTVVGKDLYLISIASLKTPV

SEQ ID NO: 106663 - protein, 25 aa, Artificial Sequence
  Cyclic GFR-binding peptide
ERYKKLVVKDYEDFYLMSIANLETP

SEQ ID NO: 106664 - protein, 24 aa, Artificial Sequence
  Cyclic GFR-binding peptide
VMDQYNKLVVNNAADLYLISIASL

SEQ ID NO: 106665 - protein, 24 aa, Artificial Sequence
  Cyclic GFR-binding peptide
TMNRYKKLVVNKNEDFYLISIANM

SEQ ID NO: 106666 - protein, 34 aa, Artificial Sequence; identical to SEQ ID NO: 3493
  Cyclic GFR-binding peptide
  MOD_RES (2)..(4): Xaa is C or S

SEQ ID NO: 106667 - protein, 25 aa, Artificial Sequence
  Cyclic GFR-binding peptide
NQYNKLVVNKNEDLYLISIASMKEP

SEQ ID NO: 106668 - protein, 32 aa, Artificial Sequence; identical to SEQ ID NO: 3494
  Cyclic GFR-binding peptide
  MOD_RES (1)..(32): Xaa is C or S

SEQ ID NO: 106669 - protein, 33 aa, Artificial Sequence; identical to SEQ ID NO: 31774
  Cyclic GFR-binding peptide
  MOD_RES (2)..(4): Xaa is C or S

SEQ ID NO: 106670 - protein, 31 aa, Artificial Sequence; identical to SEQ ID NO: 3495
  Cyclic GFR-binding peptide
  MOD_RES (1)..(1): Xaa is C or S

SEQ ID NO: 106671 - protein, 23 aa, Artificial Sequence
  Cyclic GFR-binding peptide
RYKKLVVKDYEDFYLMSIANLET

SEQ ID NO: 106672 - protein, 31 aa, Artificial Sequence; identical to SEQ ID NO: 31777
  Cyclic GFR-binding peptide
  MOD_RES (2)..(4): Xaa is C or S

SEQ ID NO: 106673 - protein, 30 aa, Artificial Sequence; identical to SEQ ID NO: 3497
  Cyclic GFR-binding peptide
  MOD_RES (26)..(27): Xaa is C or S

SEQ ID NO: 106674 - protein, 22 aa, Artificial Sequence
  Cyclic GFR-binding peptide
EQYNKLTPVGMDDLYLVSIASL

SEQ ID NO: 106675 - protein, 28 aa, Artificial Sequence
  Cyclic GFR-binding peptide
  MOD_RES (2)..(2): Xaa is C or S
KXSKVIMQYNKLIKPTKGILYLISIASL

SEQ ID NO: 106676 - protein, 30 aa, Artificial Sequence; identical to SEQ ID NO: 3501
  Cyclic GFR-binding peptide
  MOD_RES (27)..(28): Xaa is C or S

SEQ ID NO: 106677 - protein, 40 aa, Artificial Sequence; identical to SEQ ID NO: 3504
  Cyclic GFR-binding peptide
  MOD_RES (1)..(3)..(34)..(35): Xaa is C or S

SEQ ID NO: 106678 - protein, 30 aa, Artificial Sequence; identical to SEQ ID NO: 3507
  Cyclic GFR-binding peptide
  MOD_RES (2)..(2): Xaa is C or S

SEQ ID NO: 106679 - protein, 27 aa, Artificial Sequence
  Cyclic GFR-binding peptide
  MOD_RES (26)..(26): Xaa is C or S
RYKKLIVNSSDDFYLVSIANLKTPAXT

SEQ ID NO: 106680 - protein, 30 aa, Artificial Sequence; identical to SEQ ID NO: 3509
  Cyclic GFR-binding peptide
  MOD_RES (1)..(3): Xaa is C or S

SEQ ID NO: 106681 - protein, 24 aa, Artificial Sequence
  Cyclic GFR-binding peptide
QYNKLVVKENEDLYLMSIASLETP

SEQ ID NO: 106682 - protein, 36 aa, Artificial Sequence; identical to SEQ ID NO: 3514
  Cyclic GFR-binding peptide
  MOD_RES (1)..(33)..(34): Xaa is C or S

SEQ ID NO: 106683 - protein, 32 aa, Artificial Sequence; identical to SEQ ID NO: 3516
  Cyclic GFR-binding peptide
  MOD_RES (27)..(28): Xaa is C or S

SEQ ID NO: 106684 - protein, 31 aa, Artificial Sequence
  Cyclic GFR-binding peptide
  MOD_RES (1)..(1): Xaa is C or S
XAEVVMDQYNKLVVNNAADLYLISIASLRAP

SEQ ID NO: 106685 - protein, 31 aa, Artificial Sequence; identical to SEQ ID NO: 85793
  Cyclic GFR-binding peptide
  MOD_RES (27)..(28): Xaa is C or S

SEQ ID NO: 106686 - protein, 37 aa, Artificial Sequence; identical to SEQ ID NO: 3517
  Cyclic GFR-binding peptide
  MOD_RES (2)..(4)..(35)..(36): Xaa is C or S

SEQ ID NO: 106687 - protein, 38 aa, Artificial Sequence; identical to SEQ ID NO: 3522
  Cyclic GFR-binding peptide
  MOD_RES (1)..(33)..(34): Xaa is C or S

SEQ ID NO: 106688 - protein, 30 aa, Artificial Sequence; identical to SEQ ID NO: 3524
  Cyclic GFR-binding peptide
  MOD_RES (2)..(2): Xaa is C or S

SEQ ID NO: 106689 - protein, 29 aa, Artificial Sequence
  Cyclic GFR-binding peptide
EVTMNQYNKLVVNKNEDLYLISIASMKEP

SEQ ID NO: 106690 - protein, 29 aa, Artificial Sequence
  Cyclic GFR-binding peptide
  MOD_RES (2)..(4): Xaa is C or S
SXKXSRVIMRYKKLVKPKRGVFYLISIAN

SEQ ID NO: 106691 - protein, 30 aa, Artificial Sequence; identical to SEQ ID NO: 3529
  Cyclic GFR-binding peptide

SEQ ID NO: 106692 - protein, 35 aa, Artificial Sequence
  Cyclic GFR-binding peptide
  MOD_RES (30)..(31): Xaa is C or S
VVMGQYNKLIIQQKDNLYLMSIASMKTPTXXPGAS

SEQ ID NO: 106693 - protein, 29 aa, Artificial Sequence
  Cyclic GFR-binding peptide
  MOD_RES (29)..(29): Xaa is C or S
VMNQYNKLIVNNSSDLYLVSIASLKTPAX

SEQ ID NO: 106694 - protein, 27 aa, Artificial Sequence
  Cyclic GFR-binding peptide
VVMDRYKKLVVNNASDFYLISIANLRT

SEQ ID NO: 106695 - protein, 29 aa, Artificial Sequence
  Cyclic GFR-binding peptide
  MOD_RES (1)..(1): Xaa is C or S
XSRVVMNRYKKLIVNSSDDFYLVSIANLK

SEQ ID NO: 106696 - protein, 30 aa, Artificial Sequence; identical to SEQ ID NO: 3537
  Cyclic GFR-binding peptide
  MOD_RES (1)..(1): Xaa is C or S

SEQ ID NO: 106697 - protein, 30 aa, Artificial Sequence; identical to SEQ ID NO: 31818
  Cyclic GFR-binding peptide
  MOD_RES (28)..(29): Xaa is C or S

SEQ ID NO: 106698 - protein, 28 aa, Artificial Sequence
  Cyclic GFR-binding peptide
  MOD_RES (26)..(26): Xaa is C or S
RYKKLIVNSSDDFYLVSIANLKTPAXTP

SEQ ID NO: 106699 - protein, 36 aa, Artificial Sequence
  Cyclic GFR-binding peptide
  MOD_RES (30)..(31): Xaa is C or S
VVMDQYNKLVVNNAADLYLISIASLRAPVXXSAPAA

SEQ ID NO: 106700 - protein, 31 aa, Artificial Sequence; identical to SEQ ID NO: 75145
  Cyclic GFR-binding peptide
  MOD_RES (1)..(1): Xaa is C or S

SEQ ID NO: 106701 - protein, 35 aa, Artificial Sequence; identical to SEQ ID NO: 31827
  Cyclic GFR-binding peptide
  MOD_RES (1)..(3)..(35): Xaa is C or S

SEQ ID NO: 106702 - protein, 35 aa, Artificial Sequence; identical to SEQ ID NO: 3544
  Cyclic GFR-binding peptide
  MOD_RES (2)..(4)..(35): Xaa is C or S

SEQ ID NO: 106703 - protein, 23 aa, Artificial Sequence
  Cyclic GFR-binding peptide
IMQYNKLLLVRGNDLYLMSIAST

SEQ ID NO: 106704 - protein, 34 aa, Artificial Sequence; identical to SEQ ID NO: 31830
  Cyclic GFR-binding peptide
  MOD_RES (1)..(33)..(34): Xaa is C or S

SEQ ID NO: 106705 - protein, 29 aa, Artificial Sequence
  Cyclic GFR-binding peptide
  MOD_RES (26)..(27): Xaa is C or S
RYKKLVKPTRGVFYLISIANLDQPVXXPS

SEQ ID NO: 106706 - protein, 34 aa, Artificial Sequence; identical to SEQ ID NO: 3547
  Cyclic GFR-binding peptide
  MOD_RES (29)..(30): Xaa is C or S

SEQ ID NO: 106707 - protein, 32 aa, Artificial Sequence; identical to SEQ ID NO: 14091
  Cyclic GFR-binding peptide
  MOD_RES (29)..(30): Xaa is C or S

SEQ ID NO: 106708 - protein, 35 aa, Artificial Sequence; identical to SEQ ID NO: 3550
  Cyclic GFR-binding peptide
  MOD_RES (2)..(35): Xaa is C or S

SEQ ID NO: 106709 - protein, 29 aa, Artificial Sequence
  Cyclic GFR-binding peptide
  MOD_RES (28)..(28): Xaa is C or S
MNQYNKLIVNSSDDLYLVSIASLKTPAXT

SEQ ID NO: 106710 - protein, 32 aa, Artificial Sequence; identical to SEQ ID NO: 14095
  Cyclic GFR-binding peptide
  MOD_RES (27)..(28): Xaa is C or S

SEQ ID NO: 106711 - protein, 27 aa, Artificial Sequence
  Cyclic GFR-binding peptide
MGEQYNKLTPVGMDDLYLVSIASLKTP

SEQ ID NO: 106712 - protein, 27 aa, Artificial Sequence
  Cyclic GFR-binding peptide
  MOD_RES (1)..(1): Xaa is C or S
XSKVVMRYKKLVKPTRGVFYLISIANL

SEQ ID NO: 106713 - protein, 22 aa, Artificial Sequence
  Cyclic GFR-binding peptide
NQYNKLIVNSSDDLYLVSIASL

SEQ ID NO: 106714 - protein, 25 aa, Artificial Sequence
  Cyclic GFR-binding peptide
VVMGRYKKLIIQQKDNFYLMSIANM

SEQ ID NO: 106715 - protein, 28 aa, Artificial Sequence
  Cyclic GFR-binding peptide
VMDRYKKLVVKENEDFYLMSIANLETPV

SEQ ID NO: 106716 - protein, 41 aa, Artificial Sequence; identical to SEQ ID NO: 3561
  Cyclic GFR-binding peptide
  MOD_RES (2)..(4)..(36)..(37): Xaa is C or S

SEQ ID NO: 106717 - protein, 41 aa, Artificial Sequence; identical to SEQ ID NO: 3563
  Cyclic GFR-binding peptide
  MOD_RES (1)..(3)..(35): Xaa is C or S

SEQ ID NO: 106718 - protein, 24 aa, Artificial Sequence
  Cyclic GFR-binding peptide
VIMRYKKLVKPKRGVFYLISIANL

SEQ ID NO: 106719 - protein, 25 aa, Artificial Sequence
  Cyclic GFR-binding peptide
DQYNKLVVKENEDLYLMSIASLETP

SEQ ID NO: 106720 - protein, 33 aa, Artificial Sequence; identical to SEQ ID NO: 14110
  Cyclic GFR-binding peptide
  MOD_RES (1)..(33): Xaa is C or S

SEQ ID NO: 106721 - protein, 29 aa, Artificial Sequence
  Cyclic GFR-binding peptide
  MOD_RES (29)..(29): Xaa is C or S
VMNQYNKLIVNSSDDLYLVSIASLKTPAX

SEQ ID NO: 106722 - protein, 25 aa, Artificial Sequence
  Cyclic GFR-binding peptide
VMGQYNKLIIQQKDNLYLMSIASMK

SEQ ID NO: 106723 - protein, 34 aa, Artificial Sequence
  Cyclic GFR-binding peptide
  MOD_RES (29)..(30): Xaa is C or S
TMNQYNKLVVNKNEDLYLISIASMKEPVXXPEPI

SEQ ID NO: 106724 - protein, 27 aa, Artificial Sequence
  Cyclic GFR-binding peptide
KVVMRYKKLVKPTRGVFYLISIANLDQ

SEQ ID NO: 106725 - protein, 32 aa, Artificial Sequence; identical to SEQ ID NO: 14115
  Cyclic GFR-binding peptide
  MOD_RES (30)..(31): Xaa is C or S

SEQ ID NO: 106726 - protein, 32 aa, Artificial Sequence
  Cyclic GFR-binding peptide
  MOD_RES (27)..(28): Xaa is C or S
DQYNKLVVNNAADLYLISIASLRAPVXXSAPA

SEQ ID NO: 106727 - protein, 30 aa, Artificial Sequence; identical to SEQ ID NO: 3577
  Cyclic GFR-binding peptide
  MOD_RES (30)..(30): Xaa is C or S

SEQ ID NO: 106728 - protein, 36 aa, Artificial Sequence; identical to SEQ ID NO: 3580
  Cyclic GFR-binding peptide
  MOD_RES (2)..(33)..(34): Xaa is C or S

SEQ ID NO: 106729 - protein, 35 aa, Artificial Sequence; identical to SEQ ID NO: 3581
  Cyclic GFR-binding peptide
  MOD_RES (30)..(31): Xaa is C or S

SEQ ID NO: 106730 - protein, 36 aa, Artificial Sequence; identical to SEQ ID NO: 3583
  Cyclic GFR-binding peptide
  MOD_RES (2)..(35)..(36): Xaa is C or S

SEQ ID NO: 106731 - protein, 34 aa, Artificial Sequence; identical to SEQ ID NO: 3584
  Cyclic GFR-binding peptide
  MOD_RES (29)..(29): Xaa is C or S

SEQ ID NO: 106732 - protein, 36 aa, Artificial Sequence; identical to SEQ ID NO: 14127
  Cyclic GFR-binding peptide
  MOD_RES (1)..(3)..(35)..(36): Xaa is C or S

SEQ ID NO: 106733 - protein, 30 aa, Artificial Sequence; identical to SEQ ID NO: 3585
  Cyclic GFR-binding peptide
  MOD_RES (27)..(28): Xaa is C or S

SEQ ID NO: 106734 - protein, 32 aa, Artificial Sequence; identical to SEQ ID NO: 3586
  Cyclic GFR-binding peptide
  MOD_RES (26)..(27): Xaa is C or S

SEQ ID NO: 106735 - protein, 22 aa, Artificial Sequence
  Cyclic GFR-binding peptide
DRYKKLVVNNASDFYLISIANL

SEQ ID NO: 106736 - protein, 35 aa, Artificial Sequence; identical to SEQ ID NO: 75174
  Cyclic GFR-binding peptide
  MOD_RES (2)..(34)..(35): Xaa is C or S

SEQ ID NO: 106737 - protein, 34 aa, Artificial Sequence; identical to SEQ ID NO: 3591
  Cyclic GFR-binding peptide
  MOD_RES (1)..(32)..(33): Xaa is C or S

SEQ ID NO: 106738 - protein, 33 aa, Artificial Sequence
  Cyclic GFR-binding peptide
  MOD_RES (32)..(33): Xaa is C or S
RDVVMGQYNKLIIQQKDNLYLMSIASMKTPTXX

SEQ ID NO: 106739 - protein, 28 aa, Artificial Sequence
  Cyclic GFR-binding peptide
  MOD_RES (26)..(27): Xaa is C or S
RYKKLVVKENEDFYLMSIANLETPVXXA

SEQ ID NO: 106740 - protein, 42 aa, Artificial Sequence; identical to SEQ ID NO: 3596
  Cyclic GFR-binding peptide
  MOD_RES (2)..(4)..(37)..(38): Xaa is C or S

SEQ ID NO: 106741 - protein, 29 aa, Artificial Sequence
  Cyclic GFR-binding peptide
  MOD_RES (27)..(28): Xaa is C or S
ERYKKLTPVGMDDFYLVSIANLKTPVXXA

SEQ ID NO: 106742 - protein, 39 aa, Artificial Sequence; identical to SEQ ID NO: 3599
  Cyclic GFR-binding peptide
  MOD_RES (1)..(33): Xaa is C or S

SEQ ID NO: 106743 - protein, 31 aa, Artificial Sequence; identical to SEQ ID NO: 14148
  Cyclic GFR-binding peptide
  MOD_RES (31)..(31): Xaa is C or S

SEQ ID NO: 106744 - protein, 25 aa, Artificial Sequence
  Cyclic GFR-binding peptide
RVIMQYNKLVKPKRGVLYLISIASL

SEQ ID NO: 106745 - protein, 28 aa, Artificial Sequence
  Cyclic GFR-binding peptide
  MOD_RES (1)..(3): Xaa is C or S
XGXEEVIMQYNKLLLVRGNDLYLMSIAS

SEQ ID NO: 106746 - protein, 30 aa, Artificial Sequence; identical to SEQ ID NO: 3602
  Cyclic GFR-binding peptide
  MOD_RES (1)..(3): Xaa is C or S

SEQ ID NO: 106747 - protein, 34 aa, Artificial Sequence; identical to SEQ ID NO: 85873
  Cyclic GFR-binding peptide
  MOD_RES (28)..(29): Xaa is C or S

SEQ ID NO: 106748 - protein, 32 aa, Artificial Sequence; identical to SEQ ID NO: 75185
  Cyclic GFR-binding peptide
  MOD_RES (32)..(32): Xaa is C or S

SEQ ID NO: 106749 - protein, 29 aa, Artificial Sequence
  Cyclic GFR-binding peptide
  MOD_RES (27)..(28): Xaa is C or S
DRYKKLVVNNASDFYLISIANLRTPVXXT

SEQ ID NO: 106750 - protein, 31 aa, Artificial Sequence; identical to SEQ ID NO: 3606
  Cyclic GFR-binding peptide
  MOD_RES (29)..(30): Xaa is C or S

SEQ ID NO: 106751 - protein, 33 aa, Artificial Sequence; identical to SEQ ID NO: 3607
  Cyclic GFR-binding peptide
  MOD_RES (27)..(28): Xaa is C or S

SEQ ID NO: 106752 - protein, 38 aa, Artificial Sequence; identical to SEQ ID NO: 31877
  Cyclic GFR-binding peptide
  MOD_RES (32)..(33): Xaa is C or S

SEQ ID NO: 106753 - protein, 22 aa, Artificial Sequence
  Cyclic GFR-binding peptide
VMRYKKLVKPTRGVFYLISIAN

SEQ ID NO: 106754 - protein, 27 aa, Artificial Sequence
  Cyclic GFR-binding peptide
  MOD_RES (26)..(27): Xaa is C or S
QYNKLVVKDYEDLYLMSIASLETPVXX

SEQ ID NO: 106755 - protein, 30 aa, Artificial Sequence; identical to SEQ ID NO: 3613
  Cyclic GFR-binding peptide
  MOD_RES (26)..(27): Xaa is C or S

SEQ ID NO: 106756 - protein, 31 aa, Artificial Sequence; identical to SEQ ID NO: 3615
  Cyclic GFR-binding peptide
  MOD_RES (29)..(30): Xaa is C or S

SEQ ID NO: 106757 - protein, 39 aa, Artificial Sequence; identical to SEQ ID NO: 3616
  Cyclic GFR-binding peptide
  MOD_RES (2)..(33)..(34): Xaa is C or S

SEQ ID NO: 106758 - protein, 33 aa, Artificial Sequence
  Cyclic GFR-binding peptide
  MOD_RES (30)..(31): Xaa is C or S
VVMGQYNKLIIQQKDNLYLMSIASMKTPTXXPG

SEQ ID NO: 106759 - protein, 31 aa, Artificial Sequence; identical to SEQ ID NO: 31890
  Cyclic GFR-binding peptide
  MOD_RES (28)..(29): Xaa is C or S

SEQ ID NO: 106760 - protein, 31 aa, Artificial Sequence; identical to SEQ ID NO: 3621
  Cyclic GFR-binding peptide
  MOD_RES (2)..(4): Xaa is C or S

SEQ ID NO: 106761 - protein, 28 aa, Artificial Sequence
  Cyclic GFR-binding peptide
EVVMDQYNKLVVKENEDLYLMSIASLET

SEQ ID NO: 106762 - protein, 40 aa, Artificial Sequence; identical to SEQ ID NO: 3623
  Cyclic GFR-binding peptide
  MOD_RES (2)..(4)..(36)..(37): Xaa is C or S

SEQ ID NO: 106763 - protein, 32 aa, Artificial Sequence
  Cyclic GFR-binding peptide
  MOD_RES (26)..(27): Xaa is C or S
QYNKLIVNSSDDLYLVSIASLKTPAXXPKPVH

SEQ ID NO: 106764 - protein, 31 aa, Artificial Sequence; identical to SEQ ID NO: 3624
  Cyclic GFR-binding peptide
  MOD_RES (28)..(29): Xaa is C or S

SEQ ID NO: 106765 - protein, 26 aa, Artificial Sequence
  Cyclic GFR-binding peptide
KVVMQYNKLVKPTRGVLYLISIASLD

SEQ ID NO: 106766 - protein, 31 aa, Artificial Sequence; identical to SEQ ID NO: 3630
  Cyclic GFR-binding peptide
  MOD_RES (2)..(2): Xaa is C or S

SEQ ID NO: 106767 - protein, 33 aa, Artificial Sequence; identical to SEQ ID NO: 3631
  Cyclic GFR-binding peptide
  MOD_RES (2)..(33): Xaa is C or S

SEQ ID NO: 106768 - protein, 33 aa, Artificial Sequence
  Cyclic GFR-binding peptide
  MOD_RES (27)..(28): Xaa is C or S
NQYNKLVVNKNEDLYLISIASMKEPVXXPEPIG

SEQ ID NO: 106769 - protein, 36 aa, Artificial Sequence; identical to SEQ ID NO: 80673
  Cyclic GFR-binding peptide
  MOD_RES (31)..(32): Xaa is C or S

SEQ ID NO: 106770 - protein, 30 aa, Artificial Sequence; identical to SEQ ID NO: 3633
  Cyclic GFR-binding peptide
  MOD_RES (2)..(4): Xaa is C or S

SEQ ID NO: 106771 - protein, 33 aa, Artificial Sequence; identical to SEQ ID NO: 3636
  Cyclic GFR-binding peptide
  MOD_RES (2)..(33): Xaa is C or S

SEQ ID NO: 106772 - protein, 29 aa, Artificial Sequence
  Cyclic GFR-binding peptide
  MOD_RES (29)..(29): Xaa is C or S
VMDRYKKLVVNNAADFYLISIANLRAPVX

SEQ ID NO: 106773 - protein, 38 aa, Artificial Sequence
  Cyclic GFR-binding peptide
  MOD_RES (1)..(33)..(34): Xaa is C or S
XAEVVMDQYNKLVVNNAADLYLISIASLRAPVXXSAPA

SEQ ID NO: 106774 - protein, 29 aa, Artificial Sequence
  Cyclic GFR-binding peptide
SVAMGQYNKLYTVVGKDLYLISIASLKTP

SEQ ID NO: 106775 - protein, 31 aa, Artificial Sequence; identical to SEQ ID NO: 3637
  Cyclic GFR-binding peptide
  MOD_RES (2)..(2): Xaa is C or S

SEQ ID NO: 106776 - protein, 26 aa, Artificial Sequence
  Cyclic GFR-binding peptide
VVMNQYNKLIVNNSSDLYLVSIASLK

SEQ ID NO: 106777 - protein, 33 aa, Artificial Sequence
  Cyclic GFR-binding peptide
  MOD_RES (30)..(31): Xaa is C or S
EVIMQYNKLLLVRGNDLYLMSIASTKVPAXXTS

SEQ ID NO: 106778 - protein, 37 aa, Artificial Sequence; identical to SEQ ID NO: 3642
  Cyclic GFR-binding peptide
  MOD_RES (2)..(34)..(35): Xaa is C or S

SEQ ID NO: 106779 - protein, 36 aa, Artificial Sequence; identical to SEQ ID NO: 3645
  Cyclic GFR-binding peptide
  MOD_RES (2)..(4)..(35)..(36): Xaa is C or S

SEQ ID NO: 106780 - protein, 40 aa, Artificial Sequence; identical to SEQ ID NO: 3646
  Cyclic GFR-binding peptide
  MOD_RES (2)..(4)..(36)..(37): Xaa is C or S

SEQ ID NO: 106781 - protein, 28 aa, Artificial Sequence
  Cyclic GFR-binding peptide
EVTMNQYNKLVVNKNEDLYLISIASMKE

SEQ ID NO: 106782 - protein, 32 aa, Artificial Sequence; identical to SEQ ID NO: 3648
  Cyclic GFR-binding peptide
  MOD_RES (31)..(32): Xaa is C or S

SEQ ID NO: 106783 - protein, 28 aa, Artificial Sequence
  Cyclic GFR-binding peptide
  MOD_RES (28)..(28): Xaa is C or S
MGRYKKLIIQQKDNFYLMSIANMKTPTX

SEQ ID NO: 106784 - protein, 32 aa, Artificial Sequence; identical to SEQ ID NO: 3653
  Cyclic GFR-binding peptide
  MOD_RES (1)..(1): Xaa is C or S

SEQ ID NO: 106785 - protein, 40 aa, Artificial Sequence; identical to SEQ ID NO: 75206
  Cyclic GFR-binding peptide
  MOD_RES (1)..(3)..(35)..(36): Xaa is C or S

SEQ ID NO: 106786 - protein, 34 aa, Artificial Sequence; identical to SEQ ID NO: 75207
  Cyclic GFR-binding peptide
  MOD_RES (30)..(31): Xaa is C or S

SEQ ID NO: 106787 - protein, 41 aa, Artificial Sequence; identical to SEQ ID NO: 3655
  Cyclic GFR-binding peptide
  MOD_RES (1)..(3)..(35)..(36): Xaa is C or S

SEQ ID NO: 106788 - protein, 28 aa, Artificial Sequence
  Cyclic GFR-binding peptide
VTMNRYKKLVVNKNEDFYLISIANMKEP

SEQ ID NO: 106789 - protein, 31 aa, Artificial Sequence; identical to SEQ ID NO: 3657
  Cyclic GFR-binding peptide
  MOD_RES (30)..(31): Xaa is C or S

SEQ ID NO: 106790 - protein, 23 aa, Artificial Sequence
  Cyclic GFR-binding peptide
RYKKLVKPKRGVFYLISIANLAQ

SEQ ID NO: 106791 - protein, 25 aa, Artificial Sequence
  Cyclic GFR-binding peptide
VVMDRYKKLVVNNAADFYLISIANL

SEQ ID NO: 106792 - protein, 33 aa, Artificial Sequence; identical to SEQ ID NO: 3660
  Cyclic GFR-binding peptide
  MOD_RES (29)..(30): Xaa is C or S

SEQ ID NO: 106793 - protein, 33 aa, Artificial Sequence; identical to SEQ ID NO: 3661
  Cyclic GFR-binding peptide
  MOD_RES (28)..(29): Xaa is C or S

SEQ ID NO: 106794 - protein, 32 aa, Artificial Sequence; identical to SEQ ID NO: 75216
  Cyclic GFR-binding peptide
  MOD_RES (27)..(28): Xaa is C or S

SEQ ID NO: 106795 - protein, 28 aa, Artificial Sequence
  Cyclic GFR-binding peptide
GEVVMDQYNKLVVKENEDLYLMSIASLE

SEQ ID NO: 106796 - protein, 38 aa, Artificial Sequence; identical to SEQ ID NO: 3669
  Cyclic GFR-binding peptide
  MOD_RES (2)..(34)..(35): Xaa is C or S

SEQ ID NO: 106797 - protein, 26 aa, Artificial Sequence
  Cyclic GFR-binding peptide
VVMQYNKLVKPTRGVLYLISIASLDQ

SEQ ID NO: 106798 - protein, 33 aa, Artificial Sequence; identical to SEQ ID NO: 3673
  Cyclic GFR-binding peptide
  MOD_RES (28)..(29): Xaa is C or S

SEQ ID NO: 106799 - protein, 24 aa, Artificial Sequence
  Cyclic GFR-binding peptide
RYKKLIVNSSDDFYLVSIANLKTP

SEQ ID NO: 106800 - protein, 25 aa, Artificial Sequence
  Cyclic GFR-binding peptide
QYNKLVKPKRGVLYLISIASLAQPV

SEQ ID NO: 106801 - protein, 34 aa, Artificial Sequence
  Cyclic GFR-binding peptide
  MOD_RES (1)..(33)..(34): Xaa is C or S
XESVAMGQYNKLYTVVGKDLYLISIASLKTPVXX

SEQ ID NO: 106802 - protein, 22 aa, Artificial Sequence
  Cyclic GFR-binding peptide
QYNKLVKPKRGVLYLISIASLA

SEQ ID NO: 106803 - protein, 39 aa, Artificial Sequence
  Cyclic GFR-binding peptide
  MOD_RES (2)..(34)..(35): Xaa is C or S
GXESVAMGQYNKLYTVVGKDLYLISIASLKTPVXXAKSA

SEQ ID NO: 106804 - protein, 23 aa, Artificial Sequence
  Cyclic GFR-binding peptide
QYNKLYTVVGKDLYLISIASLKT

SEQ ID NO: 106805 - protein, 28 aa, Artificial Sequence
  Cyclic GFR-binding peptide
  MOD_RES (1)..(3): Xaa is C or S
XKXSRVIMRYKKLVKPKRGVFYLISIAN

SEQ ID NO: 106806 - protein, 30 aa, Artificial Sequence; identical to SEQ ID NO: 80750
  Cyclic GFR-binding peptide
  MOD_RES (26)..(27): Xaa is C or S

SEQ ID NO: 106807 - protein, 24 aa, Artificial Sequence
  Cyclic GFR-binding peptide
IMQYNKLVKPKRGVLYLISIASLA

SEQ ID NO: 106808 - protein, 29 aa, Artificial Sequence
  Cyclic GFR-binding peptide
  MOD_RES (26)..(27): Xaa is C or S
QYNKLVVNNASDLYLISIASLRTPVXXTP

SEQ ID NO: 106809 - protein, 21 aa, Artificial Sequence
  Cyclic GFR-binding peptide
QYNKLVVKENEDLYLMSIASL

SEQ ID NO: 106810 - protein, 28 aa, Artificial Sequence
  Cyclic GFR-binding peptide
  MOD_RES (1)..(1): Xaa is C or S
XESVAMGRYKKLYTVVGKDFYLISIANL

SEQ ID NO: 106811 - protein, 26 aa, Artificial Sequence
  Cyclic GFR-binding peptide
EVIMRYKKLLLVRGNDFYLMSIANTK

SEQ ID NO: 106812 - protein, 33 aa, Artificial Sequence; identical to SEQ ID NO: 75228
  Cyclic GFR-binding peptide
  MOD_RES (29)..(30): Xaa is C or S

SEQ ID NO: 106813 - protein, 27 aa, Artificial Sequence
  Cyclic GFR-binding peptide
MGQYNKLIIQQKDNLYLMSIASMKTPT

SEQ ID NO: 106814 - protein, 32 aa, Artificial Sequence; identical to SEQ ID NO: 75229
  Cyclic GFR-binding peptide
  MOD_RES (1)..(3): Xaa is C or S

SEQ ID NO: 106815 - protein, 27 aa, Artificial Sequence
  Cyclic GFR-binding peptide
EEVIMRYKKLLLVRGNDFYLMSIANTK

SEQ ID NO: 106816 - protein, 32 aa, Artificial Sequence; identical to SEQ ID NO: 3707
  Cyclic GFR-binding peptide
  MOD_RES (28)..(28): Xaa is C or S

SEQ ID NO: 106817 - protein, 35 aa, Artificial Sequence; identical to SEQ ID NO: 85961
  Cyclic GFR-binding peptide
  MOD_RES (2)..(34)..(35): Xaa is C or S

SEQ ID NO: 106818 - protein, 32 aa, Artificial Sequence; identical to SEQ ID NO: 3708
  Cyclic GFR-binding peptide
  MOD_RES (2)..(4): Xaa is C or S

SEQ ID NO: 106819 - protein, 35 aa, Artificial Sequence
  Cyclic GFR-binding peptide
  MOD_RES (32)..(33): Xaa is C or S
RDVVMGQYNKLIIQQKDNLYLMSIASMKTPTXXPG

SEQ ID NO: 106820 - protein, 26 aa, Artificial Sequence
  Cyclic GFR-binding peptide
EEVIMRYKKLLLVRGNDFYLMSIANT

SEQ ID NO: 106821 - protein, 34 aa, Artificial Sequence; identical to SEQ ID NO: 3711
  Cyclic GFR-binding peptide
  MOD_RES (1)..(32)..(33): Xaa is C or S

SEQ ID NO: 106822 - protein, 32 aa, Artificial Sequence
  Cyclic GFR-binding peptide
  MOD_RES (2)..(2): Xaa is C or S
GXAEVVMDQYNKLVVNNAADLYLISIASLRAP

SEQ ID NO: 106823 - protein, 35 aa, Artificial Sequence; identical to SEQ ID NO: 3715
  Cyclic GFR-binding peptide
  MOD_RES (29)..(30): Xaa is C or S

SEQ ID NO: 106824 - protein, 24 aa, Artificial Sequence
  Cyclic GFR-binding peptide
VAMGQYNKLYTVVGKDLYLISIAS

SEQ ID NO: 106825 - protein, 33 aa, Artificial Sequence; identical to SEQ ID NO: 3717
  Cyclic GFR-binding peptide
  MOD_RES (1)..(1): Xaa is C or S

SEQ ID NO: 106826 - protein, 36 aa, Artificial Sequence; identical to SEQ ID NO: 3718
  Cyclic GFR-binding peptide
  MOD_RES (31)..(32): Xaa is C or S

SEQ ID NO: 106827 - protein, 39 aa, Artificial Sequence
  Cyclic GFR-binding peptide
  MOD_RES (2)..(34)..(35): Xaa is C or S
GXRDVVMGQYNKLIIQQKDNLYLMSIASMKTPTXXPGAS

SEQ ID NO: 106828 - protein, 32 aa, Artificial Sequence; identical to SEQ ID NO: 3722
  Cyclic GFR-binding peptide
  MOD_RES (27)..(28): Xaa is C or S

SEQ ID NO: 106829 - protein, 25 aa, Artificial Sequence
  Cyclic GFR-binding peptide
GERYKKLTPVGMDDFYLVSIANLKT

SEQ ID NO: 106830 - protein, 36 aa, Artificial Sequence; identical to SEQ ID NO: 75246
  Cyclic GFR-binding peptide
  MOD_RES (31)..(32): Xaa is C or S

SEQ ID NO: 106831 - protein, 28 aa, Artificial Sequence
  Cyclic GFR-binding peptide
SVAMGQYNKLYTVVGKDLYLISIASLKT

SEQ ID NO: 106832 - protein, 26 aa, Artificial Sequence
  Cyclic GFR-binding peptide
RDVVMGRYKKLIIQQKDNFYLMSIAN

SEQ ID NO: 106833 - protein, 36 aa, Artificial Sequence; identical to SEQ ID NO: 32000
  Cyclic GFR-binding peptide
  MOD_RES (2)..(34)..(35): Xaa is C or S

SEQ ID NO: 106834 - protein, 35 aa, Artificial Sequence; identical to SEQ ID NO: 3727
  Cyclic GFR-binding peptide
  MOD_RES (30)..(31): Xaa is C or S

SEQ ID NO: 106835 - protein, 32 aa, Artificial Sequence
  Cyclic GFR-binding peptide
  MOD_RES (30)..(31): Xaa is C or S
VTMNQYNKLVVNKNEDLYLISIASMKEPVXXP

SEQ ID NO: 106836 - protein, 32 aa, Artificial Sequence; identical to SEQ ID NO: 75250
  Cyclic GFR-binding peptide
  MOD_RES (1)..(3): Xaa is C or S

SEQ ID NO: 106837 - protein, 24 aa, Artificial Sequence
  Cyclic GFR-binding peptide
RYKKLYTVVGKDFYLISIANLKTP

SEQ ID NO: 106838 - protein, 38 aa, Artificial Sequence; identical to SEQ ID NO: 32005
  Cyclic GFR-binding peptide
  MOD_RES (1)..(3)..(35)..(36): Xaa is C or S

SEQ ID NO: 106839 - protein, 30 aa, Artificial Sequence; identical to SEQ ID NO: 3730
  Cyclic GFR-binding peptide
  MOD_RES (2)..(2): Xaa is C or S

SEQ ID NO: 106840 - protein, 30 aa, Artificial Sequence; identical to SEQ ID NO: 3732
  Cyclic GFR-binding peptide
  MOD_RES (28)..(29): Xaa is C or S

SEQ ID NO: 106841 - protein, 26 aa, Artificial Sequence
  Cyclic GFR-binding peptide
MDRYKKLVVNNASDFYLISIANLRTP

SEQ ID NO: 106842 - protein, 22 aa, Artificial Sequence
  Cyclic GFR-binding peptide
DQYNKLVVKENEDLYLMSIASL

SEQ ID NO: 106843 - protein, 27 aa, Artificial Sequence
  Cyclic GFR-binding peptide
  MOD_RES (27)..(27): Xaa is C or S
MQYNKLVKPKRGVLYLISIASLAQPVX

SEQ ID NO: 106844 - protein, 24 aa, Artificial Sequence
  Cyclic GFR-binding peptide
QYNKLIVNNSSDLYLVSIASLKTP

SEQ ID NO: 106845 - protein, 33 aa, Artificial Sequence; identical to SEQ ID NO: 14263
  Cyclic GFR-binding peptide
  MOD_RES (28)..(29): Xaa is C or S

SEQ ID NO: 106846 - protein, 27 aa, Artificial Sequence
  Cyclic GFR-binding peptide
  MOD_RES (26)..(27): Xaa is C or S
RYKKLVVNNAADFYLISIANLRAPVXX

SEQ ID NO: 106847 - protein, 39 aa, Artificial Sequence; identical to SEQ ID NO: 3741
  Cyclic GFR-binding peptide
  MOD_RES (2)..(35)..(36): Xaa is C or S

SEQ ID NO: 106848 - protein, 42 aa, Artificial Sequence; identical to SEQ ID NO: 32013
  Cyclic GFR-binding peptide
  MOD_RES (2)..(4)..(36)..(37): Xaa is C or S

SEQ ID NO: 106849 - protein, 28 aa, Artificial Sequence
  Cyclic GFR-binding peptide
  MOD_RES (28)..(28): Xaa is C or S
MNRYKKLIVNSSDDFYLVSIANLKTPAX

SEQ ID NO: 106850 - protein, 26 aa, Artificial Sequence
  Cyclic GFR-binding peptide
ERYKKLTPVGMDDFYLVSIANLKTPV

SEQ ID NO: 106851 - protein, 35 aa, Artificial Sequence; identical to SEQ ID NO: 14269
  Cyclic GFR-binding peptide
  MOD_RES (2)..(4): Xaa is C or S

SEQ ID NO: 106852 - protein, 36 aa, Artificial Sequence; identical to SEQ ID NO: 3755
  Cyclic GFR-binding peptide
  MOD_RES (2)..(34): Xaa is C or S

SEQ ID NO: 106853 - protein, 39 aa, Artificial Sequence; identical to SEQ ID NO: 3759
  Cyclic GFR-binding peptide
  MOD_RES (1)..(33)..(34): Xaa is C or S

SEQ ID NO: 106854 - protein, 28 aa, Artificial Sequence
  Cyclic GFR-binding peptide
  MOD_RES (2)..(2): Xaa is C or S
GXESVAMGQYNKLYTVVGKDLYLISIAS

SEQ ID NO: 106855 - protein, 29 aa, Artificial Sequence
  Cyclic GFR-binding peptide
  MOD_RES (1)..(3): Xaa is C or S
XAXSEVTMNQYNKLVVNKNEDLYLISIAS

SEQ ID NO: 106856 - protein, 37 aa, Artificial Sequence; identical to SEQ ID NO: 3765
  Cyclic GFR-binding peptide
  MOD_RES (2)..(34)..(35): Xaa is C or S

SEQ ID NO: 106857 - protein, 29 aa, Artificial Sequence
  Cyclic GFR-binding peptide
  MOD_RES (27)..(28): Xaa is C or S
GRYKKLIIQQKDNFYLMSIANMKTPTXXP

SEQ ID NO: 106858 - protein, 30 aa, Artificial Sequence; identical to SEQ ID NO: 75274
  Cyclic GFR-binding peptide
  MOD_RES (1)..(3): Xaa is C or S

SEQ ID NO: 106859 - protein, 40 aa, Artificial Sequence
  Cyclic GFR-binding peptide
  MOD_RES (2)..(34)..(35): Xaa is C or S
GXRDVVMGQYNKLIIQQKDNLYLMSIASMKTPTXXPGASG

SEQ ID NO: 106860 - protein, 20 aa, Artificial Sequence
  Cyclic GFR-binding peptide
QYNKLIVNNSSDLYLVSIAS

SEQ ID NO: 106861 - protein, 35 aa, Artificial Sequence
  Cyclic GFR-binding peptide
  MOD_RES (1)..(3)..(35): Xaa is C or S
XAXSEVTMNQYNKLVVNKNEDLYLISIASMKEPVX

SEQ ID NO: 106862 - protein, 38 aa, Artificial Sequence; identical to SEQ ID NO: 80801
  Cyclic GFR-binding peptide
  MOD_RES (1)..(33)..(34): Xaa is C or S

SEQ ID NO: 106863 - protein, 27 aa, Artificial Sequence
  Cyclic GFR-binding peptide
AMGQYNKLYTVVGKDLYLISIASLKTP

SEQ ID NO: 106864 - protein, 33 aa, Artificial Sequence; identical to SEQ ID NO: 3768
  Cyclic GFR-binding peptide
  MOD_RES (29)..(30): Xaa is C or S

SEQ ID NO: 106865 - protein, 34 aa, Artificial Sequence
  Cyclic GFR-binding peptide
  MOD_RES (32)..(33): Xaa is C or S
ESVAMGQYNKLYTVVGKDLYLISIASLKTPVXXA

SEQ ID NO: 106866 - protein, 29 aa, Artificial Sequence
  Cyclic GFR-binding peptide
  MOD_RES (1)..(3): Xaa is C or S
XGXESVAMGRYKKLYTVVGKDFYLISIAN

SEQ ID NO: 106867 - protein, 30 aa, Artificial Sequence; identical to SEQ ID NO: 32039
  Cyclic GFR-binding peptide

SEQ ID NO: 106868 - protein, 27 aa, Artificial Sequence
  Cyclic GFR-binding peptide
AKVVMNRYKKLIVNNSSDFYLVSIANL

SEQ ID NO: 106869 - protein, 31 aa, Artificial Sequence
  Cyclic GFR-binding peptide
  MOD_RES (1)..(3): Xaa is C or S
XGXRDVVMGQYNKLIIQQKDNLYLMSIASMK

SEQ ID NO: 106870 - protein, 21 aa, Artificial Sequence
  Cyclic GFR-binding peptide
RYKKLVVNKNEDFYLISIANM

SEQ ID NO: 106871 - protein, 33 aa, Artificial Sequence; identical to SEQ ID NO: 3771
  Cyclic GFR-binding peptide
  MOD_RES (32)..(33): Xaa is C or S

SEQ ID NO: 106872 - protein, 29 aa, Artificial Sequence
  Cyclic GFR-binding peptide
  MOD_RES (1)..(3): Xaa is C or S
XGXRDVVMGRYKKLIIQQKDNFYLMSIAN

SEQ ID NO: 106873 - protein, 33 aa, Artificial Sequence; identical to SEQ ID NO: 3772
  Cyclic GFR-binding peptide
  MOD_RES (1)..(3): Xaa is C or S

SEQ ID NO: 106874 - protein, 30 aa, Artificial Sequence; identical to SEQ ID NO: 3773
  Cyclic GFR-binding peptide
  MOD_RES (2)..(2): Xaa is C or S

SEQ ID NO: 106875 - protein, 30 aa, Artificial Sequence; identical to SEQ ID NO: 80811
  Cyclic GFR-binding peptide
  MOD_RES (30)..(30): Xaa is C or S

SEQ ID NO: 106876 - protein, 25 aa, Artificial Sequence
  Cyclic GFR-binding peptide
AMGQYNKLYTVVGKDLYLISIASLK

SEQ ID NO: 106877 - protein, 34 aa, Artificial Sequence; identical to SEQ ID NO: 3777
  Cyclic GFR-binding peptide
  MOD_RES (28)..(29): Xaa is C or S

SEQ ID NO: 106878 - protein, 28 aa, Artificial Sequence
  Cyclic GFR-binding peptide
VVMRYKKLVKPTRGVFYLISIANLDQPV

SEQ ID NO: 106879 - protein, 34 aa, Artificial Sequence
  Cyclic GFR-binding peptide
  MOD_RES (29)..(30): Xaa is C or S
VMDQYNKLVVNNAADLYLISIASLRAPVXXSAPA

SEQ ID NO: 106880 - protein, 24 aa, Artificial Sequence
  Cyclic GFR-binding peptide
MNQYNKLIVNSSDDLYLVSIASLK

SEQ ID NO: 106881 - protein, 33 aa, Artificial Sequence; identical to SEQ ID NO: 3782
  Cyclic GFR-binding peptide
  MOD_RES (27)..(28): Xaa is C or S

SEQ ID NO: 106882 - protein, 29 aa, Artificial Sequence
  Cyclic GFR-binding peptide
SEVTMNRYKKLVVNKNEDFYLISIANMKE

SEQ ID NO: 106883 - protein, 21 aa, Artificial Sequence
  Cyclic GFR-binding peptide
QYNKLIKPTKGILYLISIASL

SEQ ID NO: 106884 - protein, 27 aa, Artificial Sequence
  Cyclic GFR-binding peptide
SKVVMRYKKLVKPTRGVFYLISIANLD

SEQ ID NO: 106885 - protein, 24 aa, Artificial Sequence
  Cyclic GFR-binding peptide
MDQYNKLVVNNASDLYLISIASLR

SEQ ID NO: 106886 - protein, 30 aa, Artificial Sequence; identical to SEQ ID NO: 80817
  Cyclic GFR-binding peptide
  MOD_RES (1)..(1): Xaa is C or S

SEQ ID NO: 106887 - protein, 31 aa, Artificial Sequence; identical to SEQ ID NO: 3787
  Cyclic GFR-binding peptide
  MOD_RES (26)..(27): Xaa is C or S

SEQ ID NO: 106888 - protein, 27 aa, Artificial Sequence
  Cyclic GFR-binding peptide
AEVVMDQYNKLVVNNAADLYLISIASL

SEQ ID NO: 106889 - protein, 34 aa, Artificial Sequence; identical to SEQ ID NO: 3790
  Cyclic GFR-binding peptide
  MOD_RES (1)..(3): Xaa is C or S

SEQ ID NO: 106890 - protein, 28 aa, Artificial Sequence
  Cyclic GFR-binding peptide
  MOD_RES (27)..(28): Xaa is C or S
DQYNKLVVNNASDLYLISIASLRTPVXX

SEQ ID NO: 106891 - protein, 35 aa, Artificial Sequence; identical to SEQ ID NO: 3792
  Cyclic GFR-binding peptide
  MOD_RES (2)..(34)..(35): Xaa is C or S

SEQ ID NO: 106892 - protein, 25 aa, Artificial Sequence
  Cyclic GFR-binding peptide
IMRYKKLVKPKRGVFYLISIANLAQ

SEQ ID NO: 106893 - protein, 26 aa, Artificial Sequence
  Cyclic GFR-binding peptide
MNRYKKLVVNKNEDFYLISIANMKEP

SEQ ID NO: 106894 - protein, 32 aa, Artificial Sequence; identical to SEQ ID NO: 3796
  Cyclic GFR-binding peptide
  MOD_RES (1)..(3): Xaa is C or S

SEQ ID NO: 106895 - protein, 26 aa, Artificial Sequence
  Cyclic GFR-binding peptide
ESVAMGQYNKLYTVVGKDLYLISIAS

SEQ ID NO: 106896 - protein, 33 aa, Artificial Sequence
  Cyclic GFR-binding peptide
  MOD_RES (1)..(3): Xaa is C or S
XGXESVAMGQYNKLYTVVGKDLYLISIASLKTP

SEQ ID NO: 106897 - protein, 34 aa, Artificial Sequence; identical to SEQ ID NO: 3801
  Cyclic GFR-binding peptide
  MOD_RES (2)..(34): Xaa is C or S

SEQ ID NO: 106898 - protein, 29 aa, Artificial Sequence
  Cyclic GFR-binding peptide
  MOD_RES (28)..(29): Xaa is C or S
MGRYKKLIIQQKDNFYLMSIANMKTPTXX

SEQ ID NO: 106899 - protein, 34 aa, Artificial Sequence; identical to SEQ ID NO: 75290
  Cyclic GFR-binding peptide
  MOD_RES (28)..(29): Xaa is C or S

SEQ ID NO: 106900 - protein, 29 aa, Artificial Sequence
  Cyclic GFR-binding peptide
  MOD_RES (2)..(2): Xaa is C or S
GXAEVVMDQYNKLVVNNAADLYLISIASL

SEQ ID NO: 106901 - protein, 35 aa, Artificial Sequence; identical to SEQ ID NO: 3803
  Cyclic GFR-binding peptide
  MOD_RES (2)..(33)..(34): Xaa is C or S

SEQ ID NO: 106902 - protein, 41 aa, Artificial Sequence; identical to SEQ ID NO: 32077
  Cyclic GFR-binding peptide
  MOD_RES (2)..(4)..(36)..(37): Xaa is C or S

SEQ ID NO: 106903 - protein, 35 aa, Artificial Sequence; identical to SEQ ID NO: 3805
  Cyclic GFR-binding peptide
  MOD_RES (1)..(3)..(34)..(35): Xaa is C or S

SEQ ID NO: 106904 - protein, 35 aa, Artificial Sequence; identical to SEQ ID NO: 3806
  Cyclic GFR-binding peptide
  MOD_RES (31)..(32): Xaa is C or S

SEQ ID NO: 106905 - protein, 33 aa, Artificial Sequence
  Cyclic GFR-binding peptide
  MOD_RES (27)..(28): Xaa is C or S
GQYNKLIIQQKDNLYLMSIASMKTPTXXPGASG

SEQ ID NO: 106906 - protein, 21 aa, Artificial Sequence
  Cyclic GFR-binding peptide
RYKKLIVNNSSDFYLVSIANL

SEQ ID NO: 106907 - protein, 28 aa, Artificial Sequence
  Cyclic GFR-binding peptide
  MOD_RES (2)..(2): Xaa is C or S
GXARVVMNQYNKLIVNSSDDLYLVSIAS

SEQ ID NO: 106908 - protein, 30 aa, Artificial Sequence
  Cyclic GFR-binding peptide
  MOD_RES (30)..(30): Xaa is C or S
VVMGQYNKLIIQQKDNLYLMSIASMKTPTX

SEQ ID NO: 106909 - protein, 34 aa, Artificial Sequence; identical to SEQ ID NO: 75295
  Cyclic GFR-binding peptide
  MOD_RES (31)..(32): Xaa is C or S

SEQ ID NO: 106910 - protein, 33 aa, Artificial Sequence
  Cyclic GFR-binding peptide
  MOD_RES (2)..(4): Xaa is C or S
SXGXRDVVMGQYNKLIIQQKDNLYLMSIASMKT

SEQ ID NO: 106911 - protein, 29 aa, Artificial Sequence
  Cyclic GFR-binding peptide
  MOD_RES (29)..(29): Xaa is C or S
VVMQYNKLVKPTRGVLYLISIASLDQPVX

SEQ ID NO: 106912 - protein, 33 aa, Artificial Sequence; identical to SEQ ID NO: 3813
  Cyclic GFR-binding peptide
  MOD_RES (31)..(32): Xaa is C or S

SEQ ID NO: 106913 - protein, 33 aa, Artificial Sequence; identical to SEQ ID NO: 3814
  Cyclic GFR-binding peptide
  MOD_RES (31)..(32): Xaa is C or S

SEQ ID NO: 106914 - protein, 36 aa, Artificial Sequence; identical to SEQ ID NO: 3816
  Cyclic GFR-binding peptide
  MOD_RES (32)..(33): Xaa is C or S

SEQ ID NO: 106915 - protein, 24 aa, Artificial Sequence
  Cyclic GFR-binding peptide
DQYNKLVVKENEDLYLMSIASLET

SEQ ID NO: 106916 - protein, 33 aa, Artificial Sequence; identical to SEQ ID NO: 86076
  Cyclic GFR-binding peptide
  MOD_RES (27)..(28): Xaa is C or S

SEQ ID NO: 106917 - protein, 24 aa, Artificial Sequence
  Cyclic GFR-binding peptide
VMEQYNKLVVKDYEDLYLMSIASL

SEQ ID NO: 106918 - protein, 40 aa, Artificial Sequence; identical to SEQ ID NO: 14329
  Cyclic GFR-binding peptide
  MOD_RES (2)..(4)..(36)..(37): Xaa is C or S

SEQ ID NO: 106919 - protein, 33 aa, Artificial Sequence; identical to SEQ ID NO: 3821
  Cyclic GFR-binding peptide
  MOD_RES (28)..(29): Xaa is C or S

SEQ ID NO: 106920 - protein, 29 aa, Artificial Sequence
  Cyclic GFR-binding peptide
  MOD_RES (1)..(1): Xaa is C or S
XRDVVMGQYNKLIIQQKDNLYLMSIASMK

SEQ ID NO: 106921 - protein, 36 aa, Artificial Sequence; identical to SEQ ID NO: 3822
  Cyclic GFR-binding peptide
  MOD_RES (2)..(4): Xaa is C or S

SEQ ID NO: 106922 - protein, 36 aa, Artificial Sequence; identical to SEQ ID NO: 3823
  Cyclic GFR-binding peptide
  MOD_RES (30)..(31): Xaa is C or S

SEQ ID NO: 106923 - protein, 33 aa, Artificial Sequence; identical to SEQ ID NO: 3824
  Cyclic GFR-binding peptide
  MOD_RES (31)..(32): Xaa is C or S

SEQ ID NO: 106924 - protein, 38 aa, Artificial Sequence; identical to SEQ ID NO: 3825
  Cyclic GFR-binding peptide
  MOD_RES (2)..(33)..(34): Xaa is C or S

SEQ ID NO: 106925 - protein, 25 aa, Artificial Sequence
  Cyclic GFR-binding peptide
VVMERYKKLVVKDYEDFYLMSIANL

SEQ ID NO: 106926 - protein, 38 aa, Artificial Sequence
  Cyclic GFR-binding peptide
  MOD_RES (1)..(32)..(33): Xaa is C or S
XEEVIMQYNKLLLVRGNDLYLMSIASTKVPAXXTSPVR

SEQ ID NO: 106927 - protein, 30 aa, Artificial Sequence
  Cyclic GFR-binding peptide
  MOD_RES (1)..(3): Xaa is C or S
XAXSEVTMNQYNKLVVNKNEDLYLISIASM

SEQ ID NO: 106928 - protein, 31 aa, Artificial Sequence
  Cyclic GFR-binding peptide
  MOD_RES (1)..(3): Xaa is C or S
XGXAEVVMDQYNKLVVNNAADLYLISIASLR

SEQ ID NO: 106929 - protein, 34 aa, Artificial Sequence; identical to SEQ ID NO: 3831
  Cyclic GFR-binding peptide
  MOD_RES (2)..(4): Xaa is C or S

SEQ ID NO: 106930 - protein, 36 aa, Artificial Sequence
  Cyclic GFR-binding peptide
  MOD_RES (1)..(3)..(35)..(36): Xaa is C or S
XGXAEVVMDQYNKLVVNNAADLYLISIASLRAPVXX

SEQ ID NO: 106931 - protein, 25 aa, Artificial Sequence
  Cyclic GFR-binding peptide
KVVMRYKKLVKPTRGVFYLISIANL

SEQ ID NO: 106932 - protein, 29 aa, Artificial Sequence
  Cyclic GFR-binding peptide
  MOD_RES (1)..(3): Xaa is C or S
XGXAKVVMNRYKKLIVNNSSDFYLVSIAN

SEQ ID NO: 106933 - protein, 23 aa, Artificial Sequence
  Cyclic GFR-binding peptide
QYNKLIVNSSDDLYLVSIASLKT

SEQ ID NO: 106934 - protein, 30 aa, Artificial Sequence
  Cyclic GFR-binding peptide
  MOD_RES (26)..(27): Xaa is C or S
QYNKLVVNNAADLYLISIASLRAPVXXSAP

SEQ ID NO: 106935 - protein, 33 aa, Artificial Sequence; identical to SEQ ID NO: 3842
  Cyclic GFR-binding peptide
  MOD_RES (1)..(32)..(33): Xaa is C or S

SEQ ID NO: 106936 - protein, 38 aa, Artificial Sequence; identical to SEQ ID NO: 3844
  Cyclic GFR-binding peptide
  MOD_RES (1)..(3)..(36)..(37): Xaa is C or S

SEQ ID NO: 106937 - protein, 32 aa, Artificial Sequence; identical to SEQ ID NO: 3849
  Cyclic GFR-binding peptide
  MOD_RES (2)..(4): Xaa is C or S

SEQ ID NO: 106938 - protein, 23 aa, Artificial Sequence
  Cyclic GFR-binding peptide
VMNQYNKLIVNNSSDLYLVSIAS

SEQ ID NO: 106939 - protein, 23 aa, Artificial Sequence
  Cyclic GFR-binding peptide
ERYKKLTPVGMDDFYLVSIANLK

SEQ ID NO: 106940 - protein, 32 aa, Artificial Sequence; identical to SEQ ID NO: 3853
  Cyclic GFR-binding peptide
  MOD_RES (2)..(2): Xaa is C or S

SEQ ID NO: 106941 - protein, 34 aa, Artificial Sequence; identical to SEQ ID NO: 3854
  Cyclic GFR-binding peptide
  MOD_RES (33)..(34): Xaa is C or S

SEQ ID NO: 106942 - protein, 38 aa, Artificial Sequence; identical to SEQ ID NO: 75313
  Cyclic GFR-binding peptide
  MOD_RES (1)..(3)..(35)..(36): Xaa is C or S

SEQ ID NO: 106943 - protein, 38 aa, Artificial Sequence; identical to SEQ ID NO: 3857
  Cyclic GFR-binding peptide
  MOD_RES (2)..(34)..(35): Xaa is C or S

SEQ ID NO: 106944 - protein, 28 aa, Artificial Sequence
  Cyclic GFR-binding peptide
AEVVMDRYKKLVVNNAADFYLISIANLR

SEQ ID NO: 106945 - protein, 39 aa, Artificial Sequence; identical to SEQ ID NO: 3858
  Cyclic GFR-binding peptide
  MOD_RES (2)..(4)..(35)..(36): Xaa is C or S

SEQ ID NO: 106946 - protein, 28 aa, Artificial Sequence
  Cyclic GFR-binding peptide
  MOD_RES (2)..(2): Xaa is C or S
GXAEVVMDRYKKLVVNNAADFYLISIAN

SEQ ID NO: 106947 - protein, 31 aa, Artificial Sequence; identical to SEQ ID NO: 3860
  Cyclic GFR-binding peptide
  MOD_RES (1)..(1): Xaa is C or S

SEQ ID NO: 106948 - protein, 38 aa, Artificial Sequence
  Cyclic GFR-binding peptide
  MOD_RES (2)..(34)..(35): Xaa is C or S
AXSEVTMNQYNKLVVNKNEDLYLISIASMKEPVXXPEP

SEQ ID NO: 106949 - protein, 34 aa, Artificial Sequence
  Cyclic GFR-binding peptide
  MOD_RES (2)..(34): Xaa is C or S
AXSEVTMNQYNKLVVNKNEDLYLISIASMKEPVX

SEQ ID NO: 106950 - protein, 27 aa, Artificial Sequence
  Cyclic GFR-binding peptide
VVMGRYKKLIIQQKDNFYLMSIANMKT

SEQ ID NO: 106951 - protein, 29 aa, Artificial Sequence
  Cyclic GFR-binding peptide
  MOD_RES (2)..(2): Xaa is C or S
AXSEVTMNQYNKLVVNKNEDLYLISIASM

SEQ ID NO: 106952 - protein, 27 aa, Artificial Sequence
  Cyclic GFR-binding peptide
  MOD_RES (26)..(27): Xaa is C or S
RYKKLVKPKRGVFYLISIANLAQPVXX

SEQ ID NO: 106953 - protein, 37 aa, Artificial Sequence; identical to SEQ ID NO: 14374
  Cyclic GFR-binding peptide
  MOD_RES (2)..(4)..(36)..(37): Xaa is C or S

SEQ ID NO: 106954 - protein, 34 aa, Artificial Sequence; identical to SEQ ID NO: 3869
  Cyclic GFR-binding peptide
  MOD_RES (29)..(30): Xaa is C or S

SEQ ID NO: 106955 - protein, 38 aa, Artificial Sequence; identical to SEQ ID NO: 3871
  Cyclic GFR-binding peptide
  MOD_RES (1)..(34)..(35): Xaa is C or S

SEQ ID NO: 106956 - protein, 39 aa, Artificial Sequence; identical to SEQ ID NO: 3874
  Cyclic GFR-binding peptide
  MOD_RES (2)..(34)..(35): Xaa is C or S

SEQ ID NO: 106957 - protein, 29 aa, Artificial Sequence
  Cyclic GFR-binding peptide
  MOD_RES (28)..(29): Xaa is C or S
MERYKKLVVKDYEDFYLMSIANLETPVXX

SEQ ID NO: 106958 - protein, 32 aa, Artificial Sequence; identical to SEQ ID NO: 3876
  Cyclic GFR-binding peptide
  MOD_RES (1)..(3): Xaa is C or S

SEQ ID NO: 106959 - protein, 24 aa, Artificial Sequence
  Cyclic GFR-binding peptide
MGQYNKLYTVVGKDLYLISIASLK

SEQ ID NO: 106960 - protein, 34 aa, Artificial Sequence; identical to SEQ ID NO: 75329
  Cyclic GFR-binding peptide
  MOD_RES (1)..(33)..(34): Xaa is C or S

SEQ ID NO: 106961 - protein, 31 aa, Artificial Sequence; identical to SEQ ID NO: 14383
  Cyclic GFR-binding peptide
  MOD_RES (30)..(31): Xaa is C or S

SEQ ID NO: 106962 - protein, 30 aa, Artificial Sequence; identical to SEQ ID NO: 14384
  Cyclic GFR-binding peptide

SEQ ID NO: 106963 - protein, 23 aa, Artificial Sequence
  Cyclic GFR-binding peptide
QYNKLVVNNAADLYLISIASLRA

SEQ ID NO: 106964 - protein, 27 aa, Artificial Sequence
  Cyclic GFR-binding peptide
  MOD_RES (1)..(1): Xaa is C or S
XGEVVMEQYNKLVVKDYEDLYLMSIAS

SEQ ID NO: 106965 - protein, 34 aa, Artificial Sequence; identical to SEQ ID NO: 3880
  Cyclic GFR-binding peptide
  MOD_RES (1)..(3)..(34): Xaa is C or S

SEQ ID NO: 106966 - protein, 30 aa, Artificial Sequence; identical to SEQ ID NO: 32169
  Cyclic GFR-binding peptide
  MOD_RES (2)..(4): Xaa is C or S

SEQ ID NO: 106967 - protein, 32 aa, Artificial Sequence; identical to SEQ ID NO: 3881
  Cyclic GFR-binding peptide
  MOD_RES (30)..(31): Xaa is C or S

SEQ ID NO: 106968 - protein, 31 aa, Artificial Sequence; identical to SEQ ID NO: 3883
  Cyclic GFR-binding peptide

SEQ ID NO: 106969 - protein, 38 aa, Artificial Sequence; identical to SEQ ID NO: 32174
  Cyclic GFR-binding peptide
  MOD_RES (32)..(33): Xaa is C or S

SEQ ID NO: 106970 - protein, 30 aa, Artificial Sequence; identical to SEQ ID NO: 3887
  Cyclic GFR-binding peptide
  MOD_RES (2)..(4): Xaa is C or S

SEQ ID NO: 106971 - protein, 24 aa, Artificial Sequence
  Cyclic GFR-binding peptide
NRYKKLVVNKNEDFYLISIANMKE

SEQ ID NO: 106972 - protein, 25 aa, Artificial Sequence
  Cyclic GFR-binding peptide
QYNKLIVNSSDDLYLVSIASLKTPA

SEQ ID NO: 106973 - protein, 34 aa, Artificial Sequence; identical to SEQ ID NO: 3890
  Cyclic GFR-binding peptide
  MOD_RES (31)..(32): Xaa is C or S

SEQ ID NO: 106974 - protein, 30 aa, Artificial Sequence; identical to SEQ ID NO: 3892
  Cyclic GFR-binding peptide
  MOD_RES (28)..(28): Xaa is C or S

SEQ ID NO: 106975 - protein, 26 aa, Artificial Sequence
  Cyclic GFR-binding peptide
DVVMGQYNKLIIQQKDNLYLMSIASM

SEQ ID NO: 106976 - protein, 29 aa, Artificial Sequence
  Cyclic GFR-binding peptide
  MOD_RES (1)..(3): Xaa is C or S
XGXAEVVMDRYKKLVVNNAADFYLISIAN

SEQ ID NO: 106977 - protein, 39 aa, Artificial Sequence; identical to SEQ ID NO: 75340
  Cyclic GFR-binding peptide
  MOD_RES (2)..(4)..(35)..(36): Xaa is C or S

SEQ ID NO: 106978 - protein, 28 aa, Artificial Sequence
  Cyclic GFR-binding peptide
RDVVMGQYNKLIIQQKDNLYLMSIASMK

SEQ ID NO: 106979 - protein, 37 aa, Artificial Sequence; identical to SEQ ID NO: 3900
  Cyclic GFR-binding peptide
  MOD_RES (2)..(34)..(35): Xaa is C or S

SEQ ID NO: 106980 - protein, 22 aa, Artificial Sequence
  Cyclic GFR-binding peptide
QYNKLIIQQKDNLYLMSIASMK

SEQ ID NO: 106981 - protein, 33 aa, Artificial Sequence; identical to SEQ ID NO: 3901
  Cyclic GFR-binding peptide
  MOD_RES (29)..(30): Xaa is C or S

SEQ ID NO: 106982 - protein, 32 aa, Artificial Sequence; identical to SEQ ID NO: 32198
  Cyclic GFR-binding peptide
  MOD_RES (31)..(32): Xaa is C or S

SEQ ID NO: 106983 - protein, 32 aa, Artificial Sequence
  Cyclic GFR-binding peptide
  MOD_RES (1)..(1): Xaa is C or S
XAEVVMDQYNKLVVNNAADLYLISIASLRAPV

SEQ ID NO: 106984 - protein, 35 aa, Artificial Sequence; identical to SEQ ID NO: 3908
  Cyclic GFR-binding peptide
  MOD_RES (30)..(31): Xaa is C or S

SEQ ID NO: 106985 - protein, 32 aa, Artificial Sequence; identical to SEQ ID NO: 3910
  Cyclic GFR-binding peptide
  MOD_RES (29)..(30): Xaa is C or S

SEQ ID NO: 106986 - protein, 28 aa, Artificial Sequence
  Cyclic GFR-binding peptide
  MOD_RES (2)..(2): Xaa is C or S
GXRDVVMGRYKKLIIQQKDNFYLMSIAN

SEQ ID NO: 106987 - protein, 38 aa, Artificial Sequence; identical to SEQ ID NO: 14418
  Cyclic GFR-binding peptide
  MOD_RES (1)..(3)..(35)..(36): Xaa is C or S

SEQ ID NO: 106988 - protein, 36 aa, Artificial Sequence; identical to SEQ ID NO: 14420
  Cyclic GFR-binding peptide
  MOD_RES (2)..(4)..(36): Xaa is C or S

SEQ ID NO: 106989 - protein, 30 aa, Artificial Sequence; identical to SEQ ID NO: 32211
  Cyclic GFR-binding peptide
  MOD_RES (26)..(27): Xaa is C or S

SEQ ID NO: 106990 - protein, 31 aa, Artificial Sequence; identical to SEQ ID NO: 3915
  Cyclic GFR-binding peptide
  MOD_RES (1)..(1): Xaa is C or S

SEQ ID NO: 106991 - protein, 34 aa, Artificial Sequence; identical to SEQ ID NO: 3918
  Cyclic GFR-binding peptide
  MOD_RES (2)..(33)..(34): Xaa is C or S

SEQ ID NO: 106992 - protein, 35 aa, Artificial Sequence; identical to SEQ ID NO: 3919
  Cyclic GFR-binding peptide
  MOD_RES (29)..(30): Xaa is C or S

SEQ ID NO: 106993 - protein, 30 aa, Artificial Sequence; identical to SEQ ID NO: 75355
  Cyclic GFR-binding peptide
  MOD_RES (29)..(30): Xaa is C or S

SEQ ID NO: 106994 - protein, 41 aa, Artificial Sequence; identical to SEQ ID NO: 3922
  Cyclic GFR-binding peptide
  MOD_RES (1)..(3)..(35)..(36): Xaa is C or S

SEQ ID NO: 106995 - protein, 36 aa, Artificial Sequence; identical to SEQ ID NO: 75359
  Cyclic GFR-binding peptide
  MOD_RES (1)..(33)..(34): Xaa is C or S

SEQ ID NO: 106996 - protein, 36 aa, Artificial Sequence; identical to SEQ ID NO: 3923
  Cyclic GFR-binding peptide
  MOD_RES (30)..(31): Xaa is C or S

SEQ ID NO: 106997 - protein, 33 aa, Artificial Sequence; identical to SEQ ID NO: 3924
  Cyclic GFR-binding peptide
  MOD_RES (32)..(33): Xaa is C or S

SEQ ID NO: 106998 - protein, 38 aa, Artificial Sequence; identical to SEQ ID NO: 3925
  Cyclic GFR-binding peptide
  MOD_RES (1)..(32)..(33): Xaa is C or S

SEQ ID NO: 106999 - protein, 39 aa, Artificial Sequence
  Cyclic GFR-binding peptide
  MOD_RES (1)..(33)..(34): Xaa is C or S
XSRVVMNQYNKLIVNSSDDLYLVSIASLKTPAXXPKPVH

SEQ ID NO: 107000 - protein, 27 aa, Artificial Sequence
  Cyclic GFR-binding peptide
  MOD_RES (26)..(27): Xaa is C or S
RYKKLIVNNSSDFYLVSIANLKTPAXX

SEQ ID NO: 107001 - protein, 30 aa, Artificial Sequence
  Cyclic GFR-binding peptide
  MOD_RES (2)..(4): Xaa is C or S
RXGXESVAMGQYNKLYTVVGKDLYLISIAS

SEQ ID NO: 107002 - protein, 24 aa, Artificial Sequence
  Cyclic GFR-binding peptide
RYKKLVVNNAADFYLISIANLRAP

SEQ ID NO: 107003 - protein, 31 aa, Artificial Sequence; identical to SEQ ID NO: 3933
  Cyclic GFR-binding peptide
  MOD_RES (30)..(31): Xaa is C or S

SEQ ID NO: 107004 - protein, 38 aa, Artificial Sequence; identical to SEQ ID NO: 3934
  Cyclic GFR-binding peptide
  MOD_RES (1)..(3)..(34)..(35): Xaa is C or S

SEQ ID NO: 107005 - protein, 41 aa, Artificial Sequence; identical to SEQ ID NO: 86184
  Cyclic GFR-binding peptide
  MOD_RES (2)..(4)..(36)..(37): Xaa is C or S

SEQ ID NO: 107006 - protein, 35 aa, Artificial Sequence
  Cyclic GFR-binding peptide
  MOD_RES (2)..(4): Xaa is C or S
SXGXRDVVMGQYNKLIIQQKDNLYLMSIASMKTPT

SEQ ID NO: 107007 - protein, 29 aa, Artificial Sequence
  Cyclic GFR-binding peptide
  MOD_RES (2)..(2): Xaa is C or S
GXAEVVMDRYKKLVVNNAADFYLISIANL

SEQ ID NO: 107008 - protein, 29 aa, Artificial Sequence
  Cyclic GFR-binding peptide
VSMGERYKKLTPVGMDDFYLVSIANLKTP

SEQ ID NO: 107009 - protein, 28 aa, Artificial Sequence
  Cyclic GFR-binding peptide
  MOD_RES (27)..(28): Xaa is C or S
MQYNKLLLVRGNDLYLMSIASTKVPAXX

SEQ ID NO: 107010 - protein, 34 aa, Artificial Sequence; identical to SEQ ID NO: 75369
  Cyclic GFR-binding peptide
  MOD_RES (28)..(29): Xaa is C or S

SEQ ID NO: 107011 - protein, 23 aa, Artificial Sequence
  Cyclic GFR-binding peptide
VMQYNKLVKPTRGVLYLISIASL

SEQ ID NO: 107012 - protein, 29 aa, Artificial Sequence
  Cyclic GFR-binding peptide
  MOD_RES (29)..(29): Xaa is C or S
TMNQYNKLVVNKNEDLYLISIASMKEPVX

SEQ ID NO: 107013 - protein, 24 aa, Artificial Sequence
  Cyclic GFR-binding peptide
QYNKLVVKDYEDLYLMSIASLETP

SEQ ID NO: 107014 - protein, 37 aa, Artificial Sequence; identical to SEQ ID NO: 3944
  Cyclic GFR-binding peptide
  MOD_RES (2)..(34)..(35): Xaa is C or S

SEQ ID NO: 107015 - protein, 31 aa, Artificial Sequence; identical to SEQ ID NO: 75371
  Cyclic GFR-binding peptide
  MOD_RES (28)..(29): Xaa is C or S

SEQ ID NO: 107016 - protein, 26 aa, Artificial Sequence
  Cyclic GFR-binding peptide
VVMDQYNKLVVKENEDLYLMSIASLE

SEQ ID NO: 107017 - protein, 31 aa, Artificial Sequence
  Cyclic GFR-binding peptide
  MOD_RES (2)..(2): Xaa is C or S
GXEEVIMQYNKLLLVRGNDLYLMSIASTKVP

SEQ ID NO: 107018 - protein, 36 aa, Artificial Sequence; identical to SEQ ID NO: 75372
  Cyclic GFR-binding peptide
  MOD_RES (1)..(32)..(33): Xaa is C or S

SEQ ID NO: 107019 - protein, 30 aa, Artificial Sequence; identical to SEQ ID NO: 3949
  Cyclic GFR-binding peptide
  MOD_RES (2)..(2): Xaa is C or S

SEQ ID NO: 107020 - protein, 31 aa, Artificial Sequence; identical to SEQ ID NO: 3950
  Cyclic GFR-binding peptide
  MOD_RES (30)..(31): Xaa is C or S

SEQ ID NO: 107021 - protein, 37 aa, Artificial Sequence
  Cyclic GFR-binding peptide
  MOD_RES (2)..(4)..(35)..(36): Xaa is C or S
LXGXEEVIMQYNKLLLVRGNDLYLMSIASTKVPAXXT

SEQ ID NO: 107022 - protein, 33 aa, Artificial Sequence
  Cyclic GFR-binding peptide
  MOD_RES (1)..(3): Xaa is C or S
XAXSEVTMNQYNKLVVNKNEDLYLISIASMKEP

SEQ ID NO: 107023 - protein, 37 aa, Artificial Sequence; identical to SEQ ID NO: 3958
  Cyclic GFR-binding peptide
  MOD_RES (2)..(4)..(35)..(36): Xaa is C or S

SEQ ID NO: 107024 - protein, 32 aa, Artificial Sequence; identical to SEQ ID NO: 3959
  Cyclic GFR-binding peptide
  MOD_RES (1)..(3): Xaa is C or S

SEQ ID NO: 107025 - protein, 37 aa, Artificial Sequence; identical to SEQ ID NO: 14461
  Cyclic GFR-binding peptide
  MOD_RES (2)..(4)..(36)..(37): Xaa is C or S

SEQ ID NO: 107026 - protein, 21 aa, Artificial Sequence
  Cyclic GFR-binding peptide
RYKKLVKPKRGVFYLISIANL

SEQ ID NO: 107027 - protein, 32 aa, Artificial Sequence; identical to SEQ ID NO: 3965
  Cyclic GFR-binding peptide
  MOD_RES (1)..(3): Xaa is C or S

SEQ ID NO: 107028 - protein, 29 aa, Artificial Sequence
  Cyclic GFR-binding peptide
SEVVMDRYKKLVVNNASDFYLISIANLRT

SEQ ID NO: 107029 - protein, 31 aa, Artificial Sequence
  Cyclic GFR-binding peptide
  MOD_RES (27)..(28): Xaa is C or S
GQYNKLYTVVGKDLYLISIASLKTPVXXAKS

SEQ ID NO: 107030 - protein, 32 aa, Artificial Sequence; identical to SEQ ID NO: 75389
  Cyclic GFR-binding peptide
  MOD_RES (1)..(1): Xaa is C or S

SEQ ID NO: 107031 - protein, 36 aa, Artificial Sequence; identical to SEQ ID NO: 14475
  Cyclic GFR-binding peptide
  MOD_RES (31)..(32): Xaa is C or S

SEQ ID NO: 107032 - protein, 33 aa, Artificial Sequence; identical to SEQ ID NO: 32278
  Cyclic GFR-binding peptide
  MOD_RES (1)..(3): Xaa is C or S

SEQ ID NO: 107033 - protein, 36 aa, Artificial Sequence; identical to SEQ ID NO: 3972
  Cyclic GFR-binding peptide
  MOD_RES (1)..(33): Xaa is C or S

SEQ ID NO: 107034 - protein, 31 aa, Artificial Sequence; identical to SEQ ID NO: 3973
  Cyclic GFR-binding peptide
  MOD_RES (1)..(1): Xaa is C or S

SEQ ID NO: 107035 - protein, 27 aa, Artificial Sequence
  Cyclic GFR-binding peptide
  MOD_RES (1)..(1): Xaa is C or S
XGEVVMDQYNKLVVKENEDLYLMSIAS

SEQ ID NO: 107036 - protein, 36 aa, Artificial Sequence
  Cyclic GFR-binding peptide
  MOD_RES (1)..(32)..(33): Xaa is C or S
XEEVIMQYNKLLLVRGNDLYLMSIASTKVPAXXTSP

SEQ ID NO: 107037 - protein, 31 aa, Artificial Sequence; identical to SEQ ID NO: 3976
  Cyclic GFR-binding peptide
  MOD_RES (29)..(30): Xaa is C or S

SEQ ID NO: 107038 - protein, 31 aa, Artificial Sequence; identical to SEQ ID NO: 32282
  Cyclic GFR-binding peptide
  MOD_RES (29)..(30): Xaa is C or S

SEQ ID NO: 107039 - protein, 41 aa, Artificial Sequence
  Cyclic GFR-binding peptide
  MOD_RES (2)..(4)..(35)..(36): Xaa is C or S
LXGXEEVIMQYNKLLLVRGNDLYLMSIASTKVPAXXTSPVR

SEQ ID NO: 107040 - protein, 34 aa, Artificial Sequence; identical to SEQ ID NO: 3980
  Cyclic GFR-binding peptide
  MOD_RES (2)..(4): Xaa is C or S

SEQ ID NO: 107041 - protein, 31 aa, Artificial Sequence; identical to SEQ ID NO: 14487
  Cyclic GFR-binding peptide

SEQ ID NO: 107042 - protein, 36 aa, Artificial Sequence
  Cyclic GFR-binding peptide
  MOD_RES (31)..(32): Xaa is C or S
SVAMGQYNKLYTVVGKDLYLISIASLKTPVXXAKSA

SEQ ID NO: 107043 - protein, 26 aa, Artificial Sequence
  Cyclic GFR-binding peptide
SEVVMDRYKKLVVNNASDFYLISIAN

SEQ ID NO: 107044 - protein, 24 aa, Artificial Sequence
  Cyclic GFR-binding peptide
IMRYKKLLLVRGNDFYLMSIANTK

SEQ ID NO: 107045 - protein, 34 aa, Artificial Sequence; identical to SEQ ID NO: 3982
  Cyclic GFR-binding peptide
  MOD_RES (2)..(4): Xaa is C or S

SEQ ID NO: 107046 - protein, 31 aa, Artificial Sequence; identical to SEQ ID NO: 3983
  Cyclic GFR-binding peptide
  MOD_RES (1)..(1): Xaa is C or S

SEQ ID NO: 107047 - protein, 26 aa, Artificial Sequence
  Cyclic GFR-binding peptide
VTMNRYKKLVVNKNEDFYLISIANMK

SEQ ID NO: 107048 - protein, 33 aa, Artificial Sequence
  Cyclic GFR-binding peptide
  MOD_RES (28)..(29): Xaa is C or S
MGQYNKLYTVVGKDLYLISIASLKTPVXXAKSA

SEQ ID NO: 107049 - protein, 21 aa, Artificial Sequence
  Cyclic GFR-binding peptide
NRYKKLIVNNSSDFYLVSIAN

SEQ ID NO: 107050 - protein, 34 aa, Artificial Sequence; identical to SEQ ID NO: 3991
  Cyclic GFR-binding peptide
  MOD_RES (2)..(33)..(34): Xaa is C or S

SEQ ID NO: 107051 - protein, 30 aa, Artificial Sequence; identical to SEQ ID NO: 3992
  Cyclic GFR-binding peptide
  MOD_RES (29)..(30): Xaa is C or S

SEQ ID NO: 107052 - protein, 34 aa, Artificial Sequence
  Cyclic GFR-binding peptide
  MOD_RES (1)..(3): Xaa is C or S
XGXESVAMGQYNKLYTVVGKDLYLISIASLKTPV

SEQ ID NO: 107053 - protein, 34 aa, Artificial Sequence; identical to SEQ ID NO: 3994
  Cyclic GFR-binding peptide
  MOD_RES (2)..(34): Xaa is C or S

SEQ ID NO: 107054 - protein, 27 aa, Artificial Sequence
  Cyclic GFR-binding peptide
  MOD_RES (26)..(27): Xaa is C or S
RYKKLYTVVGKDFYLISIANLKTPVXX

SEQ ID NO: 107055 - protein, 37 aa, Artificial Sequence; identical to SEQ ID NO: 32308
  Cyclic GFR-binding peptide
  MOD_RES (2)..(4)..(36)..(37): Xaa is C or S

SEQ ID NO: 107056 - protein, 31 aa, Artificial Sequence; identical to SEQ ID NO: 86247
  Cyclic GFR-binding peptide
  MOD_RES (29)..(30): Xaa is C or S

SEQ ID NO: 107057 - protein, 26 aa, Artificial Sequence
  Cyclic GFR-binding peptide
MGRYKKLYTVVGKDFYLISIANLKTP

SEQ ID NO: 107058 - protein, 38 aa, Artificial Sequence; identical to SEQ ID NO: 3996
  Cyclic GFR-binding peptide
  MOD_RES (2)..(34): Xaa is C or S

SEQ ID NO: 107059 - protein, 34 aa, Artificial Sequence; identical to SEQ ID NO: 3998
  Cyclic GFR-binding peptide
  MOD_RES (32)..(32): Xaa is C or S

SEQ ID NO: 107060 - protein, 39 aa, Artificial Sequence; identical to SEQ ID NO: 3999
  Cyclic GFR-binding peptide
  MOD_RES (2)..(4)..(36)..(37): Xaa is C or S

SEQ ID NO: 107061 - protein, 36 aa, Artificial Sequence; identical to SEQ ID NO: 4000
  Cyclic GFR-binding peptide
  MOD_RES (2)..(4)..(36): Xaa is C or S

SEQ ID NO: 107062 - protein, 29 aa, Artificial Sequence
  Cyclic GFR-binding peptide
VTMNRYKKLVVNKNEDFYLISIANMKEPV

SEQ ID NO: 107063 - protein, 30 aa, Artificial Sequence
  Cyclic GFR-binding peptide
  MOD_RES (29)..(30): Xaa is C or S
AMGQYNKLYTVVGKDLYLISIASLKTPVXX

SEQ ID NO: 107064 - protein, 39 aa, Artificial Sequence; identical to SEQ ID NO: 32319
  Cyclic GFR-binding peptide
  MOD_RES (1)..(3)..(35)..(36): Xaa is C or S

SEQ ID NO: 107065 - protein, 35 aa, Artificial Sequence; identical to SEQ ID NO: 4001
  Cyclic GFR-binding peptide
  MOD_RES (29)..(30): Xaa is C or S

SEQ ID NO: 107066 - protein, 23 aa, Artificial Sequence
  Cyclic GFR-binding peptide
DRYKKLVVNNAADFYLISIANLR

SEQ ID NO: 107067 - protein, 36 aa, Artificial Sequence; identical to SEQ ID NO: 4005
  Cyclic GFR-binding peptide
  MOD_RES (2)..(34): Xaa is C or S

SEQ ID NO: 107068 - protein, 34 aa, Artificial Sequence; identical to SEQ ID NO: 4006
  Cyclic GFR-binding peptide
  MOD_RES (29)..(30): Xaa is C or S

SEQ ID NO: 107069 - protein, 23 aa, Artificial Sequence
  Cyclic GFR-binding peptide
VMERYKKLVVKDYEDFYLMSIAN

SEQ ID NO: 107070 - protein, 26 aa, Artificial Sequence
  Cyclic GFR-binding peptide
MNQYNKLIVNNSSDLYLVSIASLKTP

SEQ ID NO: 107071 - protein, 20 aa, Artificial Sequence
  Cyclic GFR-binding peptide
QYNKLVKPKRGVLYLISIAS

SEQ ID NO: 107072 - protein, 28 aa, Artificial Sequence
  Cyclic GFR-binding peptide
KVIMRYKKLIKPTKGIFYLISIANLDQS

SEQ ID NO: 107073 - protein, 41 aa, Artificial Sequence
  Cyclic GFR-binding peptide
  MOD_RES (2)..(4)..(36)..(37): Xaa is C or S
RXGXESVAMGQYNKLYTVVGKDLYLISIASLKTPVXXAKSA

SEQ ID NO: 107074 - protein, 22 aa, Artificial Sequence
  Cyclic GFR-binding peptide
NRYKKLVVNKNEDFYLISIANM

SEQ ID NO: 107075 - protein, 29 aa, Artificial Sequence
  Cyclic GFR-binding peptide
  MOD_RES (2)..(2): Xaa is C or S
GXESVAMGQYNKLYTVVGKDLYLISIASL

SEQ ID NO: 107076 - protein, 39 aa, Artificial Sequence; identical to SEQ ID NO: 4022
  Cyclic GFR-binding peptide
  MOD_RES (1)..(3)..(35)..(36): Xaa is C or S

SEQ ID NO: 107077 - protein, 29 aa, Artificial Sequence
  Cyclic GFR-binding peptide
AEVVMDQYNKLVVNNAADLYLISIASLRA

SEQ ID NO: 107078 - protein, 31 aa, Artificial Sequence; identical to SEQ ID NO: 4024
  Cyclic GFR-binding peptide
  MOD_RES (2)..(2): Xaa is C or S

SEQ ID NO: 107079 - protein, 36 aa, Artificial Sequence; identical to SEQ ID NO: 75431
  Cyclic GFR-binding peptide
  MOD_RES (2)..(4)..(35)..(36): Xaa is C or S

SEQ ID NO: 107080 - protein, 26 aa, Artificial Sequence
  Cyclic GFR-binding peptide
AVSMGERYKKLTPVGMDDFYLVSIAN

SEQ ID NO: 107081 - protein, 40 aa, Artificial Sequence; identical to SEQ ID NO: 86290
  Cyclic GFR-binding peptide
  MOD_RES (2)..(4)..(36)..(37): Xaa is C or S

SEQ ID NO: 107082 - protein, 28 aa, Artificial Sequence
  Cyclic GFR-binding peptide
  MOD_RES (27)..(28): Xaa is C or S
DQYNKLVVNNAADLYLISIASLRAPVXX

SEQ ID NO: 107083 - protein, 29 aa, Artificial Sequence
  Cyclic GFR-binding peptide
AKVVMNQYNKLIVNNSSDLYLVSIASLKT

SEQ ID NO: 107084 - protein, 21 aa, Artificial Sequence
  Cyclic GFR-binding peptide
DQYNKLVVNNASDLYLISIAS

SEQ ID NO: 107085 - protein, 38 aa, Artificial Sequence; identical to SEQ ID NO: 75436
  Cyclic GFR-binding peptide
  MOD_RES (1)..(33)..(34): Xaa is C or S

SEQ ID NO: 107086 - protein, 31 aa, Artificial Sequence; identical to SEQ ID NO: 4040
  Cyclic GFR-binding peptide

SEQ ID NO: 107087 - protein, 32 aa, Artificial Sequence; identical to SEQ ID NO: 4046
  Cyclic GFR-binding peptide
  MOD_RES (28)..(29): Xaa is C or S

SEQ ID NO: 107088 - protein, 32 aa, Artificial Sequence; identical to SEQ ID NO: 32362
  Cyclic GFR-binding peptide
  MOD_RES (2)..(2): Xaa is C or S

SEQ ID NO: 107089 - protein, 21 aa, Artificial Sequence
  Cyclic GFR-binding peptide
ERYKKLTPVGMDDFYLVSIAN

SEQ ID NO: 107090 - protein, 30 aa, Artificial Sequence; identical to SEQ ID NO: 14555
  Cyclic GFR-binding peptide
  MOD_RES (27)..(28): Xaa is C or S

SEQ ID NO: 107091 - protein, 27 aa, Artificial Sequence
  Cyclic GFR-binding peptide
MDRYKKLVVNNASDFYLISIANLRTPV

SEQ ID NO: 107092 - protein, 29 aa, Artificial Sequence
  Cyclic GFR-binding peptide
  MOD_RES (1)..(1): Xaa is C or S
XARVVMNQYNKLIVNSSDDLYLVSIASLQ

SEQ ID NO: 107093 - protein, 25 aa, Artificial Sequence
  Cyclic GFR-binding peptide
VAMGQYNKLYTVVGKDLYLISIASL

SEQ ID NO: 107094 - protein, 33 aa, Artificial Sequence; identical to SEQ ID NO: 4054
  Cyclic GFR-binding peptide
  MOD_RES (31)..(31): Xaa is C or S

SEQ ID NO: 107095 - protein, 33 aa, Artificial Sequence; identical to SEQ ID NO: 4055
  Cyclic GFR-binding peptide
  MOD_RES (1)..(32)..(33): Xaa is C or S

SEQ ID NO: 107096 - protein, 37 aa, Artificial Sequence; identical to SEQ ID NO: 14562
  Cyclic GFR-binding peptide
  MOD_RES (1)..(3)..(35)..(36): Xaa is C or S

SEQ ID NO: 107097 - protein, 35 aa, Artificial Sequence; identical to SEQ ID NO: 4058
  Cyclic GFR-binding peptide
  MOD_RES (2)..(4): Xaa is C or S

SEQ ID NO: 107098 - protein, 32 aa, Artificial Sequence; identical to SEQ ID NO: 81075
  Cyclic GFR-binding peptide
  MOD_RES (27)..(28): Xaa is C or S

SEQ ID NO: 107099 - protein, 34 aa, Artificial Sequence
  Cyclic GFR-binding peptide
  MOD_RES (29)..(30): Xaa is C or S
VIMQYNKLLLVRGNDLYLMSIASTKVPAXXTSPV

SEQ ID NO: 107100 - protein, 36 aa, Artificial Sequence; identical to SEQ ID NO: 4059
  Cyclic GFR-binding peptide
  MOD_RES (1)..(33)..(34): Xaa is C or S

SEQ ID NO: 107101 - protein, 27 aa, Artificial Sequence
  Cyclic GFR-binding peptide
SMGERYKKLTPVGMDDFYLVSIANLKT

SEQ ID NO: 107102 - protein, 38 aa, Artificial Sequence; identical to SEQ ID NO: 4069
  Cyclic GFR-binding peptide
  MOD_RES (2)..(4)..(36)..(37): Xaa is C or S

SEQ ID NO: 107103 - protein, 34 aa, Artificial Sequence; identical to SEQ ID NO: 4070
  Cyclic GFR-binding peptide
  MOD_RES (1)..(3)..(34): Xaa is C or S

SEQ ID NO: 107104 - protein, 36 aa, Artificial Sequence; identical to SEQ ID NO: 14570
  Cyclic GFR-binding peptide
  MOD_RES (2)..(4)..(36): Xaa is C or S

SEQ ID NO: 107105 - protein, 35 aa, Artificial Sequence
  Cyclic GFR-binding peptide
  MOD_RES (1)..(33)..(34): Xaa is C or S
XAEVVMDQYNKLVVNNAADLYLISIASLRAPVXXS

SEQ ID NO: 107106 - protein, 32 aa, Artificial Sequence
  Cyclic GFR-binding peptide
  MOD_RES (31)..(32): Xaa is C or S
DVVMGQYNKLIIQQKDNLYLMSIASMKTPTXX

SEQ ID NO: 107107 - protein, 30 aa, Artificial Sequence; identical to SEQ ID NO: 4073
  Cyclic GFR-binding peptide
  MOD_RES (27)..(28): Xaa is C or S

SEQ ID NO: 107108 - protein, 32 aa, Artificial Sequence
  Cyclic GFR-binding peptide
  MOD_RES (2)..(4): Xaa is C or S
RXGXESVAMGQYNKLYTVVGKDLYLISIASLK

SEQ ID NO: 107109 - protein, 39 aa, Artificial Sequence; identical to SEQ ID NO: 4077
  Cyclic GFR-binding peptide
  MOD_RES (1)..(3)..(35): Xaa is C or S

SEQ ID NO: 107110 - protein, 29 aa, Artificial Sequence
  Cyclic GFR-binding peptide
  MOD_RES (28)..(29): Xaa is C or S
MDQYNKLVVKENEDLYLMSIASLETPVXX

SEQ ID NO: 107111 - protein, 33 aa, Artificial Sequence
  Cyclic GFR-binding peptide
  MOD_RES (31)..(32): Xaa is C or S
EEVIMQYNKLLLVRGNDLYLMSIASTKVPAXXT

SEQ ID NO: 107112 - protein, 34 aa, Artificial Sequence; identical to SEQ ID NO: 14579
  Cyclic GFR-binding peptide
  MOD_RES (29)..(30): Xaa is C or S

SEQ ID NO: 107113 - protein, 31 aa, Artificial Sequence; identical to SEQ ID NO: 32392
  Cyclic GFR-binding peptide
  MOD_RES (1)..(3): Xaa is C or S

SEQ ID NO: 107114 - protein, 36 aa, Artificial Sequence; identical to SEQ ID NO: 4087
  Cyclic GFR-binding peptide
  MOD_RES (1)..(3)..(35)..(36): Xaa is C or S

SEQ ID NO: 107115 - protein, 23 aa, Artificial Sequence
  Cyclic GFR-binding peptide
VMDRYKKLVVNNASDFYLISIAN

SEQ ID NO: 107116 - protein, 26 aa, Artificial Sequence
  Cyclic GFR-binding peptide
ERYKKLVVKDYEDFYLMSIANLETPV

SEQ ID NO: 107117 - protein, 37 aa, Artificial Sequence; identical to SEQ ID NO: 4090
  Cyclic GFR-binding peptide
  MOD_RES (2)..(34)..(35): Xaa is C or S

SEQ ID NO: 107118 - protein, 35 aa, Artificial Sequence; identical to SEQ ID NO: 4093
  Cyclic GFR-binding peptide
  MOD_RES (29)..(30): Xaa is C or S

SEQ ID NO: 107119 - protein, 20 aa, Artificial Sequence
  Cyclic GFR-binding peptide
RYKKLYTVVGKDFYLISIAN

SEQ ID NO: 107120 - protein, 20 aa, Artificial Sequence
  Cyclic GFR-binding peptide
RYKKLVKPKRGVFYLISIAN

SEQ ID NO: 107121 - protein, 38 aa, Artificial Sequence; identical to SEQ ID NO: 4096
  Cyclic GFR-binding peptide
  MOD_RES (1)..(3)..(36)..(37): Xaa is C or S

SEQ ID NO: 107122 - protein, 31 aa, Artificial Sequence; identical to SEQ ID NO: 4100
  Cyclic GFR-binding peptide
  MOD_RES (27)..(27): Xaa is C or S

SEQ ID NO: 107123 - protein, 26 aa, Artificial Sequence
  Cyclic GFR-binding peptide
VMDRYKKLVVNNAADFYLISIANLRA

SEQ ID NO: 107124 - protein, 25 aa, Artificial Sequence
  Cyclic GFR-binding peptide
NRYKKLVVNKNEDFYLISIANMKEP

SEQ ID NO: 107125 - protein, 30 aa, Artificial Sequence; identical to SEQ ID NO: 14596
  Cyclic GFR-binding peptide
  MOD_RES (26)..(27): Xaa is C or S

SEQ ID NO: 107126 - protein, 36 aa, Artificial Sequence; identical to SEQ ID NO: 14597
  Cyclic GFR-binding peptide
  MOD_RES (30)..(31): Xaa is C or S

SEQ ID NO: 107127 - protein, 37 aa, Artificial Sequence; identical to SEQ ID NO: 4101
  Cyclic GFR-binding peptide
  MOD_RES (1)..(3)..(35): Xaa is C or S

SEQ ID NO: 107128 - protein, 36 aa, Artificial Sequence; identical to SEQ ID NO: 4102
  Cyclic GFR-binding peptide
  MOD_RES (1)..(32)..(33): Xaa is C or S

SEQ ID NO: 107129 - protein, 34 aa, Artificial Sequence; identical to SEQ ID NO: 4103
  Cyclic GFR-binding peptide
  MOD_RES (31)..(32): Xaa is C or S

SEQ ID NO: 107130 - protein, 24 aa, Artificial Sequence
  Cyclic GFR-binding peptide
DQYNKLVVNNAADLYLISIASLRA

SEQ ID NO: 107131 - protein, 33 aa, Artificial Sequence; identical to SEQ ID NO: 4104
  Cyclic GFR-binding peptide
  MOD_RES (1)..(3): Xaa is C or S

SEQ ID NO: 107132 - protein, 29 aa, Artificial Sequence
  Cyclic GFR-binding peptide
  MOD_RES (1)..(1): Xaa is C or S
XGEVVMERYKKLVVKDYEDFYLMSIANLE

SEQ ID NO: 107133 - protein, 37 aa, Artificial Sequence; identical to SEQ ID NO: 4108
  Cyclic GFR-binding peptide
  MOD_RES (2)..(34)..(35): Xaa is C or S

SEQ ID NO: 107134 - protein, 30 aa, Artificial Sequence; identical to SEQ ID NO: 75470
  Cyclic GFR-binding peptide

SEQ ID NO: 107135 - protein, 31 aa, Artificial Sequence; identical to SEQ ID NO: 4110
  Cyclic GFR-binding peptide
  MOD_RES (1)..(3): Xaa is C or S

SEQ ID NO: 107136 - protein, 26 aa, Artificial Sequence
  Cyclic GFR-binding peptide
GRYKKLIIQQKDNFYLMSIANMKTPT

SEQ ID NO: 107137 - protein, 38 aa, Artificial Sequence; identical to SEQ ID NO: 4114
  Cyclic GFR-binding peptide
  MOD_RES (2)..(4)..(36)..(37): Xaa is C or S

SEQ ID NO: 107138 - protein, 28 aa, Artificial Sequence
  Cyclic GFR-binding peptide
VVMNQYNKLIVNSSDDLYLVSIASLKTP

SEQ ID NO: 107139 - protein, 36 aa, Artificial Sequence
  Cyclic GFR-binding peptide
  MOD_RES (1)..(3)..(35)..(36): Xaa is C or S
XGXRDVVMGQYNKLIIQQKDNLYLMSIASMKTPTXX

SEQ ID NO: 107140 - protein, 23 aa, Artificial Sequence
  Cyclic GFR-binding peptide
IMRYKKLIKPTKGIFYLISIANL

SEQ ID NO: 107141 - protein, 29 aa, Artificial Sequence
  Cyclic GFR-binding peptide
  MOD_RES (26)..(27): Xaa is C or S
QYNKLIVNSSDDLYLVSIASLKTPAXXPK

SEQ ID NO: 107142 - protein, 31 aa, Artificial Sequence; identical to SEQ ID NO: 4121
  Cyclic GFR-binding peptide
  MOD_RES (1)..(1): Xaa is C or S

SEQ ID NO: 107143 - protein, 39 aa, Artificial Sequence; identical to SEQ ID NO: 4124
  Cyclic GFR-binding peptide
  MOD_RES (2)..(4)..(36)..(37): Xaa is C or S

SEQ ID NO: 107144 - protein, 34 aa, Artificial Sequence; identical to SEQ ID NO: 4125
  Cyclic GFR-binding peptide
  MOD_RES (2)..(2): Xaa is C or S

SEQ ID NO: 107145 - protein, 41 aa, Artificial Sequence; identical to SEQ ID NO: 4127
  Cyclic GFR-binding peptide
  MOD_RES (2)..(4)..(36)..(37): Xaa is C or S

SEQ ID NO: 107146 - protein, 38 aa, Artificial Sequence; identical to SEQ ID NO: 4131
  Cyclic GFR-binding peptide
  MOD_RES (1)..(3)..(34)..(35): Xaa is C or S

SEQ ID NO: 107147 - protein, 40 aa, Artificial Sequence
  Cyclic GFR-binding peptide
  MOD_RES (2)..(4)..(36)..(37): Xaa is C or S
RXAXSEVTMNQYNKLVVNKNEDLYLISIASMKEPVXXPEP

SEQ ID NO: 107148 - protein, 24 aa, Artificial Sequence
  Cyclic GFR-binding peptide
VIMRYKKLLLVRGNDFYLMSIANT

SEQ ID NO: 107149 - protein, 38 aa, Artificial Sequence; identical to SEQ ID NO: 75485
  Cyclic GFR-binding peptide
  MOD_RES (2)..(33)..(34): Xaa is C or S

SEQ ID NO: 107150 - protein, 32 aa, Artificial Sequence; identical to SEQ ID NO: 4135
  Cyclic GFR-binding peptide
  MOD_RES (26)..(27): Xaa is C or S

SEQ ID NO: 107151 - protein, 29 aa, Artificial Sequence
  Cyclic GFR-binding peptide
VVMDQYNKLVVKENEDLYLMSIASLETPV

SEQ ID NO: 107152 - protein, 34 aa, Artificial Sequence; identical to SEQ ID NO: 32440
  Cyclic GFR-binding peptide
  MOD_RES (31)..(32): Xaa is C or S

SEQ ID NO: 107153 - protein, 26 aa, Artificial Sequence
  Cyclic GFR-binding peptide
VMDQYNKLVVKENEDLYLMSIASLET

SEQ ID NO: 107154 - protein, 33 aa, Artificial Sequence; identical to SEQ ID NO: 32444
  Cyclic GFR-binding peptide
  MOD_RES (1)..(33): Xaa is C or S

SEQ ID NO: 107155 - protein, 32 aa, Artificial Sequence; identical to SEQ ID NO: 4145
  Cyclic GFR-binding peptide
  MOD_RES (28)..(29): Xaa is C or S

SEQ ID NO: 107156 - protein, 27 aa, Artificial Sequence
  Cyclic GFR-binding peptide
  MOD_RES (26)..(27): Xaa is C or S
RYKKLIIQQKDNFYLMSIANMKTPTXX

SEQ ID NO: 107157 - protein, 32 aa, Artificial Sequence; identical to SEQ ID NO: 4147
  Cyclic GFR-binding peptide
  MOD_RES (1)..(3): Xaa is C or S

SEQ ID NO: 107158 - protein, 33 aa, Artificial Sequence; identical to SEQ ID NO: 4149
  Cyclic GFR-binding peptide
  MOD_RES (30)..(31): Xaa is C or S

SEQ ID NO: 107159 - protein, 33 aa, Artificial Sequence; identical to SEQ ID NO: 4150
  Cyclic GFR-binding peptide
  MOD_RES (28)..(29): Xaa is C or S

SEQ ID NO: 107160 - protein, 38 aa, Artificial Sequence; identical to SEQ ID NO: 4151
  Cyclic GFR-binding peptide
  MOD_RES (1)..(3)..(34)..(35): Xaa is C or S

SEQ ID NO: 107161 - protein, 23 aa, Artificial Sequence
  Cyclic GFR-binding peptide
VMDQYNKLVVNNASDLYLISIAS

SEQ ID NO: 107162 - protein, 27 aa, Artificial Sequence
  Cyclic GFR-binding peptide
VIMQYNKLIKPTKGILYLISIASLDQS

SEQ ID NO: 107163 - protein, 30 aa, Artificial Sequence; identical to SEQ ID NO: 4160
  Cyclic GFR-binding peptide
  MOD_RES (27)..(28): Xaa is C or S

SEQ ID NO: 107164 - protein, 28 aa, Artificial Sequence
  Cyclic GFR-binding peptide
  MOD_RES (26)..(27): Xaa is C or S
QYNKLVKPTRGVLYLISIASLDQPVXXP

SEQ ID NO: 107165 - protein, 29 aa, Artificial Sequence
  Cyclic GFR-binding peptide
  MOD_RES (2)..(2): Xaa is C or S
AXSEVTMNRYKKLVVNKNEDFYLISIANM

SEQ ID NO: 107166 - protein, 22 aa, Artificial Sequence
  Cyclic GFR-binding peptide
MDRYKKLVVNNAADFYLISIAN

SEQ ID NO: 107167 - protein, 29 aa, Artificial Sequence
  Cyclic GFR-binding peptide
  MOD_RES (26)..(27): Xaa is C or S
RYKKLTPVGMDDFYLVSIANLKTPVXXAK

SEQ ID NO: 107168 - protein, 38 aa, Artificial Sequence; identical to SEQ ID NO: 81157
  Cyclic GFR-binding peptide
  MOD_RES (2)..(34)..(35): Xaa is C or S

SEQ ID NO: 107169 - protein, 27 aa, Artificial Sequence
  Cyclic GFR-binding peptide
  MOD_RES (1)..(1): Xaa is C or S
XSKVVMQYNKLVKPTRGVLYLISIASL

SEQ ID NO: 107170 - protein, 20 aa, Artificial Sequence
  Cyclic GFR-binding peptide
RYKKLIVNSSDDFYLVSIAN

SEQ ID NO: 107171 - protein, 31 aa, Artificial Sequence; identical to SEQ ID NO: 4170
  Cyclic GFR-binding peptide

SEQ ID NO: 107172 - protein, 30 aa, Artificial Sequence; identical to SEQ ID NO: 32470
  Cyclic GFR-binding peptide
  MOD_RES (30)..(30): Xaa is C or S

SEQ ID NO: 107173 - protein, 28 aa, Artificial Sequence
  Cyclic GFR-binding peptide
  MOD_RES (2)..(2): Xaa is C or S
GXAEVVMDQYNKLVVNNAADLYLISIAS

SEQ ID NO: 107174 - protein, 34 aa, Artificial Sequence; identical to SEQ ID NO: 75502
  Cyclic GFR-binding peptide
  MOD_RES (30)..(31): Xaa is C or S

SEQ ID NO: 107175 - protein, 31 aa, Artificial Sequence; identical to SEQ ID NO: 4173
  Cyclic GFR-binding peptide
  MOD_RES (30)..(31): Xaa is C or S

SEQ ID NO: 107176 - protein, 31 aa, Artificial Sequence
  Cyclic GFR-binding peptide
  MOD_RES (29)..(30): Xaa is C or S
VMGQYNKLIIQQKDNLYLMSIASMKTPTXXP

SEQ ID NO: 107177 - protein, 40 aa, Artificial Sequence; identical to SEQ ID NO: 4174
  Cyclic GFR-binding peptide
  MOD_RES (1)..(3)..(35)..(36): Xaa is C or S

SEQ ID NO: 107178 - protein, 36 aa, Artificial Sequence
  Cyclic GFR-binding peptide
  MOD_RES (1)..(33)..(34): Xaa is C or S
XRDVVMGQYNKLIIQQKDNLYLMSIASMKTPTXXPG

SEQ ID NO: 107179 - protein, 28 aa, Artificial Sequence
  Cyclic GFR-binding peptide
VSMGERYKKLTPVGMDDFYLVSIANLKT

SEQ ID NO: 107180 - protein, 28 aa, Artificial Sequence
  Cyclic GFR-binding peptide
SRVVMNQYNKLIVNSSDDLYLVSIASLK

SEQ ID NO: 107181 - protein, 36 aa, Artificial Sequence; identical to SEQ ID NO: 75505
  Cyclic GFR-binding peptide
  MOD_RES (1)..(3)..(34)..(35): Xaa is C or S

SEQ ID NO: 107182 - protein, 29 aa, Artificial Sequence
  Cyclic GFR-binding peptide
  MOD_RES (26)..(27): Xaa is C or S
QYNKLVVNKNEDLYLISIASMKEPVXXPE

SEQ ID NO: 107183 - protein, 28 aa, Artificial Sequence
  Cyclic GFR-binding peptide
  MOD_RES (27)..(28): Xaa is C or S
NQYNKLIVNNSSDLYLVSIASLKTPAXX

SEQ ID NO: 107184 - protein, 31 aa, Artificial Sequence; identical to SEQ ID NO: 4180
  Cyclic GFR-binding peptide
  MOD_RES (29)..(29): Xaa is C or S

SEQ ID NO: 107185 - protein, 31 aa, Artificial Sequence; identical to SEQ ID NO: 32478
  Cyclic GFR-binding peptide
  MOD_RES (27)..(28): Xaa is C or S

SEQ ID NO: 107186 - protein, 30 aa, Artificial Sequence
  Cyclic GFR-binding peptide
  MOD_RES (29)..(30): Xaa is C or S
VMDQYNKLVVNNAADLYLISIASLRAPVXX

SEQ ID NO: 107187 - protein, 32 aa, Artificial Sequence; identical to SEQ ID NO: 4185
  Cyclic GFR-binding peptide
  MOD_RES (1)..(3): Xaa is C or S

SEQ ID NO: 107188 - protein, 29 aa, Artificial Sequence
  Cyclic GFR-binding peptide
  MOD_RES (1)..(1): Xaa is C or S
XGEVVMDRYKKLVVKENEDFYLMSIANLE

SEQ ID NO: 107189 - protein, 32 aa, Artificial Sequence
  Cyclic GFR-binding peptide
  MOD_RES (1)..(1): Xaa is C or S
XRDVVMGQYNKLIIQQKDNLYLMSIASMKTPT

SEQ ID NO: 107190 - protein, 28 aa, Artificial Sequence
  Cyclic GFR-binding peptide
  MOD_RES (1)..(1): Xaa is C or S
XEEVIMRYKKLLLVRGNDFYLMSIANTK

SEQ ID NO: 107191 - protein, 29 aa, Artificial Sequence
  Cyclic GFR-binding peptide
  MOD_RES (26)..(27): Xaa is C or S
RYKKLIKPTKGIFYLISIANLDQSVXXPS

SEQ ID NO: 107192 - protein, 36 aa, Artificial Sequence; identical to SEQ ID NO: 4193
  Cyclic GFR-binding peptide
  MOD_RES (1)..(33): Xaa is C or S

SEQ ID NO: 107193 - protein, 35 aa, Artificial Sequence; identical to SEQ ID NO: 14688
  Cyclic GFR-binding peptide
  MOD_RES (2)..(34)..(35): Xaa is C or S

SEQ ID NO: 107194 - protein, 35 aa, Artificial Sequence
  Cyclic GFR-binding peptide
  MOD_RES (30)..(31): Xaa is C or S
EVIMQYNKLLLVRGNDLYLMSIASTKVPAXXTSPV

SEQ ID NO: 107195 - protein, 31 aa, Artificial Sequence; identical to SEQ ID NO: 4194
  Cyclic GFR-binding peptide
  MOD_RES (1)..(3): Xaa is C or S

SEQ ID NO: 107196 - protein, 25 aa, Artificial Sequence
  Cyclic GFR-binding peptide
DQYNKLVVNNAADLYLISIASLRAP

SEQ ID NO: 107197 - protein, 36 aa, Artificial Sequence; identical to SEQ ID NO: 4199
  Cyclic GFR-binding peptide
  MOD_RES (2)..(33)..(34): Xaa is C or S

SEQ ID NO: 107198 - protein, 39 aa, Artificial Sequence
  Cyclic GFR-binding peptide
  MOD_RES (2)..(4)..(36)..(37): Xaa is C or S
RXAXSEVTMNQYNKLVVNKNEDLYLISIASMKEPVXXPE

SEQ ID NO: 107199 - protein, 31 aa, Artificial Sequence; identical to SEQ ID NO: 4201
  Cyclic GFR-binding peptide
  MOD_RES (30)..(30): Xaa is C or S

SEQ ID NO: 107200 - protein, 32 aa, Artificial Sequence; identical to SEQ ID NO: 4204
  Cyclic GFR-binding peptide
  MOD_RES (1)..(32): Xaa is C or S

SEQ ID NO: 107201 - protein, 31 aa, Artificial Sequence; identical to SEQ ID NO: 4205
  Cyclic GFR-binding peptide
  MOD_RES (27)..(28): Xaa is C or S

SEQ ID NO: 107202 - protein, 38 aa, Artificial Sequence; identical to SEQ ID NO: 75519
  Cyclic GFR-binding peptide
  MOD_RES (1)..(32)..(33): Xaa is C or S

SEQ ID NO: 107203 - protein, 31 aa, Artificial Sequence; identical to SEQ ID NO: 4211
  Cyclic GFR-binding peptide
  MOD_RES (2)..(4): Xaa is C or S

SEQ ID NO: 107204 - protein, 32 aa, Artificial Sequence; identical to SEQ ID NO: 4212
  Cyclic GFR-binding peptide
  MOD_RES (31)..(32): Xaa is C or S

SEQ ID NO: 107205 - protein, 36 aa, Artificial Sequence
  Cyclic GFR-binding peptide
  MOD_RES (1)..(33)..(34): Xaa is C or S
XAEVVMDQYNKLVVNNAADLYLISIASLRAPVXXSA

SEQ ID NO: 107206 - protein, 38 aa, Artificial Sequence; identical to SEQ ID NO: 4215
  Cyclic GFR-binding peptide
  MOD_RES (1)..(33)..(34): Xaa is C or S

SEQ ID NO: 107207 - protein, 23 aa, Artificial Sequence
  Cyclic GFR-binding peptide
GQYNKLIIQQKDNLYLMSIASMK

SEQ ID NO: 107208 - protein, 28 aa, Artificial Sequence
  Cyclic GFR-binding peptide
  MOD_RES (28)..(28): Xaa is C or S
MDQYNKLVVKENEDLYLMSIASLETPVX

SEQ ID NO: 107209 - protein, 30 aa, Artificial Sequence; identical to SEQ ID NO: 4222
  Cyclic GFR-binding peptide
  MOD_RES (1)..(1): Xaa is C or S

SEQ ID NO: 107210 - protein, 26 aa, Artificial Sequence
  Cyclic GFR-binding peptide
TMNQYNKLVVNKNEDLYLISIASMKE

SEQ ID NO: 107211 - protein, 39 aa, Artificial Sequence; identical to SEQ ID NO: 4224
  Cyclic GFR-binding peptide
  MOD_RES (1)..(33)..(34): Xaa is C or S

SEQ ID NO: 107212 - protein, 34 aa, Artificial Sequence; identical to SEQ ID NO: 4225
  Cyclic GFR-binding peptide
  MOD_RES (2)..(33)..(34): Xaa is C or S

SEQ ID NO: 107213 - protein, 38 aa, Artificial Sequence; identical to SEQ ID NO: 4227
  Cyclic GFR-binding peptide
  MOD_RES (1)..(33)..(34): Xaa is C or S

SEQ ID NO: 107214 - protein, 27 aa, Artificial Sequence
  Cyclic GFR-binding peptide
DVVMGQYNKLIIQQKDNLYLMSIASMK

SEQ ID NO: 107215 - protein, 32 aa, Artificial Sequence; identical to SEQ ID NO: 4230
  Cyclic GFR-binding peptide
  MOD_RES (30)..(31): Xaa is C or S

SEQ ID NO: 107216 - protein, 23 aa, Artificial Sequence
  Cyclic GFR-binding peptide
GRYKKLIIQQKDNFYLMSIANMK

SEQ ID NO: 107217 - protein, 36 aa, Artificial Sequence; identical to SEQ ID NO: 4231
  Cyclic GFR-binding peptide
  MOD_RES (1)..(33)..(34): Xaa is C or S

SEQ ID NO: 107218 - protein, 33 aa, Artificial Sequence; identical to SEQ ID NO: 32528
  Cyclic GFR-binding peptide
  MOD_RES (30)..(31): Xaa is C or S

SEQ ID NO: 107219 - protein, 31 aa, Artificial Sequence; identical to SEQ ID NO: 4232
  Cyclic GFR-binding peptide
  MOD_RES (31)..(31): Xaa is C or S

SEQ ID NO: 107220 - protein, 34 aa, Artificial Sequence; identical to SEQ ID NO: 4234
  Cyclic GFR-binding peptide
  MOD_RES (2)..(34): Xaa is C or S

SEQ ID NO: 107221 - protein, 39 aa, Artificial Sequence; identical to SEQ ID NO: 4236
  Cyclic GFR-binding peptide
  MOD_RES (2)..(4)..(36)..(37): Xaa is C or S

SEQ ID NO: 107222 - protein, 35 aa, Artificial Sequence; identical to SEQ ID NO: 4237
  Cyclic GFR-binding peptide
  MOD_RES (1)..(3)..(34)..(35): Xaa is C or S

SEQ ID NO: 107223 - protein, 35 aa, Artificial Sequence
  Cyclic GFR-binding peptide
  MOD_RES (1)..(3)..(35): Xaa is C or S
XGXESVAMGQYNKLYTVVGKDLYLISIASLKTPVX

SEQ ID NO: 107224 - protein, 38 aa, Artificial Sequence; identical to SEQ ID NO: 4238
  Cyclic GFR-binding peptide
  MOD_RES (2)..(4)..(35)..(36): Xaa is C or S

SEQ ID NO: 107225 - protein, 34 aa, Artificial Sequence; identical to SEQ ID NO: 4239
  Cyclic GFR-binding peptide
  MOD_RES (1)..(33)..(34): Xaa is C or S

SEQ ID NO: 107226 - protein, 29 aa, Artificial Sequence
  Cyclic GFR-binding peptide
  MOD_RES (2)..(2): Xaa is C or S
GXGEVVMEQYNKLVVKDYEDLYLMSIASL

SEQ ID NO: 107227 - protein, 31 aa, Artificial Sequence; identical to SEQ ID NO: 75534
  Cyclic GFR-binding peptide
  MOD_RES (31)..(31): Xaa is C or S

SEQ ID NO: 107228 - protein, 35 aa, Artificial Sequence; identical to SEQ ID NO: 32536
  Cyclic GFR-binding peptide
  MOD_RES (2)..(4): Xaa is C or S

SEQ ID NO: 107229 - protein, 32 aa, Artificial Sequence; identical to SEQ ID NO: 32537
  Cyclic GFR-binding peptide
  MOD_RES (31)..(32): Xaa is C or S

SEQ ID NO: 107230 - protein, 36 aa, Artificial Sequence; identical to SEQ ID NO: 4241
  Cyclic GFR-binding peptide
  MOD_RES (1)..(3)..(35)..(36): Xaa is C or S

SEQ ID NO: 107231 - protein, 31 aa, Artificial Sequence
  Cyclic GFR-binding peptide
  MOD_RES (29)..(30): Xaa is C or S
VMDQYNKLVVNNAADLYLISIASLRAPVXXS

SEQ ID NO: 107232 - protein, 27 aa, Artificial Sequence
  Cyclic GFR-binding peptide
ESVAMGRYKKLYTVVGKDFYLISIANL

SEQ ID NO: 107233 - protein, 27 aa, Artificial Sequence
  Cyclic GFR-binding peptide
  MOD_RES (1)..(1): Xaa is C or S
XAEVVMDQYNKLVVNNAADLYLISIAS

SEQ ID NO: 107234 - protein, 27 aa, Artificial Sequence
  Cyclic GFR-binding peptide
  MOD_RES (1)..(1): Xaa is C or S
XRDVVMGQYNKLIIQQKDNLYLMSIAS

SEQ ID NO: 107235 - protein, 37 aa, Artificial Sequence; identical to SEQ ID NO: 32543
  Cyclic GFR-binding peptide
  MOD_RES (31)..(32): Xaa is C or S

SEQ ID NO: 107236 - protein, 37 aa, Artificial Sequence; identical to SEQ ID NO: 4246
  Cyclic GFR-binding peptide
  MOD_RES (1)..(32)..(33): Xaa is C or S

SEQ ID NO: 107237 - protein, 29 aa, Artificial Sequence
  Cyclic GFR-binding peptide
  MOD_RES (2)..(4): Xaa is C or S
SXKXSKVVMQYNKLVKPTRGVLYLISIAS

SEQ ID NO: 107238 - protein, 37 aa, Artificial Sequence; identical to SEQ ID NO: 32545
  Cyclic GFR-binding peptide
  MOD_RES (1)..(3)..(35)..(36): Xaa is C or S

SEQ ID NO: 107239 - protein, 27 aa, Artificial Sequence
  Cyclic GFR-binding peptide
  MOD_RES (1)..(1): Xaa is C or S
XSEVVMDRYKKLVVNNASDFYLISIAN

SEQ ID NO: 107240 - protein, 25 aa, Artificial Sequence
  Cyclic GFR-binding peptide
MRYKKLVKPKRGVFYLISIANLAQP

SEQ ID NO: 107241 - protein, 25 aa, Artificial Sequence
  Cyclic GFR-binding peptide
QYNKLIVNNSSDLYLVSIASLKTPA

SEQ ID NO: 107242 - protein, 24 aa, Artificial Sequence
  Cyclic GFR-binding peptide
VMERYKKLVVKDYEDFYLMSIANL

SEQ ID NO: 107243 - protein, 29 aa, Artificial Sequence
  Cyclic GFR-binding peptide
  MOD_RES (1)..(1): Xaa is C or S
XGEVVMEQYNKLVVKDYEDLYLMSIASLE

SEQ ID NO: 107244 - protein, 37 aa, Artificial Sequence; identical to SEQ ID NO: 4256
  Cyclic GFR-binding peptide
  MOD_RES (32)..(33): Xaa is C or S

SEQ ID NO: 107245 - protein, 25 aa, Artificial Sequence
  Cyclic GFR-binding peptide
MDRYKKLVVNNAADFYLISIANLRA

SEQ ID NO: 107246 - protein, 33 aa, Artificial Sequence; identical to SEQ ID NO: 32558
  Cyclic GFR-binding peptide
  MOD_RES (32)..(33): Xaa is C or S

SEQ ID NO: 107247 - protein, 22 aa, Artificial Sequence
  Cyclic GFR-binding peptide
IMQYNKLVKPKRGVLYLISIAS

SEQ ID NO: 107248 - protein, 32 aa, Artificial Sequence; identical to SEQ ID NO: 4262
  Cyclic GFR-binding peptide
  MOD_RES (31)..(32): Xaa is C or S

SEQ ID NO: 107249 - protein, 33 aa, Artificial Sequence; identical to SEQ ID NO: 4263
  Cyclic GFR-binding peptide
  MOD_RES (27)..(28): Xaa is C or S

SEQ ID NO: 107250 - protein, 37 aa, Artificial Sequence
  Cyclic GFR-binding peptide
  MOD_RES (1)..(32)..(33): Xaa is C or S
XEEVIMQYNKLLLVRGNDLYLMSIASTKVPAXXTSPV

SEQ ID NO: 107251 - protein, 31 aa, Artificial Sequence; identical to SEQ ID NO: 4267
  Cyclic GFR-binding peptide
  MOD_RES (2)..(4): Xaa is C or S

SEQ ID NO: 107252 - protein, 29 aa, Artificial Sequence
  Cyclic GFR-binding peptide
ESVAMGQYNKLYTVVGKDLYLISIASLKT

SEQ ID NO: 107253 - protein, 28 aa, Artificial Sequence
  Cyclic GFR-binding peptide
  MOD_RES (28)..(28): Xaa is C or S
IMQYNKLIKPTKGILYLISIASLDQSVX

SEQ ID NO: 107254 - protein, 39 aa, Artificial Sequence; identical to SEQ ID NO: 4273
  Cyclic GFR-binding peptide
  MOD_RES (2)..(34)..(35): Xaa is C or S

SEQ ID NO: 107255 - protein, 31 aa, Artificial Sequence; identical to SEQ ID NO: 14779
  Cyclic GFR-binding peptide
  MOD_RES (2)..(4): Xaa is C or S

SEQ ID NO: 107256 - protein, 24 aa, Artificial Sequence
  Cyclic GFR-binding peptide
VVMERYKKLVVKDYEDFYLMSIAN

SEQ ID NO: 107257 - protein, 29 aa, Artificial Sequence
  Cyclic GFR-binding peptide
  MOD_RES (1)..(3): Xaa is C or S
XKXSKVVMQYNKLVKPTRGVLYLISIASL

SEQ ID NO: 107258 - protein, 33 aa, Artificial Sequence; identical to SEQ ID NO: 4281
  Cyclic GFR-binding peptide
  MOD_RES (32)..(33): Xaa is C or S

SEQ ID NO: 107259 - protein, 24 aa, Artificial Sequence
  Cyclic GFR-binding peptide
MGQYNKLIIQQKDNLYLMSIASMK

SEQ ID NO: 107260 - protein, 23 aa, Artificial Sequence
  Cyclic GFR-binding peptide
VMNRYKKLIVNNSSDFYLVSIAN

SEQ ID NO: 107261 - protein, 32 aa, Artificial Sequence; identical to SEQ ID NO: 4285
  Cyclic GFR-binding peptide
  MOD_RES (30)..(31): Xaa is C or S

SEQ ID NO: 107262 - protein, 25 aa, Artificial Sequence
  Cyclic GFR-binding peptide
VTMNQYNKLVVNKNEDLYLISIASM

SEQ ID NO: 107263 - protein, 37 aa, Artificial Sequence; identical to SEQ ID NO: 4288
  Cyclic GFR-binding peptide
  MOD_RES (31)..(32): Xaa is C or S

SEQ ID NO: 107264 - protein, 35 aa, Artificial Sequence; identical to SEQ ID NO: 4289
  Cyclic GFR-binding peptide
  MOD_RES (1)..(3)..(35): Xaa is C or S

SEQ ID NO: 107265 - protein, 30 aa, Artificial Sequence; identical to SEQ ID NO: 14804
  Cyclic GFR-binding peptide
  MOD_RES (2)..(4): Xaa is C or S

SEQ ID NO: 107266 - protein, 27 aa, Artificial Sequence
  Cyclic GFR-binding peptide
  MOD_RES (26)..(27): Xaa is C or S
QYNKLIIQQKDNLYLMSIASMKTPTXX

SEQ ID NO: 107267 - protein, 32 aa, Artificial Sequence; identical to SEQ ID NO: 4291
  Cyclic GFR-binding peptide
  MOD_RES (26)..(27): Xaa is C or S

SEQ ID NO: 107268 - protein, 33 aa, Artificial Sequence; identical to SEQ ID NO: 4292
  Cyclic GFR-binding peptide
  MOD_RES (31)..(32): Xaa is C or S

SEQ ID NO: 107269 - protein, 29 aa, Artificial Sequence
  Cyclic GFR-binding peptide
  MOD_RES (1)..(3): Xaa is C or S
XKXSKVIMQYNKLIKPTKGILYLISIASL

SEQ ID NO: 107270 - protein, 37 aa, Artificial Sequence; identical to SEQ ID NO: 4294
  Cyclic GFR-binding peptide
  MOD_RES (1)..(3)..(35)..(36): Xaa is C or S

SEQ ID NO: 107271 - protein, 34 aa, Artificial Sequence; identical to SEQ ID NO: 4295
  Cyclic GFR-binding peptide
  MOD_RES (1)..(3): Xaa is C or S

SEQ ID NO: 107272 - protein, 31 aa, Artificial Sequence; identical to SEQ ID NO: 4296
  Cyclic GFR-binding peptide
  MOD_RES (2)..(2): Xaa is C or S

SEQ ID NO: 107273 - protein, 33 aa, Artificial Sequence; identical to SEQ ID NO: 75570
  Cyclic GFR-binding peptide
  MOD_RES (2)..(4): Xaa is C or S

SEQ ID NO: 107274 - protein, 31 aa, Artificial Sequence; identical to SEQ ID NO: 4298
  Cyclic GFR-binding peptide
  MOD_RES (2)..(2): Xaa is C or S

SEQ ID NO: 107275 - protein, 30 aa, Artificial Sequence; identical to SEQ ID NO: 4300
  Cyclic GFR-binding peptide
  MOD_RES (30)..(30): Xaa is C or S

SEQ ID NO: 107276 - protein, 32 aa, Artificial Sequence; identical to SEQ ID NO: 4302
  Cyclic GFR-binding peptide
  MOD_RES (32)..(32): Xaa is C or S

SEQ ID NO: 107277 - protein, 36 aa, Artificial Sequence; identical to SEQ ID NO: 32606
  Cyclic GFR-binding peptide
  MOD_RES (2)..(4)..(36): Xaa is C or S

SEQ ID NO: 107278 - protein, 34 aa, Artificial Sequence; identical to SEQ ID NO: 4304
  Cyclic GFR-binding peptide
  MOD_RES (30)..(31): Xaa is C or S

SEQ ID NO: 107279 - protein, 34 aa, Artificial Sequence; identical to SEQ ID NO: 4306
  Cyclic GFR-binding peptide
  MOD_RES (31)..(32): Xaa is C or S

SEQ ID NO: 107280 - protein, 28 aa, Artificial Sequence
  Cyclic GFR-binding peptide
  MOD_RES (1)..(1): Xaa is C or S
XSEVVMDQYNKLVVNNASDLYLISIASL

SEQ ID NO: 107281 - protein, 23 aa, Artificial Sequence
  Cyclic GFR-binding peptide
RYKKLLLVRGNDFYLMSIANTKV

SEQ ID NO: 107282 - protein, 30 aa, Artificial Sequence; identical to SEQ ID NO: 4308
  Cyclic GFR-binding peptide
  MOD_RES (1)..(1): Xaa is C or S

SEQ ID NO: 107283 - protein, 28 aa, Artificial Sequence
  Cyclic GFR-binding peptide
  MOD_RES (1)..(1): Xaa is C or S
XAKVVMNRYKKLIVNNSSDFYLVSIANL

SEQ ID NO: 107284 - protein, 28 aa, Artificial Sequence
  Cyclic GFR-binding peptide
  MOD_RES (1)..(1): Xaa is C or S
XRDVVMGRYKKLIIQQKDNFYLMSIANM

SEQ ID NO: 107285 - protein, 33 aa, Artificial Sequence; identical to SEQ ID NO: 4318
  Cyclic GFR-binding peptide
  MOD_RES (27)..(28): Xaa is C or S

SEQ ID NO: 107286 - protein, 33 aa, Artificial Sequence; identical to SEQ ID NO: 4319
  Cyclic GFR-binding peptide
  MOD_RES (1)..(3): Xaa is C or S

SEQ ID NO: 107287 - protein, 30 aa, Artificial Sequence; identical to SEQ ID NO: 4323
  Cyclic GFR-binding peptide
  MOD_RES (26)..(27): Xaa is C or S

SEQ ID NO: 107288 - protein, 39 aa, Artificial Sequence; identical to SEQ ID NO: 4324
  Cyclic GFR-binding peptide
  MOD_RES (1)..(3)..(34)..(35): Xaa is C or S

SEQ ID NO: 107289 - protein, 21 aa, Artificial Sequence
  Cyclic GFR-binding peptide
RYKKLIKPTKGIFYLISIANL

SEQ ID NO: 107290 - protein, 36 aa, Artificial Sequence
  Cyclic GFR-binding peptide
  MOD_RES (2)..(34)..(35): Xaa is C or S
GXAEVVMDQYNKLVVNNAADLYLISIASLRAPVXXS

SEQ ID NO: 107291 - protein, 37 aa, Artificial Sequence; identical to SEQ ID NO: 14834
  Cyclic GFR-binding peptide
  MOD_RES (2)..(34)..(35): Xaa is C or S

SEQ ID NO: 107292 - protein, 40 aa, Artificial Sequence; identical to SEQ ID NO: 4330
  Cyclic GFR-binding peptide
  MOD_RES (2)..(4)..(35)..(36): Xaa is C or S

SEQ ID NO: 107293 - protein, 33 aa, Artificial Sequence; identical to SEQ ID NO: 4333
  Cyclic GFR-binding peptide
  MOD_RES (2)..(4): Xaa is C or S

SEQ ID NO: 107294 - protein, 29 aa, Artificial Sequence
  Cyclic GFR-binding peptide
  MOD_RES (2)..(2): Xaa is C or S
GXEEVIMQYNKLLLVRGNDLYLMSIASTK

SEQ ID NO: 107295 - protein, 31 aa, Artificial Sequence; identical to SEQ ID NO: 4334
  Cyclic GFR-binding peptide
  MOD_RES (1)..(3): Xaa is C or S

SEQ ID NO: 107296 - protein, 23 aa, Artificial Sequence
  Cyclic GFR-binding peptide
NQYNKLIVNSSDDLYLVSIASLQ

SEQ ID NO: 107297 - protein, 25 aa, Artificial Sequence
  Cyclic GFR-binding peptide
VIMRYKKLVKPKRGVFYLISIANLA

SEQ ID NO: 107298 - protein, 29 aa, Artificial Sequence
  Cyclic GFR-binding peptide
ESVAMGRYKKLYTVVGKDFYLISIANLKT

SEQ ID NO: 107299 - protein, 32 aa, Artificial Sequence; identical to SEQ ID NO: 4337
  Cyclic GFR-binding peptide
  MOD_RES (30)..(31): Xaa is C or S

SEQ ID NO: 107300 - protein, 39 aa, Artificial Sequence; identical to SEQ ID NO: 4340
  Cyclic GFR-binding peptide
  MOD_RES (1)..(3)..(35)..(36): Xaa is C or S

SEQ ID NO: 107301 - protein, 29 aa, Artificial Sequence
  Cyclic GFR-binding peptide
RVIMQYNKLVKPKRGVLYLISIASLAQPV

SEQ ID NO: 107302 - protein, 30 aa, Artificial Sequence
  Cyclic GFR-binding peptide
  MOD_RES (2)..(2): Xaa is C or S
GXEEVIMQYNKLLLVRGNDLYLMSIASTKV

SEQ ID NO: 107303 - protein, 30 aa, Artificial Sequence; identical to SEQ ID NO: 4345
  Cyclic GFR-binding peptide
  MOD_RES (1)..(3): Xaa is C or S

SEQ ID NO: 107304 - protein, 33 aa, Artificial Sequence; identical to SEQ ID NO: 4346
  Cyclic GFR-binding peptide
  MOD_RES (31)..(32): Xaa is C or S

SEQ ID NO: 107305 - protein, 28 aa, Artificial Sequence
  Cyclic GFR-binding peptide
SKVVMRYKKLVKPTRGVFYLISIANLDQ

SEQ ID NO: 107306 - protein, 31 aa, Artificial Sequence; identical to SEQ ID NO: 4350
  Cyclic GFR-binding peptide
  MOD_RES (1)..(1): Xaa is C or S

SEQ ID NO: 107307 - protein, 26 aa, Artificial Sequence
  Cyclic GFR-binding peptide
  MOD_RES (26)..(26): Xaa is C or S
RYKKLLLVRGNDFYLMSIANTKVPAX

SEQ ID NO: 107308 - protein, 30 aa, Artificial Sequence
  Cyclic GFR-binding peptide
  MOD_RES (27)..(28): Xaa is C or S
MQYNKLLLVRGNDLYLMSIASTKVPAXXTS

SEQ ID NO: 107309 - protein, 32 aa, Artificial Sequence; identical to SEQ ID NO: 4355
  Cyclic GFR-binding peptide
  MOD_RES (2)..(4): Xaa is C or S

SEQ ID NO: 107310 - protein, 22 aa, Artificial Sequence
  Cyclic GFR-binding peptide
GEQYNKLTPVGMDDLYLVSIAS

SEQ ID NO: 107311 - protein, 34 aa, Artificial Sequence; identical to SEQ ID NO: 14860
  Cyclic GFR-binding peptide
  MOD_RES (31)..(32): Xaa is C or S

SEQ ID NO: 107312 - protein, 32 aa, Artificial Sequence; identical to SEQ ID NO: 4359
  Cyclic GFR-binding peptide
  MOD_RES (2)..(4): Xaa is C or S

SEQ ID NO: 107313 - protein, 27 aa, Artificial Sequence
  Cyclic GFR-binding peptide
  MOD_RES (26)..(27): Xaa is C or S
QYNKLVVNNAADLYLISIASLRAPVXX

SEQ ID NO: 107314 - protein, 38 aa, Artificial Sequence; identical to SEQ ID NO: 4365
  Cyclic GFR-binding peptide
  MOD_RES (2)..(33)..(34): Xaa is C or S

SEQ ID NO: 107315 - protein, 36 aa, Artificial Sequence; identical to SEQ ID NO: 4367
  Cyclic GFR-binding peptide
  MOD_RES (31)..(32): Xaa is C or S

SEQ ID NO: 107316 - protein, 33 aa, Artificial Sequence; identical to SEQ ID NO: 75600
  Cyclic GFR-binding peptide
  MOD_RES (2)..(4): Xaa is C or S

SEQ ID NO: 107317 - protein, 34 aa, Artificial Sequence; identical to SEQ ID NO: 4371
  Cyclic GFR-binding peptide
  MOD_RES (31)..(32): Xaa is C or S

SEQ ID NO: 107318 - protein, 40 aa, Artificial Sequence
  Cyclic GFR-binding peptide
  MOD_RES (1)..(3)..(35)..(36): Xaa is C or S
XGXESVAMGQYNKLYTVVGKDLYLISIASLKTPVXXAKSA

SEQ ID NO: 107319 - protein, 37 aa, Artificial Sequence; identical to SEQ ID NO: 81343
  Cyclic GFR-binding peptide
  MOD_RES (31)..(32): Xaa is C or S

SEQ ID NO: 107320 - protein, 29 aa, Artificial Sequence
  Cyclic GFR-binding peptide
KVIMRYKKLIKPTKGIFYLISIANLDQSV

SEQ ID NO: 107321 - protein, 32 aa, Artificial Sequence; identical to SEQ ID NO: 4376
  Cyclic GFR-binding peptide
  MOD_RES (28)..(29): Xaa is C or S

SEQ ID NO: 107322 - protein, 29 aa, Artificial Sequence
  Cyclic GFR-binding peptide
  MOD_RES (29)..(29): Xaa is C or S
VMDQYNKLVVKENEDLYLMSIASLETPVX

SEQ ID NO: 107323 - protein, 37 aa, Artificial Sequence; identical to SEQ ID NO: 4381
  Cyclic GFR-binding peptide
  MOD_RES (1)..(3)..(35)..(36): Xaa is C or S

SEQ ID NO: 107324 - protein, 29 aa, Artificial Sequence
  Cyclic GFR-binding peptide
VAMGRYKKLYTVVGKDFYLISIANLKTPV

SEQ ID NO: 107325 - protein, 29 aa, Artificial Sequence
  Cyclic GFR-binding peptide
  MOD_RES (29)..(29): Xaa is C or S
TMNRYKKLVVNKNEDFYLISIANMKEPVX

SEQ ID NO: 107326 - protein, 37 aa, Artificial Sequence; identical to SEQ ID NO: 4384
  Cyclic GFR-binding peptide
  MOD_RES (31)..(32): Xaa is C or S

SEQ ID NO: 107327 - protein, 31 aa, Artificial Sequence; identical to SEQ ID NO: 14886
  Cyclic GFR-binding peptide
  MOD_RES (28)..(29): Xaa is C or S

SEQ ID NO: 107328 - protein, 33 aa, Artificial Sequence; identical to SEQ ID NO: 4386
  Cyclic GFR-binding peptide
  MOD_RES (28)..(29): Xaa is C or S

SEQ ID NO: 107329 - protein, 32 aa, Artificial Sequence; identical to SEQ ID NO: 86593
  Cyclic GFR-binding peptide
  MOD_RES (29)..(30): Xaa is C or S

SEQ ID NO: 107330 - protein, 25 aa, Artificial Sequence
  Cyclic GFR-binding peptide
SVAMGQYNKLYTVVGKDLYLISIAS

SEQ ID NO: 107331 - protein, 29 aa, Artificial Sequence
  Cyclic GFR-binding peptide
  MOD_RES (26)..(27): Xaa is C or S
QYNKLVKPKRGVLYLISIASLAQPVXXPA

SEQ ID NO: 107332 - protein, 33 aa, Artificial Sequence; identical to SEQ ID NO: 4394
  Cyclic GFR-binding peptide
  MOD_RES (1)..(3): Xaa is C or S

SEQ ID NO: 107333 - protein, 33 aa, Artificial Sequence; identical to SEQ ID NO: 4395
  Cyclic GFR-binding peptide
  MOD_RES (1)..(3): Xaa is C or S

SEQ ID NO: 107334 - protein, 31 aa, Artificial Sequence; identical to SEQ ID NO: 4397
  Cyclic GFR-binding peptide
  MOD_RES (1)..(1): Xaa is C or S

SEQ ID NO: 107335 - protein, 31 aa, Artificial Sequence; identical to SEQ ID NO: 4399
  Cyclic GFR-binding peptide
  MOD_RES (29)..(30): Xaa is C or S

SEQ ID NO: 107336 - protein, 37 aa, Artificial Sequence; identical to SEQ ID NO: 4400
  Cyclic GFR-binding peptide
  MOD_RES (32)..(33): Xaa is C or S

SEQ ID NO: 107337 - protein, 39 aa, Artificial Sequence; identical to SEQ ID NO: 4401
  Cyclic GFR-binding peptide
  MOD_RES (2)..(35)..(36): Xaa is C or S

SEQ ID NO: 107338 - protein, 33 aa, Artificial Sequence; identical to SEQ ID NO: 4402
  Cyclic GFR-binding peptide
  MOD_RES (1)..(32)..(33): Xaa is C or S

SEQ ID NO: 107339 - protein, 30 aa, Artificial Sequence; identical to SEQ ID NO: 75614
  Cyclic GFR-binding peptide
  MOD_RES (28)..(29): Xaa is C or S

SEQ ID NO: 107340 - protein, 28 aa, Artificial Sequence
  Cyclic GFR-binding peptide
ARVVMNQYNKLIVNSSDDLYLVSIASLQ

SEQ ID NO: 107341 - protein, 32 aa, Artificial Sequence; identical to SEQ ID NO: 4407
  Cyclic GFR-binding peptide
  MOD_RES (26)..(26): Xaa is C or S

SEQ ID NO: 107342 - protein, 42 aa, Artificial Sequence; identical to SEQ ID NO: 14906
  Cyclic GFR-binding peptide
  MOD_RES (2)..(4)..(36)..(37): Xaa is C or S

SEQ ID NO: 107343 - protein, 33 aa, Artificial Sequence; identical to SEQ ID NO: 4408
  Cyclic GFR-binding peptide
  MOD_RES (2)..(33): Xaa is C or S

SEQ ID NO: 107344 - protein, 37 aa, Artificial Sequence; identical to SEQ ID NO: 4409
  Cyclic GFR-binding peptide
  MOD_RES (32)..(33): Xaa is C or S

SEQ ID NO: 107345 - protein, 38 aa, Artificial Sequence; identical to SEQ ID NO: 14910
  Cyclic GFR-binding peptide
  MOD_RES (2)..(4)..(36)..(37): Xaa is C or S

SEQ ID NO: 107346 - protein, 36 aa, Artificial Sequence
  Cyclic GFR-binding peptide
  MOD_RES (1)..(3)..(34)..(35): Xaa is C or S
XGXEEVIMQYNKLLLVRGNDLYLMSIASTKVPAXXT

SEQ ID NO: 107347 - protein, 28 aa, Artificial Sequence
  Cyclic GFR-binding peptide
SRVVMNRYKKLIVNSSDDFYLVSIANLK

SEQ ID NO: 107348 - protein, 41 aa, Artificial Sequence; identical to SEQ ID NO: 4413
  Cyclic GFR-binding peptide
  MOD_RES (2)..(4)..(36)..(37): Xaa is C or S

SEQ ID NO: 107349 - protein, 39 aa, Artificial Sequence; identical to SEQ ID NO: 4414
  Cyclic GFR-binding peptide
  MOD_RES (1)..(33)..(34): Xaa is C or S

SEQ ID NO: 107350 - protein, 36 aa, Artificial Sequence; identical to SEQ ID NO: 4415
  Cyclic GFR-binding peptide
  MOD_RES (31)..(32): Xaa is C or S

SEQ ID NO: 107351 - protein, 22 aa, Artificial Sequence
  Cyclic GFR-binding peptide
RYKKLIIQQKDNFYLMSIANMK

SEQ ID NO: 107352 - protein, 33 aa, Artificial Sequence; identical to SEQ ID NO: 4416
  Cyclic GFR-binding peptide
  MOD_RES (28)..(29): Xaa is C or S

SEQ ID NO: 107353 - protein, 28 aa, Artificial Sequence
  Cyclic GFR-binding peptide
  MOD_RES (2)..(2): Xaa is C or S
KXSKVIMRYKKLIKPTKGIFYLISIANL

SEQ ID NO: 107354 - protein, 30 aa, Artificial Sequence
  Cyclic GFR-binding peptide
  MOD_RES (30)..(30): Xaa is C or S
EVIMQYNKLLLVRGNDLYLMSIASTKVPAX

SEQ ID NO: 107355 - protein, 37 aa, Artificial Sequence; identical to SEQ ID NO: 4420
  Cyclic GFR-binding peptide
  MOD_RES (31)..(32): Xaa is C or S

SEQ ID NO: 107356 - protein, 24 aa, Artificial Sequence
  Cyclic GFR-binding peptide
SMGERYKKLTPVGMDDFYLVSIAN

SEQ ID NO: 107357 - protein, 26 aa, Artificial Sequence
  Cyclic GFR-binding peptide
MGRYKKLIIQQKDNFYLMSIANMKTP

SEQ ID NO: 107358 - protein, 39 aa, Artificial Sequence; identical to SEQ ID NO: 81395
  Cyclic GFR-binding peptide
  MOD_RES (2)..(4)..(36)..(37): Xaa is C or S

SEQ ID NO: 107359 - protein, 39 aa, Artificial Sequence; identical to SEQ ID NO: 4426
  Cyclic GFR-binding peptide
  MOD_RES (2)..(4)..(35)..(36): Xaa is C or S

SEQ ID NO: 107360 - protein, 29 aa, Artificial Sequence
  Cyclic GFR-binding peptide
  MOD_RES (1)..(3): Xaa is C or S
XKXSRVIMRYKKLVKPKRGVFYLISIANL

SEQ ID NO: 107361 - protein, 25 aa, Artificial Sequence
  Cyclic GFR-binding peptide
NRYKKLIVNSSDDFYLVSIANLKTP

SEQ ID NO: 107362 - protein, 28 aa, Artificial Sequence
  Cyclic GFR-binding peptide
  MOD_RES (1)..(3): Xaa is C or S
XKXSKVVMRYKKLVKPTRGVFYLISIAN

SEQ ID NO: 107363 - protein, 33 aa, Artificial Sequence; identical to SEQ ID NO: 4431
  Cyclic GFR-binding peptide
  MOD_RES (1)..(3): Xaa is C or S

SEQ ID NO: 107364 - protein, 27 aa, Artificial Sequence
  Cyclic GFR-binding peptide
  MOD_RES (1)..(1): Xaa is C or S
XSKVIMQYNKLIKPTKGILYLISIASL

SEQ ID NO: 107365 - protein, 27 aa, Artificial Sequence
  Cyclic GFR-binding peptide
  MOD_RES (26)..(27): Xaa is C or S
QYNKLYTVVGKDLYLISIASLKTPVXX

SEQ ID NO: 107366 - protein, 22 aa, Artificial Sequence
  Cyclic GFR-binding peptide
RYKKLVVKENEDFYLMSIANLE

SEQ ID NO: 107367 - protein, 29 aa, Artificial Sequence
  Cyclic GFR-binding peptide
  MOD_RES (1)..(1): Xaa is C or S
XSEVVMDQYNKLVVNNASDLYLISIASLR

SEQ ID NO: 107368 - protein, 39 aa, Artificial Sequence; identical to SEQ ID NO: 14934
  Cyclic GFR-binding peptide
  MOD_RES (2)..(4)..(36)..(37): Xaa is C or S

SEQ ID NO: 107369 - protein, 32 aa, Artificial Sequence; identical to SEQ ID NO: 4434
  Cyclic GFR-binding peptide
  MOD_RES (32)..(32): Xaa is C or S

SEQ ID NO: 107370 - protein, 37 aa, Artificial Sequence; identical to SEQ ID NO: 4435
  Cyclic GFR-binding peptide
  MOD_RES (1)..(3)..(35)..(36): Xaa is C or S

SEQ ID NO: 107371 - protein, 38 aa, Artificial Sequence; identical to SEQ ID NO: 4436
  Cyclic GFR-binding peptide
  MOD_RES (1)..(33)..(34): Xaa is C or S

SEQ ID NO: 107372 - protein, 38 aa, Artificial Sequence; identical to SEQ ID NO: 32726
  Cyclic GFR-binding peptide
  MOD_RES (1)..(33)..(34): Xaa is C or S

SEQ ID NO: 107373 - protein, 38 aa, Artificial Sequence; identical to SEQ ID NO: 4438
  Cyclic GFR-binding peptide
  MOD_RES (2)..(34)..(35): Xaa is C or S

SEQ ID NO: 107374 - protein, 31 aa, Artificial Sequence
  Cyclic GFR-binding peptide
  MOD_RES (2)..(4): Xaa is C or S
RXGXAEVVMDQYNKLVVNNAADLYLISIASL

SEQ ID NO: 107375 - protein, 26 aa, Artificial Sequence
  Cyclic GFR-binding peptide
SKVVMQYNKLVKPTRGVLYLISIASL

SEQ ID NO: 107376 - protein, 37 aa, Artificial Sequence; identical to SEQ ID NO: 75637
  Cyclic GFR-binding peptide
  MOD_RES (1)..(3)..(34)..(35): Xaa is C or S

SEQ ID NO: 107377 - protein, 31 aa, Artificial Sequence; identical to SEQ ID NO: 4441
  Cyclic GFR-binding peptide
  MOD_RES (2)..(4): Xaa is C or S

SEQ ID NO: 107378 - protein, 30 aa, Artificial Sequence; identical to SEQ ID NO: 4444
  Cyclic GFR-binding peptide

SEQ ID NO: 107379 - protein, 24 aa, Artificial Sequence
  Cyclic GFR-binding peptide
VMRYKKLVKPTRGVFYLISIANLD

SEQ ID NO: 107380 - protein, 26 aa, Artificial Sequence
  Cyclic GFR-binding peptide
  MOD_RES (26)..(26): Xaa is C or S
QYNKLVKPKRGVLYLISIASLAQPVX

SEQ ID NO: 107381 - protein, 32 aa, Artificial Sequence; identical to SEQ ID NO: 4447
  Cyclic GFR-binding peptide
  MOD_RES (32)..(32): Xaa is C or S

SEQ ID NO: 107382 - protein, 28 aa, Artificial Sequence
  Cyclic GFR-binding peptide
  MOD_RES (27)..(28): Xaa is C or S
NRYKKLIVNSSDDFYLVSIANLKTPAXX

SEQ ID NO: 107383 - protein, 36 aa, Artificial Sequence; identical to SEQ ID NO: 4449
  Cyclic GFR-binding peptide
  MOD_RES (1)..(3)..(34)..(35): Xaa is C or S

SEQ ID NO: 107384 - protein, 29 aa, Artificial Sequence
  Cyclic GFR-binding peptide
EVVMEQYNKLVVKDYEDLYLMSIASLETP

SEQ ID NO: 107385 - protein, 36 aa, Artificial Sequence; identical to SEQ ID NO: 4451
  Cyclic GFR-binding peptide
  MOD_RES (1)..(3)..(34)..(35): Xaa is C or S

SEQ ID NO: 107386 - protein, 25 aa, Artificial Sequence
  Cyclic GFR-binding peptide
IMQYNKLLLVRGNDLYLMSIASTKV

SEQ ID NO: 107387 - protein, 36 aa, Artificial Sequence; identical to SEQ ID NO: 4452
  Cyclic GFR-binding peptide
  MOD_RES (1)..(3)..(36): Xaa is C or S

SEQ ID NO: 107388 - protein, 37 aa, Artificial Sequence
  Cyclic GFR-binding peptide
  MOD_RES (2)..(4)..(36)..(37): Xaa is C or S
SXGXRDVVMGQYNKLIIQQKDNLYLMSIASMKTPTXX

SEQ ID NO: 107389 - protein, 40 aa, Artificial Sequence; identical to SEQ ID NO: 4453
  Cyclic GFR-binding peptide
  MOD_RES (2)..(34)..(35): Xaa is C or S

SEQ ID NO: 107390 - protein, 39 aa, Artificial Sequence; identical to SEQ ID NO: 4455
  Cyclic GFR-binding peptide
  MOD_RES (2)..(4)..(36)..(37): Xaa is C or S

SEQ ID NO: 107391 - protein, 36 aa, Artificial Sequence; identical to SEQ ID NO: 4457
  Cyclic GFR-binding peptide
  MOD_RES (30)..(31): Xaa is C or S

SEQ ID NO: 107392 - protein, 29 aa, Artificial Sequence
  Cyclic GFR-binding peptide
  MOD_RES (29)..(29): Xaa is C or S
VMDQYNKLVVNNAADLYLISIASLRAPVX

SEQ ID NO: 107393 - protein, 32 aa, Artificial Sequence; identical to SEQ ID NO: 32752
  Cyclic GFR-binding peptide
  MOD_RES (2)..(4): Xaa is C or S

SEQ ID NO: 107394 - protein, 30 aa, Artificial Sequence; identical to SEQ ID NO: 4459
  Cyclic GFR-binding peptide
  MOD_RES (29)..(30): Xaa is C or S

SEQ ID NO: 107395 - protein, 27 aa, Artificial Sequence
  Cyclic GFR-binding peptide
VMNQYNKLIVNSSDDLYLVSIASLQTP

SEQ ID NO: 107396 - protein, 34 aa, Artificial Sequence; identical to SEQ ID NO: 86642
  Cyclic GFR-binding peptide
  MOD_RES (31)..(32): Xaa is C or S

SEQ ID NO: 107397 - protein, 41 aa, Artificial Sequence; identical to SEQ ID NO: 32757
  Cyclic GFR-binding peptide
  MOD_RES (2)..(4)..(36)..(37): Xaa is C or S

SEQ ID NO: 107398 - protein, 30 aa, Artificial Sequence; identical to SEQ ID NO: 4462
  Cyclic GFR-binding peptide

SEQ ID NO: 107399 - protein, 30 aa, Artificial Sequence; identical to SEQ ID NO: 75654
  Cyclic GFR-binding peptide
  MOD_RES (1)..(1): Xaa is C or S

SEQ ID NO: 107400 - protein, 23 aa, Artificial Sequence
  Cyclic GFR-binding peptide
MGQYNKLIIQQKDNLYLMSIASM

SEQ ID NO: 107401 - protein, 31 aa, Artificial Sequence; identical to SEQ ID NO: 4464
  Cyclic GFR-binding peptide
  MOD_RES (30)..(31): Xaa is C or S

SEQ ID NO: 107402 - protein, 26 aa, Artificial Sequence
  Cyclic GFR-binding peptide
RVIMQYNKLVKPKRGVLYLISIASLA

SEQ ID NO: 107403 - protein, 29 aa, Artificial Sequence
  Cyclic GFR-binding peptide
  MOD_RES (1)..(1): Xaa is C or S
XESVAMGQYNKLYTVVGKDLYLISIASLK

SEQ ID NO: 107404 - protein, 30 aa, Artificial Sequence; identical to SEQ ID NO: 4470
  Cyclic GFR-binding peptide
  MOD_RES (27)..(28): Xaa is C or S

SEQ ID NO: 107405 - protein, 20 aa, Artificial Sequence
  Cyclic GFR-binding peptide
QYNKLIKPTKGILYLISIAS

SEQ ID NO: 107406 - protein, 24 aa, Artificial Sequence
  Cyclic GFR-binding peptide
VMGRYKKLIIQQKDNFYLMSIANM

SEQ ID NO: 107407 - protein, 41 aa, Artificial Sequence; identical to SEQ ID NO: 4476
  Cyclic GFR-binding peptide
  MOD_RES (1)..(3)..(35)..(36): Xaa is C or S

SEQ ID NO: 107408 - protein, 40 aa, Artificial Sequence; identical to SEQ ID NO: 4480
  Cyclic GFR-binding peptide
  MOD_RES (2)..(4)..(36)..(37): Xaa is C or S

SEQ ID NO: 107409 - protein, 37 aa, Artificial Sequence; identical to SEQ ID NO: 4481
  Cyclic GFR-binding peptide
  MOD_RES (1)..(32)..(33): Xaa is C or S

SEQ ID NO: 107410 - protein, 37 aa, Artificial Sequence; identical to SEQ ID NO: 4482
  Cyclic GFR-binding peptide
  MOD_RES (2)..(4)..(35)..(36): Xaa is C or S

SEQ ID NO: 107411 - protein, 31 aa, Artificial Sequence; identical to SEQ ID NO: 4483
  Cyclic GFR-binding peptide
  MOD_RES (31)..(31): Xaa is C or S

SEQ ID NO: 107412 - protein, 30 aa, Artificial Sequence; identical to SEQ ID NO: 4485
  Cyclic GFR-binding peptide
  MOD_RES (1)..(1): Xaa is C or S

SEQ ID NO: 107413 - protein, 32 aa, Artificial Sequence; identical to SEQ ID NO: 75663
  Cyclic GFR-binding peptide
  MOD_RES (2)..(4): Xaa is C or S

SEQ ID NO: 107414 - protein, 31 aa, Artificial Sequence; identical to SEQ ID NO: 75665
  Cyclic GFR-binding peptide
  MOD_RES (2)..(2): Xaa is C or S

SEQ ID NO: 107415 - protein, 29 aa, Artificial Sequence
  Cyclic GFR-binding peptide
  MOD_RES (28)..(29): Xaa is C or S
IMQYNKLIKPTKGILYLISIASLDQSVXX

SEQ ID NO: 107416 - protein, 39 aa, Artificial Sequence; identical to SEQ ID NO: 4487
  Cyclic GFR-binding peptide
  MOD_RES (2)..(4)..(36)..(37): Xaa is C or S

SEQ ID NO: 107417 - protein, 25 aa, Artificial Sequence
  Cyclic GFR-binding peptide
RYKKLIVNSSDDFYLVSIANLKTPA

SEQ ID NO: 107418 - protein, 34 aa, Artificial Sequence; identical to SEQ ID NO: 4491
  Cyclic GFR-binding peptide
  MOD_RES (2)..(34): Xaa is C or S

SEQ ID NO: 107419 - protein, 32 aa, Artificial Sequence; identical to SEQ ID NO: 4492
  Cyclic GFR-binding peptide
  MOD_RES (26)..(27): Xaa is C or S

SEQ ID NO: 107420 - protein, 38 aa, Artificial Sequence
  Cyclic GFR-binding peptide
  MOD_RES (2)..(33)..(34): Xaa is C or S
GXEEVIMQYNKLLLVRGNDLYLMSIASTKVPAXXTSPV

SEQ ID NO: 107421 - protein, 29 aa, Artificial Sequence
  Cyclic GFR-binding peptide
  MOD_RES (1)..(1): Xaa is C or S
XAKVVMNQYNKLIVNNSSDLYLVSIASLK

SEQ ID NO: 107422 - protein, 24 aa, Artificial Sequence
  Cyclic GFR-binding peptide
RYKKLVVKDYEDFYLMSIANLETP

SEQ ID NO: 107423 - protein, 32 aa, Artificial Sequence; identical to SEQ ID NO: 4497
  Cyclic GFR-binding peptide

SEQ ID NO: 107424 - protein, 22 aa, Artificial Sequence
  Cyclic GFR-binding peptide
GRYKKLIIQQKDNFYLMSIANM

SEQ ID NO: 107425 - protein, 37 aa, Artificial Sequence; identical to SEQ ID NO: 4499
  Cyclic GFR-binding peptide
  MOD_RES (1)..(3)..(34)..(35): Xaa is C or S

SEQ ID NO: 107426 - protein, 33 aa, Artificial Sequence; identical to SEQ ID NO: 75678
  Cyclic GFR-binding peptide
  MOD_RES (28)..(29): Xaa is C or S

SEQ ID NO: 107427 - protein, 27 aa, Artificial Sequence
  Cyclic GFR-binding peptide
  MOD_RES (1)..(1): Xaa is C or S
XSRVVMNQYNKLIVNSSDDLYLVSIAS

SEQ ID NO: 107428 - protein, 25 aa, Artificial Sequence
  Cyclic GFR-binding peptide
MGERYKKLTPVGMDDFYLVSIANLK

SEQ ID NO: 107429 - protein, 33 aa, Artificial Sequence; identical to SEQ ID NO: 4503
  Cyclic GFR-binding peptide
  MOD_RES (28)..(29): Xaa is C or S

SEQ ID NO: 107430 - protein, 38 aa, Artificial Sequence
  Cyclic GFR-binding peptide
  MOD_RES (32)..(33): Xaa is C or S
SRVVMNQYNKLIVNSSDDLYLVSIASLKTPAXXPKPVH

SEQ ID NO: 107431 - protein, 27 aa, Artificial Sequence
  Cyclic GFR-binding peptide
  MOD_RES (1)..(1): Xaa is C or S
XSRVIMQYNKLVKPKRGVLYLISIASL

SEQ ID NO: 107432 - protein, 33 aa, Artificial Sequence; identical to SEQ ID NO: 4507
  Cyclic GFR-binding peptide
  MOD_RES (27)..(28): Xaa is C or S

SEQ ID NO: 107433 - protein, 30 aa, Artificial Sequence; identical to SEQ ID NO: 4508
  Cyclic GFR-binding peptide
  MOD_RES (30)..(30): Xaa is C or S

SEQ ID NO: 107434 - protein, 21 aa, Artificial Sequence
  Cyclic GFR-binding peptide
QYNKLTPVGMDDLYLVSIASL

SEQ ID NO: 107435 - protein, 24 aa, Artificial Sequence
  Cyclic GFR-binding peptide
KVIMQYNKLIKPTKGILYLISIAS

SEQ ID NO: 107436 - protein, 37 aa, Artificial Sequence; identical to SEQ ID NO: 32805
  Cyclic GFR-binding peptide
  MOD_RES (1)..(33)..(34): Xaa is C or S

SEQ ID NO: 107437 - protein, 30 aa, Artificial Sequence; identical to SEQ ID NO: 4511
  Cyclic GFR-binding peptide
  MOD_RES (29)..(30): Xaa is C or S

SEQ ID NO: 107438 - protein, 29 aa, Artificial Sequence
  Cyclic GFR-binding peptide
  MOD_RES (28)..(29): Xaa is C or S
VMQYNKLVKPTRGVLYLISIASLDQPVXX

SEQ ID NO: 107439 - protein, 25 aa, Artificial Sequence
  Cyclic GFR-binding peptide
QYNKLVVNNAADLYLISIASLRAPV

SEQ ID NO: 107440 - protein, 33 aa, Artificial Sequence; identical to SEQ ID NO: 4519
  Cyclic GFR-binding peptide
  MOD_RES (2)..(4): Xaa is C or S

SEQ ID NO: 107441 - protein, 38 aa, Artificial Sequence
  Cyclic GFR-binding peptide
  MOD_RES (2)..(4)..(36)..(37): Xaa is C or S
RXGXESVAMGQYNKLYTVVGKDLYLISIASLKTPVXXA

SEQ ID NO: 107442 - protein, 32 aa, Artificial Sequence; identical to SEQ ID NO: 4522
  Cyclic GFR-binding peptide
  MOD_RES (1)..(3): Xaa is C or S

SEQ ID NO: 107443 - protein, 29 aa, Artificial Sequence
  Cyclic GFR-binding peptide
SKVVMRYKKLVKPTRGVFYLISIANLDQP

SEQ ID NO: 107444 - protein, 34 aa, Artificial Sequence
  Cyclic GFR-binding peptide
  MOD_RES (2)..(34): Xaa is C or S
GXESVAMGQYNKLYTVVGKDLYLISIASLKTPVX

SEQ ID NO: 107445 - protein, 28 aa, Artificial Sequence
  Cyclic GFR-binding peptide
  MOD_RES (26)..(27): Xaa is C or S
RYKKLYTVVGKDFYLISIANLKTPVXXA

SEQ ID NO: 107446 - protein, 34 aa, Artificial Sequence; identical to SEQ ID NO: 4526
  Cyclic GFR-binding peptide
  MOD_RES (1)..(3)..(34): Xaa is C or S

SEQ ID NO: 107447 - protein, 39 aa, Artificial Sequence; identical to SEQ ID NO: 4528
  Cyclic GFR-binding peptide
  MOD_RES (2)..(33)..(34): Xaa is C or S

SEQ ID NO: 107448 - protein, 26 aa, Artificial Sequence
  Cyclic GFR-binding peptide
VAMGRYKKLYTVVGKDFYLISIANLK

SEQ ID NO: 107449 - protein, 32 aa, Artificial Sequence; identical to SEQ ID NO: 4532
  Cyclic GFR-binding peptide
  MOD_RES (29)..(30): Xaa is C or S

SEQ ID NO: 107450 - protein, 31 aa, Artificial Sequence; identical to SEQ ID NO: 4534
  Cyclic GFR-binding peptide
  MOD_RES (28)..(29): Xaa is C or S

SEQ ID NO: 107451 - protein, 30 aa, Artificial Sequence; identical to SEQ ID NO: 4535
  Cyclic GFR-binding peptide

SEQ ID NO: 107452 - protein, 29 aa, Artificial Sequence
  Cyclic GFR-binding peptide
VVMNQYNKLIVNNSSDLYLVSIASLKTPA

SEQ ID NO: 107453 - protein, 28 aa, Artificial Sequence
  Cyclic GFR-binding peptide
VMDQYNKLVVKENEDLYLMSIASLETPV

SEQ ID NO: 107454 - protein, 28 aa, Artificial Sequence
  Cyclic GFR-binding peptide
TMNRYKKLVVNKNEDFYLISIANMKEPV

SEQ ID NO: 107455 - protein, 30 aa, Artificial Sequence; identical to SEQ ID NO: 4548
  Cyclic GFR-binding peptide
  MOD_RES (27)..(28): Xaa is C or S

SEQ ID NO: 107456 - protein, 30 aa, Artificial Sequence; identical to SEQ ID NO: 4552
  Cyclic GFR-binding peptide
  MOD_RES (30)..(30): Xaa is C or S

SEQ ID NO: 107457 - protein, 32 aa, Artificial Sequence; identical to SEQ ID NO: 4553
  Cyclic GFR-binding peptide
  MOD_RES (1)..(1): Xaa is C or S

SEQ ID NO: 107458 - protein, 30 aa, Artificial Sequence; identical to SEQ ID NO: 4556
  Cyclic GFR-binding peptide
  MOD_RES (28)..(29): Xaa is C or S

SEQ ID NO: 107459 - protein, 27 aa, Artificial Sequence
  Cyclic GFR-binding peptide
SRVIMQYNKLVKPKRGVLYLISIASLA

SEQ ID NO: 107460 - protein, 28 aa, Artificial Sequence
  Cyclic GFR-binding peptide
  MOD_RES (27)..(28): Xaa is C or S
DQYNKLVVKENEDLYLMSIASLETPVXX

SEQ ID NO: 107461 - protein, 37 aa, Artificial Sequence; identical to SEQ ID NO: 86725
  Cyclic GFR-binding peptide
  MOD_RES (2)..(34)..(35): Xaa is C or S

SEQ ID NO: 107462 - protein, 38 aa, Artificial Sequence; identical to SEQ ID NO: 4560
  Cyclic GFR-binding peptide
  MOD_RES (1)..(3)..(35)..(36): Xaa is C or S

SEQ ID NO: 107463 - protein, 35 aa, Artificial Sequence; identical to SEQ ID NO: 15061
  Cyclic GFR-binding peptide
  MOD_RES (29)..(30): Xaa is C or S

SEQ ID NO: 107464 - protein, 34 aa, Artificial Sequence; identical to SEQ ID NO: 4561
  Cyclic GFR-binding peptide
  MOD_RES (29)..(29): Xaa is C or S

SEQ ID NO: 107465 - protein, 21 aa, Artificial Sequence
  Cyclic GFR-binding peptide
ERYKKLVVKDYEDFYLMSIAN

SEQ ID NO: 107466 - protein, 25 aa, Artificial Sequence
  Cyclic GFR-binding peptide
MQYNKLIKPTKGILYLISIASLDQS

SEQ ID NO: 107467 - protein, 37 aa, Artificial Sequence; identical to SEQ ID NO: 4567
  Cyclic GFR-binding peptide
  MOD_RES (32)..(33): Xaa is C or S

SEQ ID NO: 107468 - protein, 33 aa, Artificial Sequence; identical to SEQ ID NO: 4568
  Cyclic GFR-binding peptide
  MOD_RES (29)..(30): Xaa is C or S

SEQ ID NO: 107469 - protein, 36 aa, Artificial Sequence; identical to SEQ ID NO: 4570
  Cyclic GFR-binding peptide
  MOD_RES (1)..(33)..(34): Xaa is C or S

SEQ ID NO: 107470 - protein, 23 aa, Artificial Sequence
  Cyclic GFR-binding peptide
VIMQYNKLIKPTKGILYLISIAS

SEQ ID NO: 107471 - protein, 34 aa, Artificial Sequence; identical to SEQ ID NO: 15073
  Cyclic GFR-binding peptide
  MOD_RES (2)..(34): Xaa is C or S

SEQ ID NO: 107472 - protein, 24 aa, Artificial Sequence
  Cyclic GFR-binding peptide
GQYNKLYTVVGKDLYLISIASLKT

SEQ ID NO: 107473 - protein, 21 aa, Artificial Sequence
  Cyclic GFR-binding peptide
RYKKLVVKENEDFYLMSIANL

SEQ ID NO: 107474 - protein, 29 aa, Artificial Sequence
  Cyclic GFR-binding peptide
  MOD_RES (27)..(28): Xaa is C or S
MQYNKLVKPKRGVLYLISIASLAQPVXXP

SEQ ID NO: 107475 - protein, 33 aa, Artificial Sequence; identical to SEQ ID NO: 4580
  Cyclic GFR-binding peptide
  MOD_RES (1)..(3): Xaa is C or S

SEQ ID NO: 107476 - protein, 28 aa, Artificial Sequence
  Cyclic GFR-binding peptide
  MOD_RES (26)..(27): Xaa is C or S
RYKKLVVKDYEDFYLMSIANLETPVXXA

SEQ ID NO: 107477 - protein, 30 aa, Artificial Sequence
  Cyclic GFR-binding peptide
  MOD_RES (28)..(29): Xaa is C or S
MNQYNKLVVNKNEDLYLISIASMKEPVXXP

SEQ ID NO: 107478 - protein, 35 aa, Artificial Sequence; identical to SEQ ID NO: 4582
  Cyclic GFR-binding peptide
  MOD_RES (30)..(31): Xaa is C or S

SEQ ID NO: 107479 - protein, 27 aa, Artificial Sequence
  Cyclic GFR-binding peptide
  MOD_RES (27)..(27): Xaa is C or S
ERYKKLVVKDYEDFYLMSIANLETPVX

SEQ ID NO: 107480 - protein, 29 aa, Artificial Sequence
  Cyclic GFR-binding peptide
  MOD_RES (26)..(27): Xaa is C or S
RYKKLVVNNASDFYLISIANLRTPVXXTP

SEQ ID NO: 107481 - protein, 20 aa, Artificial Sequence
  Cyclic GFR-binding peptide
QYNKLVVKENEDLYLMSIAS

SEQ ID NO: 107482 - protein, 35 aa, Artificial Sequence; identical to SEQ ID NO: 4591
  Cyclic GFR-binding peptide
  MOD_RES (1)..(33): Xaa is C or S

SEQ ID NO: 107483 - protein, 26 aa, Artificial Sequence
  Cyclic GFR-binding peptide
VIMQYNKLIKPTKGILYLISIASLDQ

SEQ ID NO: 107484 - protein, 33 aa, Artificial Sequence; identical to SEQ ID NO: 4593
  Cyclic GFR-binding peptide
  MOD_RES (27)..(28): Xaa is C or S

SEQ ID NO: 107485 - protein, 37 aa, Artificial Sequence; identical to SEQ ID NO: 4595
  Cyclic GFR-binding peptide
  MOD_RES (2)..(34)..(35): Xaa is C or S

SEQ ID NO: 107486 - protein, 35 aa, Artificial Sequence; identical to SEQ ID NO: 4598
  Cyclic GFR-binding peptide
  MOD_RES (1)..(32)..(33): Xaa is C or S

SEQ ID NO: 107487 - protein, 27 aa, Artificial Sequence
  Cyclic GFR-binding peptide
MDQYNKLVVKENEDLYLMSIASLETPV

SEQ ID NO: 107488 - protein, 35 aa, Artificial Sequence; identical to SEQ ID NO: 15092
  Cyclic GFR-binding peptide
  MOD_RES (2)..(34)..(35): Xaa is C or S

SEQ ID NO: 107489 - protein, 23 aa, Artificial Sequence
  Cyclic GFR-binding peptide
VMGQYNKLIIQQKDNLYLMSIAS

SEQ ID NO: 107490 - protein, 32 aa, Artificial Sequence; identical to SEQ ID NO: 15095
  Cyclic GFR-binding peptide
  MOD_RES (2)..(2): Xaa is C or S

SEQ ID NO: 107491 - protein, 30 aa, Artificial Sequence; identical to SEQ ID NO: 4601
  Cyclic GFR-binding peptide

SEQ ID NO: 107492 - protein, 33 aa, Artificial Sequence; identical to SEQ ID NO: 4602
  Cyclic GFR-binding peptide
  MOD_RES (1)..(32)..(33): Xaa is C or S

SEQ ID NO: 107493 - protein, 31 aa, Artificial Sequence; identical to SEQ ID NO: 4603
  Cyclic GFR-binding peptide
  MOD_RES (29)..(30): Xaa is C or S

SEQ ID NO: 107494 - protein, 26 aa, Artificial Sequence
  Cyclic GFR-binding peptide
NQYNKLIVNSSDDLYLVSIASLKTPA

SEQ ID NO: 107495 - protein, 28 aa, Artificial Sequence
  Cyclic GFR-binding peptide
  MOD_RES (28)..(28): Xaa is C or S
VMQYNKLVKPTRGVLYLISIASLDQPVX

SEQ ID NO: 107496 - protein, 31 aa, Artificial Sequence; identical to SEQ ID NO: 4608
  Cyclic GFR-binding peptide
  MOD_RES (26)..(27): Xaa is C or S

SEQ ID NO: 107497 - protein, 30 aa, Artificial Sequence; identical to SEQ ID NO: 4609
  Cyclic GFR-binding peptide
  MOD_RES (28)..(29): Xaa is C or S

SEQ ID NO: 107498 - protein, 26 aa, Artificial Sequence
  Cyclic GFR-binding peptide
AKVVMNQYNKLIVNNSSDLYLVSIAS

SEQ ID NO: 107499 - protein, 28 aa, Artificial Sequence
  Cyclic GFR-binding peptide
  MOD_RES (2)..(2): Xaa is C or S
GXESVAMGRYKKLYTVVGKDFYLISIAN

SEQ ID NO: 107500 - protein, 30 aa, Artificial Sequence; identical to SEQ ID NO: 4613
  Cyclic GFR-binding peptide
  MOD_RES (2)..(2): Xaa is C or S

SEQ ID NO: 107501 - protein, 35 aa, Artificial Sequence; identical to SEQ ID NO: 4617
  Cyclic GFR-binding peptide
  MOD_RES (2)..(4): Xaa is C or S

SEQ ID NO: 107502 - protein, 31 aa, Artificial Sequence; identical to SEQ ID NO: 4620
  Cyclic GFR-binding peptide
  MOD_RES (29)..(30): Xaa is C or S

SEQ ID NO: 107503 - protein, 26 aa, Artificial Sequence
  Cyclic GFR-binding peptide
NRYKKLIVNSSDDFYLVSIANLKTPA

SEQ ID NO: 107504 - protein, 27 aa, Artificial Sequence
  Cyclic GFR-binding peptide
  MOD_RES (1)..(1): Xaa is C or S
XARVVMNQYNKLIVNSSDDLYLVSIAS

SEQ ID NO: 107505 - protein, 30 aa, Artificial Sequence; identical to SEQ ID NO: 4626
  Cyclic GFR-binding peptide
  MOD_RES (26)..(27): Xaa is C or S

SEQ ID NO: 107506 - protein, 32 aa, Artificial Sequence; identical to SEQ ID NO: 4628
  Cyclic GFR-binding peptide
  MOD_RES (26)..(26): Xaa is C or S

SEQ ID NO: 107507 - protein, 35 aa, Artificial Sequence; identical to SEQ ID NO: 75741
  Cyclic GFR-binding peptide
  MOD_RES (2)..(33)..(34): Xaa is C or S

SEQ ID NO: 107508 - protein, 36 aa, Artificial Sequence; identical to SEQ ID NO: 4629
  Cyclic GFR-binding peptide
  MOD_RES (30)..(31): Xaa is C or S

SEQ ID NO: 107509 - protein, 24 aa, Artificial Sequence
  Cyclic GFR-binding peptide
NRYKKLIVNSSDDFYLVSIANLKT

SEQ ID NO: 107510 - protein, 26 aa, Artificial Sequence
  Cyclic GFR-binding peptide
VVMNQYNKLIVNSSDDLYLVSIASLK

SEQ ID NO: 107511 - protein, 38 aa, Artificial Sequence; identical to SEQ ID NO: 4634
  Cyclic GFR-binding peptide
  MOD_RES (2)..(4)..(35)..(36): Xaa is C or S

SEQ ID NO: 107512 - protein, 32 aa, Artificial Sequence
  Cyclic GFR-binding peptide
  MOD_RES (1)..(3): Xaa is C or S
XGXEEVIMQYNKLLLVRGNDLYLMSIASTKVP

SEQ ID NO: 107513 - protein, 24 aa, Artificial Sequence
  Cyclic GFR-binding peptide
QYNKLVVNKNEDLYLISIASMKEP

SEQ ID NO: 107514 - protein, 34 aa, Artificial Sequence; identical to SEQ ID NO: 4637
  Cyclic GFR-binding peptide
  MOD_RES (2)..(4): Xaa is C or S

SEQ ID NO: 107515 - protein, 25 aa, Artificial Sequence
  Cyclic GFR-binding peptide
VMDRYKKLVVNNAADFYLISIANLR

SEQ ID NO: 107516 - protein, 31 aa, Artificial Sequence; identical to SEQ ID NO: 15137
  Cyclic GFR-binding peptide
  MOD_RES (26)..(27): Xaa is C or S

SEQ ID NO: 107517 - protein, 27 aa, Artificial Sequence
  Cyclic GFR-binding peptide
  MOD_RES (27)..(27): Xaa is C or S
NQYNKLVVNKNEDLYLISIASMKEPVX

SEQ ID NO: 107518 - protein, 38 aa, Artificial Sequence; identical to SEQ ID NO: 86803
  Cyclic GFR-binding peptide
  MOD_RES (32)..(33): Xaa is C or S

SEQ ID NO: 107519 - protein, 25 aa, Artificial Sequence
  Cyclic GFR-binding peptide
VSMGERYKKLTPVGMDDFYLVSIAN

SEQ ID NO: 107520 - protein, 36 aa, Artificial Sequence
  Cyclic GFR-binding peptide
  MOD_RES (2)..(33)..(34): Xaa is C or S
GXEEVIMQYNKLLLVRGNDLYLMSIASTKVPAXXTS

SEQ ID NO: 107521 - protein, 29 aa, Artificial Sequence
  Cyclic GFR-binding peptide
DVVMGQYNKLIIQQKDNLYLMSIASMKTP

SEQ ID NO: 107522 - protein, 38 aa, Artificial Sequence; identical to SEQ ID NO: 4642
  Cyclic GFR-binding peptide
  MOD_RES (2)..(33)..(34): Xaa is C or S

SEQ ID NO: 107523 - protein, 34 aa, Artificial Sequence; identical to SEQ ID NO: 4644
  Cyclic GFR-binding peptide
  MOD_RES (31)..(32): Xaa is C or S

SEQ ID NO: 107524 - protein, 39 aa, Artificial Sequence; identical to SEQ ID NO: 15143
  Cyclic GFR-binding peptide
  MOD_RES (1)..(3)..(35)..(36): Xaa is C or S

SEQ ID NO: 107525 - protein, 26 aa, Artificial Sequence
  Cyclic GFR-binding peptide
MDQYNKLVVKENEDLYLMSIASLETP

SEQ ID NO: 107526 - protein, 31 aa, Artificial Sequence; identical to SEQ ID NO: 4650
  Cyclic GFR-binding peptide
  MOD_RES (29)..(30): Xaa is C or S

SEQ ID NO: 107527 - protein, 27 aa, Artificial Sequence
  Cyclic GFR-binding peptide
  MOD_RES (27)..(27): Xaa is C or S
GRYKKLIIQQKDNFYLMSIANMKTPTX

SEQ ID NO: 107528 - protein, 31 aa, Artificial Sequence
  Cyclic GFR-binding peptide
  MOD_RES (30)..(31): Xaa is C or S
EVIMQYNKLLLVRGNDLYLMSIASTKVPAXX

SEQ ID NO: 107529 - protein, 30 aa, Artificial Sequence; identical to SEQ ID NO: 4655
  Cyclic GFR-binding peptide
  MOD_RES (28)..(29): Xaa is C or S

SEQ ID NO: 107530 - protein, 33 aa, Artificial Sequence; identical to SEQ ID NO: 32951
  Cyclic GFR-binding peptide
  MOD_RES (1)..(33): Xaa is C or S

SEQ ID NO: 107531 - protein, 35 aa, Artificial Sequence; identical to SEQ ID NO: 4656
  Cyclic GFR-binding peptide
  MOD_RES (2)..(34)..(35): Xaa is C or S

SEQ ID NO: 107532 - protein, 31 aa, Artificial Sequence; identical to SEQ ID NO: 4659
  Cyclic GFR-binding peptide
  MOD_RES (28)..(29): Xaa is C or S

SEQ ID NO: 107533 - protein, 31 aa, Artificial Sequence; identical to SEQ ID NO: 4661
  Cyclic GFR-binding peptide
  MOD_RES (30)..(31): Xaa is C or S

SEQ ID NO: 107534 - protein, 31 aa, Artificial Sequence; identical to SEQ ID NO: 4663
  Cyclic GFR-binding peptide
  MOD_RES (28)..(29): Xaa is C or S

SEQ ID NO: 107535 - protein, 31 aa, Artificial Sequence; identical to SEQ ID NO: 4665
  Cyclic GFR-binding peptide
  MOD_RES (2)..(2): Xaa is C or S

SEQ ID NO: 107536 - protein, 39 aa, Artificial Sequence; identical to SEQ ID NO: 4668
  Cyclic GFR-binding peptide
  MOD_RES (1)..(3)..(35)..(36): Xaa is C or S

SEQ ID NO: 107537 - protein, 37 aa, Artificial Sequence; identical to SEQ ID NO: 4671
  Cyclic GFR-binding peptide
  MOD_RES (1)..(3)..(34)..(35): Xaa is C or S

SEQ ID NO: 107538 - protein, 31 aa, Artificial Sequence; identical to SEQ ID NO: 4672
  Cyclic GFR-binding peptide
  MOD_RES (2)..(2): Xaa is C or S

SEQ ID NO: 107539 - protein, 27 aa, Artificial Sequence
  Cyclic GFR-binding peptide
  MOD_RES (26)..(27): Xaa is C or S
RYKKLVVKDYEDFYLMSIANLETPVXX

SEQ ID NO: 107540 - protein, 37 aa, Artificial Sequence; identical to SEQ ID NO: 4675
  Cyclic GFR-binding peptide
  MOD_RES (1)..(3)..(36)..(37): Xaa is C or S

SEQ ID NO: 107541 - protein, 35 aa, Artificial Sequence; identical to SEQ ID NO: 4676
  Cyclic GFR-binding peptide
  MOD_RES (1)..(33)..(34): Xaa is C or S

SEQ ID NO: 107542 - protein, 32 aa, Artificial Sequence
  Cyclic GFR-binding peptide
  MOD_RES (2)..(2): Xaa is C or S
GXRDVVMGQYNKLIIQQKDNLYLMSIASMKTP

SEQ ID NO: 107543 - protein, 24 aa, Artificial Sequence
  Cyclic GFR-binding peptide
RVIMQYNKLVKPKRGVLYLISIAS

SEQ ID NO: 107544 - protein, 29 aa, Artificial Sequence
  Cyclic GFR-binding peptide
  MOD_RES (2)..(4): Xaa is C or S
SXKXSKVIMQYNKLIKPTKGILYLISIAS

SEQ ID NO: 107545 - protein, 27 aa, Artificial Sequence
  Cyclic GFR-binding peptide
DVVMGRYKKLIIQQKDNFYLMSIANMK

SEQ ID NO: 107546 - protein, 42 aa, Artificial Sequence; identical to SEQ ID NO: 75779
  Cyclic GFR-binding peptide
  MOD_RES (2)..(4)..(36)..(37): Xaa is C or S

SEQ ID NO: 107547 - protein, 37 aa, Artificial Sequence; identical to SEQ ID NO: 4683
  Cyclic GFR-binding peptide
  MOD_RES (2)..(4)..(37): Xaa is C or S

SEQ ID NO: 107548 - protein, 30 aa, Artificial Sequence; identical to SEQ ID NO: 4684
  Cyclic GFR-binding peptide

SEQ ID NO: 107549 - protein, 33 aa, Artificial Sequence; identical to SEQ ID NO: 4685
  Cyclic GFR-binding peptide
  MOD_RES (29)..(29): Xaa is C or S

SEQ ID NO: 107550 - protein, 26 aa, Artificial Sequence
  Cyclic GFR-binding peptide
IMRYKKLLLVRGNDFYLMSIANTKVP

SEQ ID NO: 107551 - protein, 40 aa, Artificial Sequence; identical to SEQ ID NO: 32984
  Cyclic GFR-binding peptide
  MOD_RES (2)..(4)..(36)..(37): Xaa is C or S

SEQ ID NO: 107552 - protein, 36 aa, Artificial Sequence; identical to SEQ ID NO: 4688
  Cyclic GFR-binding peptide
  MOD_RES (30)..(31): Xaa is C or S

SEQ ID NO: 107553 - protein, 35 aa, Artificial Sequence
  Cyclic GFR-binding peptide
  MOD_RES (32)..(33): Xaa is C or S
AEVVMDQYNKLVVNNAADLYLISIASLRAPVXXSA

SEQ ID NO: 107554 - protein, 25 aa, Artificial Sequence
  Cyclic GFR-binding peptide
MGQYNKLYTVVGKDLYLISIASLKT

SEQ ID NO: 107555 - protein, 34 aa, Artificial Sequence
  Cyclic GFR-binding peptide
  MOD_RES (2)..(34): Xaa is C or S
GXRDVVMGQYNKLIIQQKDNLYLMSIASMKTPTX

SEQ ID NO: 107556 - protein, 28 aa, Artificial Sequence
  Cyclic GFR-binding peptide
AVSMGEQYNKLTPVGMDDLYLVSIASLK

SEQ ID NO: 107557 - protein, 28 aa, Artificial Sequence
  Cyclic GFR-binding peptide
VAMGRYKKLYTVVGKDFYLISIANLKTP

SEQ ID NO: 107558 - protein, 28 aa, Artificial Sequence
  Cyclic GFR-binding peptide
  MOD_RES (2)..(2): Xaa is C or S
GXEEVIMRYKKLLLVRGNDFYLMSIANT

SEQ ID NO: 107559 - protein, 32 aa, Artificial Sequence; identical to SEQ ID NO: 4696
  Cyclic GFR-binding peptide
  MOD_RES (2)..(4): Xaa is C or S

SEQ ID NO: 107560 - protein, 33 aa, Artificial Sequence; identical to SEQ ID NO: 32995
  Cyclic GFR-binding peptide
  MOD_RES (27)..(28): Xaa is C or S

SEQ ID NO: 107561 - protein, 32 aa, Artificial Sequence; identical to SEQ ID NO: 4700
  Cyclic GFR-binding peptide
  MOD_RES (32)..(32): Xaa is C or S

SEQ ID NO: 107562 - protein, 37 aa, Artificial Sequence; identical to SEQ ID NO: 81635
  Cyclic GFR-binding peptide
  MOD_RES (2)..(4)..(36)..(37): Xaa is C or S

SEQ ID NO: 107563 - protein, 28 aa, Artificial Sequence
  Cyclic GFR-binding peptide
  MOD_RES (28)..(28): Xaa is C or S
MDRYKKLVVKENEDFYLMSIANLETPVX

SEQ ID NO: 107564 - protein, 23 aa, Artificial Sequence
  Cyclic GFR-binding peptide
MDQYNKLVVKENEDLYLMSIASL

SEQ ID NO: 107565 - protein, 23 aa, Artificial Sequence
  Cyclic GFR-binding peptide
QYNKLVVNNASDLYLISIASLRT

SEQ ID NO: 107566 - protein, 32 aa, Artificial Sequence; identical to SEQ ID NO: 4704
  Cyclic GFR-binding peptide
  MOD_RES (32)..(32): Xaa is C or S

SEQ ID NO: 107567 - protein, 29 aa, Artificial Sequence
  Cyclic GFR-binding peptide
  MOD_RES (2)..(2): Xaa is C or S
GXSEVVMDRYKKLVVNNASDFYLISIANL

SEQ ID NO: 107568 - protein, 30 aa, Artificial Sequence; identical to SEQ ID NO: 4706
  Cyclic GFR-binding peptide
  MOD_RES (1)..(1): Xaa is C or S

SEQ ID NO: 107569 - protein, 28 aa, Artificial Sequence
  Cyclic GFR-binding peptide
VMGRYKKLIIQQKDNFYLMSIANMKTPT

SEQ ID NO: 107570 - protein, 27 aa, Artificial Sequence
  Cyclic GFR-binding peptide
VVMERYKKLVVKDYEDFYLMSIANLET

SEQ ID NO: 107571 - protein, 38 aa, Artificial Sequence; identical to SEQ ID NO: 4714
  Cyclic GFR-binding peptide
  MOD_RES (2)..(4)..(37)..(38): Xaa is C or S

SEQ ID NO: 107572 - protein, 42 aa, Artificial Sequence; identical to SEQ ID NO: 4715
  Cyclic GFR-binding peptide
  MOD_RES (1)..(3)..(36)..(37): Xaa is C or S

SEQ ID NO: 107573 - protein, 23 aa, Artificial Sequence
  Cyclic GFR-binding peptide
QYNKLVVKENEDLYLMSIASLET

SEQ ID NO: 107574 - protein, 22 aa, Artificial Sequence
  Cyclic GFR-binding peptide
DQYNKLVVNNAADLYLISIASL

SEQ ID NO: 107575 - protein, 23 aa, Artificial Sequence
  Cyclic GFR-binding peptide
VMNQYNKLIVNSSDDLYLVSIAS

SEQ ID NO: 107576 - protein, 32 aa, Artificial Sequence; identical to SEQ ID NO: 15211
  Cyclic GFR-binding peptide
  MOD_RES (1)..(3): Xaa is C or S

SEQ ID NO: 107577 - protein, 37 aa, Artificial Sequence; identical to SEQ ID NO: 4721
  Cyclic GFR-binding peptide
  MOD_RES (32)..(33): Xaa is C or S

SEQ ID NO: 107578 - protein, 29 aa, Artificial Sequence
  Cyclic GFR-binding peptide
  MOD_RES (26)..(27): Xaa is C or S
QYNKLVVNNAADLYLISIASLRAPVXXSA

SEQ ID NO: 107579 - protein, 42 aa, Artificial Sequence
  Cyclic GFR-binding peptide
  MOD_RES (2)..(4)..(36)..(37): Xaa is C or S
RXGXAEVVMDQYNKLVVNNAADLYLISIASLRAPVXXSAPAA

SEQ ID NO: 107580 - protein, 31 aa, Artificial Sequence; identical to SEQ ID NO: 4727
  Cyclic GFR-binding peptide
  MOD_RES (1)..(3): Xaa is C or S

SEQ ID NO: 107581 - protein, 30 aa, Artificial Sequence; identical to SEQ ID NO: 4729
  Cyclic GFR-binding peptide
  MOD_RES (2)..(4): Xaa is C or S

SEQ ID NO: 107582 - protein, 30 aa, Artificial Sequence; identical to SEQ ID NO: 4732
  Cyclic GFR-binding peptide
  MOD_RES (26)..(27): Xaa is C or S

SEQ ID NO: 107583 - protein, 37 aa, Artificial Sequence
  Cyclic GFR-binding peptide
  MOD_RES (1)..(3)..(35)..(36): Xaa is C or S
XGXAEVVMDQYNKLVVNNAADLYLISIASLRAPVXXS

SEQ ID NO: 107584 - protein, 38 aa, Artificial Sequence
  Cyclic GFR-binding peptide
  MOD_RES (1)..(3)..(35)..(36): Xaa is C or S
XAXSEVTMNQYNKLVVNKNEDLYLISIASMKEPVXXPE

SEQ ID NO: 107585 - protein, 40 aa, Artificial Sequence; identical to SEQ ID NO: 4736
  Cyclic GFR-binding peptide
  MOD_RES (2)..(34)..(35): Xaa is C or S

SEQ ID NO: 107586 - protein, 30 aa, Artificial Sequence; identical to SEQ ID NO: 4737
  Cyclic GFR-binding peptide
  MOD_RES (29)..(29): Xaa is C or S

SEQ ID NO: 107587 - protein, 35 aa, Artificial Sequence; identical to SEQ ID NO: 4740
  Cyclic GFR-binding peptide
  MOD_RES (1)..(3)..(35): Xaa is C or S

SEQ ID NO: 107588 - protein, 34 aa, Artificial Sequence
  Cyclic GFR-binding peptide
  MOD_RES (29)..(30): Xaa is C or S
VMGQYNKLIIQQKDNLYLMSIASMKTPTXXPGAS

SEQ ID NO: 107589 - protein, 33 aa, Artificial Sequence; identical to SEQ ID NO: 4741
  Cyclic GFR-binding peptide
  MOD_RES (2)..(4): Xaa is C or S

SEQ ID NO: 107590 - protein, 29 aa, Artificial Sequence
  Cyclic GFR-binding peptide
  MOD_RES (2)..(2): Xaa is C or S
GXEAVSMGEQYNKLTPVGMDDLYLVSIAS

SEQ ID NO: 107591 - protein, 28 aa, Artificial Sequence
  Cyclic GFR-binding peptide
AEVVMDQYNKLVVNNAADLYLISIASLR

SEQ ID NO: 107592 - protein, 24 aa, Artificial Sequence
  Cyclic GFR-binding peptide
QYNKLYTVVGKDLYLISIASLKTP

SEQ ID NO: 107593 - protein, 27 aa, Artificial Sequence
  Cyclic GFR-binding peptide
AMGRYKKLYTVVGKDFYLISIANLKTP

SEQ ID NO: 107594 - protein, 40 aa, Artificial Sequence; identical to SEQ ID NO: 15231
  Cyclic GFR-binding peptide
  MOD_RES (2)..(4)..(36)..(37): Xaa is C or S

SEQ ID NO: 107595 - protein, 26 aa, Artificial Sequence
  Cyclic GFR-binding peptide
MRYKKLIKPTKGIFYLISIANLDQSV

SEQ ID NO: 107596 - protein, 32 aa, Artificial Sequence; identical to SEQ ID NO: 4748
  Cyclic GFR-binding peptide
  MOD_RES (30)..(31): Xaa is C or S

SEQ ID NO: 107597 - protein, 36 aa, Artificial Sequence; identical to SEQ ID NO: 4749
  Cyclic GFR-binding peptide
  MOD_RES (31)..(32): Xaa is C or S

SEQ ID NO: 107598 - protein, 27 aa, Artificial Sequence
  Cyclic GFR-binding peptide
MGRYKKLYTVVGKDFYLISIANLKTPV

SEQ ID NO: 107599 - protein, 24 aa, Artificial Sequence
  Cyclic GFR-binding peptide
QYNKLIVNSSDDLYLVSIASLKTP

SEQ ID NO: 107600 - protein, 33 aa, Artificial Sequence; identical to SEQ ID NO: 4754
  Cyclic GFR-binding peptide
  MOD_RES (30)..(31): Xaa is C or S

SEQ ID NO: 107601 - protein, 39 aa, Artificial Sequence
  Cyclic GFR-binding peptide
  MOD_RES (1)..(3)..(35)..(36): Xaa is C or S
XAXSEVTMNQYNKLVVNKNEDLYLISIASMKEPVXXPEP

SEQ ID NO: 107602 - protein, 26 aa, Artificial Sequence
  Cyclic GFR-binding peptide
IMQYNKLLLVRGNDLYLMSIASTKVP

SEQ ID NO: 107603 - protein, 31 aa, Artificial Sequence; identical to SEQ ID NO: 4755
  Cyclic GFR-binding peptide
  MOD_RES (26)..(27): Xaa is C or S

SEQ ID NO: 107604 - protein, 25 aa, Artificial Sequence
  Cyclic GFR-binding peptide
MGRYKKLYTVVGKDFYLISIANLKT

SEQ ID NO: 107605 - protein, 42 aa, Artificial Sequence; identical to SEQ ID NO: 4760
  Cyclic GFR-binding peptide
  MOD_RES (2)..(4)..(36)..(37): Xaa is C or S

SEQ ID NO: 107606 - protein, 36 aa, Artificial Sequence; identical to SEQ ID NO: 75827
  Cyclic GFR-binding peptide
  MOD_RES (2)..(4)..(36): Xaa is C or S

SEQ ID NO: 107607 - protein, 27 aa, Artificial Sequence
  Cyclic GFR-binding peptide
  MOD_RES (27)..(27): Xaa is C or S
NRYKKLIVNSSDDFYLVSIANLKTPAX

SEQ ID NO: 107608 - protein, 34 aa, Artificial Sequence; identical to SEQ ID NO: 15249
  Cyclic GFR-binding peptide
  MOD_RES (1)..(33)..(34): Xaa is C or S

SEQ ID NO: 107609 - protein, 32 aa, Artificial Sequence; identical to SEQ ID NO: 75830
  Cyclic GFR-binding peptide
  MOD_RES (31)..(32): Xaa is C or S

SEQ ID NO: 107610 - protein, 36 aa, Artificial Sequence; identical to SEQ ID NO: 4762
  Cyclic GFR-binding peptide
  MOD_RES (1)..(33)..(34): Xaa is C or S

SEQ ID NO: 107611 - protein, 31 aa, Artificial Sequence; identical to SEQ ID NO: 15250
  Cyclic GFR-binding peptide
  MOD_RES (1)..(3): Xaa is C or S

SEQ ID NO: 107612 - protein, 34 aa, Artificial Sequence
  Cyclic GFR-binding peptide
  MOD_RES (2)..(4): Xaa is C or S
LXGXEEVIMQYNKLLLVRGNDLYLMSIASTKVPA

SEQ ID NO: 107613 - protein, 28 aa, Artificial Sequence
  Cyclic GFR-binding peptide
VMNRYKKLIVNNSSDFYLVSIANLKTPA

SEQ ID NO: 107614 - protein, 31 aa, Artificial Sequence
  Cyclic GFR-binding peptide
  MOD_RES (2)..(4): Xaa is C or S
RXAXSEVTMNQYNKLVVNKNEDLYLISIASM

SEQ ID NO: 107615 - protein, 35 aa, Artificial Sequence; identical to SEQ ID NO: 4768
  Cyclic GFR-binding peptide
  MOD_RES (1)..(3)..(34)..(35): Xaa is C or S

SEQ ID NO: 107616 - protein, 35 aa, Artificial Sequence; identical to SEQ ID NO: 33084
  Cyclic GFR-binding peptide
  MOD_RES (32)..(33): Xaa is C or S

SEQ ID NO: 107617 - protein, 28 aa, Artificial Sequence
  Cyclic GFR-binding peptide
KVVMNRYKKLIVNNSSDFYLVSIANLKT

SEQ ID NO: 107618 - protein, 37 aa, Artificial Sequence
  Cyclic GFR-binding peptide
  MOD_RES (2)..(34)..(35): Xaa is C or S
AXSEVTMNQYNKLVVNKNEDLYLISIASMKEPVXXPE

SEQ ID NO: 107619 - protein, 29 aa, Artificial Sequence
  Cyclic GFR-binding peptide
  MOD_RES (27)..(27): Xaa is C or S
NRYKKLIVNSSDDFYLVSIANLKTPAXTP

SEQ ID NO: 107620 - protein, 25 aa, Artificial Sequence
  Cyclic GFR-binding peptide
VMRYKKLVKPTRGVFYLISIANLDQ

SEQ ID NO: 107621 - protein, 22 aa, Artificial Sequence
  Cyclic GFR-binding peptide
MDQYNKLVVNNASDLYLISIAS

SEQ ID NO: 107622 - protein, 30 aa, Artificial Sequence; identical to SEQ ID NO: 4776
  Cyclic GFR-binding peptide

SEQ ID NO: 107623 - protein, 29 aa, Artificial Sequence
  Cyclic GFR-binding peptide
VVMGQYNKLIIQQKDNLYLMSIASMKTPT

SEQ ID NO: 107624 - protein, 25 aa, Artificial Sequence
  Cyclic GFR-binding peptide
MGRYKKLIIQQKDNFYLMSIANMKT

SEQ ID NO: 107625 - protein, 35 aa, Artificial Sequence; identical to SEQ ID NO: 4778
  Cyclic GFR-binding peptide
  MOD_RES (30)..(31): Xaa is C or S

SEQ ID NO: 107626 - protein, 24 aa, Artificial Sequence
  Cyclic GFR-binding peptide
RYKKLVVNKNEDFYLISIANMKEP

SEQ ID NO: 107627 - protein, 35 aa, Artificial Sequence; identical to SEQ ID NO: 4780
  Cyclic GFR-binding peptide
  MOD_RES (32)..(33): Xaa is C or S

SEQ ID NO: 107628 - protein, 39 aa, Artificial Sequence
  Cyclic GFR-binding peptide
  MOD_RES (1)..(3)..(35)..(36): Xaa is C or S
XGXESVAMGQYNKLYTVVGKDLYLISIASLKTPVXXAKS

SEQ ID NO: 107629 - protein, 29 aa, Artificial Sequence
  Cyclic GFR-binding peptide
  MOD_RES (28)..(29): Xaa is C or S
MGRYKKLYTVVGKDFYLISIANLKTPVXX

SEQ ID NO: 107630 - protein, 26 aa, Artificial Sequence
  Cyclic GFR-binding peptide
EQYNKLVVKDYEDLYLMSIASLETPV

SEQ ID NO: 107631 - protein, 38 aa, Artificial Sequence; identical to SEQ ID NO: 4783
  Cyclic GFR-binding peptide
  MOD_RES (32)..(33): Xaa is C or S

SEQ ID NO: 107632 - protein, 34 aa, Artificial Sequence; identical to SEQ ID NO: 81738
  Cyclic GFR-binding peptide
  MOD_RES (1)..(3): Xaa is C or S

SEQ ID NO: 107633 - protein, 34 aa, Artificial Sequence; identical to SEQ ID NO: 33104
  Cyclic GFR-binding peptide
  MOD_RES (1)..(33)..(34): Xaa is C or S

SEQ ID NO: 107634 - protein, 29 aa, Artificial Sequence
  Cyclic GFR-binding peptide
  MOD_RES (26)..(27): Xaa is C or S
QYNKLVKPTRGVLYLISIASLDQPVXXPS

SEQ ID NO: 107635 - protein, 24 aa, Artificial Sequence
  Cyclic GFR-binding peptide
MRYKKLVKPKRGVFYLISIANLAQ

SEQ ID NO: 107636 - protein, 34 aa, Artificial Sequence; identical to SEQ ID NO: 4791
  Cyclic GFR-binding peptide
  MOD_RES (28)..(29): Xaa is C or S

SEQ ID NO: 107637 - protein, 31 aa, Artificial Sequence; identical to SEQ ID NO: 81745
  Cyclic GFR-binding peptide
  MOD_RES (1)..(1): Xaa is C or S

SEQ ID NO: 107638 - protein, 27 aa, Artificial Sequence
  Cyclic GFR-binding peptide
EVVMEQYNKLVVKDYEDLYLMSIASLE

SEQ ID NO: 107639 - protein, 35 aa, Artificial Sequence; identical to SEQ ID NO: 4793
  Cyclic GFR-binding peptide
  MOD_RES (32)..(33): Xaa is C or S

SEQ ID NO: 107640 - protein, 33 aa, Artificial Sequence; identical to SEQ ID NO: 4795
  Cyclic GFR-binding peptide
  MOD_RES (28)..(28): Xaa is C or S

SEQ ID NO: 107641 - protein, 38 aa, Artificial Sequence; identical to SEQ ID NO: 4797
  Cyclic GFR-binding peptide
  MOD_RES (2)..(4)..(36)..(37): Xaa is C or S

SEQ ID NO: 107642 - protein, 26 aa, Artificial Sequence
  Cyclic GFR-binding peptide
  MOD_RES (26)..(26): Xaa is C or S
RYKKLTPVGMDDFYLVSIANLKTPVX

SEQ ID NO: 107643 - protein, 36 aa, Artificial Sequence; identical to SEQ ID NO: 15281
  Cyclic GFR-binding peptide
  MOD_RES (32)..(33): Xaa is C or S

SEQ ID NO: 107644 - protein, 33 aa, Artificial Sequence; identical to SEQ ID NO: 4804
  Cyclic GFR-binding peptide
  MOD_RES (2)..(2): Xaa is C or S

SEQ ID NO: 107645 - protein, 36 aa, Artificial Sequence; identical to SEQ ID NO: 4805
  Cyclic GFR-binding peptide
  MOD_RES (1)..(32)..(33): Xaa is C or S

SEQ ID NO: 107646 - protein, 36 aa, Artificial Sequence
  Cyclic GFR-binding peptide
  MOD_RES (2)..(4)..(36): Xaa is C or S
RXAXSEVTMNQYNKLVVNKNEDLYLISIASMKEPVX

SEQ ID NO: 107647 - protein, 23 aa, Artificial Sequence
  Cyclic GFR-binding peptide
MRYKKLVKPKRGVFYLISIANLA

SEQ ID NO: 107648 - protein, 33 aa, Artificial Sequence; identical to SEQ ID NO: 81756
  Cyclic GFR-binding peptide
  MOD_RES (27)..(28): Xaa is C or S

SEQ ID NO: 107649 - protein, 35 aa, Artificial Sequence; identical to SEQ ID NO: 75852
  Cyclic GFR-binding peptide
  MOD_RES (1)..(3)..(35): Xaa is C or S

SEQ ID NO: 107650 - protein, 32 aa, Artificial Sequence; identical to SEQ ID NO: 4811
  Cyclic GFR-binding peptide
  MOD_RES (28)..(29): Xaa is C or S

SEQ ID NO: 107651 - protein, 25 aa, Artificial Sequence
  Cyclic GFR-binding peptide
GQYNKLYTVVGKDLYLISIASLKTP

SEQ ID NO: 107652 - protein, 30 aa, Artificial Sequence; identical to SEQ ID NO: 4813
  Cyclic GFR-binding peptide
  MOD_RES (2)..(4): Xaa is C or S

SEQ ID NO: 107653 - protein, 37 aa, Artificial Sequence
  Cyclic GFR-binding peptide
  MOD_RES (2)..(4)..(36)..(37): Xaa is C or S
RXGXESVAMGQYNKLYTVVGKDLYLISIASLKTPVXX

SEQ ID NO: 107654 - protein, 34 aa, Artificial Sequence; identical to SEQ ID NO: 4814
  Cyclic GFR-binding peptide
  MOD_RES (30)..(31): Xaa is C or S

SEQ ID NO: 107655 - protein, 40 aa, Artificial Sequence; identical to SEQ ID NO: 75856
  Cyclic GFR-binding peptide
  MOD_RES (1)..(3)..(34)..(35): Xaa is C or S

SEQ ID NO: 107656 - protein, 33 aa, Artificial Sequence; identical to SEQ ID NO: 4816
  Cyclic GFR-binding peptide
  MOD_RES (29)..(30): Xaa is C or S

SEQ ID NO: 107657 - protein, 26 aa, Artificial Sequence
  Cyclic GFR-binding peptide
MGERYKKLTPVGMDDFYLVSIANLKT

SEQ ID NO: 107658 - protein, 29 aa, Artificial Sequence
  Cyclic GFR-binding peptide
  MOD_RES (28)..(29): Xaa is C or S
IMQYNKLLLVRGNDLYLMSIASTKVPAXX

SEQ ID NO: 107659 - protein, 33 aa, Artificial Sequence; identical to SEQ ID NO: 4819
  Cyclic GFR-binding peptide
  MOD_RES (30)..(31): Xaa is C or S

SEQ ID NO: 107660 - protein, 35 aa, Artificial Sequence; identical to SEQ ID NO: 4820
  Cyclic GFR-binding peptide
  MOD_RES (31)..(31): Xaa is C or S

SEQ ID NO: 107661 - protein, 30 aa, Artificial Sequence; identical to SEQ ID NO: 4821
  Cyclic GFR-binding peptide

SEQ ID NO: 107662 - protein, 28 aa, Artificial Sequence
  Cyclic GFR-binding peptide
RVVMNQYNKLIVNSSDDLYLVSIASLQT

SEQ ID NO: 107663 - protein, 39 aa, Artificial Sequence; identical to SEQ ID NO: 4824
  Cyclic GFR-binding peptide
  MOD_RES (2)..(34)..(35): Xaa is C or S

SEQ ID NO: 107664 - protein, 36 aa, Artificial Sequence; identical to SEQ ID NO: 33142
  Cyclic GFR-binding peptide
  MOD_RES (2)..(34)..(35): Xaa is C or S

SEQ ID NO: 107665 - protein, 40 aa, Artificial Sequence; identical to SEQ ID NO: 15307
  Cyclic GFR-binding peptide
  MOD_RES (1)..(3)..(35)..(36): Xaa is C or S

SEQ ID NO: 107666 - protein, 35 aa, Artificial Sequence; identical to SEQ ID NO: 4830
  Cyclic GFR-binding peptide
  MOD_RES (1)..(3): Xaa is C or S

SEQ ID NO: 107667 - protein, 26 aa, Artificial Sequence
  Cyclic GFR-binding peptide
VMNQYNKLIVNNSSDLYLVSIASLKT

SEQ ID NO: 107668 - protein, 36 aa, Artificial Sequence; identical to SEQ ID NO: 4832
  Cyclic GFR-binding peptide
  MOD_RES (31)..(32): Xaa is C or S

SEQ ID NO: 107669 - protein, 30 aa, Artificial Sequence; identical to SEQ ID NO: 4833
  Cyclic GFR-binding peptide
  MOD_RES (29)..(30): Xaa is C or S

SEQ ID NO: 107670 - protein, 24 aa, Artificial Sequence
  Cyclic GFR-binding peptide
AMGRYKKLYTVVGKDFYLISIANL

SEQ ID NO: 107671 - protein, 32 aa, Artificial Sequence; identical to SEQ ID NO: 4836
  Cyclic GFR-binding peptide
  MOD_RES (31)..(32): Xaa is C or S

SEQ ID NO: 107672 - protein, 24 aa, Artificial Sequence
  Cyclic GFR-binding peptide
TMNQYNKLVVNKNEDLYLISIASM

SEQ ID NO: 107673 - protein, 39 aa, Artificial Sequence; identical to SEQ ID NO: 15319
  Cyclic GFR-binding peptide
  MOD_RES (2)..(34)..(35): Xaa is C or S

SEQ ID NO: 107674 - protein, 28 aa, Artificial Sequence
  Cyclic GFR-binding peptide
  MOD_RES (27)..(28): Xaa is C or S
MQYNKLVKPTRGVLYLISIASLDQPVXX

SEQ ID NO: 107675 - protein, 30 aa, Artificial Sequence; identical to SEQ ID NO: 33156
  Cyclic GFR-binding peptide
  MOD_RES (27)..(28): Xaa is C or S

SEQ ID NO: 107676 - protein, 22 aa, Artificial Sequence
  Cyclic GFR-binding peptide
QYNKLIVNSSDDLYLVSIASLQ

SEQ ID NO: 107677 - protein, 22 aa, Artificial Sequence
  Cyclic GFR-binding peptide
MNQYNKLIVNSSDDLYLVSIAS

SEQ ID NO: 107678 - protein, 39 aa, Artificial Sequence; identical to SEQ ID NO: 33167
  Cyclic GFR-binding peptide
  MOD_RES (2)..(4)..(36)..(37): Xaa is C or S

SEQ ID NO: 107679 - protein, 27 aa, Artificial Sequence
  Cyclic GFR-binding peptide
  MOD_RES (26)..(27): Xaa is C or S
QYNKLIVNSSDDLYLVSIASLQTPAXX

SEQ ID NO: 107680 - protein, 31 aa, Artificial Sequence; identical to SEQ ID NO: 75883
  Cyclic GFR-binding peptide
  MOD_RES (1)..(1): Xaa is C or S

SEQ ID NO: 107681 - protein, 30 aa, Artificial Sequence; identical to SEQ ID NO: 4855
  Cyclic GFR-binding peptide
  MOD_RES (26)..(27): Xaa is C or S

SEQ ID NO: 107682 - protein, 37 aa, Artificial Sequence; identical to SEQ ID NO: 4856
  Cyclic GFR-binding peptide
  MOD_RES (32)..(33): Xaa is C or S

SEQ ID NO: 107683 - protein, 27 aa, Artificial Sequence
  Cyclic GFR-binding peptide
VMEQYNKLVVKDYEDLYLMSIASLETP

SEQ ID NO: 107684 - protein, 28 aa, Artificial Sequence
  Cyclic GFR-binding peptide
  MOD_RES (28)..(28): Xaa is C or S
IMQYNKLLLVRGNDLYLMSIASTKVPAX

SEQ ID NO: 107685 - protein, 37 aa, Artificial Sequence; identical to SEQ ID NO: 4858
  Cyclic GFR-binding peptide
  MOD_RES (32)..(33): Xaa is C or S

SEQ ID NO: 107686 - protein, 28 aa, Artificial Sequence
  Cyclic GFR-binding peptide
  MOD_RES (27)..(28): Xaa is C or S
NQYNKLVVNKNEDLYLISIASMKEPVXX

SEQ ID NO: 107687 - protein, 30 aa, Artificial Sequence; identical to SEQ ID NO: 4859
  Cyclic GFR-binding peptide
  MOD_RES (30)..(30): Xaa is C or S

SEQ ID NO: 107688 - protein, 28 aa, Artificial Sequence
  Cyclic GFR-binding peptide
DVVMGQYNKLIIQQKDNLYLMSIASMKT

SEQ ID NO: 107689 - protein, 33 aa, Artificial Sequence; identical to SEQ ID NO: 4860
  Cyclic GFR-binding peptide
  MOD_RES (30)..(31): Xaa is C or S

SEQ ID NO: 107690 - protein, 29 aa, Artificial Sequence
  Cyclic GFR-binding peptide
  MOD_RES (1)..(3): Xaa is C or S
XGXEEVIMQYNKLLLVRGNDLYLMSIAST

SEQ ID NO: 107691 - protein, 32 aa, Artificial Sequence; identical to SEQ ID NO: 75887
  Cyclic GFR-binding peptide
  MOD_RES (30)..(31): Xaa is C or S

SEQ ID NO: 107692 - protein, 39 aa, Artificial Sequence; identical to SEQ ID NO: 15351
  Cyclic GFR-binding peptide
  MOD_RES (1)..(33)..(34): Xaa is C or S

SEQ ID NO: 107693 - protein, 38 aa, Artificial Sequence; identical to SEQ ID NO: 4865
  Cyclic GFR-binding peptide
  MOD_RES (2)..(34)..(35): Xaa is C or S

SEQ ID NO: 107694 - protein, 32 aa, Artificial Sequence; identical to SEQ ID NO: 4866
  Cyclic GFR-binding peptide
  MOD_RES (1)..(1): Xaa is C or S

SEQ ID NO: 107695 - protein, 36 aa, Artificial Sequence; identical to SEQ ID NO: 86996
  Cyclic GFR-binding peptide
  MOD_RES (32)..(33): Xaa is C or S

SEQ ID NO: 107696 - protein, 24 aa, Artificial Sequence
  Cyclic GFR-binding peptide
IMRYKKLIKPTKGIFYLISIANLD

SEQ ID NO: 107697 - protein, 38 aa, Artificial Sequence
  Cyclic GFR-binding peptide
  MOD_RES (1)..(3)..(34)..(35): Xaa is C or S
XGXEEVIMQYNKLLLVRGNDLYLMSIASTKVPAXXTSP

SEQ ID NO: 107698 - protein, 28 aa, Artificial Sequence
  Cyclic GFR-binding peptide
  MOD_RES (26)..(27): Xaa is C or S
QYNKLTPVGMDDLYLVSIASLKTPVXXA

SEQ ID NO: 107699 - protein, 29 aa, Artificial Sequence
  Cyclic GFR-binding peptide
  MOD_RES (27)..(28): Xaa is C or S
DQYNKLVVNNASDLYLISIASLRTPVXXT

SEQ ID NO: 107700 - protein, 37 aa, Artificial Sequence; identical to SEQ ID NO: 4872
  Cyclic GFR-binding peptide
  MOD_RES (31)..(32): Xaa is C or S

SEQ ID NO: 107701 - protein, 29 aa, Artificial Sequence
  Cyclic GFR-binding peptide
  MOD_RES (29)..(29): Xaa is C or S
VMNRYKKLIVNNSSDFYLVSIANLKTPAX

SEQ ID NO: 107702 - protein, 29 aa, Artificial Sequence
  Cyclic GFR-binding peptide
  MOD_RES (27)..(28): Xaa is C or S
MRYKKLVKPTRGVFYLISIANLDQPVXXP

SEQ ID NO: 107703 - protein, 27 aa, Artificial Sequence
  Cyclic GFR-binding peptide
VVMDQYNKLVVNNAADLYLISIASLRA

SEQ ID NO: 107704 - protein, 30 aa, Artificial Sequence
  Cyclic GFR-binding peptide
  MOD_RES (1)..(1): Xaa is C or S
XAEVVMDQYNKLVVNNAADLYLISIASLRA

SEQ ID NO: 107705 - protein, 34 aa, Artificial Sequence; identical to SEQ ID NO: 4879
  Cyclic GFR-binding peptide
  MOD_RES (28)..(29): Xaa is C or S

SEQ ID NO: 107706 - protein, 30 aa, Artificial Sequence
  Cyclic GFR-binding peptide
  MOD_RES (29)..(30): Xaa is C or S
TMNQYNKLVVNKNEDLYLISIASMKEPVXX

SEQ ID NO: 107707 - protein, 31 aa, Artificial Sequence; identical to SEQ ID NO: 4880
  Cyclic GFR-binding peptide
  MOD_RES (2)..(4): Xaa is C or S

SEQ ID NO: 107708 - protein, 39 aa, Artificial Sequence; identical to SEQ ID NO: 4881
  Cyclic GFR-binding peptide
  MOD_RES (1)..(33)..(34): Xaa is C or S

SEQ ID NO: 107709 - protein, 36 aa, Artificial Sequence; identical to SEQ ID NO: 4882
  Cyclic GFR-binding peptide
  MOD_RES (2)..(4)..(35)..(36): Xaa is C or S

SEQ ID NO: 107710 - protein, 21 aa, Artificial Sequence
  Cyclic GFR-binding peptide
MRYKKLIKPTKGIFYLISIAN

SEQ ID NO: 107711 - protein, 30 aa, Artificial Sequence; identical to SEQ ID NO: 4887
  Cyclic GFR-binding peptide

SEQ ID NO: 107712 - protein, 31 aa, Artificial Sequence; identical to SEQ ID NO: 4888
  Cyclic GFR-binding peptide
  MOD_RES (31)..(31): Xaa is C or S

SEQ ID NO: 107713 - protein, 33 aa, Artificial Sequence; identical to SEQ ID NO: 15381
  Cyclic GFR-binding peptide
  MOD_RES (31)..(32): Xaa is C or S

SEQ ID NO: 107714 - protein, 38 aa, Artificial Sequence; identical to SEQ ID NO: 4889
  Cyclic GFR-binding peptide
  MOD_RES (32)..(33): Xaa is C or S

SEQ ID NO: 107715 - protein, 29 aa, Artificial Sequence
  Cyclic GFR-binding peptide
EVIMQYNKLLLVRGNDLYLMSIASTKVPA

SEQ ID NO: 107716 - protein, 34 aa, Artificial Sequence
  Cyclic GFR-binding peptide
  MOD_RES (30)..(31): Xaa is C or S
VAMGQYNKLYTVVGKDLYLISIASLKTPVXXAKS

SEQ ID NO: 107717 - protein, 21 aa, Artificial Sequence
  Cyclic GFR-binding peptide
DQYNKLVVKENEDLYLMSIAS

SEQ ID NO: 107718 - protein, 31 aa, Artificial Sequence; identical to SEQ ID NO: 4891
  Cyclic GFR-binding peptide
  MOD_RES (28)..(29): Xaa is C or S

SEQ ID NO: 107719 - protein, 22 aa, Artificial Sequence
  Cyclic GFR-binding peptide
RYKKLVVNNASDFYLISIANLR

SEQ ID NO: 107720 - protein, 29 aa, Artificial Sequence
  Cyclic GFR-binding peptide
  MOD_RES (2)..(2): Xaa is C or S
GXARVVMNQYNKLIVNSSDDLYLVSIASL

SEQ ID NO: 107721 - protein, 36 aa, Artificial Sequence; identical to SEQ ID NO: 4893
  Cyclic GFR-binding peptide
  MOD_RES (2)..(34)..(35): Xaa is C or S

SEQ ID NO: 107722 - protein, 28 aa, Artificial Sequence
  Cyclic GFR-binding peptide
  MOD_RES (1)..(1): Xaa is C or S
XSKVVMQYNKLVKPTRGVLYLISIASLD

SEQ ID NO: 107723 - protein, 31 aa, Artificial Sequence; identical to SEQ ID NO: 15391
  Cyclic GFR-binding peptide
  MOD_RES (28)..(29): Xaa is C or S

SEQ ID NO: 107724 - protein, 38 aa, Artificial Sequence; identical to SEQ ID NO: 4896
  Cyclic GFR-binding peptide
  MOD_RES (2)..(4)..(36)..(37): Xaa is C or S

SEQ ID NO: 107725 - protein, 27 aa, Artificial Sequence
  Cyclic GFR-binding peptide
  MOD_RES (26)..(27): Xaa is C or S
QYNKLVVNKNEDLYLISIASMKEPVXX

SEQ ID NO: 107726 - protein, 34 aa, Artificial Sequence; identical to SEQ ID NO: 4899
  Cyclic GFR-binding peptide
  MOD_RES (2)..(34): Xaa is C or S

SEQ ID NO: 107727 - protein, 22 aa, Artificial Sequence
  Cyclic GFR-binding peptide
QYNKLIKPTKGILYLISIASLD

SEQ ID NO: 107728 - protein, 29 aa, Artificial Sequence
  Cyclic GFR-binding peptide
  MOD_RES (2)..(4): Xaa is C or S
LXGXEEVIMRYKKLLLVRGNDFYLMSIAN

SEQ ID NO: 107729 - protein, 36 aa, Artificial Sequence; identical to SEQ ID NO: 33220
  Cyclic GFR-binding peptide
  MOD_RES (1)..(3)..(35)..(36): Xaa is C or S

SEQ ID NO: 107730 - protein, 27 aa, Artificial Sequence
  Cyclic GFR-binding peptide
  MOD_RES (1)..(1): Xaa is C or S
XSRVIMRYKKLVKPKRGVFYLISIANL

SEQ ID NO: 107731 - protein, 22 aa, Artificial Sequence
  Cyclic GFR-binding peptide
GERYKKLTPVGMDDFYLVSIAN

SEQ ID NO: 107732 - protein, 26 aa, Artificial Sequence
  Cyclic GFR-binding peptide
GQYNKLIIQQKDNLYLMSIASMKTPT

SEQ ID NO: 107733 - protein, 33 aa, Artificial Sequence; identical to SEQ ID NO: 15397
  Cyclic GFR-binding peptide
  MOD_RES (2)..(4): Xaa is C or S

SEQ ID NO: 107734 - protein, 34 aa, Artificial Sequence; identical to SEQ ID NO: 4910
  Cyclic GFR-binding peptide
  MOD_RES (32)..(33): Xaa is C or S

SEQ ID NO: 107735 - protein, 30 aa, Artificial Sequence; identical to SEQ ID NO: 4914
  Cyclic GFR-binding peptide
  MOD_RES (2)..(2): Xaa is C or S

SEQ ID NO: 107736 - protein, 38 aa, Artificial Sequence; identical to SEQ ID NO: 75914
  Cyclic GFR-binding peptide
  MOD_RES (2)..(4)..(36)..(37): Xaa is C or S

SEQ ID NO: 107737 - protein, 32 aa, Artificial Sequence; identical to SEQ ID NO: 4915
  Cyclic GFR-binding peptide
  MOD_RES (29)..(30): Xaa is C or S

SEQ ID NO: 107738 - protein, 31 aa, Artificial Sequence; identical to SEQ ID NO: 4918
  Cyclic GFR-binding peptide
  MOD_RES (28)..(29): Xaa is C or S

SEQ ID NO: 107739 - protein, 32 aa, Artificial Sequence; identical to SEQ ID NO: 4919
  Cyclic GFR-binding peptide
  MOD_RES (31)..(32): Xaa is C or S

SEQ ID NO: 107740 - protein, 31 aa, Artificial Sequence
  Cyclic GFR-binding peptide
  MOD_RES (1)..(1): Xaa is C or S
XEEVIMQYNKLLLVRGNDLYLMSIASTKVPA

SEQ ID NO: 107741 - protein, 32 aa, Artificial Sequence; identical to SEQ ID NO: 4920
  Cyclic GFR-binding peptide
  MOD_RES (1)..(3): Xaa is C or S

SEQ ID NO: 107742 - protein, 30 aa, Artificial Sequence; identical to SEQ ID NO: 4921
  Cyclic GFR-binding peptide

SEQ ID NO: 107743 - protein, 31 aa, Artificial Sequence; identical to SEQ ID NO: 4923
  Cyclic GFR-binding peptide
  MOD_RES (26)..(27): Xaa is C or S

SEQ ID NO: 107744 - protein, 28 aa, Artificial Sequence
  Cyclic GFR-binding peptide
VMDQYNKLVVNNASDLYLISIASLRTPV

SEQ ID NO: 107745 - protein, 24 aa, Artificial Sequence
  Cyclic GFR-binding peptide
DRYKKLVVNNAADFYLISIANLRA

SEQ ID NO: 107746 - protein, 29 aa, Artificial Sequence
  Cyclic GFR-binding peptide
  MOD_RES (29)..(29): Xaa is C or S
AMGRYKKLYTVVGKDFYLISIANLKTPVX

SEQ ID NO: 107747 - protein, 34 aa, Artificial Sequence; identical to SEQ ID NO: 4925
  Cyclic GFR-binding peptide
  MOD_RES (28)..(29): Xaa is C or S

SEQ ID NO: 107748 - protein, 32 aa, Artificial Sequence; identical to SEQ ID NO: 4928
  Cyclic GFR-binding peptide
  MOD_RES (29)..(30): Xaa is C or S

SEQ ID NO: 107749 - protein, 29 aa, Artificial Sequence
  Cyclic GFR-binding peptide
  MOD_RES (1)..(3): Xaa is C or S
XGXGEVVMDQYNKLVVKENEDLYLMSIAS

SEQ ID NO: 107750 - protein, 28 aa, Artificial Sequence
  Cyclic GFR-binding peptide
VIMQYNKLVKPKRGVLYLISIASLAQPV

SEQ ID NO: 107751 - protein, 22 aa, Artificial Sequence
  Cyclic GFR-binding peptide
MERYKKLVVKDYEDFYLMSIAN

SEQ ID NO: 107752 - protein, 32 aa, Artificial Sequence; identical to SEQ ID NO: 4935
  Cyclic GFR-binding peptide
  MOD_RES (2)..(2): Xaa is C or S

SEQ ID NO: 107753 - protein, 28 aa, Artificial Sequence
  Cyclic GFR-binding peptide
VVMNQYNKLIVNNSSDLYLVSIASLKTP

SEQ ID NO: 107754 - protein, 24 aa, Artificial Sequence
  Cyclic GFR-binding peptide
VMQYNKLVKPTRGVLYLISIASLD

SEQ ID NO: 107755 - protein, 26 aa, Artificial Sequence
  Cyclic GFR-binding peptide
EVVMDQYNKLVVKENEDLYLMSIASL

SEQ ID NO: 107756 - protein, 27 aa, Artificial Sequence
  Cyclic GFR-binding peptide
  MOD_RES (2)..(2): Xaa is C or S
GXEEVIMQYNKLLLVRGNDLYLMSIAS

SEQ ID NO: 107757 - protein, 36 aa, Artificial Sequence; identical to SEQ ID NO: 4946
  Cyclic GFR-binding peptide
  MOD_RES (2)..(33)..(34): Xaa is C or S

SEQ ID NO: 107758 - protein, 25 aa, Artificial Sequence
  Cyclic GFR-binding peptide
VMERYKKLVVKDYEDFYLMSIANLE

SEQ ID NO: 107759 - protein, 32 aa, Artificial Sequence; identical to SEQ ID NO: 4949
  Cyclic GFR-binding peptide

SEQ ID NO: 107760 - protein, 35 aa, Artificial Sequence; identical to SEQ ID NO: 4955
  Cyclic GFR-binding peptide
  MOD_RES (1)..(3)..(35): Xaa is C or S

SEQ ID NO: 107761 - protein, 28 aa, Artificial Sequence
  Cyclic GFR-binding peptide
EVVMEQYNKLVVKDYEDLYLMSIASLET

SEQ ID NO: 107762 - protein, 35 aa, Artificial Sequence; identical to SEQ ID NO: 4959
  Cyclic GFR-binding peptide
  MOD_RES (1)..(32)..(33): Xaa is C or S

SEQ ID NO: 107763 - protein, 34 aa, Artificial Sequence; identical to SEQ ID NO: 33272
  Cyclic GFR-binding peptide
  MOD_RES (2)..(34): Xaa is C or S

SEQ ID NO: 107764 - protein, 26 aa, Artificial Sequence
  Cyclic GFR-binding peptide
VVMDRYKKLVVNNAADFYLISIANLR

SEQ ID NO: 107765 - protein, 33 aa, Artificial Sequence; identical to SEQ ID NO: 4964
  Cyclic GFR-binding peptide
  MOD_RES (28)..(29): Xaa is C or S

SEQ ID NO: 107766 - protein, 36 aa, Artificial Sequence; identical to SEQ ID NO: 4966
  Cyclic GFR-binding peptide
  MOD_RES (33)..(34): Xaa is C or S

SEQ ID NO: 107767 - protein, 24 aa, Artificial Sequence
  Cyclic GFR-binding peptide
MQYNKLIKPTKGILYLISIASLDQ

SEQ ID NO: 107768 - protein, 33 aa, Artificial Sequence; identical to SEQ ID NO: 4968
  Cyclic GFR-binding peptide
  MOD_RES (30)..(31): Xaa is C or S

SEQ ID NO: 107769 - protein, 31 aa, Artificial Sequence; identical to SEQ ID NO: 4969
  Cyclic GFR-binding peptide
  MOD_RES (1)..(1): Xaa is C or S

SEQ ID NO: 107770 - protein, 26 aa, Artificial Sequence
  Cyclic GFR-binding peptide
  MOD_RES (26)..(26): Xaa is C or S
RYKKLIKPTKGIFYLISIANLDQSVX

SEQ ID NO: 107771 - protein, 26 aa, Artificial Sequence
  Cyclic GFR-binding peptide
  MOD_RES (26)..(26): Xaa is C or S
QYNKLTPVGMDDLYLVSIASLKTPVX

SEQ ID NO: 107772 - protein, 32 aa, Artificial Sequence; identical to SEQ ID NO: 4977
  Cyclic GFR-binding peptide
  MOD_RES (28)..(29): Xaa is C or S

SEQ ID NO: 107773 - protein, 27 aa, Artificial Sequence
  Cyclic GFR-binding peptide
VIMRYKKLLLVRGNDFYLMSIANTKVP

SEQ ID NO: 107774 - protein, 36 aa, Artificial Sequence
  Cyclic GFR-binding peptide
  MOD_RES (2)..(4)..(36): Xaa is C or S
RXGXESVAMGQYNKLYTVVGKDLYLISIASLKTPVX

SEQ ID NO: 107775 - protein, 30 aa, Artificial Sequence; identical to SEQ ID NO: 4980
  Cyclic GFR-binding peptide
  MOD_RES (1)..(3): Xaa is C or S

SEQ ID NO: 107776 - protein, 34 aa, Artificial Sequence; identical to SEQ ID NO: 4985
  Cyclic GFR-binding peptide
  MOD_RES (1)..(3): Xaa is C or S

SEQ ID NO: 107777 - protein, 32 aa, Artificial Sequence; identical to SEQ ID NO: 4986
  Cyclic GFR-binding peptide
  MOD_RES (31)..(32): Xaa is C or S

SEQ ID NO: 107778 - protein, 40 aa, Artificial Sequence; identical to SEQ ID NO: 4988
  Cyclic GFR-binding peptide
  MOD_RES (1)..(3)..(35)..(36): Xaa is C or S

SEQ ID NO: 107779 - protein, 35 aa, Artificial Sequence; identical to SEQ ID NO: 4991
  Cyclic GFR-binding peptide
  MOD_RES (2)..(34)..(35): Xaa is C or S

SEQ ID NO: 107780 - protein, 40 aa, Artificial Sequence; identical to SEQ ID NO: 4992
  Cyclic GFR-binding peptide
  MOD_RES (2)..(4)..(35)..(36): Xaa is C or S

SEQ ID NO: 107781 - protein, 36 aa, Artificial Sequence; identical to SEQ ID NO: 33310
  Cyclic GFR-binding peptide
  MOD_RES (31)..(32): Xaa is C or S

SEQ ID NO: 107782 - protein, 27 aa, Artificial Sequence
  Cyclic GFR-binding peptide
  MOD_RES (26)..(27): Xaa is C or S
RYKKLVVKENEDFYLMSIANLETPVXX

SEQ ID NO: 107783 - protein, 37 aa, Artificial Sequence; identical to SEQ ID NO: 4995
  Cyclic GFR-binding peptide
  MOD_RES (31)..(32): Xaa is C or S

SEQ ID NO: 107784 - protein, 36 aa, Artificial Sequence; identical to SEQ ID NO: 4996
  Cyclic GFR-binding peptide
  MOD_RES (30)..(31): Xaa is C or S

SEQ ID NO: 107785 - protein, 41 aa, Artificial Sequence; identical to SEQ ID NO: 4997
  Cyclic GFR-binding peptide
  MOD_RES (2)..(4)..(35)..(36): Xaa is C or S

SEQ ID NO: 107786 - protein, 26 aa, Artificial Sequence
  Cyclic GFR-binding peptide
MGQYNKLYTVVGKDLYLISIASLKTP

SEQ ID NO: 107787 - protein, 35 aa, Artificial Sequence; identical to SEQ ID NO: 33320
  Cyclic GFR-binding peptide
  MOD_RES (2)..(34)..(35): Xaa is C or S

SEQ ID NO: 107788 - protein, 26 aa, Artificial Sequence
  Cyclic GFR-binding peptide
SKVVMRYKKLVKPTRGVFYLISIANL

SEQ ID NO: 107789 - protein, 37 aa, Artificial Sequence; identical to SEQ ID NO: 75950
  Cyclic GFR-binding peptide
  MOD_RES (2)..(4)..(36)..(37): Xaa is C or S

SEQ ID NO: 107790 - protein, 34 aa, Artificial Sequence
  Cyclic GFR-binding peptide
  MOD_RES (31)..(32): Xaa is C or S
EVTMNQYNKLVVNKNEDLYLISIASMKEPVXXPE

SEQ ID NO: 107791 - protein, 32 aa, Artificial Sequence
  Cyclic GFR-binding peptide
  MOD_RES (26)..(27): Xaa is C or S
QYNKLIIQQKDNLYLMSIASMKTPTXXPGASG

SEQ ID NO: 107792 - protein, 35 aa, Artificial Sequence; identical to SEQ ID NO: 5000
  Cyclic GFR-binding peptide
  MOD_RES (33)..(34): Xaa is C or S

SEQ ID NO: 107793 - protein, 37 aa, Artificial Sequence; identical to SEQ ID NO: 15481
  Cyclic GFR-binding peptide
  MOD_RES (1)..(3)..(35)..(36): Xaa is C or S

SEQ ID NO: 107794 - protein, 33 aa, Artificial Sequence; identical to SEQ ID NO: 33330
  Cyclic GFR-binding peptide
  MOD_RES (28)..(29): Xaa is C or S

SEQ ID NO: 107795 - protein, 27 aa, Artificial Sequence
  Cyclic GFR-binding peptide
VSMGERYKKLTPVGMDDFYLVSIANLK

SEQ ID NO: 107796 - protein, 36 aa, Artificial Sequence; identical to SEQ ID NO: 5005
  Cyclic GFR-binding peptide
  MOD_RES (1)..(32)..(33): Xaa is C or S

SEQ ID NO: 107797 - protein, 32 aa, Artificial Sequence; identical to SEQ ID NO: 5006
  Cyclic GFR-binding peptide
  MOD_RES (2)..(4): Xaa is C or S

SEQ ID NO: 107798 - protein, 36 aa, Artificial Sequence; identical to SEQ ID NO: 87111
  Cyclic GFR-binding peptide
  MOD_RES (1)..(3)..(35)..(36): Xaa is C or S

SEQ ID NO: 107799 - protein, 33 aa, Artificial Sequence; identical to SEQ ID NO: 81947
  Cyclic GFR-binding peptide
  MOD_RES (32)..(33): Xaa is C or S

SEQ ID NO: 107800 - protein, 33 aa, Artificial Sequence; identical to SEQ ID NO: 5011
  Cyclic GFR-binding peptide
  MOD_RES (2)..(4): Xaa is C or S

SEQ ID NO: 107801 - protein, 31 aa, Artificial Sequence; identical to SEQ ID NO: 5012
  Cyclic GFR-binding peptide
  MOD_RES (31)..(31): Xaa is C or S

SEQ ID NO: 107802 - protein, 29 aa, Artificial Sequence
  Cyclic GFR-binding peptide
  MOD_RES (26)..(27): Xaa is C or S
RYKKLIIQQKDNFYLMSIANMKTPTXXPG

SEQ ID NO: 107803 - protein, 30 aa, Artificial Sequence; identical to SEQ ID NO: 5013
  Cyclic GFR-binding peptide
  MOD_RES (29)..(30): Xaa is C or S

SEQ ID NO: 107804 - protein, 22 aa, Artificial Sequence
  Cyclic GFR-binding peptide
ERYKKLTPVGMDDFYLVSIANL

SEQ ID NO: 107805 - protein, 36 aa, Artificial Sequence; identical to SEQ ID NO: 33343
  Cyclic GFR-binding peptide
  MOD_RES (30)..(31): Xaa is C or S

SEQ ID NO: 107806 - protein, 25 aa, Artificial Sequence
  Cyclic GFR-binding peptide
RVVMNQYNKLIVNSSDDLYLVSIAS

SEQ ID NO: 107807 - protein, 30 aa, Artificial Sequence; identical to SEQ ID NO: 87130
  Cyclic GFR-binding peptide

SEQ ID NO: 107808 - protein, 35 aa, Artificial Sequence; identical to SEQ ID NO: 5021
  Cyclic GFR-binding peptide
  MOD_RES (2)..(4): Xaa is C or S

SEQ ID NO: 107809 - protein, 29 aa, Artificial Sequence
  Cyclic GFR-binding peptide
  MOD_RES (26)..(27): Xaa is C or S
RYKKLVVNKNEDFYLISIANMKEPVXXPE

SEQ ID NO: 107810 - protein, 34 aa, Artificial Sequence; identical to SEQ ID NO: 33351
  Cyclic GFR-binding peptide
  MOD_RES (32)..(33): Xaa is C or S

SEQ ID NO: 107811 - protein, 23 aa, Artificial Sequence
  Cyclic GFR-binding peptide
VMEQYNKLVVKDYEDLYLMSIAS

SEQ ID NO: 107812 - protein, 40 aa, Artificial Sequence; identical to SEQ ID NO: 5025
  Cyclic GFR-binding peptide
  MOD_RES (2)..(4)..(36): Xaa is C or S

SEQ ID NO: 107813 - protein, 33 aa, Artificial Sequence; identical to SEQ ID NO: 15502
  Cyclic GFR-binding peptide
  MOD_RES (2)..(2): Xaa is C or S

SEQ ID NO: 107814 - protein, 25 aa, Artificial Sequence
  Cyclic GFR-binding peptide
MNQYNKLIVNNSSDLYLVSIASLKT

SEQ ID NO: 107815 - protein, 39 aa, Artificial Sequence; identical to SEQ ID NO: 5030
  Cyclic GFR-binding peptide
  MOD_RES (2)..(4)..(37)..(38): Xaa is C or S

SEQ ID NO: 107816 - protein, 38 aa, Artificial Sequence; identical to SEQ ID NO: 5032
  Cyclic GFR-binding peptide
  MOD_RES (1)..(3)..(35)..(36): Xaa is C or S

SEQ ID NO: 107817 - protein, 21 aa, Artificial Sequence
  Cyclic GFR-binding peptide
NQYNKLIVNSSDDLYLVSIAS

SEQ ID NO: 107818 - protein, 37 aa, Artificial Sequence; identical to SEQ ID NO: 5034
  Cyclic GFR-binding peptide
  MOD_RES (1)..(34)..(35): Xaa is C or S

SEQ ID NO: 107819 - protein, 34 aa, Artificial Sequence; identical to SEQ ID NO: 5035
  Cyclic GFR-binding peptide
  MOD_RES (29)..(30): Xaa is C or S

SEQ ID NO: 107820 - protein, 40 aa, Artificial Sequence; identical to SEQ ID NO: 5037
  Cyclic GFR-binding peptide
  MOD_RES (1)..(3)..(35)..(36): Xaa is C or S

SEQ ID NO: 107821 - protein, 39 aa, Artificial Sequence; identical to SEQ ID NO: 5038
  Cyclic GFR-binding peptide
  MOD_RES (2)..(33)..(34): Xaa is C or S

SEQ ID NO: 107822 - protein, 35 aa, Artificial Sequence; identical to SEQ ID NO: 5039
  Cyclic GFR-binding peptide
  MOD_RES (29)..(29): Xaa is C or S

SEQ ID NO: 107823 - protein, 30 aa, Artificial Sequence; identical to SEQ ID NO: 5042
  Cyclic GFR-binding peptide
  MOD_RES (26)..(27): Xaa is C or S

SEQ ID NO: 107824 - protein, 35 aa, Artificial Sequence
  Cyclic GFR-binding peptide
  MOD_RES (2)..(4): Xaa is C or S
RXGXAEVVMDQYNKLVVNNAADLYLISIASLRAPV

SEQ ID NO: 107825 - protein, 27 aa, Artificial Sequence
  Cyclic GFR-binding peptide
SEVTMNQYNKLVVNKNEDLYLISIASM

SEQ ID NO: 107826 - protein, 27 aa, Artificial Sequence
  Cyclic GFR-binding peptide
VVMDRYKKLVVKENEDFYLMSIANLET

SEQ ID NO: 107827 - protein, 35 aa, Artificial Sequence; identical to SEQ ID NO: 5044
  Cyclic GFR-binding peptide
  MOD_RES (2)..(4)..(35): Xaa is C or S

SEQ ID NO: 107828 - protein, 32 aa, Artificial Sequence
  Cyclic GFR-binding peptide
  MOD_RES (2)..(4): Xaa is C or S
RXGXAEVVMDQYNKLVVNNAADLYLISIASLR

SEQ ID NO: 107829 - protein, 37 aa, Artificial Sequence
  Cyclic GFR-binding peptide
  MOD_RES (31)..(32): Xaa is C or S
RVVMNQYNKLIVNSSDDLYLVSIASLKTPAXXPKPVH

SEQ ID NO: 107830 - protein, 26 aa, Artificial Sequence
  Cyclic GFR-binding peptide
NQYNKLVVNKNEDLYLISIASMKEPV

SEQ ID NO: 107831 - protein, 31 aa, Artificial Sequence
  Cyclic GFR-binding peptide
  MOD_RES (26)..(27): Xaa is C or S
QYNKLIIQQKDNLYLMSIASMKTPTXXPGAS

SEQ ID NO: 107832 - protein, 28 aa, Artificial Sequence
  Cyclic GFR-binding peptide
  MOD_RES (2)..(2): Xaa is C or S
KXSRVIMQYNKLVKPKRGVLYLISIASL

SEQ ID NO: 107833 - protein, 33 aa, Artificial Sequence; identical to SEQ ID NO: 5049
  Cyclic GFR-binding peptide
  MOD_RES (32)..(32): Xaa is C or S

SEQ ID NO: 107834 - protein, 29 aa, Artificial Sequence
  Cyclic GFR-binding peptide
  MOD_RES (29)..(29): Xaa is C or S
VMDQYNKLVVNNASDLYLISIASLRTPVX

SEQ ID NO: 107835 - protein, 23 aa, Artificial Sequence
  Cyclic GFR-binding peptide
VMGRYKKLIIQQKDNFYLMSIAN

SEQ ID NO: 107836 - protein, 41 aa, Artificial Sequence; identical to SEQ ID NO: 81987
  Cyclic GFR-binding peptide
  MOD_RES (1)..(3)..(35)..(36): Xaa is C or S

SEQ ID NO: 107837 - protein, 31 aa, Artificial Sequence; identical to SEQ ID NO: 5051
  Cyclic GFR-binding peptide
  MOD_RES (2)..(4): Xaa is C or S

SEQ ID NO: 107838 - protein, 38 aa, Artificial Sequence; identical to SEQ ID NO: 5052
  Cyclic GFR-binding peptide
  MOD_RES (32)..(33): Xaa is C or S

SEQ ID NO: 107839 - protein, 33 aa, Artificial Sequence; identical to SEQ ID NO: 5057
  Cyclic GFR-binding peptide
  MOD_RES (1)..(3): Xaa is C or S

SEQ ID NO: 107840 - protein, 33 aa, Artificial Sequence; identical to SEQ ID NO: 33384
  Cyclic GFR-binding peptide
  MOD_RES (30)..(31): Xaa is C or S

SEQ ID NO: 107841 - protein, 36 aa, Artificial Sequence; identical to SEQ ID NO: 5058
  Cyclic GFR-binding peptide
  MOD_RES (30)..(31): Xaa is C or S

SEQ ID NO: 107842 - protein, 31 aa, Artificial Sequence; identical to SEQ ID NO: 75999
  Cyclic GFR-binding peptide
  MOD_RES (29)..(30): Xaa is C or S

SEQ ID NO: 107843 - protein, 26 aa, Artificial Sequence
  Cyclic GFR-binding peptide
DVVMGRYKKLIIQQKDNFYLMSIANM

SEQ ID NO: 107844 - protein, 34 aa, Artificial Sequence; identical to SEQ ID NO: 5063
  Cyclic GFR-binding peptide
  MOD_RES (29)..(30): Xaa is C or S

SEQ ID NO: 107845 - protein, 35 aa, Artificial Sequence; identical to SEQ ID NO: 5064
  Cyclic GFR-binding peptide
  MOD_RES (1)..(33)..(34): Xaa is C or S

SEQ ID NO: 107846 - protein, 30 aa, Artificial Sequence; identical to SEQ ID NO: 5067
  Cyclic GFR-binding peptide

SEQ ID NO: 107847 - protein, 42 aa, Artificial Sequence; identical to SEQ ID NO: 5070
  Cyclic GFR-binding peptide
  MOD_RES (2)..(4)..(36)..(37): Xaa is C or S

SEQ ID NO: 107848 - protein, 26 aa, Artificial Sequence
  Cyclic GFR-binding peptide
VVMNRYKKLIVNSSDDFYLVSIANLK

SEQ ID NO: 107849 - protein, 27 aa, Artificial Sequence
  Cyclic GFR-binding peptide
VMDRYKKLVVNNASDFYLISIANLRTP

SEQ ID NO: 107850 - protein, 35 aa, Artificial Sequence; identical to SEQ ID NO: 5073
  Cyclic GFR-binding peptide
  MOD_RES (1)..(3)..(35): Xaa is C or S

SEQ ID NO: 107851 - protein, 39 aa, Artificial Sequence; identical to SEQ ID NO: 5076
  Cyclic GFR-binding peptide
  MOD_RES (2)..(33)..(34): Xaa is C or S

SEQ ID NO: 107852 - protein, 27 aa, Artificial Sequence
  Cyclic GFR-binding peptide
EVVMDQYNKLVVKENEDLYLMSIASLE

SEQ ID NO: 107853 - protein, 29 aa, Artificial Sequence
  Cyclic GFR-binding peptide
  MOD_RES (1)..(1): Xaa is C or S
XGEVVMDQYNKLVVKENEDLYLMSIASLE

SEQ ID NO: 107854 - protein, 32 aa, Artificial Sequence; identical to SEQ ID NO: 5081
  Cyclic GFR-binding peptide
  MOD_RES (30)..(30): Xaa is C or S

SEQ ID NO: 107855 - protein, 28 aa, Artificial Sequence
  Cyclic GFR-binding peptide
RVVMNRYKKLIVNSSDDFYLVSIANLKT

SEQ ID NO: 107856 - protein, 34 aa, Artificial Sequence; identical to SEQ ID NO: 5084
  Cyclic GFR-binding peptide
  MOD_RES (1)..(3): Xaa is C or S

SEQ ID NO: 107857 - protein, 25 aa, Artificial Sequence
  Cyclic GFR-binding peptide
DRYKKLVVKENEDFYLMSIANLETP

SEQ ID NO: 107858 - protein, 29 aa, Artificial Sequence
  Cyclic GFR-binding peptide
  MOD_RES (27)..(28): Xaa is C or S
NQYNKLIVNSSDDLYLVSIASLQTPAXXP

SEQ ID NO: 107859 - protein, 20 aa, Artificial Sequence
  Cyclic GFR-binding peptide
RYKKLIKPTKGIFYLISIAN

SEQ ID NO: 107860 - protein, 36 aa, Artificial Sequence; identical to SEQ ID NO: 33413
  Cyclic GFR-binding peptide
  MOD_RES (1)..(33)..(34): Xaa is C or S

SEQ ID NO: 107861 - protein, 20 aa, Artificial Sequence
  Cyclic GFR-binding peptide
QYNKLVVNKNEDLYLISIAS

SEQ ID NO: 107862 - protein, 35 aa, Artificial Sequence; identical to SEQ ID NO: 5091
  Cyclic GFR-binding peptide
  MOD_RES (2)..(4): Xaa is C or S

SEQ ID NO: 107863 - protein, 34 aa, Artificial Sequence; identical to SEQ ID NO: 33418
  Cyclic GFR-binding peptide
  MOD_RES (28)..(29): Xaa is C or S

SEQ ID NO: 107864 - protein, 36 aa, Artificial Sequence; identical to SEQ ID NO: 5094
  Cyclic GFR-binding peptide
  MOD_RES (31)..(32): Xaa is C or S

SEQ ID NO: 107865 - protein, 22 aa, Artificial Sequence
  Cyclic GFR-binding peptide
MRYKKLIKPTKGIFYLISIANL

SEQ ID NO: 107866 - protein, 31 aa, Artificial Sequence
  Cyclic GFR-binding peptide
  MOD_RES (30)..(31): Xaa is C or S
VVMGQYNKLIIQQKDNLYLMSIASMKTPTXX

SEQ ID NO: 107867 - protein, 40 aa, Artificial Sequence
  Cyclic GFR-binding peptide
  MOD_RES (2)..(4)..(36)..(37): Xaa is C or S
RXGXAEVVMDQYNKLVVNNAADLYLISIASLRAPVXXSAP

SEQ ID NO: 107868 - protein, 40 aa, Artificial Sequence
  Cyclic GFR-binding peptide
  MOD_RES (2)..(34)..(35): Xaa is C or S
GXESVAMGQYNKLYTVVGKDLYLISIASLKTPVXXAKSAK

SEQ ID NO: 107869 - protein, 39 aa, Artificial Sequence; identical to SEQ ID NO: 5104
  Cyclic GFR-binding peptide
  MOD_RES (2)..(4)..(36)..(37): Xaa is C or S

SEQ ID NO: 107870 - protein, 38 aa, Artificial Sequence; identical to SEQ ID NO: 5105
  Cyclic GFR-binding peptide
  MOD_RES (1)..(33)..(34): Xaa is C or S

SEQ ID NO: 107871 - protein, 21 aa, Artificial Sequence
  Cyclic GFR-binding peptide
NRYKKLVVNKNEDFYLISIAN

SEQ ID NO: 107872 - protein, 23 aa, Artificial Sequence
  Cyclic GFR-binding peptide
VMRYKKLVKPTRGVFYLISIANL

SEQ ID NO: 107873 - protein, 22 aa, Artificial Sequence
  Cyclic GFR-binding peptide
QYNKLVVNNASDLYLISIASLR

SEQ ID NO: 107874 - protein, 32 aa, Artificial Sequence; identical to SEQ ID NO: 5109
  Cyclic GFR-binding peptide
  MOD_RES (2)..(2): Xaa is C or S

SEQ ID NO: 107875 - protein, 25 aa, Artificial Sequence
  Cyclic GFR-binding peptide
GEQYNKLTPVGMDDLYLVSIASLKT

SEQ ID NO: 107876 - protein, 32 aa, Artificial Sequence
  Cyclic GFR-binding peptide
  MOD_RES (2)..(2): Xaa is C or S
AXSEVTMNQYNKLVVNKNEDLYLISIASMKEP

SEQ ID NO: 107877 - protein, 27 aa, Artificial Sequence
  Cyclic GFR-binding peptide
  MOD_RES (27)..(27): Xaa is C or S
NQYNKLIVNNSSDLYLVSIASLKTPAX

SEQ ID NO: 107878 - protein, 31 aa, Artificial Sequence; identical to SEQ ID NO: 15590
  Cyclic GFR-binding peptide
  MOD_RES (1)..(1): Xaa is C or S

SEQ ID NO: 107879 - protein, 21 aa, Artificial Sequence
  Cyclic GFR-binding peptide
EQYNKLTPVGMDDLYLVSIAS

SEQ ID NO: 107880 - protein, 25 aa, Artificial Sequence
  Cyclic GFR-binding peptide
GRYKKLYTVVGKDFYLISIANLKTP

SEQ ID NO: 107881 - protein, 30 aa, Artificial Sequence; identical to SEQ ID NO: 15596
  Cyclic GFR-binding peptide

SEQ ID NO: 107882 - protein, 30 aa, Artificial Sequence; identical to SEQ ID NO: 33446
  Cyclic GFR-binding peptide
  MOD_RES (30)..(30): Xaa is C or S

SEQ ID NO: 107883 - protein, 22 aa, Artificial Sequence
  Cyclic GFR-binding peptide
NRYKKLIVNSSDDFYLVSIANL

SEQ ID NO: 107884 - protein, 30 aa, Artificial Sequence; identical to SEQ ID NO: 5123
  Cyclic GFR-binding peptide
  MOD_RES (1)..(3): Xaa is C or S

SEQ ID NO: 107885 - protein, 28 aa, Artificial Sequence
  Cyclic GFR-binding peptide
VVMQYNKLVKPTRGVLYLISIASLDQPV

SEQ ID NO: 107886 - protein, 27 aa, Artificial Sequence
  Cyclic GFR-binding peptide
VVMNRYKKLIVNNSSDFYLVSIANLKT

SEQ ID NO: 107887 - protein, 22 aa, Artificial Sequence
  Cyclic GFR-binding peptide
QYNKLIVNNSSDLYLVSIASLK

SEQ ID NO: 107888 - protein, 26 aa, Artificial Sequence
  Cyclic GFR-binding peptide
  MOD_RES (26)..(26): Xaa is C or S
QYNKLIVNNSSDLYLVSIASLKTPAX

SEQ ID NO: 107889 - protein, 32 aa, Artificial Sequence; identical to SEQ ID NO: 5132
  Cyclic GFR-binding peptide
  MOD_RES (2)..(4): Xaa is C or S

SEQ ID NO: 107890 - protein, 33 aa, Artificial Sequence; identical to SEQ ID NO: 5134
  Cyclic GFR-binding peptide
  MOD_RES (1)..(33): Xaa is C or S

SEQ ID NO: 107891 - protein, 25 aa, Artificial Sequence
  Cyclic GFR-binding peptide
IMQYNKLIKPTKGILYLISIASLDQ

SEQ ID NO: 107892 - protein, 28 aa, Artificial Sequence
  Cyclic GFR-binding peptide
VVMNQYNKLIVNSSDDLYLVSIASLQTP

SEQ ID NO: 107893 - protein, 27 aa, Artificial Sequence
  Cyclic GFR-binding peptide
VMNRYKKLIVNSSDDFYLVSIANLKTP

SEQ ID NO: 107894 - protein, 22 aa, Artificial Sequence
  Cyclic GFR-binding peptide
VMQYNKLVKPTRGVLYLISIAS

SEQ ID NO: 107895 - protein, 31 aa, Artificial Sequence; identical to SEQ ID NO: 5147
  Cyclic GFR-binding peptide
  MOD_RES (26)..(27): Xaa is C or S

SEQ ID NO: 107896 - protein, 32 aa, Artificial Sequence; identical to SEQ ID NO: 5149
  Cyclic GFR-binding peptide
  MOD_RES (27)..(28): Xaa is C or S

SEQ ID NO: 107897 - protein, 21 aa, Artificial Sequence
  Cyclic GFR-binding peptide
GQYNKLIIQQKDNLYLMSIAS

SEQ ID NO: 107898 - protein, 24 aa, Artificial Sequence
  Cyclic GFR-binding peptide
VVMDRYKKLVVNNASDFYLISIAN

SEQ ID NO: 107899 - protein, 21 aa, Artificial Sequence
  Cyclic GFR-binding peptide
DRYKKLVVNNASDFYLISIAN

SEQ ID NO: 107900 - protein, 30 aa, Artificial Sequence; identical to SEQ ID NO: 5153
  Cyclic GFR-binding peptide
  MOD_RES (27)..(28): Xaa is C or S

SEQ ID NO: 107901 - protein, 31 aa, Artificial Sequence; identical to SEQ ID NO: 5154
  Cyclic GFR-binding peptide
  MOD_RES (31)..(31): Xaa is C or S

SEQ ID NO: 107902 - protein, 26 aa, Artificial Sequence
  Cyclic GFR-binding peptide
  MOD_RES (26)..(26): Xaa is C or S
QYNKLYTVVGKDLYLISIASLKTPVX

SEQ ID NO: 107903 - protein, 34 aa, Artificial Sequence; identical to SEQ ID NO: 5155
  Cyclic GFR-binding peptide
  MOD_RES (30)..(31): Xaa is C or S

SEQ ID NO: 107904 - protein, 25 aa, Artificial Sequence
  Cyclic GFR-binding peptide
KVVMQYNKLVKPTRGVLYLISIASL

SEQ ID NO: 107905 - protein, 35 aa, Artificial Sequence; identical to SEQ ID NO: 5160
  Cyclic GFR-binding peptide
  MOD_RES (2)..(34)..(35): Xaa is C or S

SEQ ID NO: 107906 - protein, 38 aa, Artificial Sequence; identical to SEQ ID NO: 5161
  Cyclic GFR-binding peptide
  MOD_RES (1)..(3)..(35)..(36): Xaa is C or S

SEQ ID NO: 107907 - protein, 26 aa, Artificial Sequence
  Cyclic GFR-binding peptide
IMRYKKLIKPTKGIFYLISIANLDQS

SEQ ID NO: 107908 - protein, 29 aa, Artificial Sequence
  Cyclic GFR-binding peptide
  MOD_RES (29)..(29): Xaa is C or S
VVMRYKKLVKPTRGVFYLISIANLDQPVX

SEQ ID NO: 107909 - protein, 30 aa, Artificial Sequence
  Cyclic GFR-binding peptide
  MOD_RES (2)..(2): Xaa is C or S
AXSEVTMNQYNKLVVNKNEDLYLISIASMK

SEQ ID NO: 107910 - protein, 24 aa, Artificial Sequence
  Cyclic GFR-binding peptide
MDRYKKLVVNNAADFYLISIANLR

SEQ ID NO: 107911 - protein, 31 aa, Artificial Sequence; identical to SEQ ID NO: 15632
  Cyclic GFR-binding peptide

SEQ ID NO: 107912 - protein, 33 aa, Artificial Sequence; identical to SEQ ID NO: 5170
  Cyclic GFR-binding peptide
  MOD_RES (32)..(33): Xaa is C or S

SEQ ID NO: 107913 - protein, 32 aa, Artificial Sequence; identical to SEQ ID NO: 5171
  Cyclic GFR-binding peptide
  MOD_RES (31)..(32): Xaa is C or S

SEQ ID NO: 107914 - protein, 30 aa, Artificial Sequence; identical to SEQ ID NO: 5172
  Cyclic GFR-binding peptide
  MOD_RES (1)..(3): Xaa is C or S

SEQ ID NO: 107915 - protein, 34 aa, Artificial Sequence; identical to SEQ ID NO: 5177
  Cyclic GFR-binding peptide
  MOD_RES (1)..(3)..(34): Xaa is C or S

SEQ ID NO: 107916 - protein, 25 aa, Artificial Sequence
  Cyclic GFR-binding peptide
VVMQYNKLVKPTRGVLYLISIASLD

SEQ ID NO: 107917 - protein, 37 aa, Artificial Sequence; identical to SEQ ID NO: 5180
  Cyclic GFR-binding peptide
  MOD_RES (31)..(32): Xaa is C or S

SEQ ID NO: 107918 - protein, 27 aa, Artificial Sequence
  Cyclic GFR-binding peptide
MNRYKKLIVNNSSDFYLVSIANLKTPA

SEQ ID NO: 107919 - protein, 35 aa, Artificial Sequence
  Cyclic GFR-binding peptide
  MOD_RES (2)..(4): Xaa is C or S
RXAXSEVTMNQYNKLVVNKNEDLYLISIASMKEPV

SEQ ID NO: 107920 - protein, 34 aa, Artificial Sequence; identical to SEQ ID NO: 5186
  Cyclic GFR-binding peptide
  MOD_RES (1)..(3): Xaa is C or S

SEQ ID NO: 107921 - protein, 26 aa, Artificial Sequence
  Cyclic GFR-binding peptide
EVTMNRYKKLVVNKNEDFYLISIANM

SEQ ID NO: 107922 - protein, 32 aa, Artificial Sequence
  Cyclic GFR-binding peptide
  MOD_RES (32)..(32): Xaa is C or S
RDVVMGQYNKLIIQQKDNLYLMSIASMKTPTX

SEQ ID NO: 107923 - protein, 25 aa, Artificial Sequence
  Cyclic GFR-binding peptide
TMNRYKKLVVNKNEDFYLISIANMK

SEQ ID NO: 107924 - protein, 30 aa, Artificial Sequence
  Cyclic GFR-binding peptide
DVVMGQYNKLIIQQKDNLYLMSIASMKTPT

SEQ ID NO: 107925 - protein, 23 aa, Artificial Sequence
  Cyclic GFR-binding peptide
VIMQYNKLLLVRGNDLYLMSIAS

SEQ ID NO: 107926 - protein, 26 aa, Artificial Sequence
  Cyclic GFR-binding peptide
  MOD_RES (26)..(26): Xaa is C or S
QYNKLIVNSSDDLYLVSIASLQTPAX

SEQ ID NO: 107927 - protein, 29 aa, Artificial Sequence
  Cyclic GFR-binding peptide
  MOD_RES (2)..(2): Xaa is C or S
GXEEVIMRYKKLLLVRGNDFYLMSIANTK

SEQ ID NO: 107928 - protein, 33 aa, Artificial Sequence; identical to SEQ ID NO: 5195
  Cyclic GFR-binding peptide
  MOD_RES (31)..(32): Xaa is C or S

SEQ ID NO: 107929 - protein, 32 aa, Artificial Sequence
  Cyclic GFR-binding peptide
  MOD_RES (1)..(3): Xaa is C or S
XAXSEVTMNQYNKLVVNKNEDLYLISIASMKE

SEQ ID NO: 107930 - protein, 35 aa, Artificial Sequence; identical to SEQ ID NO: 5197
  Cyclic GFR-binding peptide
  MOD_RES (33)..(34): Xaa is C or S

SEQ ID NO: 107931 - protein, 35 aa, Artificial Sequence; identical to SEQ ID NO: 15666
  Cyclic GFR-binding peptide
  MOD_RES (29)..(30): Xaa is C or S

SEQ ID NO: 107932 - protein, 35 aa, Artificial Sequence; identical to SEQ ID NO: 5198
  Cyclic GFR-binding peptide
  MOD_RES (30)..(31): Xaa is C or S

SEQ ID NO: 107933 - protein, 33 aa, Artificial Sequence; identical to SEQ ID NO: 5199
  Cyclic GFR-binding peptide
  MOD_RES (1)..(33): Xaa is C or S

SEQ ID NO: 107934 - protein, 36 aa, Artificial Sequence; identical to SEQ ID NO: 5201
  Cyclic GFR-binding peptide
  MOD_RES (1)..(3)..(35): Xaa is C or S

SEQ ID NO: 107935 - protein, 33 aa, Artificial Sequence; identical to SEQ ID NO: 5202
  Cyclic GFR-binding peptide
  MOD_RES (1)..(3): Xaa is C or S

SEQ ID NO: 107936 - protein, 29 aa, Artificial Sequence
  Cyclic GFR-binding peptide
VVMNQYNKLIVNSSDDLYLVSIASLKTPA

SEQ ID NO: 107937 - protein, 26 aa, Artificial Sequence
  Cyclic GFR-binding peptide
VMERYKKLVVKDYEDFYLMSIANLET

SEQ ID NO: 107938 - protein, 28 aa, Artificial Sequence
  Cyclic GFR-binding peptide
  MOD_RES (28)..(28): Xaa is C or S
IMRYKKLLLVRGNDFYLMSIANTKVPAX

SEQ ID NO: 107939 - protein, 25 aa, Artificial Sequence
  Cyclic GFR-binding peptide
VVMNRYKKLIVNSSDDFYLVSIANL

SEQ ID NO: 107940 - protein, 37 aa, Artificial Sequence
  Cyclic GFR-binding peptide
  MOD_RES (31)..(32): Xaa is C or S
EVVMDQYNKLVVNNAADLYLISIASLRAPVXXSAPAA

SEQ ID NO: 107941 - protein, 35 aa, Artificial Sequence; identical to SEQ ID NO: 33526
  Cyclic GFR-binding peptide
  MOD_RES (31)..(32): Xaa is C or S

SEQ ID NO: 107942 - protein, 35 aa, Artificial Sequence; identical to SEQ ID NO: 33527
  Cyclic GFR-binding peptide
  MOD_RES (30)..(31): Xaa is C or S

SEQ ID NO: 107943 - protein, 33 aa, Artificial Sequence; identical to SEQ ID NO: 5207
  Cyclic GFR-binding peptide
  MOD_RES (27)..(28): Xaa is C or S

SEQ ID NO: 107944 - protein, 28 aa, Artificial Sequence
  Cyclic GFR-binding peptide
VMDRYKKLVVNNAADFYLISIANLRAPV

SEQ ID NO: 107945 - protein, 33 aa, Artificial Sequence
  Cyclic GFR-binding peptide
  MOD_RES (30)..(31): Xaa is C or S
VTMNQYNKLVVNKNEDLYLISIASMKEPVXXPE

SEQ ID NO: 107946 - protein, 24 aa, Artificial Sequence
  Cyclic GFR-binding peptide
DRYKKLVVKENEDFYLMSIANLET

SEQ ID NO: 107947 - protein, 41 aa, Artificial Sequence; identical to SEQ ID NO: 5213
  Cyclic GFR-binding peptide
  MOD_RES (2)..(4)..(36): Xaa is C or S

SEQ ID NO: 107948 - protein, 39 aa, Artificial Sequence; identical to SEQ ID NO: 5215
  Cyclic GFR-binding peptide
  MOD_RES (2)..(34)..(35): Xaa is C or S

SEQ ID NO: 107949 - protein, 36 aa, Artificial Sequence; identical to SEQ ID NO: 5217
  Cyclic GFR-binding peptide
  MOD_RES (30)..(31): Xaa is C or S

SEQ ID NO: 107950 - protein, 28 aa, Artificial Sequence
  Cyclic GFR-binding peptide
VMNQYNKLIVNSSDDLYLVSIASLKTPA

SEQ ID NO: 107951 - protein, 25 aa, Artificial Sequence
  Cyclic GFR-binding peptide
MGQYNKLIIQQKDNLYLMSIASMKT

SEQ ID NO: 107952 - protein, 40 aa, Artificial Sequence; identical to SEQ ID NO: 5222
  Cyclic GFR-binding peptide
  MOD_RES (2)..(4)..(35)..(36): Xaa is C or S

SEQ ID NO: 107953 - protein, 35 aa, Artificial Sequence; identical to SEQ ID NO: 5223
  Cyclic GFR-binding peptide
  MOD_RES (31)..(32): Xaa is C or S

SEQ ID NO: 107954 - protein, 32 aa, Artificial Sequence
  Cyclic GFR-binding peptide
  MOD_RES (31)..(32): Xaa is C or S
EVVMDQYNKLVVNNAADLYLISIASLRAPVXX

SEQ ID NO: 107955 - protein, 42 aa, Artificial Sequence; identical to SEQ ID NO: 15700
  Cyclic GFR-binding peptide
  MOD_RES (2)..(4)..(36)..(37): Xaa is C or S

SEQ ID NO: 107956 - protein, 31 aa, Artificial Sequence; identical to SEQ ID NO: 5226
  Cyclic GFR-binding peptide
  MOD_RES (26)..(26): Xaa is C or S

SEQ ID NO: 107957 - protein, 35 aa, Artificial Sequence; identical to SEQ ID NO: 76097
  Cyclic GFR-binding peptide
  MOD_RES (2)..(4): Xaa is C or S

SEQ ID NO: 107958 - protein, 36 aa, Artificial Sequence; identical to SEQ ID NO: 5228
  Cyclic GFR-binding peptide
  MOD_RES (31)..(32): Xaa is C or S

SEQ ID NO: 107959 - protein, 33 aa, Artificial Sequence; identical to SEQ ID NO: 33542
  Cyclic GFR-binding peptide
  MOD_RES (2)..(2): Xaa is C or S

SEQ ID NO: 107960 - protein, 29 aa, Artificial Sequence
  Cyclic GFR-binding peptide
EVVMDQYNKLVVNNAADLYLISIASLRAP

SEQ ID NO: 107961 - protein, 23 aa, Artificial Sequence
  Cyclic GFR-binding peptide
VMDQYNKLVVKENEDLYLMSIAS

SEQ ID NO: 107962 - protein, 39 aa, Artificial Sequence; identical to SEQ ID NO: 15711
  Cyclic GFR-binding peptide
  MOD_RES (2)..(34)..(35): Xaa is C or S

SEQ ID NO: 107963 - protein, 31 aa, Artificial Sequence
  Cyclic GFR-binding peptide
  MOD_RES (30)..(31): Xaa is C or S
VVMDQYNKLVVNNAADLYLISIASLRAPVXX

SEQ ID NO: 107964 - protein, 35 aa, Artificial Sequence
  Cyclic GFR-binding peptide
  MOD_RES (30)..(31): Xaa is C or S
VTMNQYNKLVVNKNEDLYLISIASMKEPVXXPEPI

SEQ ID NO: 107965 - protein, 22 aa, Artificial Sequence
  Cyclic GFR-binding peptide
MNQYNKLVVNKNEDLYLISIAS

SEQ ID NO: 107966 - protein, 30 aa, Artificial Sequence; identical to SEQ ID NO: 76107
  Cyclic GFR-binding peptide

SEQ ID NO: 107967 - protein, 22 aa, Artificial Sequence
  Cyclic GFR-binding peptide
DRYKKLVVKENEDFYLMSIANL

SEQ ID NO: 107968 - protein, 31 aa, Artificial Sequence; identical to SEQ ID NO: 33554
  Cyclic GFR-binding peptide
  MOD_RES (28)..(29): Xaa is C or S

SEQ ID NO: 107969 - protein, 33 aa, Artificial Sequence; identical to SEQ ID NO: 76110
  Cyclic GFR-binding peptide
  MOD_RES (27)..(28): Xaa is C or S

SEQ ID NO: 107970 - protein, 29 aa, Artificial Sequence
  Cyclic GFR-binding peptide
  MOD_RES (29)..(29): Xaa is C or S
VMGRYKKLIIQQKDNFYLMSIANMKTPTX

SEQ ID NO: 107971 - protein, 31 aa, Artificial Sequence; identical to SEQ ID NO: 5244
  Cyclic GFR-binding peptide
  MOD_RES (30)..(31): Xaa is C or S

SEQ ID NO: 107972 - protein, 29 aa, Artificial Sequence
  Cyclic GFR-binding peptide
  MOD_RES (27)..(28): Xaa is C or S
GQYNKLIIQQKDNLYLMSIASMKTPTXXP

SEQ ID NO: 107973 - protein, 31 aa, Artificial Sequence
  Cyclic GFR-binding peptide
  MOD_RES (26)..(27): Xaa is C or S
QYNKLVVNNAADLYLISIASLRAPVXXSAPA

SEQ ID NO: 107974 - protein, 36 aa, Artificial Sequence; identical to SEQ ID NO: 5245
  Cyclic GFR-binding peptide
  MOD_RES (1)..(33)..(34): Xaa is C or S

SEQ ID NO: 107975 - protein, 32 aa, Artificial Sequence; identical to SEQ ID NO: 5247
  Cyclic GFR-binding peptide
  MOD_RES (28)..(29): Xaa is C or S

SEQ ID NO: 107976 - protein, 37 aa, Artificial Sequence
  Cyclic GFR-binding peptide
  MOD_RES (2)..(4)..(36)..(37): Xaa is C or S
RXAXSEVTMNQYNKLVVNKNEDLYLISIASMKEPVXX

SEQ ID NO: 107977 - protein, 37 aa, Artificial Sequence; identical to SEQ ID NO: 5250
  Cyclic GFR-binding peptide
  MOD_RES (2)..(4)..(36)..(37): Xaa is C or S

SEQ ID NO: 107978 - protein, 29 aa, Artificial Sequence
  Cyclic GFR-binding peptide
EVVMDRYKKLVVKENEDFYLMSIANLETP

SEQ ID NO: 107979 - protein, 30 aa, Artificial Sequence; identical to SEQ ID NO: 33564
  Cyclic GFR-binding peptide
  MOD_RES (1)..(3): Xaa is C or S

SEQ ID NO: 107980 - protein, 33 aa, Artificial Sequence; identical to SEQ ID NO: 5252
  Cyclic GFR-binding peptide
  MOD_RES (28)..(29): Xaa is C or S

SEQ ID NO: 107981 - protein, 32 aa, Artificial Sequence; identical to SEQ ID NO: 33567
  Cyclic GFR-binding peptide
  MOD_RES (28)..(29): Xaa is C or S

SEQ ID NO: 107982 - protein, 31 aa, Artificial Sequence; identical to SEQ ID NO: 5254
  Cyclic GFR-binding peptide
  MOD_RES (31)..(31): Xaa is C or S

SEQ ID NO: 107983 - protein, 28 aa, Artificial Sequence
  Cyclic GFR-binding peptide
  MOD_RES (1)..(1): Xaa is C or S
XSKVVMRYKKLVKPTRGVFYLISIANLD

SEQ ID NO: 107984 - protein, 41 aa, Artificial Sequence; identical to SEQ ID NO: 5257
  Cyclic GFR-binding peptide
  MOD_RES (1)..(3)..(35)..(36): Xaa is C or S

SEQ ID NO: 107985 - protein, 38 aa, Artificial Sequence
  Cyclic GFR-binding peptide
  MOD_RES (32)..(33): Xaa is C or S
AEVVMDQYNKLVVNNAADLYLISIASLRAPVXXSAPAA

SEQ ID NO: 107986 - protein, 31 aa, Artificial Sequence
  Cyclic GFR-binding peptide
  MOD_RES (2)..(4): Xaa is C or S
SXGXRDVVMGQYNKLIIQQKDNLYLMSIASM

SEQ ID NO: 107987 - protein, 31 aa, Artificial Sequence; identical to SEQ ID NO: 5261
  Cyclic GFR-binding peptide
  MOD_RES (1)..(3): Xaa is C or S

SEQ ID NO: 107988 - protein, 33 aa, Artificial Sequence; identical to SEQ ID NO: 5262
  Cyclic GFR-binding peptide
  MOD_RES (2)..(4): Xaa is C or S

SEQ ID NO: 107989 - protein, 31 aa, Artificial Sequence; identical to SEQ ID NO: 5263
  Cyclic GFR-binding peptide
  MOD_RES (26)..(27): Xaa is C or S

SEQ ID NO: 107990 - protein, 32 aa, Artificial Sequence; identical to SEQ ID NO: 5267
  Cyclic GFR-binding peptide
  MOD_RES (26)..(27): Xaa is C or S

SEQ ID NO: 107991 - protein, 31 aa, Artificial Sequence
  Cyclic GFR-binding peptide
  MOD_RES (31)..(31): Xaa is C or S
EEVIMQYNKLLLVRGNDLYLMSIASTKVPAX

SEQ ID NO: 107992 - protein, 33 aa, Artificial Sequence; identical to SEQ ID NO: 5268
  Cyclic GFR-binding peptide
  MOD_RES (30)..(31): Xaa is C or S

SEQ ID NO: 107993 - protein, 24 aa, Artificial Sequence
  Cyclic GFR-binding peptide
MNRYKKLIVNNSSDFYLVSIANLK

SEQ ID NO: 107994 - protein, 28 aa, Artificial Sequence
  Cyclic GFR-binding peptide
VVMERYKKLVVKDYEDFYLMSIANLETP

SEQ ID NO: 107995 - protein, 38 aa, Artificial Sequence; identical to SEQ ID NO: 5272
  Cyclic GFR-binding peptide
  MOD_RES (1)..(33)..(34): Xaa is C or S

SEQ ID NO: 107996 - protein, 32 aa, Artificial Sequence
  Cyclic GFR-binding peptide
  MOD_RES (27)..(28): Xaa is C or S
GQYNKLYTVVGKDLYLISIASLKTPVXXAKSA

SEQ ID NO: 107997 - protein, 29 aa, Artificial Sequence
  Cyclic GFR-binding peptide
  MOD_RES (2)..(2): Xaa is C or S
GXGEVVMERYKKLVVKDYEDFYLMSIANL

SEQ ID NO: 107998 - protein, 30 aa, Artificial Sequence; identical to SEQ ID NO: 5275
  Cyclic GFR-binding peptide
  MOD_RES (26)..(27): Xaa is C or S

SEQ ID NO: 107999 - protein, 24 aa, Artificial Sequence
  Cyclic GFR-binding peptide
MEQYNKLVVKDYEDLYLMSIASLE

SEQ ID NO: 108000 - protein, 22 aa, Artificial Sequence
  Cyclic GFR-binding peptide
DQYNKLVVNNASDLYLISIASL

SEQ ID NO: 108001 - protein, 31 aa, Artificial Sequence
  Cyclic GFR-binding peptide
ESVAMGQYNKLYTVVGKDLYLISIASLKTPV

SEQ ID NO: 108002 - protein, 32 aa, Artificial Sequence; identical to SEQ ID NO: 5282
  Cyclic GFR-binding peptide
  MOD_RES (31)..(32): Xaa is C or S

SEQ ID NO: 108003 - protein, 33 aa, Artificial Sequence; identical to SEQ ID NO: 5285
  Cyclic GFR-binding peptide
  MOD_RES (31)..(32): Xaa is C or S

SEQ ID NO: 108004 - protein, 35 aa, Artificial Sequence; identical to SEQ ID NO: 5286
  Cyclic GFR-binding peptide
  MOD_RES (30)..(31): Xaa is C or S

SEQ ID NO: 108005 - protein, 24 aa, Artificial Sequence
  Cyclic GFR-binding peptide
QYNKLIKPTKGILYLISIASLDQS

SEQ ID NO: 108006 - protein, 32 aa, Artificial Sequence; identical to SEQ ID NO: 87364
  Cyclic GFR-binding peptide
  MOD_RES (1)..(1): Xaa is C or S

SEQ ID NO: 108007 - protein, 34 aa, Artificial Sequence; identical to SEQ ID NO: 5289
  Cyclic GFR-binding peptide
  MOD_RES (2)..(4): Xaa is C or S

SEQ ID NO: 108008 - protein, 30 aa, Artificial Sequence; identical to SEQ ID NO: 33595
  Cyclic GFR-binding peptide
  MOD_RES (1)..(3): Xaa is C or S

SEQ ID NO: 108009 - protein, 23 aa, Artificial Sequence
  Cyclic GFR-binding peptide
QYNKLIVNNSSDLYLVSIASLKT

SEQ ID NO: 108010 - protein, 34 aa, Artificial Sequence; identical to SEQ ID NO: 5295
  Cyclic GFR-binding peptide
  MOD_RES (2)..(34): Xaa is C or S

SEQ ID NO: 108011 - protein, 32 aa, Artificial Sequence; identical to SEQ ID NO: 5296
  Cyclic GFR-binding peptide
  MOD_RES (1)..(3): Xaa is C or S

SEQ ID NO: 108012 - protein, 32 aa, Artificial Sequence; identical to SEQ ID NO: 15761
  Cyclic GFR-binding peptide
  MOD_RES (2)..(4): Xaa is C or S

SEQ ID NO: 108013 - protein, 34 aa, Artificial Sequence; identical to SEQ ID NO: 5298
  Cyclic GFR-binding peptide
  MOD_RES (31)..(32): Xaa is C or S

SEQ ID NO: 108014 - protein, 36 aa, Artificial Sequence; identical to SEQ ID NO: 5299
  Cyclic GFR-binding peptide
  MOD_RES (32)..(33): Xaa is C or S

SEQ ID NO: 108015 - protein, 24 aa, Artificial Sequence
  Cyclic GFR-binding peptide
GRYKKLYTVVGKDFYLISIANLKT

SEQ ID NO: 108016 - protein, 31 aa, Artificial Sequence; identical to SEQ ID NO: 5300
  Cyclic GFR-binding peptide
  MOD_RES (1)..(1): Xaa is C or S

SEQ ID NO: 108017 - protein, 24 aa, Artificial Sequence
  Cyclic GFR-binding peptide
NQYNKLIVNSSDDLYLVSIASLKT

SEQ ID NO: 108018 - protein, 41 aa, Artificial Sequence; identical to SEQ ID NO: 5303
  Cyclic GFR-binding peptide
  MOD_RES (2)..(4)..(37)..(38): Xaa is C or S

SEQ ID NO: 108019 - protein, 29 aa, Artificial Sequence
  Cyclic GFR-binding peptide
  MOD_RES (27)..(28): Xaa is C or S
MRYKKLVKPKRGVFYLISIANLAQPVXXP

SEQ ID NO: 108020 - protein, 33 aa, Artificial Sequence; identical to SEQ ID NO: 82224
  Cyclic GFR-binding peptide
  MOD_RES (2)..(4): Xaa is C or S

SEQ ID NO: 108021 - protein, 28 aa, Artificial Sequence
  Cyclic GFR-binding peptide
RVIMQYNKLVKPKRGVLYLISIASLAQP

SEQ ID NO: 108022 - protein, 25 aa, Artificial Sequence
  Cyclic GFR-binding peptide
QYNKLVVKENEDLYLMSIASLETPV

SEQ ID NO: 108023 - protein, 27 aa, Artificial Sequence
  Cyclic GFR-binding peptide
  MOD_RES (27)..(27): Xaa is C or S
GQYNKLIIQQKDNLYLMSIASMKTPTX

SEQ ID NO: 108024 - protein, 38 aa, Artificial Sequence; identical to SEQ ID NO: 76150
  Cyclic GFR-binding peptide
  MOD_RES (2)..(4)..(35)..(36): Xaa is C or S

SEQ ID NO: 108025 - protein, 28 aa, Artificial Sequence
  Cyclic GFR-binding peptide
  MOD_RES (27)..(28): Xaa is C or S
MQYNKLIKPTKGILYLISIASLDQSVXX

SEQ ID NO: 108026 - protein, 21 aa, Artificial Sequence
  Cyclic GFR-binding peptide
QYNKLVVNKNEDLYLISIASM

SEQ ID NO: 108027 - protein, 33 aa, Artificial Sequence
  Cyclic GFR-binding peptide
  MOD_RES (28)..(29): Xaa is C or S
MGQYNKLIIQQKDNLYLMSIASMKTPTXXPGAS

SEQ ID NO: 108028 - protein, 32 aa, Artificial Sequence
  Cyclic GFR-binding peptide
  MOD_RES (1)..(3): Xaa is C or S
XGXESVAMGQYNKLYTVVGKDLYLISIASLKT

SEQ ID NO: 108029 - protein, 26 aa, Artificial Sequence
  Cyclic GFR-binding peptide
VVMNQYNKLIVNSSDDLYLVSIASLQ

SEQ ID NO: 108030 - protein, 27 aa, Artificial Sequence
  Cyclic GFR-binding peptide
VIMRYKKLIKPTKGIFYLISIANLDQS

SEQ ID NO: 108031 - protein, 25 aa, Artificial Sequence
  Cyclic GFR-binding peptide
SKVIMRYKKLIKPTKGIFYLISIAN

SEQ ID NO: 108032 - protein, 35 aa, Artificial Sequence; identical to SEQ ID NO: 5316
  Cyclic GFR-binding peptide
  MOD_RES (30)..(31): Xaa is C or S

SEQ ID NO: 108033 - protein, 37 aa, Artificial Sequence; identical to SEQ ID NO: 5318
  Cyclic GFR-binding peptide
  MOD_RES (2)..(33)..(34): Xaa is C or S

SEQ ID NO: 108034 - protein, 38 aa, Artificial Sequence; identical to SEQ ID NO: 5323
  Cyclic GFR-binding peptide
  MOD_RES (1)..(33)..(34): Xaa is C or S

SEQ ID NO: 108035 - protein, 28 aa, Artificial Sequence
  Cyclic GFR-binding peptide
SKVVMQYNKLVKPTRGVLYLISIASLDQ

SEQ ID NO: 108036 - protein, 31 aa, Artificial Sequence; identical to SEQ ID NO: 5326
  Cyclic GFR-binding peptide
  MOD_RES (2)..(2): Xaa is C or S

SEQ ID NO: 108037 - protein, 38 aa, Artificial Sequence; identical to SEQ ID NO: 5327
  Cyclic GFR-binding peptide
  MOD_RES (2)..(4)..(37)..(38): Xaa is C or S

SEQ ID NO: 108038 - protein, 31 aa, Artificial Sequence; identical to SEQ ID NO: 15795
  Cyclic GFR-binding peptide
  MOD_RES (29)..(30): Xaa is C or S

SEQ ID NO: 108039 - protein, 27 aa, Artificial Sequence
  Cyclic GFR-binding peptide
  MOD_RES (27)..(27): Xaa is C or S
EQYNKLVVKDYEDLYLMSIASLETPVX

SEQ ID NO: 108040 - protein, 26 aa, Artificial Sequence
  Cyclic GFR-binding peptide
GEVVMDQYNKLVVKENEDLYLMSIAS

SEQ ID NO: 108041 - protein, 30 aa, Artificial Sequence
  Cyclic GFR-binding peptide
  MOD_RES (26)..(27): Xaa is C or S
QYNKLLLVRGNDLYLMSIASTKVPAXXTSP

SEQ ID NO: 108042 - protein, 33 aa, Artificial Sequence; identical to SEQ ID NO: 33641
  Cyclic GFR-binding peptide
  MOD_RES (29)..(30): Xaa is C or S

SEQ ID NO: 108043 - protein, 38 aa, Artificial Sequence; identical to SEQ ID NO: 33644
  Cyclic GFR-binding peptide
  MOD_RES (1)..(33)..(34): Xaa is C or S

SEQ ID NO: 108044 - protein, 32 aa, Artificial Sequence; identical to SEQ ID NO: 5341
  Cyclic GFR-binding peptide
  MOD_RES (31)..(32): Xaa is C or S

SEQ ID NO: 108045 - protein, 25 aa, Artificial Sequence
  Cyclic GFR-binding peptide
MQYNKLLLVRGNDLYLMSIASTKVP

SEQ ID NO: 108046 - protein, 32 aa, Artificial Sequence; identical to SEQ ID NO: 5345
  Cyclic GFR-binding peptide
  MOD_RES (1)..(3): Xaa is C or S

SEQ ID NO: 108047 - protein, 23 aa, Artificial Sequence
  Cyclic GFR-binding peptide
MDQYNKLVVNNAADLYLISIASL

SEQ ID NO: 108048 - protein, 34 aa, Artificial Sequence; identical to SEQ ID NO: 33658
  Cyclic GFR-binding peptide
  MOD_RES (1)..(3): Xaa is C or S

SEQ ID NO: 108049 - protein, 31 aa, Artificial Sequence; identical to SEQ ID NO: 5355
  Cyclic GFR-binding peptide
  MOD_RES (30)..(31): Xaa is C or S

SEQ ID NO: 108050 - protein, 33 aa, Artificial Sequence; identical to SEQ ID NO: 5356
  Cyclic GFR-binding peptide
  MOD_RES (29)..(30): Xaa is C or S

SEQ ID NO: 108051 - protein, 38 aa, Artificial Sequence
  Cyclic GFR-binding peptide
  MOD_RES (1)..(3)..(35)..(36): Xaa is C or S
XGXAEVVMDQYNKLVVNNAADLYLISIASLRAPVXXSA

SEQ ID NO: 108052 - protein, 31 aa, Artificial Sequence; identical to SEQ ID NO: 33664
  Cyclic GFR-binding peptide
  MOD_RES (29)..(30): Xaa is C or S

SEQ ID NO: 108053 - protein, 31 aa, Artificial Sequence; identical to SEQ ID NO: 5363
  Cyclic GFR-binding peptide
  MOD_RES (1)..(3): Xaa is C or S

SEQ ID NO: 108054 - protein, 30 aa, Artificial Sequence; identical to SEQ ID NO: 15821
  Cyclic GFR-binding peptide
  MOD_RES (1)..(1): Xaa is C or S

SEQ ID NO: 108055 - protein, 30 aa, Artificial Sequence
  Cyclic GFR-binding peptide
RDVVMGQYNKLIIQQKDNLYLMSIASMKTP

SEQ ID NO: 108056 - protein, 36 aa, Artificial Sequence; identical to SEQ ID NO: 33679
  Cyclic GFR-binding peptide
  MOD_RES (1)..(33)..(34): Xaa is C or S

SEQ ID NO: 108057 - protein, 31 aa, Artificial Sequence; identical to SEQ ID NO: 5377
  Cyclic GFR-binding peptide
  MOD_RES (29)..(30): Xaa is C or S

SEQ ID NO: 108058 - protein, 32 aa, Artificial Sequence
  Cyclic GFR-binding peptide
  MOD_RES (2)..(2): Xaa is C or S
GXEEVIMQYNKLLLVRGNDLYLMSIASTKVPA

SEQ ID NO: 108059 - protein, 29 aa, Artificial Sequence
  Cyclic GFR-binding peptide
  MOD_RES (28)..(29): Xaa is C or S
MNQYNKLIVNNSSDLYLVSIASLKTPAXX

SEQ ID NO: 108060 - protein, 30 aa, Artificial Sequence
  Cyclic GFR-binding peptide
  MOD_RES (1)..(3): Xaa is C or S
XGXAEVVMDQYNKLVVNNAADLYLISIASL

SEQ ID NO: 108061 - protein, 24 aa, Artificial Sequence
  Cyclic GFR-binding peptide
VVMGRYKKLIIQQKDNFYLMSIAN

SEQ ID NO: 108062 - protein, 31 aa, Artificial Sequence; identical to SEQ ID NO: 5381
  Cyclic GFR-binding peptide
  MOD_RES (1)..(1): Xaa is C or S

SEQ ID NO: 108063 - protein, 35 aa, Artificial Sequence; identical to SEQ ID NO: 5382
  Cyclic GFR-binding peptide
  MOD_RES (32)..(32): Xaa is C or S

SEQ ID NO: 108064 - protein, 32 aa, Artificial Sequence; identical to SEQ ID NO: 76182
  Cyclic GFR-binding peptide
  MOD_RES (31)..(32): Xaa is C or S

SEQ ID NO: 108065 - protein, 30 aa, Artificial Sequence
  Cyclic GFR-binding peptide
  MOD_RES (30)..(30): Xaa is C or S
VTMNQYNKLVVNKNEDLYLISIASMKEPVX

SEQ ID NO: 108066 - protein, 32 aa, Artificial Sequence
  Cyclic GFR-binding peptide
  MOD_RES (1)..(3): Xaa is C or S
XGXAEVVMDQYNKLVVNNAADLYLISIASLRA

SEQ ID NO: 108067 - protein, 35 aa, Artificial Sequence; identical to SEQ ID NO: 5385
  Cyclic GFR-binding peptide
  MOD_RES (31)..(32): Xaa is C or S

SEQ ID NO: 108068 - protein, 39 aa, Artificial Sequence; identical to SEQ ID NO: 76184
  Cyclic GFR-binding peptide
  MOD_RES (1)..(3)..(35)..(36): Xaa is C or S

SEQ ID NO: 108069 - protein, 31 aa, Artificial Sequence; identical to SEQ ID NO: 5387
  Cyclic GFR-binding peptide
  MOD_RES (28)..(29): Xaa is C or S

SEQ ID NO: 108070 - protein, 39 aa, Artificial Sequence; identical to SEQ ID NO: 5389
  Cyclic GFR-binding peptide
  MOD_RES (1)..(3)..(36)..(37): Xaa is C or S

SEQ ID NO: 108071 - protein, 33 aa, Artificial Sequence; identical to SEQ ID NO: 5390
  Cyclic GFR-binding peptide
  MOD_RES (2)..(2): Xaa is C or S

SEQ ID NO: 108072 - protein, 38 aa, Artificial Sequence
  Cyclic GFR-binding peptide
  MOD_RES (2)..(4)..(36)..(37): Xaa is C or S
RXGXAEVVMDQYNKLVVNNAADLYLISIASLRAPVXXS

SEQ ID NO: 108073 - protein, 21 aa, Artificial Sequence
  Cyclic GFR-binding peptide
QYNKLVKPKRGVLYLISIASL

SEQ ID NO: 108074 - protein, 32 aa, Artificial Sequence; identical to SEQ ID NO: 5393
  Cyclic GFR-binding peptide
  MOD_RES (31)..(32): Xaa is C or S

SEQ ID NO: 108075 - protein, 26 aa, Artificial Sequence
  Cyclic GFR-binding peptide
MRYKKLVKPKRGVFYLISIANLAQPV

SEQ ID NO: 108076 - protein, 23 aa, Artificial Sequence
  Cyclic GFR-binding peptide
QYNKLLLVRGNDLYLMSIASTKV

SEQ ID NO: 108077 - protein, 30 aa, Artificial Sequence; identical to SEQ ID NO: 15854
  Cyclic GFR-binding peptide
  MOD_RES (26)..(27): Xaa is C or S

SEQ ID NO: 108078 - protein, 22 aa, Artificial Sequence
  Cyclic GFR-binding peptide
EQYNKLVVKDYEDLYLMSIASL

SEQ ID NO: 108079 - protein, 34 aa, Artificial Sequence
  Cyclic GFR-binding peptide
  MOD_RES (2)..(4): Xaa is C or S
RXGXAEVVMDQYNKLVVNNAADLYLISIASLRAP

SEQ ID NO: 108080 - protein, 28 aa, Artificial Sequence
  Cyclic GFR-binding peptide
  MOD_RES (27)..(28): Xaa is C or S
GRYKKLYTVVGKDFYLISIANLKTPVXX

SEQ ID NO: 108081 - protein, 38 aa, Artificial Sequence; identical to SEQ ID NO: 15860
  Cyclic GFR-binding peptide
  MOD_RES (2)..(34)..(35): Xaa is C or S

SEQ ID NO: 108082 - protein, 26 aa, Artificial Sequence
  Cyclic GFR-binding peptide
ESVAMGRYKKLYTVVGKDFYLISIAN

SEQ ID NO: 108083 - protein, 26 aa, Artificial Sequence
  Cyclic GFR-binding peptide
RDVVMGQYNKLIIQQKDNLYLMSIAS

SEQ ID NO: 108084 - protein, 30 aa, Artificial Sequence; identical to SEQ ID NO: 5406
  Cyclic GFR-binding peptide
  MOD_RES (1)..(3): Xaa is C or S

SEQ ID NO: 108085 - protein, 33 aa, Artificial Sequence; identical to SEQ ID NO: 5409
  Cyclic GFR-binding peptide
  MOD_RES (27)..(28): Xaa is C or S

SEQ ID NO: 108086 - protein, 35 aa, Artificial Sequence; identical to SEQ ID NO: 5410
  Cyclic GFR-binding peptide
  MOD_RES (2)..(4): Xaa is C or S

SEQ ID NO: 108087 - protein, 35 aa, Artificial Sequence; identical to SEQ ID NO: 5411
  Cyclic GFR-binding peptide
  MOD_RES (30)..(30): Xaa is C or S

SEQ ID NO: 108088 - protein, 33 aa, Artificial Sequence; identical to SEQ ID NO: 5414
  Cyclic GFR-binding peptide
  MOD_RES (1)..(3): Xaa is C or S

SEQ ID NO: 108089 - protein, 30 aa, Artificial Sequence; identical to SEQ ID NO: 5416
  Cyclic GFR-binding peptide
  MOD_RES (2)..(4): Xaa is C or S

SEQ ID NO: 108090 - protein, 25 aa, Artificial Sequence
  Cyclic GFR-binding peptide
VIMRYKKLIKPTKGIFYLISIANLD

SEQ ID NO: 108091 - protein, 29 aa, Artificial Sequence
  Cyclic GFR-binding peptide
  MOD_RES (26)..(27): Xaa is C or S
QYNKLYTVVGKDLYLISIASLKTPVXXAK

SEQ ID NO: 108092 - protein, 34 aa, Artificial Sequence; identical to SEQ ID NO: 15878
  Cyclic GFR-binding peptide
  MOD_RES (31)..(32): Xaa is C or S

SEQ ID NO: 108093 - protein, 29 aa, Artificial Sequence
  Cyclic GFR-binding peptide
  MOD_RES (29)..(29): Xaa is C or S
VIMRYKKLIKPTKGIFYLISIANLDQSVX

SEQ ID NO: 108094 - protein, 26 aa, Artificial Sequence
  Cyclic GFR-binding peptide
VMRYKKLVKPTRGVFYLISIANLDQP

SEQ ID NO: 108095 - protein, 24 aa, Artificial Sequence
  Cyclic GFR-binding peptide
EQYNKLVVKDYEDLYLMSIASLET

SEQ ID NO: 108096 - protein, 35 aa, Artificial Sequence
  Cyclic GFR-binding peptide
  MOD_RES (1)..(33)..(34): Xaa is C or S
XSEVTMNQYNKLVVNKNEDLYLISIASMKEPVXXP

SEQ ID NO: 108097 - protein, 28 aa, Artificial Sequence
  Cyclic GFR-binding peptide
  MOD_RES (26)..(27): Xaa is C or S
RYKKLIVNNSSDFYLVSIANLKTPAXXA

SEQ ID NO: 108098 - protein, 29 aa, Artificial Sequence
  Cyclic GFR-binding peptide
  MOD_RES (26)..(26): Xaa is C or S
QYNKLIVNSSDDLYLVSIASLKTPAXTPK

SEQ ID NO: 108099 - protein, 31 aa, Artificial Sequence; identical to SEQ ID NO: 5428
  Cyclic GFR-binding peptide

SEQ ID NO: 108100 - protein, 23 aa, Artificial Sequence
  Cyclic GFR-binding peptide
NQYNKLIVNNSSDLYLVSIASLK

SEQ ID NO: 108101 - protein, 29 aa, Artificial Sequence
  Cyclic GFR-binding peptide
  MOD_RES (29)..(29): Xaa is C or S
VMNRYKKLIVNSSDDFYLVSIANLKTPAX

SEQ ID NO: 108102 - protein, 32 aa, Artificial Sequence; identical to SEQ ID NO: 15895
  Cyclic GFR-binding peptide
  MOD_RES (2)..(2): Xaa is C or S

SEQ ID NO: 108103 - protein, 28 aa, Artificial Sequence
  Cyclic GFR-binding peptide
  MOD_RES (26)..(27): Xaa is C or S
RYKKLVKPTRGVFYLISIANLDQPVXXP

SEQ ID NO: 108104 - protein, 34 aa, Artificial Sequence; identical to SEQ ID NO: 5435
  Cyclic GFR-binding peptide
  MOD_RES (2)..(4): Xaa is C or S

SEQ ID NO: 108105 - protein, 36 aa, Artificial Sequence; identical to SEQ ID NO: 33752
  Cyclic GFR-binding peptide
  MOD_RES (32)..(33): Xaa is C or S

SEQ ID NO: 108106 - protein, 32 aa, Artificial Sequence; identical to SEQ ID NO: 33756
  Cyclic GFR-binding peptide
  MOD_RES (32)..(32): Xaa is C or S

SEQ ID NO: 108107 - protein, 27 aa, Artificial Sequence
  Cyclic GFR-binding peptide
KVVMQYNKLVKPTRGVLYLISIASLDQ

SEQ ID NO: 108108 - protein, 26 aa, Artificial Sequence
  Cyclic GFR-binding peptide
VMDQYNKLVVNNAADLYLISIASLRA

SEQ ID NO: 108109 - protein, 30 aa, Artificial Sequence; identical to SEQ ID NO: 5443
  Cyclic GFR-binding peptide
  MOD_RES (1)..(3): Xaa is C or S

SEQ ID NO: 108110 - protein, 25 aa, Artificial Sequence
  Cyclic GFR-binding peptide
SVAMGRYKKLYTVVGKDFYLISIAN

SEQ ID NO: 108111 - protein, 36 aa, Artificial Sequence; identical to SEQ ID NO: 5450
  Cyclic GFR-binding peptide
  MOD_RES (31)..(32): Xaa is C or S

SEQ ID NO: 108112 - protein, 27 aa, Artificial Sequence
  Cyclic GFR-binding peptide
MGERYKKLTPVGMDDFYLVSIANLKTP

SEQ ID NO: 108113 - protein, 33 aa, Artificial Sequence; identical to SEQ ID NO: 5452
  Cyclic GFR-binding peptide
  MOD_RES (29)..(30): Xaa is C or S

SEQ ID NO: 108114 - protein, 37 aa, Artificial Sequence; identical to SEQ ID NO: 76220
  Cyclic GFR-binding peptide
  MOD_RES (2)..(4)..(35)..(36): Xaa is C or S

SEQ ID NO: 108115 - protein, 26 aa, Artificial Sequence
  Cyclic GFR-binding peptide
SKVIMRYKKLIKPTKGIFYLISIANL

SEQ ID NO: 108116 - protein, 29 aa, Artificial Sequence
  Cyclic GFR-binding peptide
  MOD_RES (1)..(3): Xaa is C or S
XAXSEVTMNRYKKLVVNKNEDFYLISIAN

SEQ ID NO: 108117 - protein, 32 aa, Artificial Sequence; identical to SEQ ID NO: 5458
  Cyclic GFR-binding peptide
  MOD_RES (2)..(4): Xaa is C or S

SEQ ID NO: 108118 - protein, 29 aa, Artificial Sequence
  Cyclic GFR-binding peptide
  MOD_RES (2)..(2): Xaa is C or S
GXRDVVMGQYNKLIIQQKDNLYLMSIASM

SEQ ID NO: 108119 - protein, 28 aa, Artificial Sequence
  Cyclic GFR-binding peptide
  MOD_RES (2)..(2): Xaa is C or S
GXGEVVMDQYNKLVVKENEDLYLMSIAS

SEQ ID NO: 108120 - protein, 34 aa, Artificial Sequence
  Cyclic GFR-binding peptide
  MOD_RES (31)..(32): Xaa is C or S
EEVIMQYNKLLLVRGNDLYLMSIASTKVPAXXTS

SEQ ID NO: 108121 - protein, 34 aa, Artificial Sequence; identical to SEQ ID NO: 5462
  Cyclic GFR-binding peptide
  MOD_RES (28)..(29): Xaa is C or S

SEQ ID NO: 108122 - protein, 35 aa, Artificial Sequence; identical to SEQ ID NO: 5468
  Cyclic GFR-binding peptide
  MOD_RES (2)..(33)..(34): Xaa is C or S

SEQ ID NO: 108123 - protein, 31 aa, Artificial Sequence; identical to SEQ ID NO: 5469
  Cyclic GFR-binding peptide
  MOD_RES (2)..(2): Xaa is C or S

SEQ ID NO: 108124 - protein, 24 aa, Artificial Sequence
  Cyclic GFR-binding peptide
MQYNKLLLVRGNDLYLMSIASTKV

SEQ ID NO: 108125 - protein, 37 aa, Artificial Sequence
  Cyclic GFR-binding peptide
  MOD_RES (31)..(32): Xaa is C or S
EEVIMQYNKLLLVRGNDLYLMSIASTKVPAXXTSPVR

SEQ ID NO: 108126 - protein, 26 aa, Artificial Sequence
  Cyclic GFR-binding peptide
SVAMGRYKKLYTVVGKDFYLISIANL

SEQ ID NO: 108127 - protein, 33 aa, Artificial Sequence; identical to SEQ ID NO: 33788
  Cyclic GFR-binding peptide
  MOD_RES (2)..(4): Xaa is C or S

SEQ ID NO: 108128 - protein, 24 aa, Artificial Sequence
  Cyclic GFR-binding peptide
EVIMRYKKLLLVRGNDFYLMSIAN

SEQ ID NO: 108129 - protein, 26 aa, Artificial Sequence
  Cyclic GFR-binding peptide
VMDRYKKLVVKENEDFYLMSIANLET

SEQ ID NO: 108130 - protein, 31 aa, Artificial Sequence; identical to SEQ ID NO: 5476
  Cyclic GFR-binding peptide
  MOD_RES (31)..(31): Xaa is C or S

SEQ ID NO: 108131 - protein, 27 aa, Artificial Sequence
  Cyclic GFR-binding peptide
VMNRYKKLIVNNSSDFYLVSIANLKTP

SEQ ID NO: 108132 - protein, 31 aa, Artificial Sequence; identical to SEQ ID NO: 5478
  Cyclic GFR-binding peptide

SEQ ID NO: 108133 - protein, 32 aa, Artificial Sequence; identical to SEQ ID NO: 5479
  Cyclic GFR-binding peptide
  MOD_RES (31)..(32): Xaa is C or S

SEQ ID NO: 108134 - protein, 37 aa, Artificial Sequence; identical to SEQ ID NO: 5481
  Cyclic GFR-binding peptide
  MOD_RES (33)..(34): Xaa is C or S

SEQ ID NO: 108135 - protein, 30 aa, Artificial Sequence; identical to SEQ ID NO: 5482
  Cyclic GFR-binding peptide
  MOD_RES (29)..(30): Xaa is C or S

SEQ ID NO: 108136 - protein, 34 aa, Artificial Sequence; identical to SEQ ID NO: 76240
  Cyclic GFR-binding peptide
  MOD_RES (2)..(34): Xaa is C or S

SEQ ID NO: 108137 - protein, 29 aa, Artificial Sequence
  Cyclic GFR-binding peptide
  MOD_RES (27)..(28): Xaa is C or S
MQYNKLLLVRGNDLYLMSIASTKVPAXXT

SEQ ID NO: 108138 - protein, 23 aa, Artificial Sequence
  Cyclic GFR-binding peptide
MGQYNKLYTVVGKDLYLISIASL

SEQ ID NO: 108139 - protein, 34 aa, Artificial Sequence; identical to SEQ ID NO: 5487
  Cyclic GFR-binding peptide
  MOD_RES (30)..(31): Xaa is C or S

SEQ ID NO: 108140 - protein, 21 aa, Artificial Sequence
  Cyclic GFR-binding peptide
MRYKKLLLVRGNDFYLMSIAN

SEQ ID NO: 108141 - protein, 31 aa, Artificial Sequence; identical to SEQ ID NO: 5491
  Cyclic GFR-binding peptide
  MOD_RES (27)..(28): Xaa is C or S

SEQ ID NO: 108142 - protein, 39 aa, Artificial Sequence
  Cyclic GFR-binding peptide
  MOD_RES (2)..(4)..(36)..(37): Xaa is C or S
SXGXRDVVMGQYNKLIIQQKDNLYLMSIASMKTPTXXPG

SEQ ID NO: 108143 - protein, 34 aa, Artificial Sequence; identical to SEQ ID NO: 5493
  Cyclic GFR-binding peptide
  MOD_RES (1)..(33)..(34): Xaa is C or S

SEQ ID NO: 108144 - protein, 34 aa, Artificial Sequence; identical to SEQ ID NO: 15945
  Cyclic GFR-binding peptide
  MOD_RES (2)..(34): Xaa is C or S

SEQ ID NO: 108145 - protein, 31 aa, Artificial Sequence; identical to SEQ ID NO: 33813
  Cyclic GFR-binding peptide
  MOD_RES (1)..(1): Xaa is C or S

SEQ ID NO: 108146 - protein, 28 aa, Artificial Sequence
  Cyclic GFR-binding peptide
RDVVMGRYKKLIIQQKDNFYLMSIANMK

SEQ ID NO: 108147 - protein, 33 aa, Artificial Sequence; identical to SEQ ID NO: 76249
  Cyclic GFR-binding peptide
  MOD_RES (30)..(31): Xaa is C or S

SEQ ID NO: 108148 - protein, 26 aa, Artificial Sequence
  Cyclic GFR-binding peptide
  MOD_RES (26)..(26): Xaa is C or S
RYKKLVVNNAADFYLISIANLRAPVX

SEQ ID NO: 108149 - protein, 34 aa, Artificial Sequence; identical to SEQ ID NO: 76251
  Cyclic GFR-binding peptide
  MOD_RES (2)..(33)..(34): Xaa is C or S

SEQ ID NO: 108150 - protein, 31 aa, Artificial Sequence
  Cyclic GFR-binding peptide
  MOD_RES (29)..(30): Xaa is C or S
TMNQYNKLVVNKNEDLYLISIASMKEPVXXP

SEQ ID NO: 108151 - protein, 24 aa, Artificial Sequence
  Cyclic GFR-binding peptide
QYNKLVVNNAADLYLISIASLRAP

SEQ ID NO: 108152 - protein, 23 aa, Artificial Sequence
  Cyclic GFR-binding peptide
QYNKLVKPKRGVLYLISIASLAQ

SEQ ID NO: 108153 - protein, 33 aa, Artificial Sequence; identical to SEQ ID NO: 76253
  Cyclic GFR-binding peptide
  MOD_RES (32)..(33): Xaa is C or S

SEQ ID NO: 108154 - protein, 33 aa, Artificial Sequence; identical to SEQ ID NO: 5509
  Cyclic GFR-binding peptide
  MOD_RES (28)..(29): Xaa is C or S

SEQ ID NO: 108155 - protein, 30 aa, Artificial Sequence; identical to SEQ ID NO: 33830
  Cyclic GFR-binding peptide
  MOD_RES (29)..(30): Xaa is C or S

SEQ ID NO: 108156 - protein, 29 aa, Artificial Sequence
  Cyclic GFR-binding peptide
  MOD_RES (28)..(29): Xaa is C or S
IMQYNKLVKPKRGVLYLISIASLAQPVXX

SEQ ID NO: 108157 - protein, 31 aa, Artificial Sequence; identical to SEQ ID NO: 5512
  Cyclic GFR-binding peptide
  MOD_RES (1)..(1): Xaa is C or S

SEQ ID NO: 108158 - protein, 38 aa, Artificial Sequence; identical to SEQ ID NO: 5513
  Cyclic GFR-binding peptide
  MOD_RES (2)..(33)..(34): Xaa is C or S

SEQ ID NO: 108159 - protein, 36 aa, Artificial Sequence; identical to SEQ ID NO: 76257
  Cyclic GFR-binding peptide
  MOD_RES (32)..(33): Xaa is C or S

SEQ ID NO: 108160 - protein, 29 aa, Artificial Sequence
  Cyclic GFR-binding peptide
  MOD_RES (27)..(28): Xaa is C or S
NQYNKLIVNNSSDLYLVSIASLKTPAXXA

SEQ ID NO: 108161 - protein, 25 aa, Artificial Sequence
  Cyclic GFR-binding peptide
SRVIMRYKKLVKPKRGVFYLISIAN

SEQ ID NO: 108162 - protein, 29 aa, Artificial Sequence
  Cyclic GFR-binding peptide
  MOD_RES (29)..(29): Xaa is C or S
MGEQYNKLTPVGMDDLYLVSIASLKTPVX

SEQ ID NO: 108163 - protein, 28 aa, Artificial Sequence
  Cyclic GFR-binding peptide
  MOD_RES (28)..(28): Xaa is C or S
MNQYNKLIVNNSSDLYLVSIASLKTPAX

SEQ ID NO: 108164 - protein, 28 aa, Artificial Sequence
  Cyclic GFR-binding peptide
  MOD_RES (27)..(27): Xaa is C or S
NQYNKLIVNSSDDLYLVSIASLKTPAXT

SEQ ID NO: 108165 - protein, 36 aa, Artificial Sequence; identical to SEQ ID NO: 5521
  Cyclic GFR-binding peptide
  MOD_RES (2)..(4)..(36): Xaa is C or S

SEQ ID NO: 108166 - protein, 31 aa, Artificial Sequence; identical to SEQ ID NO: 5522
  Cyclic GFR-binding peptide
  MOD_RES (1)..(3): Xaa is C or S

SEQ ID NO: 108167 - protein, 37 aa, Artificial Sequence; identical to SEQ ID NO: 5524
  Cyclic GFR-binding peptide
  MOD_RES (2)..(33)..(34): Xaa is C or S

SEQ ID NO: 108168 - protein, 25 aa, Artificial Sequence
  Cyclic GFR-binding peptide
KVVMNQYNKLIVNNSSDLYLVSIAS

SEQ ID NO: 108169 - protein, 34 aa, Artificial Sequence; identical to SEQ ID NO: 5526
  Cyclic GFR-binding peptide
  MOD_RES (31)..(32): Xaa is C or S

SEQ ID NO: 108170 - protein, 30 aa, Artificial Sequence; identical to SEQ ID NO: 5528
  Cyclic GFR-binding peptide
  MOD_RES (2)..(2): Xaa is C or S

SEQ ID NO: 108171 - protein, 40 aa, Artificial Sequence; identical to SEQ ID NO: 5531
  Cyclic GFR-binding peptide
  MOD_RES (2)..(4)..(36)..(37): Xaa is C or S

SEQ ID NO: 108172 - protein, 24 aa, Artificial Sequence
  Cyclic GFR-binding peptide
VMNQYNKLIVNNSSDLYLVSIASL

SEQ ID NO: 108173 - protein, 21 aa, Artificial Sequence
  Cyclic GFR-binding peptide
QYNKLLLVRGNDLYLMSIAST

SEQ ID NO: 108174 - protein, 33 aa, Artificial Sequence; identical to SEQ ID NO: 5536
  Cyclic GFR-binding peptide
  MOD_RES (30)..(31): Xaa is C or S

SEQ ID NO: 108175 - protein, 35 aa, Artificial Sequence; identical to SEQ ID NO: 15974
  Cyclic GFR-binding peptide
  MOD_RES (1)..(33)..(34): Xaa is C or S

SEQ ID NO: 108176 - protein, 26 aa, Artificial Sequence
  Cyclic GFR-binding peptide
VMNQYNKLIVNSSDDLYLVSIASLKT

SEQ ID NO: 108177 - protein, 29 aa, Artificial Sequence
  Cyclic GFR-binding peptide
  MOD_RES (26)..(26): Xaa is C or S
RYKKLIVNSSDDFYLVSIANLKTPAXTPK

SEQ ID NO: 108178 - protein, 41 aa, Artificial Sequence; identical to SEQ ID NO: 5546
  Cyclic GFR-binding peptide
  MOD_RES (2)..(4)..(35)..(36): Xaa is C or S

SEQ ID NO: 108179 - protein, 34 aa, Artificial Sequence
  Cyclic GFR-binding peptide
  MOD_RES (28)..(29): Xaa is C or S
MGQYNKLIIQQKDNLYLMSIASMKTPTXXPGASG

SEQ ID NO: 108180 - protein, 31 aa, Artificial Sequence; identical to SEQ ID NO: 5548
  Cyclic GFR-binding peptide
  MOD_RES (29)..(30): Xaa is C or S

SEQ ID NO: 108181 - protein, 33 aa, Artificial Sequence; identical to SEQ ID NO: 5549
  Cyclic GFR-binding peptide
  MOD_RES (30)..(30): Xaa is C or S

SEQ ID NO: 108182 - protein, 30 aa, Artificial Sequence; identical to SEQ ID NO: 5550
  Cyclic GFR-binding peptide
  MOD_RES (1)..(3): Xaa is C or S

SEQ ID NO: 108183 - protein, 39 aa, Artificial Sequence; identical to SEQ ID NO: 5551
  Cyclic GFR-binding peptide
  MOD_RES (2)..(4)..(35)..(36): Xaa is C or S

SEQ ID NO: 108184 - protein, 28 aa, Artificial Sequence
  Cyclic GFR-binding peptide
  MOD_RES (28)..(28): Xaa is C or S
IMQYNKLVKPKRGVLYLISIASLAQPVX

SEQ ID NO: 108185 - protein, 36 aa, Artificial Sequence; identical to SEQ ID NO: 5555
  Cyclic GFR-binding peptide
  MOD_RES (1)..(3)..(35)..(36): Xaa is C or S

SEQ ID NO: 108186 - protein, 31 aa, Artificial Sequence
  Cyclic GFR-binding peptide
  MOD_RES (1)..(3): Xaa is C or S
XGXEEVIMQYNKLLLVRGNDLYLMSIASTKV

SEQ ID NO: 108187 - protein, 37 aa, Artificial Sequence; identical to SEQ ID NO: 76281
  Cyclic GFR-binding peptide
  MOD_RES (31)..(32): Xaa is C or S

SEQ ID NO: 108188 - protein, 33 aa, Artificial Sequence; identical to SEQ ID NO: 5561
  Cyclic GFR-binding peptide
  MOD_RES (2)..(2): Xaa is C or S

SEQ ID NO: 108189 - protein, 21 aa, Artificial Sequence
  Cyclic GFR-binding peptide
RYKKLYTVVGKDFYLISIANL

SEQ ID NO: 108190 - protein, 25 aa, Artificial Sequence
  Cyclic GFR-binding peptide
QYNKLVVKDYEDLYLMSIASLETPV

SEQ ID NO: 108191 - protein, 26 aa, Artificial Sequence
  Cyclic GFR-binding peptide
EEVIMQYNKLLLVRGNDLYLMSIAST

SEQ ID NO: 108192 - protein, 25 aa, Artificial Sequence
  Cyclic GFR-binding peptide
EQYNKLVVKDYEDLYLMSIASLETP

SEQ ID NO: 108193 - protein, 29 aa, Artificial Sequence
  Cyclic GFR-binding peptide
  MOD_RES (26)..(27): Xaa is C or S
RYKKLIVNSSDDFYLVSIANLKTPAXXPK

SEQ ID NO: 108194 - protein, 40 aa, Artificial Sequence; identical to SEQ ID NO: 5566
  Cyclic GFR-binding peptide
  MOD_RES (1)..(3)..(35)..(36): Xaa is C or S

SEQ ID NO: 108195 - protein, 28 aa, Artificial Sequence
  Cyclic GFR-binding peptide
VVMNRYKKLIVNSSDDFYLVSIANLKTP

SEQ ID NO: 108196 - protein, 20 aa, Artificial Sequence
  Cyclic GFR-binding peptide
QYNKLYTVVGKDLYLISIAS

SEQ ID NO: 108197 - protein, 29 aa, Artificial Sequence
  Cyclic GFR-binding peptide
  MOD_RES (1)..(3): Xaa is C or S
XGXSEVVMDRYKKLVVNNASDFYLISIAN

SEQ ID NO: 108198 - protein, 22 aa, Artificial Sequence
  Cyclic GFR-binding peptide
MGQYNKLIIQQKDNLYLMSIAS

SEQ ID NO: 108199 - protein, 36 aa, Artificial Sequence; identical to SEQ ID NO: 82470
  Cyclic GFR-binding peptide
  MOD_RES (30)..(31): Xaa is C or S

SEQ ID NO: 108200 - protein, 28 aa, Artificial Sequence
  Cyclic GFR-binding peptide
  MOD_RES (26)..(27): Xaa is C or S
RYKKLIIQQKDNFYLMSIANMKTPTXXP

SEQ ID NO: 108201 - protein, 30 aa, Artificial Sequence; identical to SEQ ID NO: 5574
  Cyclic GFR-binding peptide
  MOD_RES (2)..(4): Xaa is C or S

SEQ ID NO: 108202 - protein, 29 aa, Artificial Sequence
  Cyclic GFR-binding peptide
  MOD_RES (27)..(28): Xaa is C or S
NRYKKLIVNSSDDFYLVSIANLKTPAXXP

SEQ ID NO: 108203 - protein, 30 aa, Artificial Sequence; identical to SEQ ID NO: 5578
  Cyclic GFR-binding peptide

SEQ ID NO: 108204 - protein, 31 aa, Artificial Sequence; identical to SEQ ID NO: 5580
  Cyclic GFR-binding peptide
  MOD_RES (1)..(3): Xaa is C or S

SEQ ID NO: 108205 - protein, 31 aa, Artificial Sequence; identical to SEQ ID NO: 33909
  Cyclic GFR-binding peptide
  MOD_RES (31)..(31): Xaa is C or S

SEQ ID NO: 108206 - protein, 24 aa, Artificial Sequence
  Cyclic GFR-binding peptide
EQYNKLTPVGMDDLYLVSIASLKT

SEQ ID NO: 108207 - protein, 22 aa, Artificial Sequence
  Cyclic GFR-binding peptide
MQYNKLVKPTRGVLYLISIASL

SEQ ID NO: 108208 - protein, 40 aa, Artificial Sequence; identical to SEQ ID NO: 33917
  Cyclic GFR-binding peptide
  MOD_RES (1)..(3)..(35)..(36): Xaa is C or S

SEQ ID NO: 108209 - protein, 33 aa, Artificial Sequence
  Cyclic GFR-binding peptide
  MOD_RES (31)..(32): Xaa is C or S
SVAMGQYNKLYTVVGKDLYLISIASLKTPVXXA

SEQ ID NO: 108210 - protein, 27 aa, Artificial Sequence
  Cyclic GFR-binding peptide
RDVVMGQYNKLIIQQKDNLYLMSIASM

SEQ ID NO: 108211 - protein, 29 aa, Artificial Sequence
  Cyclic GFR-binding peptide
RDVVMGRYKKLIIQQKDNFYLMSIANMKT

SEQ ID NO: 108212 - protein, 30 aa, Artificial Sequence; identical to SEQ ID NO: 33918
  Cyclic GFR-binding peptide
  MOD_RES (2)..(4): Xaa is C or S

SEQ ID NO: 108213 - protein, 33 aa, Artificial Sequence; identical to SEQ ID NO: 5591
  Cyclic GFR-binding peptide
  MOD_RES (1)..(3): Xaa is C or S

SEQ ID NO: 108214 - protein, 29 aa, Artificial Sequence
  Cyclic GFR-binding peptide
VVMDRYKKLVVNNAADFYLISIANLRAPV

SEQ ID NO: 108215 - protein, 39 aa, Artificial Sequence; identical to SEQ ID NO: 33923
  Cyclic GFR-binding peptide
  MOD_RES (2)..(4)..(36)..(37): Xaa is C or S

SEQ ID NO: 108216 - protein, 29 aa, Artificial Sequence
  Cyclic GFR-binding peptide
  MOD_RES (29)..(29): Xaa is C or S
MGERYKKLTPVGMDDFYLVSIANLKTPVX

SEQ ID NO: 108217 - protein, 37 aa, Artificial Sequence
  Cyclic GFR-binding peptide
  MOD_RES (2)..(4)..(36)..(37): Xaa is C or S
RXGXAEVVMDQYNKLVVNNAADLYLISIASLRAPVXX

SEQ ID NO: 108218 - protein, 35 aa, Artificial Sequence; identical to SEQ ID NO: 82507
  Cyclic GFR-binding peptide
  MOD_RES (32)..(33): Xaa is C or S

SEQ ID NO: 108219 - protein, 41 aa, Artificial Sequence
  Cyclic GFR-binding peptide
  MOD_RES (1)..(3)..(35)..(36): Xaa is C or S
XGXSRVVMNQYNKLIVNSSDDLYLVSIASLKTPAXXPKPVH

SEQ ID NO: 108220 - protein, 29 aa, Artificial Sequence
  Cyclic GFR-binding peptide
EVTMNRYKKLVVNKNEDFYLISIANMKEP

SEQ ID NO: 108221 - protein, 40 aa, Artificial Sequence; identical to SEQ ID NO: 5598
  Cyclic GFR-binding peptide
  MOD_RES (2)..(4)..(36)..(37): Xaa is C or S

SEQ ID NO: 108222 - protein, 36 aa, Artificial Sequence; identical to SEQ ID NO: 5600
  Cyclic GFR-binding peptide
  MOD_RES (30)..(31): Xaa is C or S

SEQ ID NO: 108223 - protein, 36 aa, Artificial Sequence; identical to SEQ ID NO: 16046
  Cyclic GFR-binding peptide
  MOD_RES (30)..(31): Xaa is C or S

SEQ ID NO: 108224 - protein, 27 aa, Artificial Sequence
  Cyclic GFR-binding peptide
  MOD_RES (27)..(27): Xaa is C or S
MRYKKLVKPTRGVFYLISIANLDQPVX

SEQ ID NO: 108225 - protein, 38 aa, Artificial Sequence; identical to SEQ ID NO: 33938
  Cyclic GFR-binding peptide
  MOD_RES (1)..(3)..(35)..(36): Xaa is C or S

SEQ ID NO: 108226 - protein, 39 aa, Artificial Sequence; identical to SEQ ID NO: 5604
  Cyclic GFR-binding peptide
  MOD_RES (1)..(3)..(35): Xaa is C or S

SEQ ID NO: 108227 - protein, 33 aa, Artificial Sequence; identical to SEQ ID NO: 5605
  Cyclic GFR-binding peptide
  MOD_RES (29)..(30): Xaa is C or S

SEQ ID NO: 108228 - protein, 41 aa, Artificial Sequence
  Cyclic GFR-binding peptide
  MOD_RES (1)..(3)..(35)..(36): Xaa is C or S
XGXRDVVMGQYNKLIIQQKDNLYLMSIASMKTPTXXPGASG

SEQ ID NO: 108229 - protein, 24 aa, Artificial Sequence
  Cyclic GFR-binding peptide
IMQYNKLLLVRGNDLYLMSIASTK

SEQ ID NO: 108230 - protein, 33 aa, Artificial Sequence; identical to SEQ ID NO: 5609
  Cyclic GFR-binding peptide
  MOD_RES (2)..(2): Xaa is C or S

SEQ ID NO: 108231 - protein, 36 aa, Artificial Sequence; identical to SEQ ID NO: 16054
  Cyclic GFR-binding peptide
  MOD_RES (1)..(3)..(35)..(36): Xaa is C or S

SEQ ID NO: 108232 - protein, 30 aa, Artificial Sequence; identical to SEQ ID NO: 5614
  Cyclic GFR-binding peptide
  MOD_RES (2)..(2): Xaa is C or S

SEQ ID NO: 108233 - protein, 33 aa, Artificial Sequence; identical to SEQ ID NO: 5616
  Cyclic GFR-binding peptide
  MOD_RES (30)..(31): Xaa is C or S

SEQ ID NO: 108234 - protein, 31 aa, Artificial Sequence; identical to SEQ ID NO: 5619
  Cyclic GFR-binding peptide
  MOD_RES (31)..(31): Xaa is C or S

SEQ ID NO: 108235 - protein, 31 aa, Artificial Sequence; identical to SEQ ID NO: 87684
  Cyclic GFR-binding peptide
  MOD_RES (1)..(3): Xaa is C or S

SEQ ID NO: 108236 - protein, 30 aa, Artificial Sequence; identical to SEQ ID NO: 5621
  Cyclic GFR-binding peptide

SEQ ID NO: 108237 - protein, 36 aa, Artificial Sequence; identical to SEQ ID NO: 33950
  Cyclic GFR-binding peptide
  MOD_RES (30)..(31): Xaa is C or S

SEQ ID NO: 108238 - protein, 26 aa, Artificial Sequence
  Cyclic GFR-binding peptide
  MOD_RES (26)..(26): Xaa is C or S
QYNKLVVNNAADLYLISIASLRAPVX

SEQ ID NO: 108239 - protein, 33 aa, Artificial Sequence; identical to SEQ ID NO: 5623
  Cyclic GFR-binding peptide
  MOD_RES (2)..(33): Xaa is C or S

SEQ ID NO: 108240 - protein, 35 aa, Artificial Sequence; identical to SEQ ID NO: 5629
  Cyclic GFR-binding peptide
  MOD_RES (1)..(3)..(35): Xaa is C or S

SEQ ID NO: 108241 - protein, 33 aa, Artificial Sequence; identical to SEQ ID NO: 5630
  Cyclic GFR-binding peptide
  MOD_RES (28)..(29): Xaa is C or S

SEQ ID NO: 108242 - protein, 30 aa, Artificial Sequence; identical to SEQ ID NO: 5631
  Cyclic GFR-binding peptide
  MOD_RES (29)..(30): Xaa is C or S

SEQ ID NO: 108243 - protein, 28 aa, Artificial Sequence
  Cyclic GFR-binding peptide
  MOD_RES (1)..(1): Xaa is C or S
XSEVTMNRYKKLVVNKNEDFYLISIANM

SEQ ID NO: 108244 - protein, 30 aa, Artificial Sequence; identical to SEQ ID NO: 5632
  Cyclic GFR-binding peptide
  MOD_RES (1)..(1): Xaa is C or S

SEQ ID NO: 108245 - protein, 30 aa, Artificial Sequence
  Cyclic GFR-binding peptide
SEVTMNQYNKLVVNKNEDLYLISIASMKEP

SEQ ID NO: 108246 - protein, 37 aa, Artificial Sequence; identical to SEQ ID NO: 5637
  Cyclic GFR-binding peptide
  MOD_RES (2)..(34)..(35): Xaa is C or S

SEQ ID NO: 108247 - protein, 27 aa, Artificial Sequence
  Cyclic GFR-binding peptide
VMDRYKKLVVKENEDFYLMSIANLETP

SEQ ID NO: 108248 - protein, 26 aa, Artificial Sequence
  Cyclic GFR-binding peptide
MNQYNKLIVNSSDDLYLVSIASLQTP

SEQ ID NO: 108249 - protein, 31 aa, Artificial Sequence
  Cyclic GFR-binding peptide
  MOD_RES (31)..(31): Xaa is C or S
EVVMDQYNKLVVNNAADLYLISIASLRAPVX

SEQ ID NO: 108250 - protein, 27 aa, Artificial Sequence
  Cyclic GFR-binding peptide
  MOD_RES (1)..(1): Xaa is C or S
XSKVIMRYKKLIKPTKGIFYLISIANL

SEQ ID NO: 108251 - protein, 24 aa, Artificial Sequence
  Cyclic GFR-binding peptide
DRYKKLVVNNASDFYLISIANLRT

SEQ ID NO: 108252 - protein, 35 aa, Artificial Sequence; identical to SEQ ID NO: 5644
  Cyclic GFR-binding peptide
  MOD_RES (1)..(32)..(33): Xaa is C or S

SEQ ID NO: 108253 - protein, 30 aa, Artificial Sequence
  Cyclic GFR-binding peptide
EVVMDQYNKLVVNNAADLYLISIASLRAPV

SEQ ID NO: 108254 - protein, 35 aa, Artificial Sequence; identical to SEQ ID NO: 5646
  Cyclic GFR-binding peptide
  MOD_RES (2)..(33)..(34): Xaa is C or S

SEQ ID NO: 108255 - protein, 35 aa, Artificial Sequence; identical to SEQ ID NO: 5647
  Cyclic GFR-binding peptide
  MOD_RES (31)..(32): Xaa is C or S

SEQ ID NO: 108256 - protein, 30 aa, Artificial Sequence; identical to SEQ ID NO: 76333
  Cyclic GFR-binding peptide

SEQ ID NO: 108257 - protein, 36 aa, Artificial Sequence; identical to SEQ ID NO: 5649
  Cyclic GFR-binding peptide
  MOD_RES (1)..(33)..(34): Xaa is C or S

SEQ ID NO: 108258 - protein, 37 aa, Artificial Sequence; identical to SEQ ID NO: 16084
  Cyclic GFR-binding peptide
  MOD_RES (31)..(32): Xaa is C or S

SEQ ID NO: 108259 - protein, 30 aa, Artificial Sequence; identical to SEQ ID NO: 5652
  Cyclic GFR-binding peptide

SEQ ID NO: 108260 - protein, 31 aa, Artificial Sequence; identical to SEQ ID NO: 16089
  Cyclic GFR-binding peptide
  MOD_RES (27)..(28): Xaa is C or S

SEQ ID NO: 108261 - protein, 30 aa, Artificial Sequence
  Cyclic GFR-binding peptide
  MOD_RES (26)..(27): Xaa is C or S
QYNKLVVNKNEDLYLISIASMKEPVXXPEP

SEQ ID NO: 108262 - protein, 28 aa, Artificial Sequence
  Cyclic GFR-binding peptide
  MOD_RES (26)..(27): Xaa is C or S
RYKKLVVNNAADFYLISIANLRAPVXXS

SEQ ID NO: 108263 - protein, 31 aa, Artificial Sequence; identical to SEQ ID NO: 5657
  Cyclic GFR-binding peptide

SEQ ID NO: 108264 - protein, 27 aa, Artificial Sequence
  Cyclic GFR-binding peptide
EAVSMGERYKKLTPVGMDDFYLVSIAN

SEQ ID NO: 108265 - protein, 32 aa, Artificial Sequence; identical to SEQ ID NO: 5659
  Cyclic GFR-binding peptide
  MOD_RES (30)..(31): Xaa is C or S

SEQ ID NO: 108266 - protein, 35 aa, Artificial Sequence; identical to SEQ ID NO: 33989
  Cyclic GFR-binding peptide
  MOD_RES (2)..(4): Xaa is C or S

SEQ ID NO: 108267 - protein, 23 aa, Artificial Sequence
  Cyclic GFR-binding peptide
QYNKLIKPTKGILYLISIASLDQ

SEQ ID NO: 108268 - protein, 25 aa, Artificial Sequence
  Cyclic GFR-binding peptide
MERYKKLVVKDYEDFYLMSIANLET

SEQ ID NO: 108269 - protein, 23 aa, Artificial Sequence
  Cyclic GFR-binding peptide
VMDRYKKLVVKENEDFYLMSIAN

SEQ ID NO: 108270 - protein, 28 aa, Artificial Sequence
  Cyclic GFR-binding peptide
  MOD_RES (2)..(2): Xaa is C or S
GXGEVVMEQYNKLVVKDYEDLYLMSIAS

SEQ ID NO: 108271 - protein, 30 aa, Artificial Sequence
  Cyclic GFR-binding peptide
  MOD_RES (1)..(1): Xaa is C or S
XEEVIMQYNKLLLVRGNDLYLMSIASTKVP

SEQ ID NO: 108272 - protein, 35 aa, Artificial Sequence; identical to SEQ ID NO: 5668
  Cyclic GFR-binding peptide
  MOD_RES (2)..(4): Xaa is C or S

SEQ ID NO: 108273 - protein, 32 aa, Artificial Sequence; identical to SEQ ID NO: 5670
  Cyclic GFR-binding peptide
  MOD_RES (32)..(32): Xaa is C or S

SEQ ID NO: 108274 - protein, 27 aa, Artificial Sequence
  Cyclic GFR-binding peptide
  MOD_RES (26)..(27): Xaa is C or S
RYKKLIVNSSDDFYLVSIANLKTPAXX

SEQ ID NO: 108275 - protein, 30 aa, Artificial Sequence
  Cyclic GFR-binding peptide
  MOD_RES (27)..(28): Xaa is C or S
DQYNKLVVNNAADLYLISIASLRAPVXXSA

SEQ ID NO: 108276 - protein, 39 aa, Artificial Sequence; identical to SEQ ID NO: 5673
  Cyclic GFR-binding peptide
  MOD_RES (2)..(34)..(35): Xaa is C or S

SEQ ID NO: 108277 - protein, 38 aa, Artificial Sequence; identical to SEQ ID NO: 87732
  Cyclic GFR-binding peptide
  MOD_RES (2)..(4)..(36)..(37): Xaa is C or S

SEQ ID NO: 108278 - protein, 35 aa, Artificial Sequence; identical to SEQ ID NO: 82575
  Cyclic GFR-binding peptide
  MOD_RES (1)..(33)..(34): Xaa is C or S

SEQ ID NO: 108279 - protein, 23 aa, Artificial Sequence
  Cyclic GFR-binding peptide
MDRYKKLVVNNAADFYLISIANL

SEQ ID NO: 108280 - protein, 27 aa, Artificial Sequence
  Cyclic GFR-binding peptide
  MOD_RES (1)..(1): Xaa is C or S
XGEVVMDRYKKLVVKENEDFYLMSIAN

SEQ ID NO: 108281 - protein, 35 aa, Artificial Sequence; identical to SEQ ID NO: 5683
  Cyclic GFR-binding peptide
  MOD_RES (31)..(32): Xaa is C or S

SEQ ID NO: 108282 - protein, 27 aa, Artificial Sequence
  Cyclic GFR-binding peptide
KVIMQYNKLIKPTKGILYLISIASLDQ

SEQ ID NO: 108283 - protein, 25 aa, Artificial Sequence
  Cyclic GFR-binding peptide
QYNKLYTVVGKDLYLISIASLKTPV

SEQ ID NO: 108284 - protein, 31 aa, Artificial Sequence; identical to SEQ ID NO: 5687
  Cyclic GFR-binding peptide
  MOD_RES (27)..(28): Xaa is C or S

SEQ ID NO: 108285 - protein, 31 aa, Artificial Sequence; identical to SEQ ID NO: 5688
  Cyclic GFR-binding peptide
  MOD_RES (2)..(4): Xaa is C or S

SEQ ID NO: 108286 - protein, 25 aa, Artificial Sequence
  Cyclic GFR-binding peptide
EQYNKLTPVGMDDLYLVSIASLKTP

SEQ ID NO: 108287 - protein, 38 aa, Artificial Sequence; identical to SEQ ID NO: 5691
  Cyclic GFR-binding peptide
  MOD_RES (2)..(33)..(34): Xaa is C or S

SEQ ID NO: 108288 - protein, 35 aa, Artificial Sequence; identical to SEQ ID NO: 5692
  Cyclic GFR-binding peptide
  MOD_RES (29)..(30): Xaa is C or S

SEQ ID NO: 108289 - protein, 25 aa, Artificial Sequence
  Cyclic GFR-binding peptide
VMDQYNKLVVKENEDLYLMSIASLE

SEQ ID NO: 108290 - protein, 32 aa, Artificial Sequence; identical to SEQ ID NO: 5695
  Cyclic GFR-binding peptide
  MOD_RES (29)..(30): Xaa is C or S

SEQ ID NO: 108291 - protein, 30 aa, Artificial Sequence; identical to SEQ ID NO: 16134
  Cyclic GFR-binding peptide
  MOD_RES (2)..(2): Xaa is C or S

SEQ ID NO: 108292 - protein, 34 aa, Artificial Sequence
  Cyclic GFR-binding peptide
  MOD_RES (2)..(4): Xaa is C or S
RXAXSEVTMNQYNKLVVNKNEDLYLISIASMKEP

SEQ ID NO: 108293 - protein, 25 aa, Artificial Sequence
  Cyclic GFR-binding peptide
QYNKLLLVRGNDLYLMSIASTKVPA

SEQ ID NO: 108294 - protein, 30 aa, Artificial Sequence; identical to SEQ ID NO: 34029
  Cyclic GFR-binding peptide

SEQ ID NO: 108295 - protein, 31 aa, Artificial Sequence; identical to SEQ ID NO: 34033
  Cyclic GFR-binding peptide
  MOD_RES (26)..(27): Xaa is C or S

SEQ ID NO: 108296 - protein, 26 aa, Artificial Sequence
  Cyclic GFR-binding peptide
  MOD_RES (26)..(26): Xaa is C or S
RYKKLIVNNSSDFYLVSIANLKTPAX

SEQ ID NO: 108297 - protein, 38 aa, Artificial Sequence; identical to SEQ ID NO: 87760
  Cyclic GFR-binding peptide
  MOD_RES (32)..(33): Xaa is C or S

SEQ ID NO: 108298 - protein, 35 aa, Artificial Sequence; identical to SEQ ID NO: 5703
  Cyclic GFR-binding peptide
  MOD_RES (30)..(31): Xaa is C or S

SEQ ID NO: 108299 - protein, 23 aa, Artificial Sequence
  Cyclic GFR-binding peptide
MDRYKKLVVNNASDFYLISIANL

SEQ ID NO: 108300 - protein, 41 aa, Artificial Sequence; identical to SEQ ID NO: 5704
  Cyclic GFR-binding peptide
  MOD_RES (1)..(3)..(35)..(36): Xaa is C or S

SEQ ID NO: 108301 - protein, 24 aa, Artificial Sequence
  Cyclic GFR-binding peptide
VTMNRYKKLVVNKNEDFYLISIAN

SEQ ID NO: 108302 - protein, 39 aa, Artificial Sequence; identical to SEQ ID NO: 5708
  Cyclic GFR-binding peptide
  MOD_RES (2)..(4)..(35)..(36): Xaa is C or S

SEQ ID NO: 108303 - protein, 22 aa, Artificial Sequence
  Cyclic GFR-binding peptide
RYKKLIVNNSSDFYLVSIANLK

SEQ ID NO: 108304 - protein, 30 aa, Artificial Sequence
  Cyclic GFR-binding peptide
  MOD_RES (1)..(3): Xaa is C or S
XGXESVAMGQYNKLYTVVGKDLYLISIASL

SEQ ID NO: 108305 - protein, 37 aa, Artificial Sequence; identical to SEQ ID NO: 5717
  Cyclic GFR-binding peptide
  MOD_RES (32)..(33): Xaa is C or S

SEQ ID NO: 108306 - protein, 21 aa, Artificial Sequence
  Cyclic GFR-binding peptide
RYKKLVVKDYEDFYLMSIANL

SEQ ID NO: 108307 - protein, 24 aa, Artificial Sequence
  Cyclic GFR-binding peptide
VVMGQYNKLIIQQKDNLYLMSIAS

SEQ ID NO: 108308 - protein, 26 aa, Artificial Sequence
  Cyclic GFR-binding peptide
SVAMGQYNKLYTVVGKDLYLISIASL

SEQ ID NO: 108309 - protein, 31 aa, Artificial Sequence; identical to SEQ ID NO: 5723
  Cyclic GFR-binding peptide
  MOD_RES (31)..(31): Xaa is C or S

SEQ ID NO: 108310 - protein, 20 aa, Artificial Sequence
  Cyclic GFR-binding peptide
QYNKLVVKDYEDLYLMSIAS

SEQ ID NO: 108311 - protein, 35 aa, Artificial Sequence; identical to SEQ ID NO: 5726
  Cyclic GFR-binding peptide
  MOD_RES (30)..(31): Xaa is C or S

SEQ ID NO: 108312 - protein, 25 aa, Artificial Sequence
  Cyclic GFR-binding peptide
MDRYKKLVVNNASDFYLISIANLRT

SEQ ID NO: 108313 - protein, 33 aa, Artificial Sequence; identical to SEQ ID NO: 5727
  Cyclic GFR-binding peptide
  MOD_RES (2)..(4): Xaa is C or S

SEQ ID NO: 108314 - protein, 32 aa, Artificial Sequence; identical to SEQ ID NO: 16166
  Cyclic GFR-binding peptide
  MOD_RES (31)..(32): Xaa is C or S

SEQ ID NO: 108315 - protein, 30 aa, Artificial Sequence; identical to SEQ ID NO: 5733
  Cyclic GFR-binding peptide
  MOD_RES (30)..(30): Xaa is C or S

SEQ ID NO: 108316 - protein, 42 aa, Artificial Sequence; identical to SEQ ID NO: 76392
  Cyclic GFR-binding peptide
  MOD_RES (2)..(4)..(36)..(37): Xaa is C or S

SEQ ID NO: 108317 - protein, 33 aa, Artificial Sequence; identical to SEQ ID NO: 5736
  Cyclic GFR-binding peptide
  MOD_RES (32)..(33): Xaa is C or S

SEQ ID NO: 108318 - protein, 30 aa, Artificial Sequence; identical to SEQ ID NO: 5737
  Cyclic GFR-binding peptide
  MOD_RES (26)..(27): Xaa is C or S

SEQ ID NO: 108319 - protein, 37 aa, Artificial Sequence; identical to SEQ ID NO: 5738
  Cyclic GFR-binding peptide
  MOD_RES (31)..(32): Xaa is C or S

SEQ ID NO: 108320 - protein, 33 aa, Artificial Sequence; identical to SEQ ID NO: 5742
  Cyclic GFR-binding peptide
  MOD_RES (31)..(31): Xaa is C or S

SEQ ID NO: 108321 - protein, 26 aa, Artificial Sequence
  Cyclic GFR-binding peptide
EVVMEQYNKLVVKDYEDLYLMSIASL

SEQ ID NO: 108322 - protein, 30 aa, Artificial Sequence
  Cyclic GFR-binding peptide
  MOD_RES (2)..(4): Xaa is C or S
RXAXSEVTMNQYNKLVVNKNEDLYLISIAS

SEQ ID NO: 108323 - protein, 24 aa, Artificial Sequence
  Cyclic GFR-binding peptide
VMDQYNKLVVNNASDLYLISIASL

SEQ ID NO: 108324 - protein, 24 aa, Artificial Sequence
  Cyclic GFR-binding peptide
VVMRYKKLVKPTRGVFYLISIANL

SEQ ID NO: 108325 - protein, 23 aa, Artificial Sequence
  Cyclic GFR-binding peptide
DQYNKLVVNNASDLYLISIASLR

SEQ ID NO: 108326 - protein, 40 aa, Artificial Sequence; identical to SEQ ID NO: 76399
  Cyclic GFR-binding peptide
  MOD_RES (2)..(34)..(35): Xaa is C or S

SEQ ID NO: 108327 - protein, 39 aa, Artificial Sequence; identical to SEQ ID NO: 34080
  Cyclic GFR-binding peptide
  MOD_RES (2)..(34)..(35): Xaa is C or S

SEQ ID NO: 108328 - protein, 28 aa, Artificial Sequence
  Cyclic GFR-binding peptide
  MOD_RES (1)..(1): Xaa is C or S
XARVVMNQYNKLIVNSSDDLYLVSIASL

SEQ ID NO: 108329 - protein, 32 aa, Artificial Sequence; identical to SEQ ID NO: 5749
  Cyclic GFR-binding peptide
  MOD_RES (32)..(32): Xaa is C or S

SEQ ID NO: 108330 - protein, 40 aa, Artificial Sequence
  Cyclic GFR-binding peptide
  MOD_RES (2)..(34)..(35): Xaa is C or S
GXSRVVMNQYNKLIVNSSDDLYLVSIASLKTPAXXPKPVH

SEQ ID NO: 108331 - protein, 25 aa, Artificial Sequence
  Cyclic GFR-binding peptide
RYKKLVVKDYEDFYLMSIANLETPV

SEQ ID NO: 108332 - protein, 37 aa, Artificial Sequence
  Cyclic GFR-binding peptide
  MOD_RES (1)..(33)..(34): Xaa is C or S
XRDVVMGQYNKLIIQQKDNLYLMSIASMKTPTXXPGA

SEQ ID NO: 108333 - protein, 39 aa, Artificial Sequence
  Cyclic GFR-binding peptide
  MOD_RES (2)..(4)..(36)..(37): Xaa is C or S
RXGXESVAMGQYNKLYTVVGKDLYLISIASLKTPVXXAK

SEQ ID NO: 108334 - protein, 34 aa, Artificial Sequence; identical to SEQ ID NO: 5755
  Cyclic GFR-binding peptide
  MOD_RES (1)..(33)..(34): Xaa is C or S

SEQ ID NO: 108335 - protein, 25 aa, Artificial Sequence
  Cyclic GFR-binding peptide
MQYNKLVKPTRGVLYLISIASLDQP

SEQ ID NO: 108336 - protein, 41 aa, Artificial Sequence; identical to SEQ ID NO: 16198
  Cyclic GFR-binding peptide
  MOD_RES (2)..(4)..(36)..(37): Xaa is C or S

SEQ ID NO: 108337 - protein, 30 aa, Artificial Sequence; identical to SEQ ID NO: 5761
  Cyclic GFR-binding peptide
  MOD_RES (2)..(4): Xaa is C or S

SEQ ID NO: 108338 - protein, 37 aa, Artificial Sequence; identical to SEQ ID NO: 5762
  Cyclic GFR-binding peptide
  MOD_RES (2)..(33)..(34): Xaa is C or S

SEQ ID NO: 108339 - protein, 36 aa, Artificial Sequence; identical to SEQ ID NO: 5765
  Cyclic GFR-binding peptide
  MOD_RES (2)..(35)..(36): Xaa is C or S

SEQ ID NO: 108340 - protein, 28 aa, Artificial Sequence
  Cyclic GFR-binding peptide
  MOD_RES (1)..(3): Xaa is C or S
XGXEEVIMRYKKLLLVRGNDFYLMSIAN

SEQ ID NO: 108341 - protein, 27 aa, Artificial Sequence
  Cyclic GFR-binding peptide
EVVMDRYKKLVVKENEDFYLMSIANLE

SEQ ID NO: 108342 - protein, 33 aa, Artificial Sequence
  Cyclic GFR-binding peptide
  MOD_RES (1)..(33): Xaa is C or S
XSEVTMNQYNKLVVNKNEDLYLISIASMKEPVX

SEQ ID NO: 108343 - protein, 21 aa, Artificial Sequence
  Cyclic GFR-binding peptide
GQYNKLYTVVGKDLYLISIAS

SEQ ID NO: 108344 - protein, 40 aa, Artificial Sequence; identical to SEQ ID NO: 16203
  Cyclic GFR-binding peptide
  MOD_RES (2)..(34)..(35): Xaa is C or S

SEQ ID NO: 108345 - protein, 25 aa, Artificial Sequence
  Cyclic GFR-binding peptide
NQYNKLIVNSSDDLYLVSIASLKTP

SEQ ID NO: 108346 - protein, 24 aa, Artificial Sequence
  Cyclic GFR-binding peptide
GEQYNKLTPVGMDDLYLVSIASLK

SEQ ID NO: 108347 - protein, 23 aa, Artificial Sequence
  Cyclic GFR-binding peptide
RYKKLVVNKNEDFYLISIANMKE

SEQ ID NO: 108348 - protein, 27 aa, Artificial Sequence
  Cyclic GFR-binding peptide
  MOD_RES (2)..(2): Xaa is C or S
KXSRVIMQYNKLVKPKRGVLYLISIAS

SEQ ID NO: 108349 - protein, 32 aa, Artificial Sequence; identical to SEQ ID NO: 5776
  Cyclic GFR-binding peptide
  MOD_RES (31)..(31): Xaa is C or S

SEQ ID NO: 108350 - protein, 32 aa, Artificial Sequence; identical to SEQ ID NO: 5778
  Cyclic GFR-binding peptide
  MOD_RES (1)..(32): Xaa is C or S

SEQ ID NO: 108351 - protein, 36 aa, Artificial Sequence; identical to SEQ ID NO: 76417
  Cyclic GFR-binding peptide
  MOD_RES (1)..(3)..(35)..(36): Xaa is C or S

SEQ ID NO: 108352 - protein, 38 aa, Artificial Sequence; identical to SEQ ID NO: 5779
  Cyclic GFR-binding peptide
  MOD_RES (32)..(33): Xaa is C or S

SEQ ID NO: 108353 - protein, 32 aa, Artificial Sequence
  Cyclic GFR-binding peptide
  MOD_RES (2)..(2): Xaa is C or S
GXESVAMGQYNKLYTVVGKDLYLISIASLKTP

SEQ ID NO: 108354 - protein, 24 aa, Artificial Sequence
  Cyclic GFR-binding peptide
KVIMRYKKLIKPTKGIFYLISIAN

SEQ ID NO: 108355 - protein, 21 aa, Artificial Sequence
  Cyclic GFR-binding peptide
MRYKKLVKPTRGVFYLISIAN

SEQ ID NO: 108356 - protein, 40 aa, Artificial Sequence; identical to SEQ ID NO: 5783
  Cyclic GFR-binding peptide
  MOD_RES (1)..(3)..(35): Xaa is C or S

SEQ ID NO: 108357 - protein, 31 aa, Artificial Sequence; identical to SEQ ID NO: 5784
  Cyclic GFR-binding peptide
  MOD_RES (30)..(31): Xaa is C or S

SEQ ID NO: 108358 - protein, 30 aa, Artificial Sequence; identical to SEQ ID NO: 34123
  Cyclic GFR-binding peptide
  MOD_RES (1)..(1): Xaa is C or S

SEQ ID NO: 108359 - protein, 38 aa, Artificial Sequence
  Cyclic GFR-binding peptide
  MOD_RES (2)..(34)..(35): Xaa is C or S
GXRDVVMGQYNKLIIQQKDNLYLMSIASMKTPTXXPGA

SEQ ID NO: 108360 - protein, 27 aa, Artificial Sequence
  Cyclic GFR-binding peptide
  MOD_RES (26)..(27): Xaa is C or S
QYNKLIVNNSSDLYLVSIASLKTPAXX

SEQ ID NO: 108361 - protein, 29 aa, Artificial Sequence
  Cyclic GFR-binding peptide
EAVSMGEQYNKLTPVGMDDLYLVSIASLK

SEQ ID NO: 108362 - protein, 25 aa, Artificial Sequence
  Cyclic GFR-binding peptide
KVIMQYNKLIKPTKGILYLISIASL

SEQ ID NO: 108363 - protein, 37 aa, Artificial Sequence
  Cyclic GFR-binding peptide
  MOD_RES (2)..(34)..(35): Xaa is C or S
GXRDVVMGQYNKLIIQQKDNLYLMSIASMKTPTXXPG

SEQ ID NO: 108364 - protein, 29 aa, Artificial Sequence
  Cyclic GFR-binding peptide
  MOD_RES (29)..(29): Xaa is C or S
VMDRYKKLVVNNASDFYLISIANLRTPVX

SEQ ID NO: 108365 - protein, 29 aa, Artificial Sequence
  Cyclic GFR-binding peptide
  MOD_RES (1)..(1): Xaa is C or S
XSRVVMNQYNKLIVNSSDDLYLVSIASLK

SEQ ID NO: 108366 - protein, 42 aa, Artificial Sequence; identical to SEQ ID NO: 5801
  Cyclic GFR-binding peptide
  MOD_RES (2)..(4)..(36)..(37): Xaa is C or S

SEQ ID NO: 108367 - protein, 25 aa, Artificial Sequence
  Cyclic GFR-binding peptide
VMNRYKKLIVNNSSDFYLVSIANLK

SEQ ID NO: 108368 - protein, 32 aa, Artificial Sequence; identical to SEQ ID NO: 5803
  Cyclic GFR-binding peptide
  MOD_RES (1)..(32): Xaa is C or S

SEQ ID NO: 108369 - protein, 26 aa, Artificial Sequence
  Cyclic GFR-binding peptide
  MOD_RES (1)..(1): Xaa is C or S
XEEVIMQYNKLLLVRGNDLYLMSIAS

SEQ ID NO: 108370 - protein, 33 aa, Artificial Sequence; identical to SEQ ID NO: 5806
  Cyclic GFR-binding peptide
  MOD_RES (30)..(31): Xaa is C or S

SEQ ID NO: 108371 - protein, 39 aa, Artificial Sequence; identical to SEQ ID NO: 76426
  Cyclic GFR-binding peptide
  MOD_RES (2)..(33)..(34): Xaa is C or S

SEQ ID NO: 108372 - protein, 33 aa, Artificial Sequence; identical to SEQ ID NO: 5808
  Cyclic GFR-binding peptide
  MOD_RES (2)..(4): Xaa is C or S

SEQ ID NO: 108373 - protein, 22 aa, Artificial Sequence
  Cyclic GFR-binding peptide
MGRYKKLYTVVGKDFYLISIAN

SEQ ID NO: 108374 - protein, 39 aa, Artificial Sequence; identical to SEQ ID NO: 5811
  Cyclic GFR-binding peptide
  MOD_RES (1)..(3)..(36)..(37): Xaa is C or S

SEQ ID NO: 108375 - protein, 34 aa, Artificial Sequence; identical to SEQ ID NO: 5812
  Cyclic GFR-binding peptide
  MOD_RES (29)..(30): Xaa is C or S

SEQ ID NO: 108376 - protein, 31 aa, Artificial Sequence; identical to SEQ ID NO: 5813
  Cyclic GFR-binding peptide
  MOD_RES (2)..(4): Xaa is C or S

SEQ ID NO: 108377 - protein, 41 aa, Artificial Sequence; identical to SEQ ID NO: 16246
  Cyclic GFR-binding peptide
  MOD_RES (1)..(3)..(35)..(36): Xaa is C or S

SEQ ID NO: 108378 - protein, 27 aa, Artificial Sequence
  Cyclic GFR-binding peptide
  MOD_RES (26)..(27): Xaa is C or S
QYNKLVVKENEDLYLMSIASLETPVXX

SEQ ID NO: 108379 - protein, 28 aa, Artificial Sequence
  Cyclic GFR-binding peptide
AMGQYNKLYTVVGKDLYLISIASLKTPV

SEQ ID NO: 108380 - protein, 26 aa, Artificial Sequence
  Cyclic GFR-binding peptide
  MOD_RES (26)..(26): Xaa is C or S
QYNKLVVKENEDLYLMSIASLETPVX

SEQ ID NO: 108381 - protein, 28 aa, Artificial Sequence
  Cyclic GFR-binding peptide
VMNRYKKLIVNSSDDFYLVSIANLKTPA

SEQ ID NO: 108382 - protein, 34 aa, Artificial Sequence; identical to SEQ ID NO: 5820
  Cyclic GFR-binding peptide
  MOD_RES (28)..(29): Xaa is C or S

SEQ ID NO: 108383 - protein, 31 aa, Artificial Sequence; identical to SEQ ID NO: 5821
  Cyclic GFR-binding peptide
  MOD_RES (1)..(1): Xaa is C or S

SEQ ID NO: 108384 - protein, 30 aa, Artificial Sequence; identical to SEQ ID NO: 5823
  Cyclic GFR-binding peptide
  MOD_RES (29)..(30): Xaa is C or S

SEQ ID NO: 108385 - protein, 36 aa, Artificial Sequence; identical to SEQ ID NO: 5824
  Cyclic GFR-binding peptide
  MOD_RES (2)..(34)..(35): Xaa is C or S

SEQ ID NO: 108386 - protein, 30 aa, Artificial Sequence
  Cyclic GFR-binding peptide
AEVVMDQYNKLVVNNAADLYLISIASLRAP

SEQ ID NO: 108387 - protein, 34 aa, Artificial Sequence; identical to SEQ ID NO: 5827
  Cyclic GFR-binding peptide
  MOD_RES (2)..(4): Xaa is C or S

SEQ ID NO: 108388 - protein, 30 aa, Artificial Sequence; identical to SEQ ID NO: 5829
  Cyclic GFR-binding peptide

SEQ ID NO: 108389 - protein, 33 aa, Artificial Sequence
  Cyclic GFR-binding peptide
  MOD_RES (31)..(32): Xaa is C or S
EVVMDQYNKLVVNNAADLYLISIASLRAPVXXS

SEQ ID NO: 108390 - protein, 25 aa, Artificial Sequence
  Cyclic GFR-binding peptide
VVMNQYNKLIVNSSDDLYLVSIASL

SEQ ID NO: 108391 - protein, 35 aa, Artificial Sequence; identical to SEQ ID NO: 76436
  Cyclic GFR-binding peptide
  MOD_RES (29)..(30): Xaa is C or S

SEQ ID NO: 108392 - protein, 23 aa, Artificial Sequence
  Cyclic GFR-binding peptide
RYKKLTPVGMDDFYLVSIANLKT

SEQ ID NO: 108393 - protein, 23 aa, Artificial Sequence
  Cyclic GFR-binding peptide
RYKKLIVNSSDDFYLVSIANLKT

SEQ ID NO: 108394 - protein, 38 aa, Artificial Sequence; identical to SEQ ID NO: 5833
  Cyclic GFR-binding peptide
  MOD_RES (2)..(33)..(34): Xaa is C or S

SEQ ID NO: 108395 - protein, 36 aa, Artificial Sequence
  Cyclic GFR-binding peptide
  MOD_RES (1)..(33)..(34): Xaa is C or S
XESVAMGQYNKLYTVVGKDLYLISIASLKTPVXXAK

SEQ ID NO: 108396 - protein, 23 aa, Artificial Sequence
  Cyclic GFR-binding peptide
RYKKLVVNNAADFYLISIANLRA

SEQ ID NO: 108397 - protein, 35 aa, Artificial Sequence; identical to SEQ ID NO: 16266
  Cyclic GFR-binding peptide
  MOD_RES (2)..(4): Xaa is C or S

SEQ ID NO: 108398 - protein, 33 aa, Artificial Sequence; identical to SEQ ID NO: 5835
  Cyclic GFR-binding peptide
  MOD_RES (2)..(4): Xaa is C or S

SEQ ID NO: 108399 - protein, 38 aa, Artificial Sequence; identical to SEQ ID NO: 5836
  Cyclic GFR-binding peptide
  MOD_RES (1)..(3)..(34)..(35): Xaa is C or S

SEQ ID NO: 108400 - protein, 30 aa, Artificial Sequence
  Cyclic GFR-binding peptide
  MOD_RES (26)..(27): Xaa is C or S
QYNKLYTVVGKDLYLISIASLKTPVXXAKS

SEQ ID NO: 108401 - protein, 42 aa, Artificial Sequence; identical to SEQ ID NO: 87869
  Cyclic GFR-binding peptide
  MOD_RES (2)..(4)..(36)..(37): Xaa is C or S

SEQ ID NO: 108402 - protein, 35 aa, Artificial Sequence; identical to SEQ ID NO: 5838
  Cyclic GFR-binding peptide
  MOD_RES (1)..(32)..(33): Xaa is C or S

SEQ ID NO: 108403 - protein, 31 aa, Artificial Sequence; identical to SEQ ID NO: 34177
  Cyclic GFR-binding peptide
  MOD_RES (1)..(3): Xaa is C or S

SEQ ID NO: 108404 - protein, 29 aa, Artificial Sequence
  Cyclic GFR-binding peptide
VVMNRYKKLIVNSSDDFYLVSIANLKTPA

SEQ ID NO: 108405 - protein, 31 aa, Artificial Sequence; identical to SEQ ID NO: 5842
  Cyclic GFR-binding peptide
  MOD_RES (26)..(27): Xaa is C or S

SEQ ID NO: 108406 - protein, 28 aa, Artificial Sequence
  Cyclic GFR-binding peptide
  MOD_RES (1)..(1): Xaa is C or S
XEEVIMQYNKLLLVRGNDLYLMSIASTK

SEQ ID NO: 108407 - protein, 31 aa, Artificial Sequence; identical to SEQ ID NO: 76450
  Cyclic GFR-binding peptide
  MOD_RES (27)..(28): Xaa is C or S

SEQ ID NO: 108408 - protein, 27 aa, Artificial Sequence
  Cyclic GFR-binding peptide
  MOD_RES (27)..(27): Xaa is C or S
DQYNKLVVNNAADLYLISIASLRAPVX

SEQ ID NO: 108409 - protein, 33 aa, Artificial Sequence; identical to SEQ ID NO: 76453
  Cyclic GFR-binding peptide
  MOD_RES (31)..(32): Xaa is C or S

SEQ ID NO: 108410 - protein, 21 aa, Artificial Sequence
  Cyclic GFR-binding peptide
NQYNKLIVNNSSDLYLVSIAS

SEQ ID NO: 108411 - protein, 25 aa, Artificial Sequence
  Cyclic GFR-binding peptide
MNQYNKLVVNKNEDLYLISIASMKE

SEQ ID NO: 108412 - protein, 27 aa, Artificial Sequence
  Cyclic GFR-binding peptide
EAVSMGEQYNKLTPVGMDDLYLVSIAS

SEQ ID NO: 108413 - protein, 33 aa, Artificial Sequence; identical to SEQ ID NO: 5852
  Cyclic GFR-binding peptide
  MOD_RES (2)..(2): Xaa is C or S

SEQ ID NO: 108414 - protein, 30 aa, Artificial Sequence; identical to SEQ ID NO: 82734
  Cyclic GFR-binding peptide

SEQ ID NO: 108415 - protein, 36 aa, Artificial Sequence; identical to SEQ ID NO: 5855
  Cyclic GFR-binding peptide
  MOD_RES (31)..(31): Xaa is C or S

SEQ ID NO: 108416 - protein, 41 aa, Artificial Sequence; identical to SEQ ID NO: 34191
  Cyclic GFR-binding peptide
  MOD_RES (1)..(3)..(35)..(36): Xaa is C or S

SEQ ID NO: 108417 - protein, 25 aa, Artificial Sequence
  Cyclic GFR-binding peptide
DRYKKLVVNNASDFYLISIANLRTP

SEQ ID NO: 108418 - protein, 25 aa, Artificial Sequence
  Cyclic GFR-binding peptide
VIMQYNKLLLVRGNDLYLMSIASTK

SEQ ID NO: 108419 - protein, 34 aa, Artificial Sequence; identical to SEQ ID NO: 5860
  Cyclic GFR-binding peptide
  MOD_RES (31)..(32): Xaa is C or S

SEQ ID NO: 108420 - protein, 24 aa, Artificial Sequence
  Cyclic GFR-binding peptide
GERYKKLTPVGMDDFYLVSIANLK

SEQ ID NO: 108421 - protein, 27 aa, Artificial Sequence
  Cyclic GFR-binding peptide
VVMQYNKLVKPTRGVLYLISIASLDQP

SEQ ID NO: 108422 - protein, 36 aa, Artificial Sequence; identical to SEQ ID NO: 5864
  Cyclic GFR-binding peptide
  MOD_RES (2)..(33)..(34): Xaa is C or S

SEQ ID NO: 108423 - protein, 39 aa, Artificial Sequence; identical to SEQ ID NO: 16292
  Cyclic GFR-binding peptide
  MOD_RES (1)..(33)..(34): Xaa is C or S

SEQ ID NO: 108424 - protein, 22 aa, Artificial Sequence
  Cyclic GFR-binding peptide
MDQYNKLVVNNAADLYLISIAS

SEQ ID NO: 108425 - protein, 29 aa, Artificial Sequence
  Cyclic GFR-binding peptide
SRVIMQYNKLVKPKRGVLYLISIASLAQP

SEQ ID NO: 108426 - protein, 33 aa, Artificial Sequence
  Cyclic GFR-binding peptide
  MOD_RES (29)..(30): Xaa is C or S
TMNQYNKLVVNKNEDLYLISIASMKEPVXXPEP

SEQ ID NO: 108427 - protein, 30 aa, Artificial Sequence; identical to SEQ ID NO: 5868
  Cyclic GFR-binding peptide
  MOD_RES (1)..(1): Xaa is C or S

SEQ ID NO: 108428 - protein, 29 aa, Artificial Sequence
  Cyclic GFR-binding peptide
EVVMDRYKKLVVNNASDFYLISIANLRTP

SEQ ID NO: 108429 - protein, 27 aa, Artificial Sequence
  Cyclic GFR-binding peptide
EVVMDQYNKLVVNNASDLYLISIASLR

SEQ ID NO: 108430 - protein, 35 aa, Artificial Sequence; identical to SEQ ID NO: 5872
  Cyclic GFR-binding peptide
  MOD_RES (2)..(33)..(34): Xaa is C or S

SEQ ID NO: 108431 - protein, 39 aa, Artificial Sequence; identical to SEQ ID NO: 5874
  Cyclic GFR-binding peptide
  MOD_RES (2)..(34)..(35): Xaa is C or S

SEQ ID NO: 108432 - protein, 28 aa, Artificial Sequence
  Cyclic GFR-binding peptide
  MOD_RES (26)..(27): Xaa is C or S
RYKKLLLVRGNDFYLMSIANTKVPAXXT

SEQ ID NO: 108433 - protein, 35 aa, Artificial Sequence; identical to SEQ ID NO: 87906
  Cyclic GFR-binding peptide
  MOD_RES (2)..(4): Xaa is C or S

SEQ ID NO: 108434 - protein, 30 aa, Artificial Sequence
  Cyclic GFR-binding peptide
  MOD_RES (27)..(28): Xaa is C or S
NQYNKLVVNKNEDLYLISIASMKEPVXXPE

SEQ ID NO: 108435 - protein, 35 aa, Artificial Sequence; identical to SEQ ID NO: 5877
  Cyclic GFR-binding peptide
  MOD_RES (29)..(30): Xaa is C or S

SEQ ID NO: 108436 - protein, 37 aa, Artificial Sequence; identical to SEQ ID NO: 5878
  Cyclic GFR-binding peptide
  MOD_RES (32)..(33): Xaa is C or S

SEQ ID NO: 108437 - protein, 27 aa, Artificial Sequence
  Cyclic GFR-binding peptide
IMRYKKLVKPKRGVFYLISIANLAQPV

SEQ ID NO: 108438 - protein, 37 aa, Artificial Sequence; identical to SEQ ID NO: 34216
  Cyclic GFR-binding peptide
  MOD_RES (32)..(33): Xaa is C or S

SEQ ID NO: 108439 - protein, 24 aa, Artificial Sequence
  Cyclic GFR-binding peptide
VVMDQYNKLVVNNASDLYLISIAS

SEQ ID NO: 108440 - protein, 28 aa, Artificial Sequence
  Cyclic GFR-binding peptide
  MOD_RES (1)..(3): Xaa is C or S
XKXSKVIMRYKKLIKPTKGIFYLISIAN

SEQ ID NO: 108441 - protein, 37 aa, Artificial Sequence; identical to SEQ ID NO: 5885
  Cyclic GFR-binding peptide
  MOD_RES (31)..(32): Xaa is C or S

SEQ ID NO: 108442 - protein, 28 aa, Artificial Sequence
  Cyclic GFR-binding peptide
  MOD_RES (26)..(27): Xaa is C or S
QYNKLVVKENEDLYLMSIASLETPVXXA

SEQ ID NO: 108443 - protein, 36 aa, Artificial Sequence; identical to SEQ ID NO: 5887
  Cyclic GFR-binding peptide
  MOD_RES (32)..(32): Xaa is C or S

SEQ ID NO: 108444 - protein, 35 aa, Artificial Sequence
  Cyclic GFR-binding peptide
  MOD_RES (31)..(32): Xaa is C or S
DVVMGQYNKLIIQQKDNLYLMSIASMKTPTXXPGA

SEQ ID NO: 108445 - protein, 36 aa, Artificial Sequence
  Cyclic GFR-binding peptide
  MOD_RES (2)..(4)..(36): Xaa is C or S
SXGXRDVVMGQYNKLIIQQKDNLYLMSIASMKTPTX

SEQ ID NO: 108446 - protein, 34 aa, Artificial Sequence; identical to SEQ ID NO: 5889
  Cyclic GFR-binding peptide
  MOD_RES (32)..(33): Xaa is C or S

SEQ ID NO: 108447 - protein, 31 aa, Artificial Sequence
  Cyclic GFR-binding peptide
  MOD_RES (31)..(31): Xaa is C or S
EVTMNQYNKLVVNKNEDLYLISIASMKEPVX

SEQ ID NO: 108448 - protein, 32 aa, Artificial Sequence; identical to SEQ ID NO: 5891
  Cyclic GFR-binding peptide
  MOD_RES (2)..(4): Xaa is C or S

SEQ ID NO: 108449 - protein, 33 aa, Artificial Sequence
  Cyclic GFR-binding peptide
  MOD_RES (29)..(30): Xaa is C or S
VMGQYNKLIIQQKDNLYLMSIASMKTPTXXPGA

SEQ ID NO: 108450 - protein, 31 aa, Artificial Sequence; identical to SEQ ID NO: 5892
  Cyclic GFR-binding peptide
  MOD_RES (26)..(26): Xaa is C or S

SEQ ID NO: 108451 - protein, 34 aa, Artificial Sequence; identical to SEQ ID NO: 5894
  Cyclic GFR-binding peptide
  MOD_RES (29)..(30): Xaa is C or S

SEQ ID NO: 108452 - protein, 34 aa, Artificial Sequence; identical to SEQ ID NO: 5895
  Cyclic GFR-binding peptide
  MOD_RES (28)..(29): Xaa is C or S

SEQ ID NO: 108453 - protein, 33 aa, Artificial Sequence; identical to SEQ ID NO: 76489
  Cyclic GFR-binding peptide
  MOD_RES (2)..(2): Xaa is C or S

SEQ ID NO: 108454 - protein, 25 aa, Artificial Sequence
  Cyclic GFR-binding peptide
VMNQYNKLIVNSSDDLYLVSIASLQ

SEQ ID NO: 108455 - protein, 39 aa, Artificial Sequence; identical to SEQ ID NO: 5899
  Cyclic GFR-binding peptide
  MOD_RES (1)..(33): Xaa is C or S

SEQ ID NO: 108456 - protein, 32 aa, Artificial Sequence; identical to SEQ ID NO: 5900
  Cyclic GFR-binding peptide
  MOD_RES (31)..(32): Xaa is C or S

SEQ ID NO: 108457 - protein, 23 aa, Artificial Sequence
  Cyclic GFR-binding peptide
MDQYNKLVVNNASDLYLISIASL

SEQ ID NO: 108458 - protein, 30 aa, Artificial Sequence; identical to SEQ ID NO: 5902
  Cyclic GFR-binding peptide
  MOD_RES (29)..(30): Xaa is C or S

SEQ ID NO: 108459 - protein, 29 aa, Artificial Sequence
  Cyclic GFR-binding peptide
  MOD_RES (27)..(28): Xaa is C or S
DQYNKLVVKENEDLYLMSIASLETPVXXA

SEQ ID NO: 108460 - protein, 32 aa, Artificial Sequence
  Cyclic GFR-binding peptide
  MOD_RES (1)..(3): Xaa is C or S
XGXRDVVMGQYNKLIIQQKDNLYLMSIASMKT

SEQ ID NO: 108461 - protein, 34 aa, Artificial Sequence; identical to SEQ ID NO: 5909
  Cyclic GFR-binding peptide
  MOD_RES (28)..(29): Xaa is C or S

SEQ ID NO: 108462 - protein, 29 aa, Artificial Sequence
  Cyclic GFR-binding peptide
  MOD_RES (1)..(3): Xaa is C or S
XGXAEVVMDQYNKLVVNNAADLYLISIAS

SEQ ID NO: 108463 - protein, 41 aa, Artificial Sequence; identical to SEQ ID NO: 5910
  Cyclic GFR-binding peptide
  MOD_RES (2)..(4)..(35)..(36): Xaa is C or S

SEQ ID NO: 108464 - protein, 33 aa, Artificial Sequence; identical to SEQ ID NO: 5911
  Cyclic GFR-binding peptide
  MOD_RES (28)..(29): Xaa is C or S

SEQ ID NO: 108465 - protein, 35 aa, Artificial Sequence; identical to SEQ ID NO: 5912
  Cyclic GFR-binding peptide
  MOD_RES (31)..(32): Xaa is C or S

SEQ ID NO: 108466 - protein, 35 aa, Artificial Sequence; identical to SEQ ID NO: 5913
  Cyclic GFR-binding peptide
  MOD_RES (2)..(34)..(35): Xaa is C or S

SEQ ID NO: 108467 - protein, 32 aa, Artificial Sequence; identical to SEQ ID NO: 76503
  Cyclic GFR-binding peptide
  MOD_RES (2)..(2): Xaa is C or S

SEQ ID NO: 108468 - protein, 36 aa, Artificial Sequence; identical to SEQ ID NO: 5914
  Cyclic GFR-binding peptide
  MOD_RES (2)..(4)..(36): Xaa is C or S

SEQ ID NO: 108469 - protein, 30 aa, Artificial Sequence; identical to SEQ ID NO: 5915
  Cyclic GFR-binding peptide
  MOD_RES (28)..(29): Xaa is C or S

SEQ ID NO: 108470 - protein, 28 aa, Artificial Sequence
  Cyclic GFR-binding peptide
  MOD_RES (26)..(27): Xaa is C or S
QYNKLIVNNSSDLYLVSIASLKTPAXXA

SEQ ID NO: 108471 - protein, 24 aa, Artificial Sequence
  Cyclic GFR-binding peptide
MNRYKKLVVNKNEDFYLISIANMK

SEQ ID NO: 108472 - protein, 23 aa, Artificial Sequence
  Cyclic GFR-binding peptide
MRYKKLVKPTRGVFYLISIANLD

SEQ ID NO: 108473 - protein, 26 aa, Artificial Sequence
  Cyclic GFR-binding peptide
GEVVMDRYKKLVVKENEDFYLMSIAN

SEQ ID NO: 108474 - protein, 29 aa, Artificial Sequence
  Cyclic GFR-binding peptide
  MOD_RES (29)..(29): Xaa is C or S
VMERYKKLVVKDYEDFYLMSIANLETPVX

SEQ ID NO: 108475 - protein, 29 aa, Artificial Sequence
  Cyclic GFR-binding peptide
  MOD_RES (1)..(1): Xaa is C or S
XSRVIMRYKKLVKPKRGVFYLISIANLAQ

SEQ ID NO: 108476 - protein, 23 aa, Artificial Sequence
  Cyclic GFR-binding peptide
IMRYKKLVKPKRGVFYLISIANL

SEQ ID NO: 108477 - protein, 38 aa, Artificial Sequence; identical to SEQ ID NO: 5927
  Cyclic GFR-binding peptide
  MOD_RES (1)..(3)..(35)..(36): Xaa is C or S

SEQ ID NO: 108478 - protein, 22 aa, Artificial Sequence
  Cyclic GFR-binding peptide
RYKKLVVNNAADFYLISIANLR

SEQ ID NO: 108479 - protein, 27 aa, Artificial Sequence
  Cyclic GFR-binding peptide
VVMEQYNKLVVKDYEDLYLMSIASLET

SEQ ID NO: 108480 - protein, 32 aa, Artificial Sequence; identical to SEQ ID NO: 5940
  Cyclic GFR-binding peptide
  MOD_RES (2)..(2): Xaa is C or S

SEQ ID NO: 108481 - protein, 30 aa, Artificial Sequence
  Cyclic GFR-binding peptide
  MOD_RES (27)..(28): Xaa is C or S
GQYNKLIIQQKDNLYLMSIASMKTPTXXPG

SEQ ID NO: 108482 - protein, 37 aa, Artificial Sequence; identical to SEQ ID NO: 34282
  Cyclic GFR-binding peptide
  MOD_RES (2)..(4)..(36)..(37): Xaa is C or S

SEQ ID NO: 108483 - protein, 30 aa, Artificial Sequence; identical to SEQ ID NO: 5946
  Cyclic GFR-binding peptide
  MOD_RES (1)..(1): Xaa is C or S

SEQ ID NO: 108484 - protein, 25 aa, Artificial Sequence
  Cyclic GFR-binding peptide
MEQYNKLVVKDYEDLYLMSIASLET

SEQ ID NO: 108485 - protein, 25 aa, Artificial Sequence
  Cyclic GFR-binding peptide
TMNQYNKLVVNKNEDLYLISIASMK

SEQ ID NO: 108486 - protein, 29 aa, Artificial Sequence
  Cyclic GFR-binding peptide
  MOD_RES (26)..(27): Xaa is C or S
RYKKLVVKDYEDFYLMSIANLETPVXXAK

SEQ ID NO: 108487 - protein, 38 aa, Artificial Sequence; identical to SEQ ID NO: 5952
  Cyclic GFR-binding peptide
  MOD_RES (32)..(33): Xaa is C or S

SEQ ID NO: 108488 - protein, 32 aa, Artificial Sequence
  Cyclic GFR-binding peptide
  MOD_RES (31)..(32): Xaa is C or S
EVTMNQYNKLVVNKNEDLYLISIASMKEPVXX

SEQ ID NO: 108489 - protein, 26 aa, Artificial Sequence
  Cyclic GFR-binding peptide
VMDQYNKLVVNNASDLYLISIASLRT

SEQ ID NO: 108490 - protein, 32 aa, Artificial Sequence; identical to SEQ ID NO: 5953
  Cyclic GFR-binding peptide
  MOD_RES (2)..(4): Xaa is C or S

SEQ ID NO: 108491 - protein, 39 aa, Artificial Sequence; identical to SEQ ID NO: 82821
  Cyclic GFR-binding peptide
  MOD_RES (2)..(34)..(35): Xaa is C or S

SEQ ID NO: 108492 - protein, 40 aa, Artificial Sequence; identical to SEQ ID NO: 5956
  Cyclic GFR-binding peptide
  MOD_RES (2)..(4)..(35)..(36): Xaa is C or S

SEQ ID NO: 108493 - protein, 37 aa, Artificial Sequence; identical to SEQ ID NO: 5957
  Cyclic GFR-binding peptide
  MOD_RES (2)..(34): Xaa is C or S

SEQ ID NO: 108494 - protein, 27 aa, Artificial Sequence
  Cyclic GFR-binding peptide
VMDRYKKLVVNNAADFYLISIANLRAP

SEQ ID NO: 108495 - protein, 32 aa, Artificial Sequence; identical to SEQ ID NO: 16391
  Cyclic GFR-binding peptide
  MOD_RES (26)..(27): Xaa is C or S

SEQ ID NO: 108496 - protein, 28 aa, Artificial Sequence
  Cyclic GFR-binding peptide
  MOD_RES (2)..(2): Xaa is C or S
KXSRVIMRYKKLVKPKRGVFYLISIANL

SEQ ID NO: 108497 - protein, 29 aa, Artificial Sequence
  Cyclic GFR-binding peptide
  MOD_RES (1)..(3): Xaa is C or S
XGXESVAMGQYNKLYTVVGKDLYLISIAS

SEQ ID NO: 108498 - protein, 33 aa, Artificial Sequence
  Cyclic GFR-binding peptide
  MOD_RES (1)..(32)..(33): Xaa is C or S
XEEVIMQYNKLLLVRGNDLYLMSIASTKVPAXX

SEQ ID NO: 108499 - protein, 33 aa, Artificial Sequence; identical to SEQ ID NO: 34308
  Cyclic GFR-binding peptide
  MOD_RES (27)..(28): Xaa is C or S

SEQ ID NO: 108500 - protein, 33 aa, Artificial Sequence
  Cyclic GFR-binding peptide
  MOD_RES (32)..(33): Xaa is C or S
AEVVMDQYNKLVVNNAADLYLISIASLRAPVXX

SEQ ID NO: 108501 - protein, 24 aa, Artificial Sequence
  Cyclic GFR-binding peptide
RYKKLVVKENEDFYLMSIANLETP

SEQ ID NO: 108502 - protein, 23 aa, Artificial Sequence
  Cyclic GFR-binding peptide
NQYNKLVVNKNEDLYLISIASMK

SEQ ID NO: 108503 - protein, 29 aa, Artificial Sequence
  Cyclic GFR-binding peptide
RVIMRYKKLVKPKRGVFYLISIANLAQPV

SEQ ID NO: 108504 - protein, 35 aa, Artificial Sequence; identical to SEQ ID NO: 34313
  Cyclic GFR-binding peptide
  MOD_RES (2)..(34)..(35): Xaa is C or S

SEQ ID NO: 108505 - protein, 26 aa, Artificial Sequence
  Cyclic GFR-binding peptide
VMEQYNKLVVKDYEDLYLMSIASLET

SEQ ID NO: 108506 - protein, 39 aa, Artificial Sequence; identical to SEQ ID NO: 5972
  Cyclic GFR-binding peptide
  MOD_RES (2)..(33)..(34): Xaa is C or S

SEQ ID NO: 108507 - protein, 25 aa, Artificial Sequence
  Cyclic GFR-binding peptide
MDQYNKLVVNNASDLYLISIASLRT

SEQ ID NO: 108508 - protein, 37 aa, Artificial Sequence; identical to SEQ ID NO: 5973
  Cyclic GFR-binding peptide
  MOD_RES (1)..(3)..(36)..(37): Xaa is C or S

SEQ ID NO: 108509 - protein, 26 aa, Artificial Sequence
  Cyclic GFR-binding peptide
  MOD_RES (26)..(26): Xaa is C or S
RYKKLVVKENEDFYLMSIANLETPVX

SEQ ID NO: 108510 - protein, 27 aa, Artificial Sequence
  Cyclic GFR-binding peptide
VMERYKKLVVKDYEDFYLMSIANLETP

SEQ ID NO: 108511 - protein, 32 aa, Artificial Sequence
  Cyclic GFR-binding peptide
  MOD_RES (1)..(1): Xaa is C or S
XSEVTMNQYNKLVVNKNEDLYLISIASMKEPV

SEQ ID NO: 108512 - protein, 33 aa, Artificial Sequence; identical to SEQ ID NO: 5977
  Cyclic GFR-binding peptide
  MOD_RES (30)..(31): Xaa is C or S

SEQ ID NO: 108513 - protein, 29 aa, Artificial Sequence
  Cyclic GFR-binding peptide
  MOD_RES (2)..(2): Xaa is C or S
GXGEVVMDQYNKLVVKENEDLYLMSIASL

SEQ ID NO: 108514 - protein, 33 aa, Artificial Sequence
  Cyclic GFR-binding peptide
  MOD_RES (30)..(31): Xaa is C or S
VAMGQYNKLYTVVGKDLYLISIASLKTPVXXAK

SEQ ID NO: 108515 - protein, 36 aa, Artificial Sequence; identical to SEQ ID NO: 16410
  Cyclic GFR-binding peptide
  MOD_RES (1)..(33)..(34): Xaa is C or S

SEQ ID NO: 108516 - protein, 34 aa, Artificial Sequence; identical to SEQ ID NO: 5981
  Cyclic GFR-binding peptide
  MOD_RES (28)..(29): Xaa is C or S

SEQ ID NO: 108517 - protein, 40 aa, Artificial Sequence; identical to SEQ ID NO: 5983
  Cyclic GFR-binding peptide
  MOD_RES (1)..(34)..(35): Xaa is C or S

SEQ ID NO: 108518 - protein, 28 aa, Artificial Sequence
  Cyclic GFR-binding peptide
  MOD_RES (26)..(27): Xaa is C or S
QYNKLLLVRGNDLYLMSIASTKVPAXXT

SEQ ID NO: 108519 - protein, 32 aa, Artificial Sequence; identical to SEQ ID NO: 5986
  Cyclic GFR-binding peptide
  MOD_RES (32)..(32): Xaa is C or S

SEQ ID NO: 108520 - protein, 25 aa, Artificial Sequence
  Cyclic GFR-binding peptide
MGEQYNKLTPVGMDDLYLVSIASLK

SEQ ID NO: 108521 - protein, 34 aa, Artificial Sequence; identical to SEQ ID NO: 5992
  Cyclic GFR-binding peptide
  MOD_RES (1)..(3)..(34): Xaa is C or S

SEQ ID NO: 108522 - protein, 37 aa, Artificial Sequence; identical to SEQ ID NO: 16422
  Cyclic GFR-binding peptide
  MOD_RES (32)..(33): Xaa is C or S

SEQ ID NO: 108523 - protein, 40 aa, Artificial Sequence
  Cyclic GFR-binding peptide
  MOD_RES (1)..(3)..(34)..(35): Xaa is C or S
XGXEEVIMQYNKLLLVRGNDLYLMSIASTKVPAXXTSPVR

SEQ ID NO: 108524 - protein, 35 aa, Artificial Sequence; identical to SEQ ID NO: 5999
  Cyclic GFR-binding peptide
  MOD_RES (2)..(34): Xaa is C or S

SEQ ID NO: 108525 - protein, 26 aa, Artificial Sequence
  Cyclic GFR-binding peptide
DQYNKLVVNNAADLYLISIASLRAPV

SEQ ID NO: 108526 - protein, 29 aa, Artificial Sequence
  Cyclic GFR-binding peptide
  MOD_RES (2)..(2): Xaa is C or S
KXSRVIMRYKKLVKPKRGVFYLISIANLA

SEQ ID NO: 108527 - protein, 21 aa, Artificial Sequence
  Cyclic GFR-binding peptide
RYKKLVVNNAADFYLISIANL

SEQ ID NO: 108528 - protein, 28 aa, Artificial Sequence
  Cyclic GFR-binding peptide
  MOD_RES (27)..(28): Xaa is C or S
MRYKKLLLVRGNDFYLMSIANTKVPAXX

SEQ ID NO: 108529 - protein, 26 aa, Artificial Sequence
  Cyclic GFR-binding peptide
MRYKKLVKPTRGVFYLISIANLDQPV

SEQ ID NO: 108530 - protein, 27 aa, Artificial Sequence
  Cyclic GFR-binding peptide
  MOD_RES (27)..(27): Xaa is C or S
MRYKKLLLVRGNDFYLMSIANTKVPAX

SEQ ID NO: 108531 - protein, 22 aa, Artificial Sequence
  Cyclic GFR-binding peptide
MDQYNKLVVKENEDLYLMSIAS

SEQ ID NO: 108532 - protein, 22 aa, Artificial Sequence
  Cyclic GFR-binding peptide
RYKKLIVNSSDDFYLVSIANLK

SEQ ID NO: 108533 - protein, 22 aa, Artificial Sequence
  Cyclic GFR-binding peptide
RYKKLTPVGMDDFYLVSIANLK

SEQ ID NO: 108534 - protein, 31 aa, Artificial Sequence; identical to SEQ ID NO: 16440
  Cyclic GFR-binding peptide
  MOD_RES (31)..(31): Xaa is C or S

SEQ ID NO: 108535 - protein, 31 aa, Artificial Sequence; identical to SEQ ID NO: 6012
  Cyclic GFR-binding peptide
  MOD_RES (26)..(27): Xaa is C or S

SEQ ID NO: 108536 - protein, 31 aa, Artificial Sequence; identical to SEQ ID NO: 6014
  Cyclic GFR-binding peptide
  MOD_RES (2)..(4): Xaa is C or S

SEQ ID NO: 108537 - protein, 21 aa, Artificial Sequence
  Cyclic GFR-binding peptide
RYKKLVKPTRGVFYLISIANL

SEQ ID NO: 108538 - protein, 26 aa, Artificial Sequence
  Cyclic GFR-binding peptide
  MOD_RES (26)..(26): Xaa is C or S
RYKKLIVNSSDDFYLVSIANLKTPAX

SEQ ID NO: 108539 - protein, 38 aa, Artificial Sequence; identical to SEQ ID NO: 16449
  Cyclic GFR-binding peptide
  MOD_RES (1)..(33)..(34): Xaa is C or S

SEQ ID NO: 108540 - protein, 28 aa, Artificial Sequence
  Cyclic GFR-binding peptide
  MOD_RES (2)..(2): Xaa is C or S
GXAKVVMNRYKKLIVNNSSDFYLVSIAN

SEQ ID NO: 108541 - protein, 33 aa, Artificial Sequence; identical to SEQ ID NO: 16452
  Cyclic GFR-binding peptide
  MOD_RES (2)..(4): Xaa is C or S

SEQ ID NO: 108542 - protein, 24 aa, Artificial Sequence
  Cyclic GFR-binding peptide
RYKKLLLVRGNDFYLMSIANTKVP

SEQ ID NO: 108543 - protein, 36 aa, Artificial Sequence; identical to SEQ ID NO: 6024
  Cyclic GFR-binding peptide
  MOD_RES (32)..(32): Xaa is C or S

SEQ ID NO: 108544 - protein, 38 aa, Artificial Sequence; identical to SEQ ID NO: 6025
  Cyclic GFR-binding peptide
  MOD_RES (1)..(3)..(35): Xaa is C or S

SEQ ID NO: 108545 - protein, 38 aa, Artificial Sequence; identical to SEQ ID NO: 6026
  Cyclic GFR-binding peptide
  MOD_RES (2)..(34)..(35): Xaa is C or S

SEQ ID NO: 108546 - protein, 28 aa, Artificial Sequence
  Cyclic GFR-binding peptide
  MOD_RES (26)..(27): Xaa is C or S
RYKKLIKPTKGIFYLISIANLDQSVXXP

SEQ ID NO: 108547 - protein, 29 aa, Artificial Sequence
  Cyclic GFR-binding peptide
  MOD_RES (26)..(27): Xaa is C or S
QYNKLVVKDYEDLYLMSIASLETPVXXAK

SEQ ID NO: 108548 - protein, 34 aa, Artificial Sequence; identical to SEQ ID NO: 6029
  Cyclic GFR-binding peptide
  MOD_RES (31)..(32): Xaa is C or S

SEQ ID NO: 108549 - protein, 30 aa, Artificial Sequence; identical to SEQ ID NO: 6031
  Cyclic GFR-binding peptide
  MOD_RES (27)..(27): Xaa is C or S

SEQ ID NO: 108550 - protein, 26 aa, Artificial Sequence
  Cyclic GFR-binding peptide
EVVMERYKKLVVKDYEDFYLMSIANL

SEQ ID NO: 108551 - protein, 34 aa, Artificial Sequence; identical to SEQ ID NO: 6035
  Cyclic GFR-binding peptide
  MOD_RES (2)..(34): Xaa is C or S

SEQ ID NO: 108552 - protein, 39 aa, Artificial Sequence; identical to SEQ ID NO: 6038
  Cyclic GFR-binding peptide
  MOD_RES (1)..(34)..(35): Xaa is C or S

SEQ ID NO: 108553 - protein, 35 aa, Artificial Sequence; identical to SEQ ID NO: 6041
  Cyclic GFR-binding peptide
  MOD_RES (2)..(34)..(35): Xaa is C or S

SEQ ID NO: 108554 - protein, 20 aa, Artificial Sequence
  Cyclic GFR-binding peptide
QYNKLVKPTRGVLYLISIAS

SEQ ID NO: 108555 - protein, 31 aa, Artificial Sequence; identical to SEQ ID NO: 6044
  Cyclic GFR-binding peptide
  MOD_RES (1)..(3): Xaa is C or S

SEQ ID NO: 108556 - protein, 29 aa, Artificial Sequence
  Cyclic GFR-binding peptide
  MOD_RES (1)..(3): Xaa is C or S
XGXGEVVMERYKKLVVKDYEDFYLMSIAN

SEQ ID NO: 108557 - protein, 27 aa, Artificial Sequence
  Cyclic GFR-binding peptide
VVMDQYNKLVVNNASDLYLISIASLRT

SEQ ID NO: 108558 - protein, 36 aa, Artificial Sequence; identical to SEQ ID NO: 6052
  Cyclic GFR-binding peptide
  MOD_RES (31)..(31): Xaa is C or S

SEQ ID NO: 108559 - protein, 28 aa, Artificial Sequence
  Cyclic GFR-binding peptide
  MOD_RES (1)..(1): Xaa is C or S
XEAVSMGERYKKLTPVGMDDFYLVSIAN

SEQ ID NO: 108560 - protein, 35 aa, Artificial Sequence
  Cyclic GFR-binding peptide
  MOD_RES (29)..(30): Xaa is C or S
VMNQYNKLIVNSSDDLYLVSIASLKTPAXXPKPVH

SEQ ID NO: 108561 - protein, 37 aa, Artificial Sequence; identical to SEQ ID NO: 34402
  Cyclic GFR-binding peptide
  MOD_RES (1)..(3)..(35)..(36): Xaa is C or S

SEQ ID NO: 108562 - protein, 31 aa, Artificial Sequence
  Cyclic GFR-binding peptide
  MOD_RES (26)..(27): Xaa is C or S
QYNKLVVNKNEDLYLISIASMKEPVXXPEPI

SEQ ID NO: 108563 - protein, 27 aa, Artificial Sequence
  Cyclic GFR-binding peptide
VMGQYNKLIIQQKDNLYLMSIASMKTP

SEQ ID NO: 108564 - protein, 35 aa, Artificial Sequence; identical to SEQ ID NO: 6056
  Cyclic GFR-binding peptide
  MOD_RES (30)..(31): Xaa is C or S

SEQ ID NO: 108565 - protein, 33 aa, Artificial Sequence
  Cyclic GFR-binding peptide
  MOD_RES (29)..(30): Xaa is C or S
VIMQYNKLLLVRGNDLYLMSIASTKVPAXXTSP

SEQ ID NO: 108566 - protein, 27 aa, Artificial Sequence
  Cyclic GFR-binding peptide
  MOD_RES (27)..(27): Xaa is C or S
ERYKKLTPVGMDDFYLVSIANLKTPVX

SEQ ID NO: 108567 - protein, 28 aa, Artificial Sequence
  Cyclic GFR-binding peptide
  MOD_RES (27)..(28): Xaa is C or S
ERYKKLTPVGMDDFYLVSIANLKTPVXX

SEQ ID NO: 108568 - protein, 29 aa, Artificial Sequence
  Cyclic GFR-binding peptide
  MOD_RES (27)..(28): Xaa is C or S
MQYNKLIKPTKGILYLISIASLDQSVXXP

SEQ ID NO: 108569 - protein, 32 aa, Artificial Sequence; identical to SEQ ID NO: 6070
  Cyclic GFR-binding peptide
  MOD_RES (1)..(3): Xaa is C or S

SEQ ID NO: 108570 - protein, 33 aa, Artificial Sequence; identical to SEQ ID NO: 34415
  Cyclic GFR-binding peptide
  MOD_RES (2)..(2): Xaa is C or S

SEQ ID NO: 108571 - protein, 34 aa, Artificial Sequence; identical to SEQ ID NO: 6071
  Cyclic GFR-binding peptide
  MOD_RES (2)..(4): Xaa is C or S

SEQ ID NO: 108572 - protein, 29 aa, Artificial Sequence
  Cyclic GFR-binding peptide
EEVIMRYKKLLLVRGNDFYLMSIANTKVP

SEQ ID NO: 108573 - protein, 22 aa, Artificial Sequence
  Cyclic GFR-binding peptide
IMRYKKLIKPTKGIFYLISIAN

SEQ ID NO: 108574 - protein, 42 aa, Artificial Sequence
  Cyclic GFR-binding peptide
  MOD_RES (2)..(4)..(36)..(37): Xaa is C or S
HXGXSRVVMNQYNKLIVNSSDDLYLVSIASLKTPAXXPKPVH

SEQ ID NO: 108575 - protein, 30 aa, Artificial Sequence; identical to SEQ ID NO: 6074
  Cyclic GFR-binding peptide
  MOD_RES (28)..(29): Xaa is C or S

SEQ ID NO: 108576 - protein, 25 aa, Artificial Sequence
  Cyclic GFR-binding peptide
VMEQYNKLVVKDYEDLYLMSIASLE

SEQ ID NO: 108577 - protein, 35 aa, Artificial Sequence; identical to SEQ ID NO: 76601
  Cyclic GFR-binding peptide
  MOD_RES (30)..(31): Xaa is C or S

SEQ ID NO: 108578 - protein, 31 aa, Artificial Sequence; identical to SEQ ID NO: 34432
  Cyclic GFR-binding peptide
  MOD_RES (2)..(2): Xaa is C or S

SEQ ID NO: 108579 - protein, 36 aa, Artificial Sequence
  Cyclic GFR-binding peptide
  MOD_RES (2)..(34)..(35): Xaa is C or S
GXESVAMGQYNKLYTVVGKDLYLISIASLKTPVXXA

SEQ ID NO: 108580 - protein, 23 aa, Artificial Sequence
  Cyclic GFR-binding peptide
MNQYNKLIVNSSDDLYLVSIASL

SEQ ID NO: 108581 - protein, 33 aa, Artificial Sequence; identical to SEQ ID NO: 6080
  Cyclic GFR-binding peptide
  MOD_RES (2)..(4): Xaa is C or S

SEQ ID NO: 108582 - protein, 30 aa, Artificial Sequence; identical to SEQ ID NO: 6084
  Cyclic GFR-binding peptide
  MOD_RES (30)..(30): Xaa is C or S

SEQ ID NO: 108583 - protein, 39 aa, Artificial Sequence; identical to SEQ ID NO: 6085
  Cyclic GFR-binding peptide
  MOD_RES (2)..(34): Xaa is C or S

SEQ ID NO: 108584 - protein, 23 aa, Artificial Sequence
  Cyclic GFR-binding peptide
ERYKKLVVKDYEDFYLMSIANLE

SEQ ID NO: 108585 - protein, 43 aa, Artificial Sequence; identical to SEQ ID NO: 6087
  Cyclic GFR-binding peptide
  MOD_RES (2)..(4)..(37)..(38): Xaa is C or S

SEQ ID NO: 108586 - protein, 30 aa, Artificial Sequence; identical to SEQ ID NO: 6088
  Cyclic GFR-binding peptide
  MOD_RES (1)..(3): Xaa is C or S

SEQ ID NO: 108587 - protein, 29 aa, Artificial Sequence
  Cyclic GFR-binding peptide
  MOD_RES (1)..(1): Xaa is C or S
XRDVVMGRYKKLIIQQKDNFYLMSIANMK

SEQ ID NO: 108588 - protein, 31 aa, Artificial Sequence; identical to SEQ ID NO: 82956
  Cyclic GFR-binding peptide
  MOD_RES (2)..(4): Xaa is C or S

SEQ ID NO: 108589 - protein, 31 aa, Artificial Sequence; identical to SEQ ID NO: 6090
  Cyclic GFR-binding peptide
  MOD_RES (1)..(3): Xaa is C or S

SEQ ID NO: 108590 - protein, 35 aa, Artificial Sequence; identical to SEQ ID NO: 6091
  Cyclic GFR-binding peptide
  MOD_RES (1)..(3)..(35): Xaa is C or S

SEQ ID NO: 108591 - protein, 32 aa, Artificial Sequence
  Cyclic GFR-binding peptide
  MOD_RES (30)..(31): Xaa is C or S
EVIMQYNKLLLVRGNDLYLMSIASTKVPAXXT

SEQ ID NO: 108592 - protein, 33 aa, Artificial Sequence; identical to SEQ ID NO: 6096
  Cyclic GFR-binding peptide
  MOD_RES (30)..(31): Xaa is C or S

SEQ ID NO: 108593 - protein, 22 aa, Artificial Sequence
  Cyclic GFR-binding peptide
MGQYNKLYTVVGKDLYLISIAS

SEQ ID NO: 108594 - protein, 40 aa, Artificial Sequence
  Cyclic GFR-binding peptide
  MOD_RES (2)..(34)..(35): Xaa is C or S
GXAEVVMDQYNKLVVNNAADLYLISIASLRAPVXXSAPAA

SEQ ID NO: 108595 - protein, 33 aa, Artificial Sequence; identical to SEQ ID NO: 6101
  Cyclic GFR-binding peptide
  MOD_RES (29)..(30): Xaa is C or S

SEQ ID NO: 108596 - protein, 28 aa, Artificial Sequence
  Cyclic GFR-binding peptide
  MOD_RES (2)..(2): Xaa is C or S
GXSEVVMDRYKKLVVNNASDFYLISIAN

SEQ ID NO: 108597 - protein, 24 aa, Artificial Sequence
  Cyclic GFR-binding peptide
QYNKLLLVRGNDLYLMSIASTKVP

SEQ ID NO: 108598 - protein, 32 aa, Artificial Sequence
  Cyclic GFR-binding peptide
  MOD_RES (28)..(29): Xaa is C or S
MDQYNKLVVNNAADLYLISIASLRAPVXXSAP

SEQ ID NO: 108599 - protein, 32 aa, Artificial Sequence; identical to SEQ ID NO: 6104
  Cyclic GFR-binding peptide
  MOD_RES (28)..(29): Xaa is C or S

SEQ ID NO: 108600 - protein, 37 aa, Artificial Sequence; identical to SEQ ID NO: 16507
  Cyclic GFR-binding peptide
  MOD_RES (31)..(32): Xaa is C or S

SEQ ID NO: 108601 - protein, 27 aa, Artificial Sequence
  Cyclic GFR-binding peptide
VVMGQYNKLIIQQKDNLYLMSIASMKT

SEQ ID NO: 108602 - protein, 30 aa, Artificial Sequence; identical to SEQ ID NO: 6110
  Cyclic GFR-binding peptide
  MOD_RES (2)..(2): Xaa is C or S

SEQ ID NO: 108603 - protein, 26 aa, Artificial Sequence
  Cyclic GFR-binding peptide
MNRYKKLIVNSSDDFYLVSIANLKTP

SEQ ID NO: 108604 - protein, 24 aa, Artificial Sequence
  Cyclic GFR-binding peptide
IMRYKKLVKPKRGVFYLISIANLA

SEQ ID NO: 108605 - protein, 28 aa, Artificial Sequence
  Cyclic GFR-binding peptide
VMERYKKLVVKDYEDFYLMSIANLETPV

SEQ ID NO: 108606 - protein, 35 aa, Artificial Sequence; identical to SEQ ID NO: 16519
  Cyclic GFR-binding peptide
  MOD_RES (30)..(31): Xaa is C or S

SEQ ID NO: 108607 - protein, 27 aa, Artificial Sequence
  Cyclic GFR-binding peptide
  MOD_RES (2)..(2): Xaa is C or S
GXEEVIMRYKKLLLVRGNDFYLMSIAN

SEQ ID NO: 108608 - protein, 36 aa, Artificial Sequence; identical to SEQ ID NO: 6121
  Cyclic GFR-binding peptide
  MOD_RES (32)..(33): Xaa is C or S

SEQ ID NO: 108609 - protein, 32 aa, Artificial Sequence; identical to SEQ ID NO: 6123
  Cyclic GFR-binding peptide
  MOD_RES (1)..(32): Xaa is C or S

SEQ ID NO: 108610 - protein, 27 aa, Artificial Sequence
  Cyclic GFR-binding peptide
  MOD_RES (1)..(1): Xaa is C or S
XRDVVMGRYKKLIIQQKDNFYLMSIAN

SEQ ID NO: 108611 - protein, 20 aa, Artificial Sequence
  Cyclic GFR-binding peptide
RYKKLVKPTRGVFYLISIAN

SEQ ID NO: 108612 - protein, 36 aa, Artificial Sequence; identical to SEQ ID NO: 6130
  Cyclic GFR-binding peptide
  MOD_RES (32)..(33): Xaa is C or S

SEQ ID NO: 108613 - protein, 34 aa, Artificial Sequence; identical to SEQ ID NO: 6131
  Cyclic GFR-binding peptide
  MOD_RES (32)..(33): Xaa is C or S

SEQ ID NO: 108614 - protein, 27 aa, Artificial Sequence
  Cyclic GFR-binding peptide
  MOD_RES (27)..(27): Xaa is C or S
MRYKKLVKPKRGVFYLISIANLAQPVX

SEQ ID NO: 108615 - protein, 26 aa, Artificial Sequence
  Cyclic GFR-binding peptide
RVIMRYKKLVKPKRGVFYLISIANLA

SEQ ID NO: 108616 - protein, 38 aa, Artificial Sequence
  Cyclic GFR-binding peptide
  MOD_RES (2)..(34)..(35): Xaa is C or S
GXESVAMGQYNKLYTVVGKDLYLISIASLKTPVXXAKS

SEQ ID NO: 108617 - protein, 41 aa, Artificial Sequence; identical to SEQ ID NO: 6139
  Cyclic GFR-binding peptide
  MOD_RES (2)..(4)..(36)..(37): Xaa is C or S

SEQ ID NO: 108618 - protein, 32 aa, Artificial Sequence; identical to SEQ ID NO: 6142
  Cyclic GFR-binding peptide
  MOD_RES (2)..(2): Xaa is C or S

SEQ ID NO: 108619 - protein, 28 aa, Artificial Sequence
  Cyclic GFR-binding peptide
  MOD_RES (26)..(27): Xaa is C or S
QYNKLIVNSSDDLYLVSIASLQTPAXXP

SEQ ID NO: 108620 - protein, 37 aa, Artificial Sequence; identical to SEQ ID NO: 16543
  Cyclic GFR-binding peptide
  MOD_RES (1)..(33)..(34): Xaa is C or S

SEQ ID NO: 108621 - protein, 21 aa, Artificial Sequence
  Cyclic GFR-binding peptide
QYNKLVVKDYEDLYLMSIASL

SEQ ID NO: 108622 - protein, 28 aa, Artificial Sequence
  Cyclic GFR-binding peptide
  MOD_RES (26)..(27): Xaa is C or S
QYNKLIKPTKGILYLISIASLDQSVXXP

SEQ ID NO: 108623 - protein, 29 aa, Artificial Sequence
  Cyclic GFR-binding peptide
EVIMRYKKLLLVRGNDFYLMSIANTKVPA

SEQ ID NO: 108624 - protein, 37 aa, Artificial Sequence; identical to SEQ ID NO: 6150
  Cyclic GFR-binding peptide
  MOD_RES (2)..(4)..(36)..(37): Xaa is C or S

SEQ ID NO: 108625 - protein, 28 aa, Artificial Sequence
  Cyclic GFR-binding peptide
EVIMRYKKLLLVRGNDFYLMSIANTKVP

SEQ ID NO: 108626 - protein, 32 aa, Artificial Sequence
  Cyclic GFR-binding peptide
  MOD_RES (30)..(31): Xaa is C or S
VVMDQYNKLVVNNAADLYLISIASLRAPVXXS

SEQ ID NO: 108627 - protein, 35 aa, Artificial Sequence
  Cyclic GFR-binding peptide
  MOD_RES (2)..(4)..(35): Xaa is C or S
LXGXEEVIMQYNKLLLVRGNDLYLMSIASTKVPAX

SEQ ID NO: 108628 - protein, 26 aa, Artificial Sequence
  Cyclic GFR-binding peptide
NQYNKLIVNNSSDLYLVSIASLKTPA

SEQ ID NO: 108629 - protein, 33 aa, Artificial Sequence; identical to SEQ ID NO: 34504
  Cyclic GFR-binding peptide
  MOD_RES (32)..(33): Xaa is C or S

SEQ ID NO: 108630 - protein, 37 aa, Artificial Sequence; identical to SEQ ID NO: 83019
  Cyclic GFR-binding peptide
  MOD_RES (1)..(3)..(35)..(36): Xaa is C or S

SEQ ID NO: 108631 - protein, 36 aa, Artificial Sequence; identical to SEQ ID NO: 6156
  Cyclic GFR-binding peptide
  MOD_RES (1)..(33)..(34): Xaa is C or S

SEQ ID NO: 108632 - protein, 31 aa, Artificial Sequence; identical to SEQ ID NO: 6157
  Cyclic GFR-binding peptide
  MOD_RES (26)..(27): Xaa is C or S

SEQ ID NO: 108633 - protein, 34 aa, Artificial Sequence; identical to SEQ ID NO: 6159
  Cyclic GFR-binding peptide
  MOD_RES (30)..(31): Xaa is C or S

SEQ ID NO: 108634 - protein, 30 aa, Artificial Sequence; identical to SEQ ID NO: 6160
  Cyclic GFR-binding peptide
  MOD_RES (29)..(30): Xaa is C or S

SEQ ID NO: 108635 - protein, 24 aa, Artificial Sequence
  Cyclic GFR-binding peptide
MNQYNKLVVNKNEDLYLISIASMK

SEQ ID NO: 108636 - protein, 32 aa, Artificial Sequence; identical to SEQ ID NO: 6161
  Cyclic GFR-binding peptide
  MOD_RES (27)..(28): Xaa is C or S

SEQ ID NO: 108637 - protein, 26 aa, Artificial Sequence
  Cyclic GFR-binding peptide
VMNRYKKLIVNNSSDFYLVSIANLKT

SEQ ID NO: 108638 - protein, 25 aa, Artificial Sequence
  Cyclic GFR-binding peptide
RYKKLLLVRGNDFYLMSIANTKVPA

SEQ ID NO: 108639 - protein, 39 aa, Artificial Sequence; identical to SEQ ID NO: 6164
  Cyclic GFR-binding peptide
  MOD_RES (1)..(3)..(35)..(36): Xaa is C or S

SEQ ID NO: 108640 - protein, 27 aa, Artificial Sequence
  Cyclic GFR-binding peptide
VAMGQYNKLYTVVGKDLYLISIASLKT

SEQ ID NO: 108641 - protein, 21 aa, Artificial Sequence
  Cyclic GFR-binding peptide
QYNKLVVNNAADLYLISIASL

SEQ ID NO: 108642 - protein, 27 aa, Artificial Sequence
  Cyclic GFR-binding peptide
  MOD_RES (1)..(1): Xaa is C or S
XSEVVMDQYNKLVVNNASDLYLISIAS

SEQ ID NO: 108643 - protein, 35 aa, Artificial Sequence; identical to SEQ ID NO: 6169
  Cyclic GFR-binding peptide
  MOD_RES (31)..(32): Xaa is C or S

SEQ ID NO: 108644 - protein, 37 aa, Artificial Sequence; identical to SEQ ID NO: 6175
  Cyclic GFR-binding peptide
  MOD_RES (31)..(32): Xaa is C or S

SEQ ID NO: 108645 - protein, 33 aa, Artificial Sequence; identical to SEQ ID NO: 16574
  Cyclic GFR-binding peptide
  MOD_RES (27)..(28): Xaa is C or S

SEQ ID NO: 108646 - protein, 31 aa, Artificial Sequence; identical to SEQ ID NO: 6178
  Cyclic GFR-binding peptide
  MOD_RES (26)..(27): Xaa is C or S

SEQ ID NO: 108647 - protein, 21 aa, Artificial Sequence
  Cyclic GFR-binding peptide
QYNKLVKPTRGVLYLISIASL

SEQ ID NO: 108648 - protein, 35 aa, Artificial Sequence
  Cyclic GFR-binding peptide
  MOD_RES (31)..(32): Xaa is C or S
SVAMGQYNKLYTVVGKDLYLISIASLKTPVXXAKS

SEQ ID NO: 108649 - protein, 24 aa, Artificial Sequence
  Cyclic GFR-binding peptide
VVMNRYKKLIVNSSDDFYLVSIAN

SEQ ID NO: 108650 - protein, 30 aa, Artificial Sequence; identical to SEQ ID NO: 83040
  Cyclic GFR-binding peptide
  MOD_RES (29)..(30): Xaa is C or S

SEQ ID NO: 108651 - protein, 30 aa, Artificial Sequence
  Cyclic GFR-binding peptide
EEVIMQYNKLLLVRGNDLYLMSIASTKVPA

SEQ ID NO: 108652 - protein, 36 aa, Artificial Sequence; identical to SEQ ID NO: 6185
  Cyclic GFR-binding peptide
  MOD_RES (31)..(32): Xaa is C or S

SEQ ID NO: 108653 - protein, 34 aa, Artificial Sequence; identical to SEQ ID NO: 6189
  Cyclic GFR-binding peptide
  MOD_RES (2)..(33)..(34): Xaa is C or S

SEQ ID NO: 108654 - protein, 24 aa, Artificial Sequence
  Cyclic GFR-binding peptide
NRYKKLIVNNSSDFYLVSIANLKT

SEQ ID NO: 108655 - protein, 40 aa, Artificial Sequence; identical to SEQ ID NO: 6191
  Cyclic GFR-binding peptide
  MOD_RES (2)..(4)..(36): Xaa is C or S

SEQ ID NO: 108656 - protein, 30 aa, Artificial Sequence; identical to SEQ ID NO: 16598
  Cyclic GFR-binding peptide
  MOD_RES (27)..(28): Xaa is C or S

SEQ ID NO: 108657 - protein, 41 aa, Artificial Sequence
  Cyclic GFR-binding peptide
  MOD_RES (1)..(3)..(35)..(36): Xaa is C or S
XGXESVAMGQYNKLYTVVGKDLYLISIASLKTPVXXAKSAK

SEQ ID NO: 108658 - protein, 36 aa, Artificial Sequence
  Cyclic GFR-binding peptide
  MOD_RES (31)..(32): Xaa is C or S
EVTMNQYNKLVVNKNEDLYLISIASMKEPVXXPEPI

SEQ ID NO: 108659 - protein, 26 aa, Artificial Sequence
  Cyclic GFR-binding peptide
IMQYNKLVKPKRGVLYLISIASLAQP

SEQ ID NO: 108660 - protein, 31 aa, Artificial Sequence; identical to SEQ ID NO: 6198
  Cyclic GFR-binding peptide
  MOD_RES (1)..(1): Xaa is C or S

SEQ ID NO: 108661 - protein, 28 aa, Artificial Sequence
  Cyclic GFR-binding peptide
  MOD_RES (2)..(2): Xaa is C or S
AXSEVTMNQYNKLVVNKNEDLYLISIAS

SEQ ID NO: 108662 - protein, 37 aa, Artificial Sequence; identical to SEQ ID NO: 6199
  Cyclic GFR-binding peptide
  MOD_RES (31)..(32): Xaa is C or S

SEQ ID NO: 108663 - protein, 24 aa, Artificial Sequence
  Cyclic GFR-binding peptide
KVVMRYKKLVKPTRGVFYLISIAN

SEQ ID NO: 108664 - protein, 22 aa, Artificial Sequence
  Cyclic GFR-binding peptide
QYNKLIVNSSDDLYLVSIASLK

SEQ ID NO: 108665 - protein, 36 aa, Artificial Sequence
  Cyclic GFR-binding peptide
  MOD_RES (1)..(3)..(35)..(36): Xaa is C or S
XGXESVAMGQYNKLYTVVGKDLYLISIASLKTPVXX

SEQ ID NO: 108666 - protein, 28 aa, Artificial Sequence
  Cyclic GFR-binding peptide
  MOD_RES (26)..(26): Xaa is C or S
QYNKLIVNSSDDLYLVSIASLKTPAXTP

SEQ ID NO: 108667 - protein, 34 aa, Artificial Sequence; identical to SEQ ID NO: 6204
  Cyclic GFR-binding peptide
  MOD_RES (30)..(30): Xaa is C or S

SEQ ID NO: 108668 - protein, 33 aa, Artificial Sequence; identical to SEQ ID NO: 6206
  Cyclic GFR-binding peptide
  MOD_RES (27)..(27): Xaa is C or S

SEQ ID NO: 108669 - protein, 42 aa, Artificial Sequence; identical to SEQ ID NO: 6207
  Cyclic GFR-binding peptide
  MOD_RES (1)..(3)..(36)..(37): Xaa is C or S

SEQ ID NO: 108670 - protein, 22 aa, Artificial Sequence
  Cyclic GFR-binding peptide
NQYNKLVVNKNEDLYLISIASM

SEQ ID NO: 108671 - protein, 22 aa, Artificial Sequence
  Cyclic GFR-binding peptide
QYNKLTPVGMDDLYLVSIASLK

SEQ ID NO: 108672 - protein, 34 aa, Artificial Sequence
  Cyclic GFR-binding peptide
  MOD_RES (30)..(31): Xaa is C or S
VVMDQYNKLVVNNAADLYLISIASLRAPVXXSAP

SEQ ID NO: 108673 - protein, 33 aa, Artificial Sequence; identical to SEQ ID NO: 6211
  Cyclic GFR-binding peptide
  MOD_RES (29)..(30): Xaa is C or S

SEQ ID NO: 108674 - protein, 34 aa, Artificial Sequence
  Cyclic GFR-binding peptide
  MOD_RES (28)..(29): Xaa is C or S
MDQYNKLVVNNAADLYLISIASLRAPVXXSAPAA

SEQ ID NO: 108675 - protein, 28 aa, Artificial Sequence
  Cyclic GFR-binding peptide
VMDRYKKLVVNNASDFYLISIANLRTPV

SEQ ID NO: 108676 - protein, 27 aa, Artificial Sequence
  Cyclic GFR-binding peptide
EVVMDRYKKLVVNNASDFYLISIANLR

SEQ ID NO: 108677 - protein, 26 aa, Artificial Sequence
  Cyclic GFR-binding peptide
  MOD_RES (26)..(26): Xaa is C or S
QYNKLIVNSSDDLYLVSIASLKTPAX

SEQ ID NO: 108678 - protein, 31 aa, Artificial Sequence; identical to SEQ ID NO: 76666
  Cyclic GFR-binding peptide
  MOD_RES (2)..(4): Xaa is C or S

SEQ ID NO: 108679 - protein, 30 aa, Artificial Sequence; identical to SEQ ID NO: 6216
  Cyclic GFR-binding peptide
  MOD_RES (2)..(4): Xaa is C or S

SEQ ID NO: 108680 - protein, 29 aa, Artificial Sequence
  Cyclic GFR-binding peptide
  MOD_RES (29)..(29): Xaa is C or S
AMGQYNKLYTVVGKDLYLISIASLKTPVX

SEQ ID NO: 108681 - protein, 35 aa, Artificial Sequence; identical to SEQ ID NO: 6217
  Cyclic GFR-binding peptide
  MOD_RES (30)..(31): Xaa is C or S

SEQ ID NO: 108682 - protein, 33 aa, Artificial Sequence; identical to SEQ ID NO: 6218
  Cyclic GFR-binding peptide
  MOD_RES (30)..(31): Xaa is C or S

SEQ ID NO: 108683 - protein, 30 aa, Artificial Sequence; identical to SEQ ID NO: 6219
  Cyclic GFR-binding peptide

SEQ ID NO: 108684 - protein, 27 aa, Artificial Sequence
  Cyclic GFR-binding peptide
  MOD_RES (26)..(27): Xaa is C or S
QYNKLIVNSSDDLYLVSIASLKTPAXX

SEQ ID NO: 108685 - protein, 37 aa, Artificial Sequence; identical to SEQ ID NO: 16626
  Cyclic GFR-binding peptide
  MOD_RES (32)..(33): Xaa is C or S

SEQ ID NO: 108686 - protein, 42 aa, Artificial Sequence; identical to SEQ ID NO: 6222
  Cyclic GFR-binding peptide
  MOD_RES (2)..(4)..(37)..(38): Xaa is C or S

SEQ ID NO: 108687 - protein, 20 aa, Artificial Sequence
  Cyclic GFR-binding peptide
RYKKLVVNNAADFYLISIAN

SEQ ID NO: 108688 - protein, 25 aa, Artificial Sequence
  Cyclic GFR-binding peptide
VMDQYNKLVVNNASDLYLISIASLR

SEQ ID NO: 108689 - protein, 24 aa, Artificial Sequence
  Cyclic GFR-binding peptide
MDQYNKLVVNNAADLYLISIASLR

SEQ ID NO: 108690 - protein, 38 aa, Artificial Sequence; identical to SEQ ID NO: 34583
  Cyclic GFR-binding peptide
  MOD_RES (2)..(4)..(36)..(37): Xaa is C or S

SEQ ID NO: 108691 - protein, 29 aa, Artificial Sequence
  Cyclic GFR-binding peptide
EEVIMQYNKLLLVRGNDLYLMSIASTKVP

SEQ ID NO: 108692 - protein, 26 aa, Artificial Sequence
  Cyclic GFR-binding peptide
IMRYKKLVKPKRGVFYLISIANLAQP

SEQ ID NO: 108693 - protein, 34 aa, Artificial Sequence; identical to SEQ ID NO: 6227
  Cyclic GFR-binding peptide
  MOD_RES (31)..(32): Xaa is C or S

SEQ ID NO: 108694 - protein, 40 aa, Artificial Sequence
  Cyclic GFR-binding peptide
  MOD_RES (2)..(4)..(36)..(37): Xaa is C or S
RXGXESVAMGQYNKLYTVVGKDLYLISIASLKTPVXXAKS

SEQ ID NO: 108695 - protein, 25 aa, Artificial Sequence
  Cyclic GFR-binding peptide
SMGERYKKLTPVGMDDFYLVSIANL

SEQ ID NO: 108696 - protein, 29 aa, Artificial Sequence
  Cyclic GFR-binding peptide
  MOD_RES (29)..(29): Xaa is C or S
VMDRYKKLVVKENEDFYLMSIANLETPVX

SEQ ID NO: 108697 - protein, 38 aa, Artificial Sequence
  Cyclic GFR-binding peptide
  MOD_RES (32)..(33): Xaa is C or S
SEVTMNQYNKLVVNKNEDLYLISIASMKEPVXXPEPIG

SEQ ID NO: 108698 - protein, 33 aa, Artificial Sequence; identical to SEQ ID NO: 6234
  Cyclic GFR-binding peptide
  MOD_RES (1)..(3): Xaa is C or S

SEQ ID NO: 108699 - protein, 31 aa, Artificial Sequence; identical to SEQ ID NO: 76679
  Cyclic GFR-binding peptide
  MOD_RES (27)..(28): Xaa is C or S

SEQ ID NO: 108700 - protein, 33 aa, Artificial Sequence; identical to SEQ ID NO: 6238
  Cyclic GFR-binding peptide
  MOD_RES (27)..(28): Xaa is C or S

SEQ ID NO: 108701 - protein, 30 aa, Artificial Sequence; identical to SEQ ID NO: 6239
  Cyclic GFR-binding peptide
  MOD_RES (28)..(29): Xaa is C or S

SEQ ID NO: 108702 - protein, 23 aa, Artificial Sequence
  Cyclic GFR-binding peptide
IMQYNKLVKPKRGVLYLISIASL

SEQ ID NO: 108703 - protein, 28 aa, Artificial Sequence
  Cyclic GFR-binding peptide
  MOD_RES (2)..(2): Xaa is C or S
GXEEVIMQYNKLLLVRGNDLYLMSIAST

SEQ ID NO: 108704 - protein, 23 aa, Artificial Sequence
  Cyclic GFR-binding peptide
QYNKLVVNKNEDLYLISIASMKE

SEQ ID NO: 108705 - protein, 31 aa, Artificial Sequence
  Cyclic GFR-binding peptide
  MOD_RES (30)..(31): Xaa is C or S
VAMGQYNKLYTVVGKDLYLISIASLKTPVXX

SEQ ID NO: 108706 - protein, 27 aa, Artificial Sequence
  Cyclic GFR-binding peptide
VVMDQYNKLVVKENEDLYLMSIASLET

SEQ ID NO: 108707 - protein, 35 aa, Artificial Sequence; identical to SEQ ID NO: 6245
  Cyclic GFR-binding peptide
  MOD_RES (31)..(32): Xaa is C or S

SEQ ID NO: 108708 - protein, 36 aa, Artificial Sequence; identical to SEQ ID NO: 83093
  Cyclic GFR-binding peptide
  MOD_RES (30)..(31): Xaa is C or S

SEQ ID NO: 108709 - protein, 30 aa, Artificial Sequence; identical to SEQ ID NO: 76687
  Cyclic GFR-binding peptide
  MOD_RES (2)..(2): Xaa is C or S

SEQ ID NO: 108710 - protein, 26 aa, Artificial Sequence
  Cyclic GFR-binding peptide
VIMRYKKLLLVRGNDFYLMSIANTKV

SEQ ID NO: 108711 - protein, 28 aa, Artificial Sequence
  Cyclic GFR-binding peptide
  MOD_RES (1)..(1): Xaa is C or S
XSEVVMDRYKKLVVNNASDFYLISIANL

SEQ ID NO: 108712 - protein, 36 aa, Artificial Sequence; identical to SEQ ID NO: 6252
  Cyclic GFR-binding peptide
  MOD_RES (30)..(30): Xaa is C or S

SEQ ID NO: 108713 - protein, 28 aa, Artificial Sequence
  Cyclic GFR-binding peptide
  MOD_RES (26)..(27): Xaa is C or S
QYNKLVVNKNEDLYLISIASMKEPVXXP

SEQ ID NO: 108714 - protein, 34 aa, Artificial Sequence; identical to SEQ ID NO: 6254
  Cyclic GFR-binding peptide
  MOD_RES (32)..(33): Xaa is C or S

SEQ ID NO: 108715 - protein, 33 aa, Artificial Sequence; identical to SEQ ID NO: 34610
  Cyclic GFR-binding peptide
  MOD_RES (31)..(32): Xaa is C or S

SEQ ID NO: 108716 - protein, 28 aa, Artificial Sequence
  Cyclic GFR-binding peptide
SVAMGRYKKLYTVVGKDFYLISIANLKT

SEQ ID NO: 108717 - protein, 22 aa, Artificial Sequence
  Cyclic GFR-binding peptide
IMQYNKLIKPTKGILYLISIAS

SEQ ID NO: 108718 - protein, 37 aa, Artificial Sequence; identical to SEQ ID NO: 6259
  Cyclic GFR-binding peptide
  MOD_RES (1)..(33)..(34): Xaa is C or S

SEQ ID NO: 108719 - protein, 30 aa, Artificial Sequence; identical to SEQ ID NO: 6261
  Cyclic GFR-binding peptide
  MOD_RES (27)..(28): Xaa is C or S

SEQ ID NO: 108720 - protein, 26 aa, Artificial Sequence
  Cyclic GFR-binding peptide
TMNRYKKLVVNKNEDFYLISIANMKE

SEQ ID NO: 108721 - protein, 31 aa, Artificial Sequence; identical to SEQ ID NO: 6264
  Cyclic GFR-binding peptide
  MOD_RES (30)..(31): Xaa is C or S

SEQ ID NO: 108722 - protein, 32 aa, Artificial Sequence; identical to SEQ ID NO: 6265
  Cyclic GFR-binding peptide
  MOD_RES (27)..(28): Xaa is C or S

SEQ ID NO: 108723 - protein, 38 aa, Artificial Sequence; identical to SEQ ID NO: 6268
  Cyclic GFR-binding peptide
  MOD_RES (32)..(32): Xaa is C or S

SEQ ID NO: 108724 - protein, 32 aa, Artificial Sequence; identical to SEQ ID NO: 6271
  Cyclic GFR-binding peptide
  MOD_RES (27)..(28): Xaa is C or S

SEQ ID NO: 108725 - protein, 28 aa, Artificial Sequence
  Cyclic GFR-binding peptide
  MOD_RES (1)..(1): Xaa is C or S
XRDVVMGQYNKLIIQQKDNLYLMSIASM

SEQ ID NO: 108726 - protein, 26 aa, Artificial Sequence
  Cyclic GFR-binding peptide
VIMRYKKLIKPTKGIFYLISIANLDQ

SEQ ID NO: 108727 - protein, 31 aa, Artificial Sequence; identical to SEQ ID NO: 6276
  Cyclic GFR-binding peptide
  MOD_RES (2)..(2): Xaa is C or S

SEQ ID NO: 108728 - protein, 24 aa, Artificial Sequence
  Cyclic GFR-binding peptide
VMDQYNKLVVKENEDLYLMSIASL

SEQ ID NO: 108729 - protein, 31 aa, Artificial Sequence; identical to SEQ ID NO: 6279
  Cyclic GFR-binding peptide
  MOD_RES (27)..(28): Xaa is C or S

SEQ ID NO: 108730 - protein, 30 aa, Artificial Sequence; identical to SEQ ID NO: 6280
  Cyclic GFR-binding peptide

SEQ ID NO: 108731 - protein, 29 aa, Artificial Sequence
  Cyclic GFR-binding peptide
  MOD_RES (1)..(1): Xaa is C or S
XSRVIMQYNKLVKPKRGVLYLISIASLAQ

SEQ ID NO: 108732 - protein, 40 aa, Artificial Sequence; identical to SEQ ID NO: 6282
  Cyclic GFR-binding peptide
  MOD_RES (2)..(34)..(35): Xaa is C or S

SEQ ID NO: 108733 - protein, 25 aa, Artificial Sequence
  Cyclic GFR-binding peptide
RYKKLYTVVGKDFYLISIANLKTPV

SEQ ID NO: 108734 - protein, 29 aa, Artificial Sequence
  Cyclic GFR-binding peptide
  MOD_RES (1)..(3): Xaa is C or S
XGXGEVVMDRYKKLVVKENEDFYLMSIAN

SEQ ID NO: 108735 - protein, 37 aa, Artificial Sequence; identical to SEQ ID NO: 6287
  Cyclic GFR-binding peptide
  MOD_RES (1)..(3)..(34)..(35): Xaa is C or S

SEQ ID NO: 108736 - protein, 37 aa, Artificial Sequence; identical to SEQ ID NO: 6290
  Cyclic GFR-binding peptide
  MOD_RES (1)..(33)..(34): Xaa is C or S

SEQ ID NO: 108737 - protein, 37 aa, Artificial Sequence
  Cyclic GFR-binding peptide
  MOD_RES (1)..(3)..(35)..(36): Xaa is C or S
XGXESVAMGQYNKLYTVVGKDLYLISIASLKTPVXXA

SEQ ID NO: 108738 - protein, 28 aa, Artificial Sequence
  Cyclic GFR-binding peptide
  MOD_RES (1)..(1): Xaa is C or S
XAEVVMDQYNKLVVNNAADLYLISIASL

SEQ ID NO: 108739 - protein, 20 aa, Artificial Sequence
  Cyclic GFR-binding peptide
RYKKLVVKDYEDFYLMSIAN

SEQ ID NO: 108740 - protein, 32 aa, Artificial Sequence; identical to SEQ ID NO: 34647
  Cyclic GFR-binding peptide
  MOD_RES (29)..(30): Xaa is C or S

SEQ ID NO: 108741 - protein, 34 aa, Artificial Sequence
  Cyclic GFR-binding peptide
  MOD_RES (29)..(30): Xaa is C or S
AMGQYNKLYTVVGKDLYLISIASLKTPVXXAKSA

SEQ ID NO: 108742 - protein, 28 aa, Artificial Sequence
  Cyclic GFR-binding peptide
  MOD_RES (26)..(27): Xaa is C or S
RYKKLVVNKNEDFYLISIANMKEPVXXP

SEQ ID NO: 108743 - protein, 30 aa, Artificial Sequence; identical to SEQ ID NO: 6298
  Cyclic GFR-binding peptide

SEQ ID NO: 108744 - protein, 29 aa, Artificial Sequence
  Cyclic GFR-binding peptide
  MOD_RES (1)..(3): Xaa is C or S
XGXARVVMNQYNKLIVNSSDDLYLVSIAS

SEQ ID NO: 108745 - protein, 30 aa, Artificial Sequence; identical to SEQ ID NO: 6300
  Cyclic GFR-binding peptide
  MOD_RES (1)..(3): Xaa is C or S

SEQ ID NO: 108746 - protein, 31 aa, Artificial Sequence; identical to SEQ ID NO: 34654
  Cyclic GFR-binding peptide
  MOD_RES (2)..(2): Xaa is C or S

SEQ ID NO: 108747 - protein, 24 aa, Artificial Sequence
  Cyclic GFR-binding peptide
MQYNKLVKPTRGVLYLISIASLDQ

SEQ ID NO: 108748 - protein, 32 aa, Artificial Sequence; identical to SEQ ID NO: 16696
  Cyclic GFR-binding peptide
  MOD_RES (29)..(30): Xaa is C or S

SEQ ID NO: 108749 - protein, 40 aa, Artificial Sequence; identical to SEQ ID NO: 6308
  Cyclic GFR-binding peptide
  MOD_RES (2)..(34)..(35): Xaa is C or S

SEQ ID NO: 108750 - protein, 36 aa, Artificial Sequence; identical to SEQ ID NO: 6309
  Cyclic GFR-binding peptide
  MOD_RES (1)..(3)..(36): Xaa is C or S

SEQ ID NO: 108751 - protein, 40 aa, Artificial Sequence; identical to SEQ ID NO: 34659
  Cyclic GFR-binding peptide
  MOD_RES (2)..(4)..(36)..(37): Xaa is C or S

SEQ ID NO: 108752 - protein, 21 aa, Artificial Sequence
  Cyclic GFR-binding peptide
DQYNKLVVNNAADLYLISIAS

SEQ ID NO: 108753 - protein, 32 aa, Artificial Sequence; identical to SEQ ID NO: 6311
  Cyclic GFR-binding peptide
  MOD_RES (28)..(29): Xaa is C or S

SEQ ID NO: 108754 - protein, 35 aa, Artificial Sequence; identical to SEQ ID NO: 6312
  Cyclic GFR-binding peptide
  MOD_RES (2)..(34)..(35): Xaa is C or S

SEQ ID NO: 108755 - protein, 31 aa, Artificial Sequence; identical to SEQ ID NO: 16700
  Cyclic GFR-binding peptide
  MOD_RES (1)..(1): Xaa is C or S

SEQ ID NO: 108756 - protein, 39 aa, Artificial Sequence; identical to SEQ ID NO: 6314
  Cyclic GFR-binding peptide
  MOD_RES (2)..(4)..(36)..(37): Xaa is C or S

SEQ ID NO: 108757 - protein, 23 aa, Artificial Sequence
  Cyclic GFR-binding peptide
RYKKLIKPTKGIFYLISIANLDQ

SEQ ID NO: 108758 - protein, 31 aa, Artificial Sequence; identical to SEQ ID NO: 6316
  Cyclic GFR-binding peptide
  MOD_RES (2)..(4): Xaa is C or S

SEQ ID NO: 108759 - protein, 31 aa, Artificial Sequence; identical to SEQ ID NO: 76723
  Cyclic GFR-binding peptide
  MOD_RES (30)..(31): Xaa is C or S

SEQ ID NO: 108760 - protein, 35 aa, Artificial Sequence
  Cyclic GFR-binding peptide
  MOD_RES (1)..(3)..(35): Xaa is C or S
XGXRDVVMGQYNKLIIQQKDNLYLMSIASMKTPTX

SEQ ID NO: 108761 - protein, 28 aa, Artificial Sequence
  Cyclic GFR-binding peptide
VTMNQYNKLVVNKNEDLYLISIASMKEP

SEQ ID NO: 108762 - protein, 26 aa, Artificial Sequence
  Cyclic GFR-binding peptide
MNQYNKLIVNSSDDLYLVSIASLKTP

SEQ ID NO: 108763 - protein, 26 aa, Artificial Sequence
  Cyclic GFR-binding peptide
MGEQYNKLTPVGMDDLYLVSIASLKT

SEQ ID NO: 108764 - protein, 33 aa, Artificial Sequence; identical to SEQ ID NO: 76724
  Cyclic GFR-binding peptide
  MOD_RES (1)..(32)..(33): Xaa is C or S

SEQ ID NO: 108765 - protein, 33 aa, Artificial Sequence; identical to SEQ ID NO: 6322
  Cyclic GFR-binding peptide
  MOD_RES (2)..(4): Xaa is C or S

SEQ ID NO: 108766 - protein, 32 aa, Artificial Sequence; identical to SEQ ID NO: 6323
  Cyclic GFR-binding peptide
  MOD_RES (32)..(32): Xaa is C or S

SEQ ID NO: 108767 - protein, 34 aa, Artificial Sequence; identical to SEQ ID NO: 34673
  Cyclic GFR-binding peptide
  MOD_RES (1)..(3): Xaa is C or S

SEQ ID NO: 108768 - protein, 31 aa, Artificial Sequence; identical to SEQ ID NO: 83166
  Cyclic GFR-binding peptide
  MOD_RES (26)..(27): Xaa is C or S

SEQ ID NO: 108769 - protein, 29 aa, Artificial Sequence
  Cyclic GFR-binding peptide
EVVMDRYKKLVVNNAADFYLISIANLRAP

SEQ ID NO: 108770 - protein, 32 aa, Artificial Sequence; identical to SEQ ID NO: 83168
  Cyclic GFR-binding peptide
  MOD_RES (31)..(32): Xaa is C or S

SEQ ID NO: 108771 - protein, 28 aa, Artificial Sequence
  Cyclic GFR-binding peptide
  MOD_RES (27)..(28): Xaa is C or S
MRYKKLVKPKRGVFYLISIANLAQPVXX

SEQ ID NO: 108772 - protein, 30 aa, Artificial Sequence; identical to SEQ ID NO: 6327
  Cyclic GFR-binding peptide
  MOD_RES (27)..(28): Xaa is C or S

SEQ ID NO: 108773 - protein, 30 aa, Artificial Sequence; identical to SEQ ID NO: 76733
  Cyclic GFR-binding peptide
  MOD_RES (29)..(30): Xaa is C or S

SEQ ID NO: 108774 - protein, 22 aa, Artificial Sequence
  Cyclic GFR-binding peptide
MDRYKKLVVKENEDFYLMSIAN

SEQ ID NO: 108775 - protein, 37 aa, Artificial Sequence; identical to SEQ ID NO: 6332
  Cyclic GFR-binding peptide
  MOD_RES (1)..(3)..(34)..(35): Xaa is C or S

SEQ ID NO: 108776 - protein, 38 aa, Artificial Sequence; identical to SEQ ID NO: 6333
  Cyclic GFR-binding peptide
  MOD_RES (2)..(34)..(35): Xaa is C or S

SEQ ID NO: 108777 - protein, 32 aa, Artificial Sequence; identical to SEQ ID NO: 76738
  Cyclic GFR-binding peptide
  MOD_RES (26)..(27): Xaa is C or S

SEQ ID NO: 108778 - protein, 26 aa, Artificial Sequence
  Cyclic GFR-binding peptide
  MOD_RES (1)..(1): Xaa is C or S
XEEVIMRYKKLLLVRGNDFYLMSIAN

SEQ ID NO: 108779 - protein, 29 aa, Artificial Sequence
  Cyclic GFR-binding peptide
  MOD_RES (27)..(28): Xaa is C or S
ERYKKLVVKDYEDFYLMSIANLETPVXXA

SEQ ID NO: 108780 - protein, 31 aa, Artificial Sequence
  Cyclic GFR-binding peptide
  MOD_RES (1)..(1): Xaa is C or S
XESVAMGQYNKLYTVVGKDLYLISIASLKTP

SEQ ID NO: 108781 - protein, 30 aa, Artificial Sequence; identical to SEQ ID NO: 6342
  Cyclic GFR-binding peptide
  MOD_RES (26)..(27): Xaa is C or S

SEQ ID NO: 108782 - protein, 35 aa, Artificial Sequence; identical to SEQ ID NO: 6343
  Cyclic GFR-binding peptide
  MOD_RES (2)..(4)..(35): Xaa is C or S

SEQ ID NO: 108783 - protein, 28 aa, Artificial Sequence
  Cyclic GFR-binding peptide
GEVVMDRYKKLVVKENEDFYLMSIANLE

SEQ ID NO: 108784 - protein, 29 aa, Artificial Sequence
  Cyclic GFR-binding peptide
EVVMDQYNKLVVKENEDLYLMSIASLETP

SEQ ID NO: 108785 - protein, 33 aa, Artificial Sequence; identical to SEQ ID NO: 6348
  Cyclic GFR-binding peptide
  MOD_RES (31)..(32): Xaa is C or S

SEQ ID NO: 108786 - protein, 20 aa, Artificial Sequence
  Cyclic GFR-binding peptide
QYNKLVVNNAADLYLISIAS

SEQ ID NO: 108787 - protein, 34 aa, Artificial Sequence; identical to SEQ ID NO: 6350
  Cyclic GFR-binding peptide
  MOD_RES (30)..(31): Xaa is C or S

SEQ ID NO: 108788 - protein, 28 aa, Artificial Sequence
  Cyclic GFR-binding peptide
VVMDRYKKLVVNNAADFYLISIANLRAP

SEQ ID NO: 108789 - protein, 33 aa, Artificial Sequence; identical to SEQ ID NO: 6352
  Cyclic GFR-binding peptide
  MOD_RES (2)..(33): Xaa is C or S

SEQ ID NO: 108790 - protein, 31 aa, Artificial Sequence; identical to SEQ ID NO: 6353
  Cyclic GFR-binding peptide
  MOD_RES (27)..(28): Xaa is C or S

SEQ ID NO: 108791 - protein, 25 aa, Artificial Sequence
  Cyclic GFR-binding peptide
MNRYKKLVVNKNEDFYLISIANMKE

SEQ ID NO: 108792 - protein, 28 aa, Artificial Sequence
  Cyclic GFR-binding peptide
  MOD_RES (28)..(28): Xaa is C or S
LSAISVLYLDDSSNVILKNYQNMVVRSX

SEQ ID NO: 108793 - protein, 38 aa, Artificial Sequence; identical to SEQ ID NO: 6355
  Cyclic GFR-binding peptide
  MOD_RES (6)..(7): Xaa is C or S

SEQ ID NO: 108794 - protein, 32 aa, Artificial Sequence; identical to SEQ ID NO: 76752
  Cyclic GFR-binding peptide
  MOD_RES (29)..(31): Xaa is C or S

SEQ ID NO: 108795 - protein, 35 aa, Artificial Sequence; identical to SEQ ID NO: 6358
  Cyclic GFR-binding peptide
  MOD_RES (32)..(34): Xaa is C or S

SEQ ID NO: 108796 - protein, 24 aa, Artificial Sequence
  Cyclic GFR-binding peptide
QDLNAISILYFIGKTPKILKKYRM

SEQ ID NO: 108797 - protein, 29 aa, Artificial Sequence
  Cyclic GFR-binding peptide
  MOD_RES (29)..(29): Xaa is C or S
QDLNAISILYFVGRTPKVLKKYRMVVKSX

SEQ ID NO: 108798 - protein, 30 aa, Artificial Sequence; identical to SEQ ID NO: 6363
  Cyclic GFR-binding peptide
  MOD_RES (30)..(30): Xaa is C or S

SEQ ID NO: 108799 - protein, 25 aa, Artificial Sequence
  Cyclic GFR-binding peptide
VSQDLSAISILYLIGKTPKILKNYQ

SEQ ID NO: 108800 - protein, 31 aa, Artificial Sequence; identical to SEQ ID NO: 93317
  Cyclic GFR-binding peptide
  MOD_RES (1)..(1): Xaa is C or S

SEQ ID NO: 108801 - protein, 37 aa, Artificial Sequence
  Cyclic GFR-binding peptide
  MOD_RES (6)..(7): Xaa is C or S
GSAGPXXTPTKMSAISMLYLNDKQQIILKNYQGMVVD

SEQ ID NO: 108802 - protein, 33 aa, Artificial Sequence; identical to SEQ ID NO: 6366
  Cyclic GFR-binding peptide
  MOD_RES (32)..(32): Xaa is C or S

SEQ ID NO: 108803 - protein, 28 aa, Artificial Sequence
  Cyclic GFR-binding peptide
PQALNAISILYFVGRKPKVLKKYRMIVR

SEQ ID NO: 108804 - protein, 26 aa, Artificial Sequence
  Cyclic GFR-binding peptide
LSAISILYLIGKTPKILKNYQMIVKS

SEQ ID NO: 108805 - protein, 29 aa, Artificial Sequence
  Cyclic GFR-binding peptide
  MOD_RES (29)..(29): Xaa is C or S
RLSAISILYLDAANNVVLKNYQDMVVEAX

SEQ ID NO: 108806 - protein, 25 aa, Artificial Sequence
  Cyclic GFR-binding peptide
LNAISMLYFDENEKVVLKKYRDMVV

SEQ ID NO: 108807 - protein, 33 aa, Artificial Sequence; identical to SEQ ID NO: 6370
  Cyclic GFR-binding peptide
  MOD_RES (30)..(32): Xaa is C or S

SEQ ID NO: 108808 - protein, 32 aa, Artificial Sequence
  Cyclic GFR-binding peptide
  MOD_RES (6)..(7): Xaa is C or S
AAPASXXVPARLSAISILYLDAANNVVLKNYQ

SEQ ID NO: 108809 - protein, 39 aa, Artificial Sequence; identical to SEQ ID NO: 88334
  Cyclic GFR-binding peptide
  MOD_RES (6)..(7)..(39): Xaa is C or S

SEQ ID NO: 108810 - protein, 25 aa, Artificial Sequence
  Cyclic GFR-binding peptide
VPTRLNAISILYFDSANNVVLKKYR

SEQ ID NO: 108811 - protein, 30 aa, Artificial Sequence
  Cyclic GFR-binding peptide
  MOD_RES (4)..(5): Xaa is C or S
AGPXXTPTKMSAISMLYLNDKQQIILKNYQ

SEQ ID NO: 108812 - protein, 27 aa, Artificial Sequence
  Cyclic GFR-binding peptide
  MOD_RES (1)..(1): Xaa is C or S
XAPTKLNAISVLYFDSSNNVILKKYRN

SEQ ID NO: 108813 - protein, 38 aa, Artificial Sequence; identical to SEQ ID NO: 6375
  Cyclic GFR-binding peptide
  MOD_RES (4)..(5)..(36)..(38): Xaa is C or S

SEQ ID NO: 108814 - protein, 32 aa, Artificial Sequence; identical to SEQ ID NO: 34732
  Cyclic GFR-binding peptide
  MOD_RES (2)..(3): Xaa is C or S

SEQ ID NO: 108815 - protein, 34 aa, Artificial Sequence; identical to SEQ ID NO: 93335
  Cyclic GFR-binding peptide
  MOD_RES (31)..(33): Xaa is C or S

SEQ ID NO: 108816 - protein, 22 aa, Artificial Sequence
  Cyclic GFR-binding peptide
LNAISILYFVGRKPKVLKKYRM

SEQ ID NO: 108817 - protein, 35 aa, Artificial Sequence; identical to SEQ ID NO: 6380
  Cyclic GFR-binding peptide
  MOD_RES (4)..(5): Xaa is C or S

SEQ ID NO: 108818 - protein, 34 aa, Artificial Sequence; identical to SEQ ID NO: 6381
  Cyclic GFR-binding peptide
  MOD_RES (32)..(34): Xaa is C or S

SEQ ID NO: 108819 - protein, 32 aa, Artificial Sequence; identical to SEQ ID NO: 16765
  Cyclic GFR-binding peptide
  MOD_RES (6)..(7): Xaa is C or S

SEQ ID NO: 108820 - protein, 29 aa, Artificial Sequence
  Cyclic GFR-binding peptide
  MOD_RES (1)..(2): Xaa is C or S
XXAPTKLNAISVLYFDSSNNVILKKYRNM

SEQ ID NO: 108821 - protein, 35 aa, Artificial Sequence
  Cyclic GFR-binding peptide
  MOD_RES (6)..(7): Xaa is C or S
GSAGPXXTPTKMSAISMLYLNDKQQIILKNYQGMV

SEQ ID NO: 108822 - protein, 28 aa, Artificial Sequence
  Cyclic GFR-binding peptide
KLSAISILYLDKGVVTYLKNYQGMAVSE

SEQ ID NO: 108823 - protein, 35 aa, Artificial Sequence; identical to SEQ ID NO: 34748
  Cyclic GFR-binding peptide
  MOD_RES (6)..(7): Xaa is C or S

SEQ ID NO: 108824 - protein, 22 aa, Artificial Sequence
  Cyclic GFR-binding peptide
KLSAISILYLDKGVVTYLKNYQ

SEQ ID NO: 108825 - protein, 35 aa, Artificial Sequence; identical to SEQ ID NO: 6385
  Cyclic GFR-binding peptide
  MOD_RES (5)..(6): Xaa is C or S

SEQ ID NO: 108826 - protein, 39 aa, Artificial Sequence; identical to SEQ ID NO: 6386
  Cyclic GFR-binding peptide
  MOD_RES (4)..(5)..(37)..(39): Xaa is C or S

SEQ ID NO: 108827 - protein, 27 aa, Artificial Sequence
  Cyclic GFR-binding peptide
  MOD_RES (1)..(1): Xaa is C or S
XVPTRLNAISILYFDSANNVVLKKYRD

SEQ ID NO: 108828 - protein, 35 aa, Artificial Sequence; identical to SEQ ID NO: 6387
  Cyclic GFR-binding peptide
  MOD_RES (3)..(4)..(35): Xaa is C or S

SEQ ID NO: 108829 - protein, 38 aa, Artificial Sequence
  Cyclic GFR-binding peptide
  MOD_RES (2)..(3)..(35)..(37): Xaa is C or S
PXXVPEKMSAISILYLDENKNVVLKNYQNMTVESXAXR

SEQ ID NO: 108830 - protein, 37 aa, Artificial Sequence; identical to SEQ ID NO: 6395
  Cyclic GFR-binding peptide
  MOD_RES (6)..(7): Xaa is C or S

SEQ ID NO: 108831 - protein, 37 aa, Artificial Sequence; identical to SEQ ID NO: 88369
  Cyclic GFR-binding peptide
  MOD_RES (5)..(6): Xaa is C or S

SEQ ID NO: 108832 - protein, 29 aa, Artificial Sequence
  Cyclic GFR-binding peptide
PQALNAISILYFVGRKPKVLKKYRMIVRS

SEQ ID NO: 108833 - protein, 31 aa, Artificial Sequence; identical to SEQ ID NO: 34762
  Cyclic GFR-binding peptide
  MOD_RES (1)..(1): Xaa is C or S

SEQ ID NO: 108834 - protein, 38 aa, Artificial Sequence; identical to SEQ ID NO: 6403
  Cyclic GFR-binding peptide
  MOD_RES (7)..(7): Xaa is C or S

SEQ ID NO: 108835 - protein, 34 aa, Artificial Sequence; identical to SEQ ID NO: 16784
  Cyclic GFR-binding peptide
  MOD_RES (31)..(33): Xaa is C or S

SEQ ID NO: 108836 - protein, 30 aa, Artificial Sequence; identical to SEQ ID NO: 6406
  Cyclic GFR-binding peptide
  MOD_RES (3)..(4): Xaa is C or S

SEQ ID NO: 108837 - protein, 30 aa, Artificial Sequence; identical to SEQ ID NO: 6407
  Cyclic GFR-binding peptide
  MOD_RES (29)..(29): Xaa is C or S

SEQ ID NO: 108838 - protein, 30 aa, Artificial Sequence; identical to SEQ ID NO: 93365
  Cyclic GFR-binding peptide
  MOD_RES (27)..(29): Xaa is C or S

SEQ ID NO: 108839 - protein, 40 aa, Artificial Sequence; identical to SEQ ID NO: 6410
  Cyclic GFR-binding peptide
  MOD_RES (5)..(6)..(39): Xaa is C or S

SEQ ID NO: 108840 - protein, 41 aa, Artificial Sequence; identical to SEQ ID NO: 76780
  Cyclic GFR-binding peptide
  MOD_RES (6)..(7)..(39)..(41): Xaa is C or S

SEQ ID NO: 108841 - protein, 29 aa, Artificial Sequence
  Cyclic GFR-binding peptide
  MOD_RES (3)..(4): Xaa is C or S
STXXAPVKTSAISMLYLDNGRVLLLKNYQ

SEQ ID NO: 108842 - protein, 33 aa, Artificial Sequence; identical to SEQ ID NO: 6412
  Cyclic GFR-binding peptide
  MOD_RES (3)..(4): Xaa is C or S

SEQ ID NO: 108843 - protein, 36 aa, Artificial Sequence
  Cyclic GFR-binding peptide
  MOD_RES (2)..(3)..(35): Xaa is C or S
PXXVPEKMSAISILYLDENKNVVLKNYQNMTVESXA

SEQ ID NO: 108844 - protein, 25 aa, Artificial Sequence
  Cyclic GFR-binding peptide
PTKLNAISVLYFDSSNNVILKKYRN

SEQ ID NO: 108845 - protein, 22 aa, Artificial Sequence
  Cyclic GFR-binding peptide
LSAISILYLIGKTPKILKNYQM

SEQ ID NO: 108846 - protein, 33 aa, Artificial Sequence; identical to SEQ ID NO: 6416
  Cyclic GFR-binding peptide
  MOD_RES (4)..(5): Xaa is C or S

SEQ ID NO: 108847 - protein, 41 aa, Artificial Sequence; identical to SEQ ID NO: 16794
  Cyclic GFR-binding peptide
  MOD_RES (6)..(7)..(39)..(41): Xaa is C or S

SEQ ID NO: 108848 - protein, 31 aa, Artificial Sequence; identical to SEQ ID NO: 34782
  Cyclic GFR-binding peptide
  MOD_RES (1)..(2): Xaa is C or S

SEQ ID NO: 108849 - protein, 34 aa, Artificial Sequence; identical to SEQ ID NO: 76789
  Cyclic GFR-binding peptide
  MOD_RES (2)..(3)..(34): Xaa is C or S

SEQ ID NO: 108850 - protein, 35 aa, Artificial Sequence; identical to SEQ ID NO: 16797
  Cyclic GFR-binding peptide
  MOD_RES (5)..(6): Xaa is C or S

SEQ ID NO: 108851 - protein, 35 aa, Artificial Sequence; identical to SEQ ID NO: 6417
  Cyclic GFR-binding peptide
  MOD_RES (1)..(32)..(34): Xaa is C or S

SEQ ID NO: 108852 - protein, 26 aa, Artificial Sequence
  Cyclic GFR-binding peptide
  MOD_RES (1)..(1): Xaa is C or S
XVPTELNAISMLYFDEYDKVVLKKYR

SEQ ID NO: 108853 - protein, 40 aa, Artificial Sequence; identical to SEQ ID NO: 6421
  Cyclic GFR-binding peptide
  MOD_RES (4)..(5)..(38)..(40): Xaa is C or S

SEQ ID NO: 108854 - protein, 37 aa, Artificial Sequence; identical to SEQ ID NO: 34788
  Cyclic GFR-binding peptide
  MOD_RES (4)..(5)..(37): Xaa is C or S

SEQ ID NO: 108855 - protein, 32 aa, Artificial Sequence; identical to SEQ ID NO: 6422
  Cyclic GFR-binding peptide
  MOD_RES (4)..(5): Xaa is C or S

SEQ ID NO: 108856 - protein, 28 aa, Artificial Sequence
  Cyclic GFR-binding peptide
  MOD_RES (27)..(27): Xaa is C or S
SAISVLYLDDSSNVILKNYQNMVVRSXG

SEQ ID NO: 108857 - protein, 37 aa, Artificial Sequence; identical to SEQ ID NO: 6426
  Cyclic GFR-binding peptide
  MOD_RES (2)..(3)..(35)..(37): Xaa is C or S

SEQ ID NO: 108858 - protein, 25 aa, Artificial Sequence
  Cyclic GFR-binding peptide
QDLNAISILYFIGKTPKILKKYRMI

SEQ ID NO: 108859 - protein, 25 aa, Artificial Sequence
  Cyclic GFR-binding peptide
TNAISMLYFDNGRVLLLKKYRMIVE

SEQ ID NO: 108860 - protein, 37 aa, Artificial Sequence; identical to SEQ ID NO: 6432
  Cyclic GFR-binding peptide
  MOD_RES (4)..(5)..(37): Xaa is C or S

SEQ ID NO: 108861 - protein, 26 aa, Artificial Sequence
  Cyclic GFR-binding peptide
VPEKMNAISILYFDENKNVVLKKYRN

SEQ ID NO: 108862 - protein, 36 aa, Artificial Sequence
  Cyclic GFR-binding peptide
  MOD_RES (3)..(4)..(36): Xaa is C or S
EPXXVPEKMSAISILYLDENKNVVLKNYQNMTVESX

SEQ ID NO: 108863 - protein, 33 aa, Artificial Sequence; identical to SEQ ID NO: 6435
  Cyclic GFR-binding peptide
  MOD_RES (30)..(32): Xaa is C or S

SEQ ID NO: 108864 - protein, 26 aa, Artificial Sequence
  Cyclic GFR-binding peptide
LSAISILYLVGRKPKVLKNYQMIVRS

SEQ ID NO: 108865 - protein, 35 aa, Artificial Sequence; identical to SEQ ID NO: 6437
  Cyclic GFR-binding peptide
  MOD_RES (6)..(7): Xaa is C or S

SEQ ID NO: 108866 - protein, 35 aa, Artificial Sequence
  Cyclic GFR-binding peptide
  MOD_RES (3)..(4): Xaa is C or S
EPXXVPEKMSAISILYLDENKNVVLKNYQNMTVES

SEQ ID NO: 108867 - protein, 34 aa, Artificial Sequence; identical to SEQ ID NO: 6439
  Cyclic GFR-binding peptide
  MOD_RES (3)..(4): Xaa is C or S

SEQ ID NO: 108868 - protein, 32 aa, Artificial Sequence; identical to SEQ ID NO: 6441
  Cyclic GFR-binding peptide
  MOD_RES (29)..(31): Xaa is C or S

SEQ ID NO: 108869 - protein, 30 aa, Artificial Sequence; identical to SEQ ID NO: 16827
  Cyclic GFR-binding peptide
  MOD_RES (1)..(2): Xaa is C or S

SEQ ID NO: 108870 - protein, 34 aa, Artificial Sequence
  Cyclic GFR-binding peptide
  MOD_RES (2)..(3)..(34): Xaa is C or S
TXXAPVKTSAISMLYLDNGRVLLLKNYQMIVEEX

SEQ ID NO: 108871 - protein, 34 aa, Artificial Sequence
  Cyclic GFR-binding peptide
  MOD_RES (2)..(3): Xaa is C or S
SXXVPARLSAISILYLDAANNVVLKNYQDMVVEA

SEQ ID NO: 108872 - protein, 30 aa, Artificial Sequence; identical to SEQ ID NO: 6445
  Cyclic GFR-binding peptide
  MOD_RES (1)..(2): Xaa is C or S

SEQ ID NO: 108873 - protein, 27 aa, Artificial Sequence
  Cyclic GFR-binding peptide
LNAISMLYFDEYDKVVLKKYREMVVEG

SEQ ID NO: 108874 - protein, 31 aa, Artificial Sequence; identical to SEQ ID NO: 6448
  Cyclic GFR-binding peptide
  MOD_RES (2)..(3): Xaa is C or S

SEQ ID NO: 108875 - protein, 27 aa, Artificial Sequence
  Cyclic GFR-binding peptide
  MOD_RES (26)..(26): Xaa is C or S
NAISILYFIGKTPKILKKYRMIVKSXK

SEQ ID NO: 108876 - protein, 29 aa, Artificial Sequence
  Cyclic GFR-binding peptide
  MOD_RES (29)..(29): Xaa is C or S
VKTSAISMLYLDNGRVLLLKNYQMIVEEX

SEQ ID NO: 108877 - protein, 35 aa, Artificial Sequence
  Cyclic GFR-binding peptide
  MOD_RES (6)..(7): Xaa is C or S
RVPSTXXAPVKTSAISMLYLDNGRVLLLKNYQMIV

SEQ ID NO: 108878 - protein, 21 aa, Artificial Sequence
  Cyclic GFR-binding peptide
SAISILYLVGRKPKVLKNYQM

SEQ ID NO: 108879 - protein, 34 aa, Artificial Sequence; identical to SEQ ID NO: 76806
  Cyclic GFR-binding peptide
  MOD_RES (31)..(33): Xaa is C or S

SEQ ID NO: 108880 - protein, 34 aa, Artificial Sequence; identical to SEQ ID NO: 6453
  Cyclic GFR-binding peptide
  MOD_RES (1)..(2)..(34): Xaa is C or S

SEQ ID NO: 108881 - protein, 32 aa, Artificial Sequence; identical to SEQ ID NO: 16844
  Cyclic GFR-binding peptide
  MOD_RES (30)..(32): Xaa is C or S

SEQ ID NO: 108882 - protein, 30 aa, Artificial Sequence; identical to SEQ ID NO: 6456
  Cyclic GFR-binding peptide
  MOD_RES (1)..(2): Xaa is C or S

SEQ ID NO: 108883 - protein, 20 aa, Artificial Sequence
  Cyclic GFR-binding peptide
SAISMLYLNDKQQIILKNYQ

SEQ ID NO: 108884 - protein, 30 aa, Artificial Sequence; identical to SEQ ID NO: 6458
  Cyclic GFR-binding peptide
  MOD_RES (1)..(1): Xaa is C or S

SEQ ID NO: 108885 - protein, 31 aa, Artificial Sequence; identical to SEQ ID NO: 6459
  Cyclic GFR-binding peptide

SEQ ID NO: 108886 - protein, 34 aa, Artificial Sequence; identical to SEQ ID NO: 6463
  Cyclic GFR-binding peptide
  MOD_RES (6)..(7): Xaa is C or S

SEQ ID NO: 108887 - protein, 30 aa, Artificial Sequence; identical to SEQ ID NO: 16850
  Cyclic GFR-binding peptide
  MOD_RES (28)..(30): Xaa is C or S

SEQ ID NO: 108888 - protein, 34 aa, Artificial Sequence; identical to SEQ ID NO: 6464
  Cyclic GFR-binding peptide
  MOD_RES (5)..(5): Xaa is C or S

SEQ ID NO: 108889 - protein, 29 aa, Artificial Sequence
  Cyclic GFR-binding peptide
  MOD_RES (28)..(28): Xaa is C or S
LSAISVLYLDDSSNVILKNYQNMVVRSXG

SEQ ID NO: 108890 - protein, 31 aa, Artificial Sequence; identical to SEQ ID NO: 6468
  Cyclic GFR-binding peptide
  MOD_RES (4)..(5): Xaa is C or S

SEQ ID NO: 108891 - protein, 28 aa, Artificial Sequence
  Cyclic GFR-binding peptide
  MOD_RES (2)..(3): Xaa is C or S
PXXTPTKMSAISMLYLNDKQQIILKNYQ

SEQ ID NO: 108892 - protein, 31 aa, Artificial Sequence; identical to SEQ ID NO: 6469
  Cyclic GFR-binding peptide
  MOD_RES (3)..(4): Xaa is C or S

SEQ ID NO: 108893 - protein, 30 aa, Artificial Sequence; identical to SEQ ID NO: 34833
  Cyclic GFR-binding peptide

SEQ ID NO: 108894 - protein, 30 aa, Artificial Sequence; identical to SEQ ID NO: 76818
  Cyclic GFR-binding peptide
  MOD_RES (27)..(29): Xaa is C or S

SEQ ID NO: 108895 - protein, 30 aa, Artificial Sequence; identical to SEQ ID NO: 6475
  Cyclic GFR-binding peptide
  MOD_RES (2)..(3): Xaa is C or S

SEQ ID NO: 108896 - protein, 23 aa, Artificial Sequence
  Cyclic GFR-binding peptide
TKLSAISVLYLDDMGVPTLKNYQ

SEQ ID NO: 108897 - protein, 28 aa, Artificial Sequence
  Cyclic GFR-binding peptide
QALNAISILYFVGRKPKVLKKYRMIVRS

SEQ ID NO: 108898 - protein, 27 aa, Artificial Sequence
  Cyclic GFR-binding peptide
  MOD_RES (27)..(27): Xaa is C or S
NAISVLYFDSSNNVILKKYRNMVVKAX

SEQ ID NO: 108899 - protein, 33 aa, Artificial Sequence; identical to SEQ ID NO: 76823
  Cyclic GFR-binding peptide
  MOD_RES (5)..(6): Xaa is C or S

SEQ ID NO: 108900 - protein, 26 aa, Artificial Sequence
  Cyclic GFR-binding peptide
LSAISVLYLDDMGVPTLKNYQEGMSV

SEQ ID NO: 108901 - protein, 35 aa, Artificial Sequence; identical to SEQ ID NO: 6484
  Cyclic GFR-binding peptide
  MOD_RES (3)..(4)..(35): Xaa is C or S

SEQ ID NO: 108902 - protein, 31 aa, Artificial Sequence; identical to SEQ ID NO: 6488
  Cyclic GFR-binding peptide

SEQ ID NO: 108903 - protein, 32 aa, Artificial Sequence; identical to SEQ ID NO: 6490
  Cyclic GFR-binding peptide
  MOD_RES (31)..(31): Xaa is C or S

SEQ ID NO: 108904 - protein, 25 aa, Artificial Sequence
  Cyclic GFR-binding peptide
KLSAISVLYLDDSSNVILKNYQNMV

SEQ ID NO: 108905 - protein, 38 aa, Artificial Sequence; identical to SEQ ID NO: 16874
  Cyclic GFR-binding peptide
  MOD_RES (5)..(6)..(38): Xaa is C or S

SEQ ID NO: 108906 - protein, 26 aa, Artificial Sequence
  Cyclic GFR-binding peptide
  MOD_RES (1)..(1): Xaa is C or S
XVPEKMSAISILYLDENKNVVLKNYQ

SEQ ID NO: 108907 - protein, 38 aa, Artificial Sequence; identical to SEQ ID NO: 6497
  Cyclic GFR-binding peptide
  MOD_RES (2)..(3)..(35)..(37): Xaa is C or S

SEQ ID NO: 108908 - protein, 35 aa, Artificial Sequence
  Cyclic GFR-binding peptide
  MOD_RES (2)..(3)..(35): Xaa is C or S
PXXTPTKMSAISMLYLNDKQQIILKNYQGMVVDRX

SEQ ID NO: 108909 - protein, 27 aa, Artificial Sequence
  Cyclic GFR-binding peptide
TKLSAISVLYLDSSNNVILKNYQNMVV

SEQ ID NO: 108910 - protein, 30 aa, Artificial Sequence; identical to SEQ ID NO: 34867
  Cyclic GFR-binding peptide
  MOD_RES (30)..(30): Xaa is C or S

SEQ ID NO: 108911 - protein, 23 aa, Artificial Sequence
  Cyclic GFR-binding peptide
LNAISMLYFDENEKVVLKKYRDM

SEQ ID NO: 108912 - protein, 32 aa, Artificial Sequence; identical to SEQ ID NO: 6505
  Cyclic GFR-binding peptide
  MOD_RES (2)..(3): Xaa is C or S

SEQ ID NO: 108913 - protein, 29 aa, Artificial Sequence
  Cyclic GFR-binding peptide
VPQDLNAISILYFVGRTPKVLKKYRMVVK

SEQ ID NO: 108914 - protein, 29 aa, Artificial Sequence
  Cyclic GFR-binding peptide
  MOD_RES (28)..(28): Xaa is C or S
ALSAISILYLVGRKPKVLKNYQMIVRSXK

SEQ ID NO: 108915 - protein, 30 aa, Artificial Sequence; identical to SEQ ID NO: 16887
  Cyclic GFR-binding peptide
  MOD_RES (30)..(30): Xaa is C or S

SEQ ID NO: 108916 - protein, 32 aa, Artificial Sequence; identical to SEQ ID NO: 6510
  Cyclic GFR-binding peptide
  MOD_RES (2)..(2): Xaa is C or S

SEQ ID NO: 108917 - protein, 25 aa, Artificial Sequence
  Cyclic GFR-binding peptide
VPEKMNAISILYFDENKNVVLKKYR

SEQ ID NO: 108918 - protein, 33 aa, Artificial Sequence
  Cyclic GFR-binding peptide
  MOD_RES (1)..(32): Xaa is C or S
XAPVKTSAISMLYLDNGRVLLLKNYQMIVEEXG

SEQ ID NO: 108919 - protein, 40 aa, Artificial Sequence; identical to SEQ ID NO: 16893
  Cyclic GFR-binding peptide
  MOD_RES (6)..(7)..(39): Xaa is C or S

SEQ ID NO: 108920 - protein, 31 aa, Artificial Sequence
  Cyclic GFR-binding peptide
  MOD_RES (1)..(2): Xaa is C or S
XXVPEKMSAISILYLDENKNVVLKNYQNMTV

SEQ ID NO: 108921 - protein, 29 aa, Artificial Sequence
  Cyclic GFR-binding peptide
  MOD_RES (27)..(29): Xaa is C or S
SAISVLYLDDSSNVILKNYQNMVVRSXGX

SEQ ID NO: 108922 - protein, 37 aa, Artificial Sequence; identical to SEQ ID NO: 34884
  Cyclic GFR-binding peptide
  MOD_RES (3)..(4)..(36): Xaa is C or S

SEQ ID NO: 108923 - protein, 32 aa, Artificial Sequence; identical to SEQ ID NO: 6518
  Cyclic GFR-binding peptide
  MOD_RES (1)..(2): Xaa is C or S

SEQ ID NO: 108924 - protein, 36 aa, Artificial Sequence; identical to SEQ ID NO: 6521
  Cyclic GFR-binding peptide
  MOD_RES (4)..(5)..(36): Xaa is C or S

SEQ ID NO: 108925 - protein, 26 aa, Artificial Sequence
  Cyclic GFR-binding peptide
PTELNAISMLYFDENEKVVLKKYRDM

SEQ ID NO: 108926 - protein, 38 aa, Artificial Sequence; identical to SEQ ID NO: 34894
  Cyclic GFR-binding peptide
  MOD_RES (4)..(5)..(37): Xaa is C or S

SEQ ID NO: 108927 - protein, 35 aa, Artificial Sequence; identical to SEQ ID NO: 6527
  Cyclic GFR-binding peptide
  MOD_RES (6)..(7): Xaa is C or S

SEQ ID NO: 108928 - protein, 29 aa, Artificial Sequence
  Cyclic GFR-binding peptide
TQLSAISVLYLDDSSNVILKNYQNMVVRA

SEQ ID NO: 108929 - protein, 24 aa, Artificial Sequence
  Cyclic GFR-binding peptide
SAISVLYLDDMGVPTLKNYQEGMS

SEQ ID NO: 108930 - protein, 30 aa, Artificial Sequence; identical to SEQ ID NO: 76843
  Cyclic GFR-binding peptide
  MOD_RES (1)..(1): Xaa is C or S

SEQ ID NO: 108931 - protein, 38 aa, Artificial Sequence; identical to SEQ ID NO: 76844
  Cyclic GFR-binding peptide
  MOD_RES (4)..(5)..(37): Xaa is C or S

SEQ ID NO: 108932 - protein, 26 aa, Artificial Sequence
  Cyclic GFR-binding peptide
APVKTNAISMLYFDNGRVLLLKKYRM

SEQ ID NO: 108933 - protein, 21 aa, Artificial Sequence
  Cyclic GFR-binding peptide
NAISMLYFNDKQQIILKKYRG

SEQ ID NO: 108934 - protein, 25 aa, Artificial Sequence
  Cyclic GFR-binding peptide
DLSAISILYLIGKTPKILKNYQMIV

SEQ ID NO: 108935 - protein, 27 aa, Artificial Sequence
  Cyclic GFR-binding peptide
  MOD_RES (1)..(2): Xaa is C or S
XXVPQDLNAISILYFVGRTPKVLKKYR

SEQ ID NO: 108936 - protein, 33 aa, Artificial Sequence; identical to SEQ ID NO: 34911
  Cyclic GFR-binding peptide
  MOD_RES (2)..(3): Xaa is C or S

SEQ ID NO: 108937 - protein, 25 aa, Artificial Sequence
  Cyclic GFR-binding peptide
SAISILYLVGRKPKVLKNYQMIVRS

SEQ ID NO: 108938 - protein, 40 aa, Artificial Sequence; identical to SEQ ID NO: 88515
  Cyclic GFR-binding peptide
  MOD_RES (6)..(7)..(39): Xaa is C or S

SEQ ID NO: 108939 - protein, 20 aa, Artificial Sequence
  Cyclic GFR-binding peptide
NAISILYFDSANNVVLKKYR

SEQ ID NO: 108940 - protein, 28 aa, Artificial Sequence
  Cyclic GFR-binding peptide
  MOD_RES (2)..(3): Xaa is C or S
SXXVPARLSAISILYLDAANNVVLKNYQ

SEQ ID NO: 108941 - protein, 29 aa, Artificial Sequence
  Cyclic GFR-binding peptide
  MOD_RES (29)..(29): Xaa is C or S
VKTNAISMLYFDNGRVLLLKKYRMIVEEX

SEQ ID NO: 108942 - protein, 31 aa, Artificial Sequence; identical to SEQ ID NO: 6547
  Cyclic GFR-binding peptide
  MOD_RES (28)..(30): Xaa is C or S

SEQ ID NO: 108943 - protein, 33 aa, Artificial Sequence; identical to SEQ ID NO: 6548
  Cyclic GFR-binding peptide
  MOD_RES (2)..(3): Xaa is C or S

SEQ ID NO: 108944 - protein, 34 aa, Artificial Sequence; identical to SEQ ID NO: 6550
  Cyclic GFR-binding peptide
  MOD_RES (1)..(32)..(34): Xaa is C or S

SEQ ID NO: 108945 - protein, 35 aa, Artificial Sequence; identical to SEQ ID NO: 6551
  Cyclic GFR-binding peptide
  MOD_RES (6)..(7): Xaa is C or S

SEQ ID NO: 108946 - protein, 29 aa, Artificial Sequence
  Cyclic GFR-binding peptide
VSQDLSAISILYLIGKTPKILKNYQMIVK

SEQ ID NO: 108947 - protein, 22 aa, Artificial Sequence
  Cyclic GFR-binding peptide
SAISMLYLDNGRVLLLKNYQMI

SEQ ID NO: 108948 - protein, 30 aa, Artificial Sequence; identical to SEQ ID NO: 6556
  Cyclic GFR-binding peptide
  MOD_RES (29)..(29): Xaa is C or S

SEQ ID NO: 108949 - protein, 32 aa, Artificial Sequence; identical to SEQ ID NO: 34920
  Cyclic GFR-binding peptide
  MOD_RES (5)..(6): Xaa is C or S

SEQ ID NO: 108950 - protein, 25 aa, Artificial Sequence
  Cyclic GFR-binding peptide
SAISILYLIGKTPKILKNYQMIVKS

SEQ ID NO: 108951 - protein, 28 aa, Artificial Sequence
  Cyclic GFR-binding peptide
TRLSAISILYLDSANNVVLKNYQDMVVE

SEQ ID NO: 108952 - protein, 25 aa, Artificial Sequence
  Cyclic GFR-binding peptide
LSAISVLYLDSSNNVILKNYQNMVV

SEQ ID NO: 108953 - protein, 28 aa, Artificial Sequence
  Cyclic GFR-binding peptide
  MOD_RES (1)..(1): Xaa is C or S
XVPTKLNAISVLYFDDMGVPTLKKYREG

SEQ ID NO: 108954 - protein, 22 aa, Artificial Sequence
  Cyclic GFR-binding peptide
RLSAISILYLDAANNVVLKNYQ

SEQ ID NO: 108955 - protein, 34 aa, Artificial Sequence; identical to SEQ ID NO: 34927
  Cyclic GFR-binding peptide
  MOD_RES (31)..(33): Xaa is C or S

SEQ ID NO: 108956 - protein, 29 aa, Artificial Sequence
  Cyclic GFR-binding peptide
  MOD_RES (3)..(4): Xaa is C or S
KAXXVPTKLNAISILYFDKGVVTYLKKYR

SEQ ID NO: 108957 - protein, 30 aa, Artificial Sequence
  Cyclic GFR-binding peptide
  MOD_RES (29)..(29): Xaa is C or S
RLSAISILYLDAANNVVLKNYQDMVVEAXG

SEQ ID NO: 108958 - protein, 25 aa, Artificial Sequence
  Cyclic GFR-binding peptide
SAISVLYLDDMGVPTLKNYQEGMSV

SEQ ID NO: 108959 - protein, 31 aa, Artificial Sequence; identical to SEQ ID NO: 6567
  Cyclic GFR-binding peptide
  MOD_RES (1)..(1): Xaa is C or S

SEQ ID NO: 108960 - protein, 34 aa, Artificial Sequence
  Cyclic GFR-binding peptide
  MOD_RES (1)..(2)..(34): Xaa is C or S
XXVPEKMSAISILYLDENKNVVLKNYQNMTVESX

SEQ ID NO: 108961 - protein, 34 aa, Artificial Sequence; identical to SEQ ID NO: 16941
  Cyclic GFR-binding peptide
  MOD_RES (2)..(3): Xaa is C or S

SEQ ID NO: 108962 - protein, 26 aa, Artificial Sequence
  Cyclic GFR-binding peptide
VSQDLSAISILYLIGKTPKILKNYQM

SEQ ID NO: 108963 - protein, 31 aa, Artificial Sequence; identical to SEQ ID NO: 6569
  Cyclic GFR-binding peptide
  MOD_RES (4)..(5): Xaa is C or S

SEQ ID NO: 108964 - protein, 34 aa, Artificial Sequence; identical to SEQ ID NO: 6571
  Cyclic GFR-binding peptide
  MOD_RES (3)..(4): Xaa is C or S

SEQ ID NO: 108965 - protein, 35 aa, Artificial Sequence; identical to SEQ ID NO: 93516
  Cyclic GFR-binding peptide
  MOD_RES (6)..(7): Xaa is C or S

SEQ ID NO: 108966 - protein, 40 aa, Artificial Sequence; identical to SEQ ID NO: 6573
  Cyclic GFR-binding peptide
  MOD_RES (4)..(5)..(37)..(39): Xaa is C or S

SEQ ID NO: 108967 - protein, 24 aa, Artificial Sequence
  Cyclic GFR-binding peptide
DLSAISILYLIGKTPKILKNYQMI

SEQ ID NO: 108968 - protein, 29 aa, Artificial Sequence
  Cyclic GFR-binding peptide
VPTRLNAISILYFDSANNVVLKKYRDMVV

SEQ ID NO: 108969 - protein, 28 aa, Artificial Sequence
  Cyclic GFR-binding peptide
  MOD_RES (1)..(1): Xaa is C or S
XVPQALNAISILYFVGRKPKVLKKYRMI

SEQ ID NO: 108970 - protein, 33 aa, Artificial Sequence; identical to SEQ ID NO: 6578
  Cyclic GFR-binding peptide
  MOD_RES (4)..(5): Xaa is C or S

SEQ ID NO: 108971 - protein, 34 aa, Artificial Sequence; identical to SEQ ID NO: 6579
  Cyclic GFR-binding peptide
  MOD_RES (6)..(7): Xaa is C or S

SEQ ID NO: 108972 - protein, 32 aa, Artificial Sequence; identical to SEQ ID NO: 6580
  Cyclic GFR-binding peptide
  MOD_RES (1)..(2): Xaa is C or S

SEQ ID NO: 108973 - protein, 30 aa, Artificial Sequence; identical to SEQ ID NO: 6581
  Cyclic GFR-binding peptide
  MOD_RES (4)..(5): Xaa is C or S

SEQ ID NO: 108974 - protein, 27 aa, Artificial Sequence
  Cyclic GFR-binding peptide
PEKMNAISILYFDENKNVVLKKYRNMT

SEQ ID NO: 108975 - protein, 25 aa, Artificial Sequence
  Cyclic GFR-binding peptide
KLSAISVLYLDSSNNVILKNYQNMV

SEQ ID NO: 108976 - protein, 38 aa, Artificial Sequence; identical to SEQ ID NO: 6585
  Cyclic GFR-binding peptide
  MOD_RES (6)..(7)..(38): Xaa is C or S

SEQ ID NO: 108977 - protein, 32 aa, Artificial Sequence; identical to SEQ ID NO: 6590
  Cyclic GFR-binding peptide
  MOD_RES (1)..(32): Xaa is C or S

SEQ ID NO: 108978 - protein, 27 aa, Artificial Sequence
  Cyclic GFR-binding peptide
PTKLSAISVLYLDDSSNVILKNYQNMV

SEQ ID NO: 108979 - protein, 28 aa, Artificial Sequence
  Cyclic GFR-binding peptide
  MOD_RES (2)..(3): Xaa is C or S
TXXVPTRLNAISILYFDSANNVVLKKYR

SEQ ID NO: 108980 - protein, 29 aa, Artificial Sequence
  Cyclic GFR-binding peptide
  MOD_RES (1)..(2): Xaa is C or S
XXVPTKLSAISILYLDKGVVTYLKNYQGM

SEQ ID NO: 108981 - protein, 30 aa, Artificial Sequence; identical to SEQ ID NO: 6595
  Cyclic GFR-binding peptide
  MOD_RES (30)..(30): Xaa is C or S

SEQ ID NO: 108982 - protein, 31 aa, Artificial Sequence; identical to SEQ ID NO: 6596
  Cyclic GFR-binding peptide
  MOD_RES (31)..(31): Xaa is C or S

SEQ ID NO: 108983 - protein, 25 aa, Artificial Sequence
  Cyclic GFR-binding peptide
LNAISILYFIGKTPKILKKYRMIVK

SEQ ID NO: 108984 - protein, 36 aa, Artificial Sequence
  Cyclic GFR-binding peptide
  MOD_RES (4)..(5): Xaa is C or S
PASXXVPARLSAISILYLDAANNVVLKNYQDMVVEA

SEQ ID NO: 108985 - protein, 27 aa, Artificial Sequence
  Cyclic GFR-binding peptide
LSAISILYLDSANNVVLKNYQDMVVES

SEQ ID NO: 108986 - protein, 38 aa, Artificial Sequence; identical to SEQ ID NO: 6603
  Cyclic GFR-binding peptide
  MOD_RES (6)..(7): Xaa is C or S

SEQ ID NO: 108987 - protein, 39 aa, Artificial Sequence; identical to SEQ ID NO: 6604
  Cyclic GFR-binding peptide
  MOD_RES (4)..(5)..(36)..(38): Xaa is C or S

SEQ ID NO: 108988 - protein, 30 aa, Artificial Sequence; identical to SEQ ID NO: 88576
  Cyclic GFR-binding peptide
  MOD_RES (2)..(3): Xaa is C or S

SEQ ID NO: 108989 - protein, 31 aa, Artificial Sequence; identical to SEQ ID NO: 88577
  Cyclic GFR-binding peptide
  MOD_RES (3)..(4): Xaa is C or S

SEQ ID NO: 108990 - protein, 27 aa, Artificial Sequence
  Cyclic GFR-binding peptide
MNAISILYFDENKNVVLKKYRNMTVES

SEQ ID NO: 108991 - protein, 31 aa, Artificial Sequence; identical to SEQ ID NO: 6610
  Cyclic GFR-binding peptide
  MOD_RES (29)..(31): Xaa is C or S

SEQ ID NO: 108992 - protein, 28 aa, Artificial Sequence
  Cyclic GFR-binding peptide
PTKLNAISVLYFDDMGVPTLKKYREGMS

SEQ ID NO: 108993 - protein, 40 aa, Artificial Sequence; identical to SEQ ID NO: 6612
  Cyclic GFR-binding peptide
  MOD_RES (7)..(39): Xaa is C or S

SEQ ID NO: 108994 - protein, 25 aa, Artificial Sequence
  Cyclic GFR-binding peptide
PVKTNAISMLYFDNGRVLLLKKYRM

SEQ ID NO: 108995 - protein, 34 aa, Artificial Sequence; identical to SEQ ID NO: 6617
  Cyclic GFR-binding peptide
  MOD_RES (32)..(34): Xaa is C or S

SEQ ID NO: 108996 - protein, 41 aa, Artificial Sequence; identical to SEQ ID NO: 17000
  Cyclic GFR-binding peptide
  MOD_RES (5)..(6)..(38)..(40): Xaa is C or S

SEQ ID NO: 108997 - protein, 38 aa, Artificial Sequence; identical to SEQ ID NO: 6619
  Cyclic GFR-binding peptide
  MOD_RES (3)..(4)..(35)..(37): Xaa is C or S

SEQ ID NO: 108998 - protein, 36 aa, Artificial Sequence; identical to SEQ ID NO: 6623
  Cyclic GFR-binding peptide
  MOD_RES (5)..(6): Xaa is C or S

SEQ ID NO: 108999 - protein, 33 aa, Artificial Sequence; identical to SEQ ID NO: 17006
  Cyclic GFR-binding peptide
  MOD_RES (2)..(3): Xaa is C or S

SEQ ID NO: 109000 - protein, 31 aa, Artificial Sequence; identical to SEQ ID NO: 76896
  Cyclic GFR-binding peptide
  MOD_RES (29)..(31): Xaa is C or S

SEQ ID NO: 109001 - protein, 29 aa, Artificial Sequence
  Cyclic GFR-binding peptide
  MOD_RES (1)..(1): Xaa is C or S
XAPVKTSAISMLYLDNGRVLLLKNYQMIV

SEQ ID NO: 109002 - protein, 33 aa, Artificial Sequence
  Cyclic GFR-binding peptide
  MOD_RES (3)..(4): Xaa is C or S
ASXXVPARLSAISILYLDAANNVVLKNYQDMVV

SEQ ID NO: 109003 - protein, 31 aa, Artificial Sequence; identical to SEQ ID NO: 6627
  Cyclic GFR-binding peptide
  MOD_RES (30)..(30): Xaa is C or S

SEQ ID NO: 109004 - protein, 25 aa, Artificial Sequence
  Cyclic GFR-binding peptide
ELNAISMLYFDENEKVVLKKYRDMV

SEQ ID NO: 109005 - protein, 41 aa, Artificial Sequence
  Cyclic GFR-binding peptide
  MOD_RES (6)..(7)..(39)..(41): Xaa is C or S
AAPASXXVPARLSAISILYLDAANNVVLKNYQDMVVEAXGX

SEQ ID NO: 109006 - protein, 35 aa, Artificial Sequence; identical to SEQ ID NO: 6630
  Cyclic GFR-binding peptide
  MOD_RES (6)..(7): Xaa is C or S

SEQ ID NO: 109007 - protein, 38 aa, Artificial Sequence; identical to SEQ ID NO: 6631
  Cyclic GFR-binding peptide
  MOD_RES (3)..(4)..(37): Xaa is C or S

SEQ ID NO: 109008 - protein, 34 aa, Artificial Sequence; identical to SEQ ID NO: 76899
  Cyclic GFR-binding peptide
  MOD_RES (2)..(3): Xaa is C or S

SEQ ID NO: 109009 - protein, 33 aa, Artificial Sequence; identical to SEQ ID NO: 6641
  Cyclic GFR-binding peptide
  MOD_RES (2)..(2): Xaa is C or S

SEQ ID NO: 109010 - protein, 28 aa, Artificial Sequence
  Cyclic GFR-binding peptide
RLNAISILYFDSANNVVLKKYRDMVVES

SEQ ID NO: 109011 - protein, 34 aa, Artificial Sequence
  Cyclic GFR-binding peptide
  MOD_RES (32)..(34): Xaa is C or S
TPTKMSAISMLYLNDKQQIILKNYQGMVVDRXGX

SEQ ID NO: 109012 - protein, 31 aa, Artificial Sequence; identical to SEQ ID NO: 6643
  Cyclic GFR-binding peptide
  MOD_RES (5)..(6): Xaa is C or S

SEQ ID NO: 109013 - protein, 23 aa, Artificial Sequence
  Cyclic GFR-binding peptide
NAISMLYFDNGRVLLLKKYRMIV

SEQ ID NO: 109014 - protein, 29 aa, Artificial Sequence
  Cyclic GFR-binding peptide
  MOD_RES (3)..(4): Xaa is C or S
KAXXAPTKLNAISVLYFDSSNNVILKKYR

SEQ ID NO: 109015 - protein, 32 aa, Artificial Sequence; identical to SEQ ID NO: 93578
  Cyclic GFR-binding peptide
  MOD_RES (29)..(31): Xaa is C or S

SEQ ID NO: 109016 - protein, 23 aa, Artificial Sequence
  Cyclic GFR-binding peptide
DLSAISILYLIGKTPKILKNYQM

SEQ ID NO: 109017 - protein, 34 aa, Artificial Sequence; identical to SEQ ID NO: 17027
  Cyclic GFR-binding peptide
  MOD_RES (32)..(34): Xaa is C or S

SEQ ID NO: 109018 - protein, 39 aa, Artificial Sequence; identical to SEQ ID NO: 6651
  Cyclic GFR-binding peptide
  MOD_RES (5)..(6)..(37)..(39): Xaa is C or S

SEQ ID NO: 109019 - protein, 32 aa, Artificial Sequence; identical to SEQ ID NO: 6653
  Cyclic GFR-binding peptide
  MOD_RES (6)..(7): Xaa is C or S

SEQ ID NO: 109020 - protein, 28 aa, Artificial Sequence
  Cyclic GFR-binding peptide
VPTKLNAISVLYFDDMGVPTLKKYREGM

SEQ ID NO: 109021 - protein, 28 aa, Artificial Sequence
  Cyclic GFR-binding peptide
  MOD_RES (1)..(2): Xaa is C or S
XXVSQDLNAISILYFIGKTPKILKKYRM

SEQ ID NO: 109022 - protein, 37 aa, Artificial Sequence
  Cyclic GFR-binding peptide
  MOD_RES (4)..(5)..(36): Xaa is C or S
PSTXXAPVKTSAISMLYLDNGRVLLLKNYQMIVEEXG

SEQ ID NO: 109023 - protein, 30 aa, Artificial Sequence; identical to SEQ ID NO: 6661
  Cyclic GFR-binding peptide

SEQ ID NO: 109024 - protein, 33 aa, Artificial Sequence; identical to SEQ ID NO: 35016
  Cyclic GFR-binding peptide
  MOD_RES (4)..(5): Xaa is C or S

SEQ ID NO: 109025 - protein, 29 aa, Artificial Sequence
  Cyclic GFR-binding peptide
TKMSAISMLYLNDKQQIILKNYQGMVVDR

SEQ ID NO: 109026 - protein, 35 aa, Artificial Sequence; identical to SEQ ID NO: 17036
  Cyclic GFR-binding peptide
  MOD_RES (2)..(3)..(35): Xaa is C or S

SEQ ID NO: 109027 - protein, 21 aa, Artificial Sequence
  Cyclic GFR-binding peptide
TNAISMLYFDNGRVLLLKKYR

SEQ ID NO: 109028 - protein, 28 aa, Artificial Sequence
  Cyclic GFR-binding peptide
TELNAISMLYFDEYDKVVLKKYREMVVE

SEQ ID NO: 109029 - protein, 32 aa, Artificial Sequence; identical to SEQ ID NO: 76920
  Cyclic GFR-binding peptide
  MOD_RES (2)..(3): Xaa is C or S

SEQ ID NO: 109030 - protein, 34 aa, Artificial Sequence; identical to SEQ ID NO: 6666
  Cyclic GFR-binding peptide
  MOD_RES (5)..(6): Xaa is C or S

SEQ ID NO: 109031 - protein, 33 aa, Artificial Sequence; identical to SEQ ID NO: 6670
  Cyclic GFR-binding peptide
  MOD_RES (32)..(32): Xaa is C or S

SEQ ID NO: 109032 - protein, 36 aa, Artificial Sequence; identical to SEQ ID NO: 6672
  Cyclic GFR-binding peptide
  MOD_RES (1)..(2)..(34)..(36): Xaa is C or S

SEQ ID NO: 109033 - protein, 32 aa, Artificial Sequence; identical to SEQ ID NO: 17048
  Cyclic GFR-binding peptide
  MOD_RES (1)..(2): Xaa is C or S

SEQ ID NO: 109034 - protein, 37 aa, Artificial Sequence; identical to SEQ ID NO: 6675
  Cyclic GFR-binding peptide
  MOD_RES (4)..(5)..(36): Xaa is C or S

SEQ ID NO: 109035 - protein, 36 aa, Artificial Sequence; identical to SEQ ID NO: 76929
  Cyclic GFR-binding peptide
  MOD_RES (6)..(7): Xaa is C or S

SEQ ID NO: 109036 - protein, 26 aa, Artificial Sequence
  Cyclic GFR-binding peptide
  MOD_RES (26)..(26): Xaa is C or S
NAISILYFVGRTPKVLKKYRMVVKSX

SEQ ID NO: 109037 - protein, 28 aa, Artificial Sequence
  Cyclic GFR-binding peptide
APVKTNAISMLYFDNGRVLLLKKYRMIV

SEQ ID NO: 109038 - protein, 41 aa, Artificial Sequence; identical to SEQ ID NO: 6678
  Cyclic GFR-binding peptide
  MOD_RES (5)..(6)..(38)..(40): Xaa is C or S

SEQ ID NO: 109039 - protein, 24 aa, Artificial Sequence
  Cyclic GFR-binding peptide
LNAISILYFIGKTPKILKKYRMIV

SEQ ID NO: 109040 - protein, 29 aa, Artificial Sequence
  Cyclic GFR-binding peptide
VPTKLSAISILYLDKGVVTYLKNYQGMAV

SEQ ID NO: 109041 - protein, 34 aa, Artificial Sequence; identical to SEQ ID NO: 17056
  Cyclic GFR-binding peptide
  MOD_RES (6)..(7): Xaa is C or S

SEQ ID NO: 109042 - protein, 34 aa, Artificial Sequence; identical to SEQ ID NO: 6684
  Cyclic GFR-binding peptide
  MOD_RES (2)..(34): Xaa is C or S

SEQ ID NO: 109043 - protein, 33 aa, Artificial Sequence
  Cyclic GFR-binding peptide
  MOD_RES (31)..(33): Xaa is C or S
PARLSAISILYLDAANNVVLKNYQDMVVEAXGX

SEQ ID NO: 109044 - protein, 28 aa, Artificial Sequence
  Cyclic GFR-binding peptide
  MOD_RES (27)..(27): Xaa is C or S
LSAISILYLVGRTPKVLKNYQMVVKSXK

SEQ ID NO: 109045 - protein, 36 aa, Artificial Sequence
  Cyclic GFR-binding peptide
  MOD_RES (6)..(7): Xaa is C or S
GSAGPXXTPTKMSAISMLYLNDKQQIILKNYQGMVV

SEQ ID NO: 109046 - protein, 34 aa, Artificial Sequence
  Cyclic GFR-binding peptide
  MOD_RES (1)..(2)..(33): Xaa is C or S
XXAPVKTSAISMLYLDNGRVLLLKNYQMIVEEXG

SEQ ID NO: 109047 - protein, 33 aa, Artificial Sequence; identical to SEQ ID NO: 76934
  Cyclic GFR-binding peptide
  MOD_RES (31)..(33): Xaa is C or S

SEQ ID NO: 109048 - protein, 33 aa, Artificial Sequence; identical to SEQ ID NO: 76935
  Cyclic GFR-binding peptide
  MOD_RES (2)..(3): Xaa is C or S

SEQ ID NO: 109049 - protein, 36 aa, Artificial Sequence; identical to SEQ ID NO: 6688
  Cyclic GFR-binding peptide
  MOD_RES (4)..(5): Xaa is C or S

SEQ ID NO: 109050 - protein, 27 aa, Artificial Sequence
  Cyclic GFR-binding peptide
VPTKLSAISVLYLDDMGVPTLKNYQEG

SEQ ID NO: 109051 - protein, 34 aa, Artificial Sequence; identical to SEQ ID NO: 6693
  Cyclic GFR-binding peptide
  MOD_RES (31)..(33): Xaa is C or S

SEQ ID NO: 109052 - protein, 38 aa, Artificial Sequence; identical to SEQ ID NO: 6694
  Cyclic GFR-binding peptide
  MOD_RES (5)..(6): Xaa is C or S

SEQ ID NO: 109053 - protein, 29 aa, Artificial Sequence
  Cyclic GFR-binding peptide
PTKLSAISVLYLDSSNNVILKNYQNMVVK

SEQ ID NO: 109054 - protein, 31 aa, Artificial Sequence; identical to SEQ ID NO: 6699
  Cyclic GFR-binding peptide
  MOD_RES (29)..(31): Xaa is C or S

SEQ ID NO: 109055 - protein, 27 aa, Artificial Sequence
  Cyclic GFR-binding peptide
  MOD_RES (1)..(1): Xaa is C or S
XVPTKLNAISILYFDKGVVTYLKKYRG

SEQ ID NO: 109056 - protein, 26 aa, Artificial Sequence
  Cyclic GFR-binding peptide
VPQDLSAISILYLVGRTPKVLKNYQM

SEQ ID NO: 109057 - protein, 27 aa, Artificial Sequence
  Cyclic GFR-binding peptide
  MOD_RES (1)..(1): Xaa is C or S
XVSQDLSAISILYLIGKTPKILKNYQM

SEQ ID NO: 109058 - protein, 29 aa, Artificial Sequence
  Cyclic GFR-binding peptide
  MOD_RES (1)..(2): Xaa is C or S
XXVPQALNAISILYFVGRKPKVLKKYRMI

SEQ ID NO: 109059 - protein, 35 aa, Artificial Sequence; identical to SEQ ID NO: 6711
  Cyclic GFR-binding peptide
  MOD_RES (2)..(3)..(35): Xaa is C or S

SEQ ID NO: 109060 - protein, 31 aa, Artificial Sequence; identical to SEQ ID NO: 93649
  Cyclic GFR-binding peptide
  MOD_RES (30)..(30): Xaa is C or S

SEQ ID NO: 109061 - protein, 27 aa, Artificial Sequence
  Cyclic GFR-binding peptide
QDLNAISILYFIGKTPKILKKYRMIVK

SEQ ID NO: 109062 - protein, 39 aa, Artificial Sequence
  Cyclic GFR-binding peptide
  MOD_RES (4)..(5)..(37)..(39): Xaa is C or S
PASXXVPARLSAISILYLDAANNVVLKNYQDMVVEAXGX

SEQ ID NO: 109063 - protein, 39 aa, Artificial Sequence; identical to SEQ ID NO: 6713
  Cyclic GFR-binding peptide
  MOD_RES (5)..(6)..(37)..(39): Xaa is C or S

SEQ ID NO: 109064 - protein, 37 aa, Artificial Sequence
  Cyclic GFR-binding peptide
  MOD_RES (3)..(4)..(36): Xaa is C or S
ASXXVPARLSAISILYLDAANNVVLKNYQDMVVEAXG

SEQ ID NO: 109065 - protein, 31 aa, Artificial Sequence
  Cyclic GFR-binding peptide
  MOD_RES (3)..(4): Xaa is C or S
ASXXVPARLSAISILYLDAANNVVLKNYQDM

SEQ ID NO: 109066 - protein, 36 aa, Artificial Sequence; identical to SEQ ID NO: 6716
  Cyclic GFR-binding peptide
  MOD_RES (6)..(7): Xaa is C or S

SEQ ID NO: 109067 - protein, 37 aa, Artificial Sequence; identical to SEQ ID NO: 76953
  Cyclic GFR-binding peptide
  MOD_RES (2)..(3)..(35)..(37): Xaa is C or S

SEQ ID NO: 109068 - protein, 30 aa, Artificial Sequence
  Cyclic GFR-binding peptide
VPTKLSAISILYLDKGVVTYLKNYQGMAVS

SEQ ID NO: 109069 - protein, 30 aa, Artificial Sequence; identical to SEQ ID NO: 6719
  Cyclic GFR-binding peptide
  MOD_RES (29)..(29): Xaa is C or S

SEQ ID NO: 109070 - protein, 36 aa, Artificial Sequence
  Cyclic GFR-binding peptide
  MOD_RES (6)..(7): Xaa is C or S
HVPKPXXAPTKLSAISVLYLDDSSNVILKNYQNMVV

SEQ ID NO: 109071 - protein, 31 aa, Artificial Sequence; identical to SEQ ID NO: 6721
  Cyclic GFR-binding peptide
  MOD_RES (4)..(5): Xaa is C or S

SEQ ID NO: 109072 - protein, 36 aa, Artificial Sequence; identical to SEQ ID NO: 6722
  Cyclic GFR-binding peptide
  MOD_RES (4)..(5)..(36): Xaa is C or S

SEQ ID NO: 109073 - protein, 37 aa, Artificial Sequence
  Cyclic GFR-binding peptide
  MOD_RES (5)..(6): Xaa is C or S
ASKAXXVPTKLSAISILYLDKGVVTYLKNYQGMAVSE

SEQ ID NO: 109074 - protein, 33 aa, Artificial Sequence; identical to SEQ ID NO: 6726
  Cyclic GFR-binding peptide
  MOD_RES (2)..(3): Xaa is C or S

SEQ ID NO: 109075 - protein, 33 aa, Artificial Sequence; identical to SEQ ID NO: 6727
  Cyclic GFR-binding peptide
  MOD_RES (6)..(7): Xaa is C or S

SEQ ID NO: 109076 - protein, 42 aa, Artificial Sequence; identical to SEQ ID NO: 6730
  Cyclic GFR-binding peptide
  MOD_RES (7)..(39)..(41): Xaa is C or S

SEQ ID NO: 109077 - protein, 27 aa, Artificial Sequence
  Cyclic GFR-binding peptide
MNAISMLYFNDKQQIILKKYRGMVVDR

SEQ ID NO: 109078 - protein, 26 aa, Artificial Sequence
  Cyclic GFR-binding peptide
NAISILYFDAANNVVLKKYRDMVVEA

SEQ ID NO: 109079 - protein, 32 aa, Artificial Sequence; identical to SEQ ID NO: 6732
  Cyclic GFR-binding peptide
  MOD_RES (30)..(32): Xaa is C or S

SEQ ID NO: 109080 - protein, 32 aa, Artificial Sequence; identical to SEQ ID NO: 6733
  Cyclic GFR-binding peptide
  MOD_RES (2)..(3): Xaa is C or S

SEQ ID NO: 109081 - protein, 27 aa, Artificial Sequence
  Cyclic GFR-binding peptide
VPQALSAISILYLVGRKPKVLKNYQMI

SEQ ID NO: 109082 - protein, 30 aa, Artificial Sequence; identical to SEQ ID NO: 6735
  Cyclic GFR-binding peptide
  MOD_RES (3)..(4): Xaa is C or S

SEQ ID NO: 109083 - protein, 34 aa, Artificial Sequence; identical to SEQ ID NO: 6737
  Cyclic GFR-binding peptide
  MOD_RES (5)..(6): Xaa is C or S

SEQ ID NO: 109084 - protein, 29 aa, Artificial Sequence
  Cyclic GFR-binding peptide
  MOD_RES (29)..(29): Xaa is C or S
LNAISVLYFDDMGVPTLKKYREGMSVAEX

SEQ ID NO: 109085 - protein, 30 aa, Artificial Sequence; identical to SEQ ID NO: 76964
  Cyclic GFR-binding peptide
  MOD_RES (28)..(30): Xaa is C or S

SEQ ID NO: 109086 - protein, 29 aa, Artificial Sequence
  Cyclic GFR-binding peptide
APTQLSAISVLYLDDSSNVILKNYQNMVV

SEQ ID NO: 109087 - protein, 32 aa, Artificial Sequence; identical to SEQ ID NO: 6742
  Cyclic GFR-binding peptide
  MOD_RES (5)..(6): Xaa is C or S

SEQ ID NO: 109088 - protein, 27 aa, Artificial Sequence
  Cyclic GFR-binding peptide
LNAISMLYFDENEKVVLKKYRDMVVEG

SEQ ID NO: 109089 - protein, 34 aa, Artificial Sequence; identical to SEQ ID NO: 6745
  Cyclic GFR-binding peptide
  MOD_RES (1)..(2)..(34): Xaa is C or S

SEQ ID NO: 109090 - protein, 23 aa, Artificial Sequence
  Cyclic GFR-binding peptide
NAISILYFDAANNVVLKKYRDMV

SEQ ID NO: 109091 - protein, 27 aa, Artificial Sequence
  Cyclic GFR-binding peptide
  MOD_RES (1)..(1): Xaa is C or S
XVPTELNAISMLYFDENEKVVLKKYRD

SEQ ID NO: 109092 - protein, 39 aa, Artificial Sequence
  Cyclic GFR-binding peptide
  MOD_RES (4)..(5)..(36)..(38): Xaa is C or S
PSTXXAPVKTSAISMLYLDNGRVLLLKNYQMIVEEXGXL

SEQ ID NO: 109093 - protein, 37 aa, Artificial Sequence; identical to SEQ ID NO: 76968
  Cyclic GFR-binding peptide
  MOD_RES (6)..(7): Xaa is C or S

SEQ ID NO: 109094 - protein, 32 aa, Artificial Sequence
  Cyclic GFR-binding peptide
  MOD_RES (3)..(4): Xaa is C or S
GPXXTPTKMSAISMLYLNDKQQIILKNYQGMV

SEQ ID NO: 109095 - protein, 35 aa, Artificial Sequence
  Cyclic GFR-binding peptide
  MOD_RES (2)..(3)..(35): Xaa is C or S
AXXVPTKLSAISILYLDKGVVTYLKNYQGMAVSEX

SEQ ID NO: 109096 - protein, 35 aa, Artificial Sequence; identical to SEQ ID NO: 6749
  Cyclic GFR-binding peptide
  MOD_RES (4)..(5): Xaa is C or S

SEQ ID NO: 109097 - protein, 23 aa, Artificial Sequence
  Cyclic GFR-binding peptide
LNAISILYFDKGVVTYLKKYRGM

SEQ ID NO: 109098 - protein, 26 aa, Artificial Sequence
  Cyclic GFR-binding peptide
VPTRLNAISILYFDSANNVVLKKYRD

SEQ ID NO: 109099 - protein, 28 aa, Artificial Sequence
  Cyclic GFR-binding peptide
  MOD_RES (1)..(1): Xaa is C or S
XAPTKLNAISVLYFDSSNNVILKKYRNM

SEQ ID NO: 109100 - protein, 27 aa, Artificial Sequence
  Cyclic GFR-binding peptide
PTKLSAISVLYLDSSNNVILKNYQNMV

SEQ ID NO: 109101 - protein, 30 aa, Artificial Sequence; identical to SEQ ID NO: 6758
  Cyclic GFR-binding peptide
  MOD_RES (30)..(30): Xaa is C or S

SEQ ID NO: 109102 - protein, 29 aa, Artificial Sequence
  Cyclic GFR-binding peptide
  MOD_RES (1)..(2): Xaa is C or S
XXVPTKLNAISVLYFDDMGVPTLKKYREG

SEQ ID NO: 109103 - protein, 29 aa, Artificial Sequence
  Cyclic GFR-binding peptide
KLNAISVLYFDDMGVPTLKKYREGMSVAE

SEQ ID NO: 109104 - protein, 31 aa, Artificial Sequence
  Cyclic GFR-binding peptide
  MOD_RES (1)..(1): Xaa is C or S
XTPTKMSAISMLYLNDKQQIILKNYQGMVVD

SEQ ID NO: 109105 - protein, 26 aa, Artificial Sequence
  Cyclic GFR-binding peptide
KLNAISVLYFDDMGVPTLKKYREGMS

SEQ ID NO: 109106 - protein, 28 aa, Artificial Sequence
  Cyclic GFR-binding peptide
  MOD_RES (27)..(27): Xaa is C or S
NAISMLYFDENEKVVLKKYRDMVVEGXG

SEQ ID NO: 109107 - protein, 20 aa, Artificial Sequence
  Cyclic GFR-binding peptide
NAISVLYFDDMGVPTLKKYR

SEQ ID NO: 109108 - protein, 28 aa, Artificial Sequence
  Cyclic GFR-binding peptide
VKTNAISMLYFDNGRVLLLKKYRMIVEE

SEQ ID NO: 109109 - protein, 29 aa, Artificial Sequence
  Cyclic GFR-binding peptide
  MOD_RES (1)..(2): Xaa is C or S
XXVPARLNAISILYFDAANNVVLKKYRDM

SEQ ID NO: 109110 - protein, 32 aa, Artificial Sequence; identical to SEQ ID NO: 93711
  Cyclic GFR-binding peptide
  MOD_RES (1)..(1): Xaa is C or S

SEQ ID NO: 109111 - protein, 22 aa, Artificial Sequence
  Cyclic GFR-binding peptide
MSAISMLYLNDKQQIILKNYQG

SEQ ID NO: 109112 - protein, 30 aa, Artificial Sequence; identical to SEQ ID NO: 6771
  Cyclic GFR-binding peptide
  MOD_RES (2)..(3): Xaa is C or S

SEQ ID NO: 109113 - protein, 31 aa, Artificial Sequence
  Cyclic GFR-binding peptide
  MOD_RES (30)..(30): Xaa is C or S
TKLSAISILYLDKGVVTYLKNYQGMAVSEXG

SEQ ID NO: 109114 - protein, 30 aa, Artificial Sequence; identical to SEQ ID NO: 76986
  Cyclic GFR-binding peptide
  MOD_RES (30)..(30): Xaa is C or S

SEQ ID NO: 109115 - protein, 32 aa, Artificial Sequence; identical to SEQ ID NO: 6776
  Cyclic GFR-binding peptide
  MOD_RES (31)..(31): Xaa is C or S

SEQ ID NO: 109116 - protein, 40 aa, Artificial Sequence; identical to SEQ ID NO: 6777
  Cyclic GFR-binding peptide
  MOD_RES (5)..(6)..(37)..(39): Xaa is C or S

SEQ ID NO: 109117 - protein, 41 aa, Artificial Sequence; identical to SEQ ID NO: 76989
  Cyclic GFR-binding peptide
  MOD_RES (6)..(7)..(38)..(40): Xaa is C or S

SEQ ID NO: 109118 - protein, 27 aa, Artificial Sequence
  Cyclic GFR-binding peptide
  MOD_RES (1)..(1): Xaa is C or S
XVPEKMNAISILYFDENKNVVLKKYRN

SEQ ID NO: 109119 - protein, 41 aa, Artificial Sequence; identical to SEQ ID NO: 6781
  Cyclic GFR-binding peptide
  MOD_RES (6)..(7)..(39)..(41): Xaa is C or S

SEQ ID NO: 109120 - protein, 30 aa, Artificial Sequence; identical to SEQ ID NO: 6782
  Cyclic GFR-binding peptide
  MOD_RES (1)..(1): Xaa is C or S

SEQ ID NO: 109121 - protein, 28 aa, Artificial Sequence
  Cyclic GFR-binding peptide
  MOD_RES (1)..(2): Xaa is C or S
XXAPTKLSAISVLYLDDSSNVILKNYQN

SEQ ID NO: 109122 - protein, 33 aa, Artificial Sequence; identical to SEQ ID NO: 6785
  Cyclic GFR-binding peptide
  MOD_RES (1)..(33): Xaa is C or S

SEQ ID NO: 109123 - protein, 33 aa, Artificial Sequence; identical to SEQ ID NO: 6787
  Cyclic GFR-binding peptide
  MOD_RES (3)..(4): Xaa is C or S

SEQ ID NO: 109124 - protein, 23 aa, Artificial Sequence
  Cyclic GFR-binding peptide
QDLSAISILYLVGRTPKVLKNYQ

SEQ ID NO: 109125 - protein, 28 aa, Artificial Sequence
  Cyclic GFR-binding peptide
  MOD_RES (1)..(2): Xaa is C or S
XXTPTKMSAISMLYLNDKQQIILKNYQG

SEQ ID NO: 109126 - protein, 37 aa, Artificial Sequence; identical to SEQ ID NO: 6790
  Cyclic GFR-binding peptide
  MOD_RES (6)..(6): Xaa is C or S

SEQ ID NO: 109127 - protein, 31 aa, Artificial Sequence; identical to SEQ ID NO: 6792
  Cyclic GFR-binding peptide
  MOD_RES (1)..(1): Xaa is C or S

SEQ ID NO: 109128 - protein, 34 aa, Artificial Sequence; identical to SEQ ID NO: 76996
  Cyclic GFR-binding peptide
  MOD_RES (1)..(32)..(34): Xaa is C or S

SEQ ID NO: 109129 - protein, 25 aa, Artificial Sequence
  Cyclic GFR-binding peptide
ARLSAISILYLDAANNVVLKNYQDM

SEQ ID NO: 109130 - protein, 25 aa, Artificial Sequence
  Cyclic GFR-binding peptide
NAISILYFDSANNVVLKKYRDMVVE

SEQ ID NO: 109131 - protein, 26 aa, Artificial Sequence
  Cyclic GFR-binding peptide
DLSAISILYLIGKTPKILKNYQMIVK

SEQ ID NO: 109132 - protein, 37 aa, Artificial Sequence; identical to SEQ ID NO: 6797
  Cyclic GFR-binding peptide
  MOD_RES (4)..(5)..(37): Xaa is C or S

SEQ ID NO: 109133 - protein, 32 aa, Artificial Sequence; identical to SEQ ID NO: 6801
  Cyclic GFR-binding peptide
  MOD_RES (31)..(31): Xaa is C or S

SEQ ID NO: 109134 - protein, 33 aa, Artificial Sequence; identical to SEQ ID NO: 6802
  Cyclic GFR-binding peptide
  MOD_RES (5)..(6): Xaa is C or S

SEQ ID NO: 109135 - protein, 31 aa, Artificial Sequence; identical to SEQ ID NO: 35179
  Cyclic GFR-binding peptide

SEQ ID NO: 109136 - protein, 37 aa, Artificial Sequence; identical to SEQ ID NO: 6803
  Cyclic GFR-binding peptide
  MOD_RES (6)..(7): Xaa is C or S

SEQ ID NO: 109137 - protein, 35 aa, Artificial Sequence; identical to SEQ ID NO: 77002
  Cyclic GFR-binding peptide
  MOD_RES (1)..(2)..(33)..(35): Xaa is C or S

SEQ ID NO: 109138 - protein, 32 aa, Artificial Sequence; identical to SEQ ID NO: 6806
  Cyclic GFR-binding peptide
  MOD_RES (32)..(32): Xaa is C or S

SEQ ID NO: 109139 - protein, 31 aa, Artificial Sequence
  Cyclic GFR-binding peptide
  MOD_RES (4)..(5): Xaa is C or S
PSTXXAPVKTSAISMLYLDNGRVLLLKNYQM

SEQ ID NO: 109140 - protein, 37 aa, Artificial Sequence; identical to SEQ ID NO: 6807
  Cyclic GFR-binding peptide
  MOD_RES (5)..(37): Xaa is C or S

SEQ ID NO: 109141 - protein, 29 aa, Artificial Sequence
  Cyclic GFR-binding peptide
  MOD_RES (2)..(3): Xaa is C or S
AXXVPTKLNAISILYFDKGVVTYLKKYRG

SEQ ID NO: 109142 - protein, 33 aa, Artificial Sequence
  Cyclic GFR-binding peptide
  MOD_RES (30)..(32): Xaa is C or S
PVKTSAISMLYLDNGRVLLLKNYQMIVEEXGXL

SEQ ID NO: 109143 - protein, 31 aa, Artificial Sequence; identical to SEQ ID NO: 6810
  Cyclic GFR-binding peptide
  MOD_RES (3)..(4): Xaa is C or S

SEQ ID NO: 109144 - protein, 39 aa, Artificial Sequence; identical to SEQ ID NO: 6811
  Cyclic GFR-binding peptide
  MOD_RES (4)..(5)..(36)..(38): Xaa is C or S

SEQ ID NO: 109145 - protein, 27 aa, Artificial Sequence
  Cyclic GFR-binding peptide
VPARLSAISILYLDAANNVVLKNYQDM

SEQ ID NO: 109146 - protein, 33 aa, Artificial Sequence; identical to SEQ ID NO: 6812
  Cyclic GFR-binding peptide
  MOD_RES (6)..(7): Xaa is C or S

SEQ ID NO: 109147 - protein, 36 aa, Artificial Sequence; identical to SEQ ID NO: 17184
  Cyclic GFR-binding peptide
  MOD_RES (2)..(3)..(35): Xaa is C or S

SEQ ID NO: 109148 - protein, 31 aa, Artificial Sequence; identical to SEQ ID NO: 6815
  Cyclic GFR-binding peptide
  MOD_RES (28)..(30): Xaa is C or S

SEQ ID NO: 109149 - protein, 30 aa, Artificial Sequence; identical to SEQ ID NO: 17187
  Cyclic GFR-binding peptide
  MOD_RES (2)..(3): Xaa is C or S

SEQ ID NO: 109150 - protein, 30 aa, Artificial Sequence
  Cyclic GFR-binding peptide
  MOD_RES (1)..(1): Xaa is C or S
XVPARLSAISILYLDAANNVVLKNYQDMVV

SEQ ID NO: 109151 - protein, 35 aa, Artificial Sequence; identical to SEQ ID NO: 6818
  Cyclic GFR-binding peptide
  MOD_RES (1)..(32)..(34): Xaa is C or S

SEQ ID NO: 109152 - protein, 42 aa, Artificial Sequence
  Cyclic GFR-binding peptide
  MOD_RES (6)..(7)..(39)..(41): Xaa is C or S
GSAGPXXTPTKMSAISMLYLNDKQQIILKNYQGMVVDRXGXS

SEQ ID NO: 109153 - protein, 35 aa, Artificial Sequence; identical to SEQ ID NO: 6819
  Cyclic GFR-binding peptide
  MOD_RES (1)..(2)..(33)..(35): Xaa is C or S

SEQ ID NO: 109154 - protein, 28 aa, Artificial Sequence
  Cyclic GFR-binding peptide
  MOD_RES (1)..(2): Xaa is C or S
XXVPQDLNAISILYFVGRTPKVLKKYRM

SEQ ID NO: 109155 - protein, 37 aa, Artificial Sequence; identical to SEQ ID NO: 6821
  Cyclic GFR-binding peptide
  MOD_RES (4)..(5)..(36): Xaa is C or S

SEQ ID NO: 109156 - protein, 28 aa, Artificial Sequence
  Cyclic GFR-binding peptide
VSQDLSAISILYLIGKTPKILKNYQMIV

SEQ ID NO: 109157 - protein, 37 aa, Artificial Sequence; identical to SEQ ID NO: 6824
  Cyclic GFR-binding peptide
  MOD_RES (5)..(6): Xaa is C or S

SEQ ID NO: 109158 - protein, 33 aa, Artificial Sequence
  Cyclic GFR-binding peptide
  MOD_RES (1)..(2): Xaa is C or S
XXVPEKMSAISILYLDENKNVVLKNYQNMTVES

SEQ ID NO: 109159 - protein, 34 aa, Artificial Sequence; identical to SEQ ID NO: 35206
  Cyclic GFR-binding peptide
  MOD_RES (31)..(33): Xaa is C or S

SEQ ID NO: 109160 - protein, 32 aa, Artificial Sequence; identical to SEQ ID NO: 77012
  Cyclic GFR-binding peptide
  MOD_RES (5)..(6): Xaa is C or S

SEQ ID NO: 109161 - protein, 24 aa, Artificial Sequence
  Cyclic GFR-binding peptide
SAISVLYLDSSNNVILKNYQNMVV

SEQ ID NO: 109162 - protein, 34 aa, Artificial Sequence; identical to SEQ ID NO: 6830
  Cyclic GFR-binding peptide
  MOD_RES (4)..(4): Xaa is C or S

SEQ ID NO: 109163 - protein, 24 aa, Artificial Sequence
  Cyclic GFR-binding peptide
QALSAISILYLVGRKPKVLKNYQM

SEQ ID NO: 109164 - protein, 22 aa, Artificial Sequence
  Cyclic GFR-binding peptide
TNAISMLYFDNGRVLLLKKYRM

SEQ ID NO: 109165 - protein, 24 aa, Artificial Sequence
  Cyclic GFR-binding peptide
KLSAISVLYLDSSNNVILKNYQNM

SEQ ID NO: 109166 - protein, 30 aa, Artificial Sequence; identical to SEQ ID NO: 6837
  Cyclic GFR-binding peptide
  MOD_RES (1)..(1): Xaa is C or S

SEQ ID NO: 109167 - protein, 34 aa, Artificial Sequence; identical to SEQ ID NO: 6838
  Cyclic GFR-binding peptide
  MOD_RES (6)..(7): Xaa is C or S

SEQ ID NO: 109168 - protein, 34 aa, Artificial Sequence; identical to SEQ ID NO: 6839
  Cyclic GFR-binding peptide
  MOD_RES (5)..(6): Xaa is C or S

SEQ ID NO: 109169 - protein, 30 aa, Artificial Sequence; identical to SEQ ID NO: 6841
  Cyclic GFR-binding peptide
  MOD_RES (30)..(30): Xaa is C or S

SEQ ID NO: 109170 - protein, 28 aa, Artificial Sequence
  Cyclic GFR-binding peptide
  MOD_RES (28)..(28): Xaa is C or S
ALSAISILYLVGRKPKVLKNYQMIVRSX

SEQ ID NO: 109171 - protein, 29 aa, Artificial Sequence
  Cyclic GFR-binding peptide
  MOD_RES (29)..(29): Xaa is C or S
QDLSAISILYLVGRTPKVLKNYQMVVKSX

SEQ ID NO: 109172 - protein, 29 aa, Artificial Sequence
  Cyclic GFR-binding peptide
  MOD_RES (3)..(3): Xaa is C or S
PTXAPTKLSAISVLYLDDSSNVILKNYQN

SEQ ID NO: 109173 - protein, 29 aa, Artificial Sequence
  Cyclic GFR-binding peptide
  MOD_RES (28)..(28): Xaa is C or S
LNAISMLYFDENEKVVLKKYRDMVVEGXG

SEQ ID NO: 109174 - protein, 32 aa, Artificial Sequence; identical to SEQ ID NO: 6855
  Cyclic GFR-binding peptide
  MOD_RES (3)..(4): Xaa is C or S

SEQ ID NO: 109175 - protein, 40 aa, Artificial Sequence
  Cyclic GFR-binding peptide
  MOD_RES (5)..(6)..(38)..(40): Xaa is C or S
APASXXVPARLSAISILYLDAANNVVLKNYQDMVVEAXGX

SEQ ID NO: 109176 - protein, 26 aa, Artificial Sequence
  Cyclic GFR-binding peptide
  MOD_RES (26)..(26): Xaa is C or S
SAISILYLVGRKPKVLKNYQMIVRSX

SEQ ID NO: 109177 - protein, 33 aa, Artificial Sequence
  Cyclic GFR-binding peptide
  MOD_RES (31)..(33): Xaa is C or S
APVKTSAISMLYLDNGRVLLLKNYQMIVEEXGX

SEQ ID NO: 109178 - protein, 35 aa, Artificial Sequence; identical to SEQ ID NO: 6859
  Cyclic GFR-binding peptide
  MOD_RES (4)..(4): Xaa is C or S

SEQ ID NO: 109179 - protein, 36 aa, Artificial Sequence; identical to SEQ ID NO: 6862
  Cyclic GFR-binding peptide
  MOD_RES (6)..(7): Xaa is C or S

SEQ ID NO: 109180 - protein, 21 aa, Artificial Sequence
  Cyclic GFR-binding peptide
NAISMLYFDENEKVVLKKYRD

SEQ ID NO: 109181 - protein, 26 aa, Artificial Sequence
  Cyclic GFR-binding peptide
MSAISILYLDENKNVVLKNYQNMTVE

SEQ ID NO: 109182 - protein, 27 aa, Artificial Sequence
  Cyclic GFR-binding peptide
RLSAISILYLDAANNVVLKNYQDMVVE

SEQ ID NO: 109183 - protein, 36 aa, Artificial Sequence; identical to SEQ ID NO: 6871
  Cyclic GFR-binding peptide
  MOD_RES (4)..(5): Xaa is C or S

SEQ ID NO: 109184 - protein, 31 aa, Artificial Sequence; identical to SEQ ID NO: 17241
  Cyclic GFR-binding peptide
  MOD_RES (30)..(30): Xaa is C or S

SEQ ID NO: 109185 - protein, 30 aa, Artificial Sequence; identical to SEQ ID NO: 6872
  Cyclic GFR-binding peptide
  MOD_RES (3)..(4): Xaa is C or S

SEQ ID NO: 109186 - protein, 29 aa, Artificial Sequence
  Cyclic GFR-binding peptide
  MOD_RES (2)..(3): Xaa is C or S
PXXVPQDLSAISILYLVGRTPKVLKNYQM

SEQ ID NO: 109187 - protein, 27 aa, Artificial Sequence
  Cyclic GFR-binding peptide
APTKLSAISVLYLDSSNNVILKNYQNM

SEQ ID NO: 109188 - protein, 24 aa, Artificial Sequence
  Cyclic GFR-binding peptide
ELNAISMLYFDEYDKVVLKKYREM

SEQ ID NO: 109189 - protein, 34 aa, Artificial Sequence; identical to SEQ ID NO: 6879
  Cyclic GFR-binding peptide
  MOD_RES (31)..(33): Xaa is C or S

SEQ ID NO: 109190 - protein, 33 aa, Artificial Sequence; identical to SEQ ID NO: 6880
  Cyclic GFR-binding peptide
  MOD_RES (1)..(2): Xaa is C or S

SEQ ID NO: 109191 - protein, 26 aa, Artificial Sequence
  Cyclic GFR-binding peptide
RLNAISILYFDSANNVVLKKYRDMVV

SEQ ID NO: 109192 - protein, 28 aa, Artificial Sequence
  Cyclic GFR-binding peptide
  MOD_RES (2)..(3): Xaa is C or S
PXXVPQALSAISILYLVGRKPKVLKNYQ

SEQ ID NO: 109193 - protein, 28 aa, Artificial Sequence
  Cyclic GFR-binding peptide
  MOD_RES (28)..(28): Xaa is C or S
LNAISMLYFDENEKVVLKKYRDMVVEGX

SEQ ID NO: 109194 - protein, 30 aa, Artificial Sequence; identical to SEQ ID NO: 6885
  Cyclic GFR-binding peptide

SEQ ID NO: 109195 - protein, 33 aa, Artificial Sequence; identical to SEQ ID NO: 17257
  Cyclic GFR-binding peptide
  MOD_RES (1)..(2): Xaa is C or S

SEQ ID NO: 109196 - protein, 22 aa, Artificial Sequence
  Cyclic GFR-binding peptide
NAISILYFDENKNVVLKKYRNM

SEQ ID NO: 109197 - protein, 21 aa, Artificial Sequence
  Cyclic GFR-binding peptide
NAISILYFDAANNVVLKKYRD

SEQ ID NO: 109198 - protein, 30 aa, Artificial Sequence; identical to SEQ ID NO: 6892
  Cyclic GFR-binding peptide
  MOD_RES (5)..(5): Xaa is C or S

SEQ ID NO: 109199 - protein, 34 aa, Artificial Sequence; identical to SEQ ID NO: 6893
  Cyclic GFR-binding peptide
  MOD_RES (4)..(5): Xaa is C or S

SEQ ID NO: 109200 - protein, 25 aa, Artificial Sequence
  Cyclic GFR-binding peptide
VPTELNAISMLYFDENEKVVLKKYR

SEQ ID NO: 109201 - protein, 30 aa, Artificial Sequence; identical to SEQ ID NO: 6898
  Cyclic GFR-binding peptide
  MOD_RES (1)..(2): Xaa is C or S

SEQ ID NO: 109202 - protein, 27 aa, Artificial Sequence
  Cyclic GFR-binding peptide
TKLSAISVLYLDDSSNVILKNYQNMVV

SEQ ID NO: 109203 - protein, 34 aa, Artificial Sequence; identical to SEQ ID NO: 6900
  Cyclic GFR-binding peptide
  MOD_RES (1)..(34): Xaa is C or S

SEQ ID NO: 109204 - protein, 31 aa, Artificial Sequence; identical to SEQ ID NO: 17265
  Cyclic GFR-binding peptide
  MOD_RES (2)..(3): Xaa is C or S

SEQ ID NO: 109205 - protein, 27 aa, Artificial Sequence
  Cyclic GFR-binding peptide
  MOD_RES (27)..(27): Xaa is C or S
NAISILYFDKGVVTYLKKYRGMAVSEX

SEQ ID NO: 109206 - protein, 29 aa, Artificial Sequence
  Cyclic GFR-binding peptide
  MOD_RES (2)..(3): Xaa is C or S
SXXVPARLNAISILYFDAANNVVLKKYRD

SEQ ID NO: 109207 - protein, 32 aa, Artificial Sequence; identical to SEQ ID NO: 6904
  Cyclic GFR-binding peptide
  MOD_RES (5)..(6): Xaa is C or S

SEQ ID NO: 109208 - protein, 36 aa, Artificial Sequence
  Cyclic GFR-binding peptide
  MOD_RES (4)..(5): Xaa is C or S
AGPXXTPTKMSAISMLYLNDKQQIILKNYQGMVVDR

SEQ ID NO: 109209 - protein, 32 aa, Artificial Sequence; identical to SEQ ID NO: 17271
  Cyclic GFR-binding peptide
  MOD_RES (1)..(1): Xaa is C or S

SEQ ID NO: 109210 - protein, 34 aa, Artificial Sequence
  Cyclic GFR-binding peptide
  MOD_RES (4)..(5): Xaa is C or S
AGPXXTPTKMSAISMLYLNDKQQIILKNYQGMVV

SEQ ID NO: 109211 - protein, 25 aa, Artificial Sequence
  Cyclic GFR-binding peptide
NAISMLYFDENEKVVLKKYRDMVVE

SEQ ID NO: 109212 - protein, 28 aa, Artificial Sequence
  Cyclic GFR-binding peptide
VSQDLNAISILYFIGKTPKILKKYRMIV

SEQ ID NO: 109213 - protein, 29 aa, Artificial Sequence
  Cyclic GFR-binding peptide
PTRLSAISILYLDSANNVVLKNYQDMVVE

SEQ ID NO: 109214 - protein, 28 aa, Artificial Sequence
  Cyclic GFR-binding peptide
  MOD_RES (1)..(1): Xaa is C or S
XVPARLNAISILYFDAANNVVLKKYRDM

SEQ ID NO: 109215 - protein, 35 aa, Artificial Sequence; identical to SEQ ID NO: 6912
  Cyclic GFR-binding peptide
  MOD_RES (6)..(6): Xaa is C or S

SEQ ID NO: 109216 - protein, 29 aa, Artificial Sequence
  Cyclic GFR-binding peptide
  MOD_RES (28)..(28): Xaa is C or S
DLSAISILYLIGKTPKILKNYQMIVKSXK

SEQ ID NO: 109217 - protein, 34 aa, Artificial Sequence; identical to SEQ ID NO: 6917
  Cyclic GFR-binding peptide
  MOD_RES (4)..(5): Xaa is C or S

SEQ ID NO: 109218 - protein, 39 aa, Artificial Sequence; identical to SEQ ID NO: 77057
  Cyclic GFR-binding peptide
  MOD_RES (6)..(7)..(39): Xaa is C or S

SEQ ID NO: 109219 - protein, 33 aa, Artificial Sequence; identical to SEQ ID NO: 17286
  Cyclic GFR-binding peptide
  MOD_RES (3)..(4): Xaa is C or S

SEQ ID NO: 109220 - protein, 35 aa, Artificial Sequence; identical to SEQ ID NO: 35296
  Cyclic GFR-binding peptide
  MOD_RES (1)..(33)..(35): Xaa is C or S

SEQ ID NO: 109221 - protein, 26 aa, Artificial Sequence
  Cyclic GFR-binding peptide
TKLSAISILYLDKGVVTYLKNYQGMA

SEQ ID NO: 109222 - protein, 31 aa, Artificial Sequence
  Cyclic GFR-binding peptide
TPTKMSAISMLYLNDKQQIILKNYQGMVVDR

SEQ ID NO: 109223 - protein, 26 aa, Artificial Sequence
  Cyclic GFR-binding peptide
TQLSAISVLYLDDSSNVILKNYQNMV

SEQ ID NO: 109224 - protein, 36 aa, Artificial Sequence; identical to SEQ ID NO: 6923
  Cyclic GFR-binding peptide
  MOD_RES (2)..(3)..(35): Xaa is C or S

SEQ ID NO: 109225 - protein, 32 aa, Artificial Sequence; identical to SEQ ID NO: 6924
  Cyclic GFR-binding peptide
  MOD_RES (5)..(6): Xaa is C or S

SEQ ID NO: 109226 - protein, 30 aa, Artificial Sequence; identical to SEQ ID NO: 6926
  Cyclic GFR-binding peptide

SEQ ID NO: 109227 - protein, 20 aa, Artificial Sequence
  Cyclic GFR-binding peptide
NAISILYFDENKNVVLKKYR

SEQ ID NO: 109228 - protein, 23 aa, Artificial Sequence
  Cyclic GFR-binding peptide
KTSAISMLYLDNGRVLLLKNYQM

SEQ ID NO: 109229 - protein, 33 aa, Artificial Sequence; identical to SEQ ID NO: 6927
  Cyclic GFR-binding peptide
  MOD_RES (1)..(2): Xaa is C or S

SEQ ID NO: 109230 - protein, 30 aa, Artificial Sequence
  Cyclic GFR-binding peptide
  MOD_RES (2)..(3): Xaa is C or S
PXXTPTKMSAISMLYLNDKQQIILKNYQGM

SEQ ID NO: 109231 - protein, 33 aa, Artificial Sequence; identical to SEQ ID NO: 6928
  Cyclic GFR-binding peptide
  MOD_RES (3)..(4): Xaa is C or S

SEQ ID NO: 109232 - protein, 36 aa, Artificial Sequence
  Cyclic GFR-binding peptide
  MOD_RES (4)..(5): Xaa is C or S
SKAXXVPTKLSAISILYLDKGVVTYLKNYQGMAVSE

SEQ ID NO: 109233 - protein, 31 aa, Artificial Sequence; identical to SEQ ID NO: 6932
  Cyclic GFR-binding peptide
  MOD_RES (1)..(1): Xaa is C or S

SEQ ID NO: 109234 - protein, 35 aa, Artificial Sequence; identical to SEQ ID NO: 6935
  Cyclic GFR-binding peptide
  MOD_RES (2)..(3)..(35): Xaa is C or S

SEQ ID NO: 109235 - protein, 31 aa, Artificial Sequence; identical to SEQ ID NO: 6936
  Cyclic GFR-binding peptide
  MOD_RES (31)..(31): Xaa is C or S

SEQ ID NO: 109236 - protein, 28 aa, Artificial Sequence
  Cyclic GFR-binding peptide
  MOD_RES (2)..(3): Xaa is C or S
PXXVPQALNAISILYFVGRKPKVLKKYR

SEQ ID NO: 109237 - protein, 26 aa, Artificial Sequence
  Cyclic GFR-binding peptide
KMNAISMLYFNDKQQIILKKYRGMVV

SEQ ID NO: 109238 - protein, 25 aa, Artificial Sequence
  Cyclic GFR-binding peptide
LSAISILYLDSANNVVLKNYQDMVV

SEQ ID NO: 109239 - protein, 36 aa, Artificial Sequence; identical to SEQ ID NO: 6946
  Cyclic GFR-binding peptide
  MOD_RES (33)..(35): Xaa is C or S

SEQ ID NO: 109240 - protein, 30 aa, Artificial Sequence; identical to SEQ ID NO: 77074
  Cyclic GFR-binding peptide
  MOD_RES (4)..(5): Xaa is C or S

SEQ ID NO: 109241 - protein, 37 aa, Artificial Sequence; identical to SEQ ID NO: 6949
  Cyclic GFR-binding peptide
  MOD_RES (2)..(3)..(36): Xaa is C or S

SEQ ID NO: 109242 - protein, 32 aa, Artificial Sequence
  Cyclic GFR-binding peptide
  MOD_RES (1)..(1): Xaa is C or S
XVPARLSAISILYLDAANNVVLKNYQDMVVEA

SEQ ID NO: 109243 - protein, 33 aa, Artificial Sequence; identical to SEQ ID NO: 6951
  Cyclic GFR-binding peptide
  MOD_RES (30)..(32): Xaa is C or S

SEQ ID NO: 109244 - protein, 27 aa, Artificial Sequence
  Cyclic GFR-binding peptide
ALNAISILYFVGRKPKVLKKYRMIVRS

SEQ ID NO: 109245 - protein, 24 aa, Artificial Sequence
  Cyclic GFR-binding peptide
PQDLNAISILYFVGRTPKVLKKYR

SEQ ID NO: 109246 - protein, 28 aa, Artificial Sequence
  Cyclic GFR-binding peptide
  MOD_RES (1)..(2): Xaa is C or S
XXVPTKLSAISVLYLDDMGVPTLKNYQE

SEQ ID NO: 109247 - protein, 35 aa, Artificial Sequence; identical to SEQ ID NO: 77077
  Cyclic GFR-binding peptide
  MOD_RES (4)..(5): Xaa is C or S

SEQ ID NO: 109248 - protein, 33 aa, Artificial Sequence; identical to SEQ ID NO: 77078
  Cyclic GFR-binding peptide
  MOD_RES (1)..(32): Xaa is C or S

SEQ ID NO: 109249 - protein, 31 aa, Artificial Sequence
  Cyclic GFR-binding peptide
  MOD_RES (3)..(4): Xaa is C or S
GPXXTPTKMSAISMLYLNDKQQIILKNYQGM

SEQ ID NO: 109250 - protein, 25 aa, Artificial Sequence
  Cyclic GFR-binding peptide
PQALSAISILYLVGRKPKVLKNYQM

SEQ ID NO: 109251 - protein, 32 aa, Artificial Sequence; identical to SEQ ID NO: 35359
  Cyclic GFR-binding peptide
  MOD_RES (29)..(31): Xaa is C or S

SEQ ID NO: 109252 - protein, 34 aa, Artificial Sequence
  Cyclic GFR-binding peptide
  MOD_RES (6)..(7): Xaa is C or S
RVPSTXXAPVKTSAISMLYLDNGRVLLLKNYQMI

SEQ ID NO: 109253 - protein, 35 aa, Artificial Sequence
  Cyclic GFR-binding peptide
  MOD_RES (4)..(5): Xaa is C or S
PEPXXVPEKMSAISILYLDENKNVVLKNYQNMTVE

SEQ ID NO: 109254 - protein, 22 aa, Artificial Sequence
  Cyclic GFR-binding peptide
NAISMLYFNDKQQIILKKYRGM

SEQ ID NO: 109255 - protein, 23 aa, Artificial Sequence
  Cyclic GFR-binding peptide
LSAISILYLIGKTPKILKNYQMI

SEQ ID NO: 109256 - protein, 32 aa, Artificial Sequence; identical to SEQ ID NO: 6986
  Cyclic GFR-binding peptide
  MOD_RES (29)..(31): Xaa is C or S

SEQ ID NO: 109257 - protein, 37 aa, Artificial Sequence; identical to SEQ ID NO: 6988
  Cyclic GFR-binding peptide
  MOD_RES (3)..(4)..(35)..(37): Xaa is C or S

SEQ ID NO: 109258 - protein, 36 aa, Artificial Sequence; identical to SEQ ID NO: 6989
  Cyclic GFR-binding peptide
  MOD_RES (4)..(5): Xaa is C or S

SEQ ID NO: 109259 - protein, 31 aa, Artificial Sequence; identical to SEQ ID NO: 17344
  Cyclic GFR-binding peptide
  MOD_RES (1)..(2): Xaa is C or S

SEQ ID NO: 109260 - protein, 32 aa, Artificial Sequence; identical to SEQ ID NO: 6990
  Cyclic GFR-binding peptide
  MOD_RES (1)..(2): Xaa is C or S

SEQ ID NO: 109261 - protein, 30 aa, Artificial Sequence; identical to SEQ ID NO: 6992
  Cyclic GFR-binding peptide
  MOD_RES (27)..(29): Xaa is C or S

SEQ ID NO: 109262 - protein, 32 aa, Artificial Sequence
  Cyclic GFR-binding peptide
  MOD_RES (29)..(31): Xaa is C or S
KMSAISILYLDENKNVVLKNYQNMTVESXAXR

SEQ ID NO: 109263 - protein, 26 aa, Artificial Sequence
  Cyclic GFR-binding peptide
PQDLSAISILYLVGRTPKVLKNYQMV

SEQ ID NO: 109264 - protein, 35 aa, Artificial Sequence
  Cyclic GFR-binding peptide
  MOD_RES (6)..(7): Xaa is C or S
KASKAXXVPTKLSAISILYLDKGVVTYLKNYQGMA

SEQ ID NO: 109265 - protein, 30 aa, Artificial Sequence
  Cyclic GFR-binding peptide
  MOD_RES (30)..(30): Xaa is C or S
TKLSAISILYLDKGVVTYLKNYQGMAVSEX

SEQ ID NO: 109266 - protein, 29 aa, Artificial Sequence
  Cyclic GFR-binding peptide
VPARLSAISILYLDAANNVVLKNYQDMVV

SEQ ID NO: 109267 - protein, 26 aa, Artificial Sequence
  Cyclic GFR-binding peptide
KMSAISILYLDENKNVVLKNYQNMTV

SEQ ID NO: 109268 - protein, 37 aa, Artificial Sequence; identical to SEQ ID NO: 6999
  Cyclic GFR-binding peptide
  MOD_RES (4)..(5): Xaa is C or S

SEQ ID NO: 109269 - protein, 23 aa, Artificial Sequence
  Cyclic GFR-binding peptide
KMNAISILYFDENKNVVLKKYRN

SEQ ID NO: 109270 - protein, 32 aa, Artificial Sequence; identical to SEQ ID NO: 7005
  Cyclic GFR-binding peptide
  MOD_RES (6)..(7): Xaa is C or S

SEQ ID NO: 109271 - protein, 35 aa, Artificial Sequence; identical to SEQ ID NO: 7006
  Cyclic GFR-binding peptide
  MOD_RES (6)..(7): Xaa is C or S

SEQ ID NO: 109272 - protein, 28 aa, Artificial Sequence
  Cyclic GFR-binding peptide
PTRLNAISILYFDSANNVVLKKYRDMVV

SEQ ID NO: 109273 - protein, 22 aa, Artificial Sequence
  Cyclic GFR-binding peptide
LNAISILYFDKGVVTYLKKYRG

SEQ ID NO: 109274 - protein, 23 aa, Artificial Sequence
  Cyclic GFR-binding peptide
MNAISMLYFNDKQQIILKKYRGM

SEQ ID NO: 109275 - protein, 25 aa, Artificial Sequence
  Cyclic GFR-binding peptide
VKTNAISMLYFDNGRVLLLKKYRMI

SEQ ID NO: 109276 - protein, 29 aa, Artificial Sequence
  Cyclic GFR-binding peptide
  MOD_RES (27)..(29): Xaa is C or S
SAISVLYLDSSNNVILKNYQNMVVKAXGX

SEQ ID NO: 109277 - protein, 35 aa, Artificial Sequence; identical to SEQ ID NO: 7013
  Cyclic GFR-binding peptide
  MOD_RES (3)..(4): Xaa is C or S

SEQ ID NO: 109278 - protein, 40 aa, Artificial Sequence
  Cyclic GFR-binding peptide
  MOD_RES (5)..(6)..(38)..(40): Xaa is C or S
SAGPXXTPTKMSAISMLYLNDKQQIILKNYQGMVVDRXGX

SEQ ID NO: 109279 - protein, 25 aa, Artificial Sequence
  Cyclic GFR-binding peptide
SAISMLYLDNGRVLLLKNYQMIVEE

SEQ ID NO: 109280 - protein, 38 aa, Artificial Sequence; identical to SEQ ID NO: 17369
  Cyclic GFR-binding peptide
  MOD_RES (6)..(7): Xaa is C or S

SEQ ID NO: 109281 - protein, 32 aa, Artificial Sequence; identical to SEQ ID NO: 7014
  Cyclic GFR-binding peptide
  MOD_RES (29)..(31): Xaa is C or S

SEQ ID NO: 109282 - protein, 40 aa, Artificial Sequence
  Cyclic GFR-binding peptide
  MOD_RES (5)..(6)..(38)..(40): Xaa is C or S
IPEPXXVPEKMSAISILYLDENKNVVLKNYQNMTVESXAX

SEQ ID NO: 109283 - protein, 25 aa, Artificial Sequence
  Cyclic GFR-binding peptide
SAISMLYLNDKQQIILKNYQGMVVD

SEQ ID NO: 109284 - protein, 27 aa, Artificial Sequence
  Cyclic GFR-binding peptide
VPQDLSAISILYLVGRTPKVLKNYQMV

SEQ ID NO: 109285 - protein, 40 aa, Artificial Sequence
  Cyclic GFR-binding peptide
  MOD_RES (4)..(5)..(37)..(39): Xaa is C or S
AGPXXTPTKMSAISMLYLNDKQQIILKNYQGMVVDRXGXS

SEQ ID NO: 109286 - protein, 29 aa, Artificial Sequence
  Cyclic GFR-binding peptide
VPEKMSAISILYLDENKNVVLKNYQNMTV

SEQ ID NO: 109287 - protein, 26 aa, Artificial Sequence
  Cyclic GFR-binding peptide
  MOD_RES (1)..(1): Xaa is C or S
XVPEKMNAISILYFDENKNVVLKKYR

SEQ ID NO: 109288 - protein, 24 aa, Artificial Sequence
  Cyclic GFR-binding peptide
TQLSAISVLYLDDSSNVILKNYQN

SEQ ID NO: 109289 - protein, 30 aa, Artificial Sequence
  Cyclic GFR-binding peptide
  MOD_RES (1)..(2): Xaa is C or S
XXTPTKMSAISMLYLNDKQQIILKNYQGMV

SEQ ID NO: 109290 - protein, 32 aa, Artificial Sequence; identical to SEQ ID NO: 17378
  Cyclic GFR-binding peptide
  MOD_RES (4)..(5): Xaa is C or S

SEQ ID NO: 109291 - protein, 33 aa, Artificial Sequence; identical to SEQ ID NO: 7025
  Cyclic GFR-binding peptide
  MOD_RES (1)..(2): Xaa is C or S

SEQ ID NO: 109292 - protein, 26 aa, Artificial Sequence
  Cyclic GFR-binding peptide
  MOD_RES (26)..(26): Xaa is C or S
NAISILYFVGRKPKVLKKYRMIVRSX

SEQ ID NO: 109293 - protein, 29 aa, Artificial Sequence
  Cyclic GFR-binding peptide
PTKMNAISMLYFNDKQQIILKKYRGMVVD

SEQ ID NO: 109294 - protein, 25 aa, Artificial Sequence
  Cyclic GFR-binding peptide
NAISVLYFDSSNNVILKKYRNMVVK

SEQ ID NO: 109295 - protein, 38 aa, Artificial Sequence
  Cyclic GFR-binding peptide
  MOD_RES (3)..(4)..(36)..(38): Xaa is C or S
GPXXTPTKMSAISMLYLNDKQQIILKNYQGMVVDRXGX

SEQ ID NO: 109296 - protein, 29 aa, Artificial Sequence
  Cyclic GFR-binding peptide
PTKLSAISVLYLDDMGVPTLKNYQEGMSV

SEQ ID NO: 109297 - protein, 24 aa, Artificial Sequence
  Cyclic GFR-binding peptide
SAISILYLDAANNVVLKNYQDMVV

SEQ ID NO: 109298 - protein, 36 aa, Artificial Sequence; identical to SEQ ID NO: 17390
  Cyclic GFR-binding peptide
  MOD_RES (2)..(3)..(35): Xaa is C or S

SEQ ID NO: 109299 - protein, 28 aa, Artificial Sequence
  Cyclic GFR-binding peptide
PQDLNAISILYFVGRTPKVLKKYRMVVK

SEQ ID NO: 109300 - protein, 30 aa, Artificial Sequence; identical to SEQ ID NO: 7048
  Cyclic GFR-binding peptide
  MOD_RES (4)..(5): Xaa is C or S

SEQ ID NO: 109301 - protein, 36 aa, Artificial Sequence; identical to SEQ ID NO: 94007
  Cyclic GFR-binding peptide
  MOD_RES (3)..(4)..(36): Xaa is C or S

SEQ ID NO: 109302 - protein, 21 aa, Artificial Sequence
  Cyclic GFR-binding peptide
LSAISILYLDKGVVTYLKNYQ

SEQ ID NO: 109303 - protein, 30 aa, Artificial Sequence; identical to SEQ ID NO: 7050
  Cyclic GFR-binding peptide

SEQ ID NO: 109304 - protein, 22 aa, Artificial Sequence
  Cyclic GFR-binding peptide
NAISILYFDSANNVVLKKYRDM

SEQ ID NO: 109305 - protein, 27 aa, Artificial Sequence
  Cyclic GFR-binding peptide
  MOD_RES (27)..(27): Xaa is C or S
SAISILYLDKGVVTYLKNYQGMAVSEX

SEQ ID NO: 109306 - protein, 33 aa, Artificial Sequence; identical to SEQ ID NO: 7055
  Cyclic GFR-binding peptide
  MOD_RES (31)..(33): Xaa is C or S

SEQ ID NO: 109307 - protein, 26 aa, Artificial Sequence
  Cyclic GFR-binding peptide
  MOD_RES (1)..(1): Xaa is C or S
XTPTKMNAISMLYFNDKQQIILKKYR

SEQ ID NO: 109308 - protein, 32 aa, Artificial Sequence; identical to SEQ ID NO: 7056
  Cyclic GFR-binding peptide
  MOD_RES (5)..(6): Xaa is C or S

SEQ ID NO: 109309 - protein, 31 aa, Artificial Sequence; identical to SEQ ID NO: 7057
  Cyclic GFR-binding peptide
  MOD_RES (30)..(30): Xaa is C or S

SEQ ID NO: 109310 - protein, 28 aa, Artificial Sequence
  Cyclic GFR-binding peptide
  MOD_RES (28)..(28): Xaa is C or S
LNAISMLYFDEYDKVVLKKYREMVVEGX

SEQ ID NO: 109311 - protein, 32 aa, Artificial Sequence; identical to SEQ ID NO: 7063
  Cyclic GFR-binding peptide
  MOD_RES (4)..(5): Xaa is C or S

SEQ ID NO: 109312 - protein, 34 aa, Artificial Sequence; identical to SEQ ID NO: 7064
  Cyclic GFR-binding peptide
  MOD_RES (6)..(7): Xaa is C or S

SEQ ID NO: 109313 - protein, 32 aa, Artificial Sequence; identical to SEQ ID NO: 7066
  Cyclic GFR-binding peptide
  MOD_RES (29)..(31): Xaa is C or S

SEQ ID NO: 109314 - protein, 26 aa, Artificial Sequence
  Cyclic GFR-binding peptide
PARLSAISILYLDAANNVVLKNYQDM

SEQ ID NO: 109315 - protein, 38 aa, Artificial Sequence; identical to SEQ ID NO: 7070
  Cyclic GFR-binding peptide
  MOD_RES (2)..(3)..(35)..(37): Xaa is C or S

SEQ ID NO: 109316 - protein, 26 aa, Artificial Sequence
  Cyclic GFR-binding peptide
LNAISILYFDSANNVVLKKYRDMVVE

SEQ ID NO: 109317 - protein, 35 aa, Artificial Sequence; identical to SEQ ID NO: 77131
  Cyclic GFR-binding peptide
  MOD_RES (5)..(6): Xaa is C or S

SEQ ID NO: 109318 - protein, 21 aa, Artificial Sequence
  Cyclic GFR-binding peptide
LSAISVLYLDDSSNVILKNYQ

SEQ ID NO: 109319 - protein, 28 aa, Artificial Sequence
  Cyclic GFR-binding peptide
TKLSAISVLYLDDSSNVILKNYQNMVVR

SEQ ID NO: 109320 - protein, 33 aa, Artificial Sequence
  Cyclic GFR-binding peptide
  MOD_RES (30)..(32): Xaa is C or S
TKLSAISILYLDKGVVTYLKNYQGMAVSEXGXR

SEQ ID NO: 109321 - protein, 35 aa, Artificial Sequence; identical to SEQ ID NO: 7083
  Cyclic GFR-binding peptide
  MOD_RES (1)..(32)..(34): Xaa is C or S

SEQ ID NO: 109322 - protein, 29 aa, Artificial Sequence
  Cyclic GFR-binding peptide
  MOD_RES (28)..(28): Xaa is C or S
MNAISMLYFNDKQQIILKKYRGMVVDRXG

SEQ ID NO: 109323 - protein, 32 aa, Artificial Sequence
  Cyclic GFR-binding peptide
  MOD_RES (29)..(31): Xaa is C or S
KMSAISMLYLNDKQQIILKNYQGMVVDRXGXS

SEQ ID NO: 109324 - protein, 38 aa, Artificial Sequence
  Cyclic GFR-binding peptide
  MOD_RES (3)..(4)..(36)..(38): Xaa is C or S
KAXXVPTKLSAISILYLDKGVVTYLKNYQGMAVSEXGX

SEQ ID NO: 109325 - protein, 25 aa, Artificial Sequence
  Cyclic GFR-binding peptide
PTKLNAISVLYFDDMGVPTLKKYRE

SEQ ID NO: 109326 - protein, 39 aa, Artificial Sequence; identical to SEQ ID NO: 35482
  Cyclic GFR-binding peptide
  MOD_RES (6)..(7)..(39): Xaa is C or S

SEQ ID NO: 109327 - protein, 34 aa, Artificial Sequence; identical to SEQ ID NO: 7089
  Cyclic GFR-binding peptide
  MOD_RES (2)..(3): Xaa is C or S

SEQ ID NO: 109328 - protein, 33 aa, Artificial Sequence; identical to SEQ ID NO: 7090
  Cyclic GFR-binding peptide
  MOD_RES (1)..(2): Xaa is C or S

SEQ ID NO: 109329 - protein, 36 aa, Artificial Sequence
  Cyclic GFR-binding peptide
  MOD_RES (1)..(2)..(34)..(36): Xaa is C or S
XXVPEKMSAISILYLDENKNVVLKNYQNMTVESXAX

SEQ ID NO: 109330 - protein, 33 aa, Artificial Sequence; identical to SEQ ID NO: 7093
  Cyclic GFR-binding peptide
  MOD_RES (1)..(33): Xaa is C or S

SEQ ID NO: 109331 - protein, 33 aa, Artificial Sequence; identical to SEQ ID NO: 35488
  Cyclic GFR-binding peptide
  MOD_RES (5)..(6): Xaa is C or S

SEQ ID NO: 109332 - protein, 24 aa, Artificial Sequence
  Cyclic GFR-binding peptide
LSAISVLYLDDMGVPTLKNYQEGM

SEQ ID NO: 109333 - protein, 31 aa, Artificial Sequence
  Cyclic GFR-binding peptide
  MOD_RES (2)..(3): Xaa is C or S
AXXVPTKLSAISILYLDKGVVTYLKNYQGMA

SEQ ID NO: 109334 - protein, 29 aa, Artificial Sequence
  Cyclic GFR-binding peptide
  MOD_RES (1)..(2): Xaa is C or S
XXVPQDLNAISILYFVGRTPKVLKKYRMV

SEQ ID NO: 109335 - protein, 25 aa, Artificial Sequence
  Cyclic GFR-binding peptide
LNAISILYFDKGVVTYLKKYRGMAV

SEQ ID NO: 109336 - protein, 28 aa, Artificial Sequence
  Cyclic GFR-binding peptide
  MOD_RES (2)..(3): Xaa is C or S
TXXVPTRLSAISILYLDSANNVVLKNYQ

SEQ ID NO: 109337 - protein, 29 aa, Artificial Sequence
  Cyclic GFR-binding peptide
  MOD_RES (28)..(28): Xaa is C or S
DLNAISILYFIGKTPKILKKYRMIVKSXK

SEQ ID NO: 109338 - protein, 36 aa, Artificial Sequence; identical to SEQ ID NO: 17448
  Cyclic GFR-binding peptide
  MOD_RES (3)..(4)..(36): Xaa is C or S

SEQ ID NO: 109339 - protein, 38 aa, Artificial Sequence; identical to SEQ ID NO: 7100
  Cyclic GFR-binding peptide
  MOD_RES (6)..(7): Xaa is C or S

SEQ ID NO: 109340 - protein, 35 aa, Artificial Sequence
  Cyclic GFR-binding peptide
  MOD_RES (6)..(7): Xaa is C or S
GIPEPXXVPEKMSAISILYLDENKNVVLKNYQNMT

SEQ ID NO: 109341 - protein, 30 aa, Artificial Sequence; identical to SEQ ID NO: 94072
  Cyclic GFR-binding peptide
  MOD_RES (3)..(4): Xaa is C or S

SEQ ID NO: 109342 - protein, 32 aa, Artificial Sequence; identical to SEQ ID NO: 7102
  Cyclic GFR-binding peptide
  MOD_RES (30)..(32): Xaa is C or S

SEQ ID NO: 109343 - protein, 39 aa, Artificial Sequence
  Cyclic GFR-binding peptide
  MOD_RES (6)..(7)..(39): Xaa is C or S
GSAGPXXTPTKMSAISMLYLNDKQQIILKNYQGMVVDRX

SEQ ID NO: 109344 - protein, 28 aa, Artificial Sequence
  Cyclic GFR-binding peptide
PTKMNAISMLYFNDKQQIILKKYRGMVV

SEQ ID NO: 109345 - protein, 24 aa, Artificial Sequence
  Cyclic GFR-binding peptide
TKMSAISMLYLNDKQQIILKNYQG

SEQ ID NO: 109346 - protein, 37 aa, Artificial Sequence
  Cyclic GFR-binding peptide
  MOD_RES (5)..(6): Xaa is C or S
SAGPXXTPTKMSAISMLYLNDKQQIILKNYQGMVVDR

SEQ ID NO: 109347 - protein, 31 aa, Artificial Sequence; identical to SEQ ID NO: 7106
  Cyclic GFR-binding peptide
  MOD_RES (3)..(4): Xaa is C or S

SEQ ID NO: 109348 - protein, 29 aa, Artificial Sequence
  Cyclic GFR-binding peptide
  MOD_RES (27)..(29): Xaa is C or S
SAISMLYLNDKQQIILKNYQGMVVDRXGX

SEQ ID NO: 109349 - protein, 31 aa, Artificial Sequence
  Cyclic GFR-binding peptide
  MOD_RES (30)..(30): Xaa is C or S
EKMSAISILYLDENKNVVLKNYQNMTVESXA

SEQ ID NO: 109350 - protein, 33 aa, Artificial Sequence
  Cyclic GFR-binding peptide
  MOD_RES (1)..(2): Xaa is C or S
XXVPTKLSAISILYLDKGVVTYLKNYQGMAVSE

SEQ ID NO: 109351 - protein, 23 aa, Artificial Sequence
  Cyclic GFR-binding peptide
NAISILYFDENKNVVLKKYRNMT

SEQ ID NO: 109352 - protein, 23 aa, Artificial Sequence
  Cyclic GFR-binding peptide
TKMSAISMLYLNDKQQIILKNYQ

SEQ ID NO: 109353 - protein, 31 aa, Artificial Sequence; identical to SEQ ID NO: 7112
  Cyclic GFR-binding peptide
  MOD_RES (5)..(6): Xaa is C or S

SEQ ID NO: 109354 - protein, 28 aa, Artificial Sequence
  Cyclic GFR-binding peptide
VPARLSAISILYLDAANNVVLKNYQDMV

SEQ ID NO: 109355 - protein, 33 aa, Artificial Sequence; identical to SEQ ID NO: 7115
  Cyclic GFR-binding peptide
  MOD_RES (6)..(7): Xaa is C or S

SEQ ID NO: 109356 - protein, 25 aa, Artificial Sequence
  Cyclic GFR-binding peptide
VPTRLSAISILYLDSANNVVLKNYQ

SEQ ID NO: 109357 - protein, 37 aa, Artificial Sequence; identical to SEQ ID NO: 7116
  Cyclic GFR-binding peptide
  MOD_RES (2)..(3)..(34)..(36): Xaa is C or S

SEQ ID NO: 109358 - protein, 27 aa, Artificial Sequence
  Cyclic GFR-binding peptide
EKMNAISILYFDENKNVVLKKYRNMTV

SEQ ID NO: 109359 - protein, 38 aa, Artificial Sequence; identical to SEQ ID NO: 17467
  Cyclic GFR-binding peptide
  MOD_RES (6)..(7): Xaa is C or S

SEQ ID NO: 109360 - protein, 24 aa, Artificial Sequence
  Cyclic GFR-binding peptide
SQDLNAISILYFIGKTPKILKKYR

SEQ ID NO: 109361 - protein, 28 aa, Artificial Sequence
  Cyclic GFR-binding peptide
KLSAISVLYLDSSNNVILKNYQNMVVKA

SEQ ID NO: 109362 - protein, 28 aa, Artificial Sequence
  Cyclic GFR-binding peptide
PVKTSAISMLYLDNGRVLLLKNYQMIVE

SEQ ID NO: 109363 - protein, 33 aa, Artificial Sequence; identical to SEQ ID NO: 35529
  Cyclic GFR-binding peptide
  MOD_RES (31)..(33): Xaa is C or S

SEQ ID NO: 109364 - protein, 32 aa, Artificial Sequence; identical to SEQ ID NO: 7127
  Cyclic GFR-binding peptide
  MOD_RES (1)..(1): Xaa is C or S

SEQ ID NO: 109365 - protein, 23 aa, Artificial Sequence
  Cyclic GFR-binding peptide
TKLNAISVLYFDSSNNVILKKYR

SEQ ID NO: 109366 - protein, 26 aa, Artificial Sequence
  Cyclic GFR-binding peptide
  MOD_RES (1)..(1): Xaa is C or S
XVSQDLSAISILYLIGKTPKILKNYQ

SEQ ID NO: 109367 - protein, 35 aa, Artificial Sequence; identical to SEQ ID NO: 7137
  Cyclic GFR-binding peptide
  MOD_RES (4)..(5): Xaa is C or S

SEQ ID NO: 109368 - protein, 31 aa, Artificial Sequence; identical to SEQ ID NO: 77159
  Cyclic GFR-binding peptide
  MOD_RES (5)..(6): Xaa is C or S

SEQ ID NO: 109369 - protein, 28 aa, Artificial Sequence
  Cyclic GFR-binding peptide
TKMNAISMLYFNDKQQIILKKYRGMVVD

SEQ ID NO: 109370 - protein, 30 aa, Artificial Sequence; identical to SEQ ID NO: 77161
  Cyclic GFR-binding peptide
  MOD_RES (4)..(5): Xaa is C or S

SEQ ID NO: 109371 - protein, 36 aa, Artificial Sequence; identical to SEQ ID NO: 17484
  Cyclic GFR-binding peptide
  MOD_RES (5)..(6): Xaa is C or S

SEQ ID NO: 109372 - protein, 23 aa, Artificial Sequence
  Cyclic GFR-binding peptide
SAISVLYLDDMGVPTLKNYQEGM

SEQ ID NO: 109373 - protein, 27 aa, Artificial Sequence
  Cyclic GFR-binding peptide
  MOD_RES (1)..(2): Xaa is C or S
XXVPTKLNAISVLYFDDMGVPTLKKYR

SEQ ID NO: 109374 - protein, 30 aa, Artificial Sequence; identical to SEQ ID NO: 7140
  Cyclic GFR-binding peptide
  MOD_RES (1)..(2): Xaa is C or S

SEQ ID NO: 109375 - protein, 40 aa, Artificial Sequence; identical to SEQ ID NO: 7141
  Cyclic GFR-binding peptide
  MOD_RES (4)..(5)..(38)..(40): Xaa is C or S

SEQ ID NO: 109376 - protein, 33 aa, Artificial Sequence; identical to SEQ ID NO: 7142
  Cyclic GFR-binding peptide
  MOD_RES (1)..(1): Xaa is C or S

SEQ ID NO: 109377 - protein, 31 aa, Artificial Sequence; identical to SEQ ID NO: 7143
  Cyclic GFR-binding peptide
  MOD_RES (5)..(6): Xaa is C or S

SEQ ID NO: 109378 - protein, 31 aa, Artificial Sequence; identical to SEQ ID NO: 7144
  Cyclic GFR-binding peptide
  MOD_RES (29)..(31): Xaa is C or S

SEQ ID NO: 109379 - protein, 24 aa, Artificial Sequence
  Cyclic GFR-binding peptide
SAISILYLVGRTPKVLKNYQMVVK

SEQ ID NO: 109380 - protein, 23 aa, Artificial Sequence
  Cyclic GFR-binding peptide
TRLNAISILYFDSANNVVLKKYR

SEQ ID NO: 109381 - protein, 41 aa, Artificial Sequence; identical to SEQ ID NO: 7147
  Cyclic GFR-binding peptide
  MOD_RES (6)..(7)..(40): Xaa is C or S

SEQ ID NO: 109382 - protein, 32 aa, Artificial Sequence; identical to SEQ ID NO: 7150
  Cyclic GFR-binding peptide
  MOD_RES (2)..(3): Xaa is C or S

SEQ ID NO: 109383 - protein, 30 aa, Artificial Sequence; identical to SEQ ID NO: 7151
  Cyclic GFR-binding peptide
  MOD_RES (29)..(29): Xaa is C or S

SEQ ID NO: 109384 - protein, 37 aa, Artificial Sequence
  Cyclic GFR-binding peptide
  MOD_RES (4)..(5)..(37): Xaa is C or S
SKAXXVPTKLSAISILYLDKGVVTYLKNYQGMAVSEX

SEQ ID NO: 109385 - protein, 36 aa, Artificial Sequence; identical to SEQ ID NO: 7153
  Cyclic GFR-binding peptide
  MOD_RES (6)..(7): Xaa is C or S

SEQ ID NO: 109386 - protein, 36 aa, Artificial Sequence; identical to SEQ ID NO: 35566
  Cyclic GFR-binding peptide
  MOD_RES (1)..(2)..(34)..(36): Xaa is C or S

SEQ ID NO: 109387 - protein, 40 aa, Artificial Sequence; identical to SEQ ID NO: 7156
  Cyclic GFR-binding peptide
  MOD_RES (6)..(7)..(38)..(40): Xaa is C or S

SEQ ID NO: 109388 - protein, 38 aa, Artificial Sequence
  Cyclic GFR-binding peptide
  MOD_RES (5)..(6)..(38): Xaa is C or S
ASKAXXVPTKLSAISILYLDKGVVTYLKNYQGMAVSEX

SEQ ID NO: 109389 - protein, 34 aa, Artificial Sequence; identical to SEQ ID NO: 7157
  Cyclic GFR-binding peptide
  MOD_RES (32)..(34): Xaa is C or S

SEQ ID NO: 109390 - protein, 35 aa, Artificial Sequence; identical to SEQ ID NO: 7158
  Cyclic GFR-binding peptide
  MOD_RES (1)..(2)..(35): Xaa is C or S

SEQ ID NO: 109391 - protein, 26 aa, Artificial Sequence
  Cyclic GFR-binding peptide
TRLNAISILYFDSANNVVLKKYRDMV

SEQ ID NO: 109392 - protein, 24 aa, Artificial Sequence
  Cyclic GFR-binding peptide
TKMNAISMLYFNDKQQIILKKYRG

SEQ ID NO: 109393 - protein, 30 aa, Artificial Sequence; identical to SEQ ID NO: 7164
  Cyclic GFR-binding peptide
  MOD_RES (27)..(29): Xaa is C or S

SEQ ID NO: 109394 - protein, 37 aa, Artificial Sequence; identical to SEQ ID NO: 7165
  Cyclic GFR-binding peptide
  MOD_RES (4)..(5)..(37): Xaa is C or S

SEQ ID NO: 109395 - protein, 32 aa, Artificial Sequence; identical to SEQ ID NO: 7167
  Cyclic GFR-binding peptide
  MOD_RES (4)..(5): Xaa is C or S

SEQ ID NO: 109396 - protein, 35 aa, Artificial Sequence; identical to SEQ ID NO: 7170
  Cyclic GFR-binding peptide
  MOD_RES (3)..(4): Xaa is C or S

SEQ ID NO: 109397 - protein, 33 aa, Artificial Sequence; identical to SEQ ID NO: 94151
  Cyclic GFR-binding peptide
  MOD_RES (32)..(32): Xaa is C or S

SEQ ID NO: 109398 - protein, 28 aa, Artificial Sequence
  Cyclic GFR-binding peptide
  MOD_RES (2)..(3): Xaa is C or S
AXXVPTKLSAISILYLDKGVVTYLKNYQ

SEQ ID NO: 109399 - protein, 30 aa, Artificial Sequence; identical to SEQ ID NO: 7174
  Cyclic GFR-binding peptide
  MOD_RES (3)..(3): Xaa is C or S

SEQ ID NO: 109400 - protein, 27 aa, Artificial Sequence
  Cyclic GFR-binding peptide
TKLSAISVLYLDDMGVPTLKNYQEGMS

SEQ ID NO: 109401 - protein, 27 aa, Artificial Sequence
  Cyclic GFR-binding peptide
APVKTNAISMLYFDNGRVLLLKKYRMI

SEQ ID NO: 109402 - protein, 30 aa, Artificial Sequence; identical to SEQ ID NO: 35590
  Cyclic GFR-binding peptide
  MOD_RES (29)..(29): Xaa is C or S

SEQ ID NO: 109403 - protein, 32 aa, Artificial Sequence
  Cyclic GFR-binding peptide
  MOD_RES (1)..(2): Xaa is C or S
XXAPVKTSAISMLYLDNGRVLLLKNYQMIVEE

SEQ ID NO: 109404 - protein, 31 aa, Artificial Sequence; identical to SEQ ID NO: 7182
  Cyclic GFR-binding peptide
  MOD_RES (1)..(1): Xaa is C or S

SEQ ID NO: 109405 - protein, 33 aa, Artificial Sequence; identical to SEQ ID NO: 94162
  Cyclic GFR-binding peptide
  MOD_RES (3)..(4): Xaa is C or S

SEQ ID NO: 109406 - protein, 34 aa, Artificial Sequence; identical to SEQ ID NO: 7185
  Cyclic GFR-binding peptide
  MOD_RES (5)..(6): Xaa is C or S

SEQ ID NO: 109407 - protein, 25 aa, Artificial Sequence
  Cyclic GFR-binding peptide
NAISMLYFDEYDKVVLKKYREMVVE

SEQ ID NO: 109408 - protein, 41 aa, Artificial Sequence; identical to SEQ ID NO: 77192
  Cyclic GFR-binding peptide
  MOD_RES (5)..(6)..(38)..(40): Xaa is C or S

SEQ ID NO: 109409 - protein, 28 aa, Artificial Sequence
  Cyclic GFR-binding peptide
VPTKLSAISVLYLDDMGVPTLKNYQEGM

SEQ ID NO: 109410 - protein, 31 aa, Artificial Sequence; identical to SEQ ID NO: 7189
  Cyclic GFR-binding peptide
  MOD_RES (1)..(1): Xaa is C or S

SEQ ID NO: 109411 - protein, 37 aa, Artificial Sequence; identical to SEQ ID NO: 77193
  Cyclic GFR-binding peptide
  MOD_RES (5)..(6): Xaa is C or S

SEQ ID NO: 109412 - protein, 33 aa, Artificial Sequence
  Cyclic GFR-binding peptide
  MOD_RES (30)..(32): Xaa is C or S
ARLSAISILYLDAANNVVLKNYQDMVVEAXGXR

SEQ ID NO: 109413 - protein, 34 aa, Artificial Sequence; identical to SEQ ID NO: 7196
  Cyclic GFR-binding peptide
  MOD_RES (2)..(3): Xaa is C or S

SEQ ID NO: 109414 - protein, 33 aa, Artificial Sequence
  Cyclic GFR-binding peptide
  MOD_RES (4)..(5): Xaa is C or S
PASXXVPARLSAISILYLDAANNVVLKNYQDMV

SEQ ID NO: 109415 - protein, 32 aa, Artificial Sequence; identical to SEQ ID NO: 7197
  Cyclic GFR-binding peptide
  MOD_RES (30)..(32): Xaa is C or S

SEQ ID NO: 109416 - protein, 41 aa, Artificial Sequence; identical to SEQ ID NO: 7200
  Cyclic GFR-binding peptide
  MOD_RES (5)..(6)..(38)..(40): Xaa is C or S

SEQ ID NO: 109417 - protein, 26 aa, Artificial Sequence
  Cyclic GFR-binding peptide
VPTKLNAISILYFDKGVVTYLKKYRG

SEQ ID NO: 109418 - protein, 20 aa, Artificial Sequence
  Cyclic GFR-binding peptide
SAISILYLDSANNVVLKNYQ

SEQ ID NO: 109419 - protein, 32 aa, Artificial Sequence; identical to SEQ ID NO: 35619
  Cyclic GFR-binding peptide
  MOD_RES (2)..(3): Xaa is C or S

SEQ ID NO: 109420 - protein, 23 aa, Artificial Sequence
  Cyclic GFR-binding peptide
NAISILYFVGRTPKVLKKYRMVV

SEQ ID NO: 109421 - protein, 26 aa, Artificial Sequence
  Cyclic GFR-binding peptide
TKMSAISMLYLNDKQQIILKNYQGMV

SEQ ID NO: 109422 - protein, 23 aa, Artificial Sequence
  Cyclic GFR-binding peptide
KLSAISILYLDKGVVTYLKNYQG

SEQ ID NO: 109423 - protein, 29 aa, Artificial Sequence
  Cyclic GFR-binding peptide
  MOD_RES (3)..(4): Xaa is C or S
KAXXVPTELNAISMLYFDENEKVVLKKYR

SEQ ID NO: 109424 - protein, 24 aa, Artificial Sequence
  Cyclic GFR-binding peptide
SAISILYLDENKNVVLKNYQNMTV

SEQ ID NO: 109425 - protein, 36 aa, Artificial Sequence; identical to SEQ ID NO: 17556
  Cyclic GFR-binding peptide
  MOD_RES (4)..(5): Xaa is C or S

SEQ ID NO: 109426 - protein, 26 aa, Artificial Sequence
  Cyclic GFR-binding peptide
QALNAISILYFVGRKPKVLKKYRMIV

SEQ ID NO: 109427 - protein, 27 aa, Artificial Sequence
  Cyclic GFR-binding peptide
  MOD_RES (1)..(2): Xaa is C or S
XXAPVKTNAISMLYFDNGRVLLLKKYR

SEQ ID NO: 109428 - protein, 23 aa, Artificial Sequence
  Cyclic GFR-binding peptide
SAISILYLDKGVVTYLKNYQGMA

SEQ ID NO: 109429 - protein, 29 aa, Artificial Sequence
  Cyclic GFR-binding peptide
  MOD_RES (3)..(4): Xaa is C or S
GPXXTPTKMSAISMLYLNDKQQIILKNYQ

SEQ ID NO: 109430 - protein, 40 aa, Artificial Sequence; identical to SEQ ID NO: 7216
  Cyclic GFR-binding peptide
  MOD_RES (6)..(7)..(38)..(40): Xaa is C or S

SEQ ID NO: 109431 - protein, 28 aa, Artificial Sequence
  Cyclic GFR-binding peptide
SQDLSAISILYLIGKTPKILKNYQMIVK

SEQ ID NO: 109432 - protein, 23 aa, Artificial Sequence
  Cyclic GFR-binding peptide
QDLNAISILYFVGRTPKVLKKYR

SEQ ID NO: 109433 - protein, 34 aa, Artificial Sequence; identical to SEQ ID NO: 7221
  Cyclic GFR-binding peptide
  MOD_RES (4)..(5): Xaa is C or S

SEQ ID NO: 109434 - protein, 28 aa, Artificial Sequence
  Cyclic GFR-binding peptide
  MOD_RES (28)..(28): Xaa is C or S
ALNAISILYFVGRKPKVLKKYRMIVRSX

SEQ ID NO: 109435 - protein, 29 aa, Artificial Sequence
  Cyclic GFR-binding peptide
  MOD_RES (3)..(4): Xaa is C or S
ASXXVPARLNAISILYFDAANNVVLKKYR

SEQ ID NO: 109436 - protein, 28 aa, Artificial Sequence
  Cyclic GFR-binding peptide
TKLSAISVLYLDDMGVPTLKNYQEGMSV

SEQ ID NO: 109437 - protein, 32 aa, Artificial Sequence
  Cyclic GFR-binding peptide
  MOD_RES (1)..(1): Xaa is C or S
XVPEKMSAISILYLDENKNVVLKNYQNMTVES

SEQ ID NO: 109438 - protein, 27 aa, Artificial Sequence
  Cyclic GFR-binding peptide
DLNAISILYFIGKTPKILKKYRMIVKS

SEQ ID NO: 109439 - protein, 36 aa, Artificial Sequence; identical to SEQ ID NO: 77211
  Cyclic GFR-binding peptide
  MOD_RES (2)..(3)..(35): Xaa is C or S

SEQ ID NO: 109440 - protein, 34 aa, Artificial Sequence; identical to SEQ ID NO: 17576
  Cyclic GFR-binding peptide
  MOD_RES (4)..(5): Xaa is C or S

SEQ ID NO: 109441 - protein, 27 aa, Artificial Sequence
  Cyclic GFR-binding peptide
PQDLNAISILYFVGRTPKVLKKYRMVV

SEQ ID NO: 109442 - protein, 23 aa, Artificial Sequence
  Cyclic GFR-binding peptide
KLNAISILYFDKGVVTYLKKYRG

SEQ ID NO: 109443 - protein, 33 aa, Artificial Sequence; identical to SEQ ID NO: 77214
  Cyclic GFR-binding peptide
  MOD_RES (4)..(5): Xaa is C or S

SEQ ID NO: 109444 - protein, 33 aa, Artificial Sequence; identical to SEQ ID NO: 7237
  Cyclic GFR-binding peptide
  MOD_RES (1)..(2)..(33): Xaa is C or S

SEQ ID NO: 109445 - protein, 37 aa, Artificial Sequence; identical to SEQ ID NO: 35663
  Cyclic GFR-binding peptide
  MOD_RES (3)..(4)..(36): Xaa is C or S

SEQ ID NO: 109446 - protein, 30 aa, Artificial Sequence; identical to SEQ ID NO: 7240
  Cyclic GFR-binding peptide

SEQ ID NO: 109447 - protein, 32 aa, Artificial Sequence
  Cyclic GFR-binding peptide
  MOD_RES (3)..(4): Xaa is C or S
ASXXVPARLSAISILYLDAANNVVLKNYQDMV

SEQ ID NO: 109448 - protein, 40 aa, Artificial Sequence; identical to SEQ ID NO: 77216
  Cyclic GFR-binding peptide
  MOD_RES (5)..(6)..(37)..(39): Xaa is C or S

SEQ ID NO: 109449 - protein, 21 aa, Artificial Sequence
  Cyclic GFR-binding peptide
LNAISILYFDSANNVVLKKYR

SEQ ID NO: 109450 - protein, 26 aa, Artificial Sequence
  Cyclic GFR-binding peptide
LNAISMLYFDENEKVVLKKYRDMVVE

SEQ ID NO: 109451 - protein, 27 aa, Artificial Sequence
  Cyclic GFR-binding peptide
  MOD_RES (27)..(27): Xaa is C or S
SAISVLYLDSSNNVILKNYQNMVVKAX

SEQ ID NO: 109452 - protein, 32 aa, Artificial Sequence; identical to SEQ ID NO: 94216
  Cyclic GFR-binding peptide
  MOD_RES (30)..(32): Xaa is C or S

SEQ ID NO: 109453 - protein, 27 aa, Artificial Sequence
  Cyclic GFR-binding peptide
QALSAISILYLVGRKPKVLKNYQMIVR

SEQ ID NO: 109454 - protein, 32 aa, Artificial Sequence; identical to SEQ ID NO: 77220
  Cyclic GFR-binding peptide
  MOD_RES (3)..(4): Xaa is C or S

SEQ ID NO: 109455 - protein, 26 aa, Artificial Sequence
  Cyclic GFR-binding peptide
  MOD_RES (1)..(1): Xaa is C or S
XVPTKLNAISILYFDKGVVTYLKKYR

SEQ ID NO: 109456 - protein, 32 aa, Artificial Sequence; identical to SEQ ID NO: 7252
  Cyclic GFR-binding peptide
  MOD_RES (3)..(4): Xaa is C or S

SEQ ID NO: 109457 - protein, 31 aa, Artificial Sequence; identical to SEQ ID NO: 17593
  Cyclic GFR-binding peptide
  MOD_RES (5)..(6): Xaa is C or S

SEQ ID NO: 109458 - protein, 30 aa, Artificial Sequence
  Cyclic GFR-binding peptide
  MOD_RES (2)..(3): Xaa is C or S
AXXVPTKLSAISILYLDKGVVTYLKNYQGM

SEQ ID NO: 109459 - protein, 27 aa, Artificial Sequence
  Cyclic GFR-binding peptide
  MOD_RES (26)..(26): Xaa is C or S
SAISILYLIGKTPKILKNYQMIVKSXK

SEQ ID NO: 109460 - protein, 33 aa, Artificial Sequence; identical to SEQ ID NO: 7262
  Cyclic GFR-binding peptide
  MOD_RES (32)..(32): Xaa is C or S

SEQ ID NO: 109461 - protein, 25 aa, Artificial Sequence
  Cyclic GFR-binding peptide
PTKMNAISMLYFNDKQQIILKKYRG

SEQ ID NO: 109462 - protein, 27 aa, Artificial Sequence
  Cyclic GFR-binding peptide
  MOD_RES (1)..(2): Xaa is C or S
XXVSQDLNAISILYFIGKTPKILKKYR

SEQ ID NO: 109463 - protein, 27 aa, Artificial Sequence
  Cyclic GFR-binding peptide
  MOD_RES (1)..(2): Xaa is C or S
XXVPTKLSAISVLYLDDMGVPTLKNYQ

SEQ ID NO: 109464 - protein, 29 aa, Artificial Sequence
  Cyclic GFR-binding peptide
  MOD_RES (28)..(28): Xaa is C or S
LNAISVLYFDSSNNVILKKYRNMVVKAXG

SEQ ID NO: 109465 - protein, 26 aa, Artificial Sequence
  Cyclic GFR-binding peptide
RLSAISILYLDAANNVVLKNYQDMVV

SEQ ID NO: 109466 - protein, 26 aa, Artificial Sequence
  Cyclic GFR-binding peptide
LSAISVLYLDSSNNVILKNYQNMVVK

SEQ ID NO: 109467 - protein, 31 aa, Artificial Sequence; identical to SEQ ID NO: 35702
  Cyclic GFR-binding peptide
  MOD_RES (28)..(30): Xaa is C or S

SEQ ID NO: 109468 - protein, 26 aa, Artificial Sequence
  Cyclic GFR-binding peptide
PARLNAISILYFDAANNVVLKKYRDM

SEQ ID NO: 109469 - protein, 39 aa, Artificial Sequence; identical to SEQ ID NO: 77235
  Cyclic GFR-binding peptide
  MOD_RES (5)..(6)..(37)..(39): Xaa is C or S

SEQ ID NO: 109470 - protein, 29 aa, Artificial Sequence
  Cyclic GFR-binding peptide
VPTKLNAISVLYFDDMGVPTLKKYREGMS

SEQ ID NO: 109471 - protein, 35 aa, Artificial Sequence; identical to SEQ ID NO: 7279
  Cyclic GFR-binding peptide
  MOD_RES (1)..(33)..(35): Xaa is C or S

SEQ ID NO: 109472 - protein, 34 aa, Artificial Sequence
  Cyclic GFR-binding peptide
  MOD_RES (1)..(33): Xaa is C or S
XVPARLSAISILYLDAANNVVLKNYQDMVVEAXG

SEQ ID NO: 109473 - protein, 28 aa, Artificial Sequence
  Cyclic GFR-binding peptide
  MOD_RES (1)..(2): Xaa is C or S
XXVPTELNAISMLYFDENEKVVLKKYRD

SEQ ID NO: 109474 - protein, 35 aa, Artificial Sequence; identical to SEQ ID NO: 7284
  Cyclic GFR-binding peptide
  MOD_RES (3)..(4): Xaa is C or S

SEQ ID NO: 109475 - protein, 24 aa, Artificial Sequence
  Cyclic GFR-binding peptide
LNAISMLYFDENEKVVLKKYRDMV

SEQ ID NO: 109476 - protein, 23 aa, Artificial Sequence
  Cyclic GFR-binding peptide
TELNAISMLYFDENEKVVLKKYR

SEQ ID NO: 109477 - protein, 25 aa, Artificial Sequence
  Cyclic GFR-binding peptide
TKLNAISVLYFDSSNNVILKKYRNM

SEQ ID NO: 109478 - protein, 35 aa, Artificial Sequence; identical to SEQ ID NO: 7295
  Cyclic GFR-binding peptide
  MOD_RES (2)..(3)..(34): Xaa is C or S

SEQ ID NO: 109479 - protein, 24 aa, Artificial Sequence
  Cyclic GFR-binding peptide
LSAISILYLVGRTPKVLKNYQMVV

SEQ ID NO: 109480 - protein, 24 aa, Artificial Sequence
  Cyclic GFR-binding peptide
NAISMLYFDENEKVVLKKYRDMVV

SEQ ID NO: 109481 - protein, 28 aa, Artificial Sequence
  Cyclic GFR-binding peptide
  MOD_RES (1)..(1): Xaa is C or S
XVPTKLSAISILYLDKGVVTYLKNYQGM

SEQ ID NO: 109482 - protein, 34 aa, Artificial Sequence; identical to SEQ ID NO: 35727
  Cyclic GFR-binding peptide
  MOD_RES (5)..(6): Xaa is C or S

SEQ ID NO: 109483 - protein, 30 aa, Artificial Sequence; identical to SEQ ID NO: 7304
  Cyclic GFR-binding peptide
  MOD_RES (1)..(2): Xaa is C or S

SEQ ID NO: 109484 - protein, 38 aa, Artificial Sequence; identical to SEQ ID NO: 7311
  Cyclic GFR-binding peptide
  MOD_RES (4)..(36)..(38): Xaa is C or S

SEQ ID NO: 109485 - protein, 35 aa, Artificial Sequence; identical to SEQ ID NO: 7312
  Cyclic GFR-binding peptide
  MOD_RES (3)..(4): Xaa is C or S

SEQ ID NO: 109486 - protein, 28 aa, Artificial Sequence
  Cyclic GFR-binding peptide
PARLSAISILYLDAANNVVLKNYQDMVV

SEQ ID NO: 109487 - protein, 25 aa, Artificial Sequence
  Cyclic GFR-binding peptide
NAISMLYFDNGRVLLLKKYRMIVEE

SEQ ID NO: 109488 - protein, 32 aa, Artificial Sequence; identical to SEQ ID NO: 7315
  Cyclic GFR-binding peptide
  MOD_RES (31)..(31): Xaa is C or S

SEQ ID NO: 109489 - protein, 29 aa, Artificial Sequence
  Cyclic GFR-binding peptide
TRLSAISILYLDSANNVVLKNYQDMVVES

SEQ ID NO: 109490 - protein, 29 aa, Artificial Sequence
  Cyclic GFR-binding peptide
  MOD_RES (1)..(2): Xaa is C or S
XXAPVKTNAISMLYFDNGRVLLLKKYRMI

SEQ ID NO: 109491 - protein, 31 aa, Artificial Sequence; identical to SEQ ID NO: 7321
  Cyclic GFR-binding peptide
  MOD_RES (4)..(5): Xaa is C or S

SEQ ID NO: 109492 - protein, 28 aa, Artificial Sequence
  Cyclic GFR-binding peptide
  MOD_RES (1)..(2): Xaa is C or S
XXVPTELNAISMLYFDEYDKVVLKKYRE

SEQ ID NO: 109493 - protein, 32 aa, Artificial Sequence; identical to SEQ ID NO: 77256
  Cyclic GFR-binding peptide
  MOD_RES (1)..(32): Xaa is C or S

SEQ ID NO: 109494 - protein, 37 aa, Artificial Sequence; identical to SEQ ID NO: 7324
  Cyclic GFR-binding peptide
  MOD_RES (4)..(5)..(36): Xaa is C or S

SEQ ID NO: 109495 - protein, 35 aa, Artificial Sequence
  Cyclic GFR-binding peptide
  MOD_RES (3)..(4): Xaa is C or S
KAXXVPTKLSAISILYLDKGVVTYLKNYQGMAVSE

SEQ ID NO: 109496 - protein, 32 aa, Artificial Sequence
  Cyclic GFR-binding peptide
  MOD_RES (1)..(1): Xaa is C or S
XVPTKLSAISILYLDKGVVTYLKNYQGMAVSE

SEQ ID NO: 109497 - protein, 41 aa, Artificial Sequence; identical to SEQ ID NO: 7325
  Cyclic GFR-binding peptide
  MOD_RES (6)..(7)..(38)..(40): Xaa is C or S

SEQ ID NO: 109498 - protein, 29 aa, Artificial Sequence
  Cyclic GFR-binding peptide
  MOD_RES (1)..(1): Xaa is C or S
XAPVKTNAISMLYFDNGRVLLLKKYRMIV

SEQ ID NO: 109499 - protein, 27 aa, Artificial Sequence
  Cyclic GFR-binding peptide
  MOD_RES (1)..(2): Xaa is C or S
XXVPEKMNAISILYFDENKNVVLKKYR

SEQ ID NO: 109500 - protein, 27 aa, Artificial Sequence
  Cyclic GFR-binding peptide
VSQDLSAISILYLIGKTPKILKNYQMI

SEQ ID NO: 109501 - protein, 31 aa, Artificial Sequence; identical to SEQ ID NO: 7328
  Cyclic GFR-binding peptide
  MOD_RES (1)..(2): Xaa is C or S

SEQ ID NO: 109502 - protein, 35 aa, Artificial Sequence; identical to SEQ ID NO: 35759
  Cyclic GFR-binding peptide
  MOD_RES (3)..(4): Xaa is C or S

SEQ ID NO: 109503 - protein, 25 aa, Artificial Sequence
  Cyclic GFR-binding peptide
PTKMSAISMLYLNDKQQIILKNYQG

SEQ ID NO: 109504 - protein, 27 aa, Artificial Sequence
  Cyclic GFR-binding peptide
KLSAISVLYLDDMGVPTLKNYQEGMSV

SEQ ID NO: 109505 - protein, 42 aa, Artificial Sequence
  Cyclic GFR-binding peptide
  MOD_RES (6)..(7)..(39)..(41): Xaa is C or S
KASKAXXVPTKLSAISILYLDKGVVTYLKNYQGMAVSEXGXR

SEQ ID NO: 109506 - protein, 35 aa, Artificial Sequence
  Cyclic GFR-binding peptide
  MOD_RES (1)..(2)..(33)..(35): Xaa is C or S
XXAPVKTSAISMLYLDNGRVLLLKNYQMIVEEXGX

SEQ ID NO: 109507 - protein, 27 aa, Artificial Sequence
  Cyclic GFR-binding peptide
KLNAISVLYFDSSNNVILKKYRNMVVK

SEQ ID NO: 109508 - protein, 35 aa, Artificial Sequence; identical to SEQ ID NO: 77265
  Cyclic GFR-binding peptide
  MOD_RES (1)..(32)..(34): Xaa is C or S

SEQ ID NO: 109509 - protein, 28 aa, Artificial Sequence
  Cyclic GFR-binding peptide
  MOD_RES (1)..(2): Xaa is C or S
XXTPTKMNAISMLYFNDKQQIILKKYRG

SEQ ID NO: 109510 - protein, 32 aa, Artificial Sequence; identical to SEQ ID NO: 7343
  Cyclic GFR-binding peptide
  MOD_RES (6)..(7): Xaa is C or S

SEQ ID NO: 109511 - protein, 37 aa, Artificial Sequence
  Cyclic GFR-binding peptide
  MOD_RES (2)..(3)..(35)..(37): Xaa is C or S
PXXVPEKMSAISILYLDENKNVVLKNYQNMTVESXAX

SEQ ID NO: 109512 - protein, 31 aa, Artificial Sequence
  Cyclic GFR-binding peptide
  MOD_RES (3)..(4): Xaa is C or S
KAXXVPTKLSAISILYLDKGVVTYLKNYQGM

SEQ ID NO: 109513 - protein, 31 aa, Artificial Sequence; identical to SEQ ID NO: 7348
  Cyclic GFR-binding peptide
  MOD_RES (1)..(1): Xaa is C or S

SEQ ID NO: 109514 - protein, 27 aa, Artificial Sequence
  Cyclic GFR-binding peptide
  MOD_RES (1)..(2): Xaa is C or S
XXAPVKTSAISMLYLDNGRVLLLKNYQ

SEQ ID NO: 109515 - protein, 32 aa, Artificial Sequence; identical to SEQ ID NO: 89331
  Cyclic GFR-binding peptide
  MOD_RES (6)..(7): Xaa is C or S

SEQ ID NO: 109516 - protein, 26 aa, Artificial Sequence
  Cyclic GFR-binding peptide
ELNAISMLYFDEYDKVVLKKYREMVV

SEQ ID NO: 109517 - protein, 31 aa, Artificial Sequence; identical to SEQ ID NO: 35791
  Cyclic GFR-binding peptide
  MOD_RES (4)..(5): Xaa is C or S

SEQ ID NO: 109518 - protein, 27 aa, Artificial Sequence
  Cyclic GFR-binding peptide
  MOD_RES (1)..(1): Xaa is C or S
XAPTQLSAISVLYLDDSSNVILKNYQN

SEQ ID NO: 109519 - protein, 35 aa, Artificial Sequence; identical to SEQ ID NO: 7356
  Cyclic GFR-binding peptide
  MOD_RES (5)..(6): Xaa is C or S

SEQ ID NO: 109520 - protein, 32 aa, Artificial Sequence; identical to SEQ ID NO: 17674
  Cyclic GFR-binding peptide
  MOD_RES (29)..(31): Xaa is C or S

SEQ ID NO: 109521 - protein, 33 aa, Artificial Sequence
  Cyclic GFR-binding peptide
  MOD_RES (6)..(7): Xaa is C or S
HVPKPXXAPTKLSAISVLYLDDSSNVILKNYQN

SEQ ID NO: 109522 - protein, 29 aa, Artificial Sequence
  Cyclic GFR-binding peptide
  MOD_RES (1)..(2): Xaa is C or S
XXVSQDLNAISILYFIGKTPKILKKYRMI

SEQ ID NO: 109523 - protein, 35 aa, Artificial Sequence; identical to SEQ ID NO: 7358
  Cyclic GFR-binding peptide
  MOD_RES (2)..(3)..(35): Xaa is C or S

SEQ ID NO: 109524 - protein, 32 aa, Artificial Sequence; identical to SEQ ID NO: 7359
  Cyclic GFR-binding peptide
  MOD_RES (5)..(6): Xaa is C or S

SEQ ID NO: 109525 - protein, 35 aa, Artificial Sequence; identical to SEQ ID NO: 77278
  Cyclic GFR-binding peptide
  MOD_RES (4)..(5): Xaa is C or S

SEQ ID NO: 109526 - protein, 26 aa, Artificial Sequence
  Cyclic GFR-binding peptide
SQDLSAISILYLIGKTPKILKNYQMI

SEQ ID NO: 109527 - protein, 25 aa, Artificial Sequence
  Cyclic GFR-binding peptide
QDLSAISILYLVGRTPKVLKNYQMV

SEQ ID NO: 109528 - protein, 34 aa, Artificial Sequence; identical to SEQ ID NO: 7368
  Cyclic GFR-binding peptide
  MOD_RES (2)..(3)..(34): Xaa is C or S

SEQ ID NO: 109529 - protein, 28 aa, Artificial Sequence
  Cyclic GFR-binding peptide
VPTKLNAISILYFDKGVVTYLKKYRGMA

SEQ ID NO: 109530 - protein, 28 aa, Artificial Sequence
  Cyclic GFR-binding peptide
TKLSAISVLYLDSSNNVILKNYQNMVVK

SEQ ID NO: 109531 - protein, 35 aa, Artificial Sequence
  Cyclic GFR-binding peptide
  MOD_RES (5)..(6): Xaa is C or S
ASKAXXVPTKLSAISILYLDKGVVTYLKNYQGMAV

SEQ ID NO: 109532 - protein, 33 aa, Artificial Sequence; identical to SEQ ID NO: 77282
  Cyclic GFR-binding peptide
  MOD_RES (6)..(7): Xaa is C or S

SEQ ID NO: 109533 - protein, 38 aa, Artificial Sequence; identical to SEQ ID NO: 7372
  Cyclic GFR-binding peptide
  MOD_RES (6)..(7)..(38): Xaa is C or S

SEQ ID NO: 109534 - protein, 23 aa, Artificial Sequence
  Cyclic GFR-binding peptide
KTNAISMLYFDNGRVLLLKKYRM

SEQ ID NO: 109535 - protein, 26 aa, Artificial Sequence
  Cyclic GFR-binding peptide
PTKMSAISMLYLNDKQQIILKNYQGM

SEQ ID NO: 109536 - protein, 26 aa, Artificial Sequence
  Cyclic GFR-binding peptide
VPTRLSAISILYLDSANNVVLKNYQD

SEQ ID NO: 109537 - protein, 31 aa, Artificial Sequence; identical to SEQ ID NO: 35817
  Cyclic GFR-binding peptide
  MOD_RES (31)..(31): Xaa is C or S

SEQ ID NO: 109538 - protein, 27 aa, Artificial Sequence
  Cyclic GFR-binding peptide
APVKTSAISMLYLDNGRVLLLKNYQMI

SEQ ID NO: 109539 - protein, 29 aa, Artificial Sequence
  Cyclic GFR-binding peptide
PTELNAISMLYFDEYDKVVLKKYREMVVE

SEQ ID NO: 109540 - protein, 37 aa, Artificial Sequence; identical to SEQ ID NO: 7381
  Cyclic GFR-binding peptide
  MOD_RES (2)..(3)..(35)..(37): Xaa is C or S

SEQ ID NO: 109541 - protein, 32 aa, Artificial Sequence; identical to SEQ ID NO: 77292
  Cyclic GFR-binding peptide
  MOD_RES (31)..(31): Xaa is C or S

SEQ ID NO: 109542 - protein, 29 aa, Artificial Sequence
  Cyclic GFR-binding peptide
  MOD_RES (28)..(28): Xaa is C or S
DLNAISILYFVGRTPKVLKKYRMVVKSXK

SEQ ID NO: 109543 - protein, 32 aa, Artificial Sequence; identical to SEQ ID NO: 7385
  Cyclic GFR-binding peptide
  MOD_RES (31)..(31): Xaa is C or S

SEQ ID NO: 109544 - protein, 40 aa, Artificial Sequence; identical to SEQ ID NO: 7386
  Cyclic GFR-binding peptide
  MOD_RES (6)..(7)..(38)..(40): Xaa is C or S

SEQ ID NO: 109545 - protein, 27 aa, Artificial Sequence
  Cyclic GFR-binding peptide
  MOD_RES (1)..(1): Xaa is C or S
XVSQDLNAISILYFIGKTPKILKKYRM

SEQ ID NO: 109546 - protein, 31 aa, Artificial Sequence; identical to SEQ ID NO: 35839
  Cyclic GFR-binding peptide
  MOD_RES (1)..(2): Xaa is C or S

SEQ ID NO: 109547 - protein, 31 aa, Artificial Sequence; identical to SEQ ID NO: 7390
  Cyclic GFR-binding peptide
  MOD_RES (4)..(5): Xaa is C or S

SEQ ID NO: 109548 - protein, 25 aa, Artificial Sequence
  Cyclic GFR-binding peptide
SAISILYLDAANNVVLKNYQDMVVE

SEQ ID NO: 109549 - protein, 32 aa, Artificial Sequence; identical to SEQ ID NO: 7395
  Cyclic GFR-binding peptide
  MOD_RES (6)..(7): Xaa is C or S

SEQ ID NO: 109550 - protein, 33 aa, Artificial Sequence; identical to SEQ ID NO: 7397
  Cyclic GFR-binding peptide
  MOD_RES (32)..(32): Xaa is C or S

SEQ ID NO: 109551 - protein, 29 aa, Artificial Sequence
  Cyclic GFR-binding peptide
  MOD_RES (3)..(4): Xaa is C or S
STXXAPVKTNAISMLYFDNGRVLLLKKYR

SEQ ID NO: 109552 - protein, 33 aa, Artificial Sequence; identical to SEQ ID NO: 17720
  Cyclic GFR-binding peptide
  MOD_RES (31)..(33): Xaa is C or S

SEQ ID NO: 109553 - protein, 32 aa, Artificial Sequence; identical to SEQ ID NO: 7400
  Cyclic GFR-binding peptide
  MOD_RES (32)..(32): Xaa is C or S

SEQ ID NO: 109554 - protein, 28 aa, Artificial Sequence
  Cyclic GFR-binding peptide
  MOD_RES (28)..(28): Xaa is C or S
LNAISILYFDAANNVVLKKYRDMVVEAX

SEQ ID NO: 109555 - protein, 25 aa, Artificial Sequence
  Cyclic GFR-binding peptide
NAISILYFDAANNVVLKKYRDMVVE

SEQ ID NO: 109556 - protein, 33 aa, Artificial Sequence; identical to SEQ ID NO: 89387
  Cyclic GFR-binding peptide
  MOD_RES (4)..(5): Xaa is C or S

SEQ ID NO: 109557 - protein, 27 aa, Artificial Sequence
  Cyclic GFR-binding peptide
VPQDLNAISILYFVGRTPKVLKKYRMV

SEQ ID NO: 109558 - protein, 32 aa, Artificial Sequence; identical to SEQ ID NO: 7405
  Cyclic GFR-binding peptide
  MOD_RES (6)..(7): Xaa is C or S

SEQ ID NO: 109559 - protein, 36 aa, Artificial Sequence; identical to SEQ ID NO: 7409
  Cyclic GFR-binding peptide
  MOD_RES (6)..(7): Xaa is C or S

SEQ ID NO: 109560 - protein, 30 aa, Artificial Sequence
  Cyclic GFR-binding peptide
  MOD_RES (28)..(30): Xaa is C or S
MSAISMLYLNDKQQIILKNYQGMVVDRXGX

SEQ ID NO: 109561 - protein, 23 aa, Artificial Sequence
  Cyclic GFR-binding peptide
TKMNAISMLYFNDKQQIILKKYR

SEQ ID NO: 109562 - protein, 31 aa, Artificial Sequence; identical to SEQ ID NO: 7417
  Cyclic GFR-binding peptide
  MOD_RES (28)..(30): Xaa is C or S

SEQ ID NO: 109563 - protein, 37 aa, Artificial Sequence; identical to SEQ ID NO: 7418
  Cyclic GFR-binding peptide
  MOD_RES (2)..(3)..(35)..(37): Xaa is C or S

SEQ ID NO: 109564 - protein, 29 aa, Artificial Sequence
  Cyclic GFR-binding peptide
  MOD_RES (2)..(3): Xaa is C or S
PXXVPEKMNAISILYFDENKNVVLKKYRN

SEQ ID NO: 109565 - protein, 30 aa, Artificial Sequence; identical to SEQ ID NO: 7419
  Cyclic GFR-binding peptide
  MOD_RES (3)..(4): Xaa is C or S

SEQ ID NO: 109566 - protein, 27 aa, Artificial Sequence
  Cyclic GFR-binding peptide
  MOD_RES (26)..(26): Xaa is C or S
NAISILYFVGRTPKVLKKYRMVVKSXK

SEQ ID NO: 109567 - protein, 26 aa, Artificial Sequence
  Cyclic GFR-binding peptide
VKTSAISMLYLDNGRVLLLKNYQMIV

SEQ ID NO: 109568 - protein, 24 aa, Artificial Sequence
  Cyclic GFR-binding peptide
PTKLSAISVLYLDDMGVPTLKNYQ

SEQ ID NO: 109569 - protein, 27 aa, Artificial Sequence
  Cyclic GFR-binding peptide
TKLNAISILYFDKGVVTYLKKYRGMAV

SEQ ID NO: 109570 - protein, 34 aa, Artificial Sequence; identical to SEQ ID NO: 7428
  Cyclic GFR-binding peptide
  MOD_RES (3)..(4): Xaa is C or S

SEQ ID NO: 109571 - protein, 28 aa, Artificial Sequence
  Cyclic GFR-binding peptide
PTELNAISMLYFDENEKVVLKKYRDMVV

SEQ ID NO: 109572 - protein, 26 aa, Artificial Sequence
  Cyclic GFR-binding peptide
  MOD_RES (26)..(26): Xaa is C or S
SAISILYLIGKTPKILKNYQMIVKSX

SEQ ID NO: 109573 - protein, 32 aa, Artificial Sequence
  Cyclic GFR-binding peptide
  MOD_RES (1)..(32): Xaa is C or S
XAPVKTSAISMLYLDNGRVLLLKNYQMIVEEX

SEQ ID NO: 109574 - protein, 31 aa, Artificial Sequence; identical to SEQ ID NO: 7435
  Cyclic GFR-binding peptide
  MOD_RES (1)..(1): Xaa is C or S

SEQ ID NO: 109575 - protein, 29 aa, Artificial Sequence
  Cyclic GFR-binding peptide
TELNAISMLYFDENEKVVLKKYRDMVVEG

SEQ ID NO: 109576 - protein, 33 aa, Artificial Sequence; identical to SEQ ID NO: 7437
  Cyclic GFR-binding peptide
  MOD_RES (6)..(7): Xaa is C or S

SEQ ID NO: 109577 - protein, 29 aa, Artificial Sequence
  Cyclic GFR-binding peptide
  MOD_RES (2)..(3): Xaa is C or S
AXXVPTKLSAISILYLDKGVVTYLKNYQG

SEQ ID NO: 109578 - protein, 29 aa, Artificial Sequence
  Cyclic GFR-binding peptide
  MOD_RES (29)..(29): Xaa is C or S
RLNAISILYFDAANNVVLKKYRDMVVEAX

SEQ ID NO: 109579 - protein, 30 aa, Artificial Sequence; identical to SEQ ID NO: 17756
  Cyclic GFR-binding peptide
  MOD_RES (1)..(2): Xaa is C or S

SEQ ID NO: 109580 - protein, 25 aa, Artificial Sequence
  Cyclic GFR-binding peptide
TELNAISMLYFDENEKVVLKKYRDM

SEQ ID NO: 109581 - protein, 32 aa, Artificial Sequence; identical to SEQ ID NO: 7440
  Cyclic GFR-binding peptide
  MOD_RES (3)..(4): Xaa is C or S

SEQ ID NO: 109582 - protein, 24 aa, Artificial Sequence
  Cyclic GFR-binding peptide
SAISVLYLDDSSNVILKNYQNMVV

SEQ ID NO: 109583 - protein, 25 aa, Artificial Sequence
  Cyclic GFR-binding peptide
LSAISVLYLDDMGVPTLKNYQEGMS

SEQ ID NO: 109584 - protein, 29 aa, Artificial Sequence
  Cyclic GFR-binding peptide
  MOD_RES (2)..(3): Xaa is C or S
AXXAPTKLNAISVLYFDSSNNVILKKYRN

SEQ ID NO: 109585 - protein, 38 aa, Artificial Sequence; identical to SEQ ID NO: 7453
  Cyclic GFR-binding peptide
  MOD_RES (6)..(7): Xaa is C or S

SEQ ID NO: 109586 - protein, 28 aa, Artificial Sequence
  Cyclic GFR-binding peptide
  MOD_RES (1)..(2): Xaa is C or S
XXAPTQLSAISVLYLDDSSNVILKNYQN

SEQ ID NO: 109587 - protein, 27 aa, Artificial Sequence
  Cyclic GFR-binding peptide
  MOD_RES (1)..(2): Xaa is C or S
XXVSQDLSAISILYLIGKTPKILKNYQ

SEQ ID NO: 109588 - protein, 31 aa, Artificial Sequence
  Cyclic GFR-binding peptide
  MOD_RES (2)..(3): Xaa is C or S
TXXAPVKTSAISMLYLDNGRVLLLKNYQMIV

SEQ ID NO: 109589 - protein, 27 aa, Artificial Sequence
  Cyclic GFR-binding peptide
PTRLSAISILYLDSANNVVLKNYQDMV

SEQ ID NO: 109590 - protein, 30 aa, Artificial Sequence; identical to SEQ ID NO: 7461
  Cyclic GFR-binding peptide
  MOD_RES (27)..(29): Xaa is C or S

SEQ ID NO: 109591 - protein, 34 aa, Artificial Sequence; identical to SEQ ID NO: 35929
  Cyclic GFR-binding peptide
  MOD_RES (4)..(5): Xaa is C or S

SEQ ID NO: 109592 - protein, 29 aa, Artificial Sequence
  Cyclic GFR-binding peptide
TELNAISMLYFDEYDKVVLKKYREMVVEG

SEQ ID NO: 109593 - protein, 28 aa, Artificial Sequence
  Cyclic GFR-binding peptide
  MOD_RES (1)..(1): Xaa is C or S
XVSQDLNAISILYFIGKTPKILKKYRMI

SEQ ID NO: 109594 - protein, 36 aa, Artificial Sequence; identical to SEQ ID NO: 7469
  Cyclic GFR-binding peptide
  MOD_RES (1)..(2)..(33)..(35): Xaa is C or S

SEQ ID NO: 109595 - protein, 40 aa, Artificial Sequence; identical to SEQ ID NO: 7470
  Cyclic GFR-binding peptide
  MOD_RES (3)..(4)..(37)..(39): Xaa is C or S

SEQ ID NO: 109596 - protein, 34 aa, Artificial Sequence; identical to SEQ ID NO: 7474
  Cyclic GFR-binding peptide
  MOD_RES (2)..(3)..(34): Xaa is C or S

SEQ ID NO: 109597 - protein, 27 aa, Artificial Sequence
  Cyclic GFR-binding peptide
VSQDLNAISILYFIGKTPKILKKYRMI

SEQ ID NO: 109598 - protein, 21 aa, Artificial Sequence
  Cyclic GFR-binding peptide
SAISILYLDENKNVVLKNYQN

SEQ ID NO: 109599 - protein, 33 aa, Artificial Sequence; identical to SEQ ID NO: 17795
  Cyclic GFR-binding peptide
  MOD_RES (4)..(5): Xaa is C or S

SEQ ID NO: 109600 - protein, 34 aa, Artificial Sequence
  Cyclic GFR-binding peptide
  MOD_RES (32)..(34): Xaa is C or S
VPARLSAISILYLDAANNVVLKNYQDMVVEAXGX

SEQ ID NO: 109601 - protein, 22 aa, Artificial Sequence
  Cyclic GFR-binding peptide
LSAISVLYLDSSNNVILKNYQN

SEQ ID NO: 109602 - protein, 35 aa, Artificial Sequence; identical to SEQ ID NO: 17798
  Cyclic GFR-binding peptide
  MOD_RES (1)..(33)..(35): Xaa is C or S

SEQ ID NO: 109603 - protein, 37 aa, Artificial Sequence; identical to SEQ ID NO: 7481
  Cyclic GFR-binding peptide
  MOD_RES (1)..(2)..(34)..(36): Xaa is C or S

SEQ ID NO: 109604 - protein, 36 aa, Artificial Sequence; identical to SEQ ID NO: 7482
  Cyclic GFR-binding peptide
  MOD_RES (2)..(3)..(36): Xaa is C or S

SEQ ID NO: 109605 - protein, 34 aa, Artificial Sequence; identical to SEQ ID NO: 35957
  Cyclic GFR-binding peptide
  MOD_RES (1)..(33): Xaa is C or S

SEQ ID NO: 109606 - protein, 35 aa, Artificial Sequence
  Cyclic GFR-binding peptide
  MOD_RES (4)..(5): Xaa is C or S
PSTXXAPVKTSAISMLYLDNGRVLLLKNYQMIVEE

SEQ ID NO: 109607 - protein, 20 aa, Artificial Sequence
  Cyclic GFR-binding peptide
NAISMLYFDENEKVVLKKYR

SEQ ID NO: 109608 - protein, 28 aa, Artificial Sequence
  Cyclic GFR-binding peptide
  MOD_RES (2)..(3): Xaa is C or S
AXXVPTKLNAISVLYFDDMGVPTLKKYR

SEQ ID NO: 109609 - protein, 37 aa, Artificial Sequence
  Cyclic GFR-binding peptide
  MOD_RES (3)..(4)..(36): Xaa is C or S
KAXXVPTKLSAISILYLDKGVVTYLKNYQGMAVSEXG

SEQ ID NO: 109610 - protein, 27 aa, Artificial Sequence
  Cyclic GFR-binding peptide
  MOD_RES (1)..(1): Xaa is C or S
XVPQDLSAISILYLVGRTPKVLKNYQM

SEQ ID NO: 109611 - protein, 22 aa, Artificial Sequence
  Cyclic GFR-binding peptide
DLNAISILYFIGKTPKILKKYR

SEQ ID NO: 109612 - protein, 36 aa, Artificial Sequence; identical to SEQ ID NO: 7491
  Cyclic GFR-binding peptide
  MOD_RES (1)..(2)..(34)..(36): Xaa is C or S

SEQ ID NO: 109613 - protein, 24 aa, Artificial Sequence
  Cyclic GFR-binding peptide
LNAISILYFDAANNVVLKKYRDMV

SEQ ID NO: 109614 - protein, 31 aa, Artificial Sequence; identical to SEQ ID NO: 77357
  Cyclic GFR-binding peptide
  MOD_RES (5)..(6): Xaa is C or S

SEQ ID NO: 109615 - protein, 25 aa, Artificial Sequence
  Cyclic GFR-binding peptide
PARLNAISILYFDAANNVVLKKYRD

SEQ ID NO: 109616 - protein, 30 aa, Artificial Sequence; identical to SEQ ID NO: 7498
  Cyclic GFR-binding peptide
  MOD_RES (28)..(30): Xaa is C or S

SEQ ID NO: 109617 - protein, 31 aa, Artificial Sequence; identical to SEQ ID NO: 7499
  Cyclic GFR-binding peptide
  MOD_RES (3)..(4): Xaa is C or S

SEQ ID NO: 109618 - protein, 38 aa, Artificial Sequence; identical to SEQ ID NO: 7500
  Cyclic GFR-binding peptide
  MOD_RES (5)..(6): Xaa is C or S

SEQ ID NO: 109619 - protein, 24 aa, Artificial Sequence
  Cyclic GFR-binding peptide
RLNAISILYFDSANNVVLKKYRDM

SEQ ID NO: 109620 - protein, 23 aa, Artificial Sequence
  Cyclic GFR-binding peptide
SAISILYLVGRKPKVLKNYQMIV

SEQ ID NO: 109621 - protein, 36 aa, Artificial Sequence; identical to SEQ ID NO: 7504
  Cyclic GFR-binding peptide
  MOD_RES (7)..(7): Xaa is C or S

SEQ ID NO: 109622 - protein, 27 aa, Artificial Sequence
  Cyclic GFR-binding peptide
VPTELNAISMLYFDENEKVVLKKYRDM

SEQ ID NO: 109623 - protein, 40 aa, Artificial Sequence; identical to SEQ ID NO: 7509
  Cyclic GFR-binding peptide
  MOD_RES (4)..(5)..(37)..(39): Xaa is C or S

SEQ ID NO: 109624 - protein, 36 aa, Artificial Sequence
  Cyclic GFR-binding peptide
  MOD_RES (6)..(7): Xaa is C or S
GIPEPXXVPEKMSAISILYLDENKNVVLKNYQNMTV

SEQ ID NO: 109625 - protein, 36 aa, Artificial Sequence
  Cyclic GFR-binding peptide
  MOD_RES (2)..(3)..(35): Xaa is C or S
PXXTPTKMSAISMLYLNDKQQIILKNYQGMVVDRXG

SEQ ID NO: 109626 - protein, 26 aa, Artificial Sequence
  Cyclic GFR-binding peptide
  MOD_RES (1)..(1): Xaa is C or S
XAPVKTSAISMLYLDNGRVLLLKNYQ

SEQ ID NO: 109627 - protein, 31 aa, Artificial Sequence; identical to SEQ ID NO: 7514
  Cyclic GFR-binding peptide
  MOD_RES (1)..(2): Xaa is C or S

SEQ ID NO: 109628 - protein, 37 aa, Artificial Sequence; identical to SEQ ID NO: 17831
  Cyclic GFR-binding peptide
  MOD_RES (4)..(5)..(37): Xaa is C or S

SEQ ID NO: 109629 - protein, 32 aa, Artificial Sequence; identical to SEQ ID NO: 36004
  Cyclic GFR-binding peptide
  MOD_RES (1)..(1): Xaa is C or S

SEQ ID NO: 109630 - protein, 34 aa, Artificial Sequence; identical to SEQ ID NO: 94502
  Cyclic GFR-binding peptide
  MOD_RES (4)..(5): Xaa is C or S

SEQ ID NO: 109631 - protein, 30 aa, Artificial Sequence
  Cyclic GFR-binding peptide
VPEKMSAISILYLDENKNVVLKNYQNMTVE

SEQ ID NO: 109632 - protein, 35 aa, Artificial Sequence; identical to SEQ ID NO: 7516
  Cyclic GFR-binding peptide
  MOD_RES (1)..(2)..(35): Xaa is C or S

SEQ ID NO: 109633 - protein, 40 aa, Artificial Sequence; identical to SEQ ID NO: 7517
  Cyclic GFR-binding peptide
  MOD_RES (5)..(6)..(38)..(40): Xaa is C or S

SEQ ID NO: 109634 - protein, 32 aa, Artificial Sequence
  Cyclic GFR-binding peptide
  MOD_RES (6)..(7): Xaa is C or S
GIPEPXXVPEKMSAISILYLDENKNVVLKNYQ

SEQ ID NO: 109635 - protein, 40 aa, Artificial Sequence
  Cyclic GFR-binding peptide
  MOD_RES (6)..(7)..(39): Xaa is C or S
GIPEPXXVPEKMSAISILYLDENKNVVLKNYQNMTVESXA

SEQ ID NO: 109636 - protein, 33 aa, Artificial Sequence; identical to SEQ ID NO: 94506
  Cyclic GFR-binding peptide
  MOD_RES (1)..(33): Xaa is C or S

SEQ ID NO: 109637 - protein, 34 aa, Artificial Sequence
  Cyclic GFR-binding peptide
  MOD_RES (31)..(33): Xaa is C or S
PTKLSAISILYLDKGVVTYLKNYQGMAVSEXGXR

SEQ ID NO: 109638 - protein, 27 aa, Artificial Sequence
  Cyclic GFR-binding peptide
LSAISILYLDKGVVTYLKNYQGMAVSE

SEQ ID NO: 109639 - protein, 26 aa, Artificial Sequence
  Cyclic GFR-binding peptide
NAISVLYFDSSNNVILKKYRNMVVKA

SEQ ID NO: 109640 - protein, 33 aa, Artificial Sequence
  Cyclic GFR-binding peptide
  MOD_RES (32)..(32): Xaa is C or S
VPEKMSAISILYLDENKNVVLKNYQNMTVESXA

SEQ ID NO: 109641 - protein, 22 aa, Artificial Sequence
  Cyclic GFR-binding peptide
LNAISILYFVGRTPKVLKKYRM

SEQ ID NO: 109642 - protein, 34 aa, Artificial Sequence; identical to SEQ ID NO: 94516
  Cyclic GFR-binding peptide
  MOD_RES (1)..(2)..(34): Xaa is C or S

SEQ ID NO: 109643 - protein, 26 aa, Artificial Sequence
  Cyclic GFR-binding peptide
LSAISVLYLDDSSNVILKNYQNMVVR

SEQ ID NO: 109644 - protein, 42 aa, Artificial Sequence; identical to SEQ ID NO: 7533
  Cyclic GFR-binding peptide
  MOD_RES (6)..(7)..(39)..(41): Xaa is C or S

SEQ ID NO: 109645 - protein, 24 aa, Artificial Sequence
  Cyclic GFR-binding peptide
TKLNAISVLYFDDMGVPTLKKYRE

SEQ ID NO: 109646 - protein, 25 aa, Artificial Sequence
  Cyclic GFR-binding peptide
PTQLSAISVLYLDDSSNVILKNYQN

SEQ ID NO: 109647 - protein, 36 aa, Artificial Sequence
  Cyclic GFR-binding peptide
  MOD_RES (5)..(6): Xaa is C or S
VPSTXXAPVKTSAISMLYLDNGRVLLLKNYQMIVEE

SEQ ID NO: 109648 - protein, 30 aa, Artificial Sequence
  Cyclic GFR-binding peptide
  MOD_RES (29)..(29): Xaa is C or S
KLSAISILYLDKGVVTYLKNYQGMAVSEXG

SEQ ID NO: 109649 - protein, 33 aa, Artificial Sequence; identical to SEQ ID NO: 7538
  Cyclic GFR-binding peptide
  MOD_RES (1)..(2)..(33): Xaa is C or S

SEQ ID NO: 109650 - protein, 28 aa, Artificial Sequence
  Cyclic GFR-binding peptide
  MOD_RES (2)..(3): Xaa is C or S
PXXAPTKLSAISVLYLDDSSNVILKNYQ

SEQ ID NO: 109651 - protein, 27 aa, Artificial Sequence
  Cyclic GFR-binding peptide
QLSAISVLYLDDSSNVILKNYQNMVVR

SEQ ID NO: 109652 - protein, 33 aa, Artificial Sequence; identical to SEQ ID NO: 7546
  Cyclic GFR-binding peptide
  MOD_RES (4)..(5): Xaa is C or S

SEQ ID NO: 109653 - protein, 22 aa, Artificial Sequence
  Cyclic GFR-binding peptide
NAISILYFVGRKPKVLKKYRMI

SEQ ID NO: 109654 - protein, 33 aa, Artificial Sequence; identical to SEQ ID NO: 7549
  Cyclic GFR-binding peptide
  MOD_RES (1)..(1): Xaa is C or S

SEQ ID NO: 109655 - protein, 30 aa, Artificial Sequence; identical to SEQ ID NO: 7551
  Cyclic GFR-binding peptide
  MOD_RES (30)..(30): Xaa is C or S

SEQ ID NO: 109656 - protein, 32 aa, Artificial Sequence
  Cyclic GFR-binding peptide
  MOD_RES (4)..(5): Xaa is C or S
AGPXXTPTKMSAISMLYLNDKQQIILKNYQGM

SEQ ID NO: 109657 - protein, 27 aa, Artificial Sequence
  Cyclic GFR-binding peptide
  MOD_RES (26)..(26): Xaa is C or S
NAISILYFVGRKPKVLKKYRMIVRSXK

SEQ ID NO: 109658 - protein, 33 aa, Artificial Sequence; identical to SEQ ID NO: 7554
  Cyclic GFR-binding peptide
  MOD_RES (2)..(3): Xaa is C or S

SEQ ID NO: 109659 - protein, 33 aa, Artificial Sequence; identical to SEQ ID NO: 7556
  Cyclic GFR-binding peptide
  MOD_RES (2)..(3): Xaa is C or S

SEQ ID NO: 109660 - protein, 27 aa, Artificial Sequence
  Cyclic GFR-binding peptide
PQALSAISILYLVGRKPKVLKNYQMIV

SEQ ID NO: 109661 - protein, 32 aa, Artificial Sequence; identical to SEQ ID NO: 7560
  Cyclic GFR-binding peptide
  MOD_RES (31)..(31): Xaa is C or S

SEQ ID NO: 109662 - protein, 30 aa, Artificial Sequence; identical to SEQ ID NO: 7561
  Cyclic GFR-binding peptide
  MOD_RES (2)..(3): Xaa is C or S

SEQ ID NO: 109663 - protein, 33 aa, Artificial Sequence; identical to SEQ ID NO: 7563
  Cyclic GFR-binding peptide
  MOD_RES (4)..(5): Xaa is C or S

SEQ ID NO: 109664 - protein, 25 aa, Artificial Sequence
  Cyclic GFR-binding peptide
RLNAISILYFDSANNVVLKKYRDMV

SEQ ID NO: 109665 - protein, 31 aa, Artificial Sequence
  Cyclic GFR-binding peptide
  MOD_RES (28)..(30): Xaa is C or S
KTSAISMLYLDNGRVLLLKNYQMIVEEXGXL

SEQ ID NO: 109666 - protein, 34 aa, Artificial Sequence; identical to SEQ ID NO: 7564
  Cyclic GFR-binding peptide
  MOD_RES (4)..(5): Xaa is C or S

SEQ ID NO: 109667 - protein, 36 aa, Artificial Sequence; identical to SEQ ID NO: 7565
  Cyclic GFR-binding peptide
  MOD_RES (1)..(33)..(35): Xaa is C or S

SEQ ID NO: 109668 - protein, 28 aa, Artificial Sequence
  Cyclic GFR-binding peptide
KLNAISVLYFDDMGVPTLKKYREGMSVA

SEQ ID NO: 109669 - protein, 24 aa, Artificial Sequence
  Cyclic GFR-binding peptide
PTKLNAISVLYFDDMGVPTLKKYR

SEQ ID NO: 109670 - protein, 33 aa, Artificial Sequence; identical to SEQ ID NO: 77395
  Cyclic GFR-binding peptide
  MOD_RES (3)..(4): Xaa is C or S

SEQ ID NO: 109671 - protein, 33 aa, Artificial Sequence; identical to SEQ ID NO: 7570
  Cyclic GFR-binding peptide
  MOD_RES (4)..(5): Xaa is C or S

SEQ ID NO: 109672 - protein, 32 aa, Artificial Sequence
  Cyclic GFR-binding peptide
  MOD_RES (5)..(6): Xaa is C or S
VPSTXXAPVKTSAISMLYLDNGRVLLLKNYQM

SEQ ID NO: 109673 - protein, 32 aa, Artificial Sequence; identical to SEQ ID NO: 7572
  Cyclic GFR-binding peptide
  MOD_RES (3)..(4): Xaa is C or S

SEQ ID NO: 109674 - protein, 35 aa, Artificial Sequence; identical to SEQ ID NO: 17891
  Cyclic GFR-binding peptide
  MOD_RES (4)..(5): Xaa is C or S

SEQ ID NO: 109675 - protein, 42 aa, Artificial Sequence; identical to SEQ ID NO: 7575
  Cyclic GFR-binding peptide
  MOD_RES (6)..(7)..(39)..(41): Xaa is C or S

SEQ ID NO: 109676 - protein, 28 aa, Artificial Sequence
  Cyclic GFR-binding peptide
  MOD_RES (1)..(1): Xaa is C or S
XVPQDLNAISILYFVGRTPKVLKKYRMV

SEQ ID NO: 109677 - protein, 32 aa, Artificial Sequence; identical to SEQ ID NO: 7580
  Cyclic GFR-binding peptide
  MOD_RES (2)..(3): Xaa is C or S

SEQ ID NO: 109678 - protein, 31 aa, Artificial Sequence; identical to SEQ ID NO: 77397
  Cyclic GFR-binding peptide
  MOD_RES (1)..(1): Xaa is C or S

SEQ ID NO: 109679 - protein, 28 aa, Artificial Sequence
  Cyclic GFR-binding peptide
  MOD_RES (1)..(1): Xaa is C or S
XVPTKLNAISILYFDKGVVTYLKKYRGM

SEQ ID NO: 109680 - protein, 42 aa, Artificial Sequence; identical to SEQ ID NO: 7581
  Cyclic GFR-binding peptide
  MOD_RES (6)..(7)..(39)..(41): Xaa is C or S

SEQ ID NO: 109681 - protein, 39 aa, Artificial Sequence
  Cyclic GFR-binding peptide
  MOD_RES (6)..(7)..(38): Xaa is C or S
RVPSTXXAPVKTSAISMLYLDNGRVLLLKNYQMIVEEXG

SEQ ID NO: 109682 - protein, 41 aa, Artificial Sequence; identical to SEQ ID NO: 7588
  Cyclic GFR-binding peptide
  MOD_RES (6)..(7)..(40): Xaa is C or S

SEQ ID NO: 109683 - protein, 28 aa, Artificial Sequence
  Cyclic GFR-binding peptide
VKTSAISMLYLDNGRVLLLKNYQMIVEE

SEQ ID NO: 109684 - protein, 33 aa, Artificial Sequence; identical to SEQ ID NO: 7592
  Cyclic GFR-binding peptide
  MOD_RES (1)..(32): Xaa is C or S

SEQ ID NO: 109685 - protein, 31 aa, Artificial Sequence; identical to SEQ ID NO: 7593
  Cyclic GFR-binding peptide
  MOD_RES (30)..(30): Xaa is C or S

SEQ ID NO: 109686 - protein, 30 aa, Artificial Sequence; identical to SEQ ID NO: 7594
  Cyclic GFR-binding peptide
  MOD_RES (1)..(2): Xaa is C or S

SEQ ID NO: 109687 - protein, 38 aa, Artificial Sequence; identical to SEQ ID NO: 77405
  Cyclic GFR-binding peptide
  MOD_RES (6)..(7): Xaa is C or S

SEQ ID NO: 109688 - protein, 32 aa, Artificial Sequence; identical to SEQ ID NO: 7597
  Cyclic GFR-binding peptide
  MOD_RES (2)..(3): Xaa is C or S

SEQ ID NO: 109689 - protein, 29 aa, Artificial Sequence
  Cyclic GFR-binding peptide
  MOD_RES (3)..(4): Xaa is C or S
KPXXAPTQLSAISVLYLDDSSNVILKNYQ

SEQ ID NO: 109690 - protein, 36 aa, Artificial Sequence; identical to SEQ ID NO: 7603
  Cyclic GFR-binding peptide
  MOD_RES (1)..(33)..(35): Xaa is C or S

SEQ ID NO: 109691 - protein, 27 aa, Artificial Sequence
  Cyclic GFR-binding peptide
LNAISILYFDSANNVVLKKYRDMVVES

SEQ ID NO: 109692 - protein, 24 aa, Artificial Sequence
  Cyclic GFR-binding peptide
TSAISMLYLDNGRVLLLKNYQMIV

SEQ ID NO: 109693 - protein, 26 aa, Artificial Sequence
  Cyclic GFR-binding peptide
  MOD_RES (1)..(1): Xaa is C or S
XVPQALNAISILYFVGRKPKVLKKYR

SEQ ID NO: 109694 - protein, 27 aa, Artificial Sequence
  Cyclic GFR-binding peptide
  MOD_RES (1)..(1): Xaa is C or S
XVPTRLSAISILYLDSANNVVLKNYQD

SEQ ID NO: 109695 - protein, 26 aa, Artificial Sequence
  Cyclic GFR-binding peptide
DLNAISILYFIGKTPKILKKYRMIVK

SEQ ID NO: 109696 - protein, 23 aa, Artificial Sequence
  Cyclic GFR-binding peptide
SAISILYLVGRTPKVLKNYQMVV

SEQ ID NO: 109697 - protein, 27 aa, Artificial Sequence
  Cyclic GFR-binding peptide
VPTKLSAISILYLDKGVVTYLKNYQGM

SEQ ID NO: 109698 - protein, 31 aa, Artificial Sequence; identical to SEQ ID NO: 7616
  Cyclic GFR-binding peptide
  MOD_RES (2)..(3): Xaa is C or S

SEQ ID NO: 109699 - protein, 32 aa, Artificial Sequence
  Cyclic GFR-binding peptide
  MOD_RES (3)..(4): Xaa is C or S
KAXXVPTKLSAISILYLDKGVVTYLKNYQGMA

SEQ ID NO: 109700 - protein, 28 aa, Artificial Sequence
  Cyclic GFR-binding peptide
  MOD_RES (1)..(1): Xaa is C or S
XVPTKLSAISVLYLDDMGVPTLKNYQEG

SEQ ID NO: 109701 - protein, 26 aa, Artificial Sequence
  Cyclic GFR-binding peptide
ELNAISMLYFDENEKVVLKKYRDMVV

SEQ ID NO: 109702 - protein, 30 aa, Artificial Sequence; identical to SEQ ID NO: 17934
  Cyclic GFR-binding peptide
  MOD_RES (27)..(29): Xaa is C or S

SEQ ID NO: 109703 - protein, 29 aa, Artificial Sequence
  Cyclic GFR-binding peptide
  MOD_RES (1)..(2): Xaa is C or S
XXAPTQLSAISVLYLDDSSNVILKNYQNM

SEQ ID NO: 109704 - protein, 30 aa, Artificial Sequence; identical to SEQ ID NO: 7623
  Cyclic GFR-binding peptide
  MOD_RES (30)..(30): Xaa is C or S

SEQ ID NO: 109705 - protein, 32 aa, Artificial Sequence
  Cyclic GFR-binding peptide
  MOD_RES (2)..(3): Xaa is C or S
PXXTPTKMSAISMLYLNDKQQIILKNYQGMVV

SEQ ID NO: 109706 - protein, 31 aa, Artificial Sequence
  Cyclic GFR-binding peptide
  MOD_RES (4)..(5): Xaa is C or S
PEPXXVPEKMSAISILYLDENKNVVLKNYQN

SEQ ID NO: 109707 - protein, 31 aa, Artificial Sequence; identical to SEQ ID NO: 7625
  Cyclic GFR-binding peptide
  MOD_RES (1)..(2): Xaa is C or S

SEQ ID NO: 109708 - protein, 29 aa, Artificial Sequence
  Cyclic GFR-binding peptide
SQDLNAISILYFIGKTPKILKKYRMIVKS

SEQ ID NO: 109709 - protein, 36 aa, Artificial Sequence; identical to SEQ ID NO: 7629
  Cyclic GFR-binding peptide
  MOD_RES (2)..(3)..(35): Xaa is C or S

SEQ ID NO: 109710 - protein, 28 aa, Artificial Sequence
  Cyclic GFR-binding peptide
  MOD_RES (1)..(1): Xaa is C or S
XAPTKLSAISVLYLDDSSNVILKNYQNM

SEQ ID NO: 109711 - protein, 25 aa, Artificial Sequence
  Cyclic GFR-binding peptide
TPTKMNAISMLYFNDKQQIILKKYR

SEQ ID NO: 109712 - protein, 37 aa, Artificial Sequence; identical to SEQ ID NO: 7632
  Cyclic GFR-binding peptide
  MOD_RES (7)..(7): Xaa is C or S

SEQ ID NO: 109713 - protein, 28 aa, Artificial Sequence
  Cyclic GFR-binding peptide
  MOD_RES (1)..(2): Xaa is C or S
XXAPTKLNAISVLYFDSSNNVILKKYRN

SEQ ID NO: 109714 - protein, 37 aa, Artificial Sequence; identical to SEQ ID NO: 77419
  Cyclic GFR-binding peptide
  MOD_RES (3)..(4)..(36): Xaa is C or S

SEQ ID NO: 109715 - protein, 30 aa, Artificial Sequence; identical to SEQ ID NO: 36127
  Cyclic GFR-binding peptide

SEQ ID NO: 109716 - protein, 32 aa, Artificial Sequence; identical to SEQ ID NO: 17947
  Cyclic GFR-binding peptide
  MOD_RES (1)..(1): Xaa is C or S

SEQ ID NO: 109717 - protein, 31 aa, Artificial Sequence; identical to SEQ ID NO: 7640
  Cyclic GFR-binding peptide
  MOD_RES (4)..(5): Xaa is C or S

SEQ ID NO: 109718 - protein, 29 aa, Artificial Sequence
  Cyclic GFR-binding peptide
EKMSAISILYLDENKNVVLKNYQNMTVES

SEQ ID NO: 109719 - protein, 24 aa, Artificial Sequence
  Cyclic GFR-binding peptide
PTKMSAISMLYLNDKQQIILKNYQ

SEQ ID NO: 109720 - protein, 29 aa, Artificial Sequence
  Cyclic GFR-binding peptide
PTKLNAISVLYFDSSNNVILKKYRNMVVK

SEQ ID NO: 109721 - protein, 34 aa, Artificial Sequence; identical to SEQ ID NO: 7652
  Cyclic GFR-binding peptide
  MOD_RES (33)..(33): Xaa is C or S

SEQ ID NO: 109722 - protein, 40 aa, Artificial Sequence; identical to SEQ ID NO: 77427
  Cyclic GFR-binding peptide
  MOD_RES (4)..(5)..(37)..(39): Xaa is C or S

SEQ ID NO: 109723 - protein, 27 aa, Artificial Sequence
  Cyclic GFR-binding peptide
RLNAISILYFDAANNVVLKKYRDMVVE

SEQ ID NO: 109724 - protein, 36 aa, Artificial Sequence
  Cyclic GFR-binding peptide
  MOD_RES (4)..(5): Xaa is C or S
PEPXXVPEKMSAISILYLDENKNVVLKNYQNMTVES

SEQ ID NO: 109725 - protein, 21 aa, Artificial Sequence
  Cyclic GFR-binding peptide
SAISILYLIGKTPKILKNYQM

SEQ ID NO: 109726 - protein, 27 aa, Artificial Sequence
  Cyclic GFR-binding peptide
KLSAISVLYLDSSNNVILKNYQNMVVK

SEQ ID NO: 109727 - protein, 34 aa, Artificial Sequence; identical to SEQ ID NO: 17964
  Cyclic GFR-binding peptide
  MOD_RES (6)..(7): Xaa is C or S

SEQ ID NO: 109728 - protein, 22 aa, Artificial Sequence
  Cyclic GFR-binding peptide
LSAISILYLVGRKPKVLKNYQM

SEQ ID NO: 109729 - protein, 33 aa, Artificial Sequence; identical to SEQ ID NO: 17966
  Cyclic GFR-binding peptide
  MOD_RES (3)..(4): Xaa is C or S

SEQ ID NO: 109730 - protein, 29 aa, Artificial Sequence
  Cyclic GFR-binding peptide
  MOD_RES (27)..(29): Xaa is C or S
LSAISILYLVGRKPKVLKNYQMIVRSXKX

SEQ ID NO: 109731 - protein, 40 aa, Artificial Sequence
  Cyclic GFR-binding peptide
  MOD_RES (5)..(6)..(37)..(39): Xaa is C or S
VPSTXXAPVKTSAISMLYLDNGRVLLLKNYQMIVEEXGXL

SEQ ID NO: 109732 - protein, 30 aa, Artificial Sequence; identical to SEQ ID NO: 77433
  Cyclic GFR-binding peptide
  MOD_RES (1)..(1): Xaa is C or S

SEQ ID NO: 109733 - protein, 29 aa, Artificial Sequence
  Cyclic GFR-binding peptide
  MOD_RES (29)..(29): Xaa is C or S
RLNAISILYFDSANNVVLKKYRDMVVESX

SEQ ID NO: 109734 - protein, 36 aa, Artificial Sequence; identical to SEQ ID NO: 7662
  Cyclic GFR-binding peptide
  MOD_RES (1)..(33)..(35): Xaa is C or S

SEQ ID NO: 109735 - protein, 39 aa, Artificial Sequence; identical to SEQ ID NO: 7665
  Cyclic GFR-binding peptide
  MOD_RES (6)..(7): Xaa is C or S

SEQ ID NO: 109736 - protein, 23 aa, Artificial Sequence
  Cyclic GFR-binding peptide
DLNAISILYFIGKTPKILKKYRM

SEQ ID NO: 109737 - protein, 41 aa, Artificial Sequence
  Cyclic GFR-binding peptide
  MOD_RES (5)..(6)..(38)..(40): Xaa is C or S
APASXXVPARLSAISILYLDAANNVVLKNYQDMVVEAXGXR

SEQ ID NO: 109738 - protein, 39 aa, Artificial Sequence; identical to SEQ ID NO: 7668
  Cyclic GFR-binding peptide
  MOD_RES (6)..(7)..(39): Xaa is C or S

SEQ ID NO: 109739 - protein, 37 aa, Artificial Sequence; identical to SEQ ID NO: 17975
  Cyclic GFR-binding peptide
  MOD_RES (3)..(4)..(36): Xaa is C or S

SEQ ID NO: 109740 - protein, 25 aa, Artificial Sequence
  Cyclic GFR-binding peptide
VPQDLNAISILYFVGRTPKVLKKYR

SEQ ID NO: 109741 - protein, 37 aa, Artificial Sequence; identical to SEQ ID NO: 94638
  Cyclic GFR-binding peptide
  MOD_RES (4)..(5)..(37): Xaa is C or S

SEQ ID NO: 109742 - protein, 27 aa, Artificial Sequence
  Cyclic GFR-binding peptide
LNAISILYFDAANNVVLKKYRDMVVEA

SEQ ID NO: 109743 - protein, 30 aa, Artificial Sequence; identical to SEQ ID NO: 17979
  Cyclic GFR-binding peptide
  MOD_RES (2)..(3): Xaa is C or S

SEQ ID NO: 109744 - protein, 39 aa, Artificial Sequence
  Cyclic GFR-binding peptide
  MOD_RES (5)..(6)..(38): Xaa is C or S
APASXXVPARLSAISILYLDAANNVVLKNYQDMVVEAXG

SEQ ID NO: 109745 - protein, 32 aa, Artificial Sequence
  Cyclic GFR-binding peptide
  MOD_RES (5)..(6): Xaa is C or S
SAGPXXTPTKMSAISMLYLNDKQQIILKNYQG

SEQ ID NO: 109746 - protein, 32 aa, Artificial Sequence; identical to SEQ ID NO: 7675
  Cyclic GFR-binding peptide
  MOD_RES (5)..(6): Xaa is C or S

SEQ ID NO: 109747 - protein, 29 aa, Artificial Sequence
  Cyclic GFR-binding peptide
  MOD_RES (3)..(4): Xaa is C or S
SPXXVSQDLSAISILYLIGKTPKILKNYQ

SEQ ID NO: 109748 - protein, 36 aa, Artificial Sequence; identical to SEQ ID NO: 77443
  Cyclic GFR-binding peptide
  MOD_RES (6)..(7): Xaa is C or S

SEQ ID NO: 109749 - protein, 23 aa, Artificial Sequence
  Cyclic GFR-binding peptide
NAISILYFIGKTPKILKKYRMIV

SEQ ID NO: 109750 - protein, 32 aa, Artificial Sequence; identical to SEQ ID NO: 7679
  Cyclic GFR-binding peptide
  MOD_RES (3)..(4): Xaa is C or S

SEQ ID NO: 109751 - protein, 37 aa, Artificial Sequence; identical to SEQ ID NO: 7680
  Cyclic GFR-binding peptide
  MOD_RES (5)..(6)..(37): Xaa is C or S

SEQ ID NO: 109752 - protein, 37 aa, Artificial Sequence; identical to SEQ ID NO: 7683
  Cyclic GFR-binding peptide
  MOD_RES (5)..(6)..(37): Xaa is C or S

SEQ ID NO: 109753 - protein, 21 aa, Artificial Sequence
  Cyclic GFR-binding peptide
LSAISILYLDSANNVVLKNYQ

SEQ ID NO: 109754 - protein, 34 aa, Artificial Sequence; identical to SEQ ID NO: 7688
  Cyclic GFR-binding peptide
  MOD_RES (2)..(3): Xaa is C or S

SEQ ID NO: 109755 - protein, 33 aa, Artificial Sequence
  Cyclic GFR-binding peptide
  MOD_RES (2)..(3): Xaa is C or S
PXXTPTKMSAISMLYLNDKQQIILKNYQGMVVD

SEQ ID NO: 109756 - protein, 27 aa, Artificial Sequence
  Cyclic GFR-binding peptide
VKTSAISMLYLDNGRVLLLKNYQMIVE

SEQ ID NO: 109757 - protein, 30 aa, Artificial Sequence; identical to SEQ ID NO: 7693
  Cyclic GFR-binding peptide
  MOD_RES (27)..(29): Xaa is C or S

SEQ ID NO: 109758 - protein, 37 aa, Artificial Sequence
  Cyclic GFR-binding peptide
  MOD_RES (5)..(6): Xaa is C or S
IPEPXXVPEKMSAISILYLDENKNVVLKNYQNMTVES

SEQ ID NO: 109759 - protein, 25 aa, Artificial Sequence
  Cyclic GFR-binding peptide
VPARLNAISILYFDAANNVVLKKYR

SEQ ID NO: 109760 - protein, 24 aa, Artificial Sequence
  Cyclic GFR-binding peptide
NAISILYFVGRKPKVLKKYRMIVR

SEQ ID NO: 109761 - protein, 28 aa, Artificial Sequence
  Cyclic GFR-binding peptide
APTKLSAISVLYLDSSNNVILKNYQNMV

SEQ ID NO: 109762 - protein, 35 aa, Artificial Sequence; identical to SEQ ID NO: 7701
  Cyclic GFR-binding peptide
  MOD_RES (32)..(34): Xaa is C or S

SEQ ID NO: 109763 - protein, 35 aa, Artificial Sequence; identical to SEQ ID NO: 36191
  Cyclic GFR-binding peptide
  MOD_RES (4)..(5): Xaa is C or S

SEQ ID NO: 109764 - protein, 29 aa, Artificial Sequence
  Cyclic GFR-binding peptide
  MOD_RES (2)..(3): Xaa is C or S
SXXVPARLSAISILYLDAANNVVLKNYQD

SEQ ID NO: 109765 - protein, 32 aa, Artificial Sequence
  Cyclic GFR-binding peptide
  MOD_RES (6)..(7): Xaa is C or S
KASKAXXVPTKLSAISILYLDKGVVTYLKNYQ

SEQ ID NO: 109766 - protein, 39 aa, Artificial Sequence; identical to SEQ ID NO: 36194
  Cyclic GFR-binding peptide
  MOD_RES (6)..(7)..(39): Xaa is C or S

SEQ ID NO: 109767 - protein, 28 aa, Artificial Sequence
  Cyclic GFR-binding peptide
APVKTSAISMLYLDNGRVLLLKNYQMIV

SEQ ID NO: 109768 - protein, 33 aa, Artificial Sequence; identical to SEQ ID NO: 7709
  Cyclic GFR-binding peptide
  MOD_RES (2)..(3): Xaa is C or S

SEQ ID NO: 109769 - protein, 24 aa, Artificial Sequence
  Cyclic GFR-binding peptide
LSAISILYLIGKTPKILKNYQMIV

SEQ ID NO: 109770 - protein, 32 aa, Artificial Sequence; identical to SEQ ID NO: 7711
  Cyclic GFR-binding peptide
  MOD_RES (6)..(7): Xaa is C or S

SEQ ID NO: 109771 - protein, 29 aa, Artificial Sequence
  Cyclic GFR-binding peptide
  MOD_RES (26)..(28): Xaa is C or S
NAISILYFVGRTPKVLKKYRMVVKSXKXS

SEQ ID NO: 109772 - protein, 31 aa, Artificial Sequence; identical to SEQ ID NO: 77457
  Cyclic GFR-binding peptide
  MOD_RES (1)..(2): Xaa is C or S

SEQ ID NO: 109773 - protein, 37 aa, Artificial Sequence; identical to SEQ ID NO: 7715
  Cyclic GFR-binding peptide
  MOD_RES (1)..(2)..(34)..(36): Xaa is C or S

SEQ ID NO: 109774 - protein, 35 aa, Artificial Sequence; identical to SEQ ID NO: 7717
  Cyclic GFR-binding peptide
  MOD_RES (6)..(7): Xaa is C or S

SEQ ID NO: 109775 - protein, 41 aa, Artificial Sequence; identical to SEQ ID NO: 36207
  Cyclic GFR-binding peptide
  MOD_RES (6)..(7)..(39)..(41): Xaa is C or S

SEQ ID NO: 109776 - protein, 37 aa, Artificial Sequence; identical to SEQ ID NO: 7720
  Cyclic GFR-binding peptide
  MOD_RES (3)..(4)..(35)..(37): Xaa is C or S

SEQ ID NO: 109777 - protein, 28 aa, Artificial Sequence
  Cyclic GFR-binding peptide
KLNAISILYFDKGVVTYLKKYRGMAVSE

SEQ ID NO: 109778 - protein, 34 aa, Artificial Sequence; identical to SEQ ID NO: 77463
  Cyclic GFR-binding peptide
  MOD_RES (5)..(6): Xaa is C or S

SEQ ID NO: 109779 - protein, 36 aa, Artificial Sequence; identical to SEQ ID NO: 7722
  Cyclic GFR-binding peptide
  MOD_RES (3)..(4)..(35): Xaa is C or S

SEQ ID NO: 109780 - protein, 34 aa, Artificial Sequence; identical to SEQ ID NO: 7723
  Cyclic GFR-binding peptide
  MOD_RES (5)..(6): Xaa is C or S

SEQ ID NO: 109781 - protein, 32 aa, Artificial Sequence; identical to SEQ ID NO: 18022
  Cyclic GFR-binding peptide
  MOD_RES (5)..(6): Xaa is C or S

SEQ ID NO: 109782 - protein, 31 aa, Artificial Sequence; identical to SEQ ID NO: 18023
  Cyclic GFR-binding peptide
  MOD_RES (28)..(30): Xaa is C or S

SEQ ID NO: 109783 - protein, 26 aa, Artificial Sequence
  Cyclic GFR-binding peptide
LSAISILYLDSANNVVLKNYQDMVVE

SEQ ID NO: 109784 - protein, 26 aa, Artificial Sequence
  Cyclic GFR-binding peptide
APTQLSAISVLYLDDSSNVILKNYQN

SEQ ID NO: 109785 - protein, 29 aa, Artificial Sequence
  Cyclic GFR-binding peptide
VPTRLSAISILYLDSANNVVLKNYQDMVV

SEQ ID NO: 109786 - protein, 36 aa, Artificial Sequence; identical to SEQ ID NO: 7729
  Cyclic GFR-binding peptide
  MOD_RES (2)..(3)..(34)..(36): Xaa is C or S

SEQ ID NO: 109787 - protein, 25 aa, Artificial Sequence
  Cyclic GFR-binding peptide
APTKLNAISVLYFDSSNNVILKKYR

SEQ ID NO: 109788 - protein, 30 aa, Artificial Sequence; identical to SEQ ID NO: 7732
  Cyclic GFR-binding peptide
  MOD_RES (1)..(1): Xaa is C or S

SEQ ID NO: 109789 - protein, 32 aa, Artificial Sequence; identical to SEQ ID NO: 7734
  Cyclic GFR-binding peptide
  MOD_RES (3)..(4): Xaa is C or S

SEQ ID NO: 109790 - protein, 25 aa, Artificial Sequence
  Cyclic GFR-binding peptide
KTNAISMLYFDNGRVLLLKKYRMIV

SEQ ID NO: 109791 - protein, 40 aa, Artificial Sequence; identical to SEQ ID NO: 18035
  Cyclic GFR-binding peptide
  MOD_RES (5)..(6)..(38)..(40): Xaa is C or S

SEQ ID NO: 109792 - protein, 30 aa, Artificial Sequence; identical to SEQ ID NO: 7737
  Cyclic GFR-binding peptide
  MOD_RES (3)..(4): Xaa is C or S

SEQ ID NO: 109793 - protein, 36 aa, Artificial Sequence; identical to SEQ ID NO: 7738
  Cyclic GFR-binding peptide
  MOD_RES (1)..(33)..(35): Xaa is C or S

SEQ ID NO: 109794 - protein, 30 aa, Artificial Sequence
  Cyclic GFR-binding peptide
  MOD_RES (28)..(30): Xaa is C or S
KTSAISMLYLDNGRVLLLKNYQMIVEEXGX

SEQ ID NO: 109795 - protein, 28 aa, Artificial Sequence
  Cyclic GFR-binding peptide
ARLSAISILYLDAANNVVLKNYQDMVVE

SEQ ID NO: 109796 - protein, 40 aa, Artificial Sequence; identical to SEQ ID NO: 94705
  Cyclic GFR-binding peptide
  MOD_RES (5)..(6)..(38)..(40): Xaa is C or S

SEQ ID NO: 109797 - protein, 28 aa, Artificial Sequence
  Cyclic GFR-binding peptide
  MOD_RES (27)..(27): Xaa is C or S
LNAISILYFVGRTPKVLKKYRMVVKSXK

SEQ ID NO: 109798 - protein, 29 aa, Artificial Sequence
  Cyclic GFR-binding peptide
  MOD_RES (1)..(2): Xaa is C or S
XXTPTKMSAISMLYLNDKQQIILKNYQGM

SEQ ID NO: 109799 - protein, 23 aa, Artificial Sequence
  Cyclic GFR-binding peptide
TQLSAISVLYLDDSSNVILKNYQ

SEQ ID NO: 109800 - protein, 25 aa, Artificial Sequence
  Cyclic GFR-binding peptide
SAISILYLDSANNVVLKNYQDMVVE

SEQ ID NO: 109801 - protein, 29 aa, Artificial Sequence
  Cyclic GFR-binding peptide
  MOD_RES (29)..(29): Xaa is C or S
KLNAISVLYFDSSNNVILKKYRNMVVKAX

SEQ ID NO: 109802 - protein, 31 aa, Artificial Sequence; identical to SEQ ID NO: 7750
  Cyclic GFR-binding peptide
  MOD_RES (5)..(6): Xaa is C or S

SEQ ID NO: 109803 - protein, 29 aa, Artificial Sequence
  Cyclic GFR-binding peptide
PTQLSAISVLYLDDSSNVILKNYQNMVVR

SEQ ID NO: 109804 - protein, 36 aa, Artificial Sequence; identical to SEQ ID NO: 7753
  Cyclic GFR-binding peptide
  MOD_RES (3)..(4): Xaa is C or S

SEQ ID NO: 109805 - protein, 30 aa, Artificial Sequence; identical to SEQ ID NO: 7754
  Cyclic GFR-binding peptide
  MOD_RES (1)..(1): Xaa is C or S

SEQ ID NO: 109806 - protein, 36 aa, Artificial Sequence
  Cyclic GFR-binding peptide
  MOD_RES (1)..(33)..(35): Xaa is C or S
XVPARLSAISILYLDAANNVVLKNYQDMVVEAXGXR

SEQ ID NO: 109807 - protein, 25 aa, Artificial Sequence
  Cyclic GFR-binding peptide
NAISILYFVGRTPKVLKKYRMVVKS

SEQ ID NO: 109808 - protein, 29 aa, Artificial Sequence
  Cyclic GFR-binding peptide
  MOD_RES (1)..(1): Xaa is C or S
XVPQALSAISILYLVGRKPKVLKNYQMIV

SEQ ID NO: 109809 - protein, 34 aa, Artificial Sequence; identical to SEQ ID NO: 7758
  Cyclic GFR-binding peptide
  MOD_RES (1)..(2)..(34): Xaa is C or S

SEQ ID NO: 109810 - protein, 28 aa, Artificial Sequence
  Cyclic GFR-binding peptide
QDLNAISILYFIGKTPKILKKYRMIVKS

SEQ ID NO: 109811 - protein, 32 aa, Artificial Sequence; identical to SEQ ID NO: 36245
  Cyclic GFR-binding peptide
  MOD_RES (5)..(6): Xaa is C or S

SEQ ID NO: 109812 - protein, 27 aa, Artificial Sequence
  Cyclic GFR-binding peptide
PTKMNAISMLYFNDKQQIILKKYRGMV

SEQ ID NO: 109813 - protein, 35 aa, Artificial Sequence; identical to SEQ ID NO: 7761
  Cyclic GFR-binding peptide
  MOD_RES (6)..(7): Xaa is C or S

SEQ ID NO: 109814 - protein, 33 aa, Artificial Sequence; identical to SEQ ID NO: 18059
  Cyclic GFR-binding peptide
  MOD_RES (5)..(6): Xaa is C or S

SEQ ID NO: 109815 - protein, 27 aa, Artificial Sequence
  Cyclic GFR-binding peptide
PEKMSAISILYLDENKNVVLKNYQNMT

SEQ ID NO: 109816 - protein, 27 aa, Artificial Sequence
  Cyclic GFR-binding peptide
  MOD_RES (27)..(27): Xaa is C or S
NAISMLYFDEYDKVVLKKYREMVVEGX

SEQ ID NO: 109817 - protein, 29 aa, Artificial Sequence
  Cyclic GFR-binding peptide
VPQDLSAISILYLVGRTPKVLKNYQMVVK

SEQ ID NO: 109818 - protein, 34 aa, Artificial Sequence; identical to SEQ ID NO: 7765
  Cyclic GFR-binding peptide
  MOD_RES (5)..(6): Xaa is C or S

SEQ ID NO: 109819 - protein, 32 aa, Artificial Sequence; identical to SEQ ID NO: 7766
  Cyclic GFR-binding peptide
  MOD_RES (2)..(3): Xaa is C or S

SEQ ID NO: 109820 - protein, 24 aa, Artificial Sequence
  Cyclic GFR-binding peptide
LNAISILYFDSANNVVLKKYRDMV

SEQ ID NO: 109821 - protein, 23 aa, Artificial Sequence
  Cyclic GFR-binding peptide
SAISILYLDAANNVVLKNYQDMV

SEQ ID NO: 109822 - protein, 34 aa, Artificial Sequence; identical to SEQ ID NO: 77491
  Cyclic GFR-binding peptide
  MOD_RES (3)..(4): Xaa is C or S

SEQ ID NO: 109823 - protein, 26 aa, Artificial Sequence
  Cyclic GFR-binding peptide
KTSAISMLYLDNGRVLLLKNYQMIVE

SEQ ID NO: 109824 - protein, 29 aa, Artificial Sequence
  Cyclic GFR-binding peptide
  MOD_RES (2)..(3): Xaa is C or S
PXXVPEKMSAISILYLDENKNVVLKNYQN

SEQ ID NO: 109825 - protein, 26 aa, Artificial Sequence
  Cyclic GFR-binding peptide
APVKTSAISMLYLDNGRVLLLKNYQM

SEQ ID NO: 109826 - protein, 34 aa, Artificial Sequence
  Cyclic GFR-binding peptide
  MOD_RES (3)..(4): Xaa is C or S
ASXXVPARLSAISILYLDAANNVVLKNYQDMVVE

SEQ ID NO: 109827 - protein, 32 aa, Artificial Sequence; identical to SEQ ID NO: 7778
  Cyclic GFR-binding peptide
  MOD_RES (31)..(31): Xaa is C or S

SEQ ID NO: 109828 - protein, 36 aa, Artificial Sequence; identical to SEQ ID NO: 7780
  Cyclic GFR-binding peptide
  MOD_RES (3)..(4)..(35): Xaa is C or S

SEQ ID NO: 109829 - protein, 30 aa, Artificial Sequence; identical to SEQ ID NO: 7782
  Cyclic GFR-binding peptide
  MOD_RES (4)..(5): Xaa is C or S

SEQ ID NO: 109830 - protein, 30 aa, Artificial Sequence; identical to SEQ ID NO: 18086
  Cyclic GFR-binding peptide

SEQ ID NO: 109831 - protein, 26 aa, Artificial Sequence
  Cyclic GFR-binding peptide
QALSAISILYLVGRKPKVLKNYQMIV

SEQ ID NO: 109832 - protein, 32 aa, Artificial Sequence; identical to SEQ ID NO: 77502
  Cyclic GFR-binding peptide
  MOD_RES (4)..(5): Xaa is C or S

SEQ ID NO: 109833 - protein, 31 aa, Artificial Sequence; identical to SEQ ID NO: 36286
  Cyclic GFR-binding peptide
  MOD_RES (5)..(6): Xaa is C or S

SEQ ID NO: 109834 - protein, 22 aa, Artificial Sequence
  Cyclic GFR-binding peptide
ELNAISMLYFDEYDKVVLKKYR

SEQ ID NO: 109835 - protein, 33 aa, Artificial Sequence; identical to SEQ ID NO: 18094
  Cyclic GFR-binding peptide
  MOD_RES (31)..(33): Xaa is C or S

SEQ ID NO: 109836 - protein, 35 aa, Artificial Sequence; identical to SEQ ID NO: 7799
  Cyclic GFR-binding peptide
  MOD_RES (2)..(3)..(35): Xaa is C or S

SEQ ID NO: 109837 - protein, 31 aa, Artificial Sequence; identical to SEQ ID NO: 7802
  Cyclic GFR-binding peptide
  MOD_RES (4)..(5): Xaa is C or S

SEQ ID NO: 109838 - protein, 31 aa, Artificial Sequence; identical to SEQ ID NO: 7804
  Cyclic GFR-binding peptide
  MOD_RES (3)..(4): Xaa is C or S

SEQ ID NO: 109839 - protein, 38 aa, Artificial Sequence
  Cyclic GFR-binding peptide
  MOD_RES (2)..(3)..(35)..(37): Xaa is C or S
PXXTPTKMSAISMLYLNDKQQIILKNYQGMVVDRXGXS

SEQ ID NO: 109840 - protein, 36 aa, Artificial Sequence; identical to SEQ ID NO: 77508
  Cyclic GFR-binding peptide
  MOD_RES (5)..(6): Xaa is C or S

SEQ ID NO: 109841 - protein, 31 aa, Artificial Sequence; identical to SEQ ID NO: 7805
  Cyclic GFR-binding peptide
  MOD_RES (29)..(31): Xaa is C or S

SEQ ID NO: 109842 - protein, 40 aa, Artificial Sequence; identical to SEQ ID NO: 36306
  Cyclic GFR-binding peptide
  MOD_RES (5)..(6)..(38)..(40): Xaa is C or S

SEQ ID NO: 109843 - protein, 40 aa, Artificial Sequence; identical to SEQ ID NO: 7808
  Cyclic GFR-binding peptide
  MOD_RES (5)..(6)..(37)..(39): Xaa is C or S

SEQ ID NO: 109844 - protein, 22 aa, Artificial Sequence
  Cyclic GFR-binding peptide
DLNAISILYFVGRTPKVLKKYR

SEQ ID NO: 109845 - protein, 28 aa, Artificial Sequence
  Cyclic GFR-binding peptide
PTKLSAISVLYLDDMGVPTLKNYQEGMS

SEQ ID NO: 109846 - protein, 30 aa, Artificial Sequence; identical to SEQ ID NO: 7812
  Cyclic GFR-binding peptide

SEQ ID NO: 109847 - protein, 32 aa, Artificial Sequence; identical to SEQ ID NO: 7813
  Cyclic GFR-binding peptide
  MOD_RES (32)..(32): Xaa is C or S

SEQ ID NO: 109848 - protein, 24 aa, Artificial Sequence
  Cyclic GFR-binding peptide
NAISILYFDKGVVTYLKKYRGMAV

SEQ ID NO: 109849 - protein, 27 aa, Artificial Sequence
  Cyclic GFR-binding peptide
PARLSAISILYLDAANNVVLKNYQDMV

SEQ ID NO: 109850 - protein, 37 aa, Artificial Sequence
  Cyclic GFR-binding peptide
  MOD_RES (6)..(7): Xaa is C or S
GIPEPXXVPEKMSAISILYLDENKNVVLKNYQNMTVE

SEQ ID NO: 109851 - protein, 29 aa, Artificial Sequence
  Cyclic GFR-binding peptide
TPTKMNAISMLYFNDKQQIILKKYRGMVV

SEQ ID NO: 109852 - protein, 30 aa, Artificial Sequence
  Cyclic GFR-binding peptide
  MOD_RES (27)..(29): Xaa is C or S
SAISILYLDAANNVVLKNYQDMVVEAXGXR

SEQ ID NO: 109853 - protein, 40 aa, Artificial Sequence; identical to SEQ ID NO: 7816
  Cyclic GFR-binding peptide
  MOD_RES (3)..(4)..(37)..(39): Xaa is C or S

SEQ ID NO: 109854 - protein, 42 aa, Artificial Sequence
  Cyclic GFR-binding peptide
  MOD_RES (6)..(7)..(39)..(41): Xaa is C or S
GIPEPXXVPEKMSAISILYLDENKNVVLKNYQNMTVESXAXR

SEQ ID NO: 109855 - protein, 32 aa, Artificial Sequence; identical to SEQ ID NO: 7819
  Cyclic GFR-binding peptide
  MOD_RES (30)..(32): Xaa is C or S

SEQ ID NO: 109856 - protein, 28 aa, Artificial Sequence
  Cyclic GFR-binding peptide
  MOD_RES (27)..(27): Xaa is C or S
SAISVLYLDSSNNVILKNYQNMVVKAXG

SEQ ID NO: 109857 - protein, 26 aa, Artificial Sequence
  Cyclic GFR-binding peptide
  MOD_RES (1)..(1): Xaa is C or S
XTPTKMSAISMLYLNDKQQIILKNYQ

SEQ ID NO: 109858 - protein, 32 aa, Artificial Sequence; identical to SEQ ID NO: 36333
  Cyclic GFR-binding peptide
  MOD_RES (32)..(32): Xaa is C or S

SEQ ID NO: 109859 - protein, 38 aa, Artificial Sequence; identical to SEQ ID NO: 7827
  Cyclic GFR-binding peptide
  MOD_RES (6)..(7)..(38): Xaa is C or S

SEQ ID NO: 109860 - protein, 34 aa, Artificial Sequence; identical to SEQ ID NO: 7829
  Cyclic GFR-binding peptide
  MOD_RES (4)..(5): Xaa is C or S

SEQ ID NO: 109861 - protein, 20 aa, Artificial Sequence
  Cyclic GFR-binding peptide
SAISVLYLDDMGVPTLKNYQ

SEQ ID NO: 109862 - protein, 33 aa, Artificial Sequence; identical to SEQ ID NO: 77522
  Cyclic GFR-binding peptide
  MOD_RES (31)..(33): Xaa is C or S

SEQ ID NO: 109863 - protein, 28 aa, Artificial Sequence
  Cyclic GFR-binding peptide
PQDLSAISILYLVGRTPKVLKNYQMVVK

SEQ ID NO: 109864 - protein, 21 aa, Artificial Sequence
  Cyclic GFR-binding peptide
LNAISVLYFDDMGVPTLKKYR

SEQ ID NO: 109865 - protein, 33 aa, Artificial Sequence
  Cyclic GFR-binding peptide
  MOD_RES (1)..(33): Xaa is C or S
XVPARLSAISILYLDAANNVVLKNYQDMVVEAX

SEQ ID NO: 109866 - protein, 34 aa, Artificial Sequence; identical to SEQ ID NO: 7834
  Cyclic GFR-binding peptide
  MOD_RES (3)..(4): Xaa is C or S

SEQ ID NO: 109867 - protein, 35 aa, Artificial Sequence; identical to SEQ ID NO: 36344
  Cyclic GFR-binding peptide
  MOD_RES (5)..(6): Xaa is C or S

SEQ ID NO: 109868 - protein, 39 aa, Artificial Sequence; identical to SEQ ID NO: 7838
  Cyclic GFR-binding peptide
  MOD_RES (5)..(6)..(38): Xaa is C or S

SEQ ID NO: 109869 - protein, 30 aa, Artificial Sequence; identical to SEQ ID NO: 18138
  Cyclic GFR-binding peptide
  MOD_RES (1)..(1): Xaa is C or S

SEQ ID NO: 109870 - protein, 36 aa, Artificial Sequence; identical to SEQ ID NO: 7839
  Cyclic GFR-binding peptide
  MOD_RES (2)..(3)..(36): Xaa is C or S

SEQ ID NO: 109871 - protein, 34 aa, Artificial Sequence; identical to SEQ ID NO: 36354
  Cyclic GFR-binding peptide
  MOD_RES (2)..(3): Xaa is C or S

SEQ ID NO: 109872 - protein, 29 aa, Artificial Sequence
  Cyclic GFR-binding peptide
  MOD_RES (1)..(2): Xaa is C or S
XXVPTRLNAISILYFDSANNVVLKKYRDM

SEQ ID NO: 109873 - protein, 25 aa, Artificial Sequence
  Cyclic GFR-binding peptide
LSAISILYLDAANNVVLKNYQDMVV

SEQ ID NO: 109874 - protein, 35 aa, Artificial Sequence; identical to SEQ ID NO: 77533
  Cyclic GFR-binding peptide
  MOD_RES (3)..(4): Xaa is C or S

SEQ ID NO: 109875 - protein, 34 aa, Artificial Sequence; identical to SEQ ID NO: 7849
  Cyclic GFR-binding peptide
  MOD_RES (31)..(33): Xaa is C or S

SEQ ID NO: 109876 - protein, 35 aa, Artificial Sequence; identical to SEQ ID NO: 7852
  Cyclic GFR-binding peptide
  MOD_RES (4)..(5): Xaa is C or S

SEQ ID NO: 109877 - protein, 33 aa, Artificial Sequence; identical to SEQ ID NO: 7853
  Cyclic GFR-binding peptide
  MOD_RES (4)..(5): Xaa is C or S

SEQ ID NO: 109878 - protein, 35 aa, Artificial Sequence; identical to SEQ ID NO: 7854
  Cyclic GFR-binding peptide
  MOD_RES (33)..(35): Xaa is C or S

SEQ ID NO: 109879 - protein, 27 aa, Artificial Sequence
  Cyclic GFR-binding peptide
ELNAISMLYFDEYDKVVLKKYREMVVE

SEQ ID NO: 109880 - protein, 32 aa, Artificial Sequence; identical to SEQ ID NO: 7856
  Cyclic GFR-binding peptide
  MOD_RES (6)..(7): Xaa is C or S

SEQ ID NO: 109881 - protein, 28 aa, Artificial Sequence
  Cyclic GFR-binding peptide
  MOD_RES (1)..(2): Xaa is C or S
XXVPTRLNAISILYFDSANNVVLKKYRD

SEQ ID NO: 109882 - protein, 32 aa, Artificial Sequence; identical to SEQ ID NO: 18161
  Cyclic GFR-binding peptide
  MOD_RES (32)..(32): Xaa is C or S

SEQ ID NO: 109883 - protein, 29 aa, Artificial Sequence
  Cyclic GFR-binding peptide
  MOD_RES (1)..(2): Xaa is C or S
XXVPTELNAISMLYFDENEKVVLKKYRDM

SEQ ID NO: 109884 - protein, 35 aa, Artificial Sequence; identical to SEQ ID NO: 7864
  Cyclic GFR-binding peptide
  MOD_RES (6)..(7): Xaa is C or S

SEQ ID NO: 109885 - protein, 35 aa, Artificial Sequence; identical to SEQ ID NO: 36389
  Cyclic GFR-binding peptide
  MOD_RES (2)..(3)..(35): Xaa is C or S

SEQ ID NO: 109886 - protein, 33 aa, Artificial Sequence
  Cyclic GFR-binding peptide
  MOD_RES (5)..(6): Xaa is C or S
VPSTXXAPVKTSAISMLYLDNGRVLLLKNYQMI

SEQ ID NO: 109887 - protein, 29 aa, Artificial Sequence
  Cyclic GFR-binding peptide
  MOD_RES (29)..(29): Xaa is C or S
KMNAISILYFDENKNVVLKKYRNMTVESX

SEQ ID NO: 109888 - protein, 37 aa, Artificial Sequence; identical to SEQ ID NO: 77552
  Cyclic GFR-binding peptide
  MOD_RES (4)..(5)..(37): Xaa is C or S

SEQ ID NO: 109889 - protein, 31 aa, Artificial Sequence; identical to SEQ ID NO: 7867
  Cyclic GFR-binding peptide
  MOD_RES (29)..(31): Xaa is C or S

SEQ ID NO: 109890 - protein, 31 aa, Artificial Sequence; identical to SEQ ID NO: 7868
  Cyclic GFR-binding peptide
  MOD_RES (30)..(30): Xaa is C or S

SEQ ID NO: 109891 - protein, 23 aa, Artificial Sequence
  Cyclic GFR-binding peptide
LNAISMLYFDEYDKVVLKKYREM

SEQ ID NO: 109892 - protein, 28 aa, Artificial Sequence
  Cyclic GFR-binding peptide
  MOD_RES (1)..(1): Xaa is C or S
XTPTKMSAISMLYLNDKQQIILKNYQGM

SEQ ID NO: 109893 - protein, 35 aa, Artificial Sequence; identical to SEQ ID NO: 18184
  Cyclic GFR-binding peptide
  MOD_RES (4)..(5): Xaa is C or S

SEQ ID NO: 109894 - protein, 29 aa, Artificial Sequence
  Cyclic GFR-binding peptide
VPTELNAISMLYFDEYDKVVLKKYREMVV

SEQ ID NO: 109895 - protein, 34 aa, Artificial Sequence
  Cyclic GFR-binding peptide
  MOD_RES (1)..(2)..(34): Xaa is C or S
XXTPTKMSAISMLYLNDKQQIILKNYQGMVVDRX

SEQ ID NO: 109896 - protein, 31 aa, Artificial Sequence
  Cyclic GFR-binding peptide
  MOD_RES (5)..(6): Xaa is C or S
VPSTXXAPVKTSAISMLYLDNGRVLLLKNYQ

SEQ ID NO: 109897 - protein, 32 aa, Artificial Sequence; identical to SEQ ID NO: 7876
  Cyclic GFR-binding peptide
  MOD_RES (4)..(5): Xaa is C or S

SEQ ID NO: 109898 - protein, 27 aa, Artificial Sequence
  Cyclic GFR-binding peptide
KMNAISILYFDENKNVVLKKYRNMTVE

SEQ ID NO: 109899 - protein, 34 aa, Artificial Sequence; identical to SEQ ID NO: 7878
  Cyclic GFR-binding peptide
  MOD_RES (3)..(3): Xaa is C or S

SEQ ID NO: 109900 - protein, 33 aa, Artificial Sequence; identical to SEQ ID NO: 94868
  Cyclic GFR-binding peptide
  MOD_RES (31)..(33): Xaa is C or S

SEQ ID NO: 109901 - protein, 37 aa, Artificial Sequence; identical to SEQ ID NO: 7879
  Cyclic GFR-binding peptide
  MOD_RES (2)..(3)..(34)..(36): Xaa is C or S

SEQ ID NO: 109902 - protein, 30 aa, Artificial Sequence; identical to SEQ ID NO: 7880
  Cyclic GFR-binding peptide
  MOD_RES (2)..(3): Xaa is C or S

SEQ ID NO: 109903 - protein, 30 aa, Artificial Sequence
  Cyclic GFR-binding peptide
PTKLSAISILYLDKGVVTYLKNYQGMAVSE

SEQ ID NO: 109904 - protein, 34 aa, Artificial Sequence; identical to SEQ ID NO: 7883
  Cyclic GFR-binding peptide
  MOD_RES (1)..(33): Xaa is C or S

SEQ ID NO: 109905 - protein, 23 aa, Artificial Sequence
  Cyclic GFR-binding peptide
KLSAISVLYLDDSSNVILKNYQN

SEQ ID NO: 109906 - protein, 40 aa, Artificial Sequence; identical to SEQ ID NO: 7887
  Cyclic GFR-binding peptide
  MOD_RES (6)..(7)..(39): Xaa is C or S

SEQ ID NO: 109907 - protein, 41 aa, Artificial Sequence
  Cyclic GFR-binding peptide
  MOD_RES (5)..(6)..(38)..(40): Xaa is C or S
SAGPXXTPTKMSAISMLYLNDKQQIILKNYQGMVVDRXGXS

SEQ ID NO: 109908 - protein, 26 aa, Artificial Sequence
  Cyclic GFR-binding peptide
LNAISILYFVGRKPKVLKKYRMIVRS

SEQ ID NO: 109909 - protein, 34 aa, Artificial Sequence
  Cyclic GFR-binding peptide
  MOD_RES (1)..(32)..(34): Xaa is C or S
XAPVKTSAISMLYLDNGRVLLLKNYQMIVEEXGX

SEQ ID NO: 109910 - protein, 34 aa, Artificial Sequence; identical to SEQ ID NO: 7890
  Cyclic GFR-binding peptide
  MOD_RES (2)..(3)..(34): Xaa is C or S

SEQ ID NO: 109911 - protein, 38 aa, Artificial Sequence; identical to SEQ ID NO: 36431
  Cyclic GFR-binding peptide
  MOD_RES (2)..(3)..(35)..(37): Xaa is C or S

SEQ ID NO: 109912 - protein, 32 aa, Artificial Sequence; identical to SEQ ID NO: 36433
  Cyclic GFR-binding peptide
  MOD_RES (30)..(32): Xaa is C or S

SEQ ID NO: 109913 - protein, 36 aa, Artificial Sequence; identical to SEQ ID NO: 7893
  Cyclic GFR-binding peptide
  MOD_RES (2)..(3)..(34)..(36): Xaa is C or S

SEQ ID NO: 109914 - protein, 35 aa, Artificial Sequence; identical to SEQ ID NO: 36435
  Cyclic GFR-binding peptide
  MOD_RES (2)..(3)..(35): Xaa is C or S

SEQ ID NO: 109915 - protein, 38 aa, Artificial Sequence; identical to SEQ ID NO: 7894
  Cyclic GFR-binding peptide
  MOD_RES (3)..(4)..(35)..(37): Xaa is C or S

SEQ ID NO: 109916 - protein, 26 aa, Artificial Sequence
  Cyclic GFR-binding peptide
VPARLNAISILYFDAANNVVLKKYRD

SEQ ID NO: 109917 - protein, 32 aa, Artificial Sequence; identical to SEQ ID NO: 7897
  Cyclic GFR-binding peptide
  MOD_RES (29)..(31): Xaa is C or S

SEQ ID NO: 109918 - protein, 36 aa, Artificial Sequence; identical to SEQ ID NO: 7898
  Cyclic GFR-binding peptide
  MOD_RES (4)..(5): Xaa is C or S

SEQ ID NO: 109919 - protein, 43 aa, Artificial Sequence; identical to SEQ ID NO: 7899
  Cyclic GFR-binding peptide
  MOD_RES (6)..(7)..(40)..(42): Xaa is C or S

SEQ ID NO: 109920 - protein, 34 aa, Artificial Sequence
  Cyclic GFR-binding peptide
  MOD_RES (6)..(7): Xaa is C or S
GIPEPXXVPEKMSAISILYLDENKNVVLKNYQNM

SEQ ID NO: 109921 - protein, 34 aa, Artificial Sequence; identical to SEQ ID NO: 36448
  Cyclic GFR-binding peptide
  MOD_RES (3)..(4): Xaa is C or S

SEQ ID NO: 109922 - protein, 36 aa, Artificial Sequence; identical to SEQ ID NO: 7902
  Cyclic GFR-binding peptide
  MOD_RES (4)..(5): Xaa is C or S

SEQ ID NO: 109923 - protein, 38 aa, Artificial Sequence; identical to SEQ ID NO: 36449
  Cyclic GFR-binding peptide
  MOD_RES (4)..(5)..(37): Xaa is C or S

SEQ ID NO: 109924 - protein, 34 aa, Artificial Sequence; identical to SEQ ID NO: 77573
  Cyclic GFR-binding peptide
  MOD_RES (31)..(33): Xaa is C or S

SEQ ID NO: 109925 - protein, 34 aa, Artificial Sequence; identical to SEQ ID NO: 7904
  Cyclic GFR-binding peptide
  MOD_RES (31)..(33): Xaa is C or S

SEQ ID NO: 109926 - protein, 30 aa, Artificial Sequence; identical to SEQ ID NO: 7906
  Cyclic GFR-binding peptide
  MOD_RES (1)..(1): Xaa is C or S

SEQ ID NO: 109927 - protein, 31 aa, Artificial Sequence; identical to SEQ ID NO: 77575
  Cyclic GFR-binding peptide

SEQ ID NO: 109928 - protein, 33 aa, Artificial Sequence; identical to SEQ ID NO: 7907
  Cyclic GFR-binding peptide
  MOD_RES (3)..(4): Xaa is C or S

SEQ ID NO: 109929 - protein, 28 aa, Artificial Sequence
  Cyclic GFR-binding peptide
TELNAISMLYFDENEKVVLKKYRDMVVE

SEQ ID NO: 109930 - protein, 37 aa, Artificial Sequence; identical to SEQ ID NO: 7911
  Cyclic GFR-binding peptide
  MOD_RES (2)..(3)..(36): Xaa is C or S

SEQ ID NO: 109931 - protein, 38 aa, Artificial Sequence
  Cyclic GFR-binding peptide
  MOD_RES (5)..(6)..(38): Xaa is C or S
SAGPXXTPTKMSAISMLYLNDKQQIILKNYQGMVVDRX

SEQ ID NO: 109932 - protein, 33 aa, Artificial Sequence; identical to SEQ ID NO: 7913
  Cyclic GFR-binding peptide
  MOD_RES (31)..(33): Xaa is C or S

SEQ ID NO: 109933 - protein, 25 aa, Artificial Sequence
  Cyclic GFR-binding peptide
TQLSAISVLYLDDSSNVILKNYQNM

SEQ ID NO: 109934 - protein, 30 aa, Artificial Sequence; identical to SEQ ID NO: 7918
  Cyclic GFR-binding peptide
  MOD_RES (27)..(29): Xaa is C or S

SEQ ID NO: 109935 - protein, 38 aa, Artificial Sequence; identical to SEQ ID NO: 7919
  Cyclic GFR-binding peptide
  MOD_RES (3)..(4)..(36)..(38): Xaa is C or S

SEQ ID NO: 109936 - protein, 34 aa, Artificial Sequence; identical to SEQ ID NO: 7921
  Cyclic GFR-binding peptide
  MOD_RES (1)..(2)..(33): Xaa is C or S

SEQ ID NO: 109937 - protein, 30 aa, Artificial Sequence; identical to SEQ ID NO: 77580
  Cyclic GFR-binding peptide
  MOD_RES (29)..(29): Xaa is C or S

SEQ ID NO: 109938 - protein, 30 aa, Artificial Sequence; identical to SEQ ID NO: 7922
  Cyclic GFR-binding peptide
  MOD_RES (2)..(3): Xaa is C or S

SEQ ID NO: 109939 - protein, 26 aa, Artificial Sequence
  Cyclic GFR-binding peptide
SAISVLYLDDMGVPTLKNYQEGMSVA

SEQ ID NO: 109940 - protein, 26 aa, Artificial Sequence
  Cyclic GFR-binding peptide
  MOD_RES (26)..(26): Xaa is C or S
NAISILYFIGKTPKILKKYRMIVKSX

SEQ ID NO: 109941 - protein, 28 aa, Artificial Sequence
  Cyclic GFR-binding peptide
KLNAISVLYFDSSNNVILKKYRNMVVKA

SEQ ID NO: 109942 - protein, 29 aa, Artificial Sequence
  Cyclic GFR-binding peptide
  MOD_RES (29)..(29): Xaa is C or S
LSAISVLYLDDMGVPTLKNYQEGMSVAEX

SEQ ID NO: 109943 - protein, 24 aa, Artificial Sequence
  Cyclic GFR-binding peptide
PTKLNAISVLYFDSSNNVILKKYR

SEQ ID NO: 109944 - protein, 22 aa, Artificial Sequence
  Cyclic GFR-binding peptide
LNAISILYFDAANNVVLKKYRD

SEQ ID NO: 109945 - protein, 27 aa, Artificial Sequence
  Cyclic GFR-binding peptide
  MOD_RES (1)..(1): Xaa is C or S
XAPVKTSAISMLYLDNGRVLLLKNYQM

SEQ ID NO: 109946 - protein, 32 aa, Artificial Sequence; identical to SEQ ID NO: 18251
  Cyclic GFR-binding peptide
  MOD_RES (2)..(3): Xaa is C or S

SEQ ID NO: 109947 - protein, 26 aa, Artificial Sequence
  Cyclic GFR-binding peptide
  MOD_RES (1)..(1): Xaa is C or S
XVPQDLSAISILYLVGRTPKVLKNYQ

SEQ ID NO: 109948 - protein, 29 aa, Artificial Sequence
  Cyclic GFR-binding peptide
TKLSAISVLYLDDSSNVILKNYQNMVVRS

SEQ ID NO: 109949 - protein, 34 aa, Artificial Sequence; identical to SEQ ID NO: 7937
  Cyclic GFR-binding peptide
  MOD_RES (2)..(3): Xaa is C or S

SEQ ID NO: 109950 - protein, 26 aa, Artificial Sequence
  Cyclic GFR-binding peptide
KMSAISMLYLNDKQQIILKNYQGMVV

SEQ ID NO: 109951 - protein, 37 aa, Artificial Sequence; identical to SEQ ID NO: 7938
  Cyclic GFR-binding peptide
  MOD_RES (1)..(34)..(36): Xaa is C or S

SEQ ID NO: 109952 - protein, 27 aa, Artificial Sequence
  Cyclic GFR-binding peptide
KLSAISVLYLDDSSNVILKNYQNMVVR

SEQ ID NO: 109953 - protein, 41 aa, Artificial Sequence; identical to SEQ ID NO: 7943
  Cyclic GFR-binding peptide
  MOD_RES (5)..(6)..(39)..(41): Xaa is C or S

SEQ ID NO: 109954 - protein, 39 aa, Artificial Sequence; identical to SEQ ID NO: 7945
  Cyclic GFR-binding peptide
  MOD_RES (6)..(7)..(38): Xaa is C or S

SEQ ID NO: 109955 - protein, 23 aa, Artificial Sequence
  Cyclic GFR-binding peptide
KLSAISVLYLDDMGVPTLKNYQE

SEQ ID NO: 109956 - protein, 24 aa, Artificial Sequence
  Cyclic GFR-binding peptide
PQALSAISILYLVGRKPKVLKNYQ

SEQ ID NO: 109957 - protein, 35 aa, Artificial Sequence; identical to SEQ ID NO: 7953
  Cyclic GFR-binding peptide
  MOD_RES (32)..(34): Xaa is C or S

SEQ ID NO: 109958 - protein, 36 aa, Artificial Sequence; identical to SEQ ID NO: 7954
  Cyclic GFR-binding peptide
  MOD_RES (5)..(6): Xaa is C or S

SEQ ID NO: 109959 - protein, 33 aa, Artificial Sequence; identical to SEQ ID NO: 18269
  Cyclic GFR-binding peptide
  MOD_RES (1)..(2): Xaa is C or S

SEQ ID NO: 109960 - protein, 28 aa, Artificial Sequence
  Cyclic GFR-binding peptide
  MOD_RES (1)..(2): Xaa is C or S
XXVPQALSAISILYLVGRKPKVLKNYQM

SEQ ID NO: 109961 - protein, 20 aa, Artificial Sequence
  Cyclic GFR-binding peptide
NAISMLYFDNGRVLLLKKYR

SEQ ID NO: 109962 - protein, 31 aa, Artificial Sequence
  Cyclic GFR-binding peptide
  MOD_RES (29)..(31): Xaa is C or S
KMSAISILYLDENKNVVLKNYQNMTVESXAX

SEQ ID NO: 109963 - protein, 32 aa, Artificial Sequence; identical to SEQ ID NO: 7960
  Cyclic GFR-binding peptide
  MOD_RES (5)..(6): Xaa is C or S

SEQ ID NO: 109964 - protein, 30 aa, Artificial Sequence; identical to SEQ ID NO: 36511
  Cyclic GFR-binding peptide
  MOD_RES (2)..(3): Xaa is C or S

SEQ ID NO: 109965 - protein, 23 aa, Artificial Sequence
  Cyclic GFR-binding peptide
SAISILYLDENKNVVLKNYQNMT

SEQ ID NO: 109966 - protein, 27 aa, Artificial Sequence
  Cyclic GFR-binding peptide
VPARLNAISILYFDAANNVVLKKYRDM

SEQ ID NO: 109967 - protein, 30 aa, Artificial Sequence; identical to SEQ ID NO: 7968
  Cyclic GFR-binding peptide

SEQ ID NO: 109968 - protein, 38 aa, Artificial Sequence
  Cyclic GFR-binding peptide
  MOD_RES (5)..(6)..(38): Xaa is C or S
IPEPXXVPEKMSAISILYLDENKNVVLKNYQNMTVESX

SEQ ID NO: 109969 - protein, 33 aa, Artificial Sequence
  Cyclic GFR-binding peptide
  MOD_RES (6)..(7): Xaa is C or S
RVPSTXXAPVKTSAISMLYLDNGRVLLLKNYQM

SEQ ID NO: 109970 - protein, 21 aa, Artificial Sequence
  Cyclic GFR-binding peptide
LSAISVLYLDSSNNVILKNYQ

SEQ ID NO: 109971 - protein, 38 aa, Artificial Sequence; identical to SEQ ID NO: 7972
  Cyclic GFR-binding peptide
  MOD_RES (3)..(4)..(35)..(37): Xaa is C or S

SEQ ID NO: 109972 - protein, 20 aa, Artificial Sequence
  Cyclic GFR-binding peptide
SAISVLYLDDSSNVILKNYQ

SEQ ID NO: 109973 - protein, 29 aa, Artificial Sequence
  Cyclic GFR-binding peptide
  MOD_RES (3)..(4): Xaa is C or S
KAXXAPTKLSAISVLYLDSSNNVILKNYQ

SEQ ID NO: 109974 - protein, 40 aa, Artificial Sequence; identical to SEQ ID NO: 36524
  Cyclic GFR-binding peptide
  MOD_RES (6)..(7)..(39): Xaa is C or S

SEQ ID NO: 109975 - protein, 32 aa, Artificial Sequence; identical to SEQ ID NO: 36526
  Cyclic GFR-binding peptide
  MOD_RES (30)..(32): Xaa is C or S

SEQ ID NO: 109976 - protein, 36 aa, Artificial Sequence
  Cyclic GFR-binding peptide
  MOD_RES (1)..(2)..(33)..(35): Xaa is C or S
XXAPVKTSAISMLYLDNGRVLLLKNYQMIVEEXGXL

SEQ ID NO: 109977 - protein, 22 aa, Artificial Sequence
  Cyclic GFR-binding peptide
KMSAISILYLDENKNVVLKNYQ

SEQ ID NO: 109978 - protein, 30 aa, Artificial Sequence; identical to SEQ ID NO: 7977
  Cyclic GFR-binding peptide
  MOD_RES (27)..(29): Xaa is C or S

SEQ ID NO: 109979 - protein, 33 aa, Artificial Sequence
  Cyclic GFR-binding peptide
  MOD_RES (6)..(7): Xaa is C or S
KASKAXXVPTKLSAISILYLDKGVVTYLKNYQG

SEQ ID NO: 109980 - protein, 30 aa, Artificial Sequence
  Cyclic GFR-binding peptide
  MOD_RES (27)..(29): Xaa is C or S
TSAISMLYLDNGRVLLLKNYQMIVEEXGXL

SEQ ID NO: 109981 - protein, 34 aa, Artificial Sequence
  Cyclic GFR-binding peptide
  MOD_RES (31)..(33): Xaa is C or S
PTKMSAISMLYLNDKQQIILKNYQGMVVDRXGXS

SEQ ID NO: 109982 - protein, 39 aa, Artificial Sequence; identical to SEQ ID NO: 7985
  Cyclic GFR-binding peptide
  MOD_RES (5)..(6)..(38): Xaa is C or S

SEQ ID NO: 109983 - protein, 22 aa, Artificial Sequence
  Cyclic GFR-binding peptide
KTNAISMLYFDNGRVLLLKKYR

SEQ ID NO: 109984 - protein, 41 aa, Artificial Sequence; identical to SEQ ID NO: 7987
  Cyclic GFR-binding peptide
  MOD_RES (5)..(6)..(39)..(41): Xaa is C or S

SEQ ID NO: 109985 - protein, 25 aa, Artificial Sequence
  Cyclic GFR-binding peptide
APTQLSAISVLYLDDSSNVILKNYQ

SEQ ID NO: 109986 - protein, 35 aa, Artificial Sequence; identical to SEQ ID NO: 77610
  Cyclic GFR-binding peptide
  MOD_RES (6)..(7): Xaa is C or S

SEQ ID NO: 109987 - protein, 36 aa, Artificial Sequence; identical to SEQ ID NO: 36543
  Cyclic GFR-binding peptide
  MOD_RES (4)..(5): Xaa is C or S

SEQ ID NO: 109988 - protein, 34 aa, Artificial Sequence; identical to SEQ ID NO: 7990
  Cyclic GFR-binding peptide
  MOD_RES (31)..(33): Xaa is C or S

SEQ ID NO: 109989 - protein, 38 aa, Artificial Sequence; identical to SEQ ID NO: 7992
  Cyclic GFR-binding peptide
  MOD_RES (3)..(35)..(37): Xaa is C or S

SEQ ID NO: 109990 - protein, 31 aa, Artificial Sequence
  Cyclic GFR-binding peptide
  MOD_RES (30)..(30): Xaa is C or S
TKMSAISMLYLNDKQQIILKNYQGMVVDRXG

SEQ ID NO: 109991 - protein, 27 aa, Artificial Sequence
  Cyclic GFR-binding peptide
  MOD_RES (27)..(27): Xaa is C or S
NAISILYFDAANNVVLKKYRDMVVEAX

SEQ ID NO: 109992 - protein, 33 aa, Artificial Sequence; identical to SEQ ID NO: 7998
  Cyclic GFR-binding peptide
  MOD_RES (31)..(33): Xaa is C or S

SEQ ID NO: 109993 - protein, 28 aa, Artificial Sequence
  Cyclic GFR-binding peptide
  MOD_RES (28)..(28): Xaa is C or S
MSAISILYLDENKNVVLKNYQNMTVESX

SEQ ID NO: 109994 - protein, 23 aa, Artificial Sequence
  Cyclic GFR-binding peptide
TNAISMLYFDNGRVLLLKKYRMI

SEQ ID NO: 109995 - protein, 28 aa, Artificial Sequence
  Cyclic GFR-binding peptide
QALSAISILYLVGRKPKVLKNYQMIVRS

SEQ ID NO: 109996 - protein, 30 aa, Artificial Sequence; identical to SEQ ID NO: 8001
  Cyclic GFR-binding peptide

SEQ ID NO: 109997 - protein, 38 aa, Artificial Sequence; identical to SEQ ID NO: 8002
  Cyclic GFR-binding peptide
  MOD_RES (4)..(5)..(38): Xaa is C or S

SEQ ID NO: 109998 - protein, 25 aa, Artificial Sequence
  Cyclic GFR-binding peptide
LNAISILYFDSANNVVLKKYRDMVV

SEQ ID NO: 109999 - protein, 29 aa, Artificial Sequence
  Cyclic GFR-binding peptide
  MOD_RES (29)..(29): Xaa is C or S
QDLSAISILYLIGKTPKILKNYQMIVKSX

SEQ ID NO: 110000 - protein, 39 aa, Artificial Sequence; identical to SEQ ID NO: 8006
  Cyclic GFR-binding peptide
  MOD_RES (5)..(6)..(37)..(39): Xaa is C or S

SEQ ID NO: 110001 - protein, 30 aa, Artificial Sequence; identical to SEQ ID NO: 8008
  Cyclic GFR-binding peptide
  MOD_RES (29)..(29): Xaa is C or S

SEQ ID NO: 110002 - protein, 34 aa, Artificial Sequence; identical to SEQ ID NO: 8013
  Cyclic GFR-binding peptide
  MOD_RES (3)..(4): Xaa is C or S

SEQ ID NO: 110003 - protein, 38 aa, Artificial Sequence; identical to SEQ ID NO: 18327
  Cyclic GFR-binding peptide
  MOD_RES (4)..(5)..(37): Xaa is C or S

SEQ ID NO: 110004 - protein, 35 aa, Artificial Sequence; identical to SEQ ID NO: 8015
  Cyclic GFR-binding peptide
  MOD_RES (5)..(6): Xaa is C or S

SEQ ID NO: 110005 - protein, 34 aa, Artificial Sequence; identical to SEQ ID NO: 8016
  Cyclic GFR-binding peptide
  MOD_RES (4)..(5): Xaa is C or S

SEQ ID NO: 110006 - protein, 34 aa, Artificial Sequence
  Cyclic GFR-binding peptide
  MOD_RES (2)..(3): Xaa is C or S
PXXVPEKMSAISILYLDENKNVVLKNYQNMTVES

SEQ ID NO: 110007 - protein, 29 aa, Artificial Sequence
  Cyclic GFR-binding peptide
  MOD_RES (27)..(29): Xaa is C or S
LNAISILYFIGKTPKILKKYRMIVKSXKX

SEQ ID NO: 110008 - protein, 34 aa, Artificial Sequence
  Cyclic GFR-binding peptide
  MOD_RES (2)..(3): Xaa is C or S
PXXTPTKMSAISMLYLNDKQQIILKNYQGMVVDR

SEQ ID NO: 110009 - protein, 37 aa, Artificial Sequence
  Cyclic GFR-binding peptide
  MOD_RES (4)..(5)..(37): Xaa is C or S
PASXXVPARLSAISILYLDAANNVVLKNYQDMVVEAX

SEQ ID NO: 110010 - protein, 31 aa, Artificial Sequence; identical to SEQ ID NO: 8022
  Cyclic GFR-binding peptide
  MOD_RES (4)..(5): Xaa is C or S

SEQ ID NO: 110011 - protein, 33 aa, Artificial Sequence; identical to SEQ ID NO: 8024
  Cyclic GFR-binding peptide
  MOD_RES (5)..(6): Xaa is C or S

SEQ ID NO: 110012 - protein, 27 aa, Artificial Sequence
  Cyclic GFR-binding peptide
  MOD_RES (1)..(1): Xaa is C or S
XVPTKLSAISVLYLDDMGVPTLKNYQE

SEQ ID NO: 110013 - protein, 36 aa, Artificial Sequence; identical to SEQ ID NO: 36585
  Cyclic GFR-binding peptide
  MOD_RES (5)..(6): Xaa is C or S

SEQ ID NO: 110014 - protein, 32 aa, Artificial Sequence
  Cyclic GFR-binding peptide
  MOD_RES (29)..(31): Xaa is C or S
VKTSAISMLYLDNGRVLLLKNYQMIVEEXGXL

SEQ ID NO: 110015 - protein, 29 aa, Artificial Sequence
  Cyclic GFR-binding peptide
  MOD_RES (2)..(3): Xaa is C or S
PXXVSQDLNAISILYFIGKTPKILKKYRM

SEQ ID NO: 110016 - protein, 35 aa, Artificial Sequence; identical to SEQ ID NO: 8027
  Cyclic GFR-binding peptide
  MOD_RES (1)..(34): Xaa is C or S

SEQ ID NO: 110017 - protein, 31 aa, Artificial Sequence
  Cyclic GFR-binding peptide
  MOD_RES (29)..(31): Xaa is C or S
KLSAISILYLDKGVVTYLKNYQGMAVSEXGX

SEQ ID NO: 110018 - protein, 31 aa, Artificial Sequence; identical to SEQ ID NO: 8031
  Cyclic GFR-binding peptide
  MOD_RES (30)..(30): Xaa is C or S

SEQ ID NO: 110019 - protein, 33 aa, Artificial Sequence; identical to SEQ ID NO: 8033
  Cyclic GFR-binding peptide
  MOD_RES (32)..(32): Xaa is C or S

SEQ ID NO: 110020 - protein, 29 aa, Artificial Sequence
  Cyclic GFR-binding peptide
  MOD_RES (28)..(28): Xaa is C or S
LSAISILYLDSANNVVLKNYQDMVVESXG

SEQ ID NO: 110021 - protein, 33 aa, Artificial Sequence; identical to SEQ ID NO: 8034
  Cyclic GFR-binding peptide
  MOD_RES (1)..(33): Xaa is C or S

SEQ ID NO: 110022 - protein, 31 aa, Artificial Sequence; identical to SEQ ID NO: 8036
  Cyclic GFR-binding peptide
  MOD_RES (30)..(30): Xaa is C or S

SEQ ID NO: 110023 - protein, 39 aa, Artificial Sequence
  Cyclic GFR-binding peptide
  MOD_RES (6)..(7)..(39): Xaa is C or S
GIPEPXXVPEKMSAISILYLDENKNVVLKNYQNMTVESX

SEQ ID NO: 110024 - protein, 32 aa, Artificial Sequence; identical to SEQ ID NO: 8037
  Cyclic GFR-binding peptide
  MOD_RES (6)..(6): Xaa is C or S

SEQ ID NO: 110025 - protein, 32 aa, Artificial Sequence; identical to SEQ ID NO: 8038
  Cyclic GFR-binding peptide
  MOD_RES (5)..(6): Xaa is C or S

SEQ ID NO: 110026 - protein, 34 aa, Artificial Sequence; identical to SEQ ID NO: 8040
  Cyclic GFR-binding peptide
  MOD_RES (1)..(2)..(34): Xaa is C or S

SEQ ID NO: 110027 - protein, 39 aa, Artificial Sequence
  Cyclic GFR-binding peptide
  MOD_RES (4)..(5)..(37)..(39): Xaa is C or S
AGPXXTPTKMSAISMLYLNDKQQIILKNYQGMVVDRXGX

SEQ ID NO: 110028 - protein, 39 aa, Artificial Sequence; identical to SEQ ID NO: 8041
  Cyclic GFR-binding peptide
  MOD_RES (6)..(7): Xaa is C or S

SEQ ID NO: 110029 - protein, 31 aa, Artificial Sequence; identical to SEQ ID NO: 8042
  Cyclic GFR-binding peptide
  MOD_RES (2)..(3): Xaa is C or S

SEQ ID NO: 110030 - protein, 24 aa, Artificial Sequence
  Cyclic GFR-binding peptide
PQALNAISILYFVGRKPKVLKKYR

SEQ ID NO: 110031 - protein, 24 aa, Artificial Sequence
  Cyclic GFR-binding peptide
SAISMLYLDNGRVLLLKNYQMIVE

SEQ ID NO: 110032 - protein, 25 aa, Artificial Sequence
  Cyclic GFR-binding peptide
QALSAISILYLVGRKPKVLKNYQMI

SEQ ID NO: 110033 - protein, 30 aa, Artificial Sequence; identical to SEQ ID NO: 77633
  Cyclic GFR-binding peptide
  MOD_RES (2)..(3): Xaa is C or S

SEQ ID NO: 110034 - protein, 27 aa, Artificial Sequence
  Cyclic GFR-binding peptide
DLSAISILYLVGRTPKVLKNYQMVVKS

SEQ ID NO: 110035 - protein, 30 aa, Artificial Sequence; identical to SEQ ID NO: 77634
  Cyclic GFR-binding peptide
  MOD_RES (27)..(29): Xaa is C or S

SEQ ID NO: 110036 - protein, 36 aa, Artificial Sequence; identical to SEQ ID NO: 8049
  Cyclic GFR-binding peptide
  MOD_RES (6)..(7): Xaa is C or S

SEQ ID NO: 110037 - protein, 27 aa, Artificial Sequence
  Cyclic GFR-binding peptide
  MOD_RES (1)..(1): Xaa is C or S
XAPTKLSAISVLYLDDSSNVILKNYQN

SEQ ID NO: 110038 - protein, 32 aa, Artificial Sequence; identical to SEQ ID NO: 18370
  Cyclic GFR-binding peptide
  MOD_RES (4)..(5): Xaa is C or S

SEQ ID NO: 110039 - protein, 36 aa, Artificial Sequence; identical to SEQ ID NO: 8053
  Cyclic GFR-binding peptide
  MOD_RES (1)..(2)..(33)..(35): Xaa is C or S

SEQ ID NO: 110040 - protein, 24 aa, Artificial Sequence
  Cyclic GFR-binding peptide
TKLSAISVLYLDSSNNVILKNYQN

SEQ ID NO: 110041 - protein, 26 aa, Artificial Sequence
  Cyclic GFR-binding peptide
  MOD_RES (1)..(1): Xaa is C or S
XVPQDLNAISILYFVGRTPKVLKKYR

SEQ ID NO: 110042 - protein, 29 aa, Artificial Sequence
  Cyclic GFR-binding peptide
  MOD_RES (3)..(4): Xaa is C or S
APXXVPQALNAISILYFVGRKPKVLKKYR

SEQ ID NO: 110043 - protein, 39 aa, Artificial Sequence
  Cyclic GFR-binding peptide
  MOD_RES (5)..(6)..(38): Xaa is C or S
IPEPXXVPEKMSAISILYLDENKNVVLKNYQNMTVESXA

SEQ ID NO: 110044 - protein, 32 aa, Artificial Sequence; identical to SEQ ID NO: 8057
  Cyclic GFR-binding peptide
  MOD_RES (32)..(32): Xaa is C or S

SEQ ID NO: 110045 - protein, 26 aa, Artificial Sequence
  Cyclic GFR-binding peptide
TKLNAISILYFDKGVVTYLKKYRGMA

SEQ ID NO: 110046 - protein, 31 aa, Artificial Sequence; identical to SEQ ID NO: 90034
  Cyclic GFR-binding peptide
  MOD_RES (1)..(2): Xaa is C or S

SEQ ID NO: 110047 - protein, 38 aa, Artificial Sequence; identical to SEQ ID NO: 8060
  Cyclic GFR-binding peptide
  MOD_RES (5)..(6)..(38): Xaa is C or S

SEQ ID NO: 110048 - protein, 37 aa, Artificial Sequence; identical to SEQ ID NO: 8061
  Cyclic GFR-binding peptide
  MOD_RES (6)..(7): Xaa is C or S

SEQ ID NO: 110049 - protein, 27 aa, Artificial Sequence
  Cyclic GFR-binding peptide
  MOD_RES (27)..(27): Xaa is C or S
NAISILYFDENKNVVLKKYRNMTVESX

SEQ ID NO: 110050 - protein, 33 aa, Artificial Sequence; identical to SEQ ID NO: 18382
  Cyclic GFR-binding peptide
  MOD_RES (6)..(7): Xaa is C or S

SEQ ID NO: 110051 - protein, 26 aa, Artificial Sequence
  Cyclic GFR-binding peptide
RLSAISILYLDSANNVVLKNYQDMVV

SEQ ID NO: 110052 - protein, 37 aa, Artificial Sequence; identical to SEQ ID NO: 77643
  Cyclic GFR-binding peptide
  MOD_RES (4)..(5)..(36): Xaa is C or S

SEQ ID NO: 110053 - protein, 24 aa, Artificial Sequence
  Cyclic GFR-binding peptide
PQDLSAISILYLVGRTPKVLKNYQ

SEQ ID NO: 110054 - protein, 26 aa, Artificial Sequence
  Cyclic GFR-binding peptide
SAISILYLDAANNVVLKNYQDMVVEA

SEQ ID NO: 110055 - protein, 27 aa, Artificial Sequence
  Cyclic GFR-binding peptide
  MOD_RES (1)..(2): Xaa is C or S
XXVPQALSAISILYLVGRKPKVLKNYQ

SEQ ID NO: 110056 - protein, 29 aa, Artificial Sequence
  Cyclic GFR-binding peptide
  MOD_RES (1)..(1): Xaa is C or S
XVSQDLSAISILYLIGKTPKILKNYQMIV

SEQ ID NO: 110057 - protein, 31 aa, Artificial Sequence; identical to SEQ ID NO: 8076
  Cyclic GFR-binding peptide
  MOD_RES (1)..(2): Xaa is C or S

SEQ ID NO: 110058 - protein, 26 aa, Artificial Sequence
  Cyclic GFR-binding peptide
PTRLSAISILYLDSANNVVLKNYQDM

SEQ ID NO: 110059 - protein, 31 aa, Artificial Sequence; identical to SEQ ID NO: 77653
  Cyclic GFR-binding peptide
  MOD_RES (2)..(3): Xaa is C or S

SEQ ID NO: 110060 - protein, 30 aa, Artificial Sequence
  Cyclic GFR-binding peptide
  MOD_RES (27)..(29): Xaa is C or S
SAISMLYLNDKQQIILKNYQGMVVDRXGXS

SEQ ID NO: 110061 - protein, 32 aa, Artificial Sequence; identical to SEQ ID NO: 8082
  Cyclic GFR-binding peptide
  MOD_RES (5)..(6): Xaa is C or S

SEQ ID NO: 110062 - protein, 25 aa, Artificial Sequence
  Cyclic GFR-binding peptide
NAISMLYFNDKQQIILKKYRGMVVD

SEQ ID NO: 110063 - protein, 23 aa, Artificial Sequence
  Cyclic GFR-binding peptide
ALSAISILYLVGRKPKVLKNYQM

SEQ ID NO: 110064 - protein, 32 aa, Artificial Sequence; identical to SEQ ID NO: 8085
  Cyclic GFR-binding peptide
  MOD_RES (4)..(5): Xaa is C or S

SEQ ID NO: 110065 - protein, 24 aa, Artificial Sequence
  Cyclic GFR-binding peptide
LNAISVLYFDDMGVPTLKKYREGM

SEQ ID NO: 110066 - protein, 35 aa, Artificial Sequence; identical to SEQ ID NO: 90054
  Cyclic GFR-binding peptide
  MOD_RES (4)..(5): Xaa is C or S

SEQ ID NO: 110067 - protein, 36 aa, Artificial Sequence; identical to SEQ ID NO: 8087
  Cyclic GFR-binding peptide
  MOD_RES (1)..(2)..(34)..(36): Xaa is C or S

SEQ ID NO: 110068 - protein, 26 aa, Artificial Sequence
  Cyclic GFR-binding peptide
VPTELNAISMLYFDENEKVVLKKYRD

SEQ ID NO: 110069 - protein, 34 aa, Artificial Sequence
  Cyclic GFR-binding peptide
  MOD_RES (4)..(5): Xaa is C or S
PSTXXAPVKTSAISMLYLDNGRVLLLKNYQMIVE

SEQ ID NO: 110070 - protein, 29 aa, Artificial Sequence
  Cyclic GFR-binding peptide
  MOD_RES (1)..(2): Xaa is C or S
XXVPTKLSAISVLYLDDMGVPTLKNYQEG

SEQ ID NO: 110071 - protein, 40 aa, Artificial Sequence; identical to SEQ ID NO: 36664
  Cyclic GFR-binding peptide
  MOD_RES (6)..(7)..(39): Xaa is C or S

SEQ ID NO: 110072 - protein, 38 aa, Artificial Sequence
  Cyclic GFR-binding peptide
  MOD_RES (6)..(7): Xaa is C or S
KASKAXXVPTKLSAISILYLDKGVVTYLKNYQGMAVSE

SEQ ID NO: 110073 - protein, 41 aa, Artificial Sequence; identical to SEQ ID NO: 8094
  Cyclic GFR-binding peptide
  MOD_RES (6)..(7)..(39)..(41): Xaa is C or S

SEQ ID NO: 110074 - protein, 31 aa, Artificial Sequence; identical to SEQ ID NO: 8095
  Cyclic GFR-binding peptide
  MOD_RES (2)..(2): Xaa is C or S

SEQ ID NO: 110075 - protein, 35 aa, Artificial Sequence; identical to SEQ ID NO: 8099
  Cyclic GFR-binding peptide
  MOD_RES (1)..(2)..(34): Xaa is C or S

SEQ ID NO: 110076 - protein, 33 aa, Artificial Sequence
  Cyclic GFR-binding peptide
  MOD_RES (5)..(6): Xaa is C or S
IPEPXXVPEKMSAISILYLDENKNVVLKNYQNM

SEQ ID NO: 110077 - protein, 24 aa, Artificial Sequence
  Cyclic GFR-binding peptide
NAISVLYFDSSNNVILKKYRNMVV

SEQ ID NO: 110078 - protein, 27 aa, Artificial Sequence
  Cyclic GFR-binding peptide
LSAISVLYLDSSNNVILKNYQNMVVKA

SEQ ID NO: 110079 - protein, 24 aa, Artificial Sequence
  Cyclic GFR-binding peptide
ELNAISMLYFDENEKVVLKKYRDM

SEQ ID NO: 110080 - protein, 34 aa, Artificial Sequence; identical to SEQ ID NO: 8107
  Cyclic GFR-binding peptide
  MOD_RES (2)..(3)..(34): Xaa is C or S

SEQ ID NO: 110081 - protein, 33 aa, Artificial Sequence; identical to SEQ ID NO: 77666
  Cyclic GFR-binding peptide
  MOD_RES (1)..(33): Xaa is C or S

SEQ ID NO: 110082 - protein, 29 aa, Artificial Sequence
  Cyclic GFR-binding peptide
  MOD_RES (1)..(1): Xaa is C or S
XAPTQLSAISVLYLDDSSNVILKNYQNMV

SEQ ID NO: 110083 - protein, 28 aa, Artificial Sequence
  Cyclic GFR-binding peptide
  MOD_RES (27)..(27): Xaa is C or S
NAISMLYFDEYDKVVLKKYREMVVEGXG

SEQ ID NO: 110084 - protein, 30 aa, Artificial Sequence
  Cyclic GFR-binding peptide
  MOD_RES (2)..(3): Xaa is C or S
SXXVPARLSAISILYLDAANNVVLKNYQDM

SEQ ID NO: 110085 - protein, 39 aa, Artificial Sequence; identical to SEQ ID NO: 77668
  Cyclic GFR-binding peptide
  MOD_RES (3)..(4)..(36)..(38): Xaa is C or S

SEQ ID NO: 110086 - protein, 26 aa, Artificial Sequence
  Cyclic GFR-binding peptide
QDLNAISILYFVGRTPKVLKKYRMVV

SEQ ID NO: 110087 - protein, 31 aa, Artificial Sequence; identical to SEQ ID NO: 8119
  Cyclic GFR-binding peptide
  MOD_RES (28)..(30): Xaa is C or S

SEQ ID NO: 110088 - protein, 30 aa, Artificial Sequence
  Cyclic GFR-binding peptide
  MOD_RES (30)..(30): Xaa is C or S
EKMSAISILYLDENKNVVLKNYQNMTVESX

SEQ ID NO: 110089 - protein, 41 aa, Artificial Sequence; identical to SEQ ID NO: 8120
  Cyclic GFR-binding peptide
  MOD_RES (6)..(7)..(38)..(40): Xaa is C or S

SEQ ID NO: 110090 - protein, 25 aa, Artificial Sequence
  Cyclic GFR-binding peptide
LNAISILYFVGRKPKVLKKYRMIVR

SEQ ID NO: 110091 - protein, 30 aa, Artificial Sequence
  Cyclic GFR-binding peptide
  MOD_RES (30)..(30): Xaa is C or S
TKMSAISMLYLNDKQQIILKNYQGMVVDRX

SEQ ID NO: 110092 - protein, 28 aa, Artificial Sequence
  Cyclic GFR-binding peptide
  MOD_RES (1)..(2): Xaa is C or S
XXVPEKMNAISILYFDENKNVVLKKYRN

SEQ ID NO: 110093 - protein, 40 aa, Artificial Sequence; identical to SEQ ID NO: 8124
  Cyclic GFR-binding peptide
  MOD_RES (6)..(7)..(38)..(40): Xaa is C or S

SEQ ID NO: 110094 - protein, 34 aa, Artificial Sequence; identical to SEQ ID NO: 8125
  Cyclic GFR-binding peptide
  MOD_RES (1)..(33): Xaa is C or S

SEQ ID NO: 110095 - protein, 30 aa, Artificial Sequence; identical to SEQ ID NO: 8126
  Cyclic GFR-binding peptide
  MOD_RES (1)..(1): Xaa is C or S

SEQ ID NO: 110096 - protein, 37 aa, Artificial Sequence; identical to SEQ ID NO: 8130
  Cyclic GFR-binding peptide
  MOD_RES (6)..(7): Xaa is C or S

SEQ ID NO: 110097 - protein, 33 aa, Artificial Sequence
  Cyclic GFR-binding peptide
  MOD_RES (30)..(32): Xaa is C or S
EKMSAISILYLDENKNVVLKNYQNMTVESXAXR

SEQ ID NO: 110098 - protein, 41 aa, Artificial Sequence; identical to SEQ ID NO: 8132
  Cyclic GFR-binding peptide
  MOD_RES (4)..(5)..(38)..(40): Xaa is C or S

SEQ ID NO: 110099 - protein, 29 aa, Artificial Sequence
  Cyclic GFR-binding peptide
VPTELNAISMLYFDENEKVVLKKYRDMVV

SEQ ID NO: 110100 - protein, 36 aa, Artificial Sequence; identical to SEQ ID NO: 8134
  Cyclic GFR-binding peptide
  MOD_RES (1)..(2)..(33)..(35): Xaa is C or S

SEQ ID NO: 110101 - protein, 36 aa, Artificial Sequence; identical to SEQ ID NO: 8135
  Cyclic GFR-binding peptide
  MOD_RES (5)..(6): Xaa is C or S

SEQ ID NO: 110102 - protein, 33 aa, Artificial Sequence; identical to SEQ ID NO: 8138
  Cyclic GFR-binding peptide
  MOD_RES (6)..(7): Xaa is C or S

SEQ ID NO: 110103 - protein, 33 aa, Artificial Sequence; identical to SEQ ID NO: 8140
  Cyclic GFR-binding peptide
  MOD_RES (1)..(2): Xaa is C or S

SEQ ID NO: 110104 - protein, 29 aa, Artificial Sequence
  Cyclic GFR-binding peptide
  MOD_RES (2)..(3): Xaa is C or S
AXXVPTKLSAISVLYLDDMGVPTLKNYQE

SEQ ID NO: 110105 - protein, 32 aa, Artificial Sequence; identical to SEQ ID NO: 8143
  Cyclic GFR-binding peptide
  MOD_RES (2)..(3): Xaa is C or S

SEQ ID NO: 110106 - protein, 38 aa, Artificial Sequence
  Cyclic GFR-binding peptide
  MOD_RES (3)..(4)..(35)..(37): Xaa is C or S
STXXAPVKTSAISMLYLDNGRVLLLKNYQMIVEEXGXL

SEQ ID NO: 110107 - protein, 30 aa, Artificial Sequence; identical to SEQ ID NO: 18447
  Cyclic GFR-binding peptide
  MOD_RES (29)..(29): Xaa is C or S

SEQ ID NO: 110108 - protein, 28 aa, Artificial Sequence
  Cyclic GFR-binding peptide
  MOD_RES (28)..(28): Xaa is C or S
SAISVLYLDDMGVPTLKNYQEGMSVAEX

SEQ ID NO: 110109 - protein, 33 aa, Artificial Sequence
  Cyclic GFR-binding peptide
  MOD_RES (5)..(6): Xaa is C or S
APASXXVPARLSAISILYLDAANNVVLKNYQDM

SEQ ID NO: 110110 - protein, 27 aa, Artificial Sequence
  Cyclic GFR-binding peptide
TPTKMNAISMLYFNDKQQIILKKYRGM

SEQ ID NO: 110111 - protein, 33 aa, Artificial Sequence; identical to SEQ ID NO: 8147
  Cyclic GFR-binding peptide
  MOD_RES (30)..(32): Xaa is C or S

SEQ ID NO: 110112 - protein, 33 aa, Artificial Sequence
  Cyclic GFR-binding peptide
  MOD_RES (32)..(32): Xaa is C or S
VPARLSAISILYLDAANNVVLKNYQDMVVEAXG

SEQ ID NO: 110113 - protein, 26 aa, Artificial Sequence
  Cyclic GFR-binding peptide
LNAISVLYFDSSNNVILKKYRNMVVK

SEQ ID NO: 110114 - protein, 26 aa, Artificial Sequence
  Cyclic GFR-binding peptide
SAISILYLDSANNVVLKNYQDMVVES

SEQ ID NO: 110115 - protein, 35 aa, Artificial Sequence
  Cyclic GFR-binding peptide
  MOD_RES (6)..(7): Xaa is C or S
AAPASXXVPARLSAISILYLDAANNVVLKNYQDMV

SEQ ID NO: 110116 - protein, 37 aa, Artificial Sequence; identical to SEQ ID NO: 8149
  Cyclic GFR-binding peptide
  MOD_RES (1)..(2)..(34)..(36): Xaa is C or S

SEQ ID NO: 110117 - protein, 31 aa, Artificial Sequence; identical to SEQ ID NO: 8150
  Cyclic GFR-binding peptide

SEQ ID NO: 110118 - protein, 36 aa, Artificial Sequence; identical to SEQ ID NO: 8157
  Cyclic GFR-binding peptide
  MOD_RES (5)..(6): Xaa is C or S

SEQ ID NO: 110119 - protein, 34 aa, Artificial Sequence; identical to SEQ ID NO: 95137
  Cyclic GFR-binding peptide
  MOD_RES (1)..(33): Xaa is C or S

SEQ ID NO: 110120 - protein, 32 aa, Artificial Sequence; identical to SEQ ID NO: 8161
  Cyclic GFR-binding peptide
  MOD_RES (3)..(4): Xaa is C or S

SEQ ID NO: 110121 - protein, 34 aa, Artificial Sequence; identical to SEQ ID NO: 18466
  Cyclic GFR-binding peptide
  MOD_RES (5)..(6): Xaa is C or S

SEQ ID NO: 110122 - protein, 20 aa, Artificial Sequence
  Cyclic GFR-binding peptide
SAISMLYLDNGRVLLLKNYQ

SEQ ID NO: 110123 - protein, 26 aa, Artificial Sequence
  Cyclic GFR-binding peptide
KLNAISVLYFDSSNNVILKKYRNMVV

SEQ ID NO: 110124 - protein, 31 aa, Artificial Sequence; identical to SEQ ID NO: 8166
  Cyclic GFR-binding peptide
  MOD_RES (4)..(5): Xaa is C or S

SEQ ID NO: 110125 - protein, 26 aa, Artificial Sequence
  Cyclic GFR-binding peptide
DLNAISILYFVGRTPKVLKKYRMVVK

SEQ ID NO: 110126 - protein, 30 aa, Artificial Sequence
  Cyclic GFR-binding peptide
  MOD_RES (1)..(2): Xaa is C or S
XXAPVKTSAISMLYLDNGRVLLLKNYQMIV

SEQ ID NO: 110127 - protein, 29 aa, Artificial Sequence
  Cyclic GFR-binding peptide
  MOD_RES (28)..(28): Xaa is C or S
LSAISVLYLDSSNNVILKNYQNMVVKAXG

SEQ ID NO: 110128 - protein, 22 aa, Artificial Sequence
  Cyclic GFR-binding peptide
LNAISVLYFDSSNNVILKKYRN

SEQ ID NO: 110129 - protein, 37 aa, Artificial Sequence; identical to SEQ ID NO: 8176
  Cyclic GFR-binding peptide
  MOD_RES (5)..(6): Xaa is C or S

SEQ ID NO: 110130 - protein, 22 aa, Artificial Sequence
  Cyclic GFR-binding peptide
NAISVLYFDSSNNVILKKYRNM

SEQ ID NO: 110131 - protein, 29 aa, Artificial Sequence
  Cyclic GFR-binding peptide
TKLNAISVLYFDSSNNVILKKYRNMVVKA

SEQ ID NO: 110132 - protein, 33 aa, Artificial Sequence; identical to SEQ ID NO: 8180
  Cyclic GFR-binding peptide
  MOD_RES (3)..(4): Xaa is C or S

SEQ ID NO: 110133 - protein, 30 aa, Artificial Sequence
  Cyclic GFR-binding peptide
  MOD_RES (3)..(4): Xaa is C or S
KAXXVPTKLSAISILYLDKGVVTYLKNYQG

SEQ ID NO: 110134 - protein, 35 aa, Artificial Sequence
  Cyclic GFR-binding peptide
  MOD_RES (1)..(2)..(34): Xaa is C or S
XXVPEKMSAISILYLDENKNVVLKNYQNMTVESXA

SEQ ID NO: 110135 - protein, 33 aa, Artificial Sequence
  Cyclic GFR-binding peptide
  MOD_RES (4)..(5): Xaa is C or S
SKAXXVPTKLSAISILYLDKGVVTYLKNYQGMA

SEQ ID NO: 110136 - protein, 27 aa, Artificial Sequence
  Cyclic GFR-binding peptide
DLSAISILYLIGKTPKILKNYQMIVKS

SEQ ID NO: 110137 - protein, 24 aa, Artificial Sequence
  Cyclic GFR-binding peptide
KMNAISMLYFNDKQQIILKKYRGM

SEQ ID NO: 110138 - protein, 29 aa, Artificial Sequence
  Cyclic GFR-binding peptide
  MOD_RES (26)..(28): Xaa is C or S
SAISILYLVGRKPKVLKNYQMIVRSXKXS

SEQ ID NO: 110139 - protein, 33 aa, Artificial Sequence
  Cyclic GFR-binding peptide
  MOD_RES (32)..(32): Xaa is C or S
VPTKLSAISILYLDKGVVTYLKNYQGMAVSEXG

SEQ ID NO: 110140 - protein, 24 aa, Artificial Sequence
  Cyclic GFR-binding peptide
LNAISVLYFDSSNNVILKKYRNMV

SEQ ID NO: 110141 - protein, 29 aa, Artificial Sequence
  Cyclic GFR-binding peptide
ARLNAISILYFDAANNVVLKKYRDMVVEA

SEQ ID NO: 110142 - protein, 34 aa, Artificial Sequence; identical to SEQ ID NO: 8190
  Cyclic GFR-binding peptide
  MOD_RES (6)..(7): Xaa is C or S

SEQ ID NO: 110143 - protein, 28 aa, Artificial Sequence
  Cyclic GFR-binding peptide
  MOD_RES (26)..(28): Xaa is C or S
SAISILYLIGKTPKILKNYQMIVKSXKX

SEQ ID NO: 110144 - protein, 33 aa, Artificial Sequence; identical to SEQ ID NO: 8193
  Cyclic GFR-binding peptide
  MOD_RES (33)..(33): Xaa is C or S

SEQ ID NO: 110145 - protein, 40 aa, Artificial Sequence; identical to SEQ ID NO: 8196
  Cyclic GFR-binding peptide
  MOD_RES (6)..(7)..(40): Xaa is C or S

SEQ ID NO: 110146 - protein, 29 aa, Artificial Sequence
  Cyclic GFR-binding peptide
PQDLSAISILYLVGRTPKVLKNYQMVVKS

SEQ ID NO: 110147 - protein, 34 aa, Artificial Sequence; identical to SEQ ID NO: 8198
  Cyclic GFR-binding peptide
  MOD_RES (4)..(5): Xaa is C or S

SEQ ID NO: 110148 - protein, 25 aa, Artificial Sequence
  Cyclic GFR-binding peptide
NAISILYFDENKNVVLKKYRNMTVE

SEQ ID NO: 110149 - protein, 25 aa, Artificial Sequence
  Cyclic GFR-binding peptide
PTKLSAISVLYLDSSNNVILKNYQN

SEQ ID NO: 110150 - protein, 37 aa, Artificial Sequence; identical to SEQ ID NO: 36787
  Cyclic GFR-binding peptide
  MOD_RES (6)..(7): Xaa is C or S

SEQ ID NO: 110151 - protein, 36 aa, Artificial Sequence; identical to SEQ ID NO: 8205
  Cyclic GFR-binding peptide
  MOD_RES (5)..(6): Xaa is C or S

SEQ ID NO: 110152 - protein, 38 aa, Artificial Sequence; identical to SEQ ID NO: 8206
  Cyclic GFR-binding peptide
  MOD_RES (6)..(7): Xaa is C or S

SEQ ID NO: 110153 - protein, 28 aa, Artificial Sequence
  Cyclic GFR-binding peptide
  MOD_RES (26)..(28): Xaa is C or S
SAISILYLVGRKPKVLKNYQMIVRSXKX

SEQ ID NO: 110154 - protein, 31 aa, Artificial Sequence; identical to SEQ ID NO: 36795
  Cyclic GFR-binding peptide

SEQ ID NO: 110155 - protein, 25 aa, Artificial Sequence
  Cyclic GFR-binding peptide
KLNAISILYFDKGVVTYLKKYRGMA

SEQ ID NO: 110156 - protein, 35 aa, Artificial Sequence; identical to SEQ ID NO: 8212
  Cyclic GFR-binding peptide
  MOD_RES (5)..(6): Xaa is C or S

SEQ ID NO: 110157 - protein, 31 aa, Artificial Sequence
  Cyclic GFR-binding peptide
  MOD_RES (30)..(30): Xaa is C or S
ARLSAISILYLDAANNVVLKNYQDMVVEAXG

SEQ ID NO: 110158 - protein, 31 aa, Artificial Sequence; identical to SEQ ID NO: 18519
  Cyclic GFR-binding peptide
  MOD_RES (4)..(5): Xaa is C or S

SEQ ID NO: 110159 - protein, 39 aa, Artificial Sequence; identical to SEQ ID NO: 8216
  Cyclic GFR-binding peptide
  MOD_RES (5)..(6)..(37)..(39): Xaa is C or S

SEQ ID NO: 110160 - protein, 30 aa, Artificial Sequence; identical to SEQ ID NO: 8219
  Cyclic GFR-binding peptide
  MOD_RES (4)..(5): Xaa is C or S

SEQ ID NO: 110161 - protein, 22 aa, Artificial Sequence
  Cyclic GFR-binding peptide
ALNAISILYFVGRKPKVLKKYR

SEQ ID NO: 110162 - protein, 31 aa, Artificial Sequence
  Cyclic GFR-binding peptide
  MOD_RES (3)..(4): Xaa is C or S
STXXAPVKTSAISMLYLDNGRVLLLKNYQMI

SEQ ID NO: 110163 - protein, 27 aa, Artificial Sequence
  Cyclic GFR-binding peptide
  MOD_RES (27)..(27): Xaa is C or S
SAISILYLDENKNVVLKNYQNMTVESX

SEQ ID NO: 110164 - protein, 34 aa, Artificial Sequence; identical to SEQ ID NO: 77717
  Cyclic GFR-binding peptide
  MOD_RES (32)..(34): Xaa is C or S

SEQ ID NO: 110165 - protein, 37 aa, Artificial Sequence; identical to SEQ ID NO: 36815
  Cyclic GFR-binding peptide
  MOD_RES (5)..(6): Xaa is C or S

SEQ ID NO: 110166 - protein, 21 aa, Artificial Sequence
  Cyclic GFR-binding peptide
SAISILYLVGRTPKVLKNYQM

SEQ ID NO: 110167 - protein, 28 aa, Artificial Sequence
  Cyclic GFR-binding peptide
KMSAISILYLDENKNVVLKNYQNMTVES

SEQ ID NO: 110168 - protein, 30 aa, Artificial Sequence; identical to SEQ ID NO: 36817
  Cyclic GFR-binding peptide
  MOD_RES (29)..(29): Xaa is C or S

SEQ ID NO: 110169 - protein, 37 aa, Artificial Sequence; identical to SEQ ID NO: 8225
  Cyclic GFR-binding peptide
  MOD_RES (6)..(7): Xaa is C or S

SEQ ID NO: 110170 - protein, 32 aa, Artificial Sequence; identical to SEQ ID NO: 77721
  Cyclic GFR-binding peptide
  MOD_RES (3)..(4): Xaa is C or S

SEQ ID NO: 110171 - protein, 24 aa, Artificial Sequence
  Cyclic GFR-binding peptide
TRLSAISILYLDSANNVVLKNYQD

SEQ ID NO: 110172 - protein, 35 aa, Artificial Sequence; identical to SEQ ID NO: 8226
  Cyclic GFR-binding peptide
  MOD_RES (32)..(34): Xaa is C or S

SEQ ID NO: 110173 - protein, 30 aa, Artificial Sequence; identical to SEQ ID NO: 36821
  Cyclic GFR-binding peptide
  MOD_RES (3)..(4): Xaa is C or S

SEQ ID NO: 110174 - protein, 25 aa, Artificial Sequence
  Cyclic GFR-binding peptide
VPEKMSAISILYLDENKNVVLKNYQ

SEQ ID NO: 110175 - protein, 28 aa, Artificial Sequence
  Cyclic GFR-binding peptide
  MOD_RES (28)..(28): Xaa is C or S
DLSAISILYLIGKTPKILKNYQMIVKSX

SEQ ID NO: 110176 - protein, 31 aa, Artificial Sequence; identical to SEQ ID NO: 8232
  Cyclic GFR-binding peptide
  MOD_RES (1)..(2): Xaa is C or S

SEQ ID NO: 110177 - protein, 38 aa, Artificial Sequence; identical to SEQ ID NO: 8233
  Cyclic GFR-binding peptide
  MOD_RES (4)..(5)..(37): Xaa is C or S

SEQ ID NO: 110178 - protein, 32 aa, Artificial Sequence; identical to SEQ ID NO: 8234
  Cyclic GFR-binding peptide
  MOD_RES (2)..(3): Xaa is C or S

SEQ ID NO: 110179 - protein, 31 aa, Artificial Sequence; identical to SEQ ID NO: 8235
  Cyclic GFR-binding peptide
  MOD_RES (1)..(2): Xaa is C or S

SEQ ID NO: 110180 - protein, 31 aa, Artificial Sequence; identical to SEQ ID NO: 8236
  Cyclic GFR-binding peptide
  MOD_RES (30)..(30): Xaa is C or S

SEQ ID NO: 110181 - protein, 33 aa, Artificial Sequence; identical to SEQ ID NO: 8238
  Cyclic GFR-binding peptide
  MOD_RES (2)..(3): Xaa is C or S

SEQ ID NO: 110182 - protein, 29 aa, Artificial Sequence
  Cyclic GFR-binding peptide
VPTKLSAISVLYLDDMGVPTLKNYQEGMS

SEQ ID NO: 110183 - protein, 27 aa, Artificial Sequence
  Cyclic GFR-binding peptide
  MOD_RES (1)..(2): Xaa is C or S
XXVPTRLSAISILYLDSANNVVLKNYQ

SEQ ID NO: 110184 - protein, 23 aa, Artificial Sequence
  Cyclic GFR-binding peptide
LNAISVLYFDDMGVPTLKKYREG

SEQ ID NO: 110185 - protein, 39 aa, Artificial Sequence
  Cyclic GFR-binding peptide
  MOD_RES (3)..(4)..(36)..(38): Xaa is C or S
ASXXVPARLSAISILYLDAANNVVLKNYQDMVVEAXGXR

SEQ ID NO: 110186 - protein, 31 aa, Artificial Sequence; identical to SEQ ID NO: 8247
  Cyclic GFR-binding peptide
  MOD_RES (31)..(31): Xaa is C or S

SEQ ID NO: 110187 - protein, 35 aa, Artificial Sequence; identical to SEQ ID NO: 8251
  Cyclic GFR-binding peptide
  MOD_RES (3)..(4): Xaa is C or S

SEQ ID NO: 110188 - protein, 29 aa, Artificial Sequence
  Cyclic GFR-binding peptide
  MOD_RES (1)..(1): Xaa is C or S
XTPTKMSAISMLYLNDKQQIILKNYQGMV

SEQ ID NO: 110189 - protein, 34 aa, Artificial Sequence; identical to SEQ ID NO: 8253
  Cyclic GFR-binding peptide
  MOD_RES (1)..(34): Xaa is C or S

SEQ ID NO: 110190 - protein, 26 aa, Artificial Sequence
  Cyclic GFR-binding peptide
PTKLNAISVLYFDSSNNVILKKYRNM

SEQ ID NO: 110191 - protein, 29 aa, Artificial Sequence
  Cyclic GFR-binding peptide
  MOD_RES (27)..(29): Xaa is C or S
SAISILYLDSANNVVLKNYQDMVVESXGX

SEQ ID NO: 110192 - protein, 22 aa, Artificial Sequence
  Cyclic GFR-binding peptide
LSAISILYLDKGVVTYLKNYQG

SEQ ID NO: 110193 - protein, 28 aa, Artificial Sequence
  Cyclic GFR-binding peptide
TPTKMSAISMLYLNDKQQIILKNYQGMV

SEQ ID NO: 110194 - protein, 29 aa, Artificial Sequence
  Cyclic GFR-binding peptide
  MOD_RES (1)..(2): Xaa is C or S
XXVPARLSAISILYLDAANNVVLKNYQDM

SEQ ID NO: 110195 - protein, 30 aa, Artificial Sequence; identical to SEQ ID NO: 18551
  Cyclic GFR-binding peptide
  MOD_RES (28)..(30): Xaa is C or S

SEQ ID NO: 110196 - protein, 28 aa, Artificial Sequence
  Cyclic GFR-binding peptide
TRLNAISILYFDSANNVVLKKYRDMVVE

SEQ ID NO: 110197 - protein, 34 aa, Artificial Sequence; identical to SEQ ID NO: 8264
  Cyclic GFR-binding peptide
  MOD_RES (6)..(7): Xaa is C or S

SEQ ID NO: 110198 - protein, 21 aa, Artificial Sequence
  Cyclic GFR-binding peptide
NAISILYFDKGVVTYLKKYRG

SEQ ID NO: 110199 - protein, 30 aa, Artificial Sequence; identical to SEQ ID NO: 8266
  Cyclic GFR-binding peptide
  MOD_RES (3)..(4): Xaa is C or S

SEQ ID NO: 110200 - protein, 33 aa, Artificial Sequence; identical to SEQ ID NO: 8267
  Cyclic GFR-binding peptide
  MOD_RES (1)..(33): Xaa is C or S

SEQ ID NO: 110201 - protein, 31 aa, Artificial Sequence; identical to SEQ ID NO: 8268
  Cyclic GFR-binding peptide

SEQ ID NO: 110202 - protein, 26 aa, Artificial Sequence
  Cyclic GFR-binding peptide
KLSAISVLYLDDMGVPTLKNYQEGMS

SEQ ID NO: 110203 - protein, 31 aa, Artificial Sequence; identical to SEQ ID NO: 8272
  Cyclic GFR-binding peptide
  MOD_RES (1)..(2): Xaa is C or S

SEQ ID NO: 110204 - protein, 27 aa, Artificial Sequence
  Cyclic GFR-binding peptide
  MOD_RES (1)..(2): Xaa is C or S
XXVPQDLSAISILYLVGRTPKVLKNYQ

SEQ ID NO: 110205 - protein, 36 aa, Artificial Sequence
  Cyclic GFR-binding peptide
  MOD_RES (5)..(6): Xaa is C or S
SAGPXXTPTKMSAISMLYLNDKQQIILKNYQGMVVD

SEQ ID NO: 110206 - protein, 31 aa, Artificial Sequence
  Cyclic GFR-binding peptide
VPEKMSAISILYLDENKNVVLKNYQNMTVES

SEQ ID NO: 110207 - protein, 31 aa, Artificial Sequence
  Cyclic GFR-binding peptide
  MOD_RES (31)..(31): Xaa is C or S
PEKMSAISILYLDENKNVVLKNYQNMTVESX

SEQ ID NO: 110208 - protein, 35 aa, Artificial Sequence; identical to SEQ ID NO: 95231
  Cyclic GFR-binding peptide
  MOD_RES (5)..(6): Xaa is C or S

SEQ ID NO: 110209 - protein, 25 aa, Artificial Sequence
  Cyclic GFR-binding peptide
SQDLNAISILYFIGKTPKILKKYRM

SEQ ID NO: 110210 - protein, 30 aa, Artificial Sequence; identical to SEQ ID NO: 36869
  Cyclic GFR-binding peptide
  MOD_RES (4)..(5): Xaa is C or S

SEQ ID NO: 110211 - protein, 34 aa, Artificial Sequence; identical to SEQ ID NO: 8279
  Cyclic GFR-binding peptide
  MOD_RES (7)..(7): Xaa is C or S

SEQ ID NO: 110212 - protein, 27 aa, Artificial Sequence
  Cyclic GFR-binding peptide
  MOD_RES (27)..(27): Xaa is C or S
TSAISMLYLDNGRVLLLKNYQMIVEEX

SEQ ID NO: 110213 - protein, 39 aa, Artificial Sequence
  Cyclic GFR-binding peptide
  MOD_RES (6)..(7)..(39): Xaa is C or S
AAPASXXVPARLSAISILYLDAANNVVLKNYQDMVVEAX

SEQ ID NO: 110214 - protein, 32 aa, Artificial Sequence
  Cyclic GFR-binding peptide
  MOD_RES (4)..(5): Xaa is C or S
PSTXXAPVKTSAISMLYLDNGRVLLLKNYQMI

SEQ ID NO: 110215 - protein, 23 aa, Artificial Sequence
  Cyclic GFR-binding peptide
TKLNAISILYFDKGVVTYLKKYR

SEQ ID NO: 110216 - protein, 32 aa, Artificial Sequence; identical to SEQ ID NO: 36874
  Cyclic GFR-binding peptide
  MOD_RES (31)..(31): Xaa is C or S

SEQ ID NO: 110217 - protein, 22 aa, Artificial Sequence
  Cyclic GFR-binding peptide
SAISVLYLDSSNNVILKNYQNM

SEQ ID NO: 110218 - protein, 30 aa, Artificial Sequence; identical to SEQ ID NO: 95241
  Cyclic GFR-binding peptide
  MOD_RES (29)..(29): Xaa is C or S

SEQ ID NO: 110219 - protein, 36 aa, Artificial Sequence
  Cyclic GFR-binding peptide
  MOD_RES (6)..(7): Xaa is C or S
RVPSTXXAPVKTSAISMLYLDNGRVLLLKNYQMIVE

SEQ ID NO: 110220 - protein, 29 aa, Artificial Sequence
  Cyclic GFR-binding peptide
PTKLSAISVLYLDDSSNVILKNYQNMVVR

SEQ ID NO: 110221 - protein, 34 aa, Artificial Sequence; identical to SEQ ID NO: 18579
  Cyclic GFR-binding peptide
  MOD_RES (32)..(34): Xaa is C or S

SEQ ID NO: 110222 - protein, 23 aa, Artificial Sequence
  Cyclic GFR-binding peptide
LSAISVLYLDSSNNVILKNYQNM

SEQ ID NO: 110223 - protein, 38 aa, Artificial Sequence; identical to SEQ ID NO: 8291
  Cyclic GFR-binding peptide
  MOD_RES (2)..(3)..(35)..(37): Xaa is C or S

SEQ ID NO: 110224 - protein, 24 aa, Artificial Sequence
  Cyclic GFR-binding peptide
QDLNAISILYFVGRTPKVLKKYRM

SEQ ID NO: 110225 - protein, 23 aa, Artificial Sequence
  Cyclic GFR-binding peptide
DLSAISILYLVGRTPKVLKNYQM

SEQ ID NO: 110226 - protein, 22 aa, Artificial Sequence
  Cyclic GFR-binding peptide
KMNAISILYFDENKNVVLKKYR

SEQ ID NO: 110227 - protein, 24 aa, Artificial Sequence
  Cyclic GFR-binding peptide
KLNAISILYFDKGVVTYLKKYRGM

SEQ ID NO: 110228 - protein, 29 aa, Artificial Sequence
  Cyclic GFR-binding peptide
  MOD_RES (2)..(3): Xaa is C or S
AXXVPTELNAISMLYFDENEKVVLKKYRD

SEQ ID NO: 110229 - protein, 30 aa, Artificial Sequence; identical to SEQ ID NO: 8296
  Cyclic GFR-binding peptide
  MOD_RES (28)..(30): Xaa is C or S

SEQ ID NO: 110230 - protein, 30 aa, Artificial Sequence; identical to SEQ ID NO: 77758
  Cyclic GFR-binding peptide
  MOD_RES (3)..(4): Xaa is C or S

SEQ ID NO: 110231 - protein, 39 aa, Artificial Sequence; identical to SEQ ID NO: 8298
  Cyclic GFR-binding peptide
  MOD_RES (6)..(7)..(39): Xaa is C or S

SEQ ID NO: 110232 - protein, 25 aa, Artificial Sequence
  Cyclic GFR-binding peptide
SAISILYLVGRTPKVLKNYQMVVKS

SEQ ID NO: 110233 - protein, 35 aa, Artificial Sequence; identical to SEQ ID NO: 8300
  Cyclic GFR-binding peptide
  MOD_RES (2)..(3)..(34): Xaa is C or S

SEQ ID NO: 110234 - protein, 32 aa, Artificial Sequence
  Cyclic GFR-binding peptide
  MOD_RES (32)..(32): Xaa is C or S
VPTKLSAISILYLDKGVVTYLKNYQGMAVSEX

SEQ ID NO: 110235 - protein, 31 aa, Artificial Sequence; identical to SEQ ID NO: 8301
  Cyclic GFR-binding peptide

SEQ ID NO: 110236 - protein, 35 aa, Artificial Sequence; identical to SEQ ID NO: 8304
  Cyclic GFR-binding peptide
  MOD_RES (4)..(5): Xaa is C or S

SEQ ID NO: 110237 - protein, 36 aa, Artificial Sequence; identical to SEQ ID NO: 77763
  Cyclic GFR-binding peptide
  MOD_RES (3)..(4)..(35): Xaa is C or S

SEQ ID NO: 110238 - protein, 31 aa, Artificial Sequence; identical to SEQ ID NO: 8307
  Cyclic GFR-binding peptide
  MOD_RES (2)..(3): Xaa is C or S

SEQ ID NO: 110239 - protein, 30 aa, Artificial Sequence; identical to SEQ ID NO: 8309
  Cyclic GFR-binding peptide
  MOD_RES (28)..(30): Xaa is C or S

SEQ ID NO: 110240 - protein, 32 aa, Artificial Sequence; identical to SEQ ID NO: 8311
  Cyclic GFR-binding peptide
  MOD_RES (4)..(5): Xaa is C or S

SEQ ID NO: 110241 - protein, 27 aa, Artificial Sequence
  Cyclic GFR-binding peptide
QALNAISILYFVGRKPKVLKKYRMIVR

SEQ ID NO: 110242 - protein, 28 aa, Artificial Sequence
  Cyclic GFR-binding peptide
PTKLNAISVLYFDSSNNVILKKYRNMVV

SEQ ID NO: 110243 - protein, 32 aa, Artificial Sequence; identical to SEQ ID NO: 8316
  Cyclic GFR-binding peptide
  MOD_RES (32)..(32): Xaa is C or S

SEQ ID NO: 110244 - protein, 28 aa, Artificial Sequence
  Cyclic GFR-binding peptide
  MOD_RES (1)..(1): Xaa is C or S
XVPTRLSAISILYLDSANNVVLKNYQDM

SEQ ID NO: 110245 - protein, 26 aa, Artificial Sequence
  Cyclic GFR-binding peptide
VPTKLSAISILYLDKGVVTYLKNYQG

SEQ ID NO: 110246 - protein, 30 aa, Artificial Sequence; identical to SEQ ID NO: 8318
  Cyclic GFR-binding peptide
  MOD_RES (28)..(30): Xaa is C or S

SEQ ID NO: 110247 - protein, 34 aa, Artificial Sequence
  Cyclic GFR-binding peptide
  MOD_RES (3)..(4): Xaa is C or S
GPXXTPTKMSAISMLYLNDKQQIILKNYQGMVVD

SEQ ID NO: 110248 - protein, 27 aa, Artificial Sequence
  Cyclic GFR-binding peptide
KTSAISMLYLDNGRVLLLKNYQMIVEE

SEQ ID NO: 110249 - protein, 29 aa, Artificial Sequence
  Cyclic GFR-binding peptide
  MOD_RES (1)..(2): Xaa is C or S
XXVPEKMSAISILYLDENKNVVLKNYQNM

SEQ ID NO: 110250 - protein, 31 aa, Artificial Sequence; identical to SEQ ID NO: 8322
  Cyclic GFR-binding peptide
  MOD_RES (3)..(4): Xaa is C or S

SEQ ID NO: 110251 - protein, 35 aa, Artificial Sequence; identical to SEQ ID NO: 8323
  Cyclic GFR-binding peptide
  MOD_RES (5)..(6): Xaa is C or S

SEQ ID NO: 110252 - protein, 35 aa, Artificial Sequence; identical to SEQ ID NO: 8325
  Cyclic GFR-binding peptide
  MOD_RES (3)..(4): Xaa is C or S

SEQ ID NO: 110253 - protein, 25 aa, Artificial Sequence
  Cyclic GFR-binding peptide
PQDLNAISILYFVGRTPKVLKKYRM

SEQ ID NO: 110254 - protein, 25 aa, Artificial Sequence
  Cyclic GFR-binding peptide
TPTKMSAISMLYLNDKQQIILKNYQ

SEQ ID NO: 110255 - protein, 29 aa, Artificial Sequence
  Cyclic GFR-binding peptide
  MOD_RES (29)..(29): Xaa is C or S
QDLNAISILYFIGKTPKILKKYRMIVKSX

SEQ ID NO: 110256 - protein, 35 aa, Artificial Sequence
  Cyclic GFR-binding peptide
  MOD_RES (1)..(2)..(34): Xaa is C or S
XXTPTKMSAISMLYLNDKQQIILKNYQGMVVDRXG

SEQ ID NO: 110257 - protein, 34 aa, Artificial Sequence; identical to SEQ ID NO: 8330
  Cyclic GFR-binding peptide
  MOD_RES (31)..(33): Xaa is C or S

SEQ ID NO: 110258 - protein, 36 aa, Artificial Sequence
  Cyclic GFR-binding peptide
  MOD_RES (5)..(6): Xaa is C or S
APASXXVPARLSAISILYLDAANNVVLKNYQDMVVE

SEQ ID NO: 110259 - protein, 31 aa, Artificial Sequence; identical to SEQ ID NO: 8331
  Cyclic GFR-binding peptide
  MOD_RES (28)..(30): Xaa is C or S

SEQ ID NO: 110260 - protein, 24 aa, Artificial Sequence
  Cyclic GFR-binding peptide
PTKMNAISMLYFNDKQQIILKKYR

SEQ ID NO: 110261 - protein, 30 aa, Artificial Sequence; identical to SEQ ID NO: 8335
  Cyclic GFR-binding peptide
  MOD_RES (2)..(3): Xaa is C or S

SEQ ID NO: 110262 - protein, 39 aa, Artificial Sequence; identical to SEQ ID NO: 8336
  Cyclic GFR-binding peptide
  MOD_RES (6)..(38): Xaa is C or S

SEQ ID NO: 110263 - protein, 34 aa, Artificial Sequence; identical to SEQ ID NO: 18639
  Cyclic GFR-binding peptide
  MOD_RES (31)..(33): Xaa is C or S

SEQ ID NO: 110264 - protein, 27 aa, Artificial Sequence
  Cyclic GFR-binding peptide
  MOD_RES (1)..(1): Xaa is C or S
XVPARLNAISILYFDAANNVVLKKYRD

SEQ ID NO: 110265 - protein, 31 aa, Artificial Sequence; identical to SEQ ID NO: 77779
  Cyclic GFR-binding peptide
  MOD_RES (28)..(30): Xaa is C or S

SEQ ID NO: 110266 - protein, 33 aa, Artificial Sequence; identical to SEQ ID NO: 90302
  Cyclic GFR-binding peptide
  MOD_RES (5)..(6): Xaa is C or S

SEQ ID NO: 110267 - protein, 24 aa, Artificial Sequence
  Cyclic GFR-binding peptide
LSAISILYLDKGVVTYLKNYQGMA

SEQ ID NO: 110268 - protein, 34 aa, Artificial Sequence; identical to SEQ ID NO: 18640
  Cyclic GFR-binding peptide
  MOD_RES (4)..(5): Xaa is C or S

SEQ ID NO: 110269 - protein, 40 aa, Artificial Sequence; identical to SEQ ID NO: 8347
  Cyclic GFR-binding peptide
  MOD_RES (6)..(7)..(39): Xaa is C or S

SEQ ID NO: 110270 - protein, 37 aa, Artificial Sequence
  Cyclic GFR-binding peptide
  MOD_RES (5)..(6): Xaa is C or S
APASXXVPARLSAISILYLDAANNVVLKNYQDMVVEA

SEQ ID NO: 110271 - protein, 26 aa, Artificial Sequence
  Cyclic GFR-binding peptide
LSAISILYLDAANNVVLKNYQDMVVE

SEQ ID NO: 110272 - protein, 28 aa, Artificial Sequence
  Cyclic GFR-binding peptide
EKMNAISILYFDENKNVVLKKYRNMTVE

SEQ ID NO: 110273 - protein, 34 aa, Artificial Sequence; identical to SEQ ID NO: 8348
  Cyclic GFR-binding peptide
  MOD_RES (1)..(2)..(33): Xaa is C or S

SEQ ID NO: 110274 - protein, 21 aa, Artificial Sequence
  Cyclic GFR-binding peptide
SAISMLYLDNGRVLLLKNYQM

SEQ ID NO: 110275 - protein, 29 aa, Artificial Sequence
  Cyclic GFR-binding peptide
  MOD_RES (3)..(4): Xaa is C or S
KAXXVPTKLSAISVLYLDDMGVPTLKNYQ

SEQ ID NO: 110276 - protein, 28 aa, Artificial Sequence
  Cyclic GFR-binding peptide
QDLSAISILYLIGKTPKILKNYQMIVKS

SEQ ID NO: 110277 - protein, 34 aa, Artificial Sequence; identical to SEQ ID NO: 8353
  Cyclic GFR-binding peptide
  MOD_RES (5)..(6): Xaa is C or S

SEQ ID NO: 110278 - protein, 38 aa, Artificial Sequence
  Cyclic GFR-binding peptide
  MOD_RES (4)..(5)..(37): Xaa is C or S
PASXXVPARLSAISILYLDAANNVVLKNYQDMVVEAXG

SEQ ID NO: 110279 - protein, 33 aa, Artificial Sequence; identical to SEQ ID NO: 8355
  Cyclic GFR-binding peptide
  MOD_RES (30)..(32): Xaa is C or S

SEQ ID NO: 110280 - protein, 35 aa, Artificial Sequence; identical to SEQ ID NO: 95313
  Cyclic GFR-binding peptide
  MOD_RES (1)..(33)..(35): Xaa is C or S

SEQ ID NO: 110281 - protein, 30 aa, Artificial Sequence
  Cyclic GFR-binding peptide
  MOD_RES (1)..(1): Xaa is C or S
XVPTKLSAISILYLDKGVVTYLKNYQGMAV

SEQ ID NO: 110282 - protein, 27 aa, Artificial Sequence
  Cyclic GFR-binding peptide
ARLNAISILYFDAANNVVLKKYRDMVV

SEQ ID NO: 110283 - protein, 31 aa, Artificial Sequence
  Cyclic GFR-binding peptide
  MOD_RES (3)..(4): Xaa is C or S
EPXXVPEKMSAISILYLDENKNVVLKNYQNM

SEQ ID NO: 110284 - protein, 33 aa, Artificial Sequence; identical to SEQ ID NO: 8362
  Cyclic GFR-binding peptide
  MOD_RES (7)..(7): Xaa is C or S

SEQ ID NO: 110285 - protein, 25 aa, Artificial Sequence
  Cyclic GFR-binding peptide
TKLSAISVLYLDDSSNVILKNYQNM

SEQ ID NO: 110286 - protein, 36 aa, Artificial Sequence; identical to SEQ ID NO: 8366
  Cyclic GFR-binding peptide
  MOD_RES (2)..(3)..(34)..(36): Xaa is C or S

SEQ ID NO: 110287 - protein, 27 aa, Artificial Sequence
  Cyclic GFR-binding peptide
LSAISVLYLDDMGVPTLKNYQEGMSVA

SEQ ID NO: 110288 - protein, 22 aa, Artificial Sequence
  Cyclic GFR-binding peptide
KLNAISILYFDKGVVTYLKKYR

SEQ ID NO: 110289 - protein, 33 aa, Artificial Sequence
  Cyclic GFR-binding peptide
  MOD_RES (31)..(33): Xaa is C or S
PTKMSAISMLYLNDKQQIILKNYQGMVVDRXGX

SEQ ID NO: 110290 - protein, 28 aa, Artificial Sequence
  Cyclic GFR-binding peptide
  MOD_RES (1)..(1): Xaa is C or S
XVPTRLNAISILYFDSANNVVLKKYRDM

SEQ ID NO: 110291 - protein, 26 aa, Artificial Sequence
  Cyclic GFR-binding peptide
PEKMSAISILYLDENKNVVLKNYQNM

SEQ ID NO: 110292 - protein, 36 aa, Artificial Sequence; identical to SEQ ID NO: 8374
  Cyclic GFR-binding peptide
  MOD_RES (6)..(7): Xaa is C or S

SEQ ID NO: 110293 - protein, 30 aa, Artificial Sequence; identical to SEQ ID NO: 8375
  Cyclic GFR-binding peptide
  MOD_RES (2)..(3): Xaa is C or S

SEQ ID NO: 110294 - protein, 25 aa, Artificial Sequence
  Cyclic GFR-binding peptide
VPQDLSAISILYLVGRTPKVLKNYQ

SEQ ID NO: 110295 - protein, 26 aa, Artificial Sequence
  Cyclic GFR-binding peptide
NAISILYFDENKNVVLKKYRNMTVES

SEQ ID NO: 110296 - protein, 39 aa, Artificial Sequence; identical to SEQ ID NO: 18675
  Cyclic GFR-binding peptide
  MOD_RES (4)..(5)..(37)..(39): Xaa is C or S

SEQ ID NO: 110297 - protein, 37 aa, Artificial Sequence
  Cyclic GFR-binding peptide
  MOD_RES (2)..(3)..(35)..(37): Xaa is C or S
PXXTPTKMSAISMLYLNDKQQIILKNYQGMVVDRXGX

SEQ ID NO: 110298 - protein, 31 aa, Artificial Sequence; identical to SEQ ID NO: 8381
  Cyclic GFR-binding peptide
  MOD_RES (2)..(3): Xaa is C or S

SEQ ID NO: 110299 - protein, 32 aa, Artificial Sequence
  Cyclic GFR-binding peptide
  MOD_RES (4)..(5): Xaa is C or S
PEPXXVPEKMSAISILYLDENKNVVLKNYQNM

SEQ ID NO: 110300 - protein, 32 aa, Artificial Sequence; identical to SEQ ID NO: 8382
  Cyclic GFR-binding peptide
  MOD_RES (6)..(7): Xaa is C or S

SEQ ID NO: 110301 - protein, 38 aa, Artificial Sequence; identical to SEQ ID NO: 8383
  Cyclic GFR-binding peptide
  MOD_RES (3)..(4)..(36)..(38): Xaa is C or S

SEQ ID NO: 110302 - protein, 25 aa, Artificial Sequence
  Cyclic GFR-binding peptide
VPQALNAISILYFVGRKPKVLKKYR

SEQ ID NO: 110303 - protein, 37 aa, Artificial Sequence
  Cyclic GFR-binding peptide
  MOD_RES (4)..(5)..(37): Xaa is C or S
PEPXXVPEKMSAISILYLDENKNVVLKNYQNMTVESX

SEQ ID NO: 110304 - protein, 31 aa, Artificial Sequence; identical to SEQ ID NO: 77793
  Cyclic GFR-binding peptide
  MOD_RES (30)..(30): Xaa is C or S

SEQ ID NO: 110305 - protein, 31 aa, Artificial Sequence; identical to SEQ ID NO: 8389
  Cyclic GFR-binding peptide
  MOD_RES (4)..(5): Xaa is C or S

SEQ ID NO: 110306 - protein, 31 aa, Artificial Sequence; identical to SEQ ID NO: 95346
  Cyclic GFR-binding peptide

SEQ ID NO: 110307 - protein, 41 aa, Artificial Sequence
  Cyclic GFR-binding peptide
  MOD_RES (6)..(7)..(39)..(41): Xaa is C or S
GIPEPXXVPEKMSAISILYLDENKNVVLKNYQNMTVESXAX

SEQ ID NO: 110308 - protein, 26 aa, Artificial Sequence
  Cyclic GFR-binding peptide
NAISMLYFDEYDKVVLKKYREMVVEG

SEQ ID NO: 110309 - protein, 22 aa, Artificial Sequence
  Cyclic GFR-binding peptide
TSAISMLYLDNGRVLLLKNYQM

SEQ ID NO: 110310 - protein, 29 aa, Artificial Sequence
  Cyclic GFR-binding peptide
APTKLNAISVLYFDSSNNVILKKYRNMVV

SEQ ID NO: 110311 - protein, 27 aa, Artificial Sequence
  Cyclic GFR-binding peptide
EKMSAISILYLDENKNVVLKNYQNMTV

SEQ ID NO: 110312 - protein, 31 aa, Artificial Sequence
  Cyclic GFR-binding peptide
  MOD_RES (4)..(5): Xaa is C or S
AGPXXTPTKMSAISMLYLNDKQQIILKNYQG

SEQ ID NO: 110313 - protein, 25 aa, Artificial Sequence
  Cyclic GFR-binding peptide
VSQDLNAISILYFIGKTPKILKKYR

SEQ ID NO: 110314 - protein, 31 aa, Artificial Sequence; identical to SEQ ID NO: 8398
  Cyclic GFR-binding peptide
  MOD_RES (5)..(6): Xaa is C or S

SEQ ID NO: 110315 - protein, 28 aa, Artificial Sequence
  Cyclic GFR-binding peptide
  MOD_RES (1)..(1): Xaa is C or S
XVPARLSAISILYLDAANNVVLKNYQDM

SEQ ID NO: 110316 - protein, 30 aa, Artificial Sequence; identical to SEQ ID NO: 8401
  Cyclic GFR-binding peptide
  MOD_RES (29)..(29): Xaa is C or S

SEQ ID NO: 110317 - protein, 37 aa, Artificial Sequence; identical to SEQ ID NO: 8402
  Cyclic GFR-binding peptide
  MOD_RES (3)..(4)..(37): Xaa is C or S

SEQ ID NO: 110318 - protein, 35 aa, Artificial Sequence; identical to SEQ ID NO: 18693
  Cyclic GFR-binding peptide
  MOD_RES (3)..(4): Xaa is C or S

SEQ ID NO: 110319 - protein, 36 aa, Artificial Sequence; identical to SEQ ID NO: 95367
  Cyclic GFR-binding peptide
  MOD_RES (2)..(3)..(35): Xaa is C or S

SEQ ID NO: 110320 - protein, 24 aa, Artificial Sequence
  Cyclic GFR-binding peptide
VKTNAISMLYFDNGRVLLLKKYRM

SEQ ID NO: 110321 - protein, 23 aa, Artificial Sequence
  Cyclic GFR-binding peptide
NAISILYFDKGVVTYLKKYRGMA

SEQ ID NO: 110322 - protein, 32 aa, Artificial Sequence
  Cyclic GFR-binding peptide
  MOD_RES (1)..(2): Xaa is C or S
XXVPTKLSAISILYLDKGVVTYLKNYQGMAVS

SEQ ID NO: 110323 - protein, 36 aa, Artificial Sequence; identical to SEQ ID NO: 8409
  Cyclic GFR-binding peptide
  MOD_RES (5)..(6): Xaa is C or S

SEQ ID NO: 110324 - protein, 28 aa, Artificial Sequence
  Cyclic GFR-binding peptide
  MOD_RES (1)..(1): Xaa is C or S
XVPTELNAISMLYFDEYDKVVLKKYREM

SEQ ID NO: 110325 - protein, 39 aa, Artificial Sequence; identical to SEQ ID NO: 8412
  Cyclic GFR-binding peptide
  MOD_RES (4)..(5)..(37)..(39): Xaa is C or S

SEQ ID NO: 110326 - protein, 30 aa, Artificial Sequence; identical to SEQ ID NO: 90364
  Cyclic GFR-binding peptide
  MOD_RES (28)..(30): Xaa is C or S

SEQ ID NO: 110327 - protein, 31 aa, Artificial Sequence
  Cyclic GFR-binding peptide
VPARLSAISILYLDAANNVVLKNYQDMVVEA

SEQ ID NO: 110328 - protein, 32 aa, Artificial Sequence; identical to SEQ ID NO: 8415
  Cyclic GFR-binding peptide
  MOD_RES (3)..(4): Xaa is C or S

SEQ ID NO: 110329 - protein, 38 aa, Artificial Sequence; identical to SEQ ID NO: 8416
  Cyclic GFR-binding peptide
  MOD_RES (4)..(5)..(36)..(38): Xaa is C or S

SEQ ID NO: 110330 - protein, 30 aa, Artificial Sequence; identical to SEQ ID NO: 37045
  Cyclic GFR-binding peptide
  MOD_RES (1)..(2): Xaa is C or S

SEQ ID NO: 110331 - protein, 26 aa, Artificial Sequence
  Cyclic GFR-binding peptide
APTKLNAISVLYFDSSNNVILKKYRN

SEQ ID NO: 110332 - protein, 28 aa, Artificial Sequence
  Cyclic GFR-binding peptide
VPEKMSAISILYLDENKNVVLKNYQNMT

SEQ ID NO: 110333 - protein, 26 aa, Artificial Sequence
  Cyclic GFR-binding peptide
TKMNAISMLYFNDKQQIILKKYRGMV

SEQ ID NO: 110334 - protein, 38 aa, Artificial Sequence; identical to SEQ ID NO: 77815
  Cyclic GFR-binding peptide
  MOD_RES (4)..(5)..(36)..(38): Xaa is C or S

SEQ ID NO: 110335 - protein, 35 aa, Artificial Sequence
  Cyclic GFR-binding peptide
  MOD_RES (4)..(5): Xaa is C or S
PASXXVPARLSAISILYLDAANNVVLKNYQDMVVE

SEQ ID NO: 110336 - protein, 40 aa, Artificial Sequence; identical to SEQ ID NO: 8422
  Cyclic GFR-binding peptide
  MOD_RES (5)..(6)..(38)..(40): Xaa is C or S

SEQ ID NO: 110337 - protein, 34 aa, Artificial Sequence; identical to SEQ ID NO: 8426
  Cyclic GFR-binding peptide
  MOD_RES (32)..(34): Xaa is C or S

SEQ ID NO: 110338 - protein, 28 aa, Artificial Sequence
  Cyclic GFR-binding peptide
APTQLSAISVLYLDDSSNVILKNYQNMV

SEQ ID NO: 110339 - protein, 30 aa, Artificial Sequence; identical to SEQ ID NO: 8429
  Cyclic GFR-binding peptide
  MOD_RES (29)..(29): Xaa is C or S

SEQ ID NO: 110340 - protein, 33 aa, Artificial Sequence
  Cyclic GFR-binding peptide
  MOD_RES (6)..(7): Xaa is C or S
AAPASXXVPARLSAISILYLDAANNVVLKNYQD

SEQ ID NO: 110341 - protein, 30 aa, Artificial Sequence; identical to SEQ ID NO: 8431
  Cyclic GFR-binding peptide
  MOD_RES (1)..(1): Xaa is C or S

SEQ ID NO: 110342 - protein, 36 aa, Artificial Sequence; identical to SEQ ID NO: 8432
  Cyclic GFR-binding peptide
  MOD_RES (2)..(3)..(35): Xaa is C or S

SEQ ID NO: 110343 - protein, 27 aa, Artificial Sequence
  Cyclic GFR-binding peptide
VPTKLNAISVLYFDDMGVPTLKKYREG

SEQ ID NO: 110344 - protein, 32 aa, Artificial Sequence; identical to SEQ ID NO: 37075
  Cyclic GFR-binding peptide
  MOD_RES (4)..(5): Xaa is C or S

SEQ ID NO: 110345 - protein, 37 aa, Artificial Sequence; identical to SEQ ID NO: 8434
  Cyclic GFR-binding peptide
  MOD_RES (2)..(3)..(34)..(36): Xaa is C or S

SEQ ID NO: 110346 - protein, 37 aa, Artificial Sequence; identical to SEQ ID NO: 77827
  Cyclic GFR-binding peptide
  MOD_RES (5)..(6)..(37): Xaa is C or S

SEQ ID NO: 110347 - protein, 34 aa, Artificial Sequence; identical to SEQ ID NO: 8435
  Cyclic GFR-binding peptide
  MOD_RES (4)..(5): Xaa is C or S

SEQ ID NO: 110348 - protein, 32 aa, Artificial Sequence; identical to SEQ ID NO: 37079
  Cyclic GFR-binding peptide
  MOD_RES (32)..(32): Xaa is C or S

SEQ ID NO: 110349 - protein, 23 aa, Artificial Sequence
  Cyclic GFR-binding peptide
RLSAISILYLDAANNVVLKNYQD

SEQ ID NO: 110350 - protein, 35 aa, Artificial Sequence; identical to SEQ ID NO: 8442
  Cyclic GFR-binding peptide
  MOD_RES (6)..(7): Xaa is C or S

SEQ ID NO: 110351 - protein, 32 aa, Artificial Sequence; identical to SEQ ID NO: 8445
  Cyclic GFR-binding peptide
  MOD_RES (29)..(31): Xaa is C or S

SEQ ID NO: 110352 - protein, 35 aa, Artificial Sequence; identical to SEQ ID NO: 8446
  Cyclic GFR-binding peptide
  MOD_RES (4)..(5): Xaa is C or S

SEQ ID NO: 110353 - protein, 40 aa, Artificial Sequence; identical to SEQ ID NO: 8448
  Cyclic GFR-binding peptide
  MOD_RES (5)..(6)..(39): Xaa is C or S

SEQ ID NO: 110354 - protein, 24 aa, Artificial Sequence
  Cyclic GFR-binding peptide
LSAISVLYLDDSSNVILKNYQNMV

SEQ ID NO: 110355 - protein, 30 aa, Artificial Sequence; identical to SEQ ID NO: 18736
  Cyclic GFR-binding peptide
  MOD_RES (1)..(1): Xaa is C or S

SEQ ID NO: 110356 - protein, 31 aa, Artificial Sequence; identical to SEQ ID NO: 77838
  Cyclic GFR-binding peptide
  MOD_RES (3)..(4): Xaa is C or S

SEQ ID NO: 110357 - protein, 34 aa, Artificial Sequence
  Cyclic GFR-binding peptide
  MOD_RES (3)..(4): Xaa is C or S
KAXXVPTKLSAISILYLDKGVVTYLKNYQGMAVS

SEQ ID NO: 110358 - protein, 30 aa, Artificial Sequence
  Cyclic GFR-binding peptide
  MOD_RES (2)..(3): Xaa is C or S
TXXAPVKTSAISMLYLDNGRVLLLKNYQMI

SEQ ID NO: 110359 - protein, 32 aa, Artificial Sequence; identical to SEQ ID NO: 37106
  Cyclic GFR-binding peptide
  MOD_RES (3)..(4): Xaa is C or S

SEQ ID NO: 110360 - protein, 37 aa, Artificial Sequence; identical to SEQ ID NO: 8454
  Cyclic GFR-binding peptide
  MOD_RES (2)..(34)..(36): Xaa is C or S

SEQ ID NO: 110361 - protein, 27 aa, Artificial Sequence
  Cyclic GFR-binding peptide
  MOD_RES (26)..(26): Xaa is C or S
SAISILYLVGRTPKVLKNYQMVVKSXK

SEQ ID NO: 110362 - protein, 41 aa, Artificial Sequence
  Cyclic GFR-binding peptide
  MOD_RES (5)..(6)..(38)..(40): Xaa is C or S
IPEPXXVPEKMSAISILYLDENKNVVLKNYQNMTVESXAXR

SEQ ID NO: 110363 - protein, 25 aa, Artificial Sequence
  Cyclic GFR-binding peptide
MNAISILYFDENKNVVLKKYRNMTV

SEQ ID NO: 110364 - protein, 33 aa, Artificial Sequence
  Cyclic GFR-binding peptide
  MOD_RES (1)..(33): Xaa is C or S
XTPTKMSAISMLYLNDKQQIILKNYQGMVVDRX

SEQ ID NO: 110365 - protein, 35 aa, Artificial Sequence
  Cyclic GFR-binding peptide
  MOD_RES (1)..(33)..(35): Xaa is C or S
XVPARLSAISILYLDAANNVVLKNYQDMVVEAXGX

SEQ ID NO: 110366 - protein, 30 aa, Artificial Sequence; identical to SEQ ID NO: 77842
  Cyclic GFR-binding peptide
  MOD_RES (3)..(4): Xaa is C or S

SEQ ID NO: 110367 - protein, 27 aa, Artificial Sequence
  Cyclic GFR-binding peptide
VPTRLSAISILYLDSANNVVLKNYQDM

SEQ ID NO: 110368 - protein, 35 aa, Artificial Sequence; identical to SEQ ID NO: 8463
  Cyclic GFR-binding peptide
  MOD_RES (2)..(3)..(35): Xaa is C or S

SEQ ID NO: 110369 - protein, 27 aa, Artificial Sequence
  Cyclic GFR-binding peptide
TQLSAISVLYLDDSSNVILKNYQNMVV

SEQ ID NO: 110370 - protein, 36 aa, Artificial Sequence; identical to SEQ ID NO: 37117
  Cyclic GFR-binding peptide
  MOD_RES (1)..(33)..(35): Xaa is C or S

SEQ ID NO: 110371 - protein, 23 aa, Artificial Sequence
  Cyclic GFR-binding peptide
NAISVLYFDDMGVPTLKKYREGM

SEQ ID NO: 110372 - protein, 35 aa, Artificial Sequence; identical to SEQ ID NO: 8469
  Cyclic GFR-binding peptide
  MOD_RES (1)..(2)..(33)..(35): Xaa is C or S

SEQ ID NO: 110373 - protein, 29 aa, Artificial Sequence
  Cyclic GFR-binding peptide
SQDLSAISILYLIGKTPKILKNYQMIVKS

SEQ ID NO: 110374 - protein, 35 aa, Artificial Sequence; identical to SEQ ID NO: 18759
  Cyclic GFR-binding peptide
  MOD_RES (3)..(4): Xaa is C or S

SEQ ID NO: 110375 - protein, 31 aa, Artificial Sequence
  Cyclic GFR-binding peptide
  MOD_RES (5)..(6): Xaa is C or S
ASKAXXVPTKLSAISILYLDKGVVTYLKNYQ

SEQ ID NO: 110376 - protein, 25 aa, Artificial Sequence
  Cyclic GFR-binding peptide
SAISILYLDENKNVVLKNYQNMTVE

SEQ ID NO: 110377 - protein, 30 aa, Artificial Sequence
  Cyclic GFR-binding peptide
  MOD_RES (29)..(29): Xaa is C or S
KMSAISMLYLNDKQQIILKNYQGMVVDRXG

SEQ ID NO: 110378 - protein, 27 aa, Artificial Sequence
  Cyclic GFR-binding peptide
LNAISVLYFDDMGVPTLKKYREGMSVA

SEQ ID NO: 110379 - protein, 38 aa, Artificial Sequence; identical to SEQ ID NO: 8477
  Cyclic GFR-binding peptide
  MOD_RES (6)..(38): Xaa is C or S

SEQ ID NO: 110380 - protein, 25 aa, Artificial Sequence
  Cyclic GFR-binding peptide
PTRLSAISILYLDSANNVVLKNYQD

SEQ ID NO: 110381 - protein, 20 aa, Artificial Sequence
  Cyclic GFR-binding peptide
NAISVLYFDSSNNVILKKYR

SEQ ID NO: 110382 - protein, 35 aa, Artificial Sequence; identical to SEQ ID NO: 8479
  Cyclic GFR-binding peptide
  MOD_RES (1)..(2)..(33)..(35): Xaa is C or S

SEQ ID NO: 110383 - protein, 22 aa, Artificial Sequence
  Cyclic GFR-binding peptide
KTSAISMLYLDNGRVLLLKNYQ

SEQ ID NO: 110384 - protein, 25 aa, Artificial Sequence
  Cyclic GFR-binding peptide
DLNAISILYFVGRTPKVLKKYRMVV

SEQ ID NO: 110385 - protein, 32 aa, Artificial Sequence; identical to SEQ ID NO: 8483
  Cyclic GFR-binding peptide
  MOD_RES (6)..(7): Xaa is C or S

SEQ ID NO: 110386 - protein, 23 aa, Artificial Sequence
  Cyclic GFR-binding peptide
LNAISVLYFDSSNNVILKKYRNM

SEQ ID NO: 110387 - protein, 34 aa, Artificial Sequence
  Cyclic GFR-binding peptide
  MOD_RES (1)..(2)..(34): Xaa is C or S
XXVPARLSAISILYLDAANNVVLKNYQDMVVEAX

SEQ ID NO: 110388 - protein, 23 aa, Artificial Sequence
  Cyclic GFR-binding peptide
MNAISILYFDENKNVVLKKYRNM

SEQ ID NO: 110389 - protein, 34 aa, Artificial Sequence; identical to SEQ ID NO: 95461
  Cyclic GFR-binding peptide
  MOD_RES (5)..(6): Xaa is C or S

SEQ ID NO: 110390 - protein, 24 aa, Artificial Sequence
  Cyclic GFR-binding peptide
LSAISILYLVGRKPKVLKNYQMIV

SEQ ID NO: 110391 - protein, 25 aa, Artificial Sequence
  Cyclic GFR-binding peptide
RLSAISILYLDAANNVVLKNYQDMV

SEQ ID NO: 110392 - protein, 41 aa, Artificial Sequence; identical to SEQ ID NO: 8493
  Cyclic GFR-binding peptide
  MOD_RES (7)..(39)..(41): Xaa is C or S

SEQ ID NO: 110393 - protein, 34 aa, Artificial Sequence; identical to SEQ ID NO: 8494
  Cyclic GFR-binding peptide
  MOD_RES (32)..(34): Xaa is C or S

SEQ ID NO: 110394 - protein, 22 aa, Artificial Sequence
  Cyclic GFR-binding peptide
DLSAISILYLVGRTPKVLKNYQ

SEQ ID NO: 110395 - protein, 26 aa, Artificial Sequence
  Cyclic GFR-binding peptide
SAISILYLDENKNVVLKNYQNMTVES

SEQ ID NO: 110396 - protein, 20 aa, Artificial Sequence
  Cyclic GFR-binding peptide
NAISMLYFNDKQQIILKKYR

SEQ ID NO: 110397 - protein, 38 aa, Artificial Sequence; identical to SEQ ID NO: 18786
  Cyclic GFR-binding peptide
  MOD_RES (3)..(4)..(36)..(38): Xaa is C or S

SEQ ID NO: 110398 - protein, 39 aa, Artificial Sequence; identical to SEQ ID NO: 8499
  Cyclic GFR-binding peptide
  MOD_RES (3)..(4)..(36)..(38): Xaa is C or S

SEQ ID NO: 110399 - protein, 25 aa, Artificial Sequence
  Cyclic GFR-binding peptide
VPTKLSAISVLYLDDMGVPTLKNYQ

SEQ ID NO: 110400 - protein, 34 aa, Artificial Sequence; identical to SEQ ID NO: 37159
  Cyclic GFR-binding peptide
  MOD_RES (6)..(7): Xaa is C or S

SEQ ID NO: 110401 - protein, 27 aa, Artificial Sequence
  Cyclic GFR-binding peptide
LSAISVLYLDDSSNVILKNYQNMVVRS

SEQ ID NO: 110402 - protein, 28 aa, Artificial Sequence
  Cyclic GFR-binding peptide
PTKLSAISILYLDKGVVTYLKNYQGMAV

SEQ ID NO: 110403 - protein, 37 aa, Artificial Sequence
  Cyclic GFR-binding peptide
  MOD_RES (6)..(7): Xaa is C or S
KASKAXXVPTKLSAISILYLDKGVVTYLKNYQGMAVS

SEQ ID NO: 110404 - protein, 34 aa, Artificial Sequence; identical to SEQ ID NO: 95480
  Cyclic GFR-binding peptide
  MOD_RES (2)..(3): Xaa is C or S

SEQ ID NO: 110405 - protein, 27 aa, Artificial Sequence
  Cyclic GFR-binding peptide
LSAISVLYLDDSSNVILKNYQNMVVRA

SEQ ID NO: 110406 - protein, 27 aa, Artificial Sequence
  Cyclic GFR-binding peptide
KLSAISILYLDKGVVTYLKNYQGMAVS

SEQ ID NO: 110407 - protein, 33 aa, Artificial Sequence
  Cyclic GFR-binding peptide
  MOD_RES (2)..(3): Xaa is C or S
PXXVPEKMSAISILYLDENKNVVLKNYQNMTVE

SEQ ID NO: 110408 - protein, 33 aa, Artificial Sequence; identical to SEQ ID NO: 8513
  Cyclic GFR-binding peptide
  MOD_RES (5)..(6): Xaa is C or S

SEQ ID NO: 110409 - protein, 28 aa, Artificial Sequence
  Cyclic GFR-binding peptide
  MOD_RES (1)..(1): Xaa is C or S
XVPEKMSAISILYLDENKNVVLKNYQNM

SEQ ID NO: 110410 - protein, 34 aa, Artificial Sequence; identical to SEQ ID NO: 8515
  Cyclic GFR-binding peptide
  MOD_RES (6)..(7): Xaa is C or S

SEQ ID NO: 110411 - protein, 26 aa, Artificial Sequence
  Cyclic GFR-binding peptide
  MOD_RES (26)..(26): Xaa is C or S
SAISILYLVGRTPKVLKNYQMVVKSX

SEQ ID NO: 110412 - protein, 31 aa, Artificial Sequence; identical to SEQ ID NO: 8517
  Cyclic GFR-binding peptide
  MOD_RES (4)..(4): Xaa is C or S

SEQ ID NO: 110413 - protein, 32 aa, Artificial Sequence
  Cyclic GFR-binding peptide
  MOD_RES (2)..(3): Xaa is C or S
AXXVPTKLSAISILYLDKGVVTYLKNYQGMAV

SEQ ID NO: 110414 - protein, 34 aa, Artificial Sequence; identical to SEQ ID NO: 18808
  Cyclic GFR-binding peptide
  MOD_RES (1)..(2)..(34): Xaa is C or S

SEQ ID NO: 110415 - protein, 29 aa, Artificial Sequence
  Cyclic GFR-binding peptide
  MOD_RES (26)..(28): Xaa is C or S
NAISILYFIGKTPKILKKYRMIVKSXKXS

SEQ ID NO: 110416 - protein, 24 aa, Artificial Sequence
  Cyclic GFR-binding peptide
EKMSAISILYLDENKNVVLKNYQN

SEQ ID NO: 110417 - protein, 34 aa, Artificial Sequence; identical to SEQ ID NO: 8522
  Cyclic GFR-binding peptide
  MOD_RES (3)..(4): Xaa is C or S

SEQ ID NO: 110418 - protein, 36 aa, Artificial Sequence; identical to SEQ ID NO: 8525
  Cyclic GFR-binding peptide
  MOD_RES (2)..(3)..(34)..(36): Xaa is C or S

SEQ ID NO: 110419 - protein, 39 aa, Artificial Sequence; identical to SEQ ID NO: 77878
  Cyclic GFR-binding peptide
  MOD_RES (5)..(6)..(38): Xaa is C or S

SEQ ID NO: 110420 - protein, 34 aa, Artificial Sequence; identical to SEQ ID NO: 8526
  Cyclic GFR-binding peptide
  MOD_RES (32)..(34): Xaa is C or S

SEQ ID NO: 110421 - protein, 29 aa, Artificial Sequence
  Cyclic GFR-binding peptide
  MOD_RES (29)..(29): Xaa is C or S
KLNAISILYFDKGVVTYLKKYRGMAVSEX

SEQ ID NO: 110422 - protein, 26 aa, Artificial Sequence
  Cyclic GFR-binding peptide
LNAISILYFDAANNVVLKKYRDMVVE

SEQ ID NO: 110423 - protein, 29 aa, Artificial Sequence
  Cyclic GFR-binding peptide
TKLNAISVLYFDDMGVPTLKKYREGMSVA

SEQ ID NO: 110424 - protein, 34 aa, Artificial Sequence; identical to SEQ ID NO: 37198
  Cyclic GFR-binding peptide
  MOD_RES (5)..(6): Xaa is C or S

SEQ ID NO: 110425 - protein, 31 aa, Artificial Sequence; identical to SEQ ID NO: 18820
  Cyclic GFR-binding peptide
  MOD_RES (30)..(30): Xaa is C or S

SEQ ID NO: 110426 - protein, 31 aa, Artificial Sequence; identical to SEQ ID NO: 8531
  Cyclic GFR-binding peptide
  MOD_RES (2)..(3): Xaa is C or S

SEQ ID NO: 110427 - protein, 23 aa, Artificial Sequence
  Cyclic GFR-binding peptide
ELNAISMLYFDENEKVVLKKYRD

SEQ ID NO: 110428 - protein, 31 aa, Artificial Sequence
  Cyclic GFR-binding peptide
  MOD_RES (31)..(31): Xaa is C or S
PTKMSAISMLYLNDKQQIILKNYQGMVVDRX

SEQ ID NO: 110429 - protein, 33 aa, Artificial Sequence; identical to SEQ ID NO: 8533
  Cyclic GFR-binding peptide
  MOD_RES (2)..(3): Xaa is C or S

SEQ ID NO: 110430 - protein, 32 aa, Artificial Sequence
  Cyclic GFR-binding peptide
  MOD_RES (6)..(7): Xaa is C or S
RVPSTXXAPVKTSAISMLYLDNGRVLLLKNYQ

SEQ ID NO: 110431 - protein, 25 aa, Artificial Sequence
  Cyclic GFR-binding peptide
ALSAISILYLVGRKPKVLKNYQMIV

SEQ ID NO: 110432 - protein, 30 aa, Artificial Sequence; identical to SEQ ID NO: 8535
  Cyclic GFR-binding peptide
  MOD_RES (4)..(5): Xaa is C or S

SEQ ID NO: 110433 - protein, 33 aa, Artificial Sequence; identical to SEQ ID NO: 8536
  Cyclic GFR-binding peptide
  MOD_RES (30)..(32): Xaa is C or S

SEQ ID NO: 110434 - protein, 27 aa, Artificial Sequence
  Cyclic GFR-binding peptide
  MOD_RES (1)..(1): Xaa is C or S
XVPTKLSAISILYLDKGVVTYLKNYQG

SEQ ID NO: 110435 - protein, 35 aa, Artificial Sequence; identical to SEQ ID NO: 77888
  Cyclic GFR-binding peptide
  MOD_RES (2)..(3)..(35): Xaa is C or S

SEQ ID NO: 110436 - protein, 42 aa, Artificial Sequence; identical to SEQ ID NO: 37211
  Cyclic GFR-binding peptide
  MOD_RES (6)..(7)..(39)..(41): Xaa is C or S

SEQ ID NO: 110437 - protein, 30 aa, Artificial Sequence; identical to SEQ ID NO: 8542
  Cyclic GFR-binding peptide
  MOD_RES (30)..(30): Xaa is C or S

SEQ ID NO: 110438 - protein, 29 aa, Artificial Sequence
  Cyclic GFR-binding peptide
  MOD_RES (28)..(28): Xaa is C or S
LNAISILYFDKGVVTYLKKYRGMAVSEXG

SEQ ID NO: 110439 - protein, 32 aa, Artificial Sequence; identical to SEQ ID NO: 8545
  Cyclic GFR-binding peptide
  MOD_RES (3)..(4): Xaa is C or S

SEQ ID NO: 110440 - protein, 28 aa, Artificial Sequence
  Cyclic GFR-binding peptide
  MOD_RES (26)..(28): Xaa is C or S
SAISILYLVGRTPKVLKNYQMVVKSXKX

SEQ ID NO: 110441 - protein, 32 aa, Artificial Sequence; identical to SEQ ID NO: 77891
  Cyclic GFR-binding peptide
  MOD_RES (4)..(5): Xaa is C or S

SEQ ID NO: 110442 - protein, 23 aa, Artificial Sequence
  Cyclic GFR-binding peptide
MSAISILYLDENKNVVLKNYQNM

SEQ ID NO: 110443 - protein, 30 aa, Artificial Sequence; identical to SEQ ID NO: 18839
  Cyclic GFR-binding peptide

SEQ ID NO: 110444 - protein, 25 aa, Artificial Sequence
  Cyclic GFR-binding peptide
MSAISMLYLNDKQQIILKNYQGMVV

SEQ ID NO: 110445 - protein, 39 aa, Artificial Sequence; identical to SEQ ID NO: 8552
  Cyclic GFR-binding peptide
  MOD_RES (4)..(5)..(37)..(39): Xaa is C or S

SEQ ID NO: 110446 - protein, 22 aa, Artificial Sequence
  Cyclic GFR-binding peptide
NAISMLYFDNGRVLLLKKYRMI

SEQ ID NO: 110447 - protein, 25 aa, Artificial Sequence
  Cyclic GFR-binding peptide
VPTKLNAISVLYFDDMGVPTLKKYR

SEQ ID NO: 110448 - protein, 32 aa, Artificial Sequence; identical to SEQ ID NO: 8555
  Cyclic GFR-binding peptide
  MOD_RES (6)..(7): Xaa is C or S

SEQ ID NO: 110449 - protein, 24 aa, Artificial Sequence
  Cyclic GFR-binding peptide
QLSAISVLYLDDSSNVILKNYQNM

SEQ ID NO: 110450 - protein, 39 aa, Artificial Sequence; identical to SEQ ID NO: 37234
  Cyclic GFR-binding peptide
  MOD_RES (5)..(6)..(38): Xaa is C or S

SEQ ID NO: 110451 - protein, 33 aa, Artificial Sequence
  Cyclic GFR-binding peptide
  MOD_RES (32)..(32): Xaa is C or S
TPTKMSAISMLYLNDKQQIILKNYQGMVVDRXG

SEQ ID NO: 110452 - protein, 36 aa, Artificial Sequence; identical to SEQ ID NO: 8558
  Cyclic GFR-binding peptide
  MOD_RES (4)..(5)..(36): Xaa is C or S

SEQ ID NO: 110453 - protein, 29 aa, Artificial Sequence
  Cyclic GFR-binding peptide
  MOD_RES (28)..(28): Xaa is C or S
DLSAISILYLVGRTPKVLKNYQMVVKSXK

SEQ ID NO: 110454 - protein, 32 aa, Artificial Sequence; identical to SEQ ID NO: 8562
  Cyclic GFR-binding peptide
  MOD_RES (4)..(4): Xaa is C or S

SEQ ID NO: 110455 - protein, 30 aa, Artificial Sequence; identical to SEQ ID NO: 8563
  Cyclic GFR-binding peptide
  MOD_RES (1)..(1): Xaa is C or S

SEQ ID NO: 110456 - protein, 27 aa, Artificial Sequence
  Cyclic GFR-binding peptide
APTKLSAISVLYLDDSSNVILKNYQNM

SEQ ID NO: 110457 - protein, 28 aa, Artificial Sequence
  Cyclic GFR-binding peptide
  MOD_RES (28)..(28): Xaa is C or S
LSAISILYLDKGVVTYLKNYQGMAVSEX

SEQ ID NO: 110458 - protein, 38 aa, Artificial Sequence; identical to SEQ ID NO: 95551
  Cyclic GFR-binding peptide
  MOD_RES (3)..(4)..(36)..(38): Xaa is C or S

SEQ ID NO: 110459 - protein, 33 aa, Artificial Sequence; identical to SEQ ID NO: 8567
  Cyclic GFR-binding peptide
  MOD_RES (31)..(33): Xaa is C or S

SEQ ID NO: 110460 - protein, 28 aa, Artificial Sequence
  Cyclic GFR-binding peptide
PTRLSAISILYLDSANNVVLKNYQDMVV

SEQ ID NO: 110461 - protein, 36 aa, Artificial Sequence; identical to SEQ ID NO: 8569
  Cyclic GFR-binding peptide
  MOD_RES (2)..(3)..(35): Xaa is C or S

SEQ ID NO: 110462 - protein, 34 aa, Artificial Sequence
  Cyclic GFR-binding peptide
  MOD_RES (6)..(7): Xaa is C or S
HVPKPXXAPTKLSAISVLYLDDSSNVILKNYQNM

SEQ ID NO: 110463 - protein, 38 aa, Artificial Sequence; identical to SEQ ID NO: 8571
  Cyclic GFR-binding peptide
  MOD_RES (3)..(4)..(36)..(38): Xaa is C or S

SEQ ID NO: 110464 - protein, 34 aa, Artificial Sequence; identical to SEQ ID NO: 37248
  Cyclic GFR-binding peptide
  MOD_RES (4)..(5): Xaa is C or S

SEQ ID NO: 110465 - protein, 26 aa, Artificial Sequence
  Cyclic GFR-binding peptide
PTELNAISMLYFDEYDKVVLKKYREM

SEQ ID NO: 110466 - protein, 28 aa, Artificial Sequence
  Cyclic GFR-binding peptide
  MOD_RES (27)..(27): Xaa is C or S
SAISILYLDSANNVVLKNYQDMVVESXG

SEQ ID NO: 110467 - protein, 28 aa, Artificial Sequence
  Cyclic GFR-binding peptide
VPQALNAISILYFVGRKPKVLKKYRMIV

SEQ ID NO: 110468 - protein, 37 aa, Artificial Sequence; identical to SEQ ID NO: 8576
  Cyclic GFR-binding peptide
  MOD_RES (5)..(6)..(37): Xaa is C or S

SEQ ID NO: 110469 - protein, 29 aa, Artificial Sequence
  Cyclic GFR-binding peptide
  MOD_RES (1)..(1): Xaa is C or S
XVPQALNAISILYFVGRKPKVLKKYRMIV

SEQ ID NO: 110470 - protein, 39 aa, Artificial Sequence; identical to SEQ ID NO: 18876
  Cyclic GFR-binding peptide
  MOD_RES (3)..(4)..(36)..(38): Xaa is C or S

SEQ ID NO: 110471 - protein, 32 aa, Artificial Sequence
  Cyclic GFR-binding peptide
  MOD_RES (3)..(4): Xaa is C or S
STXXAPVKTSAISMLYLDNGRVLLLKNYQMIV

SEQ ID NO: 110472 - protein, 29 aa, Artificial Sequence
  Cyclic GFR-binding peptide
  MOD_RES (1)..(2): Xaa is C or S
XXVPEKMNAISILYFDENKNVVLKKYRNM

SEQ ID NO: 110473 - protein, 36 aa, Artificial Sequence; identical to SEQ ID NO: 95563
  Cyclic GFR-binding peptide
  MOD_RES (1)..(33)..(35): Xaa is C or S

SEQ ID NO: 110474 - protein, 32 aa, Artificial Sequence
  Cyclic GFR-binding peptide
  MOD_RES (3)..(4): Xaa is C or S
EPXXVPEKMSAISILYLDENKNVVLKNYQNMT

SEQ ID NO: 110475 - protein, 24 aa, Artificial Sequence
  Cyclic GFR-binding peptide
TELNAISMLYFDEYDKVVLKKYRE

SEQ ID NO: 110476 - protein, 24 aa, Artificial Sequence
  Cyclic GFR-binding peptide
PTRLNAISILYFDSANNVVLKKYR

SEQ ID NO: 110477 - protein, 28 aa, Artificial Sequence
  Cyclic GFR-binding peptide
  MOD_RES (27)..(27): Xaa is C or S
NAISILYFDENKNVVLKKYRNMTVESXA

SEQ ID NO: 110478 - protein, 23 aa, Artificial Sequence
  Cyclic GFR-binding peptide
KLNAISVLYFDSSNNVILKKYRN

SEQ ID NO: 110479 - protein, 33 aa, Artificial Sequence; identical to SEQ ID NO: 8586
  Cyclic GFR-binding peptide
  MOD_RES (31)..(33): Xaa is C or S

SEQ ID NO: 110480 - protein, 32 aa, Artificial Sequence; identical to SEQ ID NO: 8587
  Cyclic GFR-binding peptide
  MOD_RES (32)..(32): Xaa is C or S

SEQ ID NO: 110481 - protein, 38 aa, Artificial Sequence; identical to SEQ ID NO: 18889
  Cyclic GFR-binding peptide
  MOD_RES (2)..(3)..(35)..(37): Xaa is C or S

SEQ ID NO: 110482 - protein, 31 aa, Artificial Sequence
  Cyclic GFR-binding peptide
  MOD_RES (28)..(30): Xaa is C or S
LSAISILYLDKGVVTYLKNYQGMAVSEXGXR

SEQ ID NO: 110483 - protein, 21 aa, Artificial Sequence
  Cyclic GFR-binding peptide
MSAISMLYLNDKQQIILKNYQ

SEQ ID NO: 110484 - protein, 32 aa, Artificial Sequence; identical to SEQ ID NO: 90556
  Cyclic GFR-binding peptide
  MOD_RES (4)..(5): Xaa is C or S

SEQ ID NO: 110485 - protein, 26 aa, Artificial Sequence
  Cyclic GFR-binding peptide
PTKLSAISVLYLDDMGVPTLKNYQEG

SEQ ID NO: 110486 - protein, 27 aa, Artificial Sequence
  Cyclic GFR-binding peptide
PVKTSAISMLYLDNGRVLLLKNYQMIV

SEQ ID NO: 110487 - protein, 39 aa, Artificial Sequence; identical to SEQ ID NO: 8593
  Cyclic GFR-binding peptide
  MOD_RES (5)..(6)..(39): Xaa is C or S

SEQ ID NO: 110488 - protein, 28 aa, Artificial Sequence
  Cyclic GFR-binding peptide
  MOD_RES (1)..(1): Xaa is C or S
XAPTQLSAISVLYLDDSSNVILKNYQNM

SEQ ID NO: 110489 - protein, 32 aa, Artificial Sequence; identical to SEQ ID NO: 8595
  Cyclic GFR-binding peptide
  MOD_RES (31)..(31): Xaa is C or S

SEQ ID NO: 110490 - protein, 27 aa, Artificial Sequence
  Cyclic GFR-binding peptide
  MOD_RES (2)..(2): Xaa is C or S
TXAPTKLSAISVLYLDDSSNVILKNYQ

SEQ ID NO: 110491 - protein, 34 aa, Artificial Sequence
  Cyclic GFR-binding peptide
  MOD_RES (4)..(5): Xaa is C or S
PEPXXVPEKMSAISILYLDENKNVVLKNYQNMTV

SEQ ID NO: 110492 - protein, 39 aa, Artificial Sequence; identical to SEQ ID NO: 95584
  Cyclic GFR-binding peptide
  MOD_RES (4)..(5)..(37)..(39): Xaa is C or S

SEQ ID NO: 110493 - protein, 39 aa, Artificial Sequence; identical to SEQ ID NO: 37284
  Cyclic GFR-binding peptide
  MOD_RES (4)..(5)..(37)..(39): Xaa is C or S

SEQ ID NO: 110494 - protein, 37 aa, Artificial Sequence
  Cyclic GFR-binding peptide
  MOD_RES (3)..(4)..(35)..(37): Xaa is C or S
STXXAPVKTSAISMLYLDNGRVLLLKNYQMIVEEXGX

SEQ ID NO: 110495 - protein, 24 aa, Artificial Sequence
  Cyclic GFR-binding peptide
PTQLSAISVLYLDDSSNVILKNYQ

SEQ ID NO: 110496 - protein, 28 aa, Artificial Sequence
  Cyclic GFR-binding peptide
LSAISVLYLDDMGVPTLKNYQEGMSVAE

SEQ ID NO: 110497 - protein, 31 aa, Artificial Sequence
  Cyclic GFR-binding peptide
  MOD_RES (1)..(1): Xaa is C or S
XVPTKLSAISILYLDKGVVTYLKNYQGMAVS

SEQ ID NO: 110498 - protein, 35 aa, Artificial Sequence; identical to SEQ ID NO: 37290
  Cyclic GFR-binding peptide
  MOD_RES (6)..(7): Xaa is C or S

SEQ ID NO: 110499 - protein, 36 aa, Artificial Sequence; identical to SEQ ID NO: 8607
  Cyclic GFR-binding peptide
  MOD_RES (6)..(7): Xaa is C or S

SEQ ID NO: 110500 - protein, 35 aa, Artificial Sequence
  Cyclic GFR-binding peptide
  MOD_RES (3)..(4)..(35): Xaa is C or S
STXXAPVKTSAISMLYLDNGRVLLLKNYQMIVEEX

SEQ ID NO: 110501 - protein, 30 aa, Artificial Sequence; identical to SEQ ID NO: 8610
  Cyclic GFR-binding peptide
  MOD_RES (2)..(3): Xaa is C or S

SEQ ID NO: 110502 - protein, 34 aa, Artificial Sequence; identical to SEQ ID NO: 8612
  Cyclic GFR-binding peptide
  MOD_RES (5)..(6): Xaa is C or S

SEQ ID NO: 110503 - protein, 38 aa, Artificial Sequence; identical to SEQ ID NO: 8613
  Cyclic GFR-binding peptide
  MOD_RES (2)..(3)..(35)..(37): Xaa is C or S

SEQ ID NO: 110504 - protein, 35 aa, Artificial Sequence; identical to SEQ ID NO: 8614
  Cyclic GFR-binding peptide
  MOD_RES (2)..(34): Xaa is C or S

SEQ ID NO: 110505 - protein, 29 aa, Artificial Sequence
  Cyclic GFR-binding peptide
  MOD_RES (27)..(29): Xaa is C or S
TNAISMLYFDNGRVLLLKKYRMIVEEXGX

SEQ ID NO: 110506 - protein, 26 aa, Artificial Sequence
  Cyclic GFR-binding peptide
KLSAISILYLDKGVVTYLKNYQGMAV

SEQ ID NO: 110507 - protein, 26 aa, Artificial Sequence
  Cyclic GFR-binding peptide
VPTKLSAISVLYLDDMGVPTLKNYQE

SEQ ID NO: 110508 - protein, 33 aa, Artificial Sequence; identical to SEQ ID NO: 18923
  Cyclic GFR-binding peptide
  MOD_RES (1)..(33): Xaa is C or S

SEQ ID NO: 110509 - protein, 32 aa, Artificial Sequence; identical to SEQ ID NO: 8618
  Cyclic GFR-binding peptide
  MOD_RES (31)..(31): Xaa is C or S

SEQ ID NO: 110510 - protein, 26 aa, Artificial Sequence
  Cyclic GFR-binding peptide
  MOD_RES (1)..(1): Xaa is C or S
XVPTRLSAISILYLDSANNVVLKNYQ

SEQ ID NO: 110511 - protein, 23 aa, Artificial Sequence
  Cyclic GFR-binding peptide
LSAISVLYLDDMGVPTLKNYQEG

SEQ ID NO: 110512 - protein, 28 aa, Artificial Sequence
  Cyclic GFR-binding peptide
ARLNAISILYFDAANNVVLKKYRDMVVE

SEQ ID NO: 110513 - protein, 31 aa, Artificial Sequence; identical to SEQ ID NO: 8624
  Cyclic GFR-binding peptide
  MOD_RES (29)..(31): Xaa is C or S

SEQ ID NO: 110514 - protein, 35 aa, Artificial Sequence; identical to SEQ ID NO: 8625
  Cyclic GFR-binding peptide
  MOD_RES (3)..(4): Xaa is C or S

SEQ ID NO: 110515 - protein, 35 aa, Artificial Sequence; identical to SEQ ID NO: 77939
  Cyclic GFR-binding peptide
  MOD_RES (3)..(4)..(35): Xaa is C or S

SEQ ID NO: 110516 - protein, 33 aa, Artificial Sequence; identical to SEQ ID NO: 8627
  Cyclic GFR-binding peptide
  MOD_RES (6)..(7): Xaa is C or S

SEQ ID NO: 110517 - protein, 30 aa, Artificial Sequence; identical to SEQ ID NO: 8629
  Cyclic GFR-binding peptide
  MOD_RES (4)..(5): Xaa is C or S

SEQ ID NO: 110518 - protein, 36 aa, Artificial Sequence
  Cyclic GFR-binding peptide
  MOD_RES (6)..(7): Xaa is C or S
KASKAXXVPTKLSAISILYLDKGVVTYLKNYQGMAV

SEQ ID NO: 110519 - protein, 35 aa, Artificial Sequence
  Cyclic GFR-binding peptide
  MOD_RES (2)..(3)..(34): Xaa is C or S
TXXAPVKTSAISMLYLDNGRVLLLKNYQMIVEEXG

SEQ ID NO: 110520 - protein, 24 aa, Artificial Sequence
  Cyclic GFR-binding peptide
PTRLSAISILYLDSANNVVLKNYQ

SEQ ID NO: 110521 - protein, 26 aa, Artificial Sequence
  Cyclic GFR-binding peptide
LNAISVLYFDDMGVPTLKKYREGMSV

SEQ ID NO: 110522 - protein, 24 aa, Artificial Sequence
  Cyclic GFR-binding peptide
MSAISMLYLNDKQQIILKNYQGMV

SEQ ID NO: 110523 - protein, 31 aa, Artificial Sequence; identical to SEQ ID NO: 8634
  Cyclic GFR-binding peptide
  MOD_RES (3)..(4): Xaa is C or S

SEQ ID NO: 110524 - protein, 22 aa, Artificial Sequence
  Cyclic GFR-binding peptide
LNAISMLYFDEYDKVVLKKYRE

SEQ ID NO: 110525 - protein, 25 aa, Artificial Sequence
  Cyclic GFR-binding peptide
LNAISVLYFDSSNNVILKKYRNMVV

SEQ ID NO: 110526 - protein, 32 aa, Artificial Sequence; identical to SEQ ID NO: 95607
  Cyclic GFR-binding peptide
  MOD_RES (2)..(3): Xaa is C or S

SEQ ID NO: 110527 - protein, 32 aa, Artificial Sequence; identical to SEQ ID NO: 18947
  Cyclic GFR-binding peptide
  MOD_RES (32)..(32): Xaa is C or S

SEQ ID NO: 110528 - protein, 31 aa, Artificial Sequence; identical to SEQ ID NO: 77947
  Cyclic GFR-binding peptide
  MOD_RES (29)..(31): Xaa is C or S

SEQ ID NO: 110529 - protein, 28 aa, Artificial Sequence
  Cyclic GFR-binding peptide
RLSAISILYLDSANNVVLKNYQDMVVES

SEQ ID NO: 110530 - protein, 35 aa, Artificial Sequence
  Cyclic GFR-binding peptide
  MOD_RES (5)..(6): Xaa is C or S
APASXXVPARLSAISILYLDAANNVVLKNYQDMVV

SEQ ID NO: 110531 - protein, 29 aa, Artificial Sequence
  Cyclic GFR-binding peptide
PTKLNAISILYFDKGVVTYLKKYRGMAVS

SEQ ID NO: 110532 - protein, 28 aa, Artificial Sequence
  Cyclic GFR-binding peptide
LNAISVLYFDDMGVPTLKKYREGMSVAE

SEQ ID NO: 110533 - protein, 39 aa, Artificial Sequence
  Cyclic GFR-binding peptide
  MOD_RES (5)..(6)..(37)..(39): Xaa is C or S
VPSTXXAPVKTSAISMLYLDNGRVLLLKNYQMIVEEXGX

SEQ ID NO: 110534 - protein, 27 aa, Artificial Sequence
  Cyclic GFR-binding peptide
VPEKMSAISILYLDENKNVVLKNYQNM

SEQ ID NO: 110535 - protein, 23 aa, Artificial Sequence
  Cyclic GFR-binding peptide
NAISILYFVGRKPKVLKKYRMIV

SEQ ID NO: 110536 - protein, 30 aa, Artificial Sequence; identical to SEQ ID NO: 8644
  Cyclic GFR-binding peptide

SEQ ID NO: 110537 - protein, 29 aa, Artificial Sequence
  Cyclic GFR-binding peptide
  MOD_RES (27)..(29): Xaa is C or S
LNAISILYFVGRTPKVLKKYRMVVKSXKX

SEQ ID NO: 110538 - protein, 28 aa, Artificial Sequence
  Cyclic GFR-binding peptide
  MOD_RES (28)..(28): Xaa is C or S
DLNAISILYFIGKTPKILKKYRMIVKSX

SEQ ID NO: 110539 - protein, 40 aa, Artificial Sequence; identical to SEQ ID NO: 8654
  Cyclic GFR-binding peptide
  MOD_RES (6)..(7)..(38)..(40): Xaa is C or S

SEQ ID NO: 110540 - protein, 38 aa, Artificial Sequence; identical to SEQ ID NO: 8655
  Cyclic GFR-binding peptide
  MOD_RES (5)..(6)..(38): Xaa is C or S

SEQ ID NO: 110541 - protein, 38 aa, Artificial Sequence; identical to SEQ ID NO: 8656
  Cyclic GFR-binding peptide
  MOD_RES (6)..(7)..(38): Xaa is C or S

SEQ ID NO: 110542 - protein, 27 aa, Artificial Sequence
  Cyclic GFR-binding peptide
  MOD_RES (1)..(2): Xaa is C or S
XXVPTRLNAISILYFDSANNVVLKKYR

SEQ ID NO: 110543 - protein, 39 aa, Artificial Sequence; identical to SEQ ID NO: 8659
  Cyclic GFR-binding peptide
  MOD_RES (5)..(6)..(37)..(39): Xaa is C or S

SEQ ID NO: 110544 - protein, 38 aa, Artificial Sequence; identical to SEQ ID NO: 8660
  Cyclic GFR-binding peptide
  MOD_RES (3)..(4)..(37): Xaa is C or S

SEQ ID NO: 110545 - protein, 28 aa, Artificial Sequence
  Cyclic GFR-binding peptide
  MOD_RES (1)..(2): Xaa is C or S
XXVPARLNAISILYFDAANNVVLKKYRD

SEQ ID NO: 110546 - protein, 26 aa, Artificial Sequence
  Cyclic GFR-binding peptide
PTKLNAISVLYFDDMGVPTLKKYREG

SEQ ID NO: 110547 - protein, 26 aa, Artificial Sequence
  Cyclic GFR-binding peptide
SAISVLYLDDSSNVILKNYQNMVVRS

SEQ ID NO: 110548 - protein, 34 aa, Artificial Sequence; identical to SEQ ID NO: 8668
  Cyclic GFR-binding peptide
  MOD_RES (3)..(4): Xaa is C or S

SEQ ID NO: 110549 - protein, 32 aa, Artificial Sequence
  Cyclic GFR-binding peptide
  MOD_RES (5)..(6): Xaa is C or S
IPEPXXVPEKMSAISILYLDENKNVVLKNYQN

SEQ ID NO: 110550 - protein, 26 aa, Artificial Sequence
  Cyclic GFR-binding peptide
  MOD_RES (1)..(1): Xaa is C or S
XVPTRLNAISILYFDSANNVVLKKYR

SEQ ID NO: 110551 - protein, 31 aa, Artificial Sequence; identical to SEQ ID NO: 8673
  Cyclic GFR-binding peptide
  MOD_RES (28)..(30): Xaa is C or S

SEQ ID NO: 110552 - protein, 36 aa, Artificial Sequence; identical to SEQ ID NO: 8676
  Cyclic GFR-binding peptide
  MOD_RES (1)..(2)..(33)..(35): Xaa is C or S

SEQ ID NO: 110553 - protein, 36 aa, Artificial Sequence; identical to SEQ ID NO: 8678
  Cyclic GFR-binding peptide
  MOD_RES (3)..(4)..(36): Xaa is C or S

SEQ ID NO: 110554 - protein, 32 aa, Artificial Sequence; identical to SEQ ID NO: 77964
  Cyclic GFR-binding peptide
  MOD_RES (6)..(7): Xaa is C or S

SEQ ID NO: 110555 - protein, 36 aa, Artificial Sequence; identical to SEQ ID NO: 8682
  Cyclic GFR-binding peptide
  MOD_RES (5)..(6): Xaa is C or S

SEQ ID NO: 110556 - protein, 34 aa, Artificial Sequence
  Cyclic GFR-binding peptide
  MOD_RES (6)..(7): Xaa is C or S
KASKAXXVPTKLSAISILYLDKGVVTYLKNYQGM

SEQ ID NO: 110557 - protein, 35 aa, Artificial Sequence; identical to SEQ ID NO: 8685
  Cyclic GFR-binding peptide
  MOD_RES (4)..(5): Xaa is C or S

SEQ ID NO: 110558 - protein, 37 aa, Artificial Sequence; identical to SEQ ID NO: 8687
  Cyclic GFR-binding peptide
  MOD_RES (5)..(6)..(37): Xaa is C or S

SEQ ID NO: 110559 - protein, 39 aa, Artificial Sequence; identical to SEQ ID NO: 8688
  Cyclic GFR-binding peptide
  MOD_RES (2)..(3)..(36)..(38): Xaa is C or S

SEQ ID NO: 110560 - protein, 39 aa, Artificial Sequence
  Cyclic GFR-binding peptide
  MOD_RES (6)..(7)..(39): Xaa is C or S
KASKAXXVPTKLSAISILYLDKGVVTYLKNYQGMAVSEX

SEQ ID NO: 110561 - protein, 33 aa, Artificial Sequence
  Cyclic GFR-binding peptide
  MOD_RES (1)..(33): Xaa is C or S
XVPTKLSAISILYLDKGVVTYLKNYQGMAVSEX

SEQ ID NO: 110562 - protein, 28 aa, Artificial Sequence
  Cyclic GFR-binding peptide
  MOD_RES (1)..(1): Xaa is C or S
XVPEKMNAISILYFDENKNVVLKKYRNM

SEQ ID NO: 110563 - protein, 37 aa, Artificial Sequence; identical to SEQ ID NO: 8690
  Cyclic GFR-binding peptide
  MOD_RES (4)..(5)..(37): Xaa is C or S

SEQ ID NO: 110564 - protein, 37 aa, Artificial Sequence; identical to SEQ ID NO: 90653
  Cyclic GFR-binding peptide
  MOD_RES (6)..(7): Xaa is C or S

SEQ ID NO: 110565 - protein, 29 aa, Artificial Sequence
  Cyclic GFR-binding peptide
TKLSAISVLYLDDMGVPTLKNYQEGMSVA

SEQ ID NO: 110566 - protein, 28 aa, Artificial Sequence
  Cyclic GFR-binding peptide
PTKMSAISMLYLNDKQQIILKNYQGMVV

SEQ ID NO: 110567 - protein, 27 aa, Artificial Sequence
  Cyclic GFR-binding peptide
VPEKMNAISILYFDENKNVVLKKYRNM

SEQ ID NO: 110568 - protein, 27 aa, Artificial Sequence
  Cyclic GFR-binding peptide
PQALNAISILYFVGRKPKVLKKYRMIV

SEQ ID NO: 110569 - protein, 32 aa, Artificial Sequence; identical to SEQ ID NO: 90665
  Cyclic GFR-binding peptide
  MOD_RES (31)..(31): Xaa is C or S

SEQ ID NO: 110570 - protein, 28 aa, Artificial Sequence
  Cyclic GFR-binding peptide
KMNAISILYFDENKNVVLKKYRNMTVES

SEQ ID NO: 110571 - protein, 29 aa, Artificial Sequence
  Cyclic GFR-binding peptide
  MOD_RES (29)..(29): Xaa is C or S
KMSAISILYLDENKNVVLKNYQNMTVESX

SEQ ID NO: 110572 - protein, 37 aa, Artificial Sequence; identical to SEQ ID NO: 8702
  Cyclic GFR-binding peptide
  MOD_RES (1)..(2)..(34)..(36): Xaa is C or S

SEQ ID NO: 110573 - protein, 29 aa, Artificial Sequence
  Cyclic GFR-binding peptide
  MOD_RES (26)..(28): Xaa is C or S
SAISMLYLDNGRVLLLKNYQMIVEEXGXL

SEQ ID NO: 110574 - protein, 29 aa, Artificial Sequence
  Cyclic GFR-binding peptide
  MOD_RES (28)..(28): Xaa is C or S
NAISVLYFDDMGVPTLKKYREGMSVAEXG

SEQ ID NO: 110575 - protein, 35 aa, Artificial Sequence; identical to SEQ ID NO: 8708
  Cyclic GFR-binding peptide
  MOD_RES (1)..(33)..(35): Xaa is C or S

SEQ ID NO: 110576 - protein, 34 aa, Artificial Sequence; identical to SEQ ID NO: 77978
  Cyclic GFR-binding peptide
  MOD_RES (5)..(6): Xaa is C or S

SEQ ID NO: 110577 - protein, 26 aa, Artificial Sequence
  Cyclic GFR-binding peptide
SAISVLYLDDSSNVILKNYQNMVVRA

SEQ ID NO: 110578 - protein, 36 aa, Artificial Sequence; identical to SEQ ID NO: 8716
  Cyclic GFR-binding peptide
  MOD_RES (5)..(6): Xaa is C or S

SEQ ID NO: 110579 - protein, 31 aa, Artificial Sequence
  Cyclic GFR-binding peptide
  MOD_RES (4)..(5): Xaa is C or S
PASXXVPARLSAISILYLDAANNVVLKNYQD

SEQ ID NO: 110580 - protein, 32 aa, Artificial Sequence; identical to SEQ ID NO: 37422
  Cyclic GFR-binding peptide
  MOD_RES (6)..(7): Xaa is C or S

SEQ ID NO: 110581 - protein, 39 aa, Artificial Sequence; identical to SEQ ID NO: 8718
  Cyclic GFR-binding peptide
  MOD_RES (4)..(36)..(38): Xaa is C or S

SEQ ID NO: 110582 - protein, 42 aa, Artificial Sequence; identical to SEQ ID NO: 8720
  Cyclic GFR-binding peptide
  MOD_RES (6)..(7)..(39)..(41): Xaa is C or S

SEQ ID NO: 110583 - protein, 31 aa, Artificial Sequence; identical to SEQ ID NO: 8721
  Cyclic GFR-binding peptide
  MOD_RES (3)..(4): Xaa is C or S

SEQ ID NO: 110584 - protein, 34 aa, Artificial Sequence; identical to SEQ ID NO: 19020
  Cyclic GFR-binding peptide
  MOD_RES (2)..(3): Xaa is C or S

SEQ ID NO: 110585 - protein, 29 aa, Artificial Sequence
  Cyclic GFR-binding peptide
  MOD_RES (1)..(2): Xaa is C or S
XXVPTRLSAISILYLDSANNVVLKNYQDM

SEQ ID NO: 110586 - protein, 27 aa, Artificial Sequence
  Cyclic GFR-binding peptide
VPTELNAISMLYFDEYDKVVLKKYREM

SEQ ID NO: 110587 - protein, 29 aa, Artificial Sequence
  Cyclic GFR-binding peptide
  MOD_RES (1)..(2): Xaa is C or S
XXAPTKLSAISVLYLDDSSNVILKNYQNM

SEQ ID NO: 110588 - protein, 30 aa, Artificial Sequence; identical to SEQ ID NO: 8733
  Cyclic GFR-binding peptide

SEQ ID NO: 110589 - protein, 28 aa, Artificial Sequence
  Cyclic GFR-binding peptide
  MOD_RES (27)..(27): Xaa is C or S
SAISMLYLNDKQQIILKNYQGMVVDRXG

SEQ ID NO: 110590 - protein, 33 aa, Artificial Sequence; identical to SEQ ID NO: 8735
  Cyclic GFR-binding peptide
  MOD_RES (2)..(3): Xaa is C or S

SEQ ID NO: 110591 - protein, 27 aa, Artificial Sequence
  Cyclic GFR-binding peptide
KMSAISILYLDENKNVVLKNYQNMTVE

SEQ ID NO: 110592 - protein, 27 aa, Artificial Sequence
  Cyclic GFR-binding peptide
VKTNAISMLYFDNGRVLLLKKYRMIVE

SEQ ID NO: 110593 - protein, 34 aa, Artificial Sequence; identical to SEQ ID NO: 8737
  Cyclic GFR-binding peptide
  MOD_RES (1)..(2): Xaa is C or S

SEQ ID NO: 110594 - protein, 30 aa, Artificial Sequence; identical to SEQ ID NO: 8740
  Cyclic GFR-binding peptide
  MOD_RES (2)..(3): Xaa is C or S

SEQ ID NO: 110595 - protein, 26 aa, Artificial Sequence
  Cyclic GFR-binding peptide
VPQALSAISILYLVGRKPKVLKNYQM

SEQ ID NO: 110596 - protein, 35 aa, Artificial Sequence; identical to SEQ ID NO: 8742
  Cyclic GFR-binding peptide
  MOD_RES (3)..(4): Xaa is C or S

SEQ ID NO: 110597 - protein, 28 aa, Artificial Sequence
  Cyclic GFR-binding peptide
  MOD_RES (28)..(28): Xaa is C or S
LSAISVLYLDSSNNVILKNYQNMVVKAX

SEQ ID NO: 110598 - protein, 38 aa, Artificial Sequence; identical to SEQ ID NO: 8750
  Cyclic GFR-binding peptide
  MOD_RES (3)..(4)..(35)..(37): Xaa is C or S

SEQ ID NO: 110599 - protein, 30 aa, Artificial Sequence; identical to SEQ ID NO: 8751
  Cyclic GFR-binding peptide
  MOD_RES (30)..(30): Xaa is C or S

SEQ ID NO: 110600 - protein, 25 aa, Artificial Sequence
  Cyclic GFR-binding peptide
TSAISMLYLDNGRVLLLKNYQMIVE

SEQ ID NO: 110601 - protein, 21 aa, Artificial Sequence
  Cyclic GFR-binding peptide
MNAISMLYFNDKQQIILKKYR

SEQ ID NO: 110602 - protein, 34 aa, Artificial Sequence
  Cyclic GFR-binding peptide
  MOD_RES (32)..(34): Xaa is C or S
VPEKMSAISILYLDENKNVVLKNYQNMTVESXAX

SEQ ID NO: 110603 - protein, 29 aa, Artificial Sequence
  Cyclic GFR-binding peptide
  MOD_RES (2)..(3): Xaa is C or S
PXXAPTKLSAISVLYLDDSSNVILKNYQN

SEQ ID NO: 110604 - protein, 38 aa, Artificial Sequence; identical to SEQ ID NO: 8758
  Cyclic GFR-binding peptide
  MOD_RES (6)..(7)..(38): Xaa is C or S

SEQ ID NO: 110605 - protein, 33 aa, Artificial Sequence; identical to SEQ ID NO: 19042
  Cyclic GFR-binding peptide
  MOD_RES (32)..(32): Xaa is C or S

SEQ ID NO: 110606 - protein, 34 aa, Artificial Sequence; identical to SEQ ID NO: 8760
  Cyclic GFR-binding peptide
  MOD_RES (2)..(3): Xaa is C or S

SEQ ID NO: 110607 - protein, 28 aa, Artificial Sequence
  Cyclic GFR-binding peptide
  MOD_RES (1)..(2): Xaa is C or S
XXVPTKLSAISILYLDKGVVTYLKNYQG

SEQ ID NO: 110608 - protein, 27 aa, Artificial Sequence
  Cyclic GFR-binding peptide
  MOD_RES (27)..(27): Xaa is C or S
TNAISMLYFDNGRVLLLKKYRMIVEEX

SEQ ID NO: 110609 - protein, 23 aa, Artificial Sequence
  Cyclic GFR-binding peptide
RLNAISILYFDSANNVVLKKYRD

SEQ ID NO: 110610 - protein, 24 aa, Artificial Sequence
  Cyclic GFR-binding peptide
NAISILYFDAANNVVLKKYRDMVV

SEQ ID NO: 110611 - protein, 31 aa, Artificial Sequence; identical to SEQ ID NO: 19048
  Cyclic GFR-binding peptide
  MOD_RES (29)..(31): Xaa is C or S

SEQ ID NO: 110612 - protein, 31 aa, Artificial Sequence; identical to SEQ ID NO: 8764
  Cyclic GFR-binding peptide
  MOD_RES (3)..(4): Xaa is C or S

SEQ ID NO: 110613 - protein, 21 aa, Artificial Sequence
  Cyclic GFR-binding peptide
NAISILYFVGRKPKVLKKYRM

SEQ ID NO: 110614 - protein, 31 aa, Artificial Sequence; identical to SEQ ID NO: 8766
  Cyclic GFR-binding peptide
  MOD_RES (2)..(3): Xaa is C or S

SEQ ID NO: 110615 - protein, 32 aa, Artificial Sequence; identical to SEQ ID NO: 37471
  Cyclic GFR-binding peptide
  MOD_RES (6)..(7): Xaa is C or S

SEQ ID NO: 110616 - protein, 35 aa, Artificial Sequence
  Cyclic GFR-binding peptide
  MOD_RES (1)..(2)..(34): Xaa is C or S
XXVPTKLSAISILYLDKGVVTYLKNYQGMAVSEXG

SEQ ID NO: 110617 - protein, 30 aa, Artificial Sequence; identical to SEQ ID NO: 8770
  Cyclic GFR-binding peptide
  MOD_RES (27)..(29): Xaa is C or S

SEQ ID NO: 110618 - protein, 33 aa, Artificial Sequence; identical to SEQ ID NO: 90720
  Cyclic GFR-binding peptide
  MOD_RES (2)..(3): Xaa is C or S

SEQ ID NO: 110619 - protein, 34 aa, Artificial Sequence; identical to SEQ ID NO: 8772
  Cyclic GFR-binding peptide
  MOD_RES (31)..(33): Xaa is C or S

SEQ ID NO: 110620 - protein, 30 aa, Artificial Sequence; identical to SEQ ID NO: 8774
  Cyclic GFR-binding peptide
  MOD_RES (3)..(4): Xaa is C or S

SEQ ID NO: 110621 - protein, 41 aa, Artificial Sequence; identical to SEQ ID NO: 8776
  Cyclic GFR-binding peptide
  MOD_RES (6)..(7)..(38)..(40): Xaa is C or S

SEQ ID NO: 110622 - protein, 32 aa, Artificial Sequence
  Cyclic GFR-binding peptide
  MOD_RES (4)..(5): Xaa is C or S
SKAXXVPTKLSAISILYLDKGVVTYLKNYQGM

SEQ ID NO: 110623 - protein, 25 aa, Artificial Sequence
  Cyclic GFR-binding peptide
KMNAISMLYFNDKQQIILKKYRGMV

SEQ ID NO: 110624 - protein, 33 aa, Artificial Sequence; identical to SEQ ID NO: 19065
  Cyclic GFR-binding peptide
  MOD_RES (4)..(5): Xaa is C or S

SEQ ID NO: 110625 - protein, 28 aa, Artificial Sequence
  Cyclic GFR-binding peptide
ELNAISMLYFDEYDKVVLKKYREMVVEG

SEQ ID NO: 110626 - protein, 31 aa, Artificial Sequence; identical to SEQ ID NO: 8784
  Cyclic GFR-binding peptide
  MOD_RES (4)..(5): Xaa is C or S

SEQ ID NO: 110627 - protein, 38 aa, Artificial Sequence
  Cyclic GFR-binding peptide
  MOD_RES (6)..(7): Xaa is C or S
GSAGPXXTPTKMSAISMLYLNDKQQIILKNYQGMVVDR

SEQ ID NO: 110628 - protein, 35 aa, Artificial Sequence; identical to SEQ ID NO: 19069
  Cyclic GFR-binding peptide
  MOD_RES (1)..(33)..(35): Xaa is C or S

SEQ ID NO: 110629 - protein, 29 aa, Artificial Sequence
  Cyclic GFR-binding peptide
  MOD_RES (2)..(3): Xaa is C or S
TXXAPVKTNAISMLYFDNGRVLLLKKYRM

SEQ ID NO: 110630 - protein, 27 aa, Artificial Sequence
  Cyclic GFR-binding peptide
KLNAISILYFDKGVVTYLKKYRGMAVS

SEQ ID NO: 110631 - protein, 27 aa, Artificial Sequence
  Cyclic GFR-binding peptide
APTQLSAISVLYLDDSSNVILKNYQNM

SEQ ID NO: 110632 - protein, 35 aa, Artificial Sequence
  Cyclic GFR-binding peptide
  MOD_RES (1)..(2)..(34): Xaa is C or S
XXVPARLSAISILYLDAANNVVLKNYQDMVVEAXG

SEQ ID NO: 110633 - protein, 35 aa, Artificial Sequence
  Cyclic GFR-binding peptide
  MOD_RES (32)..(34): Xaa is C or S
VPTKLSAISILYLDKGVVTYLKNYQGMAVSEXGXR

SEQ ID NO: 110634 - protein, 25 aa, Artificial Sequence
  Cyclic GFR-binding peptide
PTELNAISMLYFDEYDKVVLKKYRE

SEQ ID NO: 110635 - protein, 24 aa, Artificial Sequence
  Cyclic GFR-binding peptide
LSAISILYLDAANNVVLKNYQDMV

SEQ ID NO: 110636 - protein, 24 aa, Artificial Sequence
  Cyclic GFR-binding peptide
MNAISILYFDENKNVVLKKYRNMT

SEQ ID NO: 110637 - protein, 34 aa, Artificial Sequence; identical to SEQ ID NO: 8796
  Cyclic GFR-binding peptide
  MOD_RES (31)..(33): Xaa is C or S

SEQ ID NO: 110638 - protein, 25 aa, Artificial Sequence
  Cyclic GFR-binding peptide
PEKMSAISILYLDENKNVVLKNYQN

SEQ ID NO: 110639 - protein, 32 aa, Artificial Sequence; identical to SEQ ID NO: 8797
  Cyclic GFR-binding peptide
  MOD_RES (1)..(32): Xaa is C or S

SEQ ID NO: 110640 - protein, 33 aa, Artificial Sequence; identical to SEQ ID NO: 37510
  Cyclic GFR-binding peptide
  MOD_RES (30)..(32): Xaa is C or S

SEQ ID NO: 110641 - protein, 31 aa, Artificial Sequence; identical to SEQ ID NO: 8798
  Cyclic GFR-binding peptide
  MOD_RES (31)..(31): Xaa is C or S

SEQ ID NO: 110642 - protein, 23 aa, Artificial Sequence
  Cyclic GFR-binding peptide
TELNAISMLYFDEYDKVVLKKYR

SEQ ID NO: 110643 - protein, 31 aa, Artificial Sequence; identical to SEQ ID NO: 37513
  Cyclic GFR-binding peptide
  MOD_RES (28)..(30): Xaa is C or S

SEQ ID NO: 110644 - protein, 30 aa, Artificial Sequence; identical to SEQ ID NO: 8800
  Cyclic GFR-binding peptide
  MOD_RES (4)..(5): Xaa is C or S

SEQ ID NO: 110645 - protein, 22 aa, Artificial Sequence
  Cyclic GFR-binding peptide
LSAISVLYLDDMGVPTLKNYQE

SEQ ID NO: 110646 - protein, 28 aa, Artificial Sequence
  Cyclic GFR-binding peptide
  MOD_RES (27)..(27): Xaa is C or S
LSAISILYLIGKTPKILKNYQMIVKSXK

SEQ ID NO: 110647 - protein, 30 aa, Artificial Sequence; identical to SEQ ID NO: 8804
  Cyclic GFR-binding peptide
  MOD_RES (3)..(4): Xaa is C or S

SEQ ID NO: 110648 - protein, 40 aa, Artificial Sequence; identical to SEQ ID NO: 8807
  Cyclic GFR-binding peptide
  MOD_RES (6)..(7)..(38)..(40): Xaa is C or S

SEQ ID NO: 110649 - protein, 30 aa, Artificial Sequence; identical to SEQ ID NO: 8810
  Cyclic GFR-binding peptide
  MOD_RES (29)..(29): Xaa is C or S

SEQ ID NO: 110650 - protein, 32 aa, Artificial Sequence; identical to SEQ ID NO: 8813
  Cyclic GFR-binding peptide
  MOD_RES (5)..(6): Xaa is C or S

SEQ ID NO: 110651 - protein, 31 aa, Artificial Sequence
  Cyclic GFR-binding peptide
  MOD_RES (31)..(31): Xaa is C or S
PARLSAISILYLDAANNVVLKNYQDMVVEAX

SEQ ID NO: 110652 - protein, 31 aa, Artificial Sequence; identical to SEQ ID NO: 95803
  Cyclic GFR-binding peptide
  MOD_RES (4)..(5): Xaa is C or S

SEQ ID NO: 110653 - protein, 37 aa, Artificial Sequence; identical to SEQ ID NO: 8814
  Cyclic GFR-binding peptide
  MOD_RES (2)..(3)..(34)..(36): Xaa is C or S

SEQ ID NO: 110654 - protein, 38 aa, Artificial Sequence; identical to SEQ ID NO: 8819
  Cyclic GFR-binding peptide
  MOD_RES (5)..(6)..(38): Xaa is C or S

SEQ ID NO: 110655 - protein, 30 aa, Artificial Sequence; identical to SEQ ID NO: 8821
  Cyclic GFR-binding peptide
  MOD_RES (29)..(29): Xaa is C or S

SEQ ID NO: 110656 - protein, 29 aa, Artificial Sequence
  Cyclic GFR-binding peptide
PEKMSAISILYLDENKNVVLKNYQNMTVE

SEQ ID NO: 110657 - protein, 29 aa, Artificial Sequence
  Cyclic GFR-binding peptide
  MOD_RES (26)..(28): Xaa is C or S
NAISILYFVGRKPKVLKKYRMIVRSXKXS

SEQ ID NO: 110658 - protein, 30 aa, Artificial Sequence; identical to SEQ ID NO: 8826
  Cyclic GFR-binding peptide

SEQ ID NO: 110659 - protein, 35 aa, Artificial Sequence
  Cyclic GFR-binding peptide
  MOD_RES (5)..(6): Xaa is C or S
SAGPXXTPTKMSAISMLYLNDKQQIILKNYQGMVV

SEQ ID NO: 110660 - protein, 29 aa, Artificial Sequence
  Cyclic GFR-binding peptide
  MOD_RES (1)..(1): Xaa is C or S
XAPTKLSAISVLYLDSSNNVILKNYQNMV

SEQ ID NO: 110661 - protein, 27 aa, Artificial Sequence
  Cyclic GFR-binding peptide
TRLNAISILYFDSANNVVLKKYRDMVV

SEQ ID NO: 110662 - protein, 30 aa, Artificial Sequence; identical to SEQ ID NO: 37550
  Cyclic GFR-binding peptide
  MOD_RES (2)..(3): Xaa is C or S

SEQ ID NO: 110663 - protein, 36 aa, Artificial Sequence
  Cyclic GFR-binding peptide
  MOD_RES (6)..(7): Xaa is C or S
AAPASXXVPARLSAISILYLDAANNVVLKNYQDMVV

SEQ ID NO: 110664 - protein, 31 aa, Artificial Sequence; identical to SEQ ID NO: 76765
  Cyclic GFR-binding peptide
  MOD_RES (31)..(31): Xaa is C or S

SEQ ID NO: 110665 - protein, 35 aa, Artificial Sequence; identical to SEQ ID NO: 37558
  Cyclic GFR-binding peptide
  MOD_RES (1)..(33)..(35): Xaa is C or S

SEQ ID NO: 110666 - protein, 35 aa, Artificial Sequence; identical to SEQ ID NO: 8838
  Cyclic GFR-binding peptide
  MOD_RES (1)..(32)..(34): Xaa is C or S

SEQ ID NO: 110667 - protein, 23 aa, Artificial Sequence
  Cyclic GFR-binding peptide
TSAISMLYLDNGRVLLLKNYQMI

SEQ ID NO: 110668 - protein, 34 aa, Artificial Sequence; identical to SEQ ID NO: 37561
  Cyclic GFR-binding peptide
  MOD_RES (1)..(2)..(34): Xaa is C or S

SEQ ID NO: 110669 - protein, 29 aa, Artificial Sequence
  Cyclic GFR-binding peptide
  MOD_RES (3)..(4): Xaa is C or S
SPXXVPQDLNAISILYFVGRTPKVLKKYR

SEQ ID NO: 110670 - protein, 32 aa, Artificial Sequence; identical to SEQ ID NO: 19119
  Cyclic GFR-binding peptide
  MOD_RES (3)..(4): Xaa is C or S

SEQ ID NO: 110671 - protein, 35 aa, Artificial Sequence; identical to SEQ ID NO: 8843
  Cyclic GFR-binding peptide
  MOD_RES (1)..(34): Xaa is C or S

SEQ ID NO: 110672 - protein, 29 aa, Artificial Sequence
  Cyclic GFR-binding peptide
  MOD_RES (2)..(2): Xaa is C or S
TXAPTKLSAISVLYLDDSSNVILKNYQNM

SEQ ID NO: 110673 - protein, 32 aa, Artificial Sequence; identical to SEQ ID NO: 19123
  Cyclic GFR-binding peptide
  MOD_RES (5)..(6): Xaa is C or S

SEQ ID NO: 110674 - protein, 27 aa, Artificial Sequence
  Cyclic GFR-binding peptide
PTKLSAISVLYLDDMGVPTLKNYQEGM

SEQ ID NO: 110675 - protein, 27 aa, Artificial Sequence
  Cyclic GFR-binding peptide
  MOD_RES (27)..(27): Xaa is C or S
LNAISILYFVGRTPKVLKKYRMVVKSX

SEQ ID NO: 110676 - protein, 22 aa, Artificial Sequence
  Cyclic GFR-binding peptide
LSAISVLYLDDSSNVILKNYQN

SEQ ID NO: 110677 - protein, 25 aa, Artificial Sequence
  Cyclic GFR-binding peptide
MNAISMLYFNDKQQIILKKYRGMVV

SEQ ID NO: 110678 - protein, 28 aa, Artificial Sequence
  Cyclic GFR-binding peptide
VPTELNAISMLYFDENEKVVLKKYRDMV

SEQ ID NO: 110679 - protein, 41 aa, Artificial Sequence; identical to SEQ ID NO: 8854
  Cyclic GFR-binding peptide
  MOD_RES (5)..(6)..(38)..(40): Xaa is C or S

SEQ ID NO: 110680 - protein, 24 aa, Artificial Sequence
  Cyclic GFR-binding peptide
LNAISILYFVGRKPKVLKKYRMIV

SEQ ID NO: 110681 - protein, 33 aa, Artificial Sequence; identical to SEQ ID NO: 19135
  Cyclic GFR-binding peptide
  MOD_RES (1)..(33): Xaa is C or S

SEQ ID NO: 110682 - protein, 29 aa, Artificial Sequence
  Cyclic GFR-binding peptide
  MOD_RES (1)..(1): Xaa is C or S
XAPTKLSAISVLYLDDSSNVILKNYQNMV

SEQ ID NO: 110683 - protein, 25 aa, Artificial Sequence
  Cyclic GFR-binding peptide
KMSAISMLYLNDKQQIILKNYQGMV

SEQ ID NO: 110684 - protein, 34 aa, Artificial Sequence
  Cyclic GFR-binding peptide
  MOD_RES (5)..(6): Xaa is C or S
IPEPXXVPEKMSAISILYLDENKNVVLKNYQNMT

SEQ ID NO: 110685 - protein, 27 aa, Artificial Sequence
  Cyclic GFR-binding peptide
QDLNAISILYFVGRTPKVLKKYRMVVK

SEQ ID NO: 110686 - protein, 32 aa, Artificial Sequence; identical to SEQ ID NO: 19140
  Cyclic GFR-binding peptide
  MOD_RES (2)..(3): Xaa is C or S

SEQ ID NO: 110687 - protein, 32 aa, Artificial Sequence
  Cyclic GFR-binding peptide
  MOD_RES (5)..(6): Xaa is C or S
APASXXVPARLSAISILYLDAANNVVLKNYQD

SEQ ID NO: 110688 - protein, 36 aa, Artificial Sequence; identical to SEQ ID NO: 8868
  Cyclic GFR-binding peptide
  MOD_RES (3)..(4)..(35): Xaa is C or S

SEQ ID NO: 110689 - protein, 35 aa, Artificial Sequence; identical to SEQ ID NO: 8869
  Cyclic GFR-binding peptide
  MOD_RES (5)..(6): Xaa is C or S

SEQ ID NO: 110690 - protein, 36 aa, Artificial Sequence; identical to SEQ ID NO: 8871
  Cyclic GFR-binding peptide
  MOD_RES (1)..(2)..(35): Xaa is C or S

SEQ ID NO: 110691 - protein, 34 aa, Artificial Sequence; identical to SEQ ID NO: 8872
  Cyclic GFR-binding peptide
  MOD_RES (6)..(6): Xaa is C or S

SEQ ID NO: 110692 - protein, 36 aa, Artificial Sequence; identical to SEQ ID NO: 19150
  Cyclic GFR-binding peptide
  MOD_RES (1)..(2)..(34)..(36): Xaa is C or S

SEQ ID NO: 110693 - protein, 30 aa, Artificial Sequence; identical to SEQ ID NO: 8873
  Cyclic GFR-binding peptide
  MOD_RES (3)..(4): Xaa is C or S

SEQ ID NO: 110694 - protein, 32 aa, Artificial Sequence; identical to SEQ ID NO: 8874
  Cyclic GFR-binding peptide
  MOD_RES (6)..(7): Xaa is C or S

SEQ ID NO: 110695 - protein, 22 aa, Artificial Sequence
  Cyclic GFR-binding peptide
LNAISILYFDSANNVVLKKYRD

SEQ ID NO: 110696 - protein, 35 aa, Artificial Sequence; identical to SEQ ID NO: 76790
  Cyclic GFR-binding peptide
  MOD_RES (1)..(2)..(34): Xaa is C or S

SEQ ID NO: 110697 - protein, 34 aa, Artificial Sequence; identical to SEQ ID NO: 8879
  Cyclic GFR-binding peptide
  MOD_RES (2)..(3)..(34): Xaa is C or S

SEQ ID NO: 110698 - protein, 33 aa, Artificial Sequence
  Cyclic GFR-binding peptide
  MOD_RES (1)..(2): Xaa is C or S
XXTPTKMSAISMLYLNDKQQIILKNYQGMVVDR

SEQ ID NO: 110699 - protein, 28 aa, Artificial Sequence
  Cyclic GFR-binding peptide
  MOD_RES (2)..(3): Xaa is C or S
AXXVPTELNAISMLYFDENEKVVLKKYR

SEQ ID NO: 110700 - protein, 42 aa, Artificial Sequence; identical to SEQ ID NO: 8884
  Cyclic GFR-binding peptide
  MOD_RES (5)..(6)..(39)..(41): Xaa is C or S

SEQ ID NO: 110701 - protein, 29 aa, Artificial Sequence
  Cyclic GFR-binding peptide
  MOD_RES (2)..(3): Xaa is C or S
AXXVPTKLNAISVLYFDDMGVPTLKKYRE

SEQ ID NO: 110702 - protein, 39 aa, Artificial Sequence; identical to SEQ ID NO: 8887
  Cyclic GFR-binding peptide
  MOD_RES (7)..(39): Xaa is C or S

SEQ ID NO: 110703 - protein, 31 aa, Artificial Sequence; identical to SEQ ID NO: 19170
  Cyclic GFR-binding peptide
  MOD_RES (1)..(1): Xaa is C or S

SEQ ID NO: 110704 - protein, 25 aa, Artificial Sequence
  Cyclic GFR-binding peptide
LSAISILYLVGRKPKVLKNYQMIVR

SEQ ID NO: 110705 - protein, 28 aa, Artificial Sequence
  Cyclic GFR-binding peptide
  MOD_RES (26)..(28): Xaa is C or S
SAISMLYLDNGRVLLLKNYQMIVEEXGX

SEQ ID NO: 110706 - protein, 30 aa, Artificial Sequence; identical to SEQ ID NO: 8890
  Cyclic GFR-binding peptide
  MOD_RES (28)..(30): Xaa is C or S

SEQ ID NO: 110707 - protein, 34 aa, Artificial Sequence; identical to SEQ ID NO: 95881
  Cyclic GFR-binding peptide
  MOD_RES (6)..(7): Xaa is C or S

SEQ ID NO: 110708 - protein, 32 aa, Artificial Sequence; identical to SEQ ID NO: 76799
  Cyclic GFR-binding peptide
  MOD_RES (1)..(1): Xaa is C or S

SEQ ID NO: 110709 - protein, 29 aa, Artificial Sequence
  Cyclic GFR-binding peptide
  MOD_RES (2)..(3): Xaa is C or S
TXXVPTRLNAISILYFDSANNVVLKKYRD

SEQ ID NO: 110710 - protein, 33 aa, Artificial Sequence; identical to SEQ ID NO: 8894
  Cyclic GFR-binding peptide
  MOD_RES (6)..(7): Xaa is C or S

SEQ ID NO: 110711 - protein, 38 aa, Artificial Sequence; identical to SEQ ID NO: 37606
  Cyclic GFR-binding peptide
  MOD_RES (6)..(7): Xaa is C or S

SEQ ID NO: 110712 - protein, 22 aa, Artificial Sequence
  Cyclic GFR-binding peptide
NAISILYFVGRTPKVLKKYRMV

SEQ ID NO: 110713 - protein, 30 aa, Artificial Sequence; identical to SEQ ID NO: 8899
  Cyclic GFR-binding peptide
  MOD_RES (4)..(5): Xaa is C or S

SEQ ID NO: 110714 - protein, 31 aa, Artificial Sequence; identical to SEQ ID NO: 8901
  Cyclic GFR-binding peptide
  MOD_RES (2)..(3): Xaa is C or S

SEQ ID NO: 110715 - protein, 39 aa, Artificial Sequence; identical to SEQ ID NO: 8902
  Cyclic GFR-binding peptide
  MOD_RES (6)..(7)..(38): Xaa is C or S

SEQ ID NO: 110716 - protein, 33 aa, Artificial Sequence
  Cyclic GFR-binding peptide
  MOD_RES (3)..(4): Xaa is C or S
GPXXTPTKMSAISMLYLNDKQQIILKNYQGMVV

SEQ ID NO: 110717 - protein, 31 aa, Artificial Sequence; identical to SEQ ID NO: 37619
  Cyclic GFR-binding peptide
  MOD_RES (3)..(4): Xaa is C or S

SEQ ID NO: 110718 - protein, 31 aa, Artificial Sequence; identical to SEQ ID NO: 8907
  Cyclic GFR-binding peptide
  MOD_RES (28)..(30): Xaa is C or S

SEQ ID NO: 110719 - protein, 40 aa, Artificial Sequence; identical to SEQ ID NO: 8908
  Cyclic GFR-binding peptide
  MOD_RES (4)..(5)..(37)..(39): Xaa is C or S

SEQ ID NO: 110720 - protein, 32 aa, Artificial Sequence
  Cyclic GFR-binding peptide
  MOD_RES (6)..(7): Xaa is C or S
HVPKPXXAPTKLSAISVLYLDDSSNVILKNYQ

SEQ ID NO: 110721 - protein, 31 aa, Artificial Sequence; identical to SEQ ID NO: 8909
  Cyclic GFR-binding peptide
  MOD_RES (3)..(4): Xaa is C or S

SEQ ID NO: 110722 - protein, 26 aa, Artificial Sequence
  Cyclic GFR-binding peptide
DLSAISILYLVGRTPKVLKNYQMVVK

SEQ ID NO: 110723 - protein, 31 aa, Artificial Sequence; identical to SEQ ID NO: 8915
  Cyclic GFR-binding peptide
  MOD_RES (30)..(30): Xaa is C or S

SEQ ID NO: 110724 - protein, 33 aa, Artificial Sequence; identical to SEQ ID NO: 8916
  Cyclic GFR-binding peptide
  MOD_RES (1)..(32): Xaa is C or S

SEQ ID NO: 110725 - protein, 33 aa, Artificial Sequence
  Cyclic GFR-binding peptide
  MOD_RES (6)..(7): Xaa is C or S
GIPEPXXVPEKMSAISILYLDENKNVVLKNYQN

SEQ ID NO: 110726 - protein, 36 aa, Artificial Sequence; identical to SEQ ID NO: 90868
  Cyclic GFR-binding peptide
  MOD_RES (5)..(6): Xaa is C or S

SEQ ID NO: 110727 - protein, 30 aa, Artificial Sequence; identical to SEQ ID NO: 8918
  Cyclic GFR-binding peptide
  MOD_RES (27)..(29): Xaa is C or S

SEQ ID NO: 110728 - protein, 33 aa, Artificial Sequence; identical to SEQ ID NO: 8921
  Cyclic GFR-binding peptide
  MOD_RES (1)..(32): Xaa is C or S

SEQ ID NO: 110729 - protein, 29 aa, Artificial Sequence
  Cyclic GFR-binding peptide
  MOD_RES (1)..(1): Xaa is C or S
XVPARLNAISILYFDAANNVVLKKYRDMV

SEQ ID NO: 110730 - protein, 38 aa, Artificial Sequence
  Cyclic GFR-binding peptide
  MOD_RES (5)..(6)..(38): Xaa is C or S
APASXXVPARLSAISILYLDAANNVVLKNYQDMVVEAX

SEQ ID NO: 110731 - protein, 29 aa, Artificial Sequence
  Cyclic GFR-binding peptide
PTKLSAISILYLDKGVVTYLKNYQGMAVS

SEQ ID NO: 110732 - protein, 26 aa, Artificial Sequence
  Cyclic GFR-binding peptide
KLSAISVLYLDSSNNVILKNYQNMVV

SEQ ID NO: 110733 - protein, 33 aa, Artificial Sequence
  Cyclic GFR-binding peptide
  MOD_RES (3)..(4): Xaa is C or S
STXXAPVKTSAISMLYLDNGRVLLLKNYQMIVE

SEQ ID NO: 110734 - protein, 36 aa, Artificial Sequence; identical to SEQ ID NO: 8928
  Cyclic GFR-binding peptide
  MOD_RES (1)..(2)..(33)..(35): Xaa is C or S

SEQ ID NO: 110735 - protein, 40 aa, Artificial Sequence; identical to SEQ ID NO: 8929
  Cyclic GFR-binding peptide
  MOD_RES (4)..(5)..(37)..(39): Xaa is C or S

SEQ ID NO: 110736 - protein, 28 aa, Artificial Sequence
  Cyclic GFR-binding peptide
EKMSAISILYLDENKNVVLKNYQNMTVE

SEQ ID NO: 110737 - protein, 32 aa, Artificial Sequence; identical to SEQ ID NO: 8931
  Cyclic GFR-binding peptide
  MOD_RES (1)..(2): Xaa is C or S

SEQ ID NO: 110738 - protein, 28 aa, Artificial Sequence
  Cyclic GFR-binding peptide
  MOD_RES (1)..(1): Xaa is C or S
XTPTKMNAISMLYFNDKQQIILKKYRGM

SEQ ID NO: 110739 - protein, 32 aa, Artificial Sequence; identical to SEQ ID NO: 8936
  Cyclic GFR-binding peptide
  MOD_RES (32)..(32): Xaa is C or S

SEQ ID NO: 110740 - protein, 40 aa, Artificial Sequence; identical to SEQ ID NO: 76816
  Cyclic GFR-binding peptide
  MOD_RES (5)..(6)..(38)..(40): Xaa is C or S

SEQ ID NO: 110741 - protein, 34 aa, Artificial Sequence; identical to SEQ ID NO: 76817
  Cyclic GFR-binding peptide
  MOD_RES (4)..(5): Xaa is C or S

SEQ ID NO: 110742 - protein, 28 aa, Artificial Sequence
  Cyclic GFR-binding peptide
PEKMNAISILYFDENKNVVLKKYRNMTV

SEQ ID NO: 110743 - protein, 31 aa, Artificial Sequence; identical to SEQ ID NO: 8939
  Cyclic GFR-binding peptide
  MOD_RES (1)..(2): Xaa is C or S

SEQ ID NO: 110744 - protein, 23 aa, Artificial Sequence
  Cyclic GFR-binding peptide
QALNAISILYFVGRKPKVLKKYR

SEQ ID NO: 110745 - protein, 25 aa, Artificial Sequence
  Cyclic GFR-binding peptide
LNAISILYFDAANNVVLKKYRDMVV

SEQ ID NO: 110746 - protein, 33 aa, Artificial Sequence; identical to SEQ ID NO: 8942
  Cyclic GFR-binding peptide
  MOD_RES (4)..(5): Xaa is C or S

SEQ ID NO: 110747 - protein, 33 aa, Artificial Sequence; identical to SEQ ID NO: 8943
  Cyclic GFR-binding peptide
  MOD_RES (5)..(6): Xaa is C or S

SEQ ID NO: 110748 - protein, 32 aa, Artificial Sequence; identical to SEQ ID NO: 76824
  Cyclic GFR-binding peptide
  MOD_RES (5)..(6): Xaa is C or S

SEQ ID NO: 110749 - protein, 38 aa, Artificial Sequence; identical to SEQ ID NO: 8949
  Cyclic GFR-binding peptide
  MOD_RES (4)..(5)..(37): Xaa is C or S

SEQ ID NO: 110750 - protein, 26 aa, Artificial Sequence
  Cyclic GFR-binding peptide
QDLSAISILYLVGRTPKVLKNYQMVV

SEQ ID NO: 110751 - protein, 33 aa, Artificial Sequence; identical to SEQ ID NO: 8953
  Cyclic GFR-binding peptide
  MOD_RES (5)..(6): Xaa is C or S

SEQ ID NO: 110752 - protein, 25 aa, Artificial Sequence
  Cyclic GFR-binding peptide
VPQALSAISILYLVGRKPKVLKNYQ

SEQ ID NO: 110753 - protein, 34 aa, Artificial Sequence
  Cyclic GFR-binding peptide
  MOD_RES (1)..(2)..(34): Xaa is C or S
XXVPTKLSAISILYLDKGVVTYLKNYQGMAVSEX

SEQ ID NO: 110754 - protein, 22 aa, Artificial Sequence
  Cyclic GFR-binding peptide
ALSAISILYLVGRKPKVLKNYQ

SEQ ID NO: 110755 - protein, 39 aa, Artificial Sequence
  Cyclic GFR-binding peptide
  MOD_RES (5)..(6)..(38): Xaa is C or S
ASKAXXVPTKLSAISILYLDKGVVTYLKNYQGMAVSEXG

SEQ ID NO: 110756 - protein, 23 aa, Artificial Sequence
  Cyclic GFR-binding peptide
TKLSAISILYLDKGVVTYLKNYQ

SEQ ID NO: 110757 - protein, 28 aa, Artificial Sequence
  Cyclic GFR-binding peptide
  MOD_RES (26)..(28): Xaa is C or S
NAISILYFVGRKPKVLKKYRMIVRSXKX

SEQ ID NO: 110758 - protein, 30 aa, Artificial Sequence; identical to SEQ ID NO: 90942
  Cyclic GFR-binding peptide
  MOD_RES (4)..(5): Xaa is C or S

SEQ ID NO: 110759 - protein, 24 aa, Artificial Sequence
  Cyclic GFR-binding peptide
ALSAISILYLVGRKPKVLKNYQMI

SEQ ID NO: 110760 - protein, 29 aa, Artificial Sequence
  Cyclic GFR-binding peptide
  MOD_RES (3)..(4): Xaa is C or S
PTXXVPTRLSAISILYLDSANNVVLKNYQ

SEQ ID NO: 110761 - protein, 28 aa, Artificial Sequence
  Cyclic GFR-binding peptide
  MOD_RES (28)..(28): Xaa is C or S
LNAISILYFDKGVVTYLKKYRGMAVSEX

SEQ ID NO: 110762 - protein, 26 aa, Artificial Sequence
  Cyclic GFR-binding peptide
KTNAISMLYFDNGRVLLLKKYRMIVE

SEQ ID NO: 110763 - protein, 33 aa, Artificial Sequence; identical to SEQ ID NO: 76833
  Cyclic GFR-binding peptide
  MOD_RES (4)..(5): Xaa is C or S

SEQ ID NO: 110764 - protein, 27 aa, Artificial Sequence
  Cyclic GFR-binding peptide
TPTKMSAISMLYLNDKQQIILKNYQGM

SEQ ID NO: 110765 - protein, 32 aa, Artificial Sequence; identical to SEQ ID NO: 76834
  Cyclic GFR-binding peptide
  MOD_RES (30)..(32): Xaa is C or S

SEQ ID NO: 110766 - protein, 27 aa, Artificial Sequence
  Cyclic GFR-binding peptide
KTNAISMLYFDNGRVLLLKKYRMIVEE

SEQ ID NO: 110767 - protein, 32 aa, Artificial Sequence; identical to SEQ ID NO: 8984
  Cyclic GFR-binding peptide
  MOD_RES (5)..(5): Xaa is C or S

SEQ ID NO: 110768 - protein, 35 aa, Artificial Sequence; identical to SEQ ID NO: 95968
  Cyclic GFR-binding peptide
  MOD_RES (1)..(2)..(34): Xaa is C or S

SEQ ID NO: 110769 - protein, 32 aa, Artificial Sequence; identical to SEQ ID NO: 8985
  Cyclic GFR-binding peptide
  MOD_RES (29)..(31): Xaa is C or S

SEQ ID NO: 110770 - protein, 35 aa, Artificial Sequence
  Cyclic GFR-binding peptide
  MOD_RES (3)..(4): Xaa is C or S
GPXXTPTKMSAISMLYLNDKQQIILKNYQGMVVDR

SEQ ID NO: 110771 - protein, 26 aa, Artificial Sequence
  Cyclic GFR-binding peptide
TNAISMLYFDNGRVLLLKKYRMIVEE

SEQ ID NO: 110772 - protein, 34 aa, Artificial Sequence; identical to SEQ ID NO: 8988
  Cyclic GFR-binding peptide
  MOD_RES (2)..(3)..(34): Xaa is C or S

SEQ ID NO: 110773 - protein, 32 aa, Artificial Sequence
  Cyclic GFR-binding peptide
  MOD_RES (31)..(31): Xaa is C or S
PARLSAISILYLDAANNVVLKNYQDMVVEAXG

SEQ ID NO: 110774 - protein, 24 aa, Artificial Sequence
  Cyclic GFR-binding peptide
SAISILYLDKGVVTYLKNYQGMAV

SEQ ID NO: 110775 - protein, 33 aa, Artificial Sequence; identical to SEQ ID NO: 8993
  Cyclic GFR-binding peptide
  MOD_RES (33)..(33): Xaa is C or S

SEQ ID NO: 110776 - protein, 39 aa, Artificial Sequence
  Cyclic GFR-binding peptide
  MOD_RES (5)..(6)..(38): Xaa is C or S
SAGPXXTPTKMSAISMLYLNDKQQIILKNYQGMVVDRXG

SEQ ID NO: 110777 - protein, 32 aa, Artificial Sequence; identical to SEQ ID NO: 8997
  Cyclic GFR-binding peptide
  MOD_RES (5)..(6): Xaa is C or S

SEQ ID NO: 110778 - protein, 25 aa, Artificial Sequence
  Cyclic GFR-binding peptide
TKLNAISVLYFDDMGVPTLKKYREG

SEQ ID NO: 110779 - protein, 36 aa, Artificial Sequence; identical to SEQ ID NO: 76848
  Cyclic GFR-binding peptide
  MOD_RES (5)..(6): Xaa is C or S

SEQ ID NO: 110780 - protein, 28 aa, Artificial Sequence
  Cyclic GFR-binding peptide
TKLSAISILYLDKGVVTYLKNYQGMAVS

SEQ ID NO: 110781 - protein, 26 aa, Artificial Sequence
  Cyclic GFR-binding peptide
NAISMLYFNDKQQIILKKYRGMVVDR

SEQ ID NO: 110782 - protein, 36 aa, Artificial Sequence; identical to SEQ ID NO: 37726
  Cyclic GFR-binding peptide
  MOD_RES (2)..(3)..(35): Xaa is C or S

SEQ ID NO: 110783 - protein, 35 aa, Artificial Sequence; identical to SEQ ID NO: 9002
  Cyclic GFR-binding peptide
  MOD_RES (5)..(6): Xaa is C or S

SEQ ID NO: 110784 - protein, 32 aa, Artificial Sequence
  Cyclic GFR-binding peptide
  MOD_RES (2)..(3): Xaa is C or S
PXXVPEKMSAISILYLDENKNVVLKNYQNMTV

SEQ ID NO: 110785 - protein, 32 aa, Artificial Sequence; identical to SEQ ID NO: 76852
  Cyclic GFR-binding peptide
  MOD_RES (30)..(32): Xaa is C or S

SEQ ID NO: 110786 - protein, 24 aa, Artificial Sequence
  Cyclic GFR-binding peptide
PTKLNAISILYFDKGVVTYLKKYR

SEQ ID NO: 110787 - protein, 38 aa, Artificial Sequence; identical to SEQ ID NO: 37731
  Cyclic GFR-binding peptide
  MOD_RES (3)..(4)..(36)..(38): Xaa is C or S

SEQ ID NO: 110788 - protein, 30 aa, Artificial Sequence; identical to SEQ ID NO: 9006
  Cyclic GFR-binding peptide
  MOD_RES (2)..(3): Xaa is C or S

SEQ ID NO: 110789 - protein, 26 aa, Artificial Sequence
  Cyclic GFR-binding peptide
PTRLNAISILYFDSANNVVLKKYRDM

SEQ ID NO: 110790 - protein, 27 aa, Artificial Sequence
  Cyclic GFR-binding peptide
  MOD_RES (1)..(1): Xaa is C or S
XVPQALSAISILYLVGRKPKVLKNYQM

SEQ ID NO: 110791 - protein, 24 aa, Artificial Sequence
  Cyclic GFR-binding peptide
PTKLSAISVLYLDSSNNVILKNYQ

SEQ ID NO: 110792 - protein, 33 aa, Artificial Sequence; identical to SEQ ID NO: 19267
  Cyclic GFR-binding peptide
  MOD_RES (5)..(6): Xaa is C or S

SEQ ID NO: 110793 - protein, 27 aa, Artificial Sequence
  Cyclic GFR-binding peptide
  MOD_RES (1)..(2): Xaa is C or S
XXVPARLNAISILYFDAANNVVLKKYR

SEQ ID NO: 110794 - protein, 39 aa, Artificial Sequence; identical to SEQ ID NO: 9014
  Cyclic GFR-binding peptide
  MOD_RES (4)..(5)..(38): Xaa is C or S

SEQ ID NO: 110795 - protein, 42 aa, Artificial Sequence; identical to SEQ ID NO: 37739
  Cyclic GFR-binding peptide
  MOD_RES (6)..(7)..(39)..(41): Xaa is C or S

SEQ ID NO: 110796 - protein, 26 aa, Artificial Sequence
  Cyclic GFR-binding peptide
VPTKLNAISVLYFDDMGVPTLKKYRE

SEQ ID NO: 110797 - protein, 35 aa, Artificial Sequence; identical to SEQ ID NO: 19272
  Cyclic GFR-binding peptide
  MOD_RES (32)..(34): Xaa is C or S

SEQ ID NO: 110798 - protein, 36 aa, Artificial Sequence; identical to SEQ ID NO: 9027
  Cyclic GFR-binding peptide
  MOD_RES (3)..(35): Xaa is C or S

SEQ ID NO: 110799 - protein, 39 aa, Artificial Sequence; identical to SEQ ID NO: 9031
  Cyclic GFR-binding peptide
  MOD_RES (6)..(7)..(39): Xaa is C or S

SEQ ID NO: 110800 - protein, 28 aa, Artificial Sequence
  Cyclic GFR-binding peptide
  MOD_RES (27)..(27): Xaa is C or S
SAISILYLDKGVVTYLKNYQGMAVSEXG

SEQ ID NO: 110801 - protein, 29 aa, Artificial Sequence
  Cyclic GFR-binding peptide
  MOD_RES (27)..(29): Xaa is C or S
SAISILYLDENKNVVLKNYQNMTVESXAX

SEQ ID NO: 110802 - protein, 29 aa, Artificial Sequence
  Cyclic GFR-binding peptide
  MOD_RES (2)..(3): Xaa is C or S
PXXTPTKMNAISMLYFNDKQQIILKKYRG

SEQ ID NO: 110803 - protein, 30 aa, Artificial Sequence; identical to SEQ ID NO: 76871
  Cyclic GFR-binding peptide
  MOD_RES (28)..(30): Xaa is C or S

SEQ ID NO: 110804 - protein, 40 aa, Artificial Sequence
  Cyclic GFR-binding peptide
  MOD_RES (6)..(7)..(39): Xaa is C or S
GSAGPXXTPTKMSAISMLYLNDKQQIILKNYQGMVVDRXG

SEQ ID NO: 110805 - protein, 20 aa, Artificial Sequence
  Cyclic GFR-binding peptide
SAISVLYLDSSNNVILKNYQ

SEQ ID NO: 110806 - protein, 35 aa, Artificial Sequence
  Cyclic GFR-binding peptide
  MOD_RES (1)..(33)..(35): Xaa is C or S
XVPEKMSAISILYLDENKNVVLKNYQNMTVESXAX

SEQ ID NO: 110807 - protein, 38 aa, Artificial Sequence; identical to SEQ ID NO: 90991
  Cyclic GFR-binding peptide
  MOD_RES (5)..(6)..(38): Xaa is C or S

SEQ ID NO: 110808 - protein, 27 aa, Artificial Sequence
  Cyclic GFR-binding peptide
PTKLSAISILYLDKGVVTYLKNYQGMA

SEQ ID NO: 110809 - protein, 34 aa, Artificial Sequence
  Cyclic GFR-binding peptide
  MOD_RES (2)..(3): Xaa is C or S
AXXVPTKLSAISILYLDKGVVTYLKNYQGMAVSE

SEQ ID NO: 110810 - protein, 29 aa, Artificial Sequence
  Cyclic GFR-binding peptide
  MOD_RES (27)..(29): Xaa is C or S
NAISILYFDKGVVTYLKKYRGMAVSEXGX

SEQ ID NO: 110811 - protein, 30 aa, Artificial Sequence; identical to SEQ ID NO: 37763
  Cyclic GFR-binding peptide

SEQ ID NO: 110812 - protein, 27 aa, Artificial Sequence
  Cyclic GFR-binding peptide
LNAISVLYFDSSNNVILKKYRNMVVKA

SEQ ID NO: 110813 - protein, 31 aa, Artificial Sequence
  Cyclic GFR-binding peptide
  MOD_RES (29)..(31): Xaa is C or S
KMSAISMLYLNDKQQIILKNYQGMVVDRXGX

SEQ ID NO: 110814 - protein, 21 aa, Artificial Sequence
  Cyclic GFR-binding peptide
MNAISILYFDENKNVVLKKYR

SEQ ID NO: 110815 - protein, 33 aa, Artificial Sequence; identical to SEQ ID NO: 9040
  Cyclic GFR-binding peptide
  MOD_RES (1)..(2): Xaa is C or S

SEQ ID NO: 110816 - protein, 29 aa, Artificial Sequence
  Cyclic GFR-binding peptide
  MOD_RES (27)..(29): Xaa is C or S
NAISMLYFNDKQQIILKKYRGMVVDRXGX

SEQ ID NO: 110817 - protein, 33 aa, Artificial Sequence; identical to SEQ ID NO: 9041
  Cyclic GFR-binding peptide
  MOD_RES (31)..(33): Xaa is C or S

SEQ ID NO: 110818 - protein, 30 aa, Artificial Sequence; identical to SEQ ID NO: 9042
  Cyclic GFR-binding peptide
  MOD_RES (29)..(29): Xaa is C or S

SEQ ID NO: 110819 - protein, 30 aa, Artificial Sequence; identical to SEQ ID NO: 91001
  Cyclic GFR-binding peptide
  MOD_RES (1)..(1): Xaa is C or S

SEQ ID NO: 110820 - protein, 25 aa, Artificial Sequence
  Cyclic GFR-binding peptide
KLSAISILYLDKGVVTYLKNYQGMA

SEQ ID NO: 110821 - protein, 34 aa, Artificial Sequence; identical to SEQ ID NO: 9046
  Cyclic GFR-binding peptide
  MOD_RES (6)..(7): Xaa is C or S

SEQ ID NO: 110822 - protein, 28 aa, Artificial Sequence
  Cyclic GFR-binding peptide
VPQDLNAISILYFVGRTPKVLKKYRMVV

SEQ ID NO: 110823 - protein, 34 aa, Artificial Sequence
  Cyclic GFR-binding peptide
  MOD_RES (5)..(6): Xaa is C or S
APASXXVPARLSAISILYLDAANNVVLKNYQDMV

SEQ ID NO: 110824 - protein, 24 aa, Artificial Sequence
  Cyclic GFR-binding peptide
KLSAISVLYLDDSSNVILKNYQNM

SEQ ID NO: 110825 - protein, 33 aa, Artificial Sequence; identical to SEQ ID NO: 9051
  Cyclic GFR-binding peptide
  MOD_RES (6)..(7): Xaa is C or S

SEQ ID NO: 110826 - protein, 29 aa, Artificial Sequence
  Cyclic GFR-binding peptide
EKMNAISILYFDENKNVVLKKYRNMTVES

SEQ ID NO: 110827 - protein, 21 aa, Artificial Sequence
  Cyclic GFR-binding peptide
LSAISILYLIGKTPKILKNYQ

SEQ ID NO: 110828 - protein, 27 aa, Artificial Sequence
  Cyclic GFR-binding peptide
DLNAISILYFVGRTPKVLKKYRMVVKS

SEQ ID NO: 110829 - protein, 24 aa, Artificial Sequence
  Cyclic GFR-binding peptide
RLSAISILYLDSANNVVLKNYQDM

SEQ ID NO: 110830 - protein, 30 aa, Artificial Sequence; identical to SEQ ID NO: 91007
  Cyclic GFR-binding peptide
  MOD_RES (30)..(30): Xaa is C or S

SEQ ID NO: 110831 - protein, 31 aa, Artificial Sequence; identical to SEQ ID NO: 9056
  Cyclic GFR-binding peptide
  MOD_RES (5)..(6): Xaa is C or S

SEQ ID NO: 110832 - protein, 27 aa, Artificial Sequence
  Cyclic GFR-binding peptide
LSAISILYLDAANNVVLKNYQDMVVEA

SEQ ID NO: 110833 - protein, 34 aa, Artificial Sequence; identical to SEQ ID NO: 9059
  Cyclic GFR-binding peptide
  MOD_RES (32)..(34): Xaa is C or S

SEQ ID NO: 110834 - protein, 28 aa, Artificial Sequence
  Cyclic GFR-binding peptide
  MOD_RES (1)..(2): Xaa is C or S
XXVPTRLSAISILYLDSANNVVLKNYQD

SEQ ID NO: 110835 - protein, 25 aa, Artificial Sequence
  Cyclic GFR-binding peptide
QALNAISILYFVGRKPKVLKKYRMI

SEQ ID NO: 110836 - protein, 26 aa, Artificial Sequence
  Cyclic GFR-binding peptide
PEKMNAISILYFDENKNVVLKKYRNM

SEQ ID NO: 110837 - protein, 32 aa, Artificial Sequence; identical to SEQ ID NO: 9064
  Cyclic GFR-binding peptide
  MOD_RES (30)..(32): Xaa is C or S

SEQ ID NO: 110838 - protein, 26 aa, Artificial Sequence
  Cyclic GFR-binding peptide
SAISILYLDKGVVTYLKNYQGMAVSE

SEQ ID NO: 110839 - protein, 33 aa, Artificial Sequence
  Cyclic GFR-binding peptide
  MOD_RES (31)..(33): Xaa is C or S
PTKLSAISILYLDKGVVTYLKNYQGMAVSEXGX

SEQ ID NO: 110840 - protein, 34 aa, Artificial Sequence; identical to SEQ ID NO: 9068
  Cyclic GFR-binding peptide
  MOD_RES (1)..(33): Xaa is C or S

SEQ ID NO: 110841 - protein, 29 aa, Artificial Sequence
  Cyclic GFR-binding peptide
  MOD_RES (1)..(2): Xaa is C or S
XXTPTKMNAISMLYFNDKQQIILKKYRGM

SEQ ID NO: 110842 - protein, 34 aa, Artificial Sequence; identical to SEQ ID NO: 76883
  Cyclic GFR-binding peptide
  MOD_RES (6)..(7): Xaa is C or S

SEQ ID NO: 110843 - protein, 29 aa, Artificial Sequence
  Cyclic GFR-binding peptide
  MOD_RES (28)..(28): Xaa is C or S
LSAISILYLDAANNVVLKNYQDMVVEAXG

SEQ ID NO: 110844 - protein, 35 aa, Artificial Sequence; identical to SEQ ID NO: 9070
  Cyclic GFR-binding peptide
  MOD_RES (2)..(3)..(34): Xaa is C or S

SEQ ID NO: 110845 - protein, 41 aa, Artificial Sequence; identical to SEQ ID NO: 37800
  Cyclic GFR-binding peptide
  MOD_RES (5)..(6)..(38)..(40): Xaa is C or S

SEQ ID NO: 110846 - protein, 35 aa, Artificial Sequence; identical to SEQ ID NO: 9072
  Cyclic GFR-binding peptide
  MOD_RES (1)..(2)..(33)..(35): Xaa is C or S

SEQ ID NO: 110847 - protein, 35 aa, Artificial Sequence; identical to SEQ ID NO: 9073
  Cyclic GFR-binding peptide
  MOD_RES (4)..(5): Xaa is C or S

SEQ ID NO: 110848 - protein, 33 aa, Artificial Sequence
  Cyclic GFR-binding peptide
  MOD_RES (6)..(7): Xaa is C or S
GSAGPXXTPTKMSAISMLYLNDKQQIILKNYQG

SEQ ID NO: 110849 - protein, 21 aa, Artificial Sequence
  Cyclic GFR-binding peptide
LNAISVLYFDSSNNVILKKYR

SEQ ID NO: 110850 - protein, 28 aa, Artificial Sequence
  Cyclic GFR-binding peptide
  MOD_RES (27)..(27): Xaa is C or S
SAISVLYLDDSSNVILKNYQNMVVRAXG

SEQ ID NO: 110851 - protein, 30 aa, Artificial Sequence
  Cyclic GFR-binding peptide
  MOD_RES (1)..(1): Xaa is C or S
XTPTKMSAISMLYLNDKQQIILKNYQGMVV

SEQ ID NO: 110852 - protein, 34 aa, Artificial Sequence; identical to SEQ ID NO: 76887
  Cyclic GFR-binding peptide
  MOD_RES (3)..(4): Xaa is C or S

SEQ ID NO: 110853 - protein, 33 aa, Artificial Sequence
  Cyclic GFR-binding peptide
  MOD_RES (30)..(32): Xaa is C or S
TKMSAISMLYLNDKQQIILKNYQGMVVDRXGXS

SEQ ID NO: 110854 - protein, 29 aa, Artificial Sequence
  Cyclic GFR-binding peptide
  MOD_RES (1)..(1): Xaa is C or S
XVPQDLSAISILYLVGRTPKVLKNYQMVV

SEQ ID NO: 110855 - protein, 33 aa, Artificial Sequence; identical to SEQ ID NO: 9080
  Cyclic GFR-binding peptide
  MOD_RES (2)..(3): Xaa is C or S

SEQ ID NO: 110856 - protein, 33 aa, Artificial Sequence; identical to SEQ ID NO: 9081
  Cyclic GFR-binding peptide
  MOD_RES (2)..(3): Xaa is C or S

SEQ ID NO: 110857 - protein, 36 aa, Artificial Sequence; identical to SEQ ID NO: 9083
  Cyclic GFR-binding peptide
  MOD_RES (4)..(5): Xaa is C or S

SEQ ID NO: 110858 - protein, 40 aa, Artificial Sequence; identical to SEQ ID NO: 19324
  Cyclic GFR-binding peptide
  MOD_RES (4)..(5)..(37)..(39): Xaa is C or S

SEQ ID NO: 110859 - protein, 33 aa, Artificial Sequence; identical to SEQ ID NO: 9086
  Cyclic GFR-binding peptide
  MOD_RES (5)..(6): Xaa is C or S

SEQ ID NO: 110860 - protein, 29 aa, Artificial Sequence
  Cyclic GFR-binding peptide
  MOD_RES (29)..(29): Xaa is C or S
KMSAISMLYLNDKQQIILKNYQGMVVDRX

SEQ ID NO: 110861 - protein, 36 aa, Artificial Sequence; identical to SEQ ID NO: 9087
  Cyclic GFR-binding peptide
  MOD_RES (33)..(35): Xaa is C or S

SEQ ID NO: 110862 - protein, 36 aa, Artificial Sequence; identical to SEQ ID NO: 9088
  Cyclic GFR-binding peptide
  MOD_RES (6)..(7): Xaa is C or S

SEQ ID NO: 110863 - protein, 33 aa, Artificial Sequence; identical to SEQ ID NO: 9089
  Cyclic GFR-binding peptide
  MOD_RES (2)..(3): Xaa is C or S

SEQ ID NO: 110864 - protein, 38 aa, Artificial Sequence; identical to SEQ ID NO: 9090
  Cyclic GFR-binding peptide
  MOD_RES (5)..(6)..(37): Xaa is C or S

SEQ ID NO: 110865 - protein, 25 aa, Artificial Sequence
  Cyclic GFR-binding peptide
LNAISMLYFDEYDKVVLKKYREMVV

SEQ ID NO: 110866 - protein, 38 aa, Artificial Sequence
  Cyclic GFR-binding peptide
  MOD_RES (6)..(7)..(38): Xaa is C or S
RVPSTXXAPVKTSAISMLYLDNGRVLLLKNYQMIVEEX

SEQ ID NO: 110867 - protein, 30 aa, Artificial Sequence
  Cyclic GFR-binding peptide
  MOD_RES (28)..(30): Xaa is C or S
MSAISILYLDENKNVVLKNYQNMTVESXAX

SEQ ID NO: 110868 - protein, 31 aa, Artificial Sequence
  Cyclic GFR-binding peptide
  MOD_RES (29)..(31): Xaa is C or S
RLSAISILYLDAANNVVLKNYQDMVVEAXGX

SEQ ID NO: 110869 - protein, 34 aa, Artificial Sequence; identical to SEQ ID NO: 9096
  Cyclic GFR-binding peptide
  MOD_RES (31)..(33): Xaa is C or S

SEQ ID NO: 110870 - protein, 36 aa, Artificial Sequence
  Cyclic GFR-binding peptide
  MOD_RES (1)..(2)..(34)..(36): Xaa is C or S
XXVPARLSAISILYLDAANNVVLKNYQDMVVEAXGX

SEQ ID NO: 110871 - protein, 25 aa, Artificial Sequence
  Cyclic GFR-binding peptide
LNAISILYFVGRTPKVLKKYRMVVK

SEQ ID NO: 110872 - protein, 29 aa, Artificial Sequence
  Cyclic GFR-binding peptide
  MOD_RES (27)..(29): Xaa is C or S
NAISVLYFDSSNNVILKKYRNMVVKAXGX

SEQ ID NO: 110873 - protein, 23 aa, Artificial Sequence
  Cyclic GFR-binding peptide
TKLSAISVLYLDDSSNVILKNYQ

SEQ ID NO: 110874 - protein, 30 aa, Artificial Sequence
  Cyclic GFR-binding peptide
  MOD_RES (4)..(5): Xaa is C or S
PASXXVPARLSAISILYLDAANNVVLKNYQ

SEQ ID NO: 110875 - protein, 33 aa, Artificial Sequence; identical to SEQ ID NO: 9107
  Cyclic GFR-binding peptide
  MOD_RES (1)..(2)..(33): Xaa is C or S

SEQ ID NO: 110876 - protein, 38 aa, Artificial Sequence; identical to SEQ ID NO: 9109
  Cyclic GFR-binding peptide
  MOD_RES (2)..(3)..(36)..(38): Xaa is C or S

SEQ ID NO: 110877 - protein, 23 aa, Artificial Sequence
  Cyclic GFR-binding peptide
SAISVLYLDSSNNVILKNYQNMV

SEQ ID NO: 110878 - protein, 23 aa, Artificial Sequence
  Cyclic GFR-binding peptide
KLNAISVLYFDDMGVPTLKKYRE

SEQ ID NO: 110879 - protein, 32 aa, Artificial Sequence; identical to SEQ ID NO: 9117
  Cyclic GFR-binding peptide
  MOD_RES (31)..(31): Xaa is C or S

SEQ ID NO: 110880 - protein, 34 aa, Artificial Sequence; identical to SEQ ID NO: 9118
  Cyclic GFR-binding peptide
  MOD_RES (1)..(2): Xaa is C or S

SEQ ID NO: 110881 - protein, 38 aa, Artificial Sequence; identical to SEQ ID NO: 76903
  Cyclic GFR-binding peptide
  MOD_RES (3)..(4)..(36)..(38): Xaa is C or S

SEQ ID NO: 110882 - protein, 38 aa, Artificial Sequence; identical to SEQ ID NO: 9121
  Cyclic GFR-binding peptide
  MOD_RES (4)..(5)..(37): Xaa is C or S

SEQ ID NO: 110883 - protein, 28 aa, Artificial Sequence
  Cyclic GFR-binding peptide
RLNAISILYFDAANNVVLKKYRDMVVEA

SEQ ID NO: 110884 - protein, 39 aa, Artificial Sequence; identical to SEQ ID NO: 9122
  Cyclic GFR-binding peptide
  MOD_RES (4)..(5)..(36)..(38): Xaa is C or S

SEQ ID NO: 110885 - protein, 28 aa, Artificial Sequence
  Cyclic GFR-binding peptide
  MOD_RES (27)..(27): Xaa is C or S
NAISILYFDAANNVVLKKYRDMVVEAXG

SEQ ID NO: 110886 - protein, 31 aa, Artificial Sequence; identical to SEQ ID NO: 9124
  Cyclic GFR-binding peptide
  MOD_RES (31)..(31): Xaa is C or S

SEQ ID NO: 110887 - protein, 38 aa, Artificial Sequence
  Cyclic GFR-binding peptide
  MOD_RES (4)..(5)..(37): Xaa is C or S
PEPXXVPEKMSAISILYLDENKNVVLKNYQNMTVESXA

SEQ ID NO: 110888 - protein, 34 aa, Artificial Sequence
  Cyclic GFR-binding peptide
  MOD_RES (1)..(33): Xaa is C or S
XVPEKMSAISILYLDENKNVVLKNYQNMTVESXA

SEQ ID NO: 110889 - protein, 27 aa, Artificial Sequence
  Cyclic GFR-binding peptide
TKMNAISMLYFNDKQQIILKKYRGMVV

SEQ ID NO: 110890 - protein, 29 aa, Artificial Sequence
  Cyclic GFR-binding peptide
  MOD_RES (28)..(28): Xaa is C or S
MSAISILYLDENKNVVLKNYQNMTVESXA

SEQ ID NO: 110891 - protein, 27 aa, Artificial Sequence
  Cyclic GFR-binding peptide
  MOD_RES (1)..(2): Xaa is C or S
XXVPQALNAISILYFVGRKPKVLKKYR

SEQ ID NO: 110892 - protein, 37 aa, Artificial Sequence; identical to SEQ ID NO: 19367
  Cyclic GFR-binding peptide
  MOD_RES (1)..(2)..(34)..(36): Xaa is C or S

SEQ ID NO: 110893 - protein, 34 aa, Artificial Sequence; identical to SEQ ID NO: 9132
  Cyclic GFR-binding peptide
  MOD_RES (5)..(6): Xaa is C or S

SEQ ID NO: 110894 - protein, 38 aa, Artificial Sequence; identical to SEQ ID NO: 9134
  Cyclic GFR-binding peptide
  MOD_RES (4)..(5)..(38): Xaa is C or S

SEQ ID NO: 110895 - protein, 39 aa, Artificial Sequence; identical to SEQ ID NO: 9137
  Cyclic GFR-binding peptide
  MOD_RES (5)..(6)..(38): Xaa is C or S

SEQ ID NO: 110896 - protein, 29 aa, Artificial Sequence
  Cyclic GFR-binding peptide
  MOD_RES (1)..(2): Xaa is C or S
XXVPTELNAISMLYFDEYDKVVLKKYREM

SEQ ID NO: 110897 - protein, 24 aa, Artificial Sequence
  Cyclic GFR-binding peptide
KLSAISILYLDKGVVTYLKNYQGM

SEQ ID NO: 110898 - protein, 34 aa, Artificial Sequence; identical to SEQ ID NO: 76918
  Cyclic GFR-binding peptide
  MOD_RES (1)..(2)..(34): Xaa is C or S

SEQ ID NO: 110899 - protein, 31 aa, Artificial Sequence; identical to SEQ ID NO: 19375
  Cyclic GFR-binding peptide
  MOD_RES (1)..(2): Xaa is C or S

SEQ ID NO: 110900 - protein, 30 aa, Artificial Sequence; identical to SEQ ID NO: 19376
  Cyclic GFR-binding peptide

SEQ ID NO: 110901 - protein, 23 aa, Artificial Sequence
  Cyclic GFR-binding peptide
ARLSAISILYLDAANNVVLKNYQ

SEQ ID NO: 110902 - protein, 34 aa, Artificial Sequence; identical to SEQ ID NO: 9141
  Cyclic GFR-binding peptide
  MOD_RES (1)..(32)..(34): Xaa is C or S

SEQ ID NO: 110903 - protein, 30 aa, Artificial Sequence; identical to SEQ ID NO: 37891
  Cyclic GFR-binding peptide
  MOD_RES (27)..(29): Xaa is C or S

SEQ ID NO: 110904 - protein, 32 aa, Artificial Sequence; identical to SEQ ID NO: 9142
  Cyclic GFR-binding peptide
  MOD_RES (2)..(3): Xaa is C or S

SEQ ID NO: 110905 - protein, 31 aa, Artificial Sequence; identical to SEQ ID NO: 9144
  Cyclic GFR-binding peptide

SEQ ID NO: 110906 - protein, 38 aa, Artificial Sequence; identical to SEQ ID NO: 37896
  Cyclic GFR-binding peptide
  MOD_RES (6)..(7): Xaa is C or S

SEQ ID NO: 110907 - protein, 24 aa, Artificial Sequence
  Cyclic GFR-binding peptide
EKMNAISILYFDENKNVVLKKYRN

SEQ ID NO: 110908 - protein, 25 aa, Artificial Sequence
  Cyclic GFR-binding peptide
APTKLSAISVLYLDDSSNVILKNYQ

SEQ ID NO: 110909 - protein, 26 aa, Artificial Sequence
  Cyclic GFR-binding peptide
MSAISMLYLNDKQQIILKNYQGMVVD

SEQ ID NO: 110910 - protein, 29 aa, Artificial Sequence
  Cyclic GFR-binding peptide
  MOD_RES (27)..(29): Xaa is C or S
NAISILYFDAANNVVLKKYRDMVVEAXGX

SEQ ID NO: 110911 - protein, 39 aa, Artificial Sequence; identical to SEQ ID NO: 76928
  Cyclic GFR-binding peptide
  MOD_RES (4)..(5)..(36)..(38): Xaa is C or S

SEQ ID NO: 110912 - protein, 28 aa, Artificial Sequence
  Cyclic GFR-binding peptide
KMSAISMLYLNDKQQIILKNYQGMVVDR

SEQ ID NO: 110913 - protein, 37 aa, Artificial Sequence; identical to SEQ ID NO: 9157
  Cyclic GFR-binding peptide
  MOD_RES (3)..(4)..(36): Xaa is C or S

SEQ ID NO: 110914 - protein, 22 aa, Artificial Sequence
  Cyclic GFR-binding peptide
KMSAISMLYLNDKQQIILKNYQ

SEQ ID NO: 110915 - protein, 33 aa, Artificial Sequence; identical to SEQ ID NO: 9158
  Cyclic GFR-binding peptide
  MOD_RES (4)..(5): Xaa is C or S

SEQ ID NO: 110916 - protein, 32 aa, Artificial Sequence; identical to SEQ ID NO: 37918
  Cyclic GFR-binding peptide
  MOD_RES (1)..(2): Xaa is C or S

SEQ ID NO: 110917 - protein, 32 aa, Artificial Sequence
  Cyclic GFR-binding peptide
  MOD_RES (32)..(32): Xaa is C or S
VPARLSAISILYLDAANNVVLKNYQDMVVEAX

SEQ ID NO: 110918 - protein, 35 aa, Artificial Sequence; identical to SEQ ID NO: 9165
  Cyclic GFR-binding peptide
  MOD_RES (5)..(6): Xaa is C or S

SEQ ID NO: 110919 - protein, 32 aa, Artificial Sequence; identical to SEQ ID NO: 9167
  Cyclic GFR-binding peptide
  MOD_RES (3)..(4): Xaa is C or S

SEQ ID NO: 110920 - protein, 28 aa, Artificial Sequence
  Cyclic GFR-binding peptide
  MOD_RES (27)..(27): Xaa is C or S
NAISMLYFNDKQQIILKKYRGMVVDRXG

SEQ ID NO: 110921 - protein, 38 aa, Artificial Sequence; identical to SEQ ID NO: 19406
  Cyclic GFR-binding peptide
  MOD_RES (3)..(4)..(36)..(38): Xaa is C or S

SEQ ID NO: 110922 - protein, 36 aa, Artificial Sequence; identical to SEQ ID NO: 19408
  Cyclic GFR-binding peptide
  MOD_RES (1)..(33)..(35): Xaa is C or S

SEQ ID NO: 110923 - protein, 30 aa, Artificial Sequence; identical to SEQ ID NO: 37931
  Cyclic GFR-binding peptide
  MOD_RES (4)..(5): Xaa is C or S

SEQ ID NO: 110924 - protein, 31 aa, Artificial Sequence; identical to SEQ ID NO: 9172
  Cyclic GFR-binding peptide
  MOD_RES (31)..(31): Xaa is C or S

SEQ ID NO: 110925 - protein, 34 aa, Artificial Sequence; identical to SEQ ID NO: 9175
  Cyclic GFR-binding peptide
  MOD_RES (1)..(2)..(33): Xaa is C or S

SEQ ID NO: 110926 - protein, 35 aa, Artificial Sequence; identical to SEQ ID NO: 9176
  Cyclic GFR-binding peptide
  MOD_RES (6)..(7): Xaa is C or S

SEQ ID NO: 110927 - protein, 30 aa, Artificial Sequence; identical to SEQ ID NO: 76943
  Cyclic GFR-binding peptide
  MOD_RES (1)..(2): Xaa is C or S

SEQ ID NO: 110928 - protein, 41 aa, Artificial Sequence; identical to SEQ ID NO: 9179
  Cyclic GFR-binding peptide
  MOD_RES (6)..(7)..(39)..(41): Xaa is C or S

SEQ ID NO: 110929 - protein, 36 aa, Artificial Sequence; identical to SEQ ID NO: 76945
  Cyclic GFR-binding peptide
  MOD_RES (3)..(4)..(36): Xaa is C or S

SEQ ID NO: 110930 - protein, 36 aa, Artificial Sequence; identical to SEQ ID NO: 9180
  Cyclic GFR-binding peptide
  MOD_RES (6)..(7): Xaa is C or S

SEQ ID NO: 110931 - protein, 38 aa, Artificial Sequence; identical to SEQ ID NO: 9181
  Cyclic GFR-binding peptide
  MOD_RES (6)..(7)..(38): Xaa is C or S

SEQ ID NO: 110932 - protein, 39 aa, Artificial Sequence
  Cyclic GFR-binding peptide
  MOD_RES (6)..(7)..(39): Xaa is C or S
HVPKPXXAPTKLSAISVLYLDDSSNVILKNYQNMVVRSX

SEQ ID NO: 110933 - protein, 27 aa, Artificial Sequence
  Cyclic GFR-binding peptide
  MOD_RES (1)..(2): Xaa is C or S
XXAPTKLNAISVLYFDSSNNVILKKYR

SEQ ID NO: 110934 - protein, 30 aa, Artificial Sequence
  Cyclic GFR-binding peptide
  MOD_RES (27)..(29): Xaa is C or S
SAISILYLDKGVVTYLKNYQGMAVSEXGXR

SEQ ID NO: 110935 - protein, 24 aa, Artificial Sequence
  Cyclic GFR-binding peptide
PARLNAISILYFDAANNVVLKKYR

SEQ ID NO: 110936 - protein, 31 aa, Artificial Sequence; identical to SEQ ID NO: 9189
  Cyclic GFR-binding peptide
  MOD_RES (1)..(2): Xaa is C or S

SEQ ID NO: 110937 - protein, 38 aa, Artificial Sequence; identical to SEQ ID NO: 9190
  Cyclic GFR-binding peptide
  MOD_RES (4)..(5)..(36)..(38): Xaa is C or S

SEQ ID NO: 110938 - protein, 41 aa, Artificial Sequence; identical to SEQ ID NO: 96186
  Cyclic GFR-binding peptide
  MOD_RES (5)..(6)..(38)..(40): Xaa is C or S

SEQ ID NO: 110939 - protein, 35 aa, Artificial Sequence
  Cyclic GFR-binding peptide
  MOD_RES (32)..(34): Xaa is C or S
TPTKMSAISMLYLNDKQQIILKNYQGMVVDRXGXS

SEQ ID NO: 110940 - protein, 29 aa, Artificial Sequence
  Cyclic GFR-binding peptide
  MOD_RES (28)..(28): Xaa is C or S
LNAISILYFDAANNVVLKKYRDMVVEAXG

SEQ ID NO: 110941 - protein, 29 aa, Artificial Sequence
  Cyclic GFR-binding peptide
PTKLNAISVLYFDDMGVPTLKKYREGMSV

SEQ ID NO: 110942 - protein, 28 aa, Artificial Sequence
  Cyclic GFR-binding peptide
  MOD_RES (1)..(2): Xaa is C or S
XXAPVKTSAISMLYLDNGRVLLLKNYQM

SEQ ID NO: 110943 - protein, 34 aa, Artificial Sequence; identical to SEQ ID NO: 76954
  Cyclic GFR-binding peptide
  MOD_RES (6)..(7): Xaa is C or S

SEQ ID NO: 110944 - protein, 23 aa, Artificial Sequence
  Cyclic GFR-binding peptide
LSAISILYLVGRTPKVLKNYQMV

SEQ ID NO: 110945 - protein, 29 aa, Artificial Sequence
  Cyclic GFR-binding peptide
  MOD_RES (1)..(1): Xaa is C or S
XVPEKMSAISILYLDENKNVVLKNYQNMT

SEQ ID NO: 110946 - protein, 37 aa, Artificial Sequence; identical to SEQ ID NO: 9199
  Cyclic GFR-binding peptide
  MOD_RES (3)..(4)..(36): Xaa is C or S

SEQ ID NO: 110947 - protein, 31 aa, Artificial Sequence; identical to SEQ ID NO: 76956
  Cyclic GFR-binding peptide
  MOD_RES (3)..(4): Xaa is C or S

SEQ ID NO: 110948 - protein, 31 aa, Artificial Sequence
  Cyclic GFR-binding peptide
  MOD_RES (30)..(30): Xaa is C or S
PVKTSAISMLYLDNGRVLLLKNYQMIVEEXG

SEQ ID NO: 110949 - protein, 36 aa, Artificial Sequence; identical to SEQ ID NO: 76957
  Cyclic GFR-binding peptide
  MOD_RES (4)..(5)..(36): Xaa is C or S

SEQ ID NO: 110950 - protein, 37 aa, Artificial Sequence
  Cyclic GFR-binding peptide
  MOD_RES (2)..(3)..(34)..(36): Xaa is C or S
TXXAPVKTSAISMLYLDNGRVLLLKNYQMIVEEXGXL

SEQ ID NO: 110951 - protein, 33 aa, Artificial Sequence
  Cyclic GFR-binding peptide
  MOD_RES (31)..(33): Xaa is C or S
PEKMSAISILYLDENKNVVLKNYQNMTVESXAX

SEQ ID NO: 110952 - protein, 37 aa, Artificial Sequence; identical to SEQ ID NO: 9209
  Cyclic GFR-binding peptide
  MOD_RES (2)..(3)..(34)..(36): Xaa is C or S

SEQ ID NO: 110953 - protein, 32 aa, Artificial Sequence; identical to SEQ ID NO: 9210
  Cyclic GFR-binding peptide
  MOD_RES (30)..(32): Xaa is C or S

SEQ ID NO: 110954 - protein, 37 aa, Artificial Sequence; identical to SEQ ID NO: 19441
  Cyclic GFR-binding peptide
  MOD_RES (1)..(2)..(34)..(36): Xaa is C or S

SEQ ID NO: 110955 - protein, 21 aa, Artificial Sequence
  Cyclic GFR-binding peptide
LNAISILYFVGRKPKVLKKYR

SEQ ID NO: 110956 - protein, 32 aa, Artificial Sequence; identical to SEQ ID NO: 9215
  Cyclic GFR-binding peptide
  MOD_RES (30)..(32): Xaa is C or S

SEQ ID NO: 110957 - protein, 29 aa, Artificial Sequence
  Cyclic GFR-binding peptide
TRLNAISILYFDSANNVVLKKYRDMVVES

SEQ ID NO: 110958 - protein, 31 aa, Artificial Sequence
  Cyclic GFR-binding peptide
  MOD_RES (4)..(5): Xaa is C or S
SKAXXVPTKLSAISILYLDKGVVTYLKNYQG

SEQ ID NO: 110959 - protein, 32 aa, Artificial Sequence; identical to SEQ ID NO: 76970
  Cyclic GFR-binding peptide
  MOD_RES (32)..(32): Xaa is C or S

SEQ ID NO: 110960 - protein, 36 aa, Artificial Sequence; identical to SEQ ID NO: 19454
  Cyclic GFR-binding peptide
  MOD_RES (5)..(6): Xaa is C or S

SEQ ID NO: 110961 - protein, 33 aa, Artificial Sequence; identical to SEQ ID NO: 37996
  Cyclic GFR-binding peptide
  MOD_RES (31)..(33): Xaa is C or S

SEQ ID NO: 110962 - protein, 36 aa, Artificial Sequence; identical to SEQ ID NO: 9222
  Cyclic GFR-binding peptide
  MOD_RES (4)..(36): Xaa is C or S

SEQ ID NO: 110963 - protein, 31 aa, Artificial Sequence; identical to SEQ ID NO: 9223
  Cyclic GFR-binding peptide
  MOD_RES (31)..(31): Xaa is C or S

SEQ ID NO: 110964 - protein, 36 aa, Artificial Sequence
  Cyclic GFR-binding peptide
  MOD_RES (4)..(5)..(36): Xaa is C or S
PSTXXAPVKTSAISMLYLDNGRVLLLKNYQMIVEEX

SEQ ID NO: 110965 - protein, 31 aa, Artificial Sequence; identical to SEQ ID NO: 38000
  Cyclic GFR-binding peptide
  MOD_RES (2)..(3): Xaa is C or S

SEQ ID NO: 110966 - protein, 41 aa, Artificial Sequence
  Cyclic GFR-binding peptide
  MOD_RES (6)..(7)..(38)..(40): Xaa is C or S
RVPSTXXAPVKTSAISMLYLDNGRVLLLKNYQMIVEEXGXL

SEQ ID NO: 110967 - protein, 34 aa, Artificial Sequence; identical to SEQ ID NO: 9228
  Cyclic GFR-binding peptide
  MOD_RES (31)..(33): Xaa is C or S

SEQ ID NO: 110968 - protein, 31 aa, Artificial Sequence; identical to SEQ ID NO: 19464
  Cyclic GFR-binding peptide

SEQ ID NO: 110969 - protein, 36 aa, Artificial Sequence
  Cyclic GFR-binding peptide
  MOD_RES (5)..(6): Xaa is C or S
ASKAXXVPTKLSAISILYLDKGVVTYLKNYQGMAVS

SEQ ID NO: 110970 - protein, 26 aa, Artificial Sequence
  Cyclic GFR-binding peptide
NAISILYFDSANNVVLKKYRDMVVES

SEQ ID NO: 110971 - protein, 24 aa, Artificial Sequence
  Cyclic GFR-binding peptide
KTNAISMLYFDNGRVLLLKKYRMI

SEQ ID NO: 110972 - protein, 34 aa, Artificial Sequence; identical to SEQ ID NO: 9230
  Cyclic GFR-binding peptide
  MOD_RES (31)..(33): Xaa is C or S

SEQ ID NO: 110973 - protein, 31 aa, Artificial Sequence; identical to SEQ ID NO: 9231
  Cyclic GFR-binding peptide
  MOD_RES (31)..(31): Xaa is C or S

SEQ ID NO: 110974 - protein, 26 aa, Artificial Sequence
  Cyclic GFR-binding peptide
KMNAISILYFDENKNVVLKKYRNMTV

SEQ ID NO: 110975 - protein, 33 aa, Artificial Sequence
  Cyclic GFR-binding peptide
  MOD_RES (5)..(6): Xaa is C or S
ASKAXXVPTKLSAISILYLDKGVVTYLKNYQGM

SEQ ID NO: 110976 - protein, 21 aa, Artificial Sequence
  Cyclic GFR-binding peptide
NAISVLYFDSSNNVILKKYRN

SEQ ID NO: 110977 - protein, 34 aa, Artificial Sequence; identical to SEQ ID NO: 9238
  Cyclic GFR-binding peptide
  MOD_RES (1)..(2)..(33): Xaa is C or S

SEQ ID NO: 110978 - protein, 30 aa, Artificial Sequence; identical to SEQ ID NO: 9239
  Cyclic GFR-binding peptide
  MOD_RES (1)..(2): Xaa is C or S

SEQ ID NO: 110979 - protein, 34 aa, Artificial Sequence
  Cyclic GFR-binding peptide
  MOD_RES (32)..(34): Xaa is C or S
VPTKLSAISILYLDKGVVTYLKNYQGMAVSEXGX

SEQ ID NO: 110980 - protein, 34 aa, Artificial Sequence; identical to SEQ ID NO: 9241
  Cyclic GFR-binding peptide
  MOD_RES (1)..(33): Xaa is C or S

SEQ ID NO: 110981 - protein, 27 aa, Artificial Sequence
  Cyclic GFR-binding peptide
  MOD_RES (1)..(2): Xaa is C or S
XXVPTKLNAISILYFDKGVVTYLKKYR

SEQ ID NO: 110982 - protein, 37 aa, Artificial Sequence; identical to SEQ ID NO: 38026
  Cyclic GFR-binding peptide
  MOD_RES (1)..(2)..(34)..(36): Xaa is C or S

SEQ ID NO: 110983 - protein, 31 aa, Artificial Sequence; identical to SEQ ID NO: 96246
  Cyclic GFR-binding peptide
  MOD_RES (2)..(3): Xaa is C or S

SEQ ID NO: 110984 - protein, 26 aa, Artificial Sequence
  Cyclic GFR-binding peptide
PTKLNAISILYFDKGVVTYLKKYRGM

SEQ ID NO: 110985 - protein, 38 aa, Artificial Sequence; identical to SEQ ID NO: 9243
  Cyclic GFR-binding peptide
  MOD_RES (5)..(37): Xaa is C or S

SEQ ID NO: 110986 - protein, 39 aa, Artificial Sequence; identical to SEQ ID NO: 9245
  Cyclic GFR-binding peptide
  MOD_RES (3)..(4)..(36)..(38): Xaa is C or S

SEQ ID NO: 110987 - protein, 29 aa, Artificial Sequence
  Cyclic GFR-binding peptide
VPEKMNAISILYFDENKNVVLKKYRNMTV

SEQ ID NO: 110988 - protein, 30 aa, Artificial Sequence
  Cyclic GFR-binding peptide
  MOD_RES (1)..(2): Xaa is C or S
XXVPTKLSAISILYLDKGVVTYLKNYQGMA

SEQ ID NO: 110989 - protein, 39 aa, Artificial Sequence; identical to SEQ ID NO: 38036
  Cyclic GFR-binding peptide
  MOD_RES (4)..(5)..(37)..(39): Xaa is C or S

SEQ ID NO: 110990 - protein, 35 aa, Artificial Sequence; identical to SEQ ID NO: 9246
  Cyclic GFR-binding peptide
  MOD_RES (6)..(7): Xaa is C or S

SEQ ID NO: 110991 - protein, 23 aa, Artificial Sequence
  Cyclic GFR-binding peptide
RLNAISILYFDAANNVVLKKYRD

SEQ ID NO: 110992 - protein, 34 aa, Artificial Sequence; identical to SEQ ID NO: 9250
  Cyclic GFR-binding peptide
  MOD_RES (5)..(6): Xaa is C or S

SEQ ID NO: 110993 - protein, 23 aa, Artificial Sequence
  Cyclic GFR-binding peptide
NAISMLYFDEYDKVVLKKYREMV

SEQ ID NO: 110994 - protein, 26 aa, Artificial Sequence
  Cyclic GFR-binding peptide
PTKLSAISVLYLDSSNNVILKNYQNM

SEQ ID NO: 110995 - protein, 20 aa, Artificial Sequence
  Cyclic GFR-binding peptide
SAISILYLVGRKPKVLKNYQ

SEQ ID NO: 110996 - protein, 28 aa, Artificial Sequence
  Cyclic GFR-binding peptide
SQDLNAISILYFIGKTPKILKKYRMIVK

SEQ ID NO: 110997 - protein, 41 aa, Artificial Sequence
  Cyclic GFR-binding peptide
  MOD_RES (5)..(6)..(38)..(40): Xaa is C or S
ASKAXXVPTKLSAISILYLDKGVVTYLKNYQGMAVSEXGXR

SEQ ID NO: 110998 - protein, 22 aa, Artificial Sequence
  Cyclic GFR-binding peptide
MNAISILYFDENKNVVLKKYRN

SEQ ID NO: 110999 - protein, 29 aa, Artificial Sequence
  Cyclic GFR-binding peptide
  MOD_RES (28)..(28): Xaa is C or S
LSAISILYLDKGVVTYLKNYQGMAVSEXG

SEQ ID NO: 111000 - protein, 39 aa, Artificial Sequence; identical to SEQ ID NO: 9265
  Cyclic GFR-binding peptide
  MOD_RES (4)..(5)..(37)..(39): Xaa is C or S

SEQ ID NO: 111001 - protein, 29 aa, Artificial Sequence
  Cyclic GFR-binding peptide
ARLSAISILYLDAANNVVLKNYQDMVVEA

SEQ ID NO: 111002 - protein, 31 aa, Artificial Sequence; identical to SEQ ID NO: 9267
  Cyclic GFR-binding peptide
  MOD_RES (30)..(30): Xaa is C or S

SEQ ID NO: 111003 - protein, 36 aa, Artificial Sequence; identical to SEQ ID NO: 77005
  Cyclic GFR-binding peptide
  MOD_RES (1)..(2)..(33)..(35): Xaa is C or S

SEQ ID NO: 111004 - protein, 26 aa, Artificial Sequence
  Cyclic GFR-binding peptide
NAISVLYFDDMGVPTLKKYREGMSVA

SEQ ID NO: 111005 - protein, 40 aa, Artificial Sequence; identical to SEQ ID NO: 96288
  Cyclic GFR-binding peptide
  MOD_RES (4)..(5)..(37)..(39): Xaa is C or S

SEQ ID NO: 111006 - protein, 28 aa, Artificial Sequence
  Cyclic GFR-binding peptide
  MOD_RES (1)..(2): Xaa is C or S
XXVPARLSAISILYLDAANNVVLKNYQD

SEQ ID NO: 111007 - protein, 29 aa, Artificial Sequence
  Cyclic GFR-binding peptide
TKLSAISVLYLDSSNNVILKNYQNMVVKA

SEQ ID NO: 111008 - protein, 21 aa, Artificial Sequence
  Cyclic GFR-binding peptide
SAISILYLDSANNVVLKNYQD

SEQ ID NO: 111009 - protein, 38 aa, Artificial Sequence; identical to SEQ ID NO: 77010
  Cyclic GFR-binding peptide
  MOD_RES (5)..(6)..(38): Xaa is C or S

SEQ ID NO: 111010 - protein, 31 aa, Artificial Sequence; identical to SEQ ID NO: 9283
  Cyclic GFR-binding peptide

SEQ ID NO: 111011 - protein, 32 aa, Artificial Sequence; identical to SEQ ID NO: 9289
  Cyclic GFR-binding peptide
  MOD_RES (4)..(5): Xaa is C or S

SEQ ID NO: 111012 - protein, 32 aa, Artificial Sequence; identical to SEQ ID NO: 38078
  Cyclic GFR-binding peptide
  MOD_RES (31)..(31): Xaa is C or S

SEQ ID NO: 111013 - protein, 21 aa, Artificial Sequence
  Cyclic GFR-binding peptide
NAISVLYFDDMGVPTLKKYRE

SEQ ID NO: 111014 - protein, 30 aa, Artificial Sequence; identical to SEQ ID NO: 19524
  Cyclic GFR-binding peptide
  MOD_RES (3)..(4): Xaa is C or S

SEQ ID NO: 111015 - protein, 27 aa, Artificial Sequence
  Cyclic GFR-binding peptide
VPTRLNAISILYFDSANNVVLKKYRDM

SEQ ID NO: 111016 - protein, 29 aa, Artificial Sequence
  Cyclic GFR-binding peptide
  MOD_RES (29)..(29): Xaa is C or S
QLSAISVLYLDDSSNVILKNYQNMVVRAX

SEQ ID NO: 111017 - protein, 25 aa, Artificial Sequence
  Cyclic GFR-binding peptide
LSAISILYLDKGVVTYLKNYQGMAV

SEQ ID NO: 111018 - protein, 33 aa, Artificial Sequence; identical to SEQ ID NO: 9297
  Cyclic GFR-binding peptide
  MOD_RES (3)..(3): Xaa is C or S

SEQ ID NO: 111019 - protein, 33 aa, Artificial Sequence; identical to SEQ ID NO: 9298
  Cyclic GFR-binding peptide
  MOD_RES (1)..(2)..(33): Xaa is C or S

SEQ ID NO: 111020 - protein, 37 aa, Artificial Sequence; identical to SEQ ID NO: 19531
  Cyclic GFR-binding peptide
  MOD_RES (2)..(3)..(35)..(37): Xaa is C or S

SEQ ID NO: 111021 - protein, 35 aa, Artificial Sequence; identical to SEQ ID NO: 9301
  Cyclic GFR-binding peptide
  MOD_RES (32)..(34): Xaa is C or S

SEQ ID NO: 111022 - protein, 32 aa, Artificial Sequence; identical to SEQ ID NO: 91257
  Cyclic GFR-binding peptide
  MOD_RES (5)..(6): Xaa is C or S

SEQ ID NO: 111023 - protein, 34 aa, Artificial Sequence
  Cyclic GFR-binding peptide
  MOD_RES (5)..(6): Xaa is C or S
VPSTXXAPVKTSAISMLYLDNGRVLLLKNYQMIV

SEQ ID NO: 111024 - protein, 36 aa, Artificial Sequence; identical to SEQ ID NO: 9302
  Cyclic GFR-binding peptide
  MOD_RES (3)..(4)..(36): Xaa is C or S

SEQ ID NO: 111025 - protein, 27 aa, Artificial Sequence
  Cyclic GFR-binding peptide
TKLNAISVLYFDDMGVPTLKKYREGMS

SEQ ID NO: 111026 - protein, 34 aa, Artificial Sequence; identical to SEQ ID NO: 9312
  Cyclic GFR-binding peptide
  MOD_RES (1)..(32)..(34): Xaa is C or S

SEQ ID NO: 111027 - protein, 36 aa, Artificial Sequence; identical to SEQ ID NO: 19538
  Cyclic GFR-binding peptide
  MOD_RES (1)..(33)..(35): Xaa is C or S

SEQ ID NO: 111028 - protein, 35 aa, Artificial Sequence
  Cyclic GFR-binding peptide
  MOD_RES (2)..(3)..(35): Xaa is C or S
SXXVPARLSAISILYLDAANNVVLKNYQDMVVEAX

SEQ ID NO: 111029 - protein, 32 aa, Artificial Sequence
  Cyclic GFR-binding peptide
  MOD_RES (1)..(2): Xaa is C or S
XXTPTKMSAISMLYLNDKQQIILKNYQGMVVD

SEQ ID NO: 111030 - protein, 30 aa, Artificial Sequence; identical to SEQ ID NO: 9315
  Cyclic GFR-binding peptide
  MOD_RES (3)..(4): Xaa is C or S

SEQ ID NO: 111031 - protein, 32 aa, Artificial Sequence
  Cyclic GFR-binding peptide
  MOD_RES (29)..(31): Xaa is C or S
KLSAISILYLDKGVVTYLKNYQGMAVSEXGXR

SEQ ID NO: 111032 - protein, 33 aa, Artificial Sequence
  Cyclic GFR-binding peptide
  MOD_RES (2)..(3): Xaa is C or S
TXXAPVKTSAISMLYLDNGRVLLLKNYQMIVEE

SEQ ID NO: 111033 - protein, 34 aa, Artificial Sequence; identical to SEQ ID NO: 19544
  Cyclic GFR-binding peptide
  MOD_RES (5)..(6): Xaa is C or S

SEQ ID NO: 111034 - protein, 31 aa, Artificial Sequence; identical to SEQ ID NO: 38106
  Cyclic GFR-binding peptide
  MOD_RES (29)..(31): Xaa is C or S

SEQ ID NO: 111035 - protein, 36 aa, Artificial Sequence; identical to SEQ ID NO: 9326
  Cyclic GFR-binding peptide
  MOD_RES (1)..(2)..(34)..(36): Xaa is C or S

SEQ ID NO: 111036 - protein, 23 aa, Artificial Sequence
  Cyclic GFR-binding peptide
NAISILYFDSANNVVLKKYRDMV

SEQ ID NO: 111037 - protein, 26 aa, Artificial Sequence
  Cyclic GFR-binding peptide
VPTELNAISMLYFDEYDKVVLKKYRE

SEQ ID NO: 111038 - protein, 37 aa, Artificial Sequence; identical to SEQ ID NO: 9329
  Cyclic GFR-binding peptide
  MOD_RES (3)..(4)..(36): Xaa is C or S

SEQ ID NO: 111039 - protein, 35 aa, Artificial Sequence; identical to SEQ ID NO: 9332
  Cyclic GFR-binding peptide
  MOD_RES (6)..(7): Xaa is C or S

SEQ ID NO: 111040 - protein, 20 aa, Artificial Sequence
  Cyclic GFR-binding peptide
NAISILYFDKGVVTYLKKYR

SEQ ID NO: 111041 - protein, 20 aa, Artificial Sequence
  Cyclic GFR-binding peptide
NAISILYFVGRKPKVLKKYR

SEQ ID NO: 111042 - protein, 38 aa, Artificial Sequence; identical to SEQ ID NO: 9335
  Cyclic GFR-binding peptide
  MOD_RES (2)..(3)..(36)..(38): Xaa is C or S

SEQ ID NO: 111043 - protein, 31 aa, Artificial Sequence; identical to SEQ ID NO: 9339
  Cyclic GFR-binding peptide
  MOD_RES (5)..(5): Xaa is C or S

SEQ ID NO: 111044 - protein, 26 aa, Artificial Sequence
  Cyclic GFR-binding peptide
ARLNAISILYFDAANNVVLKKYRDMV

SEQ ID NO: 111045 - protein, 25 aa, Artificial Sequence
  Cyclic GFR-binding peptide
PEKMNAISILYFDENKNVVLKKYRN

SEQ ID NO: 111046 - protein, 30 aa, Artificial Sequence; identical to SEQ ID NO: 19560
  Cyclic GFR-binding peptide
  MOD_RES (4)..(5): Xaa is C or S

SEQ ID NO: 111047 - protein, 36 aa, Artificial Sequence; identical to SEQ ID NO: 19561
  Cyclic GFR-binding peptide
  MOD_RES (6)..(7): Xaa is C or S

SEQ ID NO: 111048 - protein, 37 aa, Artificial Sequence; identical to SEQ ID NO: 9340
  Cyclic GFR-binding peptide
  MOD_RES (3)..(35)..(37): Xaa is C or S

SEQ ID NO: 111049 - protein, 36 aa, Artificial Sequence; identical to SEQ ID NO: 9341
  Cyclic GFR-binding peptide
  MOD_RES (4)..(5)..(36): Xaa is C or S

SEQ ID NO: 111050 - protein, 34 aa, Artificial Sequence; identical to SEQ ID NO: 9342
  Cyclic GFR-binding peptide
  MOD_RES (3)..(4): Xaa is C or S

SEQ ID NO: 111051 - protein, 24 aa, Artificial Sequence
  Cyclic GFR-binding peptide
ARLSAISILYLDAANNVVLKNYQD

SEQ ID NO: 111052 - protein, 33 aa, Artificial Sequence; identical to SEQ ID NO: 9343
  Cyclic GFR-binding peptide
  MOD_RES (31)..(33): Xaa is C or S

SEQ ID NO: 111053 - protein, 29 aa, Artificial Sequence
  Cyclic GFR-binding peptide
  MOD_RES (29)..(29): Xaa is C or S
ELNAISMLYFDEYDKVVLKKYREMVVEGX

SEQ ID NO: 111054 - protein, 37 aa, Artificial Sequence; identical to SEQ ID NO: 9347
  Cyclic GFR-binding peptide
  MOD_RES (3)..(4)..(36): Xaa is C or S

SEQ ID NO: 111055 - protein, 30 aa, Artificial Sequence; identical to SEQ ID NO: 77038
  Cyclic GFR-binding peptide

SEQ ID NO: 111056 - protein, 31 aa, Artificial Sequence; identical to SEQ ID NO: 9349
  Cyclic GFR-binding peptide
  MOD_RES (29)..(31): Xaa is C or S

SEQ ID NO: 111057 - protein, 26 aa, Artificial Sequence
  Cyclic GFR-binding peptide
TPTKMNAISMLYFNDKQQIILKKYRG

SEQ ID NO: 111058 - protein, 38 aa, Artificial Sequence; identical to SEQ ID NO: 9353
  Cyclic GFR-binding peptide
  MOD_RES (2)..(3)..(35)..(37): Xaa is C or S

SEQ ID NO: 111059 - protein, 28 aa, Artificial Sequence
  Cyclic GFR-binding peptide
PTKLSAISVLYLDDSSNVILKNYQNMVV

SEQ ID NO: 111060 - protein, 36 aa, Artificial Sequence
  Cyclic GFR-binding peptide
  MOD_RES (1)..(2)..(34)..(36): Xaa is C or S
XXTPTKMSAISMLYLNDKQQIILKNYQGMVVDRXGX

SEQ ID NO: 111061 - protein, 23 aa, Artificial Sequence
  Cyclic GFR-binding peptide
LNAISILYFIGKTPKILKKYRMI

SEQ ID NO: 111062 - protein, 29 aa, Artificial Sequence
  Cyclic GFR-binding peptide
  MOD_RES (3)..(4): Xaa is C or S
KPXXAPTKLSAISVLYLDDSSNVILKNYQ

SEQ ID NO: 111063 - protein, 34 aa, Artificial Sequence; identical to SEQ ID NO: 9362
  Cyclic GFR-binding peptide
  MOD_RES (33)..(33): Xaa is C or S

SEQ ID NO: 111064 - protein, 41 aa, Artificial Sequence; identical to SEQ ID NO: 9364
  Cyclic GFR-binding peptide
  MOD_RES (5)..(6)..(38)..(40): Xaa is C or S

SEQ ID NO: 111065 - protein, 38 aa, Artificial Sequence; identical to SEQ ID NO: 9368
  Cyclic GFR-binding peptide
  MOD_RES (4)..(5)..(36)..(38): Xaa is C or S

SEQ ID NO: 111066 - protein, 40 aa, Artificial Sequence
  Cyclic GFR-binding peptide
  MOD_RES (4)..(5)..(37)..(39): Xaa is C or S
PEPXXVPEKMSAISILYLDENKNVVLKNYQNMTVESXAXR

SEQ ID NO: 111067 - protein, 24 aa, Artificial Sequence
  Cyclic GFR-binding peptide
TNAISMLYFDNGRVLLLKKYRMIV

SEQ ID NO: 111068 - protein, 38 aa, Artificial Sequence; identical to SEQ ID NO: 77051
  Cyclic GFR-binding peptide
  MOD_RES (5)..(6)..(37): Xaa is C or S

SEQ ID NO: 111069 - protein, 32 aa, Artificial Sequence; identical to SEQ ID NO: 9372
  Cyclic GFR-binding peptide
  MOD_RES (6)..(7): Xaa is C or S

SEQ ID NO: 111070 - protein, 34 aa, Artificial Sequence; identical to SEQ ID NO: 38153
  Cyclic GFR-binding peptide
  MOD_RES (3)..(4): Xaa is C or S

SEQ ID NO: 111071 - protein, 33 aa, Artificial Sequence; identical to SEQ ID NO: 38157
  Cyclic GFR-binding peptide
  MOD_RES (1)..(33): Xaa is C or S

SEQ ID NO: 111072 - protein, 32 aa, Artificial Sequence; identical to SEQ ID NO: 9379
  Cyclic GFR-binding peptide
  MOD_RES (4)..(5): Xaa is C or S

SEQ ID NO: 111073 - protein, 27 aa, Artificial Sequence
  Cyclic GFR-binding peptide
  MOD_RES (1)..(2): Xaa is C or S
XXTPTKMNAISMLYFNDKQQIILKKYR

SEQ ID NO: 111074 - protein, 32 aa, Artificial Sequence; identical to SEQ ID NO: 9381
  Cyclic GFR-binding peptide
  MOD_RES (30)..(32): Xaa is C or S

SEQ ID NO: 111075 - protein, 33 aa, Artificial Sequence; identical to SEQ ID NO: 9383
  Cyclic GFR-binding peptide
  MOD_RES (3)..(4): Xaa is C or S

SEQ ID NO: 111076 - protein, 33 aa, Artificial Sequence; identical to SEQ ID NO: 9384
  Cyclic GFR-binding peptide
  MOD_RES (5)..(6): Xaa is C or S

SEQ ID NO: 111077 - protein, 38 aa, Artificial Sequence; identical to SEQ ID NO: 9385
  Cyclic GFR-binding peptide
  MOD_RES (4)..(5)..(36)..(38): Xaa is C or S

SEQ ID NO: 111078 - protein, 23 aa, Artificial Sequence
  Cyclic GFR-binding peptide
SAISILYLDSANNVVLKNYQDMV

SEQ ID NO: 111079 - protein, 27 aa, Artificial Sequence
  Cyclic GFR-binding peptide
SQDLSAISILYLIGKTPKILKNYQMIV

SEQ ID NO: 111080 - protein, 30 aa, Artificial Sequence; identical to SEQ ID NO: 9394
  Cyclic GFR-binding peptide
  MOD_RES (3)..(4): Xaa is C or S

SEQ ID NO: 111081 - protein, 28 aa, Artificial Sequence
  Cyclic GFR-binding peptide
  MOD_RES (2)..(3): Xaa is C or S
PXXVPQDLSAISILYLVGRTPKVLKNYQ

SEQ ID NO: 111082 - protein, 29 aa, Artificial Sequence
  Cyclic GFR-binding peptide
  MOD_RES (28)..(28): Xaa is C or S
MNAISILYFDENKNVVLKKYRNMTVESXA

SEQ ID NO: 111083 - protein, 22 aa, Artificial Sequence
  Cyclic GFR-binding peptide
NAISILYFDAANNVVLKKYRDM

SEQ ID NO: 111084 - protein, 29 aa, Artificial Sequence
  Cyclic GFR-binding peptide
  MOD_RES (3)..(4): Xaa is C or S
KAXXVPTKLNAISVLYFDDMGVPTLKKYR

SEQ ID NO: 111085 - protein, 38 aa, Artificial Sequence; identical to SEQ ID NO: 91338
  Cyclic GFR-binding peptide
  MOD_RES (4)..(5)..(37): Xaa is C or S

SEQ ID NO: 111086 - protein, 27 aa, Artificial Sequence
  Cyclic GFR-binding peptide
  MOD_RES (27)..(27): Xaa is C or S
LSAISILYLVGRTPKVLKNYQMVVKSX

SEQ ID NO: 111087 - protein, 31 aa, Artificial Sequence; identical to SEQ ID NO: 9403
  Cyclic GFR-binding peptide

SEQ ID NO: 111088 - protein, 30 aa, Artificial Sequence; identical to SEQ ID NO: 38182
  Cyclic GFR-binding peptide
  MOD_RES (1)..(1): Xaa is C or S

SEQ ID NO: 111089 - protein, 28 aa, Artificial Sequence
  Cyclic GFR-binding peptide
  MOD_RES (27)..(27): Xaa is C or S
SAISILYLDAANNVVLKNYQDMVVEAXG

SEQ ID NO: 111090 - protein, 34 aa, Artificial Sequence; identical to SEQ ID NO: 77066
  Cyclic GFR-binding peptide
  MOD_RES (4)..(5): Xaa is C or S

SEQ ID NO: 111091 - protein, 31 aa, Artificial Sequence; identical to SEQ ID NO: 9406
  Cyclic GFR-binding peptide
  MOD_RES (1)..(2): Xaa is C or S

SEQ ID NO: 111092 - protein, 31 aa, Artificial Sequence
  Cyclic GFR-binding peptide
  MOD_RES (2)..(3): Xaa is C or S
PXXTPTKMSAISMLYLNDKQQIILKNYQGMV

SEQ ID NO: 111093 - protein, 40 aa, Artificial Sequence; identical to SEQ ID NO: 9407
  Cyclic GFR-binding peptide
  MOD_RES (5)..(6)..(38)..(40): Xaa is C or S

SEQ ID NO: 111094 - protein, 36 aa, Artificial Sequence
  Cyclic GFR-binding peptide
  MOD_RES (3)..(4)..(36): Xaa is C or S
GPXXTPTKMSAISMLYLNDKQQIILKNYQGMVVDRX

SEQ ID NO: 111095 - protein, 28 aa, Artificial Sequence
  Cyclic GFR-binding peptide
TKLNAISVLYFDDMGVPTLKKYREGMSV

SEQ ID NO: 111096 - protein, 28 aa, Artificial Sequence
  Cyclic GFR-binding peptide
KLSAISVLYLDDSSNVILKNYQNMVVRS

SEQ ID NO: 111097 - protein, 36 aa, Artificial Sequence; identical to SEQ ID NO: 77069
  Cyclic GFR-binding peptide
  MOD_RES (2)..(3)..(34)..(36): Xaa is C or S

SEQ ID NO: 111098 - protein, 29 aa, Artificial Sequence
  Cyclic GFR-binding peptide
  MOD_RES (3)..(4): Xaa is C or S
EPXXVPEKMSAISILYLDENKNVVLKNYQ

SEQ ID NO: 111099 - protein, 28 aa, Artificial Sequence
  Cyclic GFR-binding peptide
  MOD_RES (1)..(2): Xaa is C or S
XXAPTKLSAISVLYLDSSNNVILKNYQN

SEQ ID NO: 111100 - protein, 31 aa, Artificial Sequence; identical to SEQ ID NO: 9413
  Cyclic GFR-binding peptide
  MOD_RES (3)..(3): Xaa is C or S

SEQ ID NO: 111101 - protein, 31 aa, Artificial Sequence; identical to SEQ ID NO: 38190
  Cyclic GFR-binding peptide
  MOD_RES (4)..(5): Xaa is C or S

SEQ ID NO: 111102 - protein, 30 aa, Artificial Sequence
  Cyclic GFR-binding peptide
  MOD_RES (1)..(2): Xaa is C or S
XXVPARLSAISILYLDAANNVVLKNYQDMV

SEQ ID NO: 111103 - protein, 32 aa, Artificial Sequence; identical to SEQ ID NO: 9417
  Cyclic GFR-binding peptide
  MOD_RES (30)..(32): Xaa is C or S

SEQ ID NO: 111104 - protein, 29 aa, Artificial Sequence
  Cyclic GFR-binding peptide
  MOD_RES (29)..(29): Xaa is C or S
ELNAISMLYFDENEKVVLKKYRDMVVEGX

SEQ ID NO: 111105 - protein, 32 aa, Artificial Sequence
  Cyclic GFR-binding peptide
  MOD_RES (32)..(32): Xaa is C or S
TPTKMSAISMLYLNDKQQIILKNYQGMVVDRX

SEQ ID NO: 111106 - protein, 28 aa, Artificial Sequence
  Cyclic GFR-binding peptide
  MOD_RES (28)..(28): Xaa is C or S
KTNAISMLYFDNGRVLLLKKYRMIVEEX

SEQ ID NO: 111107 - protein, 29 aa, Artificial Sequence
  Cyclic GFR-binding peptide
  MOD_RES (3)..(4): Xaa is C or S
SPXXVSQDLNAISILYFIGKTPKILKKYR

SEQ ID NO: 111108 - protein, 35 aa, Artificial Sequence; identical to SEQ ID NO: 19643
  Cyclic GFR-binding peptide
  MOD_RES (1)..(2)..(34): Xaa is C or S

SEQ ID NO: 111109 - protein, 35 aa, Artificial Sequence
  Cyclic GFR-binding peptide
  MOD_RES (5)..(6): Xaa is C or S
VPSTXXAPVKTSAISMLYLDNGRVLLLKNYQMIVE

SEQ ID NO: 111110 - protein, 25 aa, Artificial Sequence
  Cyclic GFR-binding peptide
PARLSAISILYLDAANNVVLKNYQD

SEQ ID NO: 111111 - protein, 36 aa, Artificial Sequence; identical to SEQ ID NO: 9429
  Cyclic GFR-binding peptide
  MOD_RES (3)..(4)..(35): Xaa is C or S

SEQ ID NO: 111112 - protein, 39 aa, Artificial Sequence
  Cyclic GFR-binding peptide
  MOD_RES (3)..(4)..(36)..(38): Xaa is C or S
EPXXVPEKMSAISILYLDENKNVVLKNYQNMTVESXAXR

SEQ ID NO: 111113 - protein, 32 aa, Artificial Sequence; identical to SEQ ID NO: 9433
  Cyclic GFR-binding peptide
  MOD_RES (1)..(32): Xaa is C or S

SEQ ID NO: 111114 - protein, 38 aa, Artificial Sequence; identical to SEQ ID NO: 77076
  Cyclic GFR-binding peptide
  MOD_RES (6)..(7)..(38): Xaa is C or S

SEQ ID NO: 111115 - protein, 31 aa, Artificial Sequence; identical to SEQ ID NO: 9439
  Cyclic GFR-binding peptide
  MOD_RES (28)..(30): Xaa is C or S

SEQ ID NO: 111116 - protein, 36 aa, Artificial Sequence
  Cyclic GFR-binding peptide
  MOD_RES (3)..(4)..(36): Xaa is C or S
ASXXVPARLSAISILYLDAANNVVLKNYQDMVVEAX

SEQ ID NO: 111117 - protein, 23 aa, Artificial Sequence
  Cyclic GFR-binding peptide
KMSAISMLYLNDKQQIILKNYQG

SEQ ID NO: 111118 - protein, 30 aa, Artificial Sequence; identical to SEQ ID NO: 9447
  Cyclic GFR-binding peptide
  MOD_RES (30)..(30): Xaa is C or S

SEQ ID NO: 111119 - protein, 26 aa, Artificial Sequence
  Cyclic GFR-binding peptide
EKMSAISILYLDENKNVVLKNYQNMT

SEQ ID NO: 111120 - protein, 39 aa, Artificial Sequence; identical to SEQ ID NO: 9449
  Cyclic GFR-binding peptide
  MOD_RES (6)..(7)..(39): Xaa is C or S

SEQ ID NO: 111121 - protein, 34 aa, Artificial Sequence; identical to SEQ ID NO: 9450
  Cyclic GFR-binding peptide
  MOD_RES (1)..(2)..(33): Xaa is C or S

SEQ ID NO: 111122 - protein, 38 aa, Artificial Sequence; identical to SEQ ID NO: 9452
  Cyclic GFR-binding peptide
  MOD_RES (5)..(6)..(38): Xaa is C or S

SEQ ID NO: 111123 - protein, 27 aa, Artificial Sequence
  Cyclic GFR-binding peptide
KMSAISMLYLNDKQQIILKNYQGMVVD

SEQ ID NO: 111124 - protein, 32 aa, Artificial Sequence; identical to SEQ ID NO: 9455
  Cyclic GFR-binding peptide
  MOD_RES (2)..(3): Xaa is C or S

SEQ ID NO: 111125 - protein, 23 aa, Artificial Sequence
  Cyclic GFR-binding peptide
KMNAISMLYFNDKQQIILKKYRG

SEQ ID NO: 111126 - protein, 33 aa, Artificial Sequence; identical to SEQ ID NO: 38235
  Cyclic GFR-binding peptide
  MOD_RES (3)..(4): Xaa is C or S

SEQ ID NO: 111127 - protein, 39 aa, Artificial Sequence; identical to SEQ ID NO: 9457
  Cyclic GFR-binding peptide
  MOD_RES (3)..(4)..(36)..(38): Xaa is C or S

SEQ ID NO: 111128 - protein, 35 aa, Artificial Sequence; identical to SEQ ID NO: 9458
  Cyclic GFR-binding peptide
  MOD_RES (1)..(2)..(33)..(35): Xaa is C or S

SEQ ID NO: 111129 - protein, 35 aa, Artificial Sequence
  Cyclic GFR-binding peptide
  MOD_RES (1)..(33)..(35): Xaa is C or S
XVPTKLSAISILYLDKGVVTYLKNYQGMAVSEXGX

SEQ ID NO: 111130 - protein, 38 aa, Artificial Sequence; identical to SEQ ID NO: 9459
  Cyclic GFR-binding peptide
  MOD_RES (3)..(4)..(35)..(37): Xaa is C or S

SEQ ID NO: 111131 - protein, 34 aa, Artificial Sequence; identical to SEQ ID NO: 9460
  Cyclic GFR-binding peptide
  MOD_RES (1)..(2)..(34): Xaa is C or S

SEQ ID NO: 111132 - protein, 31 aa, Artificial Sequence; identical to SEQ ID NO: 77085
  Cyclic GFR-binding peptide
  MOD_RES (1)..(1): Xaa is C or S

SEQ ID NO: 111133 - protein, 35 aa, Artificial Sequence; identical to SEQ ID NO: 38243
  Cyclic GFR-binding peptide
  MOD_RES (32)..(34): Xaa is C or S

SEQ ID NO: 111134 - protein, 32 aa, Artificial Sequence; identical to SEQ ID NO: 38244
  Cyclic GFR-binding peptide
  MOD_RES (1)..(2): Xaa is C or S

SEQ ID NO: 111135 - protein, 36 aa, Artificial Sequence; identical to SEQ ID NO: 9461
  Cyclic GFR-binding peptide
  MOD_RES (1)..(2)..(34)..(36): Xaa is C or S

SEQ ID NO: 111136 - protein, 31 aa, Artificial Sequence
  Cyclic GFR-binding peptide
  MOD_RES (2)..(3): Xaa is C or S
SXXVPARLSAISILYLDAANNVVLKNYQDMV

SEQ ID NO: 111137 - protein, 27 aa, Artificial Sequence
  Cyclic GFR-binding peptide
LNAISILYFDKGVVTYLKKYRGMAVSE

SEQ ID NO: 111138 - protein, 27 aa, Artificial Sequence
  Cyclic GFR-binding peptide
  MOD_RES (27)..(27): Xaa is C or S
SAISILYLDAANNVVLKNYQDMVVEAX

SEQ ID NO: 111139 - protein, 27 aa, Artificial Sequence
  Cyclic GFR-binding peptide
  MOD_RES (27)..(27): Xaa is C or S
SAISMLYLNDKQQIILKNYQGMVVDRX

SEQ ID NO: 111140 - protein, 37 aa, Artificial Sequence; identical to SEQ ID NO: 38250
  Cyclic GFR-binding peptide
  MOD_RES (6)..(7): Xaa is C or S

SEQ ID NO: 111141 - protein, 37 aa, Artificial Sequence; identical to SEQ ID NO: 9465
  Cyclic GFR-binding peptide
  MOD_RES (5)..(6)..(37): Xaa is C or S

SEQ ID NO: 111142 - protein, 29 aa, Artificial Sequence
  Cyclic GFR-binding peptide
  MOD_RES (26)..(28): Xaa is C or S
SAISILYLVGRTPKVLKNYQMVVKSXKXS

SEQ ID NO: 111143 - protein, 37 aa, Artificial Sequence; identical to SEQ ID NO: 38252
  Cyclic GFR-binding peptide
  MOD_RES (2)..(3)..(35)..(37): Xaa is C or S

SEQ ID NO: 111144 - protein, 27 aa, Artificial Sequence
  Cyclic GFR-binding peptide
  MOD_RES (27)..(27): Xaa is C or S
NAISILYFDSANNVVLKKYRDMVVESX

SEQ ID NO: 111145 - protein, 25 aa, Artificial Sequence
  Cyclic GFR-binding peptide
PQALNAISILYFVGRKPKVLKKYRM

SEQ ID NO: 111146 - protein, 25 aa, Artificial Sequence
  Cyclic GFR-binding peptide
APTKLSAISVLYLDSSNNVILKNYQ

SEQ ID NO: 111147 - protein, 24 aa, Artificial Sequence
  Cyclic GFR-binding peptide
LNAISMLYFDEYDKVVLKKYREMV

SEQ ID NO: 111148 - protein, 37 aa, Artificial Sequence; identical to SEQ ID NO: 9474
  Cyclic GFR-binding peptide
  MOD_RES (5)..(6): Xaa is C or S

SEQ ID NO: 111149 - protein, 25 aa, Artificial Sequence
  Cyclic GFR-binding peptide
ARLNAISILYFDAANNVVLKKYRDM

SEQ ID NO: 111150 - protein, 33 aa, Artificial Sequence; identical to SEQ ID NO: 38265
  Cyclic GFR-binding peptide
  MOD_RES (1)..(2): Xaa is C or S

SEQ ID NO: 111151 - protein, 22 aa, Artificial Sequence
  Cyclic GFR-binding peptide
SAISILYLVGRKPKVLKNYQMI

SEQ ID NO: 111152 - protein, 32 aa, Artificial Sequence; identical to SEQ ID NO: 9480
  Cyclic GFR-binding peptide
  MOD_RES (1)..(2): Xaa is C or S

SEQ ID NO: 111153 - protein, 33 aa, Artificial Sequence; identical to SEQ ID NO: 9481
  Cyclic GFR-binding peptide
  MOD_RES (6)..(7): Xaa is C or S

SEQ ID NO: 111154 - protein, 37 aa, Artificial Sequence
  Cyclic GFR-binding peptide
  MOD_RES (5)..(6)..(37): Xaa is C or S
VPSTXXAPVKTSAISMLYLDNGRVLLLKNYQMIVEEX

SEQ ID NO: 111155 - protein, 31 aa, Artificial Sequence; identical to SEQ ID NO: 9484
  Cyclic GFR-binding peptide
  MOD_RES (28)..(30): Xaa is C or S

SEQ ID NO: 111156 - protein, 29 aa, Artificial Sequence
  Cyclic GFR-binding peptide
TKLSAISILYLDKGVVTYLKNYQGMAVSE

SEQ ID NO: 111157 - protein, 28 aa, Artificial Sequence
  Cyclic GFR-binding peptide
  MOD_RES (1)..(1): Xaa is C or S
XVSQDLSAISILYLIGKTPKILKNYQMI

SEQ ID NO: 111158 - protein, 31 aa, Artificial Sequence; identical to SEQ ID NO: 19714
  Cyclic GFR-binding peptide
  MOD_RES (28)..(30): Xaa is C or S

SEQ ID NO: 111159 - protein, 24 aa, Artificial Sequence
  Cyclic GFR-binding peptide
NAISMLYFDEYDKVVLKKYREMVV

SEQ ID NO: 111160 - protein, 29 aa, Artificial Sequence
  Cyclic GFR-binding peptide
  MOD_RES (27)..(29): Xaa is C or S
LSAISILYLVGRTPKVLKNYQMVVKSXKX

SEQ ID NO: 111161 - protein, 24 aa, Artificial Sequence
  Cyclic GFR-binding peptide
KMSAISMLYLNDKQQIILKNYQGM

SEQ ID NO: 111162 - protein, 23 aa, Artificial Sequence
  Cyclic GFR-binding peptide
NAISVLYFDSSNNVILKKYRNMV

SEQ ID NO: 111163 - protein, 32 aa, Artificial Sequence; identical to SEQ ID NO: 9500
  Cyclic GFR-binding peptide
  MOD_RES (2)..(3): Xaa is C or S

SEQ ID NO: 111164 - protein, 25 aa, Artificial Sequence
  Cyclic GFR-binding peptide
MSAISILYLDENKNVVLKNYQNMTV

SEQ ID NO: 111165 - protein, 37 aa, Artificial Sequence; identical to SEQ ID NO: 9503
  Cyclic GFR-binding peptide
  MOD_RES (6)..(7): Xaa is C or S

SEQ ID NO: 111166 - protein, 30 aa, Artificial Sequence; identical to SEQ ID NO: 19737
  Cyclic GFR-binding peptide
  MOD_RES (27)..(29): Xaa is C or S

SEQ ID NO: 111167 - protein, 27 aa, Artificial Sequence
  Cyclic GFR-binding peptide
  MOD_RES (1)..(2): Xaa is C or S
XXTPTKMSAISMLYLNDKQQIILKNYQ

SEQ ID NO: 111168 - protein, 32 aa, Artificial Sequence; identical to SEQ ID NO: 9505
  Cyclic GFR-binding peptide
  MOD_RES (6)..(7): Xaa is C or S

SEQ ID NO: 111169 - protein, 33 aa, Artificial Sequence; identical to SEQ ID NO: 9506
  Cyclic GFR-binding peptide
  MOD_RES (2)..(3): Xaa is C or S

SEQ ID NO: 111170 - protein, 29 aa, Artificial Sequence
  Cyclic GFR-binding peptide
  MOD_RES (27)..(29): Xaa is C or S
LSAISILYLIGKTPKILKNYQMIVKSXKX

SEQ ID NO: 111171 - protein, 37 aa, Artificial Sequence; identical to SEQ ID NO: 9508
  Cyclic GFR-binding peptide
  MOD_RES (2)..(3)..(35)..(37): Xaa is C or S

SEQ ID NO: 111172 - protein, 33 aa, Artificial Sequence; identical to SEQ ID NO: 77114
  Cyclic GFR-binding peptide
  MOD_RES (30)..(32): Xaa is C or S

SEQ ID NO: 111173 - protein, 31 aa, Artificial Sequence; identical to SEQ ID NO: 9510
  Cyclic GFR-binding peptide
  MOD_RES (30)..(30): Xaa is C or S

SEQ ID NO: 111174 - protein, 30 aa, Artificial Sequence; identical to SEQ ID NO: 9512
  Cyclic GFR-binding peptide
  MOD_RES (1)..(1): Xaa is C or S

SEQ ID NO: 111175 - protein, 36 aa, Artificial Sequence; identical to SEQ ID NO: 38310
  Cyclic GFR-binding peptide
  MOD_RES (1)..(33)..(35): Xaa is C or S

SEQ ID NO: 111176 - protein, 34 aa, Artificial Sequence; identical to SEQ ID NO: 9515
  Cyclic GFR-binding peptide
  MOD_RES (4)..(5): Xaa is C or S

SEQ ID NO: 111177 - protein, 34 aa, Artificial Sequence; identical to SEQ ID NO: 9517
  Cyclic GFR-binding peptide
  MOD_RES (3)..(4): Xaa is C or S

SEQ ID NO: 111178 - protein, 28 aa, Artificial Sequence
  Cyclic GFR-binding peptide
  MOD_RES (28)..(28): Xaa is C or S
LSAISILYLDSANNVVLKNYQDMVVESX

SEQ ID NO: 111179 - protein, 23 aa, Artificial Sequence
  Cyclic GFR-binding peptide
VKTNAISMLYFDNGRVLLLKKYR

SEQ ID NO: 111180 - protein, 30 aa, Artificial Sequence; identical to SEQ ID NO: 9519
  Cyclic GFR-binding peptide
  MOD_RES (30)..(30): Xaa is C or S

SEQ ID NO: 111181 - protein, 28 aa, Artificial Sequence
  Cyclic GFR-binding peptide
  MOD_RES (28)..(28): Xaa is C or S
LNAISVLYFDSSNNVILKKYRNMVVKAX

SEQ ID NO: 111182 - protein, 28 aa, Artificial Sequence
  Cyclic GFR-binding peptide
  MOD_RES (28)..(28): Xaa is C or S
MNAISMLYFNDKQQIILKKYRGMVVDRX

SEQ ID NO: 111183 - protein, 33 aa, Artificial Sequence; identical to SEQ ID NO: 9529
  Cyclic GFR-binding peptide
  MOD_RES (6)..(7): Xaa is C or S

SEQ ID NO: 111184 - protein, 33 aa, Artificial Sequence; identical to SEQ ID NO: 9530
  Cyclic GFR-binding peptide
  MOD_RES (31)..(33): Xaa is C or S

SEQ ID NO: 111185 - protein, 30 aa, Artificial Sequence; identical to SEQ ID NO: 9534
  Cyclic GFR-binding peptide
  MOD_RES (4)..(5): Xaa is C or S

SEQ ID NO: 111186 - protein, 39 aa, Artificial Sequence; identical to SEQ ID NO: 9535
  Cyclic GFR-binding peptide
  MOD_RES (5)..(6)..(37)..(39): Xaa is C or S

SEQ ID NO: 111187 - protein, 21 aa, Artificial Sequence
  Cyclic GFR-binding peptide
LNAISILYFIGKTPKILKKYR

SEQ ID NO: 111188 - protein, 36 aa, Artificial Sequence
  Cyclic GFR-binding peptide
  MOD_RES (2)..(3)..(35): Xaa is C or S
SXXVPARLSAISILYLDAANNVVLKNYQDMVVEAXG

SEQ ID NO: 111189 - protein, 37 aa, Artificial Sequence; identical to SEQ ID NO: 19764
  Cyclic GFR-binding peptide
  MOD_RES (3)..(4)..(36): Xaa is C or S

SEQ ID NO: 111190 - protein, 40 aa, Artificial Sequence; identical to SEQ ID NO: 9541
  Cyclic GFR-binding peptide
  MOD_RES (5)..(6)..(37)..(39): Xaa is C or S

SEQ ID NO: 111191 - protein, 33 aa, Artificial Sequence; identical to SEQ ID NO: 9544
  Cyclic GFR-binding peptide
  MOD_RES (30)..(32): Xaa is C or S

SEQ ID NO: 111192 - protein, 29 aa, Artificial Sequence
  Cyclic GFR-binding peptide
  MOD_RES (28)..(28): Xaa is C or S
KTSAISMLYLDNGRVLLLKNYQMIVEEXG

SEQ ID NO: 111193 - protein, 23 aa, Artificial Sequence
  Cyclic GFR-binding peptide
QLSAISVLYLDDSSNVILKNYQN

SEQ ID NO: 111194 - protein, 25 aa, Artificial Sequence
  Cyclic GFR-binding peptide
ALNAISILYFVGRKPKVLKKYRMIV

SEQ ID NO: 111195 - protein, 29 aa, Artificial Sequence
  Cyclic GFR-binding peptide
TKLNAISILYFDKGVVTYLKKYRGMAVSE

SEQ ID NO: 111196 - protein, 32 aa, Artificial Sequence; identical to SEQ ID NO: 9547
  Cyclic GFR-binding peptide
  MOD_RES (2)..(3): Xaa is C or S

SEQ ID NO: 111197 - protein, 29 aa, Artificial Sequence
  Cyclic GFR-binding peptide
VPQALSAISILYLVGRKPKVLKNYQMIVR

SEQ ID NO: 111198 - protein, 30 aa, Artificial Sequence
  Cyclic GFR-binding peptide
  MOD_RES (29)..(29): Xaa is C or S
VKTSAISMLYLDNGRVLLLKNYQMIVEEXG

SEQ ID NO: 111199 - protein, 30 aa, Artificial Sequence; identical to SEQ ID NO: 9554
  Cyclic GFR-binding peptide
  MOD_RES (28)..(30): Xaa is C or S

SEQ ID NO: 111200 - protein, 28 aa, Artificial Sequence
  Cyclic GFR-binding peptide
QDLNAISILYFVGRTPKVLKKYRMVVKS

SEQ ID NO: 111201 - protein, 26 aa, Artificial Sequence
  Cyclic GFR-binding peptide
  MOD_RES (1)..(1): Xaa is C or S
XAPVKTNAISMLYFDNGRVLLLKKYR

SEQ ID NO: 111202 - protein, 30 aa, Artificial Sequence
  Cyclic GFR-binding peptide
  MOD_RES (3)..(4): Xaa is C or S
STXXAPVKTSAISMLYLDNGRVLLLKNYQM

SEQ ID NO: 111203 - protein, 32 aa, Artificial Sequence; identical to SEQ ID NO: 9561
  Cyclic GFR-binding peptide
  MOD_RES (29)..(31): Xaa is C or S

SEQ ID NO: 111204 - protein, 22 aa, Artificial Sequence
  Cyclic GFR-binding peptide
SAISVLYLDDMGVPTLKNYQEG

SEQ ID NO: 111205 - protein, 34 aa, Artificial Sequence; identical to SEQ ID NO: 19784
  Cyclic GFR-binding peptide
  MOD_RES (3)..(4): Xaa is C or S

SEQ ID NO: 111206 - protein, 32 aa, Artificial Sequence; identical to SEQ ID NO: 9565
  Cyclic GFR-binding peptide
  MOD_RES (29)..(31): Xaa is C or S

SEQ ID NO: 111207 - protein, 27 aa, Artificial Sequence
  Cyclic GFR-binding peptide
  MOD_RES (1)..(2): Xaa is C or S
XXVPARLSAISILYLDAANNVVLKNYQ

SEQ ID NO: 111208 - protein, 38 aa, Artificial Sequence; identical to SEQ ID NO: 9570
  Cyclic GFR-binding peptide
  MOD_RES (5)..(6)..(37): Xaa is C or S

SEQ ID NO: 111209 - protein, 36 aa, Artificial Sequence; identical to SEQ ID NO: 9572
  Cyclic GFR-binding peptide
  MOD_RES (5)..(6): Xaa is C or S

SEQ ID NO: 111210 - protein, 33 aa, Artificial Sequence; identical to SEQ ID NO: 77139
  Cyclic GFR-binding peptide
  MOD_RES (30)..(32): Xaa is C or S

SEQ ID NO: 111211 - protein, 34 aa, Artificial Sequence; identical to SEQ ID NO: 9576
  Cyclic GFR-binding peptide
  MOD_RES (3)..(4): Xaa is C or S

SEQ ID NO: 111212 - protein, 40 aa, Artificial Sequence
  Cyclic GFR-binding peptide
  MOD_RES (5)..(6)..(38)..(40): Xaa is C or S
ASKAXXVPTKLSAISILYLDKGVVTYLKNYQGMAVSEXGX

SEQ ID NO: 111213 - protein, 29 aa, Artificial Sequence
  Cyclic GFR-binding peptide
VSQDLNAISILYFIGKTPKILKKYRMIVK

SEQ ID NO: 111214 - protein, 32 aa, Artificial Sequence; identical to SEQ ID NO: 9581
  Cyclic GFR-binding peptide
  MOD_RES (4)..(5): Xaa is C or S

SEQ ID NO: 111215 - protein, 37 aa, Artificial Sequence; identical to SEQ ID NO: 9585
  Cyclic GFR-binding peptide
  MOD_RES (2)..(3)..(35)..(37): Xaa is C or S

SEQ ID NO: 111216 - protein, 29 aa, Artificial Sequence
  Cyclic GFR-binding peptide
VPTKLNAISILYFDKGVVTYLKKYRGMAV

SEQ ID NO: 111217 - protein, 29 aa, Artificial Sequence
  Cyclic GFR-binding peptide
  MOD_RES (1)..(1): Xaa is C or S
XVPEKMNAISILYFDENKNVVLKKYRNMT

SEQ ID NO: 111218 - protein, 31 aa, Artificial Sequence; identical to SEQ ID NO: 19806
  Cyclic GFR-binding peptide
  MOD_RES (3)..(4): Xaa is C or S

SEQ ID NO: 111219 - protein, 33 aa, Artificial Sequence; identical to SEQ ID NO: 9589
  Cyclic GFR-binding peptide
  MOD_RES (5)..(6): Xaa is C or S

SEQ ID NO: 111220 - protein, 32 aa, Artificial Sequence; identical to SEQ ID NO: 96577
  Cyclic GFR-binding peptide
  MOD_RES (3)..(4): Xaa is C or S

SEQ ID NO: 111221 - protein, 25 aa, Artificial Sequence
  Cyclic GFR-binding peptide
SAISILYLDKGVVTYLKNYQGMAVS

SEQ ID NO: 111222 - protein, 29 aa, Artificial Sequence
  Cyclic GFR-binding peptide
  MOD_RES (3)..(4): Xaa is C or S
APXXVPQALSAISILYLVGRKPKVLKNYQ

SEQ ID NO: 111223 - protein, 33 aa, Artificial Sequence; identical to SEQ ID NO: 9597
  Cyclic GFR-binding peptide
  MOD_RES (31)..(33): Xaa is C or S

SEQ ID NO: 111224 - protein, 33 aa, Artificial Sequence; identical to SEQ ID NO: 9598
  Cyclic GFR-binding peptide
  MOD_RES (31)..(33): Xaa is C or S

SEQ ID NO: 111225 - protein, 31 aa, Artificial Sequence; identical to SEQ ID NO: 9600
  Cyclic GFR-binding peptide
  MOD_RES (31)..(31): Xaa is C or S

SEQ ID NO: 111226 - protein, 31 aa, Artificial Sequence; identical to SEQ ID NO: 9602
  Cyclic GFR-binding peptide
  MOD_RES (2)..(3): Xaa is C or S

SEQ ID NO: 111227 - protein, 37 aa, Artificial Sequence; identical to SEQ ID NO: 9603
  Cyclic GFR-binding peptide
  MOD_RES (5)..(6): Xaa is C or S

SEQ ID NO: 111228 - protein, 39 aa, Artificial Sequence; identical to SEQ ID NO: 9604
  Cyclic GFR-binding peptide
  MOD_RES (4)..(5)..(38): Xaa is C or S

SEQ ID NO: 111229 - protein, 33 aa, Artificial Sequence; identical to SEQ ID NO: 9605
  Cyclic GFR-binding peptide
  MOD_RES (1)..(2)..(33): Xaa is C or S

SEQ ID NO: 111230 - protein, 30 aa, Artificial Sequence; identical to SEQ ID NO: 77150
  Cyclic GFR-binding peptide
  MOD_RES (2)..(3): Xaa is C or S

SEQ ID NO: 111231 - protein, 28 aa, Artificial Sequence
  Cyclic GFR-binding peptide
QLSAISVLYLDDSSNVILKNYQNMVVRA

SEQ ID NO: 111232 - protein, 32 aa, Artificial Sequence; identical to SEQ ID NO: 9608
  Cyclic GFR-binding peptide
  MOD_RES (7)..(7): Xaa is C or S

SEQ ID NO: 111233 - protein, 42 aa, Artificial Sequence; identical to SEQ ID NO: 19822
  Cyclic GFR-binding peptide
  MOD_RES (6)..(7)..(39)..(41): Xaa is C or S

SEQ ID NO: 111234 - protein, 33 aa, Artificial Sequence; identical to SEQ ID NO: 9609
  Cyclic GFR-binding peptide
  MOD_RES (1)..(32): Xaa is C or S

SEQ ID NO: 111235 - protein, 38 aa, Artificial Sequence; identical to SEQ ID NO: 19825
  Cyclic GFR-binding peptide
  MOD_RES (2)..(3)..(35)..(37): Xaa is C or S

SEQ ID NO: 111236 - protein, 36 aa, Artificial Sequence
  Cyclic GFR-binding peptide
  MOD_RES (2)..(3)..(34)..(36): Xaa is C or S
TXXAPVKTSAISMLYLDNGRVLLLKNYQMIVEEXGX

SEQ ID NO: 111237 - protein, 41 aa, Artificial Sequence; identical to SEQ ID NO: 9612
  Cyclic GFR-binding peptide
  MOD_RES (5)..(6)..(38)..(40): Xaa is C or S

SEQ ID NO: 111238 - protein, 39 aa, Artificial Sequence; identical to SEQ ID NO: 9613
  Cyclic GFR-binding peptide
  MOD_RES (6)..(7)..(39): Xaa is C or S

SEQ ID NO: 111239 - protein, 36 aa, Artificial Sequence; identical to SEQ ID NO: 9614
  Cyclic GFR-binding peptide
  MOD_RES (5)..(6): Xaa is C or S

SEQ ID NO: 111240 - protein, 22 aa, Artificial Sequence
  Cyclic GFR-binding peptide
KMNAISMLYFNDKQQIILKKYR

SEQ ID NO: 111241 - protein, 33 aa, Artificial Sequence; identical to SEQ ID NO: 9615
  Cyclic GFR-binding peptide
  MOD_RES (5)..(6): Xaa is C or S

SEQ ID NO: 111242 - protein, 28 aa, Artificial Sequence
  Cyclic GFR-binding peptide
  MOD_RES (27)..(27): Xaa is C or S
LNAISILYFIGKTPKILKKYRMIVKSXK

SEQ ID NO: 111243 - protein, 30 aa, Artificial Sequence
  Cyclic GFR-binding peptide
  MOD_RES (1)..(1): Xaa is C or S
XAPVKTSAISMLYLDNGRVLLLKNYQMIVE

SEQ ID NO: 111244 - protein, 37 aa, Artificial Sequence; identical to SEQ ID NO: 9619
  Cyclic GFR-binding peptide
  MOD_RES (6)..(7): Xaa is C or S

SEQ ID NO: 111245 - protein, 24 aa, Artificial Sequence
  Cyclic GFR-binding peptide
NAISVLYFDDMGVPTLKKYREGMS

SEQ ID NO: 111246 - protein, 26 aa, Artificial Sequence
  Cyclic GFR-binding peptide
PTKMNAISMLYFNDKQQIILKKYRGM

SEQ ID NO: 111247 - protein, 39 aa, Artificial Sequence; identical to SEQ ID NO: 91566
  Cyclic GFR-binding peptide
  MOD_RES (3)..(4)..(36)..(38): Xaa is C or S

SEQ ID NO: 111248 - protein, 39 aa, Artificial Sequence; identical to SEQ ID NO: 9625
  Cyclic GFR-binding peptide
  MOD_RES (4)..(5)..(36)..(38): Xaa is C or S

SEQ ID NO: 111249 - protein, 29 aa, Artificial Sequence
  Cyclic GFR-binding peptide
  MOD_RES (27)..(29): Xaa is C or S
LNAISILYFVGRKPKVLKKYRMIVRSXKX

SEQ ID NO: 111250 - protein, 28 aa, Artificial Sequence
  Cyclic GFR-binding peptide
  MOD_RES (26)..(28): Xaa is C or S
NAISILYFVGRTPKVLKKYRMVVKSXKX

SEQ ID NO: 111251 - protein, 33 aa, Artificial Sequence; identical to SEQ ID NO: 9629
  Cyclic GFR-binding peptide
  MOD_RES (31)..(33): Xaa is C or S

SEQ ID NO: 111252 - protein, 27 aa, Artificial Sequence
  Cyclic GFR-binding peptide
  MOD_RES (27)..(27): Xaa is C or S
LSAISILYLIGKTPKILKNYQMIVKSX

SEQ ID NO: 111253 - protein, 27 aa, Artificial Sequence
  Cyclic GFR-binding peptide
  MOD_RES (1)..(2): Xaa is C or S
XXVPTKLSAISILYLDKGVVTYLKNYQ

SEQ ID NO: 111254 - protein, 22 aa, Artificial Sequence
  Cyclic GFR-binding peptide
ELNAISMLYFDENEKVVLKKYR

SEQ ID NO: 111255 - protein, 29 aa, Artificial Sequence
  Cyclic GFR-binding peptide
  MOD_RES (29)..(29): Xaa is C or S
RLSAISILYLDSANNVVLKNYQDMVVESX

SEQ ID NO: 111256 - protein, 39 aa, Artificial Sequence; identical to SEQ ID NO: 19847
  Cyclic GFR-binding peptide
  MOD_RES (3)..(4)..(36)..(38): Xaa is C or S

SEQ ID NO: 111257 - protein, 32 aa, Artificial Sequence; identical to SEQ ID NO: 9632
  Cyclic GFR-binding peptide
  MOD_RES (1)..(1): Xaa is C or S

SEQ ID NO: 111258 - protein, 37 aa, Artificial Sequence; identical to SEQ ID NO: 9633
  Cyclic GFR-binding peptide
  MOD_RES (2)..(3)..(35)..(37): Xaa is C or S

SEQ ID NO: 111259 - protein, 38 aa, Artificial Sequence; identical to SEQ ID NO: 38427
  Cyclic GFR-binding peptide
  MOD_RES (5)..(6)..(38): Xaa is C or S

SEQ ID NO: 111260 - protein, 38 aa, Artificial Sequence; identical to SEQ ID NO: 9635
  Cyclic GFR-binding peptide
  MOD_RES (4)..(5)..(37): Xaa is C or S

SEQ ID NO: 111261 - protein, 31 aa, Artificial Sequence
  Cyclic GFR-binding peptide
  MOD_RES (28)..(30): Xaa is C or S
LSAISILYLDAANNVVLKNYQDMVVEAXGXR

SEQ ID NO: 111262 - protein, 26 aa, Artificial Sequence
  Cyclic GFR-binding peptide
LSAISILYLVGRTPKVLKNYQMVVKS

SEQ ID NO: 111263 - protein, 37 aa, Artificial Sequence; identical to SEQ ID NO: 77165
  Cyclic GFR-binding peptide
  MOD_RES (3)..(4)..(35)..(37): Xaa is C or S

SEQ ID NO: 111264 - protein, 31 aa, Artificial Sequence; identical to SEQ ID NO: 9638
  Cyclic GFR-binding peptide
  MOD_RES (28)..(30): Xaa is C or S

SEQ ID NO: 111265 - protein, 24 aa, Artificial Sequence
  Cyclic GFR-binding peptide
DLNAISILYFVGRTPKVLKKYRMV

SEQ ID NO: 111266 - protein, 26 aa, Artificial Sequence
  Cyclic GFR-binding peptide
  MOD_RES (1)..(1): Xaa is C or S
XVPQALSAISILYLVGRKPKVLKNYQ

SEQ ID NO: 111267 - protein, 32 aa, Artificial Sequence; identical to SEQ ID NO: 9643
  Cyclic GFR-binding peptide
  MOD_RES (1)..(1): Xaa is C or S

SEQ ID NO: 111268 - protein, 36 aa, Artificial Sequence; identical to SEQ ID NO: 9644
  Cyclic GFR-binding peptide
  MOD_RES (2)..(3)..(34)..(36): Xaa is C or S

SEQ ID NO: 111269 - protein, 36 aa, Artificial Sequence; identical to SEQ ID NO: 9645
  Cyclic GFR-binding peptide
  MOD_RES (2)..(3)..(34)..(36): Xaa is C or S

SEQ ID NO: 111270 - protein, 25 aa, Artificial Sequence
  Cyclic GFR-binding peptide
VKTSAISMLYLDNGRVLLLKNYQMI

SEQ ID NO: 111271 - protein, 36 aa, Artificial Sequence; identical to SEQ ID NO: 9646
  Cyclic GFR-binding peptide
  MOD_RES (1)..(34)..(36): Xaa is C or S

SEQ ID NO: 111272 - protein, 37 aa, Artificial Sequence
  Cyclic GFR-binding peptide
  MOD_RES (1)..(2)..(34)..(36): Xaa is C or S
XXTPTKMSAISMLYLNDKQQIILKNYQGMVVDRXGXS

SEQ ID NO: 111273 - protein, 40 aa, Artificial Sequence; identical to SEQ ID NO: 9647
  Cyclic GFR-binding peptide
  MOD_RES (6)..(7)..(39): Xaa is C or S

SEQ ID NO: 111274 - protein, 36 aa, Artificial Sequence; identical to SEQ ID NO: 9650
  Cyclic GFR-binding peptide
  MOD_RES (6)..(7): Xaa is C or S

SEQ ID NO: 111275 - protein, 29 aa, Artificial Sequence
  Cyclic GFR-binding peptide
  MOD_RES (1)..(1): Xaa is C or S
XVPARLSAISILYLDAANNVVLKNYQDMV

SEQ ID NO: 111276 - protein, 32 aa, Artificial Sequence; identical to SEQ ID NO: 38450
  Cyclic GFR-binding peptide
  MOD_RES (29)..(31): Xaa is C or S

SEQ ID NO: 111277 - protein, 30 aa, Artificial Sequence; identical to SEQ ID NO: 9652
  Cyclic GFR-binding peptide
  MOD_RES (1)..(2): Xaa is C or S

SEQ ID NO: 111278 - protein, 27 aa, Artificial Sequence
  Cyclic GFR-binding peptide
PTQLSAISVLYLDDSSNVILKNYQNMV

SEQ ID NO: 111279 - protein, 34 aa, Artificial Sequence; identical to SEQ ID NO: 96623
  Cyclic GFR-binding peptide
  MOD_RES (3)..(4): Xaa is C or S

SEQ ID NO: 111280 - protein, 41 aa, Artificial Sequence; identical to SEQ ID NO: 38455
  Cyclic GFR-binding peptide
  MOD_RES (5)..(6)..(38)..(40): Xaa is C or S

SEQ ID NO: 111281 - protein, 30 aa, Artificial Sequence; identical to SEQ ID NO: 9655
  Cyclic GFR-binding peptide

SEQ ID NO: 111282 - protein, 30 aa, Artificial Sequence; identical to SEQ ID NO: 77178
  Cyclic GFR-binding peptide
  MOD_RES (30)..(30): Xaa is C or S

SEQ ID NO: 111283 - protein, 23 aa, Artificial Sequence
  Cyclic GFR-binding peptide
MSAISMLYLNDKQQIILKNYQGM

SEQ ID NO: 111284 - protein, 31 aa, Artificial Sequence; identical to SEQ ID NO: 9657
  Cyclic GFR-binding peptide
  MOD_RES (1)..(2): Xaa is C or S

SEQ ID NO: 111285 - protein, 26 aa, Artificial Sequence
  Cyclic GFR-binding peptide
ALSAISILYLVGRKPKVLKNYQMIVR

SEQ ID NO: 111286 - protein, 29 aa, Artificial Sequence
  Cyclic GFR-binding peptide
  MOD_RES (29)..(29): Xaa is C or S
KLSAISILYLDKGVVTYLKNYQGMAVSEX

SEQ ID NO: 111287 - protein, 30 aa, Artificial Sequence; identical to SEQ ID NO: 9663
  Cyclic GFR-binding peptide
  MOD_RES (3)..(4): Xaa is C or S

SEQ ID NO: 111288 - protein, 20 aa, Artificial Sequence
  Cyclic GFR-binding peptide
SAISILYLIGKTPKILKNYQ

SEQ ID NO: 111289 - protein, 24 aa, Artificial Sequence
  Cyclic GFR-binding peptide
MNAISMLYFNDKQQIILKKYRGMV

SEQ ID NO: 111290 - protein, 41 aa, Artificial Sequence; identical to SEQ ID NO: 9668
  Cyclic GFR-binding peptide
  MOD_RES (6)..(7)..(39)..(41): Xaa is C or S

SEQ ID NO: 111291 - protein, 40 aa, Artificial Sequence; identical to SEQ ID NO: 9672
  Cyclic GFR-binding peptide
  MOD_RES (4)..(5)..(37)..(39): Xaa is C or S

SEQ ID NO: 111292 - protein, 37 aa, Artificial Sequence; identical to SEQ ID NO: 9673
  Cyclic GFR-binding peptide
  MOD_RES (5)..(6)..(37): Xaa is C or S

SEQ ID NO: 111293 - protein, 37 aa, Artificial Sequence; identical to SEQ ID NO: 9674
  Cyclic GFR-binding peptide
  MOD_RES (2)..(3)..(34)..(36): Xaa is C or S

SEQ ID NO: 111294 - protein, 31 aa, Artificial Sequence; identical to SEQ ID NO: 9675
  Cyclic GFR-binding peptide
  MOD_RES (1)..(1): Xaa is C or S

SEQ ID NO: 111295 - protein, 32 aa, Artificial Sequence; identical to SEQ ID NO: 77186
  Cyclic GFR-binding peptide
  MOD_RES (29)..(31): Xaa is C or S

SEQ ID NO: 111296 - protein, 31 aa, Artificial Sequence; identical to SEQ ID NO: 77188
  Cyclic GFR-binding peptide
  MOD_RES (30)..(30): Xaa is C or S

SEQ ID NO: 111297 - protein, 29 aa, Artificial Sequence
  Cyclic GFR-binding peptide
  MOD_RES (1)..(2): Xaa is C or S
XXVSQDLSAISILYLIGKTPKILKNYQMI

SEQ ID NO: 111298 - protein, 39 aa, Artificial Sequence; identical to SEQ ID NO: 9678
  Cyclic GFR-binding peptide
  MOD_RES (3)..(4)..(36)..(38): Xaa is C or S

SEQ ID NO: 111299 - protein, 34 aa, Artificial Sequence; identical to SEQ ID NO: 9680
  Cyclic GFR-binding peptide
  MOD_RES (1)..(33): Xaa is C or S

SEQ ID NO: 111300 - protein, 38 aa, Artificial Sequence
  Cyclic GFR-binding peptide
  MOD_RES (5)..(6)..(37): Xaa is C or S
VPSTXXAPVKTSAISMLYLDNGRVLLLKNYQMIVEEXG

SEQ ID NO: 111301 - protein, 29 aa, Artificial Sequence
  Cyclic GFR-binding peptide
  MOD_RES (29)..(29): Xaa is C or S
KLSAISVLYLDSSNNVILKNYQNMVVKAX

SEQ ID NO: 111302 - protein, 24 aa, Artificial Sequence
  Cyclic GFR-binding peptide
PTELNAISMLYFDEYDKVVLKKYR

SEQ ID NO: 111303 - protein, 32 aa, Artificial Sequence; identical to SEQ ID NO: 9685
  Cyclic GFR-binding peptide

SEQ ID NO: 111304 - protein, 22 aa, Artificial Sequence
  Cyclic GFR-binding peptide
MNAISMLYFNDKQQIILKKYRG

SEQ ID NO: 111305 - protein, 37 aa, Artificial Sequence; identical to SEQ ID NO: 9687
  Cyclic GFR-binding peptide
  MOD_RES (3)..(4)..(35)..(37): Xaa is C or S

SEQ ID NO: 111306 - protein, 33 aa, Artificial Sequence; identical to SEQ ID NO: 77197
  Cyclic GFR-binding peptide
  MOD_RES (5)..(6): Xaa is C or S

SEQ ID NO: 111307 - protein, 27 aa, Artificial Sequence
  Cyclic GFR-binding peptide
  MOD_RES (27)..(27): Xaa is C or S
SAISVLYLDDSSNVILKNYQNMVVRSX

SEQ ID NO: 111308 - protein, 25 aa, Artificial Sequence
  Cyclic GFR-binding peptide
KLNAISVLYFDDMGVPTLKKYREGM

SEQ ID NO: 111309 - protein, 33 aa, Artificial Sequence; identical to SEQ ID NO: 9691
  Cyclic GFR-binding peptide
  MOD_RES (5)..(6): Xaa is C or S

SEQ ID NO: 111310 - protein, 38 aa, Artificial Sequence
  Cyclic GFR-binding peptide
  MOD_RES (6)..(7): Xaa is C or S
HVPKPXXAPTKLSAISVLYLDDSSNVILKNYQNMVVRS

SEQ ID NO: 111311 - protein, 27 aa, Artificial Sequence
  Cyclic GFR-binding peptide
  MOD_RES (27)..(27): Xaa is C or S
LSAISILYLVGRKPKVLKNYQMIVRSX

SEQ ID NO: 111312 - protein, 33 aa, Artificial Sequence; identical to SEQ ID NO: 9695
  Cyclic GFR-binding peptide
  MOD_RES (6)..(7): Xaa is C or S

SEQ ID NO: 111313 - protein, 30 aa, Artificial Sequence; identical to SEQ ID NO: 9696
  Cyclic GFR-binding peptide
  MOD_RES (1)..(1): Xaa is C or S

SEQ ID NO: 111314 - protein, 21 aa, Artificial Sequence
  Cyclic GFR-binding peptide
LSAISVLYLDDMGVPTLKNYQ

SEQ ID NO: 111315 - protein, 24 aa, Artificial Sequence
  Cyclic GFR-binding peptide
SAISILYLIGKTPKILKNYQMIVK

SEQ ID NO: 111316 - protein, 37 aa, Artificial Sequence; identical to SEQ ID NO: 38502
  Cyclic GFR-binding peptide
  MOD_RES (4)..(5)..(37): Xaa is C or S

SEQ ID NO: 111317 - protein, 30 aa, Artificial Sequence; identical to SEQ ID NO: 9699
  Cyclic GFR-binding peptide
  MOD_RES (1)..(2): Xaa is C or S

SEQ ID NO: 111318 - protein, 29 aa, Artificial Sequence
  Cyclic GFR-binding peptide
  MOD_RES (1)..(2): Xaa is C or S
XXVPQDLSAISILYLVGRTPKVLKNYQMV

SEQ ID NO: 111319 - protein, 25 aa, Artificial Sequence
  Cyclic GFR-binding peptide
VPARLSAISILYLDAANNVVLKNYQ

SEQ ID NO: 111320 - protein, 33 aa, Artificial Sequence; identical to SEQ ID NO: 9707
  Cyclic GFR-binding peptide
  MOD_RES (30)..(32): Xaa is C or S

SEQ ID NO: 111321 - protein, 38 aa, Artificial Sequence
  Cyclic GFR-binding peptide
  MOD_RES (2)..(3)..(35)..(37): Xaa is C or S
AXXVPTKLSAISILYLDKGVVTYLKNYQGMAVSEXGXR

SEQ ID NO: 111322 - protein, 32 aa, Artificial Sequence; identical to SEQ ID NO: 9710
  Cyclic GFR-binding peptide
  MOD_RES (30)..(32): Xaa is C or S

SEQ ID NO: 111323 - protein, 29 aa, Artificial Sequence
  Cyclic GFR-binding peptide
PQDLNAISILYFVGRTPKVLKKYRMVVKS

SEQ ID NO: 111324 - protein, 34 aa, Artificial Sequence
  Cyclic GFR-binding peptide
  MOD_RES (1)..(33): Xaa is C or S
XVPTKLSAISILYLDKGVVTYLKNYQGMAVSEXG

SEQ ID NO: 111325 - protein, 28 aa, Artificial Sequence
  Cyclic GFR-binding peptide
  MOD_RES (2)..(3): Xaa is C or S
AXXVPTKLNAISILYFDKGVVTYLKKYR

SEQ ID NO: 111326 - protein, 34 aa, Artificial Sequence; identical to SEQ ID NO: 9714
  Cyclic GFR-binding peptide
  MOD_RES (1)..(32)..(34): Xaa is C or S

SEQ ID NO: 111327 - protein, 39 aa, Artificial Sequence; identical to SEQ ID NO: 9716
  Cyclic GFR-binding peptide
  MOD_RES (6)..(7)..(38): Xaa is C or S

SEQ ID NO: 111328 - protein, 26 aa, Artificial Sequence
  Cyclic GFR-binding peptide
KLNAISILYFDKGVVTYLKKYRGMAV

SEQ ID NO: 111329 - protein, 32 aa, Artificial Sequence; identical to SEQ ID NO: 9720
  Cyclic GFR-binding peptide
  MOD_RES (3)..(4): Xaa is C or S

SEQ ID NO: 111330 - protein, 30 aa, Artificial Sequence; identical to SEQ ID NO: 9722
  Cyclic GFR-binding peptide

SEQ ID NO: 111331 - protein, 29 aa, Artificial Sequence
  Cyclic GFR-binding peptide
APTKLSAISVLYLDSSNNVILKNYQNMVV

SEQ ID NO: 111332 - protein, 28 aa, Artificial Sequence
  Cyclic GFR-binding peptide
VPEKMNAISILYFDENKNVVLKKYRNMT

SEQ ID NO: 111333 - protein, 30 aa, Artificial Sequence; identical to SEQ ID NO: 9735
  Cyclic GFR-binding peptide
  MOD_RES (1)..(1): Xaa is C or S

SEQ ID NO: 111334 - protein, 30 aa, Artificial Sequence; identical to SEQ ID NO: 9738
  Cyclic GFR-binding peptide
  MOD_RES (2)..(3): Xaa is C or S

SEQ ID NO: 111335 - protein, 27 aa, Artificial Sequence
  Cyclic GFR-binding peptide
ALSAISILYLVGRKPKVLKNYQMIVRS

SEQ ID NO: 111336 - protein, 37 aa, Artificial Sequence; identical to SEQ ID NO: 96702
  Cyclic GFR-binding peptide
  MOD_RES (3)..(4)..(36): Xaa is C or S

SEQ ID NO: 111337 - protein, 35 aa, Artificial Sequence; identical to SEQ ID NO: 19950
  Cyclic GFR-binding peptide
  MOD_RES (6)..(7): Xaa is C or S

SEQ ID NO: 111338 - protein, 21 aa, Artificial Sequence
  Cyclic GFR-binding peptide
NAISMLYFDEYDKVVLKKYRE

SEQ ID NO: 111339 - protein, 25 aa, Artificial Sequence
  Cyclic GFR-binding peptide
SQDLSAISILYLIGKTPKILKNYQM

SEQ ID NO: 111340 - protein, 33 aa, Artificial Sequence; identical to SEQ ID NO: 9746
  Cyclic GFR-binding peptide
  MOD_RES (4)..(5): Xaa is C or S

SEQ ID NO: 111341 - protein, 36 aa, Artificial Sequence; identical to SEQ ID NO: 9748
  Cyclic GFR-binding peptide
  MOD_RES (3)..(4)..(36): Xaa is C or S

SEQ ID NO: 111342 - protein, 23 aa, Artificial Sequence
  Cyclic GFR-binding peptide
SAISILYLIGKTPKILKNYQMIV

SEQ ID NO: 111343 - protein, 34 aa, Artificial Sequence; identical to SEQ ID NO: 19960
  Cyclic GFR-binding peptide
  MOD_RES (1)..(33): Xaa is C or S

SEQ ID NO: 111344 - protein, 24 aa, Artificial Sequence
  Cyclic GFR-binding peptide
TKLSAISILYLDKGVVTYLKNYQG

SEQ ID NO: 111345 - protein, 21 aa, Artificial Sequence
  Cyclic GFR-binding peptide
LNAISMLYFDENEKVVLKKYR

SEQ ID NO: 111346 - protein, 29 aa, Artificial Sequence
  Cyclic GFR-binding peptide
  MOD_RES (2)..(3): Xaa is C or S
PXXVPQALSAISILYLVGRKPKVLKNYQM

SEQ ID NO: 111347 - protein, 33 aa, Artificial Sequence; identical to SEQ ID NO: 9758
  Cyclic GFR-binding peptide
  MOD_RES (31)..(33): Xaa is C or S

SEQ ID NO: 111348 - protein, 28 aa, Artificial Sequence
  Cyclic GFR-binding peptide
  MOD_RES (2)..(3): Xaa is C or S
AXXVPTELNAISMLYFDEYDKVVLKKYR

SEQ ID NO: 111349 - protein, 30 aa, Artificial Sequence
  Cyclic GFR-binding peptide
  MOD_RES (2)..(3): Xaa is C or S
PXXVPEKMSAISILYLDENKNVVLKNYQNM

SEQ ID NO: 111350 - protein, 35 aa, Artificial Sequence; identical to SEQ ID NO: 9760
  Cyclic GFR-binding peptide
  MOD_RES (5)..(6): Xaa is C or S

SEQ ID NO: 111351 - protein, 27 aa, Artificial Sequence
  Cyclic GFR-binding peptide
  MOD_RES (1)..(1): Xaa is C or S
XVPTELNAISMLYFDEYDKVVLKKYRE

SEQ ID NO: 111352 - protein, 29 aa, Artificial Sequence
  Cyclic GFR-binding peptide
  MOD_RES (3)..(4): Xaa is C or S
PTXXVPTRLNAISILYFDSANNVVLKKYR

SEQ ID NO: 111353 - protein, 35 aa, Artificial Sequence; identical to SEQ ID NO: 9768
  Cyclic GFR-binding peptide
  MOD_RES (3)..(35): Xaa is C or S

SEQ ID NO: 111354 - protein, 26 aa, Artificial Sequence
  Cyclic GFR-binding peptide
QDLSAISILYLIGKTPKILKNYQMIV

SEQ ID NO: 111355 - protein, 33 aa, Artificial Sequence; identical to SEQ ID NO: 9770
  Cyclic GFR-binding peptide
  MOD_RES (6)..(7): Xaa is C or S

SEQ ID NO: 111356 - protein, 37 aa, Artificial Sequence; identical to SEQ ID NO: 9772
  Cyclic GFR-binding peptide
  MOD_RES (3)..(4)..(36): Xaa is C or S

SEQ ID NO: 111357 - protein, 35 aa, Artificial Sequence; identical to SEQ ID NO: 9775
  Cyclic GFR-binding peptide
  MOD_RES (3)..(4)..(35): Xaa is C or S

SEQ ID NO: 111358 - protein, 35 aa, Artificial Sequence; identical to SEQ ID NO: 19977
  Cyclic GFR-binding peptide
  MOD_RES (1)..(2)..(34): Xaa is C or S

SEQ ID NO: 111359 - protein, 23 aa, Artificial Sequence
  Cyclic GFR-binding peptide
SAISMLYLNDKQQIILKNYQGMV

SEQ ID NO: 111360 - protein, 32 aa, Artificial Sequence; identical to SEQ ID NO: 19980
  Cyclic GFR-binding peptide
  MOD_RES (31)..(31): Xaa is C or S

SEQ ID NO: 111361 - protein, 33 aa, Artificial Sequence; identical to SEQ ID NO: 9777
  Cyclic GFR-binding peptide
  MOD_RES (1)..(2)..(33): Xaa is C or S

SEQ ID NO: 111362 - protein, 31 aa, Artificial Sequence; identical to SEQ ID NO: 9778
  Cyclic GFR-binding peptide
  MOD_RES (2)..(3): Xaa is C or S

SEQ ID NO: 111363 - protein, 26 aa, Artificial Sequence
  Cyclic GFR-binding peptide
APTKLSAISVLYLDDSSNVILKNYQN

SEQ ID NO: 111364 - protein, 28 aa, Artificial Sequence
  Cyclic GFR-binding peptide
  MOD_RES (1)..(1): Xaa is C or S
XVPQDLSAISILYLVGRTPKVLKNYQMV

SEQ ID NO: 111365 - protein, 31 aa, Artificial Sequence; identical to SEQ ID NO: 9783
  Cyclic GFR-binding peptide
  MOD_RES (5)..(6): Xaa is C or S

SEQ ID NO: 111366 - protein, 26 aa, Artificial Sequence
  Cyclic GFR-binding peptide
SAISVLYLDSSNNVILKNYQNMVVKA

SEQ ID NO: 111367 - protein, 28 aa, Artificial Sequence
  Cyclic GFR-binding peptide
  MOD_RES (27)..(27): Xaa is C or S
NAISILYFDKGVVTYLKKYRGMAVSEXG

SEQ ID NO: 111368 - protein, 30 aa, Artificial Sequence; identical to SEQ ID NO: 9787
  Cyclic GFR-binding peptide
  MOD_RES (29)..(29): Xaa is C or S

SEQ ID NO: 111369 - protein, 31 aa, Artificial Sequence; identical to SEQ ID NO: 9793
  Cyclic GFR-binding peptide
  MOD_RES (2)..(3): Xaa is C or S

SEQ ID NO: 111370 - protein, 27 aa, Artificial Sequence
  Cyclic GFR-binding peptide
  MOD_RES (27)..(27): Xaa is C or S
SAISVLYLDDSSNVILKNYQNMVVRAX

SEQ ID NO: 111371 - protein, 30 aa, Artificial Sequence; identical to SEQ ID NO: 9797
  Cyclic GFR-binding peptide
  MOD_RES (4)..(5): Xaa is C or S

SEQ ID NO: 111372 - protein, 35 aa, Artificial Sequence; identical to SEQ ID NO: 77248
  Cyclic GFR-binding peptide
  MOD_RES (2)..(3)..(34): Xaa is C or S

SEQ ID NO: 111373 - protein, 36 aa, Artificial Sequence; identical to SEQ ID NO: 9799
  Cyclic GFR-binding peptide
  MOD_RES (6)..(7): Xaa is C or S

SEQ ID NO: 111374 - protein, 26 aa, Artificial Sequence
  Cyclic GFR-binding peptide
KLSAISVLYLDDSSNVILKNYQNMVV

SEQ ID NO: 111375 - protein, 38 aa, Artificial Sequence; identical to SEQ ID NO: 9803
  Cyclic GFR-binding peptide
  MOD_RES (3)..(4)..(35)..(37): Xaa is C or S

SEQ ID NO: 111376 - protein, 32 aa, Artificial Sequence
  Cyclic GFR-binding peptide
  MOD_RES (30)..(32): Xaa is C or S
PVKTSAISMLYLDNGRVLLLKNYQMIVEEXGX

SEQ ID NO: 111377 - protein, 24 aa, Artificial Sequence
  Cyclic GFR-binding peptide
PEKMSAISILYLDENKNVVLKNYQ

SEQ ID NO: 111378 - protein, 25 aa, Artificial Sequence
  Cyclic GFR-binding peptide
RLNAISILYFDAANNVVLKKYRDMV

SEQ ID NO: 111379 - protein, 31 aa, Artificial Sequence; identical to SEQ ID NO: 20012
  Cyclic GFR-binding peptide
  MOD_RES (5)..(6): Xaa is C or S

SEQ ID NO: 111380 - protein, 27 aa, Artificial Sequence
  Cyclic GFR-binding peptide
  MOD_RES (1)..(1): Xaa is C or S
XVPEKMSAISILYLDENKNVVLKNYQN

SEQ ID NO: 111381 - protein, 25 aa, Artificial Sequence
  Cyclic GFR-binding peptide
NAISVLYFDDMGVPTLKKYREGMSV

SEQ ID NO: 111382 - protein, 36 aa, Artificial Sequence
  Cyclic GFR-binding peptide
  MOD_RES (3)..(4)..(35): Xaa is C or S
STXXAPVKTSAISMLYLDNGRVLLLKNYQMIVEEXG

SEQ ID NO: 111383 - protein, 29 aa, Artificial Sequence
  Cyclic GFR-binding peptide
PTKMSAISMLYLNDKQQIILKNYQGMVVD

SEQ ID NO: 111384 - protein, 38 aa, Artificial Sequence; identical to SEQ ID NO: 9809
  Cyclic GFR-binding peptide
  MOD_RES (5)..(6)..(37): Xaa is C or S

SEQ ID NO: 111385 - protein, 39 aa, Artificial Sequence; identical to SEQ ID NO: 20016
  Cyclic GFR-binding peptide
  MOD_RES (4)..(5)..(37)..(39): Xaa is C or S

SEQ ID NO: 111386 - protein, 31 aa, Artificial Sequence; identical to SEQ ID NO: 9815
  Cyclic GFR-binding peptide
  MOD_RES (2)..(3): Xaa is C or S

SEQ ID NO: 111387 - protein, 27 aa, Artificial Sequence
  Cyclic GFR-binding peptide
  MOD_RES (1)..(1): Xaa is C or S
XTPTKMNAISMLYFNDKQQIILKKYRG

SEQ ID NO: 111388 - protein, 31 aa, Artificial Sequence
  Cyclic GFR-binding peptide
  MOD_RES (1)..(2): Xaa is C or S
XXAPVKTSAISMLYLDNGRVLLLKNYQMIVE

SEQ ID NO: 111389 - protein, 30 aa, Artificial Sequence; identical to SEQ ID NO: 9820
  Cyclic GFR-binding peptide
  MOD_RES (2)..(3): Xaa is C or S

SEQ ID NO: 111390 - protein, 33 aa, Artificial Sequence; identical to SEQ ID NO: 38641
  Cyclic GFR-binding peptide
  MOD_RES (1)..(33): Xaa is C or S

SEQ ID NO: 111391 - protein, 35 aa, Artificial Sequence; identical to SEQ ID NO: 9821
  Cyclic GFR-binding peptide
  MOD_RES (1)..(2)..(34): Xaa is C or S

SEQ ID NO: 111392 - protein, 31 aa, Artificial Sequence; identical to SEQ ID NO: 9825
  Cyclic GFR-binding peptide
  MOD_RES (1)..(2): Xaa is C or S

SEQ ID NO: 111393 - protein, 31 aa, Artificial Sequence; identical to SEQ ID NO: 9827
  Cyclic GFR-binding peptide
  MOD_RES (3)..(4): Xaa is C or S

SEQ ID NO: 111394 - protein, 31 aa, Artificial Sequence; identical to SEQ ID NO: 9829
  Cyclic GFR-binding peptide
  MOD_RES (30)..(30): Xaa is C or S

SEQ ID NO: 111395 - protein, 39 aa, Artificial Sequence; identical to SEQ ID NO: 9832
  Cyclic GFR-binding peptide
  MOD_RES (4)..(5)..(37)..(39): Xaa is C or S

SEQ ID NO: 111396 - protein, 37 aa, Artificial Sequence; identical to SEQ ID NO: 9835
  Cyclic GFR-binding peptide
  MOD_RES (3)..(4)..(35)..(37): Xaa is C or S

SEQ ID NO: 111397 - protein, 31 aa, Artificial Sequence; identical to SEQ ID NO: 9836
  Cyclic GFR-binding peptide
  MOD_RES (30)..(30): Xaa is C or S

SEQ ID NO: 111398 - protein, 27 aa, Artificial Sequence
  Cyclic GFR-binding peptide
  MOD_RES (1)..(2): Xaa is C or S
XXVPTELNAISMLYFDEYDKVVLKKYR

SEQ ID NO: 111399 - protein, 37 aa, Artificial Sequence; identical to SEQ ID NO: 9839
  Cyclic GFR-binding peptide
  MOD_RES (1)..(2)..(35)..(37): Xaa is C or S

SEQ ID NO: 111400 - protein, 32 aa, Artificial Sequence
  Cyclic GFR-binding peptide
  MOD_RES (31)..(31): Xaa is C or S
PTKMSAISMLYLNDKQQIILKNYQGMVVDRXG

SEQ ID NO: 111401 - protein, 24 aa, Artificial Sequence
  Cyclic GFR-binding peptide
SAISILYLVGRKPKVLKNYQMIVR

SEQ ID NO: 111402 - protein, 29 aa, Artificial Sequence
  Cyclic GFR-binding peptide
  MOD_RES (26)..(28): Xaa is C or S
SAISILYLIGKTPKILKNYQMIVKSXKXS

SEQ ID NO: 111403 - protein, 27 aa, Artificial Sequence
  Cyclic GFR-binding peptide
KMNAISMLYFNDKQQIILKKYRGMVVD

SEQ ID NO: 111404 - protein, 37 aa, Artificial Sequence; identical to SEQ ID NO: 9846
  Cyclic GFR-binding peptide
  MOD_RES (1)..(34)..(36): Xaa is C or S

SEQ ID NO: 111405 - protein, 30 aa, Artificial Sequence; identical to SEQ ID NO: 9847
  Cyclic GFR-binding peptide

SEQ ID NO: 111406 - protein, 33 aa, Artificial Sequence; identical to SEQ ID NO: 9848
  Cyclic GFR-binding peptide
  MOD_RES (5)..(5): Xaa is C or S

SEQ ID NO: 111407 - protein, 26 aa, Artificial Sequence
  Cyclic GFR-binding peptide
PVKTNAISMLYFDNGRVLLLKKYRMI

SEQ ID NO: 111408 - protein, 40 aa, Artificial Sequence; identical to SEQ ID NO: 38673
  Cyclic GFR-binding peptide
  MOD_RES (4)..(5)..(37)..(39): Xaa is C or S

SEQ ID NO: 111409 - protein, 36 aa, Artificial Sequence; identical to SEQ ID NO: 9851
  Cyclic GFR-binding peptide
  MOD_RES (6)..(7): Xaa is C or S

SEQ ID NO: 111410 - protein, 35 aa, Artificial Sequence
  Cyclic GFR-binding peptide
  MOD_RES (3)..(4): Xaa is C or S
ASXXVPARLSAISILYLDAANNVVLKNYQDMVVEA

SEQ ID NO: 111411 - protein, 25 aa, Artificial Sequence
  Cyclic GFR-binding peptide
TKLSAISILYLDKGVVTYLKNYQGM

SEQ ID NO: 111412 - protein, 34 aa, Artificial Sequence
  Cyclic GFR-binding peptide
  MOD_RES (1)..(33): Xaa is C or S
XTPTKMSAISMLYLNDKQQIILKNYQGMVVDRXG

SEQ ID NO: 111413 - protein, 28 aa, Artificial Sequence
  Cyclic GFR-binding peptide
KLSAISVLYLDDMGVPTLKNYQEGMSVA

SEQ ID NO: 111414 - protein, 28 aa, Artificial Sequence
  Cyclic GFR-binding peptide
PTKLNAISILYFDKGVVTYLKKYRGMAV

SEQ ID NO: 111415 - protein, 28 aa, Artificial Sequence
  Cyclic GFR-binding peptide
  MOD_RES (27)..(27): Xaa is C or S
TNAISMLYFDNGRVLLLKKYRMIVEEXG

SEQ ID NO: 111416 - protein, 32 aa, Artificial Sequence; identical to SEQ ID NO: 9859
  Cyclic GFR-binding peptide
  MOD_RES (29)..(31): Xaa is C or S

SEQ ID NO: 111417 - protein, 33 aa, Artificial Sequence; identical to SEQ ID NO: 38684
  Cyclic GFR-binding peptide
  MOD_RES (6)..(7): Xaa is C or S

SEQ ID NO: 111418 - protein, 32 aa, Artificial Sequence; identical to SEQ ID NO: 9863
  Cyclic GFR-binding peptide
  MOD_RES (1)..(1): Xaa is C or S

SEQ ID NO: 111419 - protein, 37 aa, Artificial Sequence; identical to SEQ ID NO: 91800
  Cyclic GFR-binding peptide
  MOD_RES (1)..(2)..(34)..(36): Xaa is C or S

SEQ ID NO: 111420 - protein, 28 aa, Artificial Sequence
  Cyclic GFR-binding peptide
  MOD_RES (1)..(1): Xaa is C or S
XVPTELNAISMLYFDENEKVVLKKYRDM

SEQ ID NO: 111421 - protein, 23 aa, Artificial Sequence
  Cyclic GFR-binding peptide
TRLSAISILYLDSANNVVLKNYQ

SEQ ID NO: 111422 - protein, 29 aa, Artificial Sequence
  Cyclic GFR-binding peptide
  MOD_RES (28)..(28): Xaa is C or S
LNAISILYFDSANNVVLKKYRDMVVESXG

SEQ ID NO: 111423 - protein, 30 aa, Artificial Sequence; identical to SEQ ID NO: 9867
  Cyclic GFR-binding peptide
  MOD_RES (30)..(30): Xaa is C or S

SEQ ID NO: 111424 - protein, 28 aa, Artificial Sequence
  Cyclic GFR-binding peptide
TPTKMNAISMLYFNDKQQIILKKYRGMV

SEQ ID NO: 111425 - protein, 27 aa, Artificial Sequence
  Cyclic GFR-binding peptide
TELNAISMLYFDEYDKVVLKKYREMVV

SEQ ID NO: 111426 - protein, 38 aa, Artificial Sequence; identical to SEQ ID NO: 9875
  Cyclic GFR-binding peptide
  MOD_RES (1)..(2)..(35)..(37): Xaa is C or S

SEQ ID NO: 111427 - protein, 42 aa, Artificial Sequence; identical to SEQ ID NO: 9876
  Cyclic GFR-binding peptide
  MOD_RES (6)..(7)..(40)..(42): Xaa is C or S

SEQ ID NO: 111428 - protein, 22 aa, Artificial Sequence
  Cyclic GFR-binding peptide
LSAISILYLDAANNVVLKNYQD

SEQ ID NO: 111429 - protein, 23 aa, Artificial Sequence
  Cyclic GFR-binding peptide
SAISVLYLDDSSNVILKNYQNMV

SEQ ID NO: 111430 - protein, 32 aa, Artificial Sequence; identical to SEQ ID NO: 20074
  Cyclic GFR-binding peptide
  MOD_RES (30)..(32): Xaa is C or S

SEQ ID NO: 111431 - protein, 37 aa, Artificial Sequence; identical to SEQ ID NO: 9881
  Cyclic GFR-binding peptide
  MOD_RES (5)..(6): Xaa is C or S

SEQ ID NO: 111432 - protein, 29 aa, Artificial Sequence
  Cyclic GFR-binding peptide
  MOD_RES (3)..(4): Xaa is C or S
ASXXVPARLSAISILYLDAANNVVLKNYQ

SEQ ID NO: 111433 - protein, 42 aa, Artificial Sequence
  Cyclic GFR-binding peptide
  MOD_RES (6)..(7)..(39)..(41): Xaa is C or S
AAPASXXVPARLSAISILYLDAANNVVLKNYQDMVVEAXGXR

SEQ ID NO: 111434 - protein, 31 aa, Artificial Sequence; identical to SEQ ID NO: 9887
  Cyclic GFR-binding peptide
  MOD_RES (29)..(31): Xaa is C or S

SEQ ID NO: 111435 - protein, 30 aa, Artificial Sequence; identical to SEQ ID NO: 9889
  Cyclic GFR-binding peptide
  MOD_RES (27)..(29): Xaa is C or S

SEQ ID NO: 111436 - protein, 37 aa, Artificial Sequence
  Cyclic GFR-binding peptide
  MOD_RES (2)..(3)..(35)..(37): Xaa is C or S
SXXVPARLSAISILYLDAANNVVLKNYQDMVVEAXGX

SEQ ID NO: 111437 - protein, 38 aa, Artificial Sequence
  Cyclic GFR-binding peptide
  MOD_RES (3)..(4)..(36)..(38): Xaa is C or S
EPXXVPEKMSAISILYLDENKNVVLKNYQNMTVESXAX

SEQ ID NO: 111438 - protein, 40 aa, Artificial Sequence; identical to SEQ ID NO: 9895
  Cyclic GFR-binding peptide
  MOD_RES (6)..(7)..(39): Xaa is C or S

SEQ ID NO: 111439 - protein, 30 aa, Artificial Sequence; identical to SEQ ID NO: 9896
  Cyclic GFR-binding peptide
  MOD_RES (2)..(2): Xaa is C or S

SEQ ID NO: 111440 - protein, 35 aa, Artificial Sequence; identical to SEQ ID NO: 9899
  Cyclic GFR-binding peptide
  MOD_RES (1)..(33)..(35): Xaa is C or S

SEQ ID NO: 111441 - protein, 34 aa, Artificial Sequence
  Cyclic GFR-binding peptide
  MOD_RES (5)..(6): Xaa is C or S
SAGPXXTPTKMSAISMLYLNDKQQIILKNYQGMV

SEQ ID NO: 111442 - protein, 33 aa, Artificial Sequence; identical to SEQ ID NO: 9900
  Cyclic GFR-binding peptide
  MOD_RES (30)..(32): Xaa is C or S

SEQ ID NO: 111443 - protein, 29 aa, Artificial Sequence
  Cyclic GFR-binding peptide
  MOD_RES (28)..(28): Xaa is C or S
SAISVLYLDDMGVPTLKNYQEGMSVAEXG

SEQ ID NO: 111444 - protein, 28 aa, Artificial Sequence
  Cyclic GFR-binding peptide
RLSAISILYLDAANNVVLKNYQDMVVEA

SEQ ID NO: 111445 - protein, 24 aa, Artificial Sequence
  Cyclic GFR-binding peptide
PTKLSAISILYLDKGVVTYLKNYQ

SEQ ID NO: 111446 - protein, 27 aa, Artificial Sequence
  Cyclic GFR-binding peptide
PTKLNAISILYFDKGVVTYLKKYRGMA

SEQ ID NO: 111447 - protein, 40 aa, Artificial Sequence; identical to SEQ ID NO: 20093
  Cyclic GFR-binding peptide
  MOD_RES (4)..(5)..(37)..(39): Xaa is C or S

SEQ ID NO: 111448 - protein, 26 aa, Artificial Sequence
  Cyclic GFR-binding peptide
VSQDLNAISILYFIGKTPKILKKYRM

SEQ ID NO: 111449 - protein, 32 aa, Artificial Sequence; identical to SEQ ID NO: 9907
  Cyclic GFR-binding peptide
  MOD_RES (2)..(3): Xaa is C or S

SEQ ID NO: 111450 - protein, 36 aa, Artificial Sequence; identical to SEQ ID NO: 9908
  Cyclic GFR-binding peptide
  MOD_RES (5)..(6): Xaa is C or S

SEQ ID NO: 111451 - protein, 27 aa, Artificial Sequence
  Cyclic GFR-binding peptide
VPTKLNAISILYFDKGVVTYLKKYRGM

SEQ ID NO: 111452 - protein, 24 aa, Artificial Sequence
  Cyclic GFR-binding peptide
PTKLSAISVLYLDDSSNVILKNYQ

SEQ ID NO: 111453 - protein, 33 aa, Artificial Sequence; identical to SEQ ID NO: 9913
  Cyclic GFR-binding peptide
  MOD_RES (3)..(4): Xaa is C or S

SEQ ID NO: 111454 - protein, 39 aa, Artificial Sequence
  Cyclic GFR-binding peptide
  MOD_RES (4)..(5)..(37)..(39): Xaa is C or S
PEPXXVPEKMSAISILYLDENKNVVLKNYQNMTVESXAX

SEQ ID NO: 111455 - protein, 26 aa, Artificial Sequence
  Cyclic GFR-binding peptide
PVKTSAISMLYLDNGRVLLLKNYQMI

SEQ ID NO: 111456 - protein, 25 aa, Artificial Sequence
  Cyclic GFR-binding peptide
TKLNAISILYFDKGVVTYLKKYRGM

SEQ ID NO: 111457 - protein, 42 aa, Artificial Sequence; identical to SEQ ID NO: 9918
  Cyclic GFR-binding peptide
  MOD_RES (6)..(7)..(39)..(41): Xaa is C or S

SEQ ID NO: 111458 - protein, 36 aa, Artificial Sequence; identical to SEQ ID NO: 77315
  Cyclic GFR-binding peptide
  MOD_RES (1)..(33)..(35): Xaa is C or S

SEQ ID NO: 111459 - protein, 34 aa, Artificial Sequence; identical to SEQ ID NO: 20109
  Cyclic GFR-binding peptide
  MOD_RES (1)..(2)..(34): Xaa is C or S

SEQ ID NO: 111460 - protein, 32 aa, Artificial Sequence; identical to SEQ ID NO: 77317
  Cyclic GFR-binding peptide
  MOD_RES (1)..(2): Xaa is C or S

SEQ ID NO: 111461 - protein, 36 aa, Artificial Sequence; identical to SEQ ID NO: 9919
  Cyclic GFR-binding peptide
  MOD_RES (3)..(4)..(36): Xaa is C or S

SEQ ID NO: 111462 - protein, 31 aa, Artificial Sequence; identical to SEQ ID NO: 20110
  Cyclic GFR-binding peptide
  MOD_RES (29)..(31): Xaa is C or S

SEQ ID NO: 111463 - protein, 34 aa, Artificial Sequence
  Cyclic GFR-binding peptide
  MOD_RES (31)..(33): Xaa is C or S
APVKTSAISMLYLDNGRVLLLKNYQMIVEEXGXL

SEQ ID NO: 111464 - protein, 28 aa, Artificial Sequence
  Cyclic GFR-binding peptide
APTKLNAISVLYFDSSNNVILKKYRNMV

SEQ ID NO: 111465 - protein, 31 aa, Artificial Sequence
  Cyclic GFR-binding peptide
  MOD_RES (28)..(30): Xaa is C or S
MSAISILYLDENKNVVLKNYQNMTVESXAXR

SEQ ID NO: 111466 - protein, 35 aa, Artificial Sequence; identical to SEQ ID NO: 9925
  Cyclic GFR-binding peptide
  MOD_RES (1)..(2)..(33)..(35): Xaa is C or S

SEQ ID NO: 111467 - protein, 35 aa, Artificial Sequence; identical to SEQ ID NO: 38770
  Cyclic GFR-binding peptide
  MOD_RES (3)..(4): Xaa is C or S

SEQ ID NO: 111468 - protein, 28 aa, Artificial Sequence
  Cyclic GFR-binding peptide
TKLNAISVLYFDSSNNVILKKYRNMVVK

SEQ ID NO: 111469 - protein, 37 aa, Artificial Sequence
  Cyclic GFR-binding peptide
  MOD_RES (3)..(4)..(36): Xaa is C or S
EPXXVPEKMSAISILYLDENKNVVLKNYQNMTVESXA

SEQ ID NO: 111470 - protein, 25 aa, Artificial Sequence
  Cyclic GFR-binding peptide
QDLNAISILYFVGRTPKVLKKYRMV

SEQ ID NO: 111471 - protein, 22 aa, Artificial Sequence
  Cyclic GFR-binding peptide
SAISILYLDSANNVVLKNYQDM

SEQ ID NO: 111472 - protein, 30 aa, Artificial Sequence; identical to SEQ ID NO: 9932
  Cyclic GFR-binding peptide

SEQ ID NO: 111473 - protein, 29 aa, Artificial Sequence
  Cyclic GFR-binding peptide
TPTKMSAISMLYLNDKQQIILKNYQGMVV

SEQ ID NO: 111474 - protein, 25 aa, Artificial Sequence
  Cyclic GFR-binding peptide
TKMNAISMLYFNDKQQIILKKYRGM

SEQ ID NO: 111475 - protein, 24 aa, Artificial Sequence
  Cyclic GFR-binding peptide
PEKMNAISILYFDENKNVVLKKYR

SEQ ID NO: 111476 - protein, 39 aa, Artificial Sequence
  Cyclic GFR-binding peptide
  MOD_RES (4)..(5)..(37)..(39): Xaa is C or S
SKAXXVPTKLSAISILYLDKGVVTYLKNYQGMAVSEXGX

SEQ ID NO: 111477 - protein, 29 aa, Artificial Sequence
  Cyclic GFR-binding peptide
  MOD_RES (1)..(2): Xaa is C or S
XXVPTKLNAISILYFDKGVVTYLKKYRGM

SEQ ID NO: 111478 - protein, 38 aa, Artificial Sequence; identical to SEQ ID NO: 9936
  Cyclic GFR-binding peptide
  MOD_RES (6)..(7): Xaa is C or S

SEQ ID NO: 111479 - protein, 34 aa, Artificial Sequence; identical to SEQ ID NO: 91900
  Cyclic GFR-binding peptide
  MOD_RES (32)..(34): Xaa is C or S

SEQ ID NO: 111480 - protein, 34 aa, Artificial Sequence; identical to SEQ ID NO: 38788
  Cyclic GFR-binding peptide
  MOD_RES (1)..(2)..(34): Xaa is C or S

SEQ ID NO: 111481 - protein, 29 aa, Artificial Sequence
  Cyclic GFR-binding peptide
  MOD_RES (3)..(4): Xaa is C or S
SPXXVPQDLSAISILYLVGRTPKVLKNYQ

SEQ ID NO: 111482 - protein, 24 aa, Artificial Sequence
  Cyclic GFR-binding peptide
QALNAISILYFVGRKPKVLKKYRM

SEQ ID NO: 111483 - protein, 34 aa, Artificial Sequence; identical to SEQ ID NO: 9944
  Cyclic GFR-binding peptide
  MOD_RES (6)..(7): Xaa is C or S

SEQ ID NO: 111484 - protein, 31 aa, Artificial Sequence; identical to SEQ ID NO: 91907
  Cyclic GFR-binding peptide
  MOD_RES (31)..(31): Xaa is C or S

SEQ ID NO: 111485 - protein, 33 aa, Artificial Sequence; identical to SEQ ID NO: 9946
  Cyclic GFR-binding peptide
  MOD_RES (6)..(6): Xaa is C or S

SEQ ID NO: 111486 - protein, 38 aa, Artificial Sequence; identical to SEQ ID NO: 9948
  Cyclic GFR-binding peptide
  MOD_RES (2)..(3)..(35)..(37): Xaa is C or S

SEQ ID NO: 111487 - protein, 26 aa, Artificial Sequence
  Cyclic GFR-binding peptide
  MOD_RES (1)..(1): Xaa is C or S
XVPTKLNAISVLYFDDMGVPTLKKYR

SEQ ID NO: 111488 - protein, 36 aa, Artificial Sequence; identical to SEQ ID NO: 20134
  Cyclic GFR-binding peptide
  MOD_RES (4)..(5): Xaa is C or S

SEQ ID NO: 111489 - protein, 36 aa, Artificial Sequence; identical to SEQ ID NO: 9955
  Cyclic GFR-binding peptide
  MOD_RES (4)..(5)..(36): Xaa is C or S

SEQ ID NO: 111490 - protein, 36 aa, Artificial Sequence
  Cyclic GFR-binding peptide
  MOD_RES (1)..(33)..(35): Xaa is C or S
XVPEKMSAISILYLDENKNVVLKNYQNMTVESXAXR

SEQ ID NO: 111491 - protein, 23 aa, Artificial Sequence
  Cyclic GFR-binding peptide
ALNAISILYFVGRKPKVLKKYRM

SEQ ID NO: 111492 - protein, 33 aa, Artificial Sequence; identical to SEQ ID NO: 91918
  Cyclic GFR-binding peptide
  MOD_RES (6)..(7): Xaa is C or S

SEQ ID NO: 111493 - protein, 35 aa, Artificial Sequence; identical to SEQ ID NO: 77334
  Cyclic GFR-binding peptide
  MOD_RES (1)..(33)..(35): Xaa is C or S

SEQ ID NO: 111494 - protein, 32 aa, Artificial Sequence; identical to SEQ ID NO: 9961
  Cyclic GFR-binding peptide
  MOD_RES (4)..(5): Xaa is C or S

SEQ ID NO: 111495 - protein, 25 aa, Artificial Sequence
  Cyclic GFR-binding peptide
PTKLSAISILYLDKGVVTYLKNYQG

SEQ ID NO: 111496 - protein, 30 aa, Artificial Sequence; identical to SEQ ID NO: 9963
  Cyclic GFR-binding peptide
  MOD_RES (27)..(29): Xaa is C or S

SEQ ID NO: 111497 - protein, 37 aa, Artificial Sequence
  Cyclic GFR-binding peptide
  MOD_RES (1)..(2)..(34)..(36): Xaa is C or S
XXVPTKLSAISILYLDKGVVTYLKNYQGMAVSEXGXR

SEQ ID NO: 111498 - protein, 34 aa, Artificial Sequence; identical to SEQ ID NO: 9964
  Cyclic GFR-binding peptide
  MOD_RES (4)..(5): Xaa is C or S

SEQ ID NO: 111499 - protein, 40 aa, Artificial Sequence; identical to SEQ ID NO: 77338
  Cyclic GFR-binding peptide
  MOD_RES (6)..(7)..(38)..(40): Xaa is C or S

SEQ ID NO: 111500 - protein, 33 aa, Artificial Sequence; identical to SEQ ID NO: 9966
  Cyclic GFR-binding peptide
  MOD_RES (4)..(5): Xaa is C or S

SEQ ID NO: 111501 - protein, 26 aa, Artificial Sequence
  Cyclic GFR-binding peptide
TKLNAISVLYFDDMGVPTLKKYREGM

SEQ ID NO: 111502 - protein, 29 aa, Artificial Sequence
  Cyclic GFR-binding peptide
  MOD_RES (1)..(2): Xaa is C or S
XXAPVKTSAISMLYLDNGRVLLLKNYQMI

SEQ ID NO: 111503 - protein, 33 aa, Artificial Sequence; identical to SEQ ID NO: 9968
  Cyclic GFR-binding peptide
  MOD_RES (3)..(4): Xaa is C or S

SEQ ID NO: 111504 - protein, 35 aa, Artificial Sequence; identical to SEQ ID NO: 9969
  Cyclic GFR-binding peptide
  MOD_RES (5)..(5): Xaa is C or S

SEQ ID NO: 111505 - protein, 30 aa, Artificial Sequence; identical to SEQ ID NO: 9970
  Cyclic GFR-binding peptide

SEQ ID NO: 111506 - protein, 28 aa, Artificial Sequence
  Cyclic GFR-binding peptide
TQLSAISVLYLDDSSNVILKNYQNMVVR

SEQ ID NO: 111507 - protein, 36 aa, Artificial Sequence; identical to SEQ ID NO: 38825
  Cyclic GFR-binding peptide
  MOD_RES (2)..(3)..(35): Xaa is C or S

SEQ ID NO: 111508 - protein, 40 aa, Artificial Sequence; identical to SEQ ID NO: 20157
  Cyclic GFR-binding peptide
  MOD_RES (5)..(6)..(38)..(40): Xaa is C or S

SEQ ID NO: 111509 - protein, 35 aa, Artificial Sequence; identical to SEQ ID NO: 9977
  Cyclic GFR-binding peptide
  MOD_RES (33)..(35): Xaa is C or S

SEQ ID NO: 111510 - protein, 26 aa, Artificial Sequence
  Cyclic GFR-binding peptide
TKLSAISVLYLDSSNNVILKNYQNMV

SEQ ID NO: 111511 - protein, 36 aa, Artificial Sequence; identical to SEQ ID NO: 9979
  Cyclic GFR-binding peptide
  MOD_RES (5)..(6): Xaa is C or S

SEQ ID NO: 111512 - protein, 30 aa, Artificial Sequence; identical to SEQ ID NO: 9980
  Cyclic GFR-binding peptide
  MOD_RES (1)..(2): Xaa is C or S

SEQ ID NO: 111513 - protein, 24 aa, Artificial Sequence
  Cyclic GFR-binding peptide
LNAISILYFDKGVVTYLKKYRGMA

SEQ ID NO: 111514 - protein, 32 aa, Artificial Sequence; identical to SEQ ID NO: 9982
  Cyclic GFR-binding peptide
  MOD_RES (1)..(2): Xaa is C or S

SEQ ID NO: 111515 - protein, 24 aa, Artificial Sequence
  Cyclic GFR-binding peptide
MSAISILYLDENKNVVLKNYQNMT

SEQ ID NO: 111516 - protein, 39 aa, Artificial Sequence; identical to SEQ ID NO: 20166
  Cyclic GFR-binding peptide
  MOD_RES (5)..(6)..(38): Xaa is C or S

SEQ ID NO: 111517 - protein, 28 aa, Artificial Sequence
  Cyclic GFR-binding peptide
  MOD_RES (1)..(2): Xaa is C or S
XXVPQDLSAISILYLVGRTPKVLKNYQM

SEQ ID NO: 111518 - protein, 30 aa, Artificial Sequence; identical to SEQ ID NO: 38839
  Cyclic GFR-binding peptide
  MOD_RES (3)..(4): Xaa is C or S

SEQ ID NO: 111519 - protein, 22 aa, Artificial Sequence
  Cyclic GFR-binding peptide
QLSAISVLYLDDSSNVILKNYQ

SEQ ID NO: 111520 - protein, 22 aa, Artificial Sequence
  Cyclic GFR-binding peptide
SAISVLYLDDSSNVILKNYQNM

SEQ ID NO: 111521 - protein, 39 aa, Artificial Sequence; identical to SEQ ID NO: 38850
  Cyclic GFR-binding peptide
  MOD_RES (3)..(4)..(36)..(38): Xaa is C or S

SEQ ID NO: 111522 - protein, 27 aa, Artificial Sequence
  Cyclic GFR-binding peptide
  MOD_RES (1)..(2): Xaa is C or S
XXAPTQLSAISVLYLDDSSNVILKNYQ

SEQ ID NO: 111523 - protein, 31 aa, Artificial Sequence; identical to SEQ ID NO: 77362
  Cyclic GFR-binding peptide
  MOD_RES (31)..(31): Xaa is C or S

SEQ ID NO: 111524 - protein, 30 aa, Artificial Sequence; identical to SEQ ID NO: 10001
  Cyclic GFR-binding peptide
  MOD_RES (4)..(5): Xaa is C or S

SEQ ID NO: 111525 - protein, 37 aa, Artificial Sequence; identical to SEQ ID NO: 10002
  Cyclic GFR-binding peptide
  MOD_RES (5)..(6): Xaa is C or S

SEQ ID NO: 111526 - protein, 28 aa, Artificial Sequence
  Cyclic GFR-binding peptide
  MOD_RES (1)..(1): Xaa is C or S
XAPVKTSAISMLYLDNGRVLLLKNYQMI

SEQ ID NO: 111527 - protein, 28 aa, Artificial Sequence
  Cyclic GFR-binding peptide
  MOD_RES (1)..(2): Xaa is C or S
XXVPEKMSAISILYLDENKNVVLKNYQN

SEQ ID NO: 111528 - protein, 30 aa, Artificial Sequence; identical to SEQ ID NO: 10003
  Cyclic GFR-binding peptide
  MOD_RES (1)..(1): Xaa is C or S

SEQ ID NO: 111529 - protein, 28 aa, Artificial Sequence
  Cyclic GFR-binding peptide
TKMSAISMLYLNDKQQIILKNYQGMVVD

SEQ ID NO: 111530 - protein, 33 aa, Artificial Sequence; identical to SEQ ID NO: 10004
  Cyclic GFR-binding peptide
  MOD_RES (3)..(4): Xaa is C or S

SEQ ID NO: 111531 - protein, 29 aa, Artificial Sequence
  Cyclic GFR-binding peptide
  MOD_RES (27)..(29): Xaa is C or S
TSAISMLYLDNGRVLLLKNYQMIVEEXGX

SEQ ID NO: 111532 - protein, 32 aa, Artificial Sequence; identical to SEQ ID NO: 77365
  Cyclic GFR-binding peptide
  MOD_RES (2)..(3): Xaa is C or S

SEQ ID NO: 111533 - protein, 39 aa, Artificial Sequence; identical to SEQ ID NO: 20195
  Cyclic GFR-binding peptide
  MOD_RES (6)..(7)..(39): Xaa is C or S

SEQ ID NO: 111534 - protein, 38 aa, Artificial Sequence; identical to SEQ ID NO: 10009
  Cyclic GFR-binding peptide
  MOD_RES (4)..(5)..(37): Xaa is C or S

SEQ ID NO: 111535 - protein, 32 aa, Artificial Sequence; identical to SEQ ID NO: 10010
  Cyclic GFR-binding peptide
  MOD_RES (32)..(32): Xaa is C or S

SEQ ID NO: 111536 - protein, 36 aa, Artificial Sequence; identical to SEQ ID NO: 96960
  Cyclic GFR-binding peptide
  MOD_RES (4)..(5): Xaa is C or S

SEQ ID NO: 111537 - protein, 24 aa, Artificial Sequence
  Cyclic GFR-binding peptide
DLNAISILYFIGKTPKILKKYRMI

SEQ ID NO: 111538 - protein, 38 aa, Artificial Sequence
  Cyclic GFR-binding peptide
  MOD_RES (4)..(5)..(36)..(38): Xaa is C or S
PSTXXAPVKTSAISMLYLDNGRVLLLKNYQMIVEEXGX

SEQ ID NO: 111539 - protein, 28 aa, Artificial Sequence
  Cyclic GFR-binding peptide
  MOD_RES (2)..(3): Xaa is C or S
AXXVPTKLSAISVLYLDDMGVPTLKNYQ

SEQ ID NO: 111540 - protein, 29 aa, Artificial Sequence
  Cyclic GFR-binding peptide
  MOD_RES (2)..(3): Xaa is C or S
TXXVPTRLSAISILYLDSANNVVLKNYQD

SEQ ID NO: 111541 - protein, 37 aa, Artificial Sequence; identical to SEQ ID NO: 10015
  Cyclic GFR-binding peptide
  MOD_RES (6)..(7): Xaa is C or S

SEQ ID NO: 111542 - protein, 29 aa, Artificial Sequence
  Cyclic GFR-binding peptide
  MOD_RES (1)..(1): Xaa is C or S
XAPTKLNAISVLYFDSSNNVILKKYRNMV

SEQ ID NO: 111543 - protein, 29 aa, Artificial Sequence
  Cyclic GFR-binding peptide
  MOD_RES (2)..(3): Xaa is C or S
PXXVPQDLNAISILYFVGRTPKVLKKYRM

SEQ ID NO: 111544 - protein, 27 aa, Artificial Sequence
  Cyclic GFR-binding peptide
ARLSAISILYLDAANNVVLKNYQDMVV

SEQ ID NO: 111545 - protein, 30 aa, Artificial Sequence
  Cyclic GFR-binding peptide
  MOD_RES (30)..(30): Xaa is C or S
ARLSAISILYLDAANNVVLKNYQDMVVEAX

SEQ ID NO: 111546 - protein, 34 aa, Artificial Sequence; identical to SEQ ID NO: 10022
  Cyclic GFR-binding peptide
  MOD_RES (6)..(7): Xaa is C or S

SEQ ID NO: 111547 - protein, 30 aa, Artificial Sequence
  Cyclic GFR-binding peptide
  MOD_RES (1)..(2): Xaa is C or S
XXVPEKMSAISILYLDENKNVVLKNYQNMT

SEQ ID NO: 111548 - protein, 39 aa, Artificial Sequence; identical to SEQ ID NO: 10023
  Cyclic GFR-binding peptide
  MOD_RES (6)..(7)..(39): Xaa is C or S

SEQ ID NO: 111549 - protein, 36 aa, Artificial Sequence; identical to SEQ ID NO: 10024
  Cyclic GFR-binding peptide
  MOD_RES (1)..(2)..(33)..(35): Xaa is C or S

SEQ ID NO: 111550 - protein, 21 aa, Artificial Sequence
  Cyclic GFR-binding peptide
NAISILYFIGKTPKILKKYRM

SEQ ID NO: 111551 - protein, 30 aa, Artificial Sequence; identical to SEQ ID NO: 10029
  Cyclic GFR-binding peptide

SEQ ID NO: 111552 - protein, 31 aa, Artificial Sequence; identical to SEQ ID NO: 10030
  Cyclic GFR-binding peptide
  MOD_RES (1)..(1): Xaa is C or S

SEQ ID NO: 111553 - protein, 33 aa, Artificial Sequence; identical to SEQ ID NO: 20223
  Cyclic GFR-binding peptide
  MOD_RES (2)..(3): Xaa is C or S

SEQ ID NO: 111554 - protein, 38 aa, Artificial Sequence; identical to SEQ ID NO: 10031
  Cyclic GFR-binding peptide
  MOD_RES (6)..(7): Xaa is C or S

SEQ ID NO: 111555 - protein, 29 aa, Artificial Sequence
  Cyclic GFR-binding peptide
APVKTSAISMLYLDNGRVLLLKNYQMIVE

SEQ ID NO: 111556 - protein, 34 aa, Artificial Sequence
  Cyclic GFR-binding peptide
  MOD_RES (4)..(5): Xaa is C or S
SKAXXVPTKLSAISILYLDKGVVTYLKNYQGMAV

SEQ ID NO: 111557 - protein, 31 aa, Artificial Sequence; identical to SEQ ID NO: 10032
  Cyclic GFR-binding peptide
  MOD_RES (3)..(4): Xaa is C or S

SEQ ID NO: 111558 - protein, 22 aa, Artificial Sequence
  Cyclic GFR-binding peptide
RLNAISILYFDSANNVVLKKYR

SEQ ID NO: 111559 - protein, 29 aa, Artificial Sequence
  Cyclic GFR-binding peptide
  MOD_RES (28)..(28): Xaa is C or S
LSAISVLYLDDSSNVILKNYQNMVVRAXG

SEQ ID NO: 111560 - protein, 36 aa, Artificial Sequence; identical to SEQ ID NO: 10034
  Cyclic GFR-binding peptide
  MOD_RES (2)..(3)..(35): Xaa is C or S

SEQ ID NO: 111561 - protein, 28 aa, Artificial Sequence
  Cyclic GFR-binding peptide
  MOD_RES (28)..(28): Xaa is C or S
DLSAISILYLVGRTPKVLKNYQMVVKSX

SEQ ID NO: 111562 - protein, 31 aa, Artificial Sequence; identical to SEQ ID NO: 20232
  Cyclic GFR-binding peptide
  MOD_RES (3)..(4): Xaa is C or S

SEQ ID NO: 111563 - protein, 27 aa, Artificial Sequence
  Cyclic GFR-binding peptide
  MOD_RES (1)..(2): Xaa is C or S
XXVPEKMSAISILYLDENKNVVLKNYQ

SEQ ID NO: 111564 - protein, 22 aa, Artificial Sequence
  Cyclic GFR-binding peptide
DLSAISILYLIGKTPKILKNYQ

SEQ ID NO: 111565 - protein, 29 aa, Artificial Sequence
  Cyclic GFR-binding peptide
  MOD_RES (26)..(28): Xaa is C or S
NAISMLYFDNGRVLLLKKYRMIVEEXGXL

SEQ ID NO: 111566 - protein, 36 aa, Artificial Sequence; identical to SEQ ID NO: 38901
  Cyclic GFR-binding peptide
  MOD_RES (1)..(2)..(34)..(36): Xaa is C or S

SEQ ID NO: 111567 - protein, 27 aa, Artificial Sequence
  Cyclic GFR-binding peptide
  MOD_RES (27)..(27): Xaa is C or S
LNAISILYFVGRKPKVLKKYRMIVRSX

SEQ ID NO: 111568 - protein, 22 aa, Artificial Sequence
  Cyclic GFR-binding peptide
NAISVLYFDDMGVPTLKKYREG

SEQ ID NO: 111569 - protein, 26 aa, Artificial Sequence
  Cyclic GFR-binding peptide
TPTKMSAISMLYLNDKQQIILKNYQG

SEQ ID NO: 111570 - protein, 33 aa, Artificial Sequence; identical to SEQ ID NO: 20236
  Cyclic GFR-binding peptide
  MOD_RES (30)..(32): Xaa is C or S

SEQ ID NO: 111571 - protein, 34 aa, Artificial Sequence; identical to SEQ ID NO: 10048
  Cyclic GFR-binding peptide
  MOD_RES (2)..(3): Xaa is C or S

SEQ ID NO: 111572 - protein, 30 aa, Artificial Sequence; identical to SEQ ID NO: 10052
  Cyclic GFR-binding peptide
  MOD_RES (29)..(29): Xaa is C or S

SEQ ID NO: 111573 - protein, 38 aa, Artificial Sequence; identical to SEQ ID NO: 77386
  Cyclic GFR-binding peptide
  MOD_RES (2)..(3)..(35)..(37): Xaa is C or S

SEQ ID NO: 111574 - protein, 32 aa, Artificial Sequence; identical to SEQ ID NO: 10053
  Cyclic GFR-binding peptide
  MOD_RES (3)..(4): Xaa is C or S

SEQ ID NO: 111575 - protein, 31 aa, Artificial Sequence; identical to SEQ ID NO: 10056
  Cyclic GFR-binding peptide
  MOD_RES (3)..(4): Xaa is C or S

SEQ ID NO: 111576 - protein, 32 aa, Artificial Sequence; identical to SEQ ID NO: 10057
  Cyclic GFR-binding peptide
  MOD_RES (1)..(2): Xaa is C or S

SEQ ID NO: 111577 - protein, 31 aa, Artificial Sequence
  Cyclic GFR-binding peptide
  MOD_RES (31)..(31): Xaa is C or S
APVKTSAISMLYLDNGRVLLLKNYQMIVEEX

SEQ ID NO: 111578 - protein, 32 aa, Artificial Sequence; identical to SEQ ID NO: 10058
  Cyclic GFR-binding peptide
  MOD_RES (30)..(32): Xaa is C or S

SEQ ID NO: 111579 - protein, 30 aa, Artificial Sequence; identical to SEQ ID NO: 10059
  Cyclic GFR-binding peptide

SEQ ID NO: 111580 - protein, 31 aa, Artificial Sequence; identical to SEQ ID NO: 10061
  Cyclic GFR-binding peptide
  MOD_RES (5)..(6): Xaa is C or S

SEQ ID NO: 111581 - protein, 28 aa, Artificial Sequence
  Cyclic GFR-binding peptide
VPTRLSAISILYLDSANNVVLKNYQDMV

SEQ ID NO: 111582 - protein, 24 aa, Artificial Sequence
  Cyclic GFR-binding peptide
ARLNAISILYFDAANNVVLKKYRD

SEQ ID NO: 111583 - protein, 29 aa, Artificial Sequence
  Cyclic GFR-binding peptide
  MOD_RES (1)..(1): Xaa is C or S
XVPTKLNAISILYFDKGVVTYLKKYRGMA

SEQ ID NO: 111584 - protein, 34 aa, Artificial Sequence; identical to SEQ ID NO: 10063
  Cyclic GFR-binding peptide
  MOD_RES (6)..(7): Xaa is C or S

SEQ ID NO: 111585 - protein, 32 aa, Artificial Sequence; identical to SEQ ID NO: 10066
  Cyclic GFR-binding peptide
  MOD_RES (3)..(4): Xaa is C or S

SEQ ID NO: 111586 - protein, 28 aa, Artificial Sequence
  Cyclic GFR-binding peptide
VPQALSAISILYLVGRKPKVLKNYQMIV

SEQ ID NO: 111587 - protein, 22 aa, Artificial Sequence
  Cyclic GFR-binding peptide
NAISMLYFDEYDKVVLKKYREM

SEQ ID NO: 111588 - protein, 32 aa, Artificial Sequence; identical to SEQ ID NO: 10072
  Cyclic GFR-binding peptide
  MOD_RES (31)..(31): Xaa is C or S

SEQ ID NO: 111589 - protein, 28 aa, Artificial Sequence
  Cyclic GFR-binding peptide
PTKLSAISVLYLDSSNNVILKNYQNMVV

SEQ ID NO: 111590 - protein, 24 aa, Artificial Sequence
  Cyclic GFR-binding peptide
DLSAISILYLVGRTPKVLKNYQMV

SEQ ID NO: 111591 - protein, 27 aa, Artificial Sequence
  Cyclic GFR-binding peptide
  MOD_RES (26)..(26): Xaa is C or S
SAISMLYLDNGRVLLLKNYQMIVEEXG

SEQ ID NO: 111592 - protein, 36 aa, Artificial Sequence; identical to SEQ ID NO: 10081
  Cyclic GFR-binding peptide
  MOD_RES (3)..(4)..(35): Xaa is C or S

SEQ ID NO: 111593 - protein, 25 aa, Artificial Sequence
  Cyclic GFR-binding peptide
ELNAISMLYFDEYDKVVLKKYREMV

SEQ ID NO: 111594 - protein, 32 aa, Artificial Sequence; identical to SEQ ID NO: 10084
  Cyclic GFR-binding peptide

SEQ ID NO: 111595 - protein, 35 aa, Artificial Sequence; identical to SEQ ID NO: 10090
  Cyclic GFR-binding peptide
  MOD_RES (1)..(33)..(35): Xaa is C or S

SEQ ID NO: 111596 - protein, 35 aa, Artificial Sequence; identical to SEQ ID NO: 10093
  Cyclic GFR-binding peptide
  MOD_RES (3)..(4)..(35): Xaa is C or S

SEQ ID NO: 111597 - protein, 34 aa, Artificial Sequence; identical to SEQ ID NO: 38953
  Cyclic GFR-binding peptide
  MOD_RES (1)..(33): Xaa is C or S

SEQ ID NO: 111598 - protein, 26 aa, Artificial Sequence
  Cyclic GFR-binding peptide
RLNAISILYFDAANNVVLKKYRDMVV

SEQ ID NO: 111599 - protein, 36 aa, Artificial Sequence; identical to SEQ ID NO: 10099
  Cyclic GFR-binding peptide
  MOD_RES (3)..(4): Xaa is C or S

SEQ ID NO: 111600 - protein, 24 aa, Artificial Sequence
  Cyclic GFR-binding peptide
QDLSAISILYLIGKTPKILKNYQM

SEQ ID NO: 111601 - protein, 33 aa, Artificial Sequence; identical to SEQ ID NO: 10101
  Cyclic GFR-binding peptide
  MOD_RES (3)..(4): Xaa is C or S

SEQ ID NO: 111602 - protein, 31 aa, Artificial Sequence; identical to SEQ ID NO: 10102
  Cyclic GFR-binding peptide
  MOD_RES (31)..(31): Xaa is C or S

SEQ ID NO: 111603 - protein, 26 aa, Artificial Sequence
  Cyclic GFR-binding peptide
  MOD_RES (1)..(1): Xaa is C or S
XVSQDLNAISILYFIGKTPKILKKYR

SEQ ID NO: 111604 - protein, 26 aa, Artificial Sequence
  Cyclic GFR-binding peptide
  MOD_RES (1)..(1): Xaa is C or S
XVPTKLSAISVLYLDDMGVPTLKNYQ

SEQ ID NO: 111605 - protein, 32 aa, Artificial Sequence; identical to SEQ ID NO: 10110
  Cyclic GFR-binding peptide
  MOD_RES (4)..(5): Xaa is C or S

SEQ ID NO: 111606 - protein, 27 aa, Artificial Sequence
  Cyclic GFR-binding peptide
PVKTNAISMLYFDNGRVLLLKKYRMIV

SEQ ID NO: 111607 - protein, 36 aa, Artificial Sequence
  Cyclic GFR-binding peptide
  MOD_RES (1)..(33)..(35): Xaa is C or S
XVPTKLSAISILYLDKGVVTYLKNYQGMAVSEXGXR

SEQ ID NO: 111608 - protein, 30 aa, Artificial Sequence; identical to SEQ ID NO: 10113
  Cyclic GFR-binding peptide
  MOD_RES (28)..(30): Xaa is C or S

SEQ ID NO: 111609 - protein, 32 aa, Artificial Sequence; identical to SEQ ID NO: 10118
  Cyclic GFR-binding peptide
  MOD_RES (1)..(2): Xaa is C or S

SEQ ID NO: 111610 - protein, 40 aa, Artificial Sequence; identical to SEQ ID NO: 10120
  Cyclic GFR-binding peptide
  MOD_RES (5)..(6)..(38)..(40): Xaa is C or S

SEQ ID NO: 111611 - protein, 35 aa, Artificial Sequence; identical to SEQ ID NO: 10123
  Cyclic GFR-binding peptide
  MOD_RES (1)..(2)..(34): Xaa is C or S

SEQ ID NO: 111612 - protein, 40 aa, Artificial Sequence; identical to SEQ ID NO: 10124
  Cyclic GFR-binding peptide
  MOD_RES (5)..(6)..(37)..(39): Xaa is C or S

SEQ ID NO: 111613 - protein, 36 aa, Artificial Sequence; identical to SEQ ID NO: 38990
  Cyclic GFR-binding peptide
  MOD_RES (5)..(6): Xaa is C or S

SEQ ID NO: 111614 - protein, 27 aa, Artificial Sequence
  Cyclic GFR-binding peptide
  MOD_RES (1)..(2): Xaa is C or S
XXVPTELNAISMLYFDENEKVVLKKYR

SEQ ID NO: 111615 - protein, 37 aa, Artificial Sequence; identical to SEQ ID NO: 10127
  Cyclic GFR-binding peptide
  MOD_RES (6)..(7): Xaa is C or S

SEQ ID NO: 111616 - protein, 41 aa, Artificial Sequence; identical to SEQ ID NO: 10128
  Cyclic GFR-binding peptide
  MOD_RES (6)..(7)..(38)..(40): Xaa is C or S

SEQ ID NO: 111617 - protein, 26 aa, Artificial Sequence
  Cyclic GFR-binding peptide
PTKLSAISILYLDKGVVTYLKNYQGM

SEQ ID NO: 111618 - protein, 35 aa, Artificial Sequence; identical to SEQ ID NO: 39000
  Cyclic GFR-binding peptide
  MOD_RES (1)..(2)..(34): Xaa is C or S

SEQ ID NO: 111619 - protein, 26 aa, Artificial Sequence
  Cyclic GFR-binding peptide
LNAISILYFVGRTPKVLKKYRMVVKS

SEQ ID NO: 111620 - protein, 37 aa, Artificial Sequence; identical to SEQ ID NO: 77416
  Cyclic GFR-binding peptide
  MOD_RES (1)..(2)..(34)..(36): Xaa is C or S

SEQ ID NO: 111621 - protein, 34 aa, Artificial Sequence
  Cyclic GFR-binding peptide
  MOD_RES (3)..(4): Xaa is C or S
EPXXVPEKMSAISILYLDENKNVVLKNYQNMTVE

SEQ ID NO: 111622 - protein, 32 aa, Artificial Sequence
  Cyclic GFR-binding peptide
  MOD_RES (6)..(7): Xaa is C or S
GSAGPXXTPTKMSAISMLYLNDKQQIILKNYQ

SEQ ID NO: 111623 - protein, 35 aa, Artificial Sequence; identical to SEQ ID NO: 10131
  Cyclic GFR-binding peptide
  MOD_RES (2)..(3): Xaa is C or S

SEQ ID NO: 111624 - protein, 37 aa, Artificial Sequence; identical to SEQ ID NO: 20311
  Cyclic GFR-binding peptide
  MOD_RES (2)..(3)..(35)..(37): Xaa is C or S

SEQ ID NO: 111625 - protein, 33 aa, Artificial Sequence; identical to SEQ ID NO: 39010
  Cyclic GFR-binding peptide
  MOD_RES (5)..(6): Xaa is C or S

SEQ ID NO: 111626 - protein, 27 aa, Artificial Sequence
  Cyclic GFR-binding peptide
KLNAISVLYFDDMGVPTLKKYREGMSV

SEQ ID NO: 111627 - protein, 36 aa, Artificial Sequence; identical to SEQ ID NO: 10136
  Cyclic GFR-binding peptide
  MOD_RES (4)..(5)..(36): Xaa is C or S

SEQ ID NO: 111628 - protein, 32 aa, Artificial Sequence; identical to SEQ ID NO: 10137
  Cyclic GFR-binding peptide
  MOD_RES (29)..(31): Xaa is C or S

SEQ ID NO: 111629 - protein, 36 aa, Artificial Sequence; identical to SEQ ID NO: 97073
  Cyclic GFR-binding peptide
  MOD_RES (1)..(2)..(34)..(36): Xaa is C or S

SEQ ID NO: 111630 - protein, 33 aa, Artificial Sequence; identical to SEQ ID NO: 92104
  Cyclic GFR-binding peptide
  MOD_RES (1)..(2): Xaa is C or S

SEQ ID NO: 111631 - protein, 33 aa, Artificial Sequence; identical to SEQ ID NO: 10142
  Cyclic GFR-binding peptide
  MOD_RES (30)..(32): Xaa is C or S

SEQ ID NO: 111632 - protein, 31 aa, Artificial Sequence; identical to SEQ ID NO: 10143
  Cyclic GFR-binding peptide
  MOD_RES (1)..(1): Xaa is C or S

SEQ ID NO: 111633 - protein, 29 aa, Artificial Sequence
  Cyclic GFR-binding peptide
  MOD_RES (3)..(4): Xaa is C or S
GPXXTPTKMNAISMLYFNDKQQIILKKYR

SEQ ID NO: 111634 - protein, 30 aa, Artificial Sequence; identical to SEQ ID NO: 10144
  Cyclic GFR-binding peptide
  MOD_RES (1)..(2): Xaa is C or S

SEQ ID NO: 111635 - protein, 22 aa, Artificial Sequence
  Cyclic GFR-binding peptide
LNAISVLYFDDMGVPTLKKYRE

SEQ ID NO: 111636 - protein, 36 aa, Artificial Sequence; identical to SEQ ID NO: 39023
  Cyclic GFR-binding peptide
  MOD_RES (6)..(7): Xaa is C or S

SEQ ID NO: 111637 - protein, 25 aa, Artificial Sequence
  Cyclic GFR-binding peptide
SAISVLYLDDSSNVILKNYQNMVVR

SEQ ID NO: 111638 - protein, 30 aa, Artificial Sequence; identical to SEQ ID NO: 97092
  Cyclic GFR-binding peptide

SEQ ID NO: 111639 - protein, 35 aa, Artificial Sequence; identical to SEQ ID NO: 10152
  Cyclic GFR-binding peptide
  MOD_RES (32)..(34): Xaa is C or S

SEQ ID NO: 111640 - protein, 29 aa, Artificial Sequence
  Cyclic GFR-binding peptide
  MOD_RES (3)..(4): Xaa is C or S
EPXXVPEKMNAISILYFDENKNVVLKKYR

SEQ ID NO: 111641 - protein, 34 aa, Artificial Sequence; identical to SEQ ID NO: 39031
  Cyclic GFR-binding peptide
  MOD_RES (2)..(3): Xaa is C or S

SEQ ID NO: 111642 - protein, 33 aa, Artificial Sequence; identical to SEQ ID NO: 20330
  Cyclic GFR-binding peptide
  MOD_RES (32)..(32): Xaa is C or S

SEQ ID NO: 111643 - protein, 25 aa, Artificial Sequence
  Cyclic GFR-binding peptide
TKLSAISVLYLDSSNNVILKNYQNM

SEQ ID NO: 111644 - protein, 39 aa, Artificial Sequence; identical to SEQ ID NO: 10159
  Cyclic GFR-binding peptide
  MOD_RES (2)..(3)..(36)..(38): Xaa is C or S

SEQ ID NO: 111645 - protein, 38 aa, Artificial Sequence; identical to SEQ ID NO: 10161
  Cyclic GFR-binding peptide
  MOD_RES (3)..(4)..(36)..(38): Xaa is C or S

SEQ ID NO: 111646 - protein, 21 aa, Artificial Sequence
  Cyclic GFR-binding peptide
SAISVLYLDDSSNVILKNYQN

SEQ ID NO: 111647 - protein, 37 aa, Artificial Sequence; identical to SEQ ID NO: 10163
  Cyclic GFR-binding peptide
  MOD_RES (3)..(4)..(37): Xaa is C or S

SEQ ID NO: 111648 - protein, 34 aa, Artificial Sequence; identical to SEQ ID NO: 10164
  Cyclic GFR-binding peptide
  MOD_RES (5)..(6): Xaa is C or S

SEQ ID NO: 111649 - protein, 40 aa, Artificial Sequence; identical to SEQ ID NO: 10166
  Cyclic GFR-binding peptide
  MOD_RES (5)..(6)..(38)..(40): Xaa is C or S

SEQ ID NO: 111650 - protein, 39 aa, Artificial Sequence; identical to SEQ ID NO: 10167
  Cyclic GFR-binding peptide
  MOD_RES (6)..(7)..(38): Xaa is C or S

SEQ ID NO: 111651 - protein, 35 aa, Artificial Sequence; identical to SEQ ID NO: 10168
  Cyclic GFR-binding peptide
  MOD_RES (7)..(7): Xaa is C or S

SEQ ID NO: 111652 - protein, 30 aa, Artificial Sequence; identical to SEQ ID NO: 10171
  Cyclic GFR-binding peptide
  MOD_RES (4)..(5): Xaa is C or S

SEQ ID NO: 111653 - protein, 35 aa, Artificial Sequence
  Cyclic GFR-binding peptide
  MOD_RES (32)..(34): Xaa is C or S
VPARLSAISILYLDAANNVVLKNYQDMVVEAXGXR

SEQ ID NO: 111654 - protein, 27 aa, Artificial Sequence
  Cyclic GFR-binding peptide
MSAISILYLDENKNVVLKNYQNMTVES

SEQ ID NO: 111655 - protein, 27 aa, Artificial Sequence
  Cyclic GFR-binding peptide
TELNAISMLYFDENEKVVLKKYRDMVV

SEQ ID NO: 111656 - protein, 35 aa, Artificial Sequence; identical to SEQ ID NO: 10173
  Cyclic GFR-binding peptide
  MOD_RES (1)..(32)..(34): Xaa is C or S

SEQ ID NO: 111657 - protein, 32 aa, Artificial Sequence
  Cyclic GFR-binding peptide
  MOD_RES (29)..(31): Xaa is C or S
RLSAISILYLDAANNVVLKNYQDMVVEAXGXR

SEQ ID NO: 111658 - protein, 37 aa, Artificial Sequence
  Cyclic GFR-binding peptide
  MOD_RES (6)..(7): Xaa is C or S
HVPKPXXAPTKLSAISVLYLDDSSNVILKNYQNMVVR

SEQ ID NO: 111659 - protein, 26 aa, Artificial Sequence
  Cyclic GFR-binding peptide
VPEKMSAISILYLDENKNVVLKNYQN

SEQ ID NO: 111660 - protein, 31 aa, Artificial Sequence
  Cyclic GFR-binding peptide
  MOD_RES (5)..(6): Xaa is C or S
SAGPXXTPTKMSAISMLYLNDKQQIILKNYQ

SEQ ID NO: 111661 - protein, 28 aa, Artificial Sequence
  Cyclic GFR-binding peptide
  MOD_RES (27)..(27): Xaa is C or S
LSAISILYLVGRKPKVLKNYQMIVRSXK

SEQ ID NO: 111662 - protein, 29 aa, Artificial Sequence
  Cyclic GFR-binding peptide
  MOD_RES (1)..(1): Xaa is C or S
XVPTRLSAISILYLDSANNVVLKNYQDMV

SEQ ID NO: 111663 - protein, 23 aa, Artificial Sequence
  Cyclic GFR-binding peptide
NAISMLYFNDKQQIILKKYRGMV

SEQ ID NO: 111664 - protein, 41 aa, Artificial Sequence; identical to SEQ ID NO: 92144
  Cyclic GFR-binding peptide
  MOD_RES (6)..(7)..(39)..(41): Xaa is C or S

SEQ ID NO: 111665 - protein, 31 aa, Artificial Sequence; identical to SEQ ID NO: 10179
  Cyclic GFR-binding peptide
  MOD_RES (28)..(30): Xaa is C or S

SEQ ID NO: 111666 - protein, 33 aa, Artificial Sequence; identical to SEQ ID NO: 39060
  Cyclic GFR-binding peptide
  MOD_RES (3)..(4): Xaa is C or S

SEQ ID NO: 111667 - protein, 31 aa, Artificial Sequence; identical to SEQ ID NO: 77454
  Cyclic GFR-binding peptide
  MOD_RES (2)..(3): Xaa is C or S

SEQ ID NO: 111668 - protein, 26 aa, Artificial Sequence
  Cyclic GFR-binding peptide
MNAISMLYFNDKQQIILKKYRGMVVD

SEQ ID NO: 111669 - protein, 34 aa, Artificial Sequence; identical to SEQ ID NO: 10187
  Cyclic GFR-binding peptide
  MOD_RES (5)..(6): Xaa is C or S

SEQ ID NO: 111670 - protein, 35 aa, Artificial Sequence; identical to SEQ ID NO: 10188
  Cyclic GFR-binding peptide
  MOD_RES (2)..(3)..(35): Xaa is C or S

SEQ ID NO: 111671 - protein, 42 aa, Artificial Sequence; identical to SEQ ID NO: 10193
  Cyclic GFR-binding peptide
  MOD_RES (6)..(7)..(39)..(41): Xaa is C or S

SEQ ID NO: 111672 - protein, 27 aa, Artificial Sequence
  Cyclic GFR-binding peptide
PTRLNAISILYFDSANNVVLKKYRDMV

SEQ ID NO: 111673 - protein, 35 aa, Artificial Sequence; identical to SEQ ID NO: 10195
  Cyclic GFR-binding peptide
  MOD_RES (1)..(33)..(35): Xaa is C or S

SEQ ID NO: 111674 - protein, 39 aa, Artificial Sequence; identical to SEQ ID NO: 10198
  Cyclic GFR-binding peptide
  MOD_RES (6)..(7)..(38): Xaa is C or S

SEQ ID NO: 111675 - protein, 32 aa, Artificial Sequence; identical to SEQ ID NO: 10201
  Cyclic GFR-binding peptide
  MOD_RES (3)..(3): Xaa is C or S

SEQ ID NO: 111676 - protein, 34 aa, Artificial Sequence; identical to SEQ ID NO: 10203
  Cyclic GFR-binding peptide
  MOD_RES (32)..(34): Xaa is C or S

SEQ ID NO: 111677 - protein, 25 aa, Artificial Sequence
  Cyclic GFR-binding peptide
PTELNAISMLYFDENEKVVLKKYRD

SEQ ID NO: 111678 - protein, 29 aa, Artificial Sequence
  Cyclic GFR-binding peptide
  MOD_RES (2)..(3): Xaa is C or S
PXXAPTQLSAISVLYLDDSSNVILKNYQN

SEQ ID NO: 111679 - protein, 20 aa, Artificial Sequence
  Cyclic GFR-binding peptide
NAISILYFIGKTPKILKKYR

SEQ ID NO: 111680 - protein, 36 aa, Artificial Sequence; identical to SEQ ID NO: 39086
  Cyclic GFR-binding peptide
  MOD_RES (3)..(4)..(36): Xaa is C or S

SEQ ID NO: 111681 - protein, 20 aa, Artificial Sequence
  Cyclic GFR-binding peptide
SAISILYLDENKNVVLKNYQ

SEQ ID NO: 111682 - protein, 35 aa, Artificial Sequence; identical to SEQ ID NO: 10210
  Cyclic GFR-binding peptide
  MOD_RES (32)..(34): Xaa is C or S

SEQ ID NO: 111683 - protein, 34 aa, Artificial Sequence; identical to SEQ ID NO: 39091
  Cyclic GFR-binding peptide
  MOD_RES (6)..(7): Xaa is C or S

SEQ ID NO: 111684 - protein, 36 aa, Artificial Sequence; identical to SEQ ID NO: 10213
  Cyclic GFR-binding peptide
  MOD_RES (5)..(6): Xaa is C or S

SEQ ID NO: 111685 - protein, 22 aa, Artificial Sequence
  Cyclic GFR-binding peptide
LNAISILYFIGKTPKILKKYRM

SEQ ID NO: 111686 - protein, 31 aa, Artificial Sequence
  Cyclic GFR-binding peptide
  MOD_RES (1)..(2): Xaa is C or S
XXTPTKMSAISMLYLNDKQQIILKNYQGMVV

SEQ ID NO: 111687 - protein, 40 aa, Artificial Sequence
  Cyclic GFR-binding peptide
  MOD_RES (4)..(5)..(37)..(39): Xaa is C or S
PASXXVPARLSAISILYLDAANNVVLKNYQDMVVEAXGXR

SEQ ID NO: 111688 - protein, 40 aa, Artificial Sequence
  Cyclic GFR-binding peptide
  MOD_RES (6)..(7)..(39): Xaa is C or S
KASKAXXVPTKLSAISILYLDKGVVTYLKNYQGMAVSEXG

SEQ ID NO: 111689 - protein, 39 aa, Artificial Sequence; identical to SEQ ID NO: 10222
  Cyclic GFR-binding peptide
  MOD_RES (3)..(4)..(36)..(38): Xaa is C or S

SEQ ID NO: 111690 - protein, 38 aa, Artificial Sequence; identical to SEQ ID NO: 10223
  Cyclic GFR-binding peptide
  MOD_RES (5)..(6)..(38): Xaa is C or S

SEQ ID NO: 111691 - protein, 21 aa, Artificial Sequence
  Cyclic GFR-binding peptide
NAISILYFDENKNVVLKKYRN

SEQ ID NO: 111692 - protein, 23 aa, Artificial Sequence
  Cyclic GFR-binding peptide
LNAISILYFVGRTPKVLKKYRMV

SEQ ID NO: 111693 - protein, 22 aa, Artificial Sequence
  Cyclic GFR-binding peptide
RLSAISILYLDSANNVVLKNYQ

SEQ ID NO: 111694 - protein, 32 aa, Artificial Sequence; identical to SEQ ID NO: 10226
  Cyclic GFR-binding peptide
  MOD_RES (31)..(31): Xaa is C or S

SEQ ID NO: 111695 - protein, 25 aa, Artificial Sequence
  Cyclic GFR-binding peptide
TKLSAISVLYLDDMGVPTLKNYQEG

SEQ ID NO: 111696 - protein, 32 aa, Artificial Sequence
  Cyclic GFR-binding peptide
  MOD_RES (31)..(31): Xaa is C or S
PEKMSAISILYLDENKNVVLKNYQNMTVESXA

SEQ ID NO: 111697 - protein, 27 aa, Artificial Sequence
  Cyclic GFR-binding peptide
  MOD_RES (1)..(1): Xaa is C or S
XAPTKLSAISVLYLDSSNNVILKNYQN

SEQ ID NO: 111698 - protein, 31 aa, Artificial Sequence; identical to SEQ ID NO: 20401
  Cyclic GFR-binding peptide
  MOD_RES (31)..(31): Xaa is C or S

SEQ ID NO: 111699 - protein, 21 aa, Artificial Sequence
  Cyclic GFR-binding peptide
SAISVLYLDDMGVPTLKNYQE

SEQ ID NO: 111700 - protein, 25 aa, Artificial Sequence
  Cyclic GFR-binding peptide
PTKLNAISILYFDKGVVTYLKKYRG

SEQ ID NO: 111701 - protein, 30 aa, Artificial Sequence; identical to SEQ ID NO: 20407
  Cyclic GFR-binding peptide

SEQ ID NO: 111702 - protein, 30 aa, Artificial Sequence; identical to SEQ ID NO: 39119
  Cyclic GFR-binding peptide
  MOD_RES (1)..(1): Xaa is C or S

SEQ ID NO: 111703 - protein, 30 aa, Artificial Sequence; identical to SEQ ID NO: 10238
  Cyclic GFR-binding peptide
  MOD_RES (28)..(30): Xaa is C or S

SEQ ID NO: 111704 - protein, 28 aa, Artificial Sequence
  Cyclic GFR-binding peptide
VPQDLSAISILYLVGRTPKVLKNYQMVV

SEQ ID NO: 111705 - protein, 27 aa, Artificial Sequence
  Cyclic GFR-binding peptide
TKLNAISVLYFDSSNNVILKKYRNMVV

SEQ ID NO: 111706 - protein, 22 aa, Artificial Sequence
  Cyclic GFR-binding peptide
KLSAISVLYLDSSNNVILKNYQ

SEQ ID NO: 111707 - protein, 26 aa, Artificial Sequence
  Cyclic GFR-binding peptide
  MOD_RES (1)..(1): Xaa is C or S
XAPTKLSAISVLYLDSSNNVILKNYQ

SEQ ID NO: 111708 - protein, 32 aa, Artificial Sequence; identical to SEQ ID NO: 10247
  Cyclic GFR-binding peptide
  MOD_RES (29)..(31): Xaa is C or S

SEQ ID NO: 111709 - protein, 33 aa, Artificial Sequence; identical to SEQ ID NO: 10249
  Cyclic GFR-binding peptide
  MOD_RES (1)..(33): Xaa is C or S

SEQ ID NO: 111710 - protein, 25 aa, Artificial Sequence
  Cyclic GFR-binding peptide
QDLSAISILYLIGKTPKILKNYQMI

SEQ ID NO: 111711 - protein, 28 aa, Artificial Sequence
  Cyclic GFR-binding peptide
PTQLSAISVLYLDDSSNVILKNYQNMVV

SEQ ID NO: 111712 - protein, 22 aa, Artificial Sequence
  Cyclic GFR-binding peptide
SAISILYLVGRTPKVLKNYQMV

SEQ ID NO: 111713 - protein, 31 aa, Artificial Sequence; identical to SEQ ID NO: 10261
  Cyclic GFR-binding peptide
  MOD_RES (5)..(6): Xaa is C or S

SEQ ID NO: 111714 - protein, 32 aa, Artificial Sequence; identical to SEQ ID NO: 10263
  Cyclic GFR-binding peptide
  MOD_RES (5)..(6): Xaa is C or S

SEQ ID NO: 111715 - protein, 21 aa, Artificial Sequence
  Cyclic GFR-binding peptide
SAISMLYLNDKQQIILKNYQG

SEQ ID NO: 111716 - protein, 24 aa, Artificial Sequence
  Cyclic GFR-binding peptide
NAISILYFDSANNVVLKKYRDMVV

SEQ ID NO: 111717 - protein, 21 aa, Artificial Sequence
  Cyclic GFR-binding peptide
NAISILYFDSANNVVLKKYRD

SEQ ID NO: 111718 - protein, 30 aa, Artificial Sequence; identical to SEQ ID NO: 10267
  Cyclic GFR-binding peptide
  MOD_RES (3)..(4): Xaa is C or S

SEQ ID NO: 111719 - protein, 31 aa, Artificial Sequence; identical to SEQ ID NO: 10268
  Cyclic GFR-binding peptide
  MOD_RES (1)..(1): Xaa is C or S

SEQ ID NO: 111720 - protein, 26 aa, Artificial Sequence
  Cyclic GFR-binding peptide
  MOD_RES (1)..(1): Xaa is C or S
XVPTKLSAISILYLDKGVVTYLKNYQ

SEQ ID NO: 111721 - protein, 34 aa, Artificial Sequence; identical to SEQ ID NO: 10269
  Cyclic GFR-binding peptide
  MOD_RES (4)..(5): Xaa is C or S

SEQ ID NO: 111722 - protein, 25 aa, Artificial Sequence
  Cyclic GFR-binding peptide
LSAISILYLVGRTPKVLKNYQMVVK

SEQ ID NO: 111723 - protein, 38 aa, Artificial Sequence; identical to SEQ ID NO: 10274
  Cyclic GFR-binding peptide
  MOD_RES (3)..(4)..(36)..(38): Xaa is C or S

SEQ ID NO: 111724 - protein, 26 aa, Artificial Sequence
  Cyclic GFR-binding peptide
SQDLNAISILYFIGKTPKILKKYRMI

SEQ ID NO: 111725 - protein, 29 aa, Artificial Sequence
  Cyclic GFR-binding peptide
  MOD_RES (1)..(1): Xaa is C or S
XVPQDLNAISILYFVGRTPKVLKKYRMVV

SEQ ID NO: 111726 - protein, 30 aa, Artificial Sequence
  Cyclic GFR-binding peptide
  MOD_RES (29)..(29): Xaa is C or S
KMSAISILYLDENKNVVLKNYQNMTVESXA

SEQ ID NO: 111727 - protein, 24 aa, Artificial Sequence
  Cyclic GFR-binding peptide
RLNAISILYFDAANNVVLKKYRDM

SEQ ID NO: 111728 - protein, 31 aa, Artificial Sequence; identical to SEQ ID NO: 20439
  Cyclic GFR-binding peptide

SEQ ID NO: 111729 - protein, 33 aa, Artificial Sequence; identical to SEQ ID NO: 10283
  Cyclic GFR-binding peptide
  MOD_RES (1)..(2): Xaa is C or S

SEQ ID NO: 111730 - protein, 32 aa, Artificial Sequence; identical to SEQ ID NO: 10284
  Cyclic GFR-binding peptide
  MOD_RES (1)..(2): Xaa is C or S

SEQ ID NO: 111731 - protein, 30 aa, Artificial Sequence; identical to SEQ ID NO: 10285
  Cyclic GFR-binding peptide
  MOD_RES (28)..(30): Xaa is C or S

SEQ ID NO: 111732 - protein, 34 aa, Artificial Sequence; identical to SEQ ID NO: 10290
  Cyclic GFR-binding peptide
  MOD_RES (1)..(32)..(34): Xaa is C or S

SEQ ID NO: 111733 - protein, 25 aa, Artificial Sequence
  Cyclic GFR-binding peptide
DLSAISILYLVGRTPKVLKNYQMVV

SEQ ID NO: 111734 - protein, 37 aa, Artificial Sequence; identical to SEQ ID NO: 10293
  Cyclic GFR-binding peptide
  MOD_RES (6)..(7): Xaa is C or S

SEQ ID NO: 111735 - protein, 27 aa, Artificial Sequence
  Cyclic GFR-binding peptide
APTKLNAISVLYFDSSNNVILKKYRNM

SEQ ID NO: 111736 - protein, 35 aa, Artificial Sequence
  Cyclic GFR-binding peptide
  MOD_RES (32)..(34): Xaa is C or S
VPEKMSAISILYLDENKNVVLKNYQNMTVESXAXR

SEQ ID NO: 111737 - protein, 26 aa, Artificial Sequence
  Cyclic GFR-binding peptide
MNAISILYFDENKNVVLKKYRNMTVE

SEQ ID NO: 111738 - protein, 32 aa, Artificial Sequence
  Cyclic GFR-binding peptide
  MOD_RES (1)..(1): Xaa is C or S
XTPTKMSAISMLYLNDKQQIILKNYQGMVVDR

SEQ ID NO: 111739 - protein, 25 aa, Artificial Sequence
  Cyclic GFR-binding peptide
KMNAISILYFDENKNVVLKKYRNMT

SEQ ID NO: 111740 - protein, 30 aa, Artificial Sequence
  Cyclic GFR-binding peptide
TPTKMSAISMLYLNDKQQIILKNYQGMVVD

SEQ ID NO: 111741 - protein, 23 aa, Artificial Sequence
  Cyclic GFR-binding peptide
SAISMLYLDNGRVLLLKNYQMIV

SEQ ID NO: 111742 - protein, 26 aa, Artificial Sequence
  Cyclic GFR-binding peptide
  MOD_RES (1)..(1): Xaa is C or S
XAPTQLSAISVLYLDDSSNVILKNYQ

SEQ ID NO: 111743 - protein, 29 aa, Artificial Sequence
  Cyclic GFR-binding peptide
  MOD_RES (28)..(28): Xaa is C or S
KTNAISMLYFDNGRVLLLKKYRMIVEEXG

SEQ ID NO: 111744 - protein, 33 aa, Artificial Sequence; identical to SEQ ID NO: 10306
  Cyclic GFR-binding peptide
  MOD_RES (2)..(3): Xaa is C or S

SEQ ID NO: 111745 - protein, 32 aa, Artificial Sequence
  Cyclic GFR-binding peptide
  MOD_RES (30)..(32): Xaa is C or S
EKMSAISILYLDENKNVVLKNYQNMTVESXAX

SEQ ID NO: 111746 - protein, 35 aa, Artificial Sequence; identical to SEQ ID NO: 10308
  Cyclic GFR-binding peptide
  MOD_RES (2)..(3): Xaa is C or S

SEQ ID NO: 111747 - protein, 35 aa, Artificial Sequence; identical to SEQ ID NO: 20470
  Cyclic GFR-binding peptide
  MOD_RES (6)..(7): Xaa is C or S

SEQ ID NO: 111748 - protein, 35 aa, Artificial Sequence; identical to SEQ ID NO: 10309
  Cyclic GFR-binding peptide
  MOD_RES (5)..(6): Xaa is C or S

SEQ ID NO: 111749 - protein, 33 aa, Artificial Sequence; identical to SEQ ID NO: 10310
  Cyclic GFR-binding peptide
  MOD_RES (1)..(33): Xaa is C or S

SEQ ID NO: 111750 - protein, 36 aa, Artificial Sequence; identical to SEQ ID NO: 10312
  Cyclic GFR-binding peptide
  MOD_RES (2)..(34)..(36): Xaa is C or S

SEQ ID NO: 111751 - protein, 29 aa, Artificial Sequence
  Cyclic GFR-binding peptide
APTKLSAISVLYLDDSSNVILKNYQNMVV

SEQ ID NO: 111752 - protein, 26 aa, Artificial Sequence
  Cyclic GFR-binding peptide
TELNAISMLYFDEYDKVVLKKYREMV

SEQ ID NO: 111753 - protein, 28 aa, Artificial Sequence
  Cyclic GFR-binding peptide
  MOD_RES (1)..(1): Xaa is C or S
XAPVKTNAISMLYFDNGRVLLLKKYRMI

SEQ ID NO: 111754 - protein, 37 aa, Artificial Sequence
  Cyclic GFR-binding peptide
  MOD_RES (6)..(7): Xaa is C or S
AAPASXXVPARLSAISILYLDAANNVVLKNYQDMVVE

SEQ ID NO: 111755 - protein, 35 aa, Artificial Sequence; identical to SEQ ID NO: 39196
  Cyclic GFR-binding peptide
  MOD_RES (4)..(5): Xaa is C or S

SEQ ID NO: 111756 - protein, 35 aa, Artificial Sequence; identical to SEQ ID NO: 39197
  Cyclic GFR-binding peptide
  MOD_RES (5)..(6): Xaa is C or S

SEQ ID NO: 111757 - protein, 33 aa, Artificial Sequence; identical to SEQ ID NO: 10316
  Cyclic GFR-binding peptide
  MOD_RES (6)..(7): Xaa is C or S

SEQ ID NO: 111758 - protein, 28 aa, Artificial Sequence
  Cyclic GFR-binding peptide
VPARLNAISILYFDAANNVVLKKYRDMV

SEQ ID NO: 111759 - protein, 33 aa, Artificial Sequence
  Cyclic GFR-binding peptide
  MOD_RES (3)..(4): Xaa is C or S
EPXXVPEKMSAISILYLDENKNVVLKNYQNMTV

SEQ ID NO: 111760 - protein, 24 aa, Artificial Sequence
  Cyclic GFR-binding peptide
TELNAISMLYFDENEKVVLKKYRD

SEQ ID NO: 111761 - protein, 41 aa, Artificial Sequence; identical to SEQ ID NO: 10322
  Cyclic GFR-binding peptide
  MOD_RES (6)..(38)..(40): Xaa is C or S

SEQ ID NO: 111762 - protein, 39 aa, Artificial Sequence; identical to SEQ ID NO: 10323
  Cyclic GFR-binding peptide
  MOD_RES (5)..(6)..(38): Xaa is C or S

SEQ ID NO: 111763 - protein, 36 aa, Artificial Sequence; identical to SEQ ID NO: 10325
  Cyclic GFR-binding peptide
  MOD_RES (6)..(7): Xaa is C or S

SEQ ID NO: 111764 - protein, 28 aa, Artificial Sequence
  Cyclic GFR-binding peptide
APTKLSAISVLYLDDSSNVILKNYQNMV

SEQ ID NO: 111765 - protein, 25 aa, Artificial Sequence
  Cyclic GFR-binding peptide
TKMSAISMLYLNDKQQIILKNYQGM

SEQ ID NO: 111766 - protein, 40 aa, Artificial Sequence; identical to SEQ ID NO: 10330
  Cyclic GFR-binding peptide
  MOD_RES (5)..(6)..(37)..(39): Xaa is C or S

SEQ ID NO: 111767 - protein, 35 aa, Artificial Sequence; identical to SEQ ID NO: 10331
  Cyclic GFR-binding peptide
  MOD_RES (4)..(5): Xaa is C or S

SEQ ID NO: 111768 - protein, 32 aa, Artificial Sequence
  Cyclic GFR-binding peptide
  MOD_RES (1)..(2): Xaa is C or S
XXVPARLSAISILYLDAANNVVLKNYQDMVVE

SEQ ID NO: 111769 - protein, 42 aa, Artificial Sequence; identical to SEQ ID NO: 20500
  Cyclic GFR-binding peptide
  MOD_RES (6)..(7)..(39)..(41): Xaa is C or S

SEQ ID NO: 111770 - protein, 31 aa, Artificial Sequence; identical to SEQ ID NO: 10334
  Cyclic GFR-binding peptide
  MOD_RES (6)..(6): Xaa is C or S

SEQ ID NO: 111771 - protein, 35 aa, Artificial Sequence; identical to SEQ ID NO: 77530
  Cyclic GFR-binding peptide
  MOD_RES (32)..(34): Xaa is C or S

SEQ ID NO: 111772 - protein, 33 aa, Artificial Sequence; identical to SEQ ID NO: 39212
  Cyclic GFR-binding peptide
  MOD_RES (32)..(32): Xaa is C or S

SEQ ID NO: 111773 - protein, 29 aa, Artificial Sequence
  Cyclic GFR-binding peptide
PARLSAISILYLDAANNVVLKNYQDMVVE

SEQ ID NO: 111774 - protein, 39 aa, Artificial Sequence; identical to SEQ ID NO: 20509
  Cyclic GFR-binding peptide
  MOD_RES (5)..(6)..(38): Xaa is C or S

SEQ ID NO: 111775 - protein, 31 aa, Artificial Sequence
  Cyclic GFR-binding peptide
  MOD_RES (1)..(2): Xaa is C or S
XXVPARLSAISILYLDAANNVVLKNYQDMVV

SEQ ID NO: 111776 - protein, 35 aa, Artificial Sequence
  Cyclic GFR-binding peptide
  MOD_RES (5)..(6): Xaa is C or S
IPEPXXVPEKMSAISILYLDENKNVVLKNYQNMTV

SEQ ID NO: 111777 - protein, 22 aa, Artificial Sequence
  Cyclic GFR-binding peptide
SAISILYLDENKNVVLKNYQNM

SEQ ID NO: 111778 - protein, 30 aa, Artificial Sequence; identical to SEQ ID NO: 77537
  Cyclic GFR-binding peptide

SEQ ID NO: 111779 - protein, 22 aa, Artificial Sequence
  Cyclic GFR-binding peptide
LNAISMLYFDENEKVVLKKYRD

SEQ ID NO: 111780 - protein, 31 aa, Artificial Sequence; identical to SEQ ID NO: 39224
  Cyclic GFR-binding peptide
  MOD_RES (3)..(4): Xaa is C or S

SEQ ID NO: 111781 - protein, 33 aa, Artificial Sequence; identical to SEQ ID NO: 77540
  Cyclic GFR-binding peptide
  MOD_RES (6)..(7): Xaa is C or S

SEQ ID NO: 111782 - protein, 29 aa, Artificial Sequence
  Cyclic GFR-binding peptide
  MOD_RES (1)..(1): Xaa is C or S
XTPTKMNAISMLYFNDKQQIILKKYRGMV

SEQ ID NO: 111783 - protein, 29 aa, Artificial Sequence
  Cyclic GFR-binding peptide
  MOD_RES (2)..(3): Xaa is C or S
PXXTPTKMSAISMLYLNDKQQIILKNYQG

SEQ ID NO: 111784 - protein, 31 aa, Artificial Sequence
  Cyclic GFR-binding peptide
  MOD_RES (5)..(6): Xaa is C or S
APASXXVPARLSAISILYLDAANNVVLKNYQ

SEQ ID NO: 111785 - protein, 32 aa, Artificial Sequence; identical to SEQ ID NO: 10350
  Cyclic GFR-binding peptide
  MOD_RES (4)..(5): Xaa is C or S

SEQ ID NO: 111786 - protein, 37 aa, Artificial Sequence
  Cyclic GFR-binding peptide
  MOD_RES (1)..(2)..(34)..(36): Xaa is C or S
XXVPEKMSAISILYLDENKNVVLKNYQNMTVESXAXR

SEQ ID NO: 111787 - protein, 37 aa, Artificial Sequence; identical to SEQ ID NO: 10353
  Cyclic GFR-binding peptide
  MOD_RES (1)..(2)..(34)..(36): Xaa is C or S

SEQ ID NO: 111788 - protein, 29 aa, Artificial Sequence
  Cyclic GFR-binding peptide
PTELNAISMLYFDENEKVVLKKYRDMVVE

SEQ ID NO: 111789 - protein, 30 aa, Artificial Sequence; identical to SEQ ID NO: 39234
  Cyclic GFR-binding peptide
  MOD_RES (28)..(30): Xaa is C or S

SEQ ID NO: 111790 - protein, 33 aa, Artificial Sequence; identical to SEQ ID NO: 10355
  Cyclic GFR-binding peptide
  MOD_RES (5)..(6): Xaa is C or S

SEQ ID NO: 111791 - protein, 32 aa, Artificial Sequence; identical to SEQ ID NO: 39237
  Cyclic GFR-binding peptide
  MOD_RES (4)..(5): Xaa is C or S

SEQ ID NO: 111792 - protein, 31 aa, Artificial Sequence; identical to SEQ ID NO: 10357
  Cyclic GFR-binding peptide
  MOD_RES (1)..(1): Xaa is C or S

SEQ ID NO: 111793 - protein, 28 aa, Artificial Sequence
  Cyclic GFR-binding peptide
  MOD_RES (28)..(28): Xaa is C or S
DLNAISILYFVGRTPKVLKKYRMVVKSX

SEQ ID NO: 111794 - protein, 41 aa, Artificial Sequence; identical to SEQ ID NO: 10360
  Cyclic GFR-binding peptide
  MOD_RES (6)..(7)..(39)..(41): Xaa is C or S

SEQ ID NO: 111795 - protein, 38 aa, Artificial Sequence
  Cyclic GFR-binding peptide
  MOD_RES (6)..(7): Xaa is C or S
AAPASXXVPARLSAISILYLDAANNVVLKNYQDMVVEA

SEQ ID NO: 111796 - protein, 31 aa, Artificial Sequence
  Cyclic GFR-binding peptide
  MOD_RES (28)..(30): Xaa is C or S
MSAISMLYLNDKQQIILKNYQGMVVDRXGXS

SEQ ID NO: 111797 - protein, 31 aa, Artificial Sequence; identical to SEQ ID NO: 10364
  Cyclic GFR-binding peptide
  MOD_RES (29)..(31): Xaa is C or S

SEQ ID NO: 111798 - protein, 33 aa, Artificial Sequence; identical to SEQ ID NO: 10365
  Cyclic GFR-binding peptide
  MOD_RES (30)..(32): Xaa is C or S

SEQ ID NO: 111799 - protein, 31 aa, Artificial Sequence; identical to SEQ ID NO: 10366
  Cyclic GFR-binding peptide
  MOD_RES (5)..(6): Xaa is C or S

SEQ ID NO: 111800 - protein, 32 aa, Artificial Sequence; identical to SEQ ID NO: 10370
  Cyclic GFR-binding peptide
  MOD_RES (6)..(7): Xaa is C or S

SEQ ID NO: 111801 - protein, 31 aa, Artificial Sequence
  Cyclic GFR-binding peptide
  MOD_RES (1)..(1): Xaa is C or S
XAPVKTSAISMLYLDNGRVLLLKNYQMIVEE

SEQ ID NO: 111802 - protein, 24 aa, Artificial Sequence
  Cyclic GFR-binding peptide
KLNAISVLYFDSSNNVILKKYRNM

SEQ ID NO: 111803 - protein, 28 aa, Artificial Sequence
  Cyclic GFR-binding peptide
PTELNAISMLYFDEYDKVVLKKYREMVV

SEQ ID NO: 111804 - protein, 32 aa, Artificial Sequence
  Cyclic GFR-binding peptide
  MOD_RES (5)..(6): Xaa is C or S
ASKAXXVPTKLSAISILYLDKGVVTYLKNYQG

SEQ ID NO: 111805 - protein, 29 aa, Artificial Sequence
  Cyclic GFR-binding peptide
  MOD_RES (28)..(28): Xaa is C or S
LNAISMLYFDEYDKVVLKKYREMVVEGXG

SEQ ID NO: 111806 - protein, 22 aa, Artificial Sequence
  Cyclic GFR-binding peptide
LSAISILYLDSANNVVLKNYQD

SEQ ID NO: 111807 - protein, 31 aa, Artificial Sequence
  Cyclic GFR-binding peptide
VPTKLSAISILYLDKGVVTYLKNYQGMAVSE

SEQ ID NO: 111808 - protein, 32 aa, Artificial Sequence; identical to SEQ ID NO: 10381
  Cyclic GFR-binding peptide
  MOD_RES (1)..(2): Xaa is C or S

SEQ ID NO: 111809 - protein, 24 aa, Artificial Sequence
  Cyclic GFR-binding peptide
SQDLSAISILYLIGKTPKILKNYQ

SEQ ID NO: 111810 - protein, 32 aa, Artificial Sequence; identical to SEQ ID NO: 97317
  Cyclic GFR-binding peptide
  MOD_RES (32)..(32): Xaa is C or S

SEQ ID NO: 111811 - protein, 30 aa, Artificial Sequence; identical to SEQ ID NO: 39265
  Cyclic GFR-binding peptide
  MOD_RES (28)..(30): Xaa is C or S

SEQ ID NO: 111812 - protein, 23 aa, Artificial Sequence
  Cyclic GFR-binding peptide
TKLSAISVLYLDSSNNVILKNYQ

SEQ ID NO: 111813 - protein, 34 aa, Artificial Sequence; identical to SEQ ID NO: 10391
  Cyclic GFR-binding peptide
  MOD_RES (1)..(33): Xaa is C or S

SEQ ID NO: 111814 - protein, 32 aa, Artificial Sequence; identical to SEQ ID NO: 10392
  Cyclic GFR-binding peptide
  MOD_RES (30)..(32): Xaa is C or S

SEQ ID NO: 111815 - protein, 32 aa, Artificial Sequence; identical to SEQ ID NO: 20547
  Cyclic GFR-binding peptide
  MOD_RES (29)..(31): Xaa is C or S

SEQ ID NO: 111816 - protein, 24 aa, Artificial Sequence
  Cyclic GFR-binding peptide
TKLNAISILYFDKGVVTYLKKYRG

SEQ ID NO: 111817 - protein, 31 aa, Artificial Sequence; identical to SEQ ID NO: 10394
  Cyclic GFR-binding peptide
  MOD_RES (31)..(31): Xaa is C or S

SEQ ID NO: 111818 - protein, 24 aa, Artificial Sequence
  Cyclic GFR-binding peptide
TKLSAISVLYLDDSSNVILKNYQN

SEQ ID NO: 111819 - protein, 41 aa, Artificial Sequence; identical to SEQ ID NO: 10397
  Cyclic GFR-binding peptide
  MOD_RES (4)..(5)..(38)..(40): Xaa is C or S

SEQ ID NO: 111820 - protein, 29 aa, Artificial Sequence
  Cyclic GFR-binding peptide
  MOD_RES (2)..(3): Xaa is C or S
PXXVPQALNAISILYFVGRKPKVLKKYRM

SEQ ID NO: 111821 - protein, 33 aa, Artificial Sequence; identical to SEQ ID NO: 92374
  Cyclic GFR-binding peptide
  MOD_RES (30)..(32): Xaa is C or S

SEQ ID NO: 111822 - protein, 28 aa, Artificial Sequence
  Cyclic GFR-binding peptide
PQALSAISILYLVGRKPKVLKNYQMIVR

SEQ ID NO: 111823 - protein, 27 aa, Artificial Sequence
  Cyclic GFR-binding peptide
  MOD_RES (1)..(1): Xaa is C or S
XTPTKMSAISMLYLNDKQQIILKNYQG

SEQ ID NO: 111824 - protein, 38 aa, Artificial Sequence; identical to SEQ ID NO: 77571
  Cyclic GFR-binding peptide
  MOD_RES (3)..(4)..(35)..(37): Xaa is C or S

SEQ ID NO: 111825 - protein, 28 aa, Artificial Sequence
  Cyclic GFR-binding peptide
  MOD_RES (1)..(2): Xaa is C or S
XXVSQDLSAISILYLIGKTPKILKNYQM

SEQ ID NO: 111826 - protein, 21 aa, Artificial Sequence
  Cyclic GFR-binding peptide
MSAISILYLDENKNVVLKNYQ

SEQ ID NO: 111827 - protein, 33 aa, Artificial Sequence
  Cyclic GFR-binding peptide
  MOD_RES (5)..(6): Xaa is C or S
SAGPXXTPTKMSAISMLYLNDKQQIILKNYQGM

SEQ ID NO: 111828 - protein, 32 aa, Artificial Sequence
  Cyclic GFR-binding peptide
  MOD_RES (30)..(32): Xaa is C or S
TKLSAISILYLDKGVVTYLKNYQGMAVSEXGX

SEQ ID NO: 111829 - protein, 26 aa, Artificial Sequence
  Cyclic GFR-binding peptide
QLSAISVLYLDDSSNVILKNYQNMVV

SEQ ID NO: 111830 - protein, 27 aa, Artificial Sequence
  Cyclic GFR-binding peptide
SQDLNAISILYFIGKTPKILKKYRMIV

SEQ ID NO: 111831 - protein, 25 aa, Artificial Sequence
  Cyclic GFR-binding peptide
NAISILYFIGKTPKILKKYRMIVKS

SEQ ID NO: 111832 - protein, 37 aa, Artificial Sequence; identical to SEQ ID NO: 10410
  Cyclic GFR-binding peptide
  MOD_RES (4)..(5)..(36): Xaa is C or S

SEQ ID NO: 111833 - protein, 38 aa, Artificial Sequence; identical to SEQ ID NO: 10415
  Cyclic GFR-binding peptide
  MOD_RES (5)..(6)..(38): Xaa is C or S

SEQ ID NO: 111834 - protein, 28 aa, Artificial Sequence
  Cyclic GFR-binding peptide
QDLSAISILYLVGRTPKVLKNYQMVVKS

SEQ ID NO: 111835 - protein, 38 aa, Artificial Sequence; identical to SEQ ID NO: 10418
  Cyclic GFR-binding peptide
  MOD_RES (1)..(2)..(35)..(37): Xaa is C or S

SEQ ID NO: 111836 - protein, 31 aa, Artificial Sequence; identical to SEQ ID NO: 20574
  Cyclic GFR-binding peptide
  MOD_RES (2)..(3): Xaa is C or S

SEQ ID NO: 111837 - protein, 30 aa, Artificial Sequence
  Cyclic GFR-binding peptide
  MOD_RES (4)..(5): Xaa is C or S
PSTXXAPVKTSAISMLYLDNGRVLLLKNYQ

SEQ ID NO: 111838 - protein, 33 aa, Artificial Sequence; identical to SEQ ID NO: 39310
  Cyclic GFR-binding peptide
  MOD_RES (4)..(5): Xaa is C or S

SEQ ID NO: 111839 - protein, 38 aa, Artificial Sequence; identical to SEQ ID NO: 39313
  Cyclic GFR-binding peptide
  MOD_RES (5)..(6)..(38): Xaa is C or S

SEQ ID NO: 111840 - protein, 32 aa, Artificial Sequence; identical to SEQ ID NO: 10430
  Cyclic GFR-binding peptide
  MOD_RES (1)..(2): Xaa is C or S

SEQ ID NO: 111841 - protein, 25 aa, Artificial Sequence
  Cyclic GFR-binding peptide
PVKTSAISMLYLDNGRVLLLKNYQM

SEQ ID NO: 111842 - protein, 32 aa, Artificial Sequence; identical to SEQ ID NO: 10434
  Cyclic GFR-binding peptide
  MOD_RES (30)..(32): Xaa is C or S

SEQ ID NO: 111843 - protein, 23 aa, Artificial Sequence
  Cyclic GFR-binding peptide
LSAISILYLDAANNVVLKNYQDM

SEQ ID NO: 111844 - protein, 34 aa, Artificial Sequence; identical to SEQ ID NO: 39327
  Cyclic GFR-binding peptide
  MOD_RES (32)..(34): Xaa is C or S

SEQ ID NO: 111845 - protein, 31 aa, Artificial Sequence; identical to SEQ ID NO: 10444
  Cyclic GFR-binding peptide
  MOD_RES (1)..(2): Xaa is C or S

SEQ ID NO: 111846 - protein, 33 aa, Artificial Sequence; identical to SEQ ID NO: 10445
  Cyclic GFR-binding peptide
  MOD_RES (4)..(5): Xaa is C or S

SEQ ID NO: 111847 - protein, 38 aa, Artificial Sequence
  Cyclic GFR-binding peptide
  MOD_RES (3)..(4)..(36)..(38): Xaa is C or S
ASXXVPARLSAISILYLDAANNVVLKNYQDMVVEAXGX

SEQ ID NO: 111848 - protein, 31 aa, Artificial Sequence; identical to SEQ ID NO: 39333
  Cyclic GFR-binding peptide
  MOD_RES (2)..(3): Xaa is C or S

SEQ ID NO: 111849 - protein, 31 aa, Artificial Sequence; identical to SEQ ID NO: 10452
  Cyclic GFR-binding peptide
  MOD_RES (29)..(31): Xaa is C or S

SEQ ID NO: 111850 - protein, 30 aa, Artificial Sequence; identical to SEQ ID NO: 20597
  Cyclic GFR-binding peptide
  MOD_RES (30)..(30): Xaa is C or S

SEQ ID NO: 111851 - protein, 30 aa, Artificial Sequence
  Cyclic GFR-binding peptide
PTKMSAISMLYLNDKQQIILKNYQGMVVDR

SEQ ID NO: 111852 - protein, 36 aa, Artificial Sequence; identical to SEQ ID NO: 39347
  Cyclic GFR-binding peptide
  MOD_RES (3)..(4)..(36): Xaa is C or S

SEQ ID NO: 111853 - protein, 31 aa, Artificial Sequence; identical to SEQ ID NO: 10466
  Cyclic GFR-binding peptide
  MOD_RES (2)..(3): Xaa is C or S

SEQ ID NO: 111854 - protein, 32 aa, Artificial Sequence
  Cyclic GFR-binding peptide
  MOD_RES (31)..(31): Xaa is C or S
APVKTSAISMLYLDNGRVLLLKNYQMIVEEXG

SEQ ID NO: 111855 - protein, 29 aa, Artificial Sequence
  Cyclic GFR-binding peptide
  MOD_RES (1)..(2): Xaa is C or S
XXAPTKLSAISVLYLDSSNNVILKNYQNM

SEQ ID NO: 111856 - protein, 30 aa, Artificial Sequence
  Cyclic GFR-binding peptide
  MOD_RES (28)..(30): Xaa is C or S
LSAISILYLDAANNVVLKNYQDMVVEAXGX

SEQ ID NO: 111857 - protein, 24 aa, Artificial Sequence
  Cyclic GFR-binding peptide
NAISMLYFNDKQQIILKKYRGMVV

SEQ ID NO: 111858 - protein, 31 aa, Artificial Sequence; identical to SEQ ID NO: 10469
  Cyclic GFR-binding peptide
  MOD_RES (31)..(31): Xaa is C or S

SEQ ID NO: 111859 - protein, 32 aa, Artificial Sequence; identical to SEQ ID NO: 77596
  Cyclic GFR-binding peptide
  MOD_RES (1)..(2): Xaa is C or S

SEQ ID NO: 111860 - protein, 30 aa, Artificial Sequence
  Cyclic GFR-binding peptide
  MOD_RES (1)..(1): Xaa is C or S
XVPEKMSAISILYLDENKNVVLKNYQNMTV

SEQ ID NO: 111861 - protein, 32 aa, Artificial Sequence
  Cyclic GFR-binding peptide
  MOD_RES (30)..(32): Xaa is C or S
ARLSAISILYLDAANNVVLKNYQDMVVEAXGX

SEQ ID NO: 111862 - protein, 39 aa, Artificial Sequence; identical to SEQ ID NO: 77597
  Cyclic GFR-binding peptide
  MOD_RES (4)..(5)..(37)..(39): Xaa is C or S

SEQ ID NO: 111863 - protein, 31 aa, Artificial Sequence; identical to SEQ ID NO: 10473
  Cyclic GFR-binding peptide
  MOD_RES (3)..(4): Xaa is C or S

SEQ ID NO: 111864 - protein, 39 aa, Artificial Sequence; identical to SEQ ID NO: 10475
  Cyclic GFR-binding peptide
  MOD_RES (3)..(4)..(37)..(39): Xaa is C or S

SEQ ID NO: 111865 - protein, 33 aa, Artificial Sequence; identical to SEQ ID NO: 10476
  Cyclic GFR-binding peptide
  MOD_RES (32)..(32): Xaa is C or S

SEQ ID NO: 111866 - protein, 38 aa, Artificial Sequence
  Cyclic GFR-binding peptide
  MOD_RES (2)..(3)..(35)..(37): Xaa is C or S
SXXVPARLSAISILYLDAANNVVLKNYQDMVVEAXGXR

SEQ ID NO: 111867 - protein, 21 aa, Artificial Sequence
  Cyclic GFR-binding peptide
LSAISILYLVGRKPKVLKNYQ

SEQ ID NO: 111868 - protein, 32 aa, Artificial Sequence; identical to SEQ ID NO: 10479
  Cyclic GFR-binding peptide
  MOD_RES (1)..(2): Xaa is C or S

SEQ ID NO: 111869 - protein, 26 aa, Artificial Sequence
  Cyclic GFR-binding peptide
VPQALNAISILYFVGRKPKVLKKYRM

SEQ ID NO: 111870 - protein, 23 aa, Artificial Sequence
  Cyclic GFR-binding peptide
VKTSAISMLYLDNGRVLLLKNYQ

SEQ ID NO: 111871 - protein, 30 aa, Artificial Sequence; identical to SEQ ID NO: 20627
  Cyclic GFR-binding peptide
  MOD_RES (4)..(5): Xaa is C or S

SEQ ID NO: 111872 - protein, 34 aa, Artificial Sequence
  Cyclic GFR-binding peptide
  MOD_RES (31)..(33): Xaa is C or S
PARLSAISILYLDAANNVVLKNYQDMVVEAXGXR

SEQ ID NO: 111873 - protein, 28 aa, Artificial Sequence
  Cyclic GFR-binding peptide
  MOD_RES (1)..(2): Xaa is C or S
XXVPTKLNAISILYFDKGVVTYLKKYRG

SEQ ID NO: 111874 - protein, 38 aa, Artificial Sequence; identical to SEQ ID NO: 20632
  Cyclic GFR-binding peptide
  MOD_RES (4)..(5)..(37): Xaa is C or S

SEQ ID NO: 111875 - protein, 26 aa, Artificial Sequence
  Cyclic GFR-binding peptide
NAISILYFDKGVVTYLKKYRGMAVSE

SEQ ID NO: 111876 - protein, 26 aa, Artificial Sequence
  Cyclic GFR-binding peptide
SAISMLYLNDKQQIILKNYQGMVVDR

SEQ ID NO: 111877 - protein, 30 aa, Artificial Sequence; identical to SEQ ID NO: 10491
  Cyclic GFR-binding peptide
  MOD_RES (28)..(30): Xaa is C or S

SEQ ID NO: 111878 - protein, 35 aa, Artificial Sequence; identical to SEQ ID NO: 10494
  Cyclic GFR-binding peptide
  MOD_RES (32)..(34): Xaa is C or S

SEQ ID NO: 111879 - protein, 30 aa, Artificial Sequence; identical to SEQ ID NO: 10498
  Cyclic GFR-binding peptide
  MOD_RES (27)..(29): Xaa is C or S

SEQ ID NO: 111880 - protein, 25 aa, Artificial Sequence
  Cyclic GFR-binding peptide
DLNAISILYFIGKTPKILKKYRMIV

SEQ ID NO: 111881 - protein, 29 aa, Artificial Sequence
  Cyclic GFR-binding peptide
  MOD_RES (3)..(4): Xaa is C or S
KAXXVPTKLSAISILYLDKGVVTYLKNYQ

SEQ ID NO: 111882 - protein, 34 aa, Artificial Sequence; identical to SEQ ID NO: 20647
  Cyclic GFR-binding peptide
  MOD_RES (3)..(4): Xaa is C or S

SEQ ID NO: 111883 - protein, 29 aa, Artificial Sequence
  Cyclic GFR-binding peptide
  MOD_RES (1)..(1): Xaa is C or S
XVSQDLNAISILYFIGKTPKILKKYRMIV

SEQ ID NO: 111884 - protein, 26 aa, Artificial Sequence
  Cyclic GFR-binding peptide
PQDLNAISILYFVGRTPKVLKKYRMV

SEQ ID NO: 111885 - protein, 35 aa, Artificial Sequence
  Cyclic GFR-binding peptide
  MOD_RES (2)..(3)..(35): Xaa is C or S
PXXVPEKMSAISILYLDENKNVVLKNYQNMTVESX

SEQ ID NO: 111886 - protein, 28 aa, Artificial Sequence
  Cyclic GFR-binding peptide
  MOD_RES (2)..(3): Xaa is C or S
AXXAPTKLNAISVLYFDSSNNVILKKYR

SEQ ID NO: 111887 - protein, 29 aa, Artificial Sequence
  Cyclic GFR-binding peptide
  MOD_RES (4)..(4): Xaa is C or S
KPTXAPTKLSAISVLYLDDSSNVILKNYQ

SEQ ID NO: 111888 - protein, 31 aa, Artificial Sequence; identical to SEQ ID NO: 10509
  Cyclic GFR-binding peptide

SEQ ID NO: 111889 - protein, 23 aa, Artificial Sequence
  Cyclic GFR-binding peptide
KLSAISVLYLDSSNNVILKNYQN

SEQ ID NO: 111890 - protein, 32 aa, Artificial Sequence; identical to SEQ ID NO: 20662
  Cyclic GFR-binding peptide
  MOD_RES (31)..(31): Xaa is C or S

SEQ ID NO: 111891 - protein, 28 aa, Artificial Sequence
  Cyclic GFR-binding peptide
  MOD_RES (2)..(3): Xaa is C or S
PXXVPQDLNAISILYFVGRTPKVLKKYR

SEQ ID NO: 111892 - protein, 34 aa, Artificial Sequence; identical to SEQ ID NO: 10515
  Cyclic GFR-binding peptide
  MOD_RES (31)..(33): Xaa is C or S

SEQ ID NO: 111893 - protein, 36 aa, Artificial Sequence; identical to SEQ ID NO: 39416
  Cyclic GFR-binding peptide
  MOD_RES (4)..(5): Xaa is C or S

SEQ ID NO: 111894 - protein, 32 aa, Artificial Sequence; identical to SEQ ID NO: 39420
  Cyclic GFR-binding peptide
  MOD_RES (1)..(1): Xaa is C or S

SEQ ID NO: 111895 - protein, 27 aa, Artificial Sequence
  Cyclic GFR-binding peptide
QDLSAISILYLVGRTPKVLKNYQMVVK

SEQ ID NO: 111896 - protein, 26 aa, Artificial Sequence
  Cyclic GFR-binding peptide
ARLSAISILYLDAANNVVLKNYQDMV

SEQ ID NO: 111897 - protein, 30 aa, Artificial Sequence; identical to SEQ ID NO: 10522
  Cyclic GFR-binding peptide
  MOD_RES (28)..(30): Xaa is C or S

SEQ ID NO: 111898 - protein, 25 aa, Artificial Sequence
  Cyclic GFR-binding peptide
NAISILYFDKGVVTYLKKYRGMAVS

SEQ ID NO: 111899 - protein, 27 aa, Artificial Sequence
  Cyclic GFR-binding peptide
PTKLNAISVLYFDDMGVPTLKKYREGM

SEQ ID NO: 111900 - protein, 33 aa, Artificial Sequence; identical to SEQ ID NO: 10530
  Cyclic GFR-binding peptide
  MOD_RES (4)..(5): Xaa is C or S

SEQ ID NO: 111901 - protein, 37 aa, Artificial Sequence; identical to SEQ ID NO: 77624
  Cyclic GFR-binding peptide
  MOD_RES (2)..(3)..(34)..(36): Xaa is C or S

SEQ ID NO: 111902 - protein, 26 aa, Artificial Sequence
  Cyclic GFR-binding peptide
LNAISILYFIGKTPKILKKYRMIVKS

SEQ ID NO: 111903 - protein, 29 aa, Artificial Sequence
  Cyclic GFR-binding peptide
  MOD_RES (27)..(29): Xaa is C or S
NAISILYFDENKNVVLKKYRNMTVESXAX

SEQ ID NO: 111904 - protein, 32 aa, Artificial Sequence; identical to SEQ ID NO: 10535
  Cyclic GFR-binding peptide
  MOD_RES (29)..(31): Xaa is C or S

SEQ ID NO: 111905 - protein, 29 aa, Artificial Sequence
  Cyclic GFR-binding peptide
  MOD_RES (28)..(28): Xaa is C or S
MSAISMLYLNDKQQIILKNYQGMVVDRXG

SEQ ID NO: 111906 - protein, 34 aa, Artificial Sequence
  Cyclic GFR-binding peptide
  MOD_RES (3)..(4): Xaa is C or S
STXXAPVKTSAISMLYLDNGRVLLLKNYQMIVEE

SEQ ID NO: 111907 - protein, 35 aa, Artificial Sequence; identical to SEQ ID NO: 10543
  Cyclic GFR-binding peptide
  MOD_RES (2)..(3)..(34): Xaa is C or S

SEQ ID NO: 111908 - protein, 31 aa, Artificial Sequence; identical to SEQ ID NO: 10544
  Cyclic GFR-binding peptide
  MOD_RES (30)..(30): Xaa is C or S

SEQ ID NO: 111909 - protein, 24 aa, Artificial Sequence
  Cyclic GFR-binding peptide
VKTSAISMLYLDNGRVLLLKNYQM

SEQ ID NO: 111910 - protein, 37 aa, Artificial Sequence
  Cyclic GFR-binding peptide
  MOD_RES (6)..(7): Xaa is C or S
RVPSTXXAPVKTSAISMLYLDNGRVLLLKNYQMIVEE

SEQ ID NO: 111911 - protein, 26 aa, Artificial Sequence
  Cyclic GFR-binding peptide
LNAISILYFDKGVVTYLKKYRGMAVS

SEQ ID NO: 111912 - protein, 33 aa, Artificial Sequence; identical to SEQ ID NO: 39451
  Cyclic GFR-binding peptide
  MOD_RES (30)..(32): Xaa is C or S

SEQ ID NO: 111913 - protein, 24 aa, Artificial Sequence
  Cyclic GFR-binding peptide
NAISMLYFDNGRVLLLKKYRMIVE

SEQ ID NO: 111914 - protein, 26 aa, Artificial Sequence
  Cyclic GFR-binding peptide
TELNAISMLYFDENEKVVLKKYRDMV

SEQ ID NO: 111915 - protein, 31 aa, Artificial Sequence; identical to SEQ ID NO: 10550
  Cyclic GFR-binding peptide
  MOD_RES (1)..(1): Xaa is C or S

SEQ ID NO: 111916 - protein, 27 aa, Artificial Sequence
  Cyclic GFR-binding peptide
PTKLNAISVLYFDSSNNVILKKYRNMV

SEQ ID NO: 111917 - protein, 32 aa, Artificial Sequence; identical to SEQ ID NO: 10552
  Cyclic GFR-binding peptide
  MOD_RES (1)..(2): Xaa is C or S

SEQ ID NO: 111918 - protein, 37 aa, Artificial Sequence; identical to SEQ ID NO: 10554
  Cyclic GFR-binding peptide
  MOD_RES (4)..(5): Xaa is C or S

SEQ ID NO: 111919 - protein, 34 aa, Artificial Sequence; identical to SEQ ID NO: 77641
  Cyclic GFR-binding peptide
  MOD_RES (1)..(33): Xaa is C or S

SEQ ID NO: 111920 - protein, 29 aa, Artificial Sequence
  Cyclic GFR-binding peptide
  MOD_RES (2)..(3): Xaa is C or S
TXXAPVKTSAISMLYLDNGRVLLLKNYQM

SEQ ID NO: 111921 - protein, 23 aa, Artificial Sequence
  Cyclic GFR-binding peptide
LSAISILYLDKGVVTYLKNYQGM

SEQ ID NO: 111922 - protein, 34 aa, Artificial Sequence; identical to SEQ ID NO: 10559
  Cyclic GFR-binding peptide
  MOD_RES (4)..(5): Xaa is C or S

SEQ ID NO: 111923 - protein, 21 aa, Artificial Sequence
  Cyclic GFR-binding peptide
NAISMLYFDNGRVLLLKKYRM

SEQ ID NO: 111924 - protein, 31 aa, Artificial Sequence; identical to SEQ ID NO: 10562
  Cyclic GFR-binding peptide
  MOD_RES (4)..(5): Xaa is C or S

SEQ ID NO: 111925 - protein, 39 aa, Artificial Sequence
  Cyclic GFR-binding peptide
  MOD_RES (3)..(4)..(36)..(38): Xaa is C or S
GPXXTPTKMSAISMLYLNDKQQIILKNYQGMVVDRXGXS

SEQ ID NO: 111926 - protein, 34 aa, Artificial Sequence; identical to SEQ ID NO: 20699
  Cyclic GFR-binding peptide
  MOD_RES (1)..(33): Xaa is C or S

SEQ ID NO: 111927 - protein, 31 aa, Artificial Sequence; identical to SEQ ID NO: 39476
  Cyclic GFR-binding peptide
  MOD_RES (31)..(31): Xaa is C or S

SEQ ID NO: 111928 - protein, 28 aa, Artificial Sequence
  Cyclic GFR-binding peptide
KMNAISMLYFNDKQQIILKKYRGMVVDR

SEQ ID NO: 111929 - protein, 33 aa, Artificial Sequence; identical to SEQ ID NO: 77648
  Cyclic GFR-binding peptide
  MOD_RES (3)..(4): Xaa is C or S

SEQ ID NO: 111930 - protein, 26 aa, Artificial Sequence
  Cyclic GFR-binding peptide
  MOD_RES (1)..(1): Xaa is C or S
XVPARLNAISILYFDAANNVVLKKYR

SEQ ID NO: 111931 - protein, 34 aa, Artificial Sequence; identical to SEQ ID NO: 77650
  Cyclic GFR-binding peptide
  MOD_RES (1)..(2)..(33): Xaa is C or S

SEQ ID NO: 111932 - protein, 31 aa, Artificial Sequence
  Cyclic GFR-binding peptide
  MOD_RES (2)..(3): Xaa is C or S
PXXVPEKMSAISILYLDENKNVVLKNYQNMT

SEQ ID NO: 111933 - protein, 24 aa, Artificial Sequence
  Cyclic GFR-binding peptide
PARLSAISILYLDAANNVVLKNYQ

SEQ ID NO: 111934 - protein, 23 aa, Artificial Sequence
  Cyclic GFR-binding peptide
QALSAISILYLVGRKPKVLKNYQ

SEQ ID NO: 111935 - protein, 33 aa, Artificial Sequence; identical to SEQ ID NO: 77652
  Cyclic GFR-binding peptide
  MOD_RES (1)..(2): Xaa is C or S

SEQ ID NO: 111936 - protein, 33 aa, Artificial Sequence; identical to SEQ ID NO: 10579
  Cyclic GFR-binding peptide
  MOD_RES (5)..(6): Xaa is C or S

SEQ ID NO: 111937 - protein, 30 aa, Artificial Sequence; identical to SEQ ID NO: 39493
  Cyclic GFR-binding peptide
  MOD_RES (1)..(2): Xaa is C or S

SEQ ID NO: 111938 - protein, 29 aa, Artificial Sequence
  Cyclic GFR-binding peptide
  MOD_RES (1)..(2): Xaa is C or S
XXVPQALSAISILYLVGRKPKVLKNYQMI

SEQ ID NO: 111939 - protein, 38 aa, Artificial Sequence; identical to SEQ ID NO: 10582
  Cyclic GFR-binding peptide
  MOD_RES (5)..(6)..(37): Xaa is C or S

SEQ ID NO: 111940 - protein, 36 aa, Artificial Sequence; identical to SEQ ID NO: 77656
  Cyclic GFR-binding peptide
  MOD_RES (4)..(5): Xaa is C or S

SEQ ID NO: 111941 - protein, 29 aa, Artificial Sequence
  Cyclic GFR-binding peptide
  MOD_RES (2)..(3): Xaa is C or S
AXXAPTKLSAISVLYLDSSNNVILKNYQN

SEQ ID NO: 111942 - protein, 25 aa, Artificial Sequence
  Cyclic GFR-binding peptide
NAISILYFVGRKPKVLKKYRMIVRS

SEQ ID NO: 111943 - protein, 29 aa, Artificial Sequence
  Cyclic GFR-binding peptide
  MOD_RES (1)..(1): Xaa is C or S
XVPTKLSAISVLYLDDMGVPTLKNYQEGM

SEQ ID NO: 111944 - protein, 28 aa, Artificial Sequence
  Cyclic GFR-binding peptide
  MOD_RES (1)..(1): Xaa is C or S
XAPTKLSAISVLYLDSSNNVILKNYQNM

SEQ ID NO: 111945 - protein, 28 aa, Artificial Sequence
  Cyclic GFR-binding peptide
  MOD_RES (2)..(2): Xaa is C or S
TXAPTKLSAISVLYLDDSSNVILKNYQN

SEQ ID NO: 111946 - protein, 36 aa, Artificial Sequence; identical to SEQ ID NO: 10590
  Cyclic GFR-binding peptide
  MOD_RES (1)..(33)..(35): Xaa is C or S

SEQ ID NO: 111947 - protein, 31 aa, Artificial Sequence; identical to SEQ ID NO: 10591
  Cyclic GFR-binding peptide
  MOD_RES (29)..(31): Xaa is C or S

SEQ ID NO: 111948 - protein, 37 aa, Artificial Sequence; identical to SEQ ID NO: 10593
  Cyclic GFR-binding peptide
  MOD_RES (4)..(5)..(36): Xaa is C or S

SEQ ID NO: 111949 - protein, 25 aa, Artificial Sequence
  Cyclic GFR-binding peptide
SAISVLYLDSSNNVILKNYQNMVVK

SEQ ID NO: 111950 - protein, 34 aa, Artificial Sequence; identical to SEQ ID NO: 10595
  Cyclic GFR-binding peptide
  MOD_RES (3)..(4): Xaa is C or S

SEQ ID NO: 111951 - protein, 30 aa, Artificial Sequence; identical to SEQ ID NO: 10596
  Cyclic GFR-binding peptide
  MOD_RES (29)..(29): Xaa is C or S

SEQ ID NO: 111952 - protein, 40 aa, Artificial Sequence; identical to SEQ ID NO: 10599
  Cyclic GFR-binding peptide
  MOD_RES (4)..(5)..(37)..(39): Xaa is C or S

SEQ ID NO: 111953 - protein, 24 aa, Artificial Sequence
  Cyclic GFR-binding peptide
LSAISVLYLDSSNNVILKNYQNMV

SEQ ID NO: 111954 - protein, 21 aa, Artificial Sequence
  Cyclic GFR-binding peptide
TSAISMLYLDNGRVLLLKNYQ

SEQ ID NO: 111955 - protein, 33 aa, Artificial Sequence; identical to SEQ ID NO: 10604
  Cyclic GFR-binding peptide
  MOD_RES (3)..(4): Xaa is C or S

SEQ ID NO: 111956 - protein, 35 aa, Artificial Sequence; identical to SEQ ID NO: 20726
  Cyclic GFR-binding peptide
  MOD_RES (2)..(3)..(35): Xaa is C or S

SEQ ID NO: 111957 - protein, 26 aa, Artificial Sequence
  Cyclic GFR-binding peptide
TKLSAISVLYLDDSSNVILKNYQNMV

SEQ ID NO: 111958 - protein, 41 aa, Artificial Sequence; identical to SEQ ID NO: 10613
  Cyclic GFR-binding peptide
  MOD_RES (6)..(7)..(38)..(40): Xaa is C or S

SEQ ID NO: 111959 - protein, 34 aa, Artificial Sequence
  Cyclic GFR-binding peptide
  MOD_RES (6)..(7): Xaa is C or S
GSAGPXXTPTKMSAISMLYLNDKQQIILKNYQGM

SEQ ID NO: 111960 - protein, 31 aa, Artificial Sequence; identical to SEQ ID NO: 10615
  Cyclic GFR-binding peptide
  MOD_RES (2)..(3): Xaa is C or S

SEQ ID NO: 111961 - protein, 33 aa, Artificial Sequence; identical to SEQ ID NO: 10616
  Cyclic GFR-binding peptide
  MOD_RES (4)..(4): Xaa is C or S

SEQ ID NO: 111962 - protein, 30 aa, Artificial Sequence; identical to SEQ ID NO: 10617
  Cyclic GFR-binding peptide
  MOD_RES (28)..(30): Xaa is C or S

SEQ ID NO: 111963 - protein, 39 aa, Artificial Sequence; identical to SEQ ID NO: 10618
  Cyclic GFR-binding peptide
  MOD_RES (4)..(5)..(36)..(38): Xaa is C or S

SEQ ID NO: 111964 - protein, 28 aa, Artificial Sequence
  Cyclic GFR-binding peptide
  MOD_RES (1)..(1): Xaa is C or S
XVPQALSAISILYLVGRKPKVLKNYQMI

SEQ ID NO: 111965 - protein, 36 aa, Artificial Sequence; identical to SEQ ID NO: 10622
  Cyclic GFR-binding peptide
  MOD_RES (1)..(2)..(34)..(36): Xaa is C or S

SEQ ID NO: 111966 - protein, 31 aa, Artificial Sequence
  Cyclic GFR-binding peptide
  MOD_RES (29)..(31): Xaa is C or S
VKTSAISMLYLDNGRVLLLKNYQMIVEEXGX

SEQ ID NO: 111967 - protein, 37 aa, Artificial Sequence; identical to SEQ ID NO: 77674
  Cyclic GFR-binding peptide
  MOD_RES (6)..(7): Xaa is C or S

SEQ ID NO: 111968 - protein, 33 aa, Artificial Sequence; identical to SEQ ID NO: 10627
  Cyclic GFR-binding peptide
  MOD_RES (32)..(32): Xaa is C or S

SEQ ID NO: 111969 - protein, 21 aa, Artificial Sequence
  Cyclic GFR-binding peptide
LNAISILYFDKGVVTYLKKYR

SEQ ID NO: 111970 - protein, 26 aa, Artificial Sequence
  Cyclic GFR-binding peptide
TSAISMLYLDNGRVLLLKNYQMIVEE

SEQ ID NO: 111971 - protein, 40 aa, Artificial Sequence; identical to SEQ ID NO: 10629
  Cyclic GFR-binding peptide
  MOD_RES (5)..(6)..(38)..(40): Xaa is C or S

SEQ ID NO: 111972 - protein, 20 aa, Artificial Sequence
  Cyclic GFR-binding peptide
SAISILYLDKGVVTYLKNYQ

SEQ ID NO: 111973 - protein, 29 aa, Artificial Sequence
  Cyclic GFR-binding peptide
  MOD_RES (27)..(29): Xaa is C or S
NAISILYFDSANNVVLKKYRDMVVESXGX

SEQ ID NO: 111974 - protein, 22 aa, Artificial Sequence
  Cyclic GFR-binding peptide
SAISMLYLNDKQQIILKNYQGM

SEQ ID NO: 111975 - protein, 28 aa, Artificial Sequence
  Cyclic GFR-binding peptide
  MOD_RES (2)..(3): Xaa is C or S
PXXTPTKMNAISMLYFNDKQQIILKKYR

SEQ ID NO: 111976 - protein, 30 aa, Artificial Sequence; identical to SEQ ID NO: 10638
  Cyclic GFR-binding peptide

SEQ ID NO: 111977 - protein, 31 aa, Artificial Sequence; identical to SEQ ID NO: 10640
  Cyclic GFR-binding peptide
  MOD_RES (29)..(31): Xaa is C or S

SEQ ID NO: 111978 - protein, 31 aa, Artificial Sequence; identical to SEQ ID NO: 39567
  Cyclic GFR-binding peptide
  MOD_RES (1)..(1): Xaa is C or S

SEQ ID NO: 111979 - protein, 24 aa, Artificial Sequence
  Cyclic GFR-binding peptide
TKLSAISVLYLDDMGVPTLKNYQE

SEQ ID NO: 111980 - protein, 22 aa, Artificial Sequence
  Cyclic GFR-binding peptide
LSAISILYLVGRTPKVLKNYQM

SEQ ID NO: 111981 - protein, 40 aa, Artificial Sequence; identical to SEQ ID NO: 39575
  Cyclic GFR-binding peptide
  MOD_RES (5)..(6)..(38)..(40): Xaa is C or S

SEQ ID NO: 111982 - protein, 33 aa, Artificial Sequence
  Cyclic GFR-binding peptide
  MOD_RES (2)..(3): Xaa is C or S
AXXVPTKLSAISILYLDKGVVTYLKNYQGMAVS

SEQ ID NO: 111983 - protein, 27 aa, Artificial Sequence
  Cyclic GFR-binding peptide
MSAISMLYLNDKQQIILKNYQGMVVDR

SEQ ID NO: 111984 - protein, 29 aa, Artificial Sequence
  Cyclic GFR-binding peptide
TKMNAISMLYFNDKQQIILKKYRGMVVDR

SEQ ID NO: 111985 - protein, 30 aa, Artificial Sequence; identical to SEQ ID NO: 39576
  Cyclic GFR-binding peptide
  MOD_RES (27)..(29): Xaa is C or S

SEQ ID NO: 111986 - protein, 33 aa, Artificial Sequence; identical to SEQ ID NO: 10651
  Cyclic GFR-binding peptide
  MOD_RES (31)..(33): Xaa is C or S

SEQ ID NO: 111987 - protein, 29 aa, Artificial Sequence
  Cyclic GFR-binding peptide
VPARLNAISILYFDAANNVVLKKYRDMVV

SEQ ID NO: 111988 - protein, 39 aa, Artificial Sequence; identical to SEQ ID NO: 39581
  Cyclic GFR-binding peptide
  MOD_RES (3)..(4)..(36)..(38): Xaa is C or S

SEQ ID NO: 111989 - protein, 29 aa, Artificial Sequence
  Cyclic GFR-binding peptide
  MOD_RES (1)..(1): Xaa is C or S
XVPTKLNAISVLYFDDMGVPTLKKYREGM

SEQ ID NO: 111990 - protein, 37 aa, Artificial Sequence
  Cyclic GFR-binding peptide
  MOD_RES (1)..(2)..(34)..(36): Xaa is C or S
XXVPARLSAISILYLDAANNVVLKNYQDMVVEAXGXR

SEQ ID NO: 111991 - protein, 35 aa, Artificial Sequence; identical to SEQ ID NO: 92649
  Cyclic GFR-binding peptide
  MOD_RES (3)..(4): Xaa is C or S

SEQ ID NO: 111992 - protein, 41 aa, Artificial Sequence
  Cyclic GFR-binding peptide
  MOD_RES (6)..(7)..(39)..(41): Xaa is C or S
HVPKPXXAPTKLSAISVLYLDDSSNVILKNYQNMVVRSXGX

SEQ ID NO: 111993 - protein, 29 aa, Artificial Sequence
  Cyclic GFR-binding peptide
PEKMNAISILYFDENKNVVLKKYRNMTVE

SEQ ID NO: 111994 - protein, 36 aa, Artificial Sequence; identical to SEQ ID NO: 10659
  Cyclic GFR-binding peptide
  MOD_RES (6)..(7): Xaa is C or S

SEQ ID NO: 111995 - protein, 36 aa, Artificial Sequence; identical to SEQ ID NO: 20788
  Cyclic GFR-binding peptide
  MOD_RES (6)..(7): Xaa is C or S

SEQ ID NO: 111996 - protein, 27 aa, Artificial Sequence
  Cyclic GFR-binding peptide
  MOD_RES (1)..(1): Xaa is C or S
XVPQDLNAISILYFVGRTPKVLKKYRM

SEQ ID NO: 111997 - protein, 38 aa, Artificial Sequence; identical to SEQ ID NO: 39596
  Cyclic GFR-binding peptide
  MOD_RES (3)..(4)..(36)..(38): Xaa is C or S

SEQ ID NO: 111998 - protein, 39 aa, Artificial Sequence; identical to SEQ ID NO: 10663
  Cyclic GFR-binding peptide
  MOD_RES (5)..(37)..(39): Xaa is C or S

SEQ ID NO: 111999 - protein, 33 aa, Artificial Sequence; identical to SEQ ID NO: 10664
  Cyclic GFR-binding peptide
  MOD_RES (4)..(5): Xaa is C or S

SEQ ID NO: 112000 - protein, 41 aa, Artificial Sequence
  Cyclic GFR-binding peptide
  MOD_RES (6)..(7)..(39)..(41): Xaa is C or S
GSAGPXXTPTKMSAISMLYLNDKQQIILKNYQGMVVDRXGX

SEQ ID NO: 112001 - protein, 24 aa, Artificial Sequence
  Cyclic GFR-binding peptide
KTSAISMLYLDNGRVLLLKNYQMI

SEQ ID NO: 112002 - protein, 33 aa, Artificial Sequence; identical to SEQ ID NO: 10668
  Cyclic GFR-binding peptide
  MOD_RES (32)..(32): Xaa is C or S

SEQ ID NO: 112003 - protein, 36 aa, Artificial Sequence; identical to SEQ ID NO: 20796
  Cyclic GFR-binding peptide
  MOD_RES (1)..(2)..(34)..(36): Xaa is C or S

SEQ ID NO: 112004 - protein, 33 aa, Artificial Sequence; identical to SEQ ID NO: 10673
  Cyclic GFR-binding peptide
  MOD_RES (3)..(4): Xaa is C or S

SEQ ID NO: 112005 - protein, 31 aa, Artificial Sequence; identical to SEQ ID NO: 97626
  Cyclic GFR-binding peptide
  MOD_RES (29)..(31): Xaa is C or S

SEQ ID NO: 112006 - protein, 30 aa, Artificial Sequence; identical to SEQ ID NO: 10677
  Cyclic GFR-binding peptide

SEQ ID NO: 112007 - protein, 36 aa, Artificial Sequence; identical to SEQ ID NO: 39607
  Cyclic GFR-binding peptide
  MOD_RES (6)..(7): Xaa is C or S

SEQ ID NO: 112008 - protein, 26 aa, Artificial Sequence
  Cyclic GFR-binding peptide
  MOD_RES (1)..(1): Xaa is C or S
XVPARLSAISILYLDAANNVVLKNYQ

SEQ ID NO: 112009 - protein, 33 aa, Artificial Sequence; identical to SEQ ID NO: 10679
  Cyclic GFR-binding peptide
  MOD_RES (1)..(32): Xaa is C or S

SEQ ID NO: 112010 - protein, 35 aa, Artificial Sequence; identical to SEQ ID NO: 10685
  Cyclic GFR-binding peptide
  MOD_RES (1)..(33)..(35): Xaa is C or S

SEQ ID NO: 112011 - protein, 33 aa, Artificial Sequence; identical to SEQ ID NO: 10686
  Cyclic GFR-binding peptide
  MOD_RES (5)..(6): Xaa is C or S

SEQ ID NO: 112012 - protein, 30 aa, Artificial Sequence; identical to SEQ ID NO: 10687
  Cyclic GFR-binding peptide
  MOD_RES (1)..(2): Xaa is C or S

SEQ ID NO: 112013 - protein, 28 aa, Artificial Sequence
  Cyclic GFR-binding peptide
  MOD_RES (28)..(28): Xaa is C or S
MNAISILYFDENKNVVLKKYRNMTVESX

SEQ ID NO: 112014 - protein, 30 aa, Artificial Sequence; identical to SEQ ID NO: 10688
  Cyclic GFR-binding peptide
  MOD_RES (30)..(30): Xaa is C or S

SEQ ID NO: 112015 - protein, 30 aa, Artificial Sequence
  Cyclic GFR-binding peptide
PEKMSAISILYLDENKNVVLKNYQNMTVES

SEQ ID NO: 112016 - protein, 37 aa, Artificial Sequence; identical to SEQ ID NO: 10693
  Cyclic GFR-binding peptide
  MOD_RES (3)..(4)..(36): Xaa is C or S

SEQ ID NO: 112017 - protein, 27 aa, Artificial Sequence
  Cyclic GFR-binding peptide
PTELNAISMLYFDENEKVVLKKYRDMV

SEQ ID NO: 112018 - protein, 26 aa, Artificial Sequence
  Cyclic GFR-binding peptide
PTQLSAISVLYLDDSSNVILKNYQNM

SEQ ID NO: 112019 - protein, 31 aa, Artificial Sequence
  Cyclic GFR-binding peptide
  MOD_RES (1)..(1): Xaa is C or S
XVPARLSAISILYLDAANNVVLKNYQDMVVE

SEQ ID NO: 112020 - protein, 27 aa, Artificial Sequence
  Cyclic GFR-binding peptide
  MOD_RES (27)..(27): Xaa is C or S
LNAISILYFIGKTPKILKKYRMIVKSX

SEQ ID NO: 112021 - protein, 24 aa, Artificial Sequence
  Cyclic GFR-binding peptide
TRLNAISILYFDSANNVVLKKYRD

SEQ ID NO: 112022 - protein, 35 aa, Artificial Sequence; identical to SEQ ID NO: 10700
  Cyclic GFR-binding peptide
  MOD_RES (3)..(4)..(35): Xaa is C or S

SEQ ID NO: 112023 - protein, 30 aa, Artificial Sequence
  Cyclic GFR-binding peptide
VPARLSAISILYLDAANNVVLKNYQDMVVE

SEQ ID NO: 112024 - protein, 35 aa, Artificial Sequence; identical to SEQ ID NO: 10702
  Cyclic GFR-binding peptide
  MOD_RES (2)..(3)..(34): Xaa is C or S

SEQ ID NO: 112025 - protein, 35 aa, Artificial Sequence; identical to SEQ ID NO: 10703
  Cyclic GFR-binding peptide
  MOD_RES (4)..(5): Xaa is C or S

SEQ ID NO: 112026 - protein, 30 aa, Artificial Sequence; identical to SEQ ID NO: 77715
  Cyclic GFR-binding peptide

SEQ ID NO: 112027 - protein, 36 aa, Artificial Sequence; identical to SEQ ID NO: 10705
  Cyclic GFR-binding peptide
  MOD_RES (3)..(4)..(36): Xaa is C or S

SEQ ID NO: 112028 - protein, 37 aa, Artificial Sequence; identical to SEQ ID NO: 20823
  Cyclic GFR-binding peptide
  MOD_RES (6)..(7): Xaa is C or S

SEQ ID NO: 112029 - protein, 31 aa, Artificial Sequence; identical to SEQ ID NO: 20827
  Cyclic GFR-binding peptide
  MOD_RES (4)..(5): Xaa is C or S

SEQ ID NO: 112030 - protein, 30 aa, Artificial Sequence
  Cyclic GFR-binding peptide
  MOD_RES (4)..(5): Xaa is C or S
PEPXXVPEKMSAISILYLDENKNVVLKNYQ

SEQ ID NO: 112031 - protein, 28 aa, Artificial Sequence
  Cyclic GFR-binding peptide
  MOD_RES (2)..(3): Xaa is C or S
SXXVPARLNAISILYFDAANNVVLKKYR

SEQ ID NO: 112032 - protein, 31 aa, Artificial Sequence; identical to SEQ ID NO: 10712
  Cyclic GFR-binding peptide

SEQ ID NO: 112033 - protein, 27 aa, Artificial Sequence
  Cyclic GFR-binding peptide
NAISVLYFDDMGVPTLKKYREGMSVAE

SEQ ID NO: 112034 - protein, 32 aa, Artificial Sequence; identical to SEQ ID NO: 10714
  Cyclic GFR-binding peptide
  MOD_RES (2)..(3): Xaa is C or S

SEQ ID NO: 112035 - protein, 35 aa, Artificial Sequence; identical to SEQ ID NO: 39646
  Cyclic GFR-binding peptide
  MOD_RES (32)..(34): Xaa is C or S

SEQ ID NO: 112036 - protein, 23 aa, Artificial Sequence
  Cyclic GFR-binding peptide
QDLSAISILYLIGKTPKILKNYQ

SEQ ID NO: 112037 - protein, 25 aa, Artificial Sequence
  Cyclic GFR-binding peptide
TELNAISMLYFDEYDKVVLKKYREM

SEQ ID NO: 112038 - protein, 23 aa, Artificial Sequence
  Cyclic GFR-binding peptide
NAISMLYFDENEKVVLKKYRDMV

SEQ ID NO: 112039 - protein, 30 aa, Artificial Sequence
  Cyclic GFR-binding peptide
  MOD_RES (30)..(30): Xaa is C or S
PVKTSAISMLYLDNGRVLLLKNYQMIVEEX

SEQ ID NO: 112040 - protein, 32 aa, Artificial Sequence; identical to SEQ ID NO: 10723
  Cyclic GFR-binding peptide
  MOD_RES (1)..(1): Xaa is C or S

SEQ ID NO: 112041 - protein, 30 aa, Artificial Sequence
  Cyclic GFR-binding peptide
  MOD_RES (3)..(4): Xaa is C or S
ASXXVPARLSAISILYLDAANNVVLKNYQD

SEQ ID NO: 112042 - protein, 39 aa, Artificial Sequence; identical to SEQ ID NO: 10725
  Cyclic GFR-binding peptide
  MOD_RES (5)..(6)..(38): Xaa is C or S

SEQ ID NO: 112043 - protein, 38 aa, Artificial Sequence; identical to SEQ ID NO: 97673
  Cyclic GFR-binding peptide
  MOD_RES (2)..(3)..(35)..(37): Xaa is C or S

SEQ ID NO: 112044 - protein, 35 aa, Artificial Sequence; identical to SEQ ID NO: 92715
  Cyclic GFR-binding peptide
  MOD_RES (2)..(3)..(35): Xaa is C or S

SEQ ID NO: 112045 - protein, 23 aa, Artificial Sequence
  Cyclic GFR-binding peptide
LNAISILYFDAANNVVLKKYRDM

SEQ ID NO: 112046 - protein, 27 aa, Artificial Sequence
  Cyclic GFR-binding peptide
  MOD_RES (27)..(27): Xaa is C or S
NAISMLYFDENEKVVLKKYRDMVVEGX

SEQ ID NO: 112047 - protein, 35 aa, Artificial Sequence; identical to SEQ ID NO: 10735
  Cyclic GFR-binding peptide
  MOD_RES (4)..(5): Xaa is C or S

SEQ ID NO: 112048 - protein, 27 aa, Artificial Sequence
  Cyclic GFR-binding peptide
QDLSAISILYLIGKTPKILKNYQMIVK

SEQ ID NO: 112049 - protein, 25 aa, Artificial Sequence
  Cyclic GFR-binding peptide
VPTKLSAISILYLDKGVVTYLKNYQ

SEQ ID NO: 112050 - protein, 31 aa, Artificial Sequence; identical to SEQ ID NO: 10739
  Cyclic GFR-binding peptide
  MOD_RES (28)..(30): Xaa is C or S

SEQ ID NO: 112051 - protein, 25 aa, Artificial Sequence
  Cyclic GFR-binding peptide
PTKLSAISVLYLDDMGVPTLKNYQE

SEQ ID NO: 112052 - protein, 38 aa, Artificial Sequence; identical to SEQ ID NO: 10742
  Cyclic GFR-binding peptide
  MOD_RES (5)..(6)..(37): Xaa is C or S

SEQ ID NO: 112053 - protein, 35 aa, Artificial Sequence; identical to SEQ ID NO: 10743
  Cyclic GFR-binding peptide
  MOD_RES (6)..(7): Xaa is C or S

SEQ ID NO: 112054 - protein, 32 aa, Artificial Sequence; identical to SEQ ID NO: 10745
  Cyclic GFR-binding peptide
  MOD_RES (3)..(4): Xaa is C or S

SEQ ID NO: 112055 - protein, 30 aa, Artificial Sequence; identical to SEQ ID NO: 20865
  Cyclic GFR-binding peptide
  MOD_RES (29)..(29): Xaa is C or S

SEQ ID NO: 112056 - protein, 34 aa, Artificial Sequence
  Cyclic GFR-binding peptide
  MOD_RES (31)..(33): Xaa is C or S
PEKMSAISILYLDENKNVVLKNYQNMTVESXAXR

SEQ ID NO: 112057 - protein, 25 aa, Artificial Sequence
  Cyclic GFR-binding peptide
APVKTSAISMLYLDNGRVLLLKNYQ

SEQ ID NO: 112058 - protein, 30 aa, Artificial Sequence; identical to SEQ ID NO: 39685
  Cyclic GFR-binding peptide

SEQ ID NO: 112059 - protein, 31 aa, Artificial Sequence; identical to SEQ ID NO: 39689
  Cyclic GFR-binding peptide
  MOD_RES (5)..(6): Xaa is C or S

SEQ ID NO: 112060 - protein, 26 aa, Artificial Sequence
  Cyclic GFR-binding peptide
  MOD_RES (1)..(1): Xaa is C or S
XAPTKLNAISVLYFDSSNNVILKKYR

SEQ ID NO: 112061 - protein, 38 aa, Artificial Sequence; identical to SEQ ID NO: 97701
  Cyclic GFR-binding peptide
  MOD_RES (6)..(7): Xaa is C or S

SEQ ID NO: 112062 - protein, 35 aa, Artificial Sequence; identical to SEQ ID NO: 10753
  Cyclic GFR-binding peptide
  MOD_RES (5)..(6): Xaa is C or S

SEQ ID NO: 112063 - protein, 23 aa, Artificial Sequence
  Cyclic GFR-binding peptide
LNAISILYFDSANNVVLKKYRDM

SEQ ID NO: 112064 - protein, 41 aa, Artificial Sequence; identical to SEQ ID NO: 10754
  Cyclic GFR-binding peptide
  MOD_RES (6)..(7)..(39)..(41): Xaa is C or S

SEQ ID NO: 112065 - protein, 24 aa, Artificial Sequence
  Cyclic GFR-binding peptide
NAISILYFDENKNVVLKKYRNMTV

SEQ ID NO: 112066 - protein, 39 aa, Artificial Sequence; identical to SEQ ID NO: 10757
  Cyclic GFR-binding peptide
  MOD_RES (4)..(5)..(36)..(38): Xaa is C or S

SEQ ID NO: 112067 - protein, 22 aa, Artificial Sequence
  Cyclic GFR-binding peptide
KLNAISVLYFDSSNNVILKKYR

SEQ ID NO: 112068 - protein, 30 aa, Artificial Sequence
  Cyclic GFR-binding peptide
  MOD_RES (28)..(30): Xaa is C or S
LSAISILYLDKGVVTYLKNYQGMAVSEXGX

SEQ ID NO: 112069 - protein, 37 aa, Artificial Sequence; identical to SEQ ID NO: 10765
  Cyclic GFR-binding peptide
  MOD_RES (5)..(6): Xaa is C or S

SEQ ID NO: 112070 - protein, 21 aa, Artificial Sequence
  Cyclic GFR-binding peptide
LNAISMLYFDEYDKVVLKKYR

SEQ ID NO: 112071 - protein, 24 aa, Artificial Sequence
  Cyclic GFR-binding peptide
SAISMLYLNDKQQIILKNYQGMVV

SEQ ID NO: 112072 - protein, 26 aa, Artificial Sequence
  Cyclic GFR-binding peptide
LSAISILYLDKGVVTYLKNYQGMAVS

SEQ ID NO: 112073 - protein, 31 aa, Artificial Sequence; identical to SEQ ID NO: 10770
  Cyclic GFR-binding peptide
  MOD_RES (1)..(1): Xaa is C or S

SEQ ID NO: 112074 - protein, 35 aa, Artificial Sequence; identical to SEQ ID NO: 10771
  Cyclic GFR-binding peptide
  MOD_RES (5)..(6): Xaa is C or S

SEQ ID NO: 112075 - protein, 25 aa, Artificial Sequence
  Cyclic GFR-binding peptide
TRLNAISILYFDSANNVVLKKYRDM

SEQ ID NO: 112076 - protein, 32 aa, Artificial Sequence; identical to SEQ ID NO: 20890
  Cyclic GFR-binding peptide
  MOD_RES (1)..(2): Xaa is C or S

SEQ ID NO: 112077 - protein, 42 aa, Artificial Sequence; identical to SEQ ID NO: 77761
  Cyclic GFR-binding peptide
  MOD_RES (6)..(7)..(39)..(41): Xaa is C or S

SEQ ID NO: 112078 - protein, 33 aa, Artificial Sequence; identical to SEQ ID NO: 10779
  Cyclic GFR-binding peptide
  MOD_RES (1)..(2): Xaa is C or S

SEQ ID NO: 112079 - protein, 30 aa, Artificial Sequence; identical to SEQ ID NO: 10780
  Cyclic GFR-binding peptide
  MOD_RES (4)..(5): Xaa is C or S

SEQ ID NO: 112080 - protein, 37 aa, Artificial Sequence; identical to SEQ ID NO: 10781
  Cyclic GFR-binding peptide
  MOD_RES (6)..(7): Xaa is C or S

SEQ ID NO: 112081 - protein, 30 aa, Artificial Sequence
  Cyclic GFR-binding peptide
  MOD_RES (27)..(29): Xaa is C or S
SAISILYLDENKNVVLKNYQNMTVESXAXR

SEQ ID NO: 112082 - protein, 24 aa, Artificial Sequence
  Cyclic GFR-binding peptide
LSAISILYLDSANNVVLKNYQDMV

SEQ ID NO: 112083 - protein, 24 aa, Artificial Sequence
  Cyclic GFR-binding peptide
LNAISILYFVGRTPKVLKKYRMVV

SEQ ID NO: 112084 - protein, 23 aa, Artificial Sequence
  Cyclic GFR-binding peptide
RLSAISILYLDSANNVVLKNYQD

SEQ ID NO: 112085 - protein, 40 aa, Artificial Sequence; identical to SEQ ID NO: 77766
  Cyclic GFR-binding peptide
  MOD_RES (6)..(7)..(39): Xaa is C or S

SEQ ID NO: 112086 - protein, 39 aa, Artificial Sequence; identical to SEQ ID NO: 39733
  Cyclic GFR-binding peptide
  MOD_RES (5)..(6)..(38): Xaa is C or S

SEQ ID NO: 112087 - protein, 28 aa, Artificial Sequence
  Cyclic GFR-binding peptide
  MOD_RES (28)..(28): Xaa is C or S
LSAISVLYLDDSSNVILKNYQNMVVRAX

SEQ ID NO: 112088 - protein, 32 aa, Artificial Sequence; identical to SEQ ID NO: 10790
  Cyclic GFR-binding peptide
  MOD_RES (1)..(1): Xaa is C or S

SEQ ID NO: 112089 - protein, 40 aa, Artificial Sequence
  Cyclic GFR-binding peptide
  MOD_RES (6)..(7)..(39): Xaa is C or S
HVPKPXXAPTKLSAISVLYLDDSSNVILKNYQNMVVRSXG

SEQ ID NO: 112090 - protein, 25 aa, Artificial Sequence
  Cyclic GFR-binding peptide
VPTELNAISMLYFDEYDKVVLKKYR

SEQ ID NO: 112091 - protein, 37 aa, Artificial Sequence
  Cyclic GFR-binding peptide
  MOD_RES (4)..(5)..(37): Xaa is C or S
AGPXXTPTKMSAISMLYLNDKQQIILKNYQGMVVDRX

SEQ ID NO: 112092 - protein, 39 aa, Artificial Sequence
  Cyclic GFR-binding peptide
  MOD_RES (3)..(4)..(36)..(38): Xaa is C or S
KAXXVPTKLSAISILYLDKGVVTYLKNYQGMAVSEXGXR

SEQ ID NO: 112093 - protein, 34 aa, Artificial Sequence; identical to SEQ ID NO: 10796
  Cyclic GFR-binding peptide
  MOD_RES (1)..(2)..(34): Xaa is C or S

SEQ ID NO: 112094 - protein, 25 aa, Artificial Sequence
  Cyclic GFR-binding peptide
PQDLSAISILYLVGRTPKVLKNYQM

SEQ ID NO: 112095 - protein, 41 aa, Artificial Sequence; identical to SEQ ID NO: 20919
  Cyclic GFR-binding peptide
  MOD_RES (5)..(6)..(38)..(40): Xaa is C or S

SEQ ID NO: 112096 - protein, 37 aa, Artificial Sequence; identical to SEQ ID NO: 10802
  Cyclic GFR-binding peptide
  MOD_RES (4)..(5)..(36): Xaa is C or S

SEQ ID NO: 112097 - protein, 36 aa, Artificial Sequence; identical to SEQ ID NO: 10805
  Cyclic GFR-binding peptide
  MOD_RES (1)..(2)..(35): Xaa is C or S

SEQ ID NO: 112098 - protein, 28 aa, Artificial Sequence
  Cyclic GFR-binding peptide
  MOD_RES (26)..(28): Xaa is C or S
NAISMLYFDNGRVLLLKKYRMIVEEXGX

SEQ ID NO: 112099 - protein, 27 aa, Artificial Sequence
  Cyclic GFR-binding peptide
ELNAISMLYFDENEKVVLKKYRDMVVE

SEQ ID NO: 112100 - protein, 33 aa, Artificial Sequence
  Cyclic GFR-binding peptide
  MOD_RES (1)..(33): Xaa is C or S
XVPEKMSAISILYLDENKNVVLKNYQNMTVESX

SEQ ID NO: 112101 - protein, 21 aa, Artificial Sequence
  Cyclic GFR-binding peptide
SAISILYLDKGVVTYLKNYQG

SEQ ID NO: 112102 - protein, 40 aa, Artificial Sequence; identical to SEQ ID NO: 20923
  Cyclic GFR-binding peptide
  MOD_RES (6)..(7)..(39): Xaa is C or S

SEQ ID NO: 112103 - protein, 25 aa, Artificial Sequence
  Cyclic GFR-binding peptide
PTKLSAISVLYLDDSSNVILKNYQN

SEQ ID NO: 112104 - protein, 24 aa, Artificial Sequence
  Cyclic GFR-binding peptide
KLSAISVLYLDDMGVPTLKNYQEG

SEQ ID NO: 112105 - protein, 23 aa, Artificial Sequence
  Cyclic GFR-binding peptide
EKMNAISILYFDENKNVVLKKYR

SEQ ID NO: 112106 - protein, 27 aa, Artificial Sequence
  Cyclic GFR-binding peptide
  MOD_RES (26)..(26): Xaa is C or S
SAISILYLVGRKPKVLKNYQMIVRSXK

SEQ ID NO: 112107 - protein, 32 aa, Artificial Sequence; identical to SEQ ID NO: 10816
  Cyclic GFR-binding peptide
  MOD_RES (1)..(32): Xaa is C or S

SEQ ID NO: 112108 - protein, 36 aa, Artificial Sequence; identical to SEQ ID NO: 77780
  Cyclic GFR-binding peptide
  MOD_RES (1)..(2)..(34)..(36): Xaa is C or S

SEQ ID NO: 112109 - protein, 32 aa, Artificial Sequence
  Cyclic GFR-binding peptide
  MOD_RES (31)..(31): Xaa is C or S
PTKLSAISILYLDKGVVTYLKNYQGMAVSEXG

SEQ ID NO: 112110 - protein, 24 aa, Artificial Sequence
  Cyclic GFR-binding peptide
NAISILYFIGKTPKILKKYRMIVK

SEQ ID NO: 112111 - protein, 21 aa, Artificial Sequence
  Cyclic GFR-binding peptide
NAISILYFVGRTPKVLKKYRM

SEQ ID NO: 112112 - protein, 40 aa, Artificial Sequence; identical to SEQ ID NO: 10820
  Cyclic GFR-binding peptide
  MOD_RES (6)..(38)..(40): Xaa is C or S

SEQ ID NO: 112113 - protein, 31 aa, Artificial Sequence; identical to SEQ ID NO: 10821
  Cyclic GFR-binding peptide
  MOD_RES (1)..(2): Xaa is C or S

SEQ ID NO: 112114 - protein, 30 aa, Artificial Sequence; identical to SEQ ID NO: 39774
  Cyclic GFR-binding peptide
  MOD_RES (30)..(30): Xaa is C or S

SEQ ID NO: 112115 - protein, 38 aa, Artificial Sequence
  Cyclic GFR-binding peptide
  MOD_RES (4)..(5)..(37): Xaa is C or S
AGPXXTPTKMSAISMLYLNDKQQIILKNYQGMVVDRXG

SEQ ID NO: 112116 - protein, 27 aa, Artificial Sequence
  Cyclic GFR-binding peptide
  MOD_RES (1)..(2): Xaa is C or S
XXAPTKLSAISVLYLDSSNNVILKNYQ

SEQ ID NO: 112117 - protein, 29 aa, Artificial Sequence
  Cyclic GFR-binding peptide
KLSAISVLYLDDMGVPTLKNYQEGMSVAE

SEQ ID NO: 112118 - protein, 25 aa, Artificial Sequence
  Cyclic GFR-binding peptide
LSAISILYLIGKTPKILKNYQMIVK

SEQ ID NO: 112119 - protein, 37 aa, Artificial Sequence
  Cyclic GFR-binding peptide
  MOD_RES (3)..(4)..(36): Xaa is C or S
GPXXTPTKMSAISMLYLNDKQQIILKNYQGMVVDRXG

SEQ ID NO: 112120 - protein, 29 aa, Artificial Sequence
  Cyclic GFR-binding peptide
  MOD_RES (1)..(1): Xaa is C or S
XVPTRLNAISILYFDSANNVVLKKYRDMV

SEQ ID NO: 112121 - protein, 29 aa, Artificial Sequence
  Cyclic GFR-binding peptide
  MOD_RES (29)..(29): Xaa is C or S
KLSAISVLYLDDSSNVILKNYQNMVVRSX

SEQ ID NO: 112122 - protein, 25 aa, Artificial Sequence
  Cyclic GFR-binding peptide
KLNAISVLYFDSSNNVILKKYRNMV

SEQ ID NO: 112123 - protein, 32 aa, Artificial Sequence; identical to SEQ ID NO: 10839
  Cyclic GFR-binding peptide
  MOD_RES (1)..(32): Xaa is C or S

SEQ ID NO: 112124 - protein, 26 aa, Artificial Sequence
  Cyclic GFR-binding peptide
  MOD_RES (26)..(26): Xaa is C or S
SAISMLYLDNGRVLLLKNYQMIVEEX

SEQ ID NO: 112125 - protein, 33 aa, Artificial Sequence; identical to SEQ ID NO: 10842
  Cyclic GFR-binding peptide
  MOD_RES (3)..(4): Xaa is C or S

SEQ ID NO: 112126 - protein, 39 aa, Artificial Sequence; identical to SEQ ID NO: 77788
  Cyclic GFR-binding peptide
  MOD_RES (6)..(7)..(38): Xaa is C or S

SEQ ID NO: 112127 - protein, 33 aa, Artificial Sequence; identical to SEQ ID NO: 10844
  Cyclic GFR-binding peptide
  MOD_RES (30)..(32): Xaa is C or S

SEQ ID NO: 112128 - protein, 22 aa, Artificial Sequence
  Cyclic GFR-binding peptide
NAISILYFDKGVVTYLKKYRGM

SEQ ID NO: 112129 - protein, 39 aa, Artificial Sequence; identical to SEQ ID NO: 10847
  Cyclic GFR-binding peptide
  MOD_RES (3)..(4)..(37)..(39): Xaa is C or S

SEQ ID NO: 112130 - protein, 34 aa, Artificial Sequence; identical to SEQ ID NO: 10848
  Cyclic GFR-binding peptide
  MOD_RES (5)..(6): Xaa is C or S

SEQ ID NO: 112131 - protein, 31 aa, Artificial Sequence; identical to SEQ ID NO: 10849
  Cyclic GFR-binding peptide
  MOD_RES (28)..(30): Xaa is C or S

SEQ ID NO: 112132 - protein, 41 aa, Artificial Sequence; identical to SEQ ID NO: 20962
  Cyclic GFR-binding peptide
  MOD_RES (6)..(7)..(39)..(41): Xaa is C or S

SEQ ID NO: 112133 - protein, 28 aa, Artificial Sequence
  Cyclic GFR-binding peptide
VPTKLSAISILYLDKGVVTYLKNYQGMA

SEQ ID NO: 112134 - protein, 34 aa, Artificial Sequence; identical to SEQ ID NO: 10853
  Cyclic GFR-binding peptide
  MOD_RES (6)..(7): Xaa is C or S

SEQ ID NO: 112135 - protein, 31 aa, Artificial Sequence; identical to SEQ ID NO: 10854
  Cyclic GFR-binding peptide
  MOD_RES (31)..(31): Xaa is C or S

SEQ ID NO: 112136 - protein, 30 aa, Artificial Sequence; identical to SEQ ID NO: 10856
  Cyclic GFR-binding peptide
  MOD_RES (1)..(2): Xaa is C or S

SEQ ID NO: 112137 - protein, 36 aa, Artificial Sequence; identical to SEQ ID NO: 10857
  Cyclic GFR-binding peptide
  MOD_RES (2)..(3)..(35): Xaa is C or S

SEQ ID NO: 112138 - protein, 30 aa, Artificial Sequence
  Cyclic GFR-binding peptide
PARLSAISILYLDAANNVVLKNYQDMVVEA

SEQ ID NO: 112139 - protein, 34 aa, Artificial Sequence; identical to SEQ ID NO: 10860
  Cyclic GFR-binding peptide
  MOD_RES (31)..(33): Xaa is C or S

SEQ ID NO: 112140 - protein, 30 aa, Artificial Sequence; identical to SEQ ID NO: 10862
  Cyclic GFR-binding peptide

SEQ ID NO: 112141 - protein, 33 aa, Artificial Sequence
  Cyclic GFR-binding peptide
  MOD_RES (2)..(3): Xaa is C or S
SXXVPARLSAISILYLDAANNVVLKNYQDMVVE

SEQ ID NO: 112142 - protein, 25 aa, Artificial Sequence
  Cyclic GFR-binding peptide
LSAISVLYLDDSSNVILKNYQNMVV

SEQ ID NO: 112143 - protein, 35 aa, Artificial Sequence; identical to SEQ ID NO: 77796
  Cyclic GFR-binding peptide
  MOD_RES (6)..(7): Xaa is C or S

SEQ ID NO: 112144 - protein, 23 aa, Artificial Sequence
  Cyclic GFR-binding peptide
TKLNAISVLYFDDMGVPTLKKYR

SEQ ID NO: 112145 - protein, 38 aa, Artificial Sequence; identical to SEQ ID NO: 10865
  Cyclic GFR-binding peptide
  MOD_RES (5)..(6)..(37): Xaa is C or S

SEQ ID NO: 112146 - protein, 36 aa, Artificial Sequence
  Cyclic GFR-binding peptide
  MOD_RES (3)..(4)..(36): Xaa is C or S
KAXXVPTKLSAISILYLDKGVVTYLKNYQGMAVSEX

SEQ ID NO: 112147 - protein, 23 aa, Artificial Sequence
  Cyclic GFR-binding peptide
ARLNAISILYFDAANNVVLKKYR

SEQ ID NO: 112148 - protein, 35 aa, Artificial Sequence; identical to SEQ ID NO: 20978
  Cyclic GFR-binding peptide
  MOD_RES (32)..(34): Xaa is C or S

SEQ ID NO: 112149 - protein, 33 aa, Artificial Sequence; identical to SEQ ID NO: 10867
  Cyclic GFR-binding peptide
  MOD_RES (30)..(32): Xaa is C or S

SEQ ID NO: 112150 - protein, 38 aa, Artificial Sequence; identical to SEQ ID NO: 10868
  Cyclic GFR-binding peptide
  MOD_RES (4)..(5)..(36)..(38): Xaa is C or S

SEQ ID NO: 112151 - protein, 30 aa, Artificial Sequence
  Cyclic GFR-binding peptide
  MOD_RES (4)..(5): Xaa is C or S
SKAXXVPTKLSAISILYLDKGVVTYLKNYQ

SEQ ID NO: 112152 - protein, 42 aa, Artificial Sequence; identical to SEQ ID NO: 97803
  Cyclic GFR-binding peptide
  MOD_RES (6)..(7)..(39)..(41): Xaa is C or S

SEQ ID NO: 112153 - protein, 35 aa, Artificial Sequence; identical to SEQ ID NO: 10870
  Cyclic GFR-binding peptide
  MOD_RES (3)..(4)..(35): Xaa is C or S

SEQ ID NO: 112154 - protein, 31 aa, Artificial Sequence; identical to SEQ ID NO: 39826
  Cyclic GFR-binding peptide
  MOD_RES (29)..(31): Xaa is C or S

SEQ ID NO: 112155 - protein, 31 aa, Artificial Sequence; identical to SEQ ID NO: 10873
  Cyclic GFR-binding peptide
  MOD_RES (5)..(6): Xaa is C or S

SEQ ID NO: 112156 - protein, 28 aa, Artificial Sequence
  Cyclic GFR-binding peptide
  MOD_RES (28)..(28): Xaa is C or S
KTSAISMLYLDNGRVLLLKNYQMIVEEX

SEQ ID NO: 112157 - protein, 31 aa, Artificial Sequence; identical to SEQ ID NO: 77806
  Cyclic GFR-binding peptide
  MOD_RES (4)..(5): Xaa is C or S

SEQ ID NO: 112158 - protein, 27 aa, Artificial Sequence
  Cyclic GFR-binding peptide
  MOD_RES (1)..(1): Xaa is C or S
XVPARLSAISILYLDAANNVVLKNYQD

SEQ ID NO: 112159 - protein, 33 aa, Artificial Sequence; identical to SEQ ID NO: 77808
  Cyclic GFR-binding peptide
  MOD_RES (2)..(3): Xaa is C or S

SEQ ID NO: 112160 - protein, 21 aa, Artificial Sequence
  Cyclic GFR-binding peptide
SAISVLYLDSSNNVILKNYQN

SEQ ID NO: 112161 - protein, 25 aa, Artificial Sequence
  Cyclic GFR-binding peptide
EKMSAISILYLDENKNVVLKNYQNM

SEQ ID NO: 112162 - protein, 27 aa, Artificial Sequence
  Cyclic GFR-binding peptide
SAISVLYLDDMGVPTLKNYQEGMSVAE

SEQ ID NO: 112163 - protein, 30 aa, Artificial Sequence; identical to SEQ ID NO: 92868
  Cyclic GFR-binding peptide

SEQ ID NO: 112164 - protein, 41 aa, Artificial Sequence; identical to SEQ ID NO: 39838
  Cyclic GFR-binding peptide
  MOD_RES (6)..(7)..(39)..(41): Xaa is C or S

SEQ ID NO: 112165 - protein, 25 aa, Artificial Sequence
  Cyclic GFR-binding peptide
PTRLNAISILYFDSANNVVLKKYRD

SEQ ID NO: 112166 - protein, 25 aa, Artificial Sequence
  Cyclic GFR-binding peptide
KTSAISMLYLDNGRVLLLKNYQMIV

SEQ ID NO: 112167 - protein, 34 aa, Artificial Sequence; identical to SEQ ID NO: 10888
  Cyclic GFR-binding peptide
  MOD_RES (3)..(4): Xaa is C or S

SEQ ID NO: 112168 - protein, 24 aa, Artificial Sequence
  Cyclic GFR-binding peptide
KLNAISVLYFDDMGVPTLKKYREG

SEQ ID NO: 112169 - protein, 27 aa, Artificial Sequence
  Cyclic GFR-binding peptide
PQDLSAISILYLVGRTPKVLKNYQMVV

SEQ ID NO: 112170 - protein, 36 aa, Artificial Sequence; identical to SEQ ID NO: 10892
  Cyclic GFR-binding peptide
  MOD_RES (3)..(4)..(35): Xaa is C or S

SEQ ID NO: 112171 - protein, 39 aa, Artificial Sequence; identical to SEQ ID NO: 21000
  Cyclic GFR-binding peptide
  MOD_RES (6)..(7)..(39): Xaa is C or S

SEQ ID NO: 112172 - protein, 22 aa, Artificial Sequence
  Cyclic GFR-binding peptide
SAISILYLDAANNVVLKNYQDM

SEQ ID NO: 112173 - protein, 29 aa, Artificial Sequence
  Cyclic GFR-binding peptide
PQALSAISILYLVGRKPKVLKNYQMIVRS

SEQ ID NO: 112174 - protein, 33 aa, Artificial Sequence
  Cyclic GFR-binding peptide
  MOD_RES (4)..(5): Xaa is C or S
PEPXXVPEKMSAISILYLDENKNVVLKNYQNMT

SEQ ID NO: 112175 - protein, 30 aa, Artificial Sequence; identical to SEQ ID NO: 10896
  Cyclic GFR-binding peptide
  MOD_RES (30)..(30): Xaa is C or S

SEQ ID NO: 112176 - protein, 29 aa, Artificial Sequence
  Cyclic GFR-binding peptide
PTRLNAISILYFDSANNVVLKKYRDMVVE

SEQ ID NO: 112177 - protein, 27 aa, Artificial Sequence
  Cyclic GFR-binding peptide
RLSAISILYLDSANNVVLKNYQDMVVE

SEQ ID NO: 112178 - protein, 35 aa, Artificial Sequence; identical to SEQ ID NO: 10900
  Cyclic GFR-binding peptide
  MOD_RES (2)..(3)..(34): Xaa is C or S

SEQ ID NO: 112179 - protein, 39 aa, Artificial Sequence; identical to SEQ ID NO: 10902
  Cyclic GFR-binding peptide
  MOD_RES (5)..(6)..(38): Xaa is C or S

SEQ ID NO: 112180 - protein, 28 aa, Artificial Sequence
  Cyclic GFR-binding peptide
  MOD_RES (2)..(3): Xaa is C or S
TXXAPVKTNAISMLYFDNGRVLLLKKYR

SEQ ID NO: 112181 - protein, 35 aa, Artificial Sequence; identical to SEQ ID NO: 97839
  Cyclic GFR-binding peptide
  MOD_RES (32)..(34): Xaa is C or S

SEQ ID NO: 112182 - protein, 30 aa, Artificial Sequence
  Cyclic GFR-binding peptide
  MOD_RES (3)..(4): Xaa is C or S
EPXXVPEKMSAISILYLDENKNVVLKNYQN

SEQ ID NO: 112183 - protein, 35 aa, Artificial Sequence; identical to SEQ ID NO: 10905
  Cyclic GFR-binding peptide
  MOD_RES (6)..(7): Xaa is C or S

SEQ ID NO: 112184 - protein, 37 aa, Artificial Sequence; identical to SEQ ID NO: 10906
  Cyclic GFR-binding peptide
  MOD_RES (5)..(6): Xaa is C or S

SEQ ID NO: 112185 - protein, 27 aa, Artificial Sequence
  Cyclic GFR-binding peptide
VPQALNAISILYFVGRKPKVLKKYRMI

SEQ ID NO: 112186 - protein, 37 aa, Artificial Sequence; identical to SEQ ID NO: 39863
  Cyclic GFR-binding peptide
  MOD_RES (5)..(6): Xaa is C or S

SEQ ID NO: 112187 - protein, 24 aa, Artificial Sequence
  Cyclic GFR-binding peptide
SAISILYLDSANNVVLKNYQDMVV

SEQ ID NO: 112188 - protein, 28 aa, Artificial Sequence
  Cyclic GFR-binding peptide
  MOD_RES (26)..(28): Xaa is C or S
NAISILYFIGKTPKILKKYRMIVKSXKX

SEQ ID NO: 112189 - protein, 37 aa, Artificial Sequence; identical to SEQ ID NO: 10913
  Cyclic GFR-binding peptide
  MOD_RES (6)..(7): Xaa is C or S

SEQ ID NO: 112190 - protein, 36 aa, Artificial Sequence; identical to SEQ ID NO: 10914
  Cyclic GFR-binding peptide
  MOD_RES (5)..(5): Xaa is C or S

SEQ ID NO: 112191 - protein, 35 aa, Artificial Sequence
  Cyclic GFR-binding peptide
  MOD_RES (4)..(5): Xaa is C or S
AGPXXTPTKMSAISMLYLNDKQQIILKNYQGMVVD

SEQ ID NO: 112192 - protein, 36 aa, Artificial Sequence
  Cyclic GFR-binding peptide
  MOD_RES (1)..(33)..(35): Xaa is C or S
XTPTKMSAISMLYLNDKQQIILKNYQGMVVDRXGXS

SEQ ID NO: 112193 - protein, 34 aa, Artificial Sequence; identical to SEQ ID NO: 10916
  Cyclic GFR-binding peptide
  MOD_RES (2)..(3): Xaa is C or S

SEQ ID NO: 112194 - protein, 31 aa, Artificial Sequence
  Cyclic GFR-binding peptide
  MOD_RES (1)..(1): Xaa is C or S
XVPEKMSAISILYLDENKNVVLKNYQNMTVE

SEQ ID NO: 112195 - protein, 32 aa, Artificial Sequence; identical to SEQ ID NO: 10917
  Cyclic GFR-binding peptide
  MOD_RES (29)..(31): Xaa is C or S

SEQ ID NO: 112196 - protein, 33 aa, Artificial Sequence
  Cyclic GFR-binding peptide
  MOD_RES (4)..(5): Xaa is C or S
AGPXXTPTKMSAISMLYLNDKQQIILKNYQGMV

SEQ ID NO: 112197 - protein, 34 aa, Artificial Sequence; identical to SEQ ID NO: 10919
  Cyclic GFR-binding peptide
  MOD_RES (5)..(6): Xaa is C or S

SEQ ID NO: 112198 - protein, 34 aa, Artificial Sequence; identical to SEQ ID NO: 10920
  Cyclic GFR-binding peptide
  MOD_RES (6)..(7): Xaa is C or S

SEQ ID NO: 112199 - protein, 33 aa, Artificial Sequence; identical to SEQ ID NO: 77834
  Cyclic GFR-binding peptide
  MOD_RES (32)..(32): Xaa is C or S

SEQ ID NO: 112200 - protein, 25 aa, Artificial Sequence
  Cyclic GFR-binding peptide
QLSAISVLYLDDSSNVILKNYQNMV

SEQ ID NO: 112201 - protein, 32 aa, Artificial Sequence; identical to SEQ ID NO: 10923
  Cyclic GFR-binding peptide
  MOD_RES (1)..(2): Xaa is C or S

SEQ ID NO: 112202 - protein, 23 aa, Artificial Sequence
  Cyclic GFR-binding peptide
LSAISILYLDSANNVVLKNYQDM

SEQ ID NO: 112203 - protein, 30 aa, Artificial Sequence; identical to SEQ ID NO: 10925
  Cyclic GFR-binding peptide
  MOD_RES (1)..(2): Xaa is C or S

SEQ ID NO: 112204 - protein, 32 aa, Artificial Sequence
  Cyclic GFR-binding peptide
  MOD_RES (30)..(32): Xaa is C or S
TKMSAISMLYLNDKQQIILKNYQGMVVDRXGX

SEQ ID NO: 112205 - protein, 29 aa, Artificial Sequence
  Cyclic GFR-binding peptide
  MOD_RES (27)..(29): Xaa is C or S
SAISILYLDAANNVVLKNYQDMVVEAXGX

SEQ ID NO: 112206 - protein, 41 aa, Artificial Sequence; identical to SEQ ID NO: 10931
  Cyclic GFR-binding peptide
  MOD_RES (6)..(7)..(38)..(40): Xaa is C or S

SEQ ID NO: 112207 - protein, 33 aa, Artificial Sequence; identical to SEQ ID NO: 10932
  Cyclic GFR-binding peptide
  MOD_RES (5)..(6): Xaa is C or S

SEQ ID NO: 112208 - protein, 35 aa, Artificial Sequence; identical to SEQ ID NO: 10933
  Cyclic GFR-binding peptide
  MOD_RES (4)..(5): Xaa is C or S

SEQ ID NO: 112209 - protein, 35 aa, Artificial Sequence; identical to SEQ ID NO: 10934
  Cyclic GFR-binding peptide
  MOD_RES (1)..(2)..(34): Xaa is C or S

SEQ ID NO: 112210 - protein, 32 aa, Artificial Sequence; identical to SEQ ID NO: 77844
  Cyclic GFR-binding peptide
  MOD_RES (31)..(31): Xaa is C or S

SEQ ID NO: 112211 - protein, 36 aa, Artificial Sequence; identical to SEQ ID NO: 10935
  Cyclic GFR-binding peptide
  MOD_RES (1)..(33)..(35): Xaa is C or S

SEQ ID NO: 112212 - protein, 30 aa, Artificial Sequence; identical to SEQ ID NO: 10936
  Cyclic GFR-binding peptide
  MOD_RES (2)..(3): Xaa is C or S

SEQ ID NO: 112213 - protein, 28 aa, Artificial Sequence
  Cyclic GFR-binding peptide
  MOD_RES (2)..(3): Xaa is C or S
AXXAPTKLSAISVLYLDSSNNVILKNYQ

SEQ ID NO: 112214 - protein, 24 aa, Artificial Sequence
  Cyclic GFR-binding peptide
KMNAISILYFDENKNVVLKKYRNM

SEQ ID NO: 112215 - protein, 23 aa, Artificial Sequence
  Cyclic GFR-binding peptide
DLNAISILYFVGRTPKVLKKYRM

SEQ ID NO: 112216 - protein, 26 aa, Artificial Sequence
  Cyclic GFR-binding peptide
NAISMLYFDENEKVVLKKYRDMVVEG

SEQ ID NO: 112217 - protein, 29 aa, Artificial Sequence
  Cyclic GFR-binding peptide
  MOD_RES (1)..(1): Xaa is C or S
XVPTELNAISMLYFDEYDKVVLKKYREMV

SEQ ID NO: 112218 - protein, 29 aa, Artificial Sequence
  Cyclic GFR-binding peptide
  MOD_RES (29)..(29): Xaa is C or S
QALNAISILYFVGRKPKVLKKYRMIVRSX

SEQ ID NO: 112219 - protein, 23 aa, Artificial Sequence
  Cyclic GFR-binding peptide
LNAISILYFVGRKPKVLKKYRMI

SEQ ID NO: 112220 - protein, 38 aa, Artificial Sequence; identical to SEQ ID NO: 10948
  Cyclic GFR-binding peptide
  MOD_RES (3)..(4)..(36)..(38): Xaa is C or S

SEQ ID NO: 112221 - protein, 22 aa, Artificial Sequence
  Cyclic GFR-binding peptide
RLNAISILYFDAANNVVLKKYR

SEQ ID NO: 112222 - protein, 32 aa, Artificial Sequence; identical to SEQ ID NO: 10960
  Cyclic GFR-binding peptide
  MOD_RES (31)..(31): Xaa is C or S

SEQ ID NO: 112223 - protein, 30 aa, Artificial Sequence
  Cyclic GFR-binding peptide
  MOD_RES (3)..(4): Xaa is C or S
GPXXTPTKMSAISMLYLNDKQQIILKNYQG

SEQ ID NO: 112224 - protein, 37 aa, Artificial Sequence; identical to SEQ ID NO: 39927
  Cyclic GFR-binding peptide
  MOD_RES (1)..(2)..(34)..(36): Xaa is C or S

SEQ ID NO: 112225 - protein, 30 aa, Artificial Sequence; identical to SEQ ID NO: 10964
  Cyclic GFR-binding peptide
  MOD_RES (30)..(30): Xaa is C or S

SEQ ID NO: 112226 - protein, 25 aa, Artificial Sequence
  Cyclic GFR-binding peptide
KMSAISILYLDENKNVVLKNYQNMT

SEQ ID NO: 112227 - protein, 29 aa, Artificial Sequence
  Cyclic GFR-binding peptide
  MOD_RES (3)..(4): Xaa is C or S
KAXXVPTELNAISMLYFDEYDKVVLKKYR

SEQ ID NO: 112228 - protein, 38 aa, Artificial Sequence; identical to SEQ ID NO: 10969
  Cyclic GFR-binding peptide
  MOD_RES (6)..(7): Xaa is C or S

SEQ ID NO: 112229 - protein, 32 aa, Artificial Sequence
  Cyclic GFR-binding peptide
  MOD_RES (1)..(2): Xaa is C or S
XXVPEKMSAISILYLDENKNVVLKNYQNMTVE

SEQ ID NO: 112230 - protein, 26 aa, Artificial Sequence
  Cyclic GFR-binding peptide
TRLSAISILYLDSANNVVLKNYQDMV

SEQ ID NO: 112231 - protein, 39 aa, Artificial Sequence; identical to SEQ ID NO: 92951
  Cyclic GFR-binding peptide
  MOD_RES (5)..(6)..(38): Xaa is C or S

SEQ ID NO: 112232 - protein, 40 aa, Artificial Sequence; identical to SEQ ID NO: 10971
  Cyclic GFR-binding peptide
  MOD_RES (5)..(6)..(37)..(39): Xaa is C or S

SEQ ID NO: 112233 - protein, 37 aa, Artificial Sequence; identical to SEQ ID NO: 10972
  Cyclic GFR-binding peptide
  MOD_RES (4)..(36): Xaa is C or S

SEQ ID NO: 112234 - protein, 27 aa, Artificial Sequence
  Cyclic GFR-binding peptide
PARLNAISILYFDAANNVVLKKYRDMV

SEQ ID NO: 112235 - protein, 32 aa, Artificial Sequence; identical to SEQ ID NO: 21083
  Cyclic GFR-binding peptide
  MOD_RES (6)..(7): Xaa is C or S

SEQ ID NO: 112236 - protein, 28 aa, Artificial Sequence
  Cyclic GFR-binding peptide
  MOD_RES (27)..(27): Xaa is C or S
LNAISILYFVGRKPKVLKKYRMIVRSXK

SEQ ID NO: 112237 - protein, 29 aa, Artificial Sequence
  Cyclic GFR-binding peptide
  MOD_RES (27)..(29): Xaa is C or S
SAISILYLDKGVVTYLKNYQGMAVSEXGX

SEQ ID NO: 112238 - protein, 33 aa, Artificial Sequence
  Cyclic GFR-binding peptide
  MOD_RES (1)..(2)..(33): Xaa is C or S
XXAPVKTSAISMLYLDNGRVLLLKNYQMIVEEX

SEQ ID NO: 112239 - protein, 33 aa, Artificial Sequence; identical to SEQ ID NO: 39953
  Cyclic GFR-binding peptide
  MOD_RES (6)..(7): Xaa is C or S

SEQ ID NO: 112240 - protein, 33 aa, Artificial Sequence
  Cyclic GFR-binding peptide
  MOD_RES (1)..(2): Xaa is C or S
XXVPARLSAISILYLDAANNVVLKNYQDMVVEA

SEQ ID NO: 112241 - protein, 24 aa, Artificial Sequence
  Cyclic GFR-binding peptide
PTELNAISMLYFDENEKVVLKKYR

SEQ ID NO: 112242 - protein, 23 aa, Artificial Sequence
  Cyclic GFR-binding peptide
KMSAISILYLDENKNVVLKNYQN

SEQ ID NO: 112243 - protein, 29 aa, Artificial Sequence
  Cyclic GFR-binding peptide
VPQALNAISILYFVGRKPKVLKKYRMIVR

SEQ ID NO: 112244 - protein, 35 aa, Artificial Sequence; identical to SEQ ID NO: 39958
  Cyclic GFR-binding peptide
  MOD_RES (1)..(2)..(34): Xaa is C or S

SEQ ID NO: 112245 - protein, 39 aa, Artificial Sequence; identical to SEQ ID NO: 10986
  Cyclic GFR-binding peptide
  MOD_RES (6)..(7)..(38): Xaa is C or S

SEQ ID NO: 112246 - protein, 25 aa, Artificial Sequence
  Cyclic GFR-binding peptide
TRLSAISILYLDSANNVVLKNYQDM

SEQ ID NO: 112247 - protein, 37 aa, Artificial Sequence; identical to SEQ ID NO: 10987
  Cyclic GFR-binding peptide
  MOD_RES (1)..(2)..(35)..(37): Xaa is C or S

SEQ ID NO: 112248 - protein, 26 aa, Artificial Sequence
  Cyclic GFR-binding peptide
  MOD_RES (1)..(1): Xaa is C or S
XVPTELNAISMLYFDENEKVVLKKYR

SEQ ID NO: 112249 - protein, 27 aa, Artificial Sequence
  Cyclic GFR-binding peptide
PTELNAISMLYFDEYDKVVLKKYREMV

SEQ ID NO: 112250 - protein, 32 aa, Artificial Sequence
  Cyclic GFR-binding peptide
  MOD_RES (32)..(32): Xaa is C or S
VPEKMSAISILYLDENKNVVLKNYQNMTVESX

SEQ ID NO: 112251 - protein, 33 aa, Artificial Sequence
  Cyclic GFR-binding peptide
  MOD_RES (3)..(4): Xaa is C or S
KAXXVPTKLSAISILYLDKGVVTYLKNYQGMAV

SEQ ID NO: 112252 - protein, 36 aa, Artificial Sequence; identical to SEQ ID NO: 21098
  Cyclic GFR-binding peptide
  MOD_RES (3)..(4)..(36): Xaa is C or S

SEQ ID NO: 112253 - protein, 34 aa, Artificial Sequence; identical to SEQ ID NO: 10992
  Cyclic GFR-binding peptide
  MOD_RES (6)..(7): Xaa is C or S

SEQ ID NO: 112254 - protein, 40 aa, Artificial Sequence; identical to SEQ ID NO: 10994
  Cyclic GFR-binding peptide
  MOD_RES (6)..(7)..(40): Xaa is C or S

SEQ ID NO: 112255 - protein, 28 aa, Artificial Sequence
  Cyclic GFR-binding peptide
  MOD_RES (2)..(3): Xaa is C or S
TXXAPVKTSAISMLYLDNGRVLLLKNYQ

SEQ ID NO: 112256 - protein, 32 aa, Artificial Sequence; identical to SEQ ID NO: 10997
  Cyclic GFR-binding peptide
  MOD_RES (1)..(1): Xaa is C or S

SEQ ID NO: 112257 - protein, 25 aa, Artificial Sequence
  Cyclic GFR-binding peptide
KLSAISVLYLDDMGVPTLKNYQEGM

SEQ ID NO: 112258 - protein, 34 aa, Artificial Sequence; identical to SEQ ID NO: 11003
  Cyclic GFR-binding peptide
  MOD_RES (1)..(32)..(34): Xaa is C or S

SEQ ID NO: 112259 - protein, 37 aa, Artificial Sequence; identical to SEQ ID NO: 21108
  Cyclic GFR-binding peptide
  MOD_RES (5)..(6): Xaa is C or S

SEQ ID NO: 112260 - protein, 40 aa, Artificial Sequence
  Cyclic GFR-binding peptide
  MOD_RES (6)..(7)..(38)..(40): Xaa is C or S
RVPSTXXAPVKTSAISMLYLDNGRVLLLKNYQMIVEEXGX

SEQ ID NO: 112261 - protein, 26 aa, Artificial Sequence
  Cyclic GFR-binding peptide
VPARLSAISILYLDAANNVVLKNYQD

SEQ ID NO: 112262 - protein, 29 aa, Artificial Sequence
  Cyclic GFR-binding peptide
  MOD_RES (28)..(28): Xaa is C or S
ALNAISILYFVGRKPKVLKKYRMIVRSXK

SEQ ID NO: 112263 - protein, 21 aa, Artificial Sequence
  Cyclic GFR-binding peptide
LNAISILYFDAANNVVLKKYR

SEQ ID NO: 112264 - protein, 28 aa, Artificial Sequence
  Cyclic GFR-binding peptide
  MOD_RES (1)..(2): Xaa is C or S
XXAPVKTNAISMLYFDNGRVLLLKKYRM

SEQ ID NO: 112265 - protein, 26 aa, Artificial Sequence
  Cyclic GFR-binding peptide
VPQDLNAISILYFVGRTPKVLKKYRM

SEQ ID NO: 112266 - protein, 27 aa, Artificial Sequence
  Cyclic GFR-binding peptide
  MOD_RES (1)..(1): Xaa is C or S
XAPVKTNAISMLYFDNGRVLLLKKYRM

SEQ ID NO: 112267 - protein, 22 aa, Artificial Sequence
  Cyclic GFR-binding peptide
KLNAISVLYFDDMGVPTLKKYR

SEQ ID NO: 112268 - protein, 31 aa, Artificial Sequence; identical to SEQ ID NO: 21123
  Cyclic GFR-binding peptide
  MOD_RES (1)..(1): Xaa is C or S

SEQ ID NO: 112269 - protein, 31 aa, Artificial Sequence; identical to SEQ ID NO: 11020
  Cyclic GFR-binding peptide
  MOD_RES (5)..(6): Xaa is C or S

SEQ ID NO: 112270 - protein, 21 aa, Artificial Sequence
  Cyclic GFR-binding peptide
LNAISILYFVGRTPKVLKKYR

SEQ ID NO: 112271 - protein, 38 aa, Artificial Sequence; identical to SEQ ID NO: 21130
  Cyclic GFR-binding peptide
  MOD_RES (5)..(6)..(38): Xaa is C or S

SEQ ID NO: 112272 - protein, 28 aa, Artificial Sequence
  Cyclic GFR-binding peptide
  MOD_RES (27)..(27): Xaa is C or S
NAISVLYFDSSNNVILKKYRNMVVKAXG

SEQ ID NO: 112273 - protein, 33 aa, Artificial Sequence; identical to SEQ ID NO: 21133
  Cyclic GFR-binding peptide
  MOD_RES (30)..(32): Xaa is C or S

SEQ ID NO: 112274 - protein, 24 aa, Artificial Sequence
  Cyclic GFR-binding peptide
PVKTNAISMLYFDNGRVLLLKKYR

SEQ ID NO: 112275 - protein, 38 aa, Artificial Sequence; identical to SEQ ID NO: 11029
  Cyclic GFR-binding peptide
  MOD_RES (4)..(5)..(37): Xaa is C or S

SEQ ID NO: 112276 - protein, 28 aa, Artificial Sequence
  Cyclic GFR-binding peptide
  MOD_RES (2)..(3): Xaa is C or S
PXXVSQDLNAISILYFIGKTPKILKKYR

SEQ ID NO: 112277 - protein, 34 aa, Artificial Sequence; identical to SEQ ID NO: 11031
  Cyclic GFR-binding peptide
  MOD_RES (3)..(4): Xaa is C or S

SEQ ID NO: 112278 - protein, 30 aa, Artificial Sequence; identical to SEQ ID NO: 11032
  Cyclic GFR-binding peptide
  MOD_RES (4)..(4): Xaa is C or S

SEQ ID NO: 112279 - protein, 26 aa, Artificial Sequence
  Cyclic GFR-binding peptide
LNAISMLYFDEYDKVVLKKYREMVVE

SEQ ID NO: 112280 - protein, 39 aa, Artificial Sequence; identical to SEQ ID NO: 11038
  Cyclic GFR-binding peptide
  MOD_RES (5)..(6)..(39): Xaa is C or S

SEQ ID NO: 112281 - protein, 35 aa, Artificial Sequence; identical to SEQ ID NO: 11041
  Cyclic GFR-binding peptide
  MOD_RES (1)..(2)..(34): Xaa is C or S

SEQ ID NO: 112282 - protein, 20 aa, Artificial Sequence
  Cyclic GFR-binding peptide
SAISILYLVGRTPKVLKNYQ

SEQ ID NO: 112283 - protein, 31 aa, Artificial Sequence; identical to SEQ ID NO: 11044
  Cyclic GFR-binding peptide
  MOD_RES (29)..(31): Xaa is C or S

SEQ ID NO: 112284 - protein, 29 aa, Artificial Sequence
  Cyclic GFR-binding peptide
  MOD_RES (27)..(29): Xaa is C or S
NAISMLYFDEYDKVVLKKYREMVVEGXGX

SEQ ID NO: 112285 - protein, 27 aa, Artificial Sequence
  Cyclic GFR-binding peptide
TRLSAISILYLDSANNVVLKNYQDMVV

SEQ ID NO: 112286 - protein, 36 aa, Artificial Sequence; identical to SEQ ID NO: 11052
  Cyclic GFR-binding peptide
  MOD_RES (6)..(6): Xaa is C or S

SEQ ID NO: 112287 - protein, 28 aa, Artificial Sequence
  Cyclic GFR-binding peptide
  MOD_RES (28)..(28): Xaa is C or S
NAISVLYFDDMGVPTLKKYREGMSVAEX

SEQ ID NO: 112288 - protein, 35 aa, Artificial Sequence
  Cyclic GFR-binding peptide
  MOD_RES (6)..(7): Xaa is C or S
HVPKPXXAPTKLSAISVLYLDDSSNVILKNYQNMV

SEQ ID NO: 112289 - protein, 37 aa, Artificial Sequence; identical to SEQ ID NO: 40040
  Cyclic GFR-binding peptide
  MOD_RES (2)..(3)..(35)..(37): Xaa is C or S

SEQ ID NO: 112290 - protein, 31 aa, Artificial Sequence
  Cyclic GFR-binding peptide
  MOD_RES (5)..(6): Xaa is C or S
IPEPXXVPEKMSAISILYLDENKNVVLKNYQ

SEQ ID NO: 112291 - protein, 27 aa, Artificial Sequence
  Cyclic GFR-binding peptide
PTKMSAISMLYLNDKQQIILKNYQGMV

SEQ ID NO: 112292 - protein, 35 aa, Artificial Sequence; identical to SEQ ID NO: 11056
  Cyclic GFR-binding peptide
  MOD_RES (5)..(6): Xaa is C or S

SEQ ID NO: 112293 - protein, 33 aa, Artificial Sequence
  Cyclic GFR-binding peptide
  MOD_RES (4)..(5): Xaa is C or S
PSTXXAPVKTSAISMLYLDNGRVLLLKNYQMIV

SEQ ID NO: 112294 - protein, 27 aa, Artificial Sequence
  Cyclic GFR-binding peptide
  MOD_RES (1)..(1): Xaa is C or S
XVPTKLNAISVLYFDDMGVPTLKKYRE

SEQ ID NO: 112295 - protein, 28 aa, Artificial Sequence
  Cyclic GFR-binding peptide
  MOD_RES (1)..(2): Xaa is C or S
XXVPTKLNAISVLYFDDMGVPTLKKYRE

SEQ ID NO: 112296 - protein, 29 aa, Artificial Sequence
  Cyclic GFR-binding peptide
  MOD_RES (2)..(3): Xaa is C or S
PXXVSQDLSAISILYLIGKTPKILKNYQM

SEQ ID NO: 112297 - protein, 32 aa, Artificial Sequence; identical to SEQ ID NO: 11069
  Cyclic GFR-binding peptide
  MOD_RES (30)..(32): Xaa is C or S

SEQ ID NO: 112298 - protein, 33 aa, Artificial Sequence; identical to SEQ ID NO: 40053
  Cyclic GFR-binding peptide
  MOD_RES (32)..(32): Xaa is C or S

SEQ ID NO: 112299 - protein, 34 aa, Artificial Sequence; identical to SEQ ID NO: 11070
  Cyclic GFR-binding peptide
  MOD_RES (31)..(33): Xaa is C or S

SEQ ID NO: 112300 - protein, 29 aa, Artificial Sequence
  Cyclic GFR-binding peptide
PVKTNAISMLYFDNGRVLLLKKYRMIVEE

SEQ ID NO: 112301 - protein, 22 aa, Artificial Sequence
  Cyclic GFR-binding peptide
NAISILYFIGKTPKILKKYRMI

SEQ ID NO: 112302 - protein, 42 aa, Artificial Sequence
  Cyclic GFR-binding peptide
  MOD_RES (6)..(7)..(39)..(41): Xaa is C or S
HVPKPXXAPTKLSAISVLYLDDSSNVILKNYQNMVVRSXGXH

SEQ ID NO: 112303 - protein, 30 aa, Artificial Sequence; identical to SEQ ID NO: 11073
  Cyclic GFR-binding peptide
  MOD_RES (2)..(3): Xaa is C or S

SEQ ID NO: 112304 - protein, 35 aa, Artificial Sequence; identical to SEQ ID NO: 77919
  Cyclic GFR-binding peptide
  MOD_RES (5)..(6): Xaa is C or S

SEQ ID NO: 112305 - protein, 31 aa, Artificial Sequence; identical to SEQ ID NO: 40070
  Cyclic GFR-binding peptide
  MOD_RES (30)..(30): Xaa is C or S

SEQ ID NO: 112306 - protein, 36 aa, Artificial Sequence
  Cyclic GFR-binding peptide
  MOD_RES (2)..(3)..(35): Xaa is C or S
AXXVPTKLSAISILYLDKGVVTYLKNYQGMAVSEXG

SEQ ID NO: 112307 - protein, 23 aa, Artificial Sequence
  Cyclic GFR-binding peptide
LSAISVLYLDDSSNVILKNYQNM

SEQ ID NO: 112308 - protein, 33 aa, Artificial Sequence; identical to SEQ ID NO: 11078
  Cyclic GFR-binding peptide
  MOD_RES (30)..(32): Xaa is C or S

SEQ ID NO: 112309 - protein, 30 aa, Artificial Sequence; identical to SEQ ID NO: 11082
  Cyclic GFR-binding peptide
  MOD_RES (1)..(1): Xaa is C or S

SEQ ID NO: 112310 - protein, 23 aa, Artificial Sequence
  Cyclic GFR-binding peptide
ELNAISMLYFDEYDKVVLKKYRE

SEQ ID NO: 112311 - protein, 43 aa, Artificial Sequence; identical to SEQ ID NO: 11084
  Cyclic GFR-binding peptide
  MOD_RES (6)..(7)..(40)..(42): Xaa is C or S

SEQ ID NO: 112312 - protein, 30 aa, Artificial Sequence; identical to SEQ ID NO: 11085
  Cyclic GFR-binding peptide
  MOD_RES (28)..(30): Xaa is C or S

SEQ ID NO: 112313 - protein, 29 aa, Artificial Sequence
  Cyclic GFR-binding peptide
  MOD_RES (29)..(29): Xaa is C or S
KMNAISMLYFNDKQQIILKKYRGMVVDRX

SEQ ID NO: 112314 - protein, 31 aa, Artificial Sequence; identical to SEQ ID NO: 93079
  Cyclic GFR-binding peptide
  MOD_RES (28)..(30): Xaa is C or S

SEQ ID NO: 112315 - protein, 31 aa, Artificial Sequence; identical to SEQ ID NO: 11087
  Cyclic GFR-binding peptide
  MOD_RES (29)..(31): Xaa is C or S

SEQ ID NO: 112316 - protein, 32 aa, Artificial Sequence
  Cyclic GFR-binding peptide
  MOD_RES (2)..(3): Xaa is C or S
TXXAPVKTSAISMLYLDNGRVLLLKNYQMIVE

SEQ ID NO: 112317 - protein, 33 aa, Artificial Sequence; identical to SEQ ID NO: 11092
  Cyclic GFR-binding peptide
  MOD_RES (3)..(4): Xaa is C or S

SEQ ID NO: 112318 - protein, 22 aa, Artificial Sequence
  Cyclic GFR-binding peptide
SAISILYLDKGVVTYLKNYQGM

SEQ ID NO: 112319 - protein, 40 aa, Artificial Sequence
  Cyclic GFR-binding peptide
  MOD_RES (6)..(7)..(39): Xaa is C or S
AAPASXXVPARLSAISILYLDAANNVVLKNYQDMVVEAXG

SEQ ID NO: 112320 - protein, 33 aa, Artificial Sequence; identical to SEQ ID NO: 11097
  Cyclic GFR-binding peptide
  MOD_RES (4)..(5): Xaa is C or S

SEQ ID NO: 112321 - protein, 28 aa, Artificial Sequence
  Cyclic GFR-binding peptide
  MOD_RES (27)..(27): Xaa is C or S
NAISILYFDSANNVVLKKYRDMVVESXG

SEQ ID NO: 112322 - protein, 24 aa, Artificial Sequence
  Cyclic GFR-binding peptide
PVKTSAISMLYLDNGRVLLLKNYQ

SEQ ID NO: 112323 - protein, 32 aa, Artificial Sequence
  Cyclic GFR-binding peptide
  MOD_RES (4)..(5): Xaa is C or S
PASXXVPARLSAISILYLDAANNVVLKNYQDM

SEQ ID NO: 112324 - protein, 32 aa, Artificial Sequence; identical to SEQ ID NO: 11100
  Cyclic GFR-binding peptide
  MOD_RES (4)..(5): Xaa is C or S

SEQ ID NO: 112325 - protein, 37 aa, Artificial Sequence; identical to SEQ ID NO: 21178
  Cyclic GFR-binding peptide
  MOD_RES (6)..(7): Xaa is C or S

SEQ ID NO: 112326 - protein, 27 aa, Artificial Sequence
  Cyclic GFR-binding peptide
TKMSAISMLYLNDKQQIILKNYQGMVV

SEQ ID NO: 112327 - protein, 30 aa, Artificial Sequence; identical to SEQ ID NO: 11106
  Cyclic GFR-binding peptide
  MOD_RES (29)..(29): Xaa is C or S

SEQ ID NO: 112328 - protein, 24 aa, Artificial Sequence
  Cyclic GFR-binding peptide
ALNAISILYFVGRKPKVLKKYRMI

SEQ ID NO: 112329 - protein, 28 aa, Artificial Sequence
  Cyclic GFR-binding peptide
VPTELNAISMLYFDEYDKVVLKKYREMV

SEQ ID NO: 112330 - protein, 35 aa, Artificial Sequence; identical to SEQ ID NO: 21188
  Cyclic GFR-binding peptide
  MOD_RES (5)..(6): Xaa is C or S

SEQ ID NO: 112331 - protein, 27 aa, Artificial Sequence
  Cyclic GFR-binding peptide
  MOD_RES (26)..(26): Xaa is C or S
NAISMLYFDNGRVLLLKKYRMIVEEXG

SEQ ID NO: 112332 - protein, 36 aa, Artificial Sequence; identical to SEQ ID NO: 11116
  Cyclic GFR-binding peptide
  MOD_RES (4)..(5): Xaa is C or S

SEQ ID NO: 112333 - protein, 32 aa, Artificial Sequence; identical to SEQ ID NO: 11118
  Cyclic GFR-binding peptide
  MOD_RES (1)..(32): Xaa is C or S

SEQ ID NO: 112334 - protein, 27 aa, Artificial Sequence
  Cyclic GFR-binding peptide
  MOD_RES (27)..(27): Xaa is C or S
NAISMLYFNDKQQIILKKYRGMVVDRX

SEQ ID NO: 112335 - protein, 20 aa, Artificial Sequence
  Cyclic GFR-binding peptide
NAISILYFVGRTPKVLKKYR

SEQ ID NO: 112336 - protein, 36 aa, Artificial Sequence; identical to SEQ ID NO: 11125
  Cyclic GFR-binding peptide
  MOD_RES (4)..(5): Xaa is C or S

SEQ ID NO: 112337 - protein, 27 aa, Artificial Sequence
  Cyclic GFR-binding peptide
  MOD_RES (1)..(1): Xaa is C or S
XVPQALNAISILYFVGRKPKVLKKYRM

SEQ ID NO: 112338 - protein, 26 aa, Artificial Sequence
  Cyclic GFR-binding peptide
ALNAISILYFVGRKPKVLKKYRMIVR

SEQ ID NO: 112339 - protein, 38 aa, Artificial Sequence
  Cyclic GFR-binding peptide
  MOD_RES (4)..(5)..(37): Xaa is C or S
SKAXXVPTKLSAISILYLDKGVVTYLKNYQGMAVSEXG

SEQ ID NO: 112340 - protein, 41 aa, Artificial Sequence; identical to SEQ ID NO: 11132
  Cyclic GFR-binding peptide
  MOD_RES (5)..(6)..(38)..(40): Xaa is C or S

SEQ ID NO: 112341 - protein, 32 aa, Artificial Sequence; identical to SEQ ID NO: 11135
  Cyclic GFR-binding peptide
  MOD_RES (31)..(31): Xaa is C or S

SEQ ID NO: 112342 - protein, 28 aa, Artificial Sequence
  Cyclic GFR-binding peptide
  MOD_RES (2)..(3): Xaa is C or S
PXXAPTQLSAISVLYLDDSSNVILKNYQ

SEQ ID NO: 112343 - protein, 37 aa, Artificial Sequence; identical to SEQ ID NO: 21209
  Cyclic GFR-binding peptide
  MOD_RES (4)..(5)..(37): Xaa is C or S

SEQ ID NO: 112344 - protein, 28 aa, Artificial Sequence
  Cyclic GFR-binding peptide
  MOD_RES (2)..(3): Xaa is C or S
PXXVSQDLSAISILYLIGKTPKILKNYQ

SEQ ID NO: 112345 - protein, 29 aa, Artificial Sequence
  Cyclic GFR-binding peptide
APVKTNAISMLYFDNGRVLLLKKYRMIVE

SEQ ID NO: 112346 - protein, 37 aa, Artificial Sequence; identical to SEQ ID NO: 11142
  Cyclic GFR-binding peptide
  MOD_RES (1)..(2)..(34)..(36): Xaa is C or S

SEQ ID NO: 112347 - protein, 28 aa, Artificial Sequence
  Cyclic GFR-binding peptide
PVKTNAISMLYFDNGRVLLLKKYRMIVE

SEQ ID NO: 112348 - protein, 32 aa, Artificial Sequence
  Cyclic GFR-binding peptide
  MOD_RES (2)..(3): Xaa is C or S
SXXVPARLSAISILYLDAANNVVLKNYQDMVV

SEQ ID NO: 112349 - protein, 35 aa, Artificial Sequence
  Cyclic GFR-binding peptide
  MOD_RES (1)..(32)..(34): Xaa is C or S
XAPVKTSAISMLYLDNGRVLLLKNYQMIVEEXGXL

SEQ ID NO: 112350 - protein, 26 aa, Artificial Sequence
  Cyclic GFR-binding peptide
APTKLSAISVLYLDSSNNVILKNYQN

SEQ ID NO: 112351 - protein, 33 aa, Artificial Sequence; identical to SEQ ID NO: 40139
  Cyclic GFR-binding peptide
  MOD_RES (1)..(2): Xaa is C or S

SEQ ID NO: 112352 - protein, 37 aa, Artificial Sequence; identical to SEQ ID NO: 93140
  Cyclic GFR-binding peptide
  MOD_RES (2)..(3)..(35)..(37): Xaa is C or S

SEQ ID NO: 112353 - protein, 36 aa, Artificial Sequence; identical to SEQ ID NO: 11148
  Cyclic GFR-binding peptide
  MOD_RES (3)..(4)..(36): Xaa is C or S

SEQ ID NO: 112354 - protein, 31 aa, Artificial Sequence; identical to SEQ ID NO: 11149
  Cyclic GFR-binding peptide
  MOD_RES (5)..(6): Xaa is C or S

SEQ ID NO: 112355 - protein, 34 aa, Artificial Sequence; identical to SEQ ID NO: 11151
  Cyclic GFR-binding peptide
  MOD_RES (4)..(5): Xaa is C or S

SEQ ID NO: 112356 - protein, 24 aa, Artificial Sequence
  Cyclic GFR-binding peptide
KMSAISILYLDENKNVVLKNYQNM

SEQ ID NO: 112357 - protein, 26 aa, Artificial Sequence
  Cyclic GFR-binding peptide
TKLNAISVLYFDSSNNVILKKYRNMV

SEQ ID NO: 112358 - protein, 25 aa, Artificial Sequence
  Cyclic GFR-binding peptide
APVKTNAISMLYFDNGRVLLLKKYR

SEQ ID NO: 112359 - protein, 39 aa, Artificial Sequence; identical to SEQ ID NO: 11154
  Cyclic GFR-binding peptide
  MOD_RES (4)..(5)..(37)..(39): Xaa is C or S

SEQ ID NO: 112360 - protein, 27 aa, Artificial Sequence
  Cyclic GFR-binding peptide
TKLSAISILYLDKGVVTYLKNYQGMAV

SEQ ID NO: 112361 - protein, 21 aa, Artificial Sequence
  Cyclic GFR-binding peptide
LSAISILYLDAANNVVLKNYQ

SEQ ID NO: 112362 - protein, 27 aa, Artificial Sequence
  Cyclic GFR-binding peptide
  MOD_RES (27)..(27): Xaa is C or S
SAISILYLDSANNVVLKNYQDMVVESX

SEQ ID NO: 112363 - protein, 35 aa, Artificial Sequence; identical to SEQ ID NO: 11159
  Cyclic GFR-binding peptide
  MOD_RES (4)..(5): Xaa is C or S

SEQ ID NO: 112364 - protein, 37 aa, Artificial Sequence; identical to SEQ ID NO: 11165
  Cyclic GFR-binding peptide
  MOD_RES (6)..(7): Xaa is C or S

SEQ ID NO: 112365 - protein, 33 aa, Artificial Sequence; identical to SEQ ID NO: 21237
  Cyclic GFR-binding peptide
  MOD_RES (6)..(7): Xaa is C or S

SEQ ID NO: 112366 - protein, 31 aa, Artificial Sequence; identical to SEQ ID NO: 11168
  Cyclic GFR-binding peptide
  MOD_RES (5)..(6): Xaa is C or S

SEQ ID NO: 112367 - protein, 21 aa, Artificial Sequence
  Cyclic GFR-binding peptide
LSAISILYLVGRTPKVLKNYQ

SEQ ID NO: 112368 - protein, 35 aa, Artificial Sequence
  Cyclic GFR-binding peptide
  MOD_RES (4)..(5): Xaa is C or S
SKAXXVPTKLSAISILYLDKGVVTYLKNYQGMAVS

SEQ ID NO: 112369 - protein, 30 aa, Artificial Sequence; identical to SEQ ID NO: 93159
  Cyclic GFR-binding peptide
  MOD_RES (1)..(2): Xaa is C or S

SEQ ID NO: 112370 - protein, 30 aa, Artificial Sequence
  Cyclic GFR-binding peptide
APVKTSAISMLYLDNGRVLLLKNYQMIVEE

SEQ ID NO: 112371 - protein, 36 aa, Artificial Sequence; identical to SEQ ID NO: 11174
  Cyclic GFR-binding peptide
  MOD_RES (5)..(6): Xaa is C or S

SEQ ID NO: 112372 - protein, 34 aa, Artificial Sequence; identical to SEQ ID NO: 11177
  Cyclic GFR-binding peptide
  MOD_RES (1)..(2)..(33): Xaa is C or S

SEQ ID NO: 112373 - protein, 24 aa, Artificial Sequence
  Cyclic GFR-binding peptide
TKLNAISVLYFDSSNNVILKKYRN

SEQ ID NO: 112374 - protein, 40 aa, Artificial Sequence; identical to SEQ ID NO: 11179
  Cyclic GFR-binding peptide
  MOD_RES (5)..(37)..(39): Xaa is C or S

SEQ ID NO: 112375 - protein, 30 aa, Artificial Sequence; identical to SEQ ID NO: 21257
  Cyclic GFR-binding peptide
  MOD_RES (3)..(4): Xaa is C or S

SEQ ID NO: 112376 - protein, 41 aa, Artificial Sequence
  Cyclic GFR-binding peptide
  MOD_RES (6)..(7)..(39)..(41): Xaa is C or S
KASKAXXVPTKLSAISILYLDKGVVTYLKNYQGMAVSEXGX

SEQ ID NO: 112377 - protein, 36 aa, Artificial Sequence
  Cyclic GFR-binding peptide
  MOD_RES (5)..(6): Xaa is C or S
IPEPXXVPEKMSAISILYLDENKNVVLKNYQNMTVE

SEQ ID NO: 112378 - protein, 26 aa, Artificial Sequence
  Cyclic GFR-binding peptide
PQALSAISILYLVGRKPKVLKNYQMI

SEQ ID NO: 112379 - protein, 31 aa, Artificial Sequence; identical to SEQ ID NO: 11186
  Cyclic GFR-binding peptide
  MOD_RES (31)..(31): Xaa is C or S

SEQ ID NO: 112380 - protein, 28 aa, Artificial Sequence
  Cyclic GFR-binding peptide
  MOD_RES (27)..(27): Xaa is C or S
SAISILYLDENKNVVLKNYQNMTVESXA

SEQ ID NO: 112381 - protein, 37 aa, Artificial Sequence; identical to SEQ ID NO: 11187
  Cyclic GFR-binding peptide
  MOD_RES (6)..(7): Xaa is C or S

SEQ ID NO: 112382 - protein, 24 aa, Artificial Sequence
  Cyclic GFR-binding peptide
NAISILYFVGRTPKVLKKYRMVVK

SEQ ID NO: 112383 - protein, 22 aa, Artificial Sequence
  Cyclic GFR-binding peptide
KLSAISVLYLDDSSNVILKNYQ

SEQ ID NO: 112384 - protein, 36 aa, Artificial Sequence
  Cyclic GFR-binding peptide
  MOD_RES (1)..(2)..(34)..(36): Xaa is C or S
XXVPTKLSAISILYLDKGVVTYLKNYQGMAVSEXGX

SEQ ID NO: 112385 - protein, 28 aa, Artificial Sequence
  Cyclic GFR-binding peptide
  MOD_RES (3)..(3): Xaa is C or S
PTXAPTKLSAISVLYLDDSSNVILKNYQ

SEQ ID NO: 112386 - protein, 42 aa, Artificial Sequence; identical to SEQ ID NO: 11193
  Cyclic GFR-binding peptide
  MOD_RES (6)..(7)..(40)..(42): Xaa is C or S

SEQ ID NO: 112387 - protein, 22 aa, Artificial Sequence
  Cyclic GFR-binding peptide
MSAISILYLDENKNVVLKNYQN

SEQ ID NO: 112388 - protein, 22 aa, Artificial Sequence
  Cyclic GFR-binding peptide
KLSAISVLYLDDMGVPTLKNYQ

SEQ ID NO: 112389 - protein, 34 aa, Artificial Sequence
  Cyclic GFR-binding peptide
  MOD_RES (4)..(5): Xaa is C or S
PASXXVPARLSAISILYLDAANNVVLKNYQDMVV

SEQ ID NO: 112390 - protein, 34 aa, Artificial Sequence
  Cyclic GFR-binding peptide
  MOD_RES (6)..(7): Xaa is C or S
AAPASXXVPARLSAISILYLDAANNVVLKNYQDM

SEQ ID NO: 112391 - protein, 28 aa, Artificial Sequence
  Cyclic GFR-binding peptide
VPTRLNAISILYFDSANNVVLKKYRDMV

SEQ ID NO: 112392 - protein, 27 aa, Artificial Sequence
  Cyclic GFR-binding peptide
RLNAISILYFDSANNVVLKKYRDMVVE

SEQ ID NO: 112393 - protein, 26 aa, Artificial Sequence
  Cyclic GFR-binding peptide
  MOD_RES (1)..(1): Xaa is C or S
XAPTKLSAISVLYLDDSSNVILKNYQ

SEQ ID NO: 112394 - protein, 31 aa, Artificial Sequence; identical to SEQ ID NO: 77970
  Cyclic GFR-binding peptide
  MOD_RES (28)..(30): Xaa is C or S

SEQ ID NO: 112395 - protein, 30 aa, Artificial Sequence; identical to SEQ ID NO: 11201
  Cyclic GFR-binding peptide
  MOD_RES (27)..(29): Xaa is C or S

SEQ ID NO: 112396 - protein, 29 aa, Artificial Sequence
  Cyclic GFR-binding peptide
  MOD_RES (1)..(1): Xaa is C or S
XVPTKLSAISILYLDKGVVTYLKNYQGMA

SEQ ID NO: 112397 - protein, 35 aa, Artificial Sequence; identical to SEQ ID NO: 11202
  Cyclic GFR-binding peptide
  MOD_RES (5)..(6): Xaa is C or S

SEQ ID NO: 112398 - protein, 30 aa, Artificial Sequence; identical to SEQ ID NO: 11203
  Cyclic GFR-binding peptide

SEQ ID NO: 112399 - protein, 27 aa, Artificial Sequence
  Cyclic GFR-binding peptide
  MOD_RES (1)..(2): Xaa is C or S
XXAPTKLSAISVLYLDDSSNVILKNYQ

SEQ ID NO: 112400 - protein, 37 aa, Artificial Sequence; identical to SEQ ID NO: 21279
  Cyclic GFR-binding peptide
  MOD_RES (5)..(6): Xaa is C or S

SEQ ID NO: 112401 - protein, 42 aa, Artificial Sequence; identical to SEQ ID NO: 11205
  Cyclic GFR-binding peptide
  MOD_RES (5)..(6)..(39)..(41): Xaa is C or S

SEQ ID NO: 112402 - protein, 20 aa, Artificial Sequence
  Cyclic GFR-binding peptide
NAISILYFDAANNVVLKKYR

SEQ ID NO: 112403 - protein, 25 aa, Artificial Sequence
  Cyclic GFR-binding peptide
RLSAISILYLDSANNVVLKNYQDMV

SEQ ID NO: 112404 - protein, 24 aa, Artificial Sequence
  Cyclic GFR-binding peptide
RLSAISILYLDAANNVVLKNYQDM

SEQ ID NO: 112405 - protein, 38 aa, Artificial Sequence; identical to SEQ ID NO: 40213
  Cyclic GFR-binding peptide
  MOD_RES (2)..(3)..(35)..(37): Xaa is C or S

SEQ ID NO: 112406 - protein, 29 aa, Artificial Sequence
  Cyclic GFR-binding peptide
PVKTSAISMLYLDNGRVLLLKNYQMIVEE

SEQ ID NO: 112407 - protein, 26 aa, Artificial Sequence
  Cyclic GFR-binding peptide
PQALNAISILYFVGRKPKVLKKYRMI

SEQ ID NO: 112408 - protein, 34 aa, Artificial Sequence; identical to SEQ ID NO: 11209
  Cyclic GFR-binding peptide
  MOD_RES (3)..(4): Xaa is C or S

SEQ ID NO: 112409 - protein, 40 aa, Artificial Sequence
  Cyclic GFR-binding peptide
  MOD_RES (4)..(5)..(37)..(39): Xaa is C or S
SKAXXVPTKLSAISILYLDKGVVTYLKNYQGMAVSEXGXR

SEQ ID NO: 112410 - protein, 25 aa, Artificial Sequence
  Cyclic GFR-binding peptide
LNAISVLYFDDMGVPTLKKYREGMS

SEQ ID NO: 112411 - protein, 29 aa, Artificial Sequence
  Cyclic GFR-binding peptide
  MOD_RES (1)..(1): Xaa is C or S
XVPTELNAISMLYFDENEKVVLKKYRDMV

SEQ ID NO: 112412 - protein, 38 aa, Artificial Sequence
  Cyclic GFR-binding peptide
  MOD_RES (6)..(7): Xaa is C or S
GIPEPXXVPEKMSAISILYLDENKNVVLKNYQNMTVES

SEQ ID NO: 112413 - protein, 33 aa, Artificial Sequence; identical to SEQ ID NO: 11216
  Cyclic GFR-binding peptide
  MOD_RES (31)..(33): Xaa is C or S

SEQ ID NO: 112414 - protein, 31 aa, Artificial Sequence; identical to SEQ ID NO: 77981
  Cyclic GFR-binding peptide
  MOD_RES (4)..(5): Xaa is C or S

SEQ ID NO: 112415 - protein, 33 aa, Artificial Sequence; identical to SEQ ID NO: 11219
  Cyclic GFR-binding peptide
  MOD_RES (6)..(7): Xaa is C or S

SEQ ID NO: 112416 - protein, 23 aa, Artificial Sequence
  Cyclic GFR-binding peptide
LSAISILYLVGRKPKVLKNYQMI

SEQ ID NO: 112417 - protein, 28 aa, Artificial Sequence
  Cyclic GFR-binding peptide
  MOD_RES (27)..(27): Xaa is C or S
TSAISMLYLDNGRVLLLKNYQMIVEEXG

SEQ ID NO: 112418 - protein, 23 aa, Artificial Sequence
  Cyclic GFR-binding peptide
EKMSAISILYLDENKNVVLKNYQ

SEQ ID NO: 112419 - protein, 31 aa, Artificial Sequence
  Cyclic GFR-binding peptide
  MOD_RES (1)..(2): Xaa is C or S
XXVPTKLSAISILYLDKGVVTYLKNYQGMAV

SEQ ID NO: 112420 - protein, 35 aa, Artificial Sequence; identical to SEQ ID NO: 11224
  Cyclic GFR-binding peptide
  MOD_RES (4)..(5): Xaa is C or S

SEQ ID NO: 112421 - protein, 36 aa, Artificial Sequence; identical to SEQ ID NO: 93209
  Cyclic GFR-binding peptide
  MOD_RES (6)..(7): Xaa is C or S

SEQ ID NO: 112422 - protein, 30 aa, Artificial Sequence; identical to SEQ ID NO: 77986
  Cyclic GFR-binding peptide
  MOD_RES (29)..(29): Xaa is C or S

SEQ ID NO: 112423 - protein, 26 aa, Artificial Sequence
  Cyclic GFR-binding peptide
VKTNAISMLYFDNGRVLLLKKYRMIV

SEQ ID NO: 112424 - protein, 28 aa, Artificial Sequence
  Cyclic GFR-binding peptide
  MOD_RES (28)..(28): Xaa is C or S
LNAISILYFDSANNVVLKKYRDMVVESX

SEQ ID NO: 112425 - protein, 28 aa, Artificial Sequence
  Cyclic GFR-binding peptide
  MOD_RES (2)..(3): Xaa is C or S
PXXVPEKMSAISILYLDENKNVVLKNYQ

SEQ ID NO: 112426 - protein, 34 aa, Artificial Sequence; identical to SEQ ID NO: 11231
  Cyclic GFR-binding peptide
  MOD_RES (2)..(3): Xaa is C or S

SEQ ID NO: 112427 - protein, 33 aa, Artificial Sequence; identical to SEQ ID NO: 40239
  Cyclic GFR-binding peptide
  MOD_RES (2)..(3): Xaa is C or S

SEQ ID NO: 112428 - protein, 28 aa, Artificial Sequence
  Cyclic GFR-binding peptide
TKLNAISILYFDKGVVTYLKKYRGMAVS

SEQ ID NO: 112429 - protein, 22 aa, Artificial Sequence
  Cyclic GFR-binding peptide
SAISILYLIGKTPKILKNYQMI

SEQ ID NO: 112430 - protein, 37 aa, Artificial Sequence; identical to SEQ ID NO: 11236
  Cyclic GFR-binding peptide
  MOD_RES (4)..(5)..(37): Xaa is C or S

SEQ ID NO: 112431 - protein, 26 aa, Artificial Sequence
  Cyclic GFR-binding peptide
EKMNAISILYFDENKNVVLKKYRNMT

SEQ ID NO: 112432 - protein, 32 aa, Artificial Sequence; identical to SEQ ID NO: 11239
  Cyclic GFR-binding peptide
  MOD_RES (5)..(6): Xaa is C or S

SEQ ID NO: 112433 - protein, 32 aa, Artificial Sequence; identical to SEQ ID NO: 11244
  Cyclic GFR-binding peptide
  MOD_RES (5)..(6): Xaa is C or S

SEQ ID NO: 112434 - protein, 28 aa, Artificial Sequence
  Cyclic GFR-binding peptide
  MOD_RES (28)..(28): Xaa is C or S
MSAISMLYLNDKQQIILKNYQGMVVDRX

SEQ ID NO: 112435 - protein, 26 aa, Artificial Sequence
  Cyclic GFR-binding peptide
QDLNAISILYFIGKTPKILKKYRMIV

SEQ ID NO: 112436 - protein, 31 aa, Artificial Sequence; identical to SEQ ID NO: 11249
  Cyclic GFR-binding peptide
  MOD_RES (30)..(30): Xaa is C or S

SEQ ID NO: 112437 - protein, 31 aa, Artificial Sequence; identical to SEQ ID NO: 11251
  Cyclic GFR-binding peptide
  MOD_RES (4)..(5): Xaa is C or S

SEQ ID NO: 112438 - protein, 30 aa, Artificial Sequence; identical to SEQ ID NO: 11252
  Cyclic GFR-binding peptide

SEQ ID NO: 112439 - protein, 29 aa, Artificial Sequence
  Cyclic GFR-binding peptide
  MOD_RES (29)..(29): Xaa is C or S
QALSAISILYLVGRKPKVLKNYQMIVRSX

SEQ ID NO: 112440 - protein, 40 aa, Artificial Sequence; identical to SEQ ID NO: 11254
  Cyclic GFR-binding peptide
  MOD_RES (6)..(7)..(39): Xaa is C or S

SEQ ID NO: 112441 - protein, 25 aa, Artificial Sequence
  Cyclic GFR-binding peptide
VPTKLNAISILYFDKGVVTYLKKYR

SEQ ID NO: 112442 - protein, 29 aa, Artificial Sequence
  Cyclic GFR-binding peptide
  MOD_RES (27)..(29): Xaa is C or S
NAISMLYFDENEKVVLKKYRDMVVEGXGX

SEQ ID NO: 112443 - protein, 37 aa, Artificial Sequence; identical to SEQ ID NO: 11259
  Cyclic GFR-binding peptide
  MOD_RES (3)..(4)..(35)..(37): Xaa is C or S

SEQ ID NO: 112444 - protein, 37 aa, Artificial Sequence; identical to SEQ ID NO: 11262
  Cyclic GFR-binding peptide
  MOD_RES (4)..(5)..(37): Xaa is C or S

SEQ ID NO: 112445 - protein, 37 aa, Artificial Sequence
  Cyclic GFR-binding peptide
  MOD_RES (2)..(3)..(35)..(37): Xaa is C or S
AXXVPTKLSAISILYLDKGVVTYLKNYQGMAVSEXGX

SEQ ID NO: 112446 - protein, 28 aa, Artificial Sequence
  Cyclic GFR-binding peptide
  MOD_RES (28)..(28): Xaa is C or S
LSAISILYLDAANNVVLKNYQDMVVEAX

SEQ ID NO: 112447 - protein, 20 aa, Artificial Sequence
  Cyclic GFR-binding peptide
NAISMLYFDEYDKVVLKKYR

SEQ ID NO: 112448 - protein, 32 aa, Artificial Sequence; identical to SEQ ID NO: 40273
  Cyclic GFR-binding peptide
  MOD_RES (3)..(4): Xaa is C or S

SEQ ID NO: 112449 - protein, 34 aa, Artificial Sequence
  Cyclic GFR-binding peptide
  MOD_RES (5)..(6): Xaa is C or S
ASKAXXVPTKLSAISILYLDKGVVTYLKNYQGMA

SEQ ID NO: 112450 - protein, 28 aa, Artificial Sequence
  Cyclic GFR-binding peptide
  MOD_RES (2)..(3): Xaa is C or S
PXXVPEKMNAISILYFDENKNVVLKKYR

SEQ ID NO: 112451 - protein, 30 aa, Artificial Sequence; identical to SEQ ID NO: 11270
  Cyclic GFR-binding peptide

SEQ ID NO: 112452 - protein, 29 aa, Artificial Sequence
  Cyclic GFR-binding peptide
  MOD_RES (27)..(29): Xaa is C or S
SAISVLYLDDSSNVILKNYQNMVVRAXGX

SEQ ID NO: 112453 - protein, 30 aa, Artificial Sequence; identical to SEQ ID NO: 11272
  Cyclic GFR-binding peptide
  MOD_RES (28)..(30): Xaa is C or S

SEQ ID NO: 112454 - protein, 31 aa, Artificial Sequence; identical to SEQ ID NO: 40280
  Cyclic GFR-binding peptide
  MOD_RES (30)..(30): Xaa is C or S

SEQ ID NO: 112455 - protein, 24 aa, Artificial Sequence
  Cyclic GFR-binding peptide
QDLSAISILYLVGRTPKVLKNYQM

SEQ ID NO: 112456 - protein, 32 aa, Artificial Sequence; identical to SEQ ID NO: 21337
  Cyclic GFR-binding peptide
  MOD_RES (3)..(4): Xaa is C or S

SEQ ID NO: 112457 - protein, 40 aa, Artificial Sequence; identical to SEQ ID NO: 11279
  Cyclic GFR-binding peptide
  MOD_RES (6)..(7)..(39): Xaa is C or S

SEQ ID NO: 112458 - protein, 36 aa, Artificial Sequence; identical to SEQ ID NO: 11280
  Cyclic GFR-binding peptide
  MOD_RES (1)..(34)..(36): Xaa is C or S

SEQ ID NO: 112459 - protein, 40 aa, Artificial Sequence; identical to SEQ ID NO: 40285
  Cyclic GFR-binding peptide
  MOD_RES (4)..(5)..(37)..(39): Xaa is C or S

SEQ ID NO: 112460 - protein, 21 aa, Artificial Sequence
  Cyclic GFR-binding peptide
SAISILYLDAANNVVLKNYQD

SEQ ID NO: 112461 - protein, 32 aa, Artificial Sequence; identical to SEQ ID NO: 11282
  Cyclic GFR-binding peptide
  MOD_RES (4)..(5): Xaa is C or S

SEQ ID NO: 112462 - protein, 35 aa, Artificial Sequence; identical to SEQ ID NO: 11283
  Cyclic GFR-binding peptide
  MOD_RES (1)..(2)..(34): Xaa is C or S

SEQ ID NO: 112463 - protein, 31 aa, Artificial Sequence; identical to SEQ ID NO: 21341
  Cyclic GFR-binding peptide
  MOD_RES (31)..(31): Xaa is C or S

SEQ ID NO: 112464 - protein, 39 aa, Artificial Sequence; identical to SEQ ID NO: 11285
  Cyclic GFR-binding peptide
  MOD_RES (3)..(4)..(36)..(38): Xaa is C or S

SEQ ID NO: 112465 - protein, 23 aa, Artificial Sequence
  Cyclic GFR-binding peptide
QDLNAISILYFIGKTPKILKKYR

SEQ ID NO: 112466 - protein, 31 aa, Artificial Sequence; identical to SEQ ID NO: 11287
  Cyclic GFR-binding peptide
  MOD_RES (28)..(30): Xaa is C or S

SEQ ID NO: 112467 - protein, 31 aa, Artificial Sequence; identical to SEQ ID NO: 78014
  Cyclic GFR-binding peptide
  MOD_RES (1)..(2): Xaa is C or S

SEQ ID NO: 112468 - protein, 35 aa, Artificial Sequence
  Cyclic GFR-binding peptide
  MOD_RES (1)..(33)..(35): Xaa is C or S
XTPTKMSAISMLYLNDKQQIILKNYQGMVVDRXGX

SEQ ID NO: 112469 - protein, 28 aa, Artificial Sequence
  Cyclic GFR-binding peptide
PEKMSAISILYLDENKNVVLKNYQNMTV

SEQ ID NO: 112470 - protein, 26 aa, Artificial Sequence
  Cyclic GFR-binding peptide
PTKLSAISVLYLDDSSNVILKNYQNM

SEQ ID NO: 112471 - protein, 26 aa, Artificial Sequence
  Cyclic GFR-binding peptide
TKLSAISVLYLDDMGVPTLKNYQEGM

SEQ ID NO: 112472 - protein, 33 aa, Artificial Sequence; identical to SEQ ID NO: 78015
  Cyclic GFR-binding peptide
  MOD_RES (1)..(2)..(33): Xaa is C or S

SEQ ID NO: 112473 - protein, 32 aa, Artificial Sequence; identical to SEQ ID NO: 11293
  Cyclic GFR-binding peptide
  MOD_RES (1)..(1): Xaa is C or S

SEQ ID NO: 112474 - protein, 34 aa, Artificial Sequence; identical to SEQ ID NO: 40299
  Cyclic GFR-binding peptide
  MOD_RES (32)..(34): Xaa is C or S

SEQ ID NO: 112475 - protein, 31 aa, Artificial Sequence; identical to SEQ ID NO: 93277
  Cyclic GFR-binding peptide
  MOD_RES (5)..(6): Xaa is C or S

SEQ ID NO: 112476 - protein, 29 aa, Artificial Sequence
  Cyclic GFR-binding peptide
PARLNAISILYFDAANNVVLKKYRDMVVE

SEQ ID NO: 112477 - protein, 32 aa, Artificial Sequence; identical to SEQ ID NO: 93279
  Cyclic GFR-binding peptide
  MOD_RES (1)..(2): Xaa is C or S

SEQ ID NO: 112478 - protein, 28 aa, Artificial Sequence
  Cyclic GFR-binding peptide
  MOD_RES (1)..(2): Xaa is C or S
XXVPQALNAISILYFVGRKPKVLKKYRM

SEQ ID NO: 112479 - protein, 30 aa, Artificial Sequence; identical to SEQ ID NO: 11297
  Cyclic GFR-binding peptide
  MOD_RES (3)..(4): Xaa is C or S

SEQ ID NO: 112480 - protein, 30 aa, Artificial Sequence; identical to SEQ ID NO: 78023
  Cyclic GFR-binding peptide
  MOD_RES (1)..(2): Xaa is C or S

SEQ ID NO: 112481 - protein, 22 aa, Artificial Sequence
  Cyclic GFR-binding peptide
NAISMLYFDENEKVVLKKYRDM

SEQ ID NO: 112482 - protein, 37 aa, Artificial Sequence; identical to SEQ ID NO: 11302
  Cyclic GFR-binding peptide
  MOD_RES (3)..(4)..(35)..(37): Xaa is C or S

SEQ ID NO: 112483 - protein, 32 aa, Artificial Sequence; identical to SEQ ID NO: 78026
  Cyclic GFR-binding peptide
  MOD_RES (6)..(7): Xaa is C or S

SEQ ID NO: 112484 - protein, 26 aa, Artificial Sequence
  Cyclic GFR-binding peptide
  MOD_RES (26)..(26): Xaa is C or S
NAISMLYFDNGRVLLLKKYRMIVEEX

SEQ ID NO: 112485 - protein, 29 aa, Artificial Sequence
  Cyclic GFR-binding peptide
  MOD_RES (2)..(3): Xaa is C or S
AXXVPTELNAISMLYFDEYDKVVLKKYRE

SEQ ID NO: 112486 - protein, 31 aa, Artificial Sequence
  Cyclic GFR-binding peptide
  MOD_RES (31)..(31): Xaa is C or S
PTKLSAISILYLDKGVVTYLKNYQGMAVSEX

SEQ ID NO: 112487 - protein, 30 aa, Artificial Sequence; identical to SEQ ID NO: 11311
  Cyclic GFR-binding peptide
  MOD_RES (4)..(5): Xaa is C or S

SEQ ID NO: 112488 - protein, 35 aa, Artificial Sequence; identical to SEQ ID NO: 11312
  Cyclic GFR-binding peptide
  MOD_RES (1)..(32)..(34): Xaa is C or S

SEQ ID NO: 112489 - protein, 28 aa, Artificial Sequence
  Cyclic GFR-binding peptide
ELNAISMLYFDENEKVVLKKYRDMVVEG

SEQ ID NO: 112490 - protein, 33 aa, Artificial Sequence; identical to SEQ ID NO: 11316
  Cyclic GFR-binding peptide
  MOD_RES (2)..(3): Xaa is C or S

SEQ ID NO: 112491 - protein, 20 aa, Artificial Sequence
  Cyclic GFR-binding peptide
SAISILYLDAANNVVLKNYQ

SEQ ID NO: 112492 - protein, 34 aa, Artificial Sequence; identical to SEQ ID NO: 11318
  Cyclic GFR-binding peptide
  MOD_RES (4)..(5): Xaa is C or S

SEQ ID NO: 112493 - protein, 28 aa, Artificial Sequence
  Cyclic GFR-binding peptide
PARLNAISILYFDAANNVVLKKYRDMVV

SEQ ID NO: 112494 - protein, 33 aa, Artificial Sequence; identical to SEQ ID NO: 11320
  Cyclic GFR-binding peptide
  MOD_RES (1)..(32): Xaa is C or S

SEQ ID NO: 112495 - protein, 31 aa, Artificial Sequence; identical to SEQ ID NO: 11321
  Cyclic GFR-binding peptide
  MOD_RES (4)..(5): Xaa is C or S

SEQ ID NO: 112496 - protein, 25 aa, Artificial Sequence
  Cyclic GFR-binding peptide
EKMNAISILYFDENKNVVLKKYRNM

SEQ ID NO: 112497 - protein, 39 aa, Artificial Sequence; identical to SEQ ID NO: 66941
  Cyclic GFR-binding peptide
  MOD_RES (2)..(33)..(34): Xaa is C or S

SEQ ID NO: 112498 - protein, 27 aa, Artificial Sequence
  Cyclic GFR-binding peptide
  MOD_RES (26)..(27): Xaa is C or S
VTAKKVKPKRGVIKRIQVPRLAQPVXX

SEQ ID NO: 112499 - protein, 29 aa, Artificial Sequence
  Cyclic GFR-binding peptide
HEELRVTAKKLKPKKRVYEIKRVQVPRHH

SEQ ID NO: 112500 - protein, 27 aa, Artificial Sequence
  Cyclic GFR-binding peptide
  MOD_RES (26)..(27): Xaa is C or S
VTAKKIKPTKGIIKRIQVPRLDQSVXX

SEQ ID NO: 112501 - protein, 23 aa, Artificial Sequence
  Cyclic GFR-binding peptide
RVTAKKLKPKKRVYEIKRVQVPR

SEQ ID NO: 112502 - protein, 30 aa, Artificial Sequence; identical to SEQ ID NO: 66944
  Cyclic GFR-binding peptide
  MOD_RES (2)..(4): Xaa is C or S

SEQ ID NO: 112503 - protein, 34 aa, Artificial Sequence; identical to SEQ ID NO: 65248
  Cyclic GFR-binding peptide
  MOD_RES (1)..(3)..(34): Xaa is C or S

SEQ ID NO: 112504 - protein, 24 aa, Artificial Sequence
  Cyclic GFR-binding peptide
VTAKKVKPTRGVIKRIQVPRLDQP

SEQ ID NO: 112505 - protein, 31 aa, Artificial Sequence; identical to SEQ ID NO: 61826
  Cyclic GFR-binding peptide
  MOD_RES (2)..(4): Xaa is C or S

SEQ ID NO: 112506 - protein, 26 aa, Artificial Sequence
  Cyclic GFR-binding peptide
LFVQVEKHQGQHPKIRVKAMKVSREE

SEQ ID NO: 112507 - protein, 36 aa, Artificial Sequence; identical to SEQ ID NO: 21381
  Cyclic GFR-binding peptide
  MOD_RES (30)..(30): Xaa is C or S

SEQ ID NO: 112508 - protein, 26 aa, Artificial Sequence
  Cyclic GFR-binding peptide
VMVQVEKVKPTRGVVKAIKVSRLDQP

SEQ ID NO: 112509 - protein, 26 aa, Artificial Sequence
  Cyclic GFR-binding peptide
IMVTAKKVKPKRGVIKRIQVPRLAQP

SEQ ID NO: 112510 - protein, 30 aa, Artificial Sequence; identical to SEQ ID NO: 21382
  Cyclic GFR-binding peptide

SEQ ID NO: 112511 - protein, 36 aa, Artificial Sequence; identical to SEQ ID NO: 65260
  Cyclic GFR-binding peptide
  MOD_RES (2)..(33)..(34): Xaa is C or S

SEQ ID NO: 112512 - protein, 32 aa, Artificial Sequence; identical to SEQ ID NO: 21383
  Cyclic GFR-binding peptide

SEQ ID NO: 112513 - protein, 24 aa, Artificial Sequence
  Cyclic GFR-binding peptide
VMVQVEKVKPTRGVVKAIKVSRLD

SEQ ID NO: 112514 - protein, 42 aa, Artificial Sequence; identical to SEQ ID NO: 21385
  Cyclic GFR-binding peptide
  MOD_RES (1)..(38): Xaa is C or S

SEQ ID NO: 112515 - protein, 27 aa, Artificial Sequence
  Cyclic GFR-binding peptide
LVTAKKHQGQHPKIRIKRMQVPRQGTP

SEQ ID NO: 112516 - protein, 23 aa, Artificial Sequence
  Cyclic GFR-binding peptide
VVMVTAKKVKPTRGVIKRIQVPR

SEQ ID NO: 112517 - protein, 31 aa, Artificial Sequence; identical to SEQ ID NO: 21391
  Cyclic GFR-binding peptide
  MOD_RES (31)..(31): Xaa is C or S

SEQ ID NO: 112518 - protein, 31 aa, Artificial Sequence; identical to SEQ ID NO: 21392
  Cyclic GFR-binding peptide
  MOD_RES (30)..(30): Xaa is C or S

SEQ ID NO: 112519 - protein, 26 aa, Artificial Sequence
  Cyclic GFR-binding peptide
VQVEKFIPKKRVIEVKAVKVSRLQVQ

SEQ ID NO: 112520 - protein, 30 aa, Artificial Sequence; identical to SEQ ID NO: 61843
  Cyclic GFR-binding peptide

SEQ ID NO: 112521 - protein, 27 aa, Artificial Sequence
  Cyclic GFR-binding peptide
IMVTAKKVKPKRGVIKRIQVPRLAQPV

SEQ ID NO: 112522 - protein, 33 aa, Artificial Sequence; identical to SEQ ID NO: 65269
  Cyclic GFR-binding peptide
  MOD_RES (1)..(32)..(33): Xaa is C or S

SEQ ID NO: 112523 - protein, 35 aa, Artificial Sequence; identical to SEQ ID NO: 63625
  Cyclic GFR-binding peptide
  MOD_RES (2)..(4)..(35): Xaa is C or S

SEQ ID NO: 112524 - protein, 36 aa, Artificial Sequence; identical to SEQ ID NO: 21399
  Cyclic GFR-binding peptide
  MOD_RES (1)..(3): Xaa is C or S

SEQ ID NO: 112525 - protein, 32 aa, Artificial Sequence; identical to SEQ ID NO: 63628
  Cyclic GFR-binding peptide
  MOD_RES (26)..(27): Xaa is C or S

SEQ ID NO: 112526 - protein, 35 aa, Artificial Sequence; identical to SEQ ID NO: 21400
  Cyclic GFR-binding peptide
  MOD_RES (31)..(31): Xaa is C or S

SEQ ID NO: 112527 - protein, 26 aa, Artificial Sequence
  Cyclic GFR-binding peptide
VIMVQVEKIKPTKGIVKAIKVSRLDQ

SEQ ID NO: 112528 - protein, 34 aa, Artificial Sequence; identical to SEQ ID NO: 66968
  Cyclic GFR-binding peptide
  MOD_RES (30)..(31): Xaa is C or S

SEQ ID NO: 112529 - protein, 39 aa, Artificial Sequence; identical to SEQ ID NO: 65273
  Cyclic GFR-binding peptide
  MOD_RES (2)..(33)..(34): Xaa is C or S

SEQ ID NO: 112530 - protein, 35 aa, Artificial Sequence; identical to SEQ ID NO: 63629
  Cyclic GFR-binding peptide
  MOD_RES (29)..(30): Xaa is C or S

SEQ ID NO: 112531 - protein, 37 aa, Artificial Sequence; identical to SEQ ID NO: 21402
  Cyclic GFR-binding peptide
  MOD_RES (37)..(37): Xaa is C or S

SEQ ID NO: 112532 - protein, 25 aa, Artificial Sequence
  Cyclic GFR-binding peptide
MVQVEKVKPKRGVVKAIKVSRLAQP

SEQ ID NO: 112533 - protein, 26 aa, Artificial Sequence
  Cyclic GFR-binding peptide
RVIMVQVEKVKPKRGVVKAIKVSRLA

SEQ ID NO: 112534 - protein, 21 aa, Artificial Sequence
  Cyclic GFR-binding peptide
MVQVEKVKPTRGVVKAIKVSR

SEQ ID NO: 112535 - protein, 31 aa, Artificial Sequence; identical to SEQ ID NO: 21405
  Cyclic GFR-binding peptide
  MOD_RES (1)..(1): Xaa is C or S

SEQ ID NO: 112536 - protein, 34 aa, Artificial Sequence; identical to SEQ ID NO: 21406
  Cyclic GFR-binding peptide

SEQ ID NO: 112537 - protein, 29 aa, Artificial Sequence
  Cyclic GFR-binding peptide
  MOD_RES (26)..(27): Xaa is C or S
VQVEKVKPTRGVVKAIKVSRLDQPVXXPS

SEQ ID NO: 112538 - protein, 31 aa, Artificial Sequence; identical to SEQ ID NO: 65284
  Cyclic GFR-binding peptide
  MOD_RES (1)..(3): Xaa is C or S

SEQ ID NO: 112539 - protein, 37 aa, Artificial Sequence; identical to SEQ ID NO: 21408
  Cyclic GFR-binding peptide
  MOD_RES (2)..(4): Xaa is C or S

SEQ ID NO: 112540 - protein, 29 aa, Artificial Sequence
  Cyclic GFR-binding peptide
  MOD_RES (29)..(29): Xaa is C or S
VIMVTAKKVKPKRGVIKRIQVPRLAQPVX

SEQ ID NO: 112541 - protein, 34 aa, Artificial Sequence; identical to SEQ ID NO: 21411
  Cyclic GFR-binding peptide
  MOD_RES (2)..(2): Xaa is C or S

SEQ ID NO: 112542 - protein, 34 aa, Artificial Sequence; identical to SEQ ID NO: 21412
  Cyclic GFR-binding peptide
  MOD_RES (34)..(34): Xaa is C or S

SEQ ID NO: 112543 - protein, 33 aa, Artificial Sequence; identical to SEQ ID NO: 65289
  Cyclic GFR-binding peptide
  MOD_RES (1)..(3): Xaa is C or S

SEQ ID NO: 112544 - protein, 34 aa, Artificial Sequence; identical to SEQ ID NO: 21415
  Cyclic GFR-binding peptide
  MOD_RES (1)..(3): Xaa is C or S

SEQ ID NO: 112545 - protein, 36 aa, Artificial Sequence; identical to SEQ ID NO: 63644
  Cyclic GFR-binding peptide
  MOD_RES (2)..(33)..(34): Xaa is C or S

SEQ ID NO: 112546 - protein, 32 aa, Artificial Sequence; identical to SEQ ID NO: 21416
  Cyclic GFR-binding peptide
  MOD_RES (32)..(32): Xaa is C or S

SEQ ID NO: 112547 - protein, 35 aa, Artificial Sequence; identical to SEQ ID NO: 65293
  Cyclic GFR-binding peptide
  MOD_RES (1)..(3)..(34)..(35): Xaa is C or S

SEQ ID NO: 112548 - protein, 30 aa, Artificial Sequence; identical to SEQ ID NO: 21417
  Cyclic GFR-binding peptide

SEQ ID NO: 112549 - protein, 38 aa, Artificial Sequence; identical to SEQ ID NO: 21418
  Cyclic GFR-binding peptide
  MOD_RES (2)..(2): Xaa is C or S

SEQ ID NO: 112550 - protein, 38 aa, Artificial Sequence; identical to SEQ ID NO: 21419
  Cyclic GFR-binding peptide
  MOD_RES (2)..(36): Xaa is C or S

SEQ ID NO: 112551 - protein, 25 aa, Artificial Sequence
  Cyclic GFR-binding peptide
MVQVEKVKPTRGVVKAIKVSRLDQP

SEQ ID NO: 112552 - protein, 28 aa, Artificial Sequence
  Cyclic GFR-binding peptide
LRVTAKKLKPKKRVYEIKRVQVPRHHVR

SEQ ID NO: 112553 - protein, 21 aa, Artificial Sequence
  Cyclic GFR-binding peptide
VTAKKVKPKRGVIKRIQVPRL

SEQ ID NO: 112554 - protein, 23 aa, Artificial Sequence
  Cyclic GFR-binding peptide
IMVQVEKVKPKRGVVKAIKVSRL

SEQ ID NO: 112555 - protein, 27 aa, Artificial Sequence
  Cyclic GFR-binding peptide
VMVQVEKVKPTRGVVKAIKVSRLDQPV

SEQ ID NO: 112556 - protein, 33 aa, Artificial Sequence; identical to SEQ ID NO: 21425
  Cyclic GFR-binding peptide
  MOD_RES (32)..(32): Xaa is C or S

SEQ ID NO: 112557 - protein, 42 aa, Artificial Sequence; identical to SEQ ID NO: 21426
  Cyclic GFR-binding peptide
  MOD_RES (1)..(3)..(37): Xaa is C or S

SEQ ID NO: 112558 - protein, 23 aa, Artificial Sequence
  Cyclic GFR-binding peptide
VQVEKVKPKRGVVKAIKVSRLAQ

SEQ ID NO: 112559 - protein, 29 aa, Artificial Sequence
  Cyclic GFR-binding peptide
  MOD_RES (2)..(4): Xaa is C or S
SXKXSRVIMVTAKKVKPKRGVIKRIQVPR

SEQ ID NO: 112560 - protein, 37 aa, Artificial Sequence; identical to SEQ ID NO: 63662
  Cyclic GFR-binding peptide
  MOD_RES (1)..(32)..(33): Xaa is C or S

SEQ ID NO: 112561 - protein, 38 aa, Artificial Sequence; identical to SEQ ID NO: 21428
  Cyclic GFR-binding peptide
  MOD_RES (35)..(35): Xaa is C or S

SEQ ID NO: 112562 - protein, 37 aa, Artificial Sequence; identical to SEQ ID NO: 21429
  Cyclic GFR-binding peptide
  MOD_RES (33)..(33): Xaa is C or S

SEQ ID NO: 112563 - protein, 38 aa, Artificial Sequence; identical to SEQ ID NO: 21430
  Cyclic GFR-binding peptide
  MOD_RES (2)..(4)..(38): Xaa is C or S

SEQ ID NO: 112564 - protein, 32 aa, Artificial Sequence; identical to SEQ ID NO: 63666
  Cyclic GFR-binding peptide
  MOD_RES (1)..(32): Xaa is C or S

SEQ ID NO: 112565 - protein, 30 aa, Artificial Sequence; identical to SEQ ID NO: 21432
  Cyclic GFR-binding peptide
  MOD_RES (29)..(29): Xaa is C or S

SEQ ID NO: 112566 - protein, 35 aa, Artificial Sequence; identical to SEQ ID NO: 21434
  Cyclic GFR-binding peptide
  MOD_RES (35)..(35): Xaa is C or S

SEQ ID NO: 112567 - protein, 36 aa, Artificial Sequence; identical to SEQ ID NO: 21436
  Cyclic GFR-binding peptide
  MOD_RES (34)..(34): Xaa is C or S

SEQ ID NO: 112568 - protein, 35 aa, Artificial Sequence; identical to SEQ ID NO: 21438
  Cyclic GFR-binding peptide
  MOD_RES (33)..(33): Xaa is C or S

SEQ ID NO: 112569 - protein, 28 aa, Artificial Sequence
  Cyclic GFR-binding peptide
  MOD_RES (27)..(28): Xaa is C or S
MVTAKKIKPTKGIIKRIQVPRLDQSVXX

SEQ ID NO: 112570 - protein, 38 aa, Artificial Sequence; identical to SEQ ID NO: 21441
  Cyclic GFR-binding peptide
  MOD_RES (2)..(4)..(38): Xaa is C or S

SEQ ID NO: 112571 - protein, 38 aa, Artificial Sequence; identical to SEQ ID NO: 65313
  Cyclic GFR-binding peptide
  MOD_RES (1)..(32)..(33): Xaa is C or S

SEQ ID NO: 112572 - protein, 31 aa, Artificial Sequence; identical to SEQ ID NO: 21444
  Cyclic GFR-binding peptide

SEQ ID NO: 112573 - protein, 34 aa, Artificial Sequence; identical to SEQ ID NO: 21445
  Cyclic GFR-binding peptide
  MOD_RES (1)..(1): Xaa is C or S

SEQ ID NO: 112574 - protein, 33 aa, Artificial Sequence; identical to SEQ ID NO: 67016
  Cyclic GFR-binding peptide
  MOD_RES (29)..(30): Xaa is C or S

SEQ ID NO: 112575 - protein, 24 aa, Artificial Sequence
  Cyclic GFR-binding peptide
VIMVTAKKIKPTKGIIKRIQVPRL

SEQ ID NO: 112576 - protein, 25 aa, Artificial Sequence
  Cyclic GFR-binding peptide
EELVTAKKHQGQHPKIRIKRMQVPR

SEQ ID NO: 112577 - protein, 28 aa, Artificial Sequence
  Cyclic GFR-binding peptide
  MOD_RES (27)..(28): Xaa is C or S
MVTAKKVKPKRGVIKRIQVPRLAQPVXX

SEQ ID NO: 112578 - protein, 29 aa, Artificial Sequence
  Cyclic GFR-binding peptide
ALHDELTVQVEKFIPKKRVIEVKAVKVSR

SEQ ID NO: 112579 - protein, 24 aa, Artificial Sequence
  Cyclic GFR-binding peptide
IMVTAKKIKPTKGIIKRIQVPRLD

SEQ ID NO: 112580 - protein, 40 aa, Artificial Sequence; identical to SEQ ID NO: 61903
  Cyclic GFR-binding peptide
  MOD_RES (1)..(3)..(34)..(35): Xaa is C or S

SEQ ID NO: 112581 - protein, 31 aa, Artificial Sequence; identical to SEQ ID NO: 21457
  Cyclic GFR-binding peptide
  MOD_RES (30)..(30): Xaa is C or S

SEQ ID NO: 112582 - protein, 27 aa, Artificial Sequence
  Cyclic GFR-binding peptide
EELVQVEKHQGQHPKIRVKAMKVSRQG

SEQ ID NO: 112583 - protein, 29 aa, Artificial Sequence
  Cyclic GFR-binding peptide
SHEELVQVEKHQGQHPKIRVKAMKVSRQG

SEQ ID NO: 112584 - protein, 32 aa, Artificial Sequence; identical to SEQ ID NO: 21463
  Cyclic GFR-binding peptide
  MOD_RES (1)..(3): Xaa is C or S

SEQ ID NO: 112585 - protein, 33 aa, Artificial Sequence; identical to SEQ ID NO: 21465
  Cyclic GFR-binding peptide

SEQ ID NO: 112586 - protein, 28 aa, Artificial Sequence
  Cyclic GFR-binding peptide
  MOD_RES (28)..(28): Xaa is C or S
VMVTAKKVKPTRGVIKRIQVPRLDQPVX

SEQ ID NO: 112587 - protein, 22 aa, Artificial Sequence
  Cyclic GFR-binding peptide
IMVQVEKIKPTKGIVKAIKVSR

SEQ ID NO: 112588 - protein, 39 aa, Artificial Sequence; identical to SEQ ID NO: 61911
  Cyclic GFR-binding peptide
  MOD_RES (2)..(4)..(35)..(36): Xaa is C or S

SEQ ID NO: 112589 - protein, 36 aa, Artificial Sequence; identical to SEQ ID NO: 21467
  Cyclic GFR-binding peptide
  MOD_RES (32)..(32): Xaa is C or S

SEQ ID NO: 112590 - protein, 34 aa, Artificial Sequence; identical to SEQ ID NO: 67036
  Cyclic GFR-binding peptide
  MOD_RES (28)..(29): Xaa is C or S

SEQ ID NO: 112591 - protein, 37 aa, Artificial Sequence; identical to SEQ ID NO: 63689
  Cyclic GFR-binding peptide
  MOD_RES (2)..(4)..(35)..(36): Xaa is C or S

SEQ ID NO: 112592 - protein, 35 aa, Artificial Sequence; identical to SEQ ID NO: 21470
  Cyclic GFR-binding peptide

SEQ ID NO: 112593 - protein, 39 aa, Artificial Sequence; identical to SEQ ID NO: 21471
  Cyclic GFR-binding peptide
  MOD_RES (1)..(3)..(37): Xaa is C or S

SEQ ID NO: 112594 - protein, 21 aa, Artificial Sequence
  Cyclic GFR-binding peptide
VTAKKVKPTRGVIKRIQVPRL

SEQ ID NO: 112595 - protein, 26 aa, Artificial Sequence
  Cyclic GFR-binding peptide
  MOD_RES (1)..(1): Xaa is C or S
XSKVIMVTAKKIKPTKGIIKRIQVPR

SEQ ID NO: 112596 - protein, 41 aa, Artificial Sequence; identical to SEQ ID NO: 21473
  Cyclic GFR-binding peptide
  MOD_RES (37)..(37): Xaa is C or S

SEQ ID NO: 112597 - protein, 35 aa, Artificial Sequence; identical to SEQ ID NO: 21475
  Cyclic GFR-binding peptide
  MOD_RES (2)..(2): Xaa is C or S

SEQ ID NO: 112598 - protein, 31 aa, Artificial Sequence; identical to SEQ ID NO: 61921
  Cyclic GFR-binding peptide
  MOD_RES (26)..(27): Xaa is C or S

SEQ ID NO: 112599 - protein, 27 aa, Artificial Sequence
  Cyclic GFR-binding peptide
LFVQVEKHQGQHPKIRVKAMKVSREET

SEQ ID NO: 112600 - protein, 29 aa, Artificial Sequence
  Cyclic GFR-binding peptide
  MOD_RES (28)..(28): Xaa is C or S
VQVEKHQGQHPKIRVKAMKVSRQGTPVXE

SEQ ID NO: 112601 - protein, 27 aa, Artificial Sequence
  Cyclic GFR-binding peptide
NHQLFVTAKKHQGQHPKIRIKRMQVPR

SEQ ID NO: 112602 - protein, 32 aa, Artificial Sequence; identical to SEQ ID NO: 21482
  Cyclic GFR-binding peptide

SEQ ID NO: 112603 - protein, 30 aa, Artificial Sequence; identical to SEQ ID NO: 65352
  Cyclic GFR-binding peptide
  MOD_RES (28)..(29): Xaa is C or S

SEQ ID NO: 112604 - protein, 24 aa, Artificial Sequence
  Cyclic GFR-binding peptide
LVTAKKHQGQHPKIRIKRMQVPRQ

SEQ ID NO: 112605 - protein, 32 aa, Artificial Sequence; identical to SEQ ID NO: 21486
  Cyclic GFR-binding peptide
  MOD_RES (28)..(28): Xaa is C or S

SEQ ID NO: 112606 - protein, 34 aa, Artificial Sequence; identical to SEQ ID NO: 21489
  Cyclic GFR-binding peptide
  MOD_RES (31)..(31): Xaa is C or S

SEQ ID NO: 112607 - protein, 32 aa, Artificial Sequence; identical to SEQ ID NO: 63705
  Cyclic GFR-binding peptide
  MOD_RES (28)..(29): Xaa is C or S

SEQ ID NO: 112608 - protein, 32 aa, Artificial Sequence; identical to SEQ ID NO: 21490
  Cyclic GFR-binding peptide
  MOD_RES (31)..(31): Xaa is C or S

SEQ ID NO: 112609 - protein, 28 aa, Artificial Sequence
  Cyclic GFR-binding peptide
SKVIMVQVEKIKPTKGIVKAIKVSRLDQ

SEQ ID NO: 112610 - protein, 36 aa, Artificial Sequence; identical to SEQ ID NO: 21492
  Cyclic GFR-binding peptide
  MOD_RES (1)..(35): Xaa is C or S

SEQ ID NO: 112611 - protein, 37 aa, Artificial Sequence; identical to SEQ ID NO: 21494
  Cyclic GFR-binding peptide
  MOD_RES (37)..(37): Xaa is C or S

SEQ ID NO: 112612 - protein, 40 aa, Artificial Sequence; identical to SEQ ID NO: 21495
  Cyclic GFR-binding peptide
  MOD_RES (1)..(38): Xaa is C or S

SEQ ID NO: 112613 - protein, 43 aa, Artificial Sequence; identical to SEQ ID NO: 21496
  Cyclic GFR-binding peptide
  MOD_RES (2)..(4)..(38): Xaa is C or S

SEQ ID NO: 112614 - protein, 30 aa, Artificial Sequence; identical to SEQ ID NO: 63713
  Cyclic GFR-binding peptide
  MOD_RES (29)..(30): Xaa is C or S

SEQ ID NO: 112615 - protein, 27 aa, Artificial Sequence
  Cyclic GFR-binding peptide
SHEELVTAKKHQGQHPKIRIKRMQVPR

SEQ ID NO: 112616 - protein, 40 aa, Artificial Sequence; identical to SEQ ID NO: 21498
  Cyclic GFR-binding peptide
  MOD_RES (2)..(39): Xaa is C or S

SEQ ID NO: 112617 - protein, 35 aa, Artificial Sequence; identical to SEQ ID NO: 21499
  Cyclic GFR-binding peptide
  MOD_RES (34)..(34): Xaa is C or S

SEQ ID NO: 112618 - protein, 28 aa, Artificial Sequence
  Cyclic GFR-binding peptide
KVVMVTAKKVKPTRGVIKRIQVPRLDQP

SEQ ID NO: 112619 - protein, 34 aa, Artificial Sequence; identical to SEQ ID NO: 21502
  Cyclic GFR-binding peptide
  MOD_RES (28)..(28): Xaa is C or S

SEQ ID NO: 112620 - protein, 31 aa, Artificial Sequence; identical to SEQ ID NO: 21504
  Cyclic GFR-binding peptide

SEQ ID NO: 112621 - protein, 40 aa, Artificial Sequence; identical to SEQ ID NO: 61947
  Cyclic GFR-binding peptide
  MOD_RES (1)..(3)..(34)..(35): Xaa is C or S

SEQ ID NO: 112622 - protein, 35 aa, Artificial Sequence; identical to SEQ ID NO: 21505
  Cyclic GFR-binding peptide

SEQ ID NO: 112623 - protein, 32 aa, Artificial Sequence; identical to SEQ ID NO: 63721
  Cyclic GFR-binding peptide
  MOD_RES (1)..(32): Xaa is C or S

SEQ ID NO: 112624 - protein, 28 aa, Artificial Sequence
  Cyclic GFR-binding peptide
VVMVTAKKVKPTRGVIKRIQVPRLDQPV

SEQ ID NO: 112625 - protein, 35 aa, Artificial Sequence; identical to SEQ ID NO: 21508
  Cyclic GFR-binding peptide
  MOD_RES (2)..(4): Xaa is C or S

SEQ ID NO: 112626 - protein, 29 aa, Artificial Sequence
  Cyclic GFR-binding peptide
ELRVTAKKLKPKKRVYEIKRVQVPRHHVR

SEQ ID NO: 112627 - protein, 31 aa, Artificial Sequence; identical to SEQ ID NO: 67066
  Cyclic GFR-binding peptide
  MOD_RES (27)..(28): Xaa is C or S

SEQ ID NO: 112628 - protein, 38 aa, Artificial Sequence; identical to SEQ ID NO: 63729
  Cyclic GFR-binding peptide
  MOD_RES (1)..(32)..(33): Xaa is C or S

SEQ ID NO: 112629 - protein, 33 aa, Artificial Sequence; identical to SEQ ID NO: 65376
  Cyclic GFR-binding peptide
  MOD_RES (2)..(4): Xaa is C or S

SEQ ID NO: 112630 - protein, 24 aa, Artificial Sequence
  Cyclic GFR-binding peptide
LRVTAKKLKPKKRVYEIKRVQVPR

SEQ ID NO: 112631 - protein, 26 aa, Artificial Sequence
  Cyclic GFR-binding peptide
VTAKKHQGQHPKIRIKRMQVPREETP

SEQ ID NO: 112632 - protein, 34 aa, Artificial Sequence; identical to SEQ ID NO: 65377
  Cyclic GFR-binding peptide
  MOD_RES (2)..(33)..(34): Xaa is C or S

SEQ ID NO: 112633 - protein, 33 aa, Artificial Sequence; identical to SEQ ID NO: 21514
  Cyclic GFR-binding peptide
  MOD_RES (1)..(3): Xaa is C or S

SEQ ID NO: 112634 - protein, 29 aa, Artificial Sequence
  Cyclic GFR-binding peptide
QSHEELVQVEKHQGQHPKIRVKAMKVSRQ

SEQ ID NO: 112635 - protein, 27 aa, Artificial Sequence
  Cyclic GFR-binding peptide
ELTVQVEKFIPKKRVIEVKAVKVSRLQ

SEQ ID NO: 112636 - protein, 35 aa, Artificial Sequence; identical to SEQ ID NO: 61956
  Cyclic GFR-binding peptide
  MOD_RES (1)..(32)..(33): Xaa is C or S

SEQ ID NO: 112637 - protein, 30 aa, Artificial Sequence; identical to SEQ ID NO: 61960
  Cyclic GFR-binding peptide
  MOD_RES (29)..(30): Xaa is C or S

SEQ ID NO: 112638 - protein, 35 aa, Artificial Sequence; identical to SEQ ID NO: 21521
  Cyclic GFR-binding peptide
  MOD_RES (32)..(32): Xaa is C or S

SEQ ID NO: 112639 - protein, 39 aa, Artificial Sequence; identical to SEQ ID NO: 61964
  Cyclic GFR-binding peptide
  MOD_RES (1)..(3)..(34)..(35): Xaa is C or S

SEQ ID NO: 112640 - protein, 36 aa, Artificial Sequence; identical to SEQ ID NO: 63738
  Cyclic GFR-binding peptide
  MOD_RES (2)..(33)..(34): Xaa is C or S

SEQ ID NO: 112641 - protein, 33 aa, Artificial Sequence; identical to SEQ ID NO: 61966
  Cyclic GFR-binding peptide
  MOD_RES (28)..(29): Xaa is C or S

SEQ ID NO: 112642 - protein, 38 aa, Artificial Sequence; identical to SEQ ID NO: 21522
  Cyclic GFR-binding peptide
  MOD_RES (34)..(34): Xaa is C or S

SEQ ID NO: 112643 - protein, 31 aa, Artificial Sequence; identical to SEQ ID NO: 21524
  Cyclic GFR-binding peptide

SEQ ID NO: 112644 - protein, 31 aa, Artificial Sequence; identical to SEQ ID NO: 21525
  Cyclic GFR-binding peptide
  MOD_RES (1)..(1): Xaa is C or S

SEQ ID NO: 112645 - protein, 29 aa, Artificial Sequence
  Cyclic GFR-binding peptide
LTVQVEKFIPKKRVIEVKAVKVSRLQVQT

SEQ ID NO: 112646 - protein, 31 aa, Artificial Sequence; identical to SEQ ID NO: 21530
  Cyclic GFR-binding peptide
  MOD_RES (2)..(2): Xaa is C or S

SEQ ID NO: 112647 - protein, 35 aa, Artificial Sequence; identical to SEQ ID NO: 21531
  Cyclic GFR-binding peptide
  MOD_RES (30)..(30): Xaa is C or S

SEQ ID NO: 112648 - protein, 38 aa, Artificial Sequence; identical to SEQ ID NO: 21534
  Cyclic GFR-binding peptide
  MOD_RES (1)..(35): Xaa is C or S

SEQ ID NO: 112649 - protein, 28 aa, Artificial Sequence
  Cyclic GFR-binding peptide
  MOD_RES (1)..(1): Xaa is C or S
XSKVVMVTAKKVKPTRGVIKRIQVPRLD

SEQ ID NO: 112650 - protein, 37 aa, Artificial Sequence; identical to SEQ ID NO: 21536
  Cyclic GFR-binding peptide
  MOD_RES (35)..(35): Xaa is C or S

SEQ ID NO: 112651 - protein, 28 aa, Artificial Sequence
  Cyclic GFR-binding peptide
SRVIMVTAKKVKPKRGVIKRIQVPRLAQ

SEQ ID NO: 112652 - protein, 33 aa, Artificial Sequence; identical to SEQ ID NO: 21538
  Cyclic GFR-binding peptide
  MOD_RES (31)..(31): Xaa is C or S

SEQ ID NO: 112653 - protein, 32 aa, Artificial Sequence; identical to SEQ ID NO: 67087
  Cyclic GFR-binding peptide
  MOD_RES (30)..(31): Xaa is C or S

SEQ ID NO: 112654 - protein, 24 aa, Artificial Sequence
  Cyclic GFR-binding peptide
TVQVEKFIPKKRVIEVKAVKVSRL

SEQ ID NO: 112655 - protein, 30 aa, Artificial Sequence; identical to SEQ ID NO: 21546
  Cyclic GFR-binding peptide
  MOD_RES (1)..(1): Xaa is C or S

SEQ ID NO: 112656 - protein, 39 aa, Artificial Sequence; identical to SEQ ID NO: 21547
  Cyclic GFR-binding peptide
  MOD_RES (2)..(36): Xaa is C or S

SEQ ID NO: 112657 - protein, 35 aa, Artificial Sequence; identical to SEQ ID NO: 61979
  Cyclic GFR-binding peptide
  MOD_RES (31)..(32): Xaa is C or S

SEQ ID NO: 112658 - protein, 32 aa, Artificial Sequence; identical to SEQ ID NO: 65403
  Cyclic GFR-binding peptide
  MOD_RES (31)..(32): Xaa is C or S

SEQ ID NO: 112659 - protein, 30 aa, Artificial Sequence; identical to SEQ ID NO: 21553
  Cyclic GFR-binding peptide

SEQ ID NO: 112660 - protein, 32 aa, Artificial Sequence; identical to SEQ ID NO: 67096
  Cyclic GFR-binding peptide
  MOD_RES (31)..(32): Xaa is C or S

SEQ ID NO: 112661 - protein, 43 aa, Artificial Sequence; identical to SEQ ID NO: 21554
  Cyclic GFR-binding peptide
  MOD_RES (2)..(39): Xaa is C or S

SEQ ID NO: 112662 - protein, 39 aa, Artificial Sequence; identical to SEQ ID NO: 21556
  Cyclic GFR-binding peptide
  MOD_RES (1)..(35): Xaa is C or S

SEQ ID NO: 112663 - protein, 36 aa, Artificial Sequence; identical to SEQ ID NO: 65410
  Cyclic GFR-binding peptide
  MOD_RES (30)..(31): Xaa is C or S

SEQ ID NO: 112664 - protein, 22 aa, Artificial Sequence
  Cyclic GFR-binding peptide
VTAKKLKPKKRVYEIKRVQVPR

SEQ ID NO: 112665 - protein, 38 aa, Artificial Sequence; identical to SEQ ID NO: 21560
  Cyclic GFR-binding peptide
  MOD_RES (1)..(38): Xaa is C or S

SEQ ID NO: 112666 - protein, 28 aa, Artificial Sequence
  Cyclic GFR-binding peptide
  MOD_RES (27)..(28): Xaa is C or S
MVTAKKVKPTRGVIKRIQVPRLDQPVXX

SEQ ID NO: 112667 - protein, 29 aa, Artificial Sequence
  Cyclic GFR-binding peptide
LRVTAKKLKPKKRVYEIKRVQVPRHHVRS

SEQ ID NO: 112668 - protein, 32 aa, Artificial Sequence; identical to SEQ ID NO: 21564
  Cyclic GFR-binding peptide
  MOD_RES (32)..(32): Xaa is C or S

SEQ ID NO: 112669 - protein, 31 aa, Artificial Sequence; identical to SEQ ID NO: 61990
  Cyclic GFR-binding peptide
  MOD_RES (1)..(1): Xaa is C or S

SEQ ID NO: 112670 - protein, 35 aa, Artificial Sequence; identical to SEQ ID NO: 63764
  Cyclic GFR-binding peptide
  MOD_RES (2)..(4)..(35): Xaa is C or S

SEQ ID NO: 112671 - protein, 34 aa, Artificial Sequence; identical to SEQ ID NO: 61994
  Cyclic GFR-binding peptide
  MOD_RES (31)..(32): Xaa is C or S

SEQ ID NO: 112672 - protein, 32 aa, Artificial Sequence; identical to SEQ ID NO: 63768
  Cyclic GFR-binding peptide
  MOD_RES (29)..(30): Xaa is C or S

SEQ ID NO: 112673 - protein, 32 aa, Artificial Sequence; identical to SEQ ID NO: 21570
  Cyclic GFR-binding peptide
  MOD_RES (2)..(4): Xaa is C or S

SEQ ID NO: 112674 - protein, 33 aa, Artificial Sequence; identical to SEQ ID NO: 21572
  Cyclic GFR-binding peptide
  MOD_RES (33)..(33): Xaa is C or S

SEQ ID NO: 112675 - protein, 35 aa, Artificial Sequence; identical to SEQ ID NO: 65420
  Cyclic GFR-binding peptide
  MOD_RES (30)..(31): Xaa is C or S

SEQ ID NO: 112676 - protein, 37 aa, Artificial Sequence; identical to SEQ ID NO: 63773
  Cyclic GFR-binding peptide
  MOD_RES (2)..(33)..(34): Xaa is C or S

SEQ ID NO: 112677 - protein, 41 aa, Artificial Sequence; identical to SEQ ID NO: 21575
  Cyclic GFR-binding peptide
  MOD_RES (2)..(36): Xaa is C or S

SEQ ID NO: 112678 - protein, 35 aa, Artificial Sequence; identical to SEQ ID NO: 67111
  Cyclic GFR-binding peptide
  MOD_RES (30)..(31): Xaa is C or S

SEQ ID NO: 112679 - protein, 32 aa, Artificial Sequence; identical to SEQ ID NO: 21579
  Cyclic GFR-binding peptide

SEQ ID NO: 112680 - protein, 42 aa, Artificial Sequence; identical to SEQ ID NO: 21581
  Cyclic GFR-binding peptide
  MOD_RES (2)..(36): Xaa is C or S

SEQ ID NO: 112681 - protein, 29 aa, Artificial Sequence
  Cyclic GFR-binding peptide
  MOD_RES (26)..(27): Xaa is C or S
VTAKKIKPTKGIIKRIQVPRLDQSVXXPS

SEQ ID NO: 112682 - protein, 30 aa, Artificial Sequence; identical to SEQ ID NO: 21582
  Cyclic GFR-binding peptide

SEQ ID NO: 112683 - protein, 27 aa, Artificial Sequence
  Cyclic GFR-binding peptide
TVQVEKFIPKKRVIEVKAVKVSRLQVQ

SEQ ID NO: 112684 - protein, 45 aa, Artificial Sequence; identical to SEQ ID NO: 21588
  Cyclic GFR-binding peptide
  MOD_RES (2)..(4)..(41): Xaa is C or S

SEQ ID NO: 112685 - protein, 37 aa, Artificial Sequence; identical to SEQ ID NO: 21589
  Cyclic GFR-binding peptide
  MOD_RES (31)..(31): Xaa is C or S

SEQ ID NO: 112686 - protein, 36 aa, Artificial Sequence; identical to SEQ ID NO: 21590
  Cyclic GFR-binding peptide
  MOD_RES (1)..(3): Xaa is C or S

SEQ ID NO: 112687 - protein, 30 aa, Artificial Sequence; identical to SEQ ID NO: 21593
  Cyclic GFR-binding peptide

SEQ ID NO: 112688 - protein, 34 aa, Artificial Sequence; identical to SEQ ID NO: 21594
  Cyclic GFR-binding peptide
  MOD_RES (1)..(3): Xaa is C or S

SEQ ID NO: 112689 - protein, 29 aa, Artificial Sequence
  Cyclic GFR-binding peptide
KNHQLFVTAKKHQGQHPKIRIKRMQVPRE

SEQ ID NO: 112690 - protein, 24 aa, Artificial Sequence
  Cyclic GFR-binding peptide
FVQVEKHQGQHPKIRVKAMKVSRE

SEQ ID NO: 112691 - protein, 33 aa, Artificial Sequence; identical to SEQ ID NO: 62011
  Cyclic GFR-binding peptide
  MOD_RES (28)..(29): Xaa is C or S

SEQ ID NO: 112692 - protein, 35 aa, Artificial Sequence; identical to SEQ ID NO: 62014
  Cyclic GFR-binding peptide
  MOD_RES (2)..(33)..(34): Xaa is C or S

SEQ ID NO: 112693 - protein, 30 aa, Artificial Sequence; identical to SEQ ID NO: 21599
  Cyclic GFR-binding peptide
  MOD_RES (1)..(1): Xaa is C or S

SEQ ID NO: 112694 - protein, 33 aa, Artificial Sequence; identical to SEQ ID NO: 21601
  Cyclic GFR-binding peptide
  MOD_RES (1)..(3): Xaa is C or S

SEQ ID NO: 112695 - protein, 35 aa, Artificial Sequence; identical to SEQ ID NO: 65434
  Cyclic GFR-binding peptide
  MOD_RES (2)..(33)..(34): Xaa is C or S

SEQ ID NO: 112696 - protein, 29 aa, Artificial Sequence
  Cyclic GFR-binding peptide
  MOD_RES (1)..(3): Xaa is C or S
XKXSKVIMVTAKKIKPTKGIIKRIQVPRL

SEQ ID NO: 112697 - protein, 22 aa, Artificial Sequence
  Cyclic GFR-binding peptide
MVTAKKVKPKRGVIKRIQVPRL

SEQ ID NO: 112698 - protein, 41 aa, Artificial Sequence; identical to SEQ ID NO: 21603
  Cyclic GFR-binding peptide
  MOD_RES (2)..(39): Xaa is C or S

SEQ ID NO: 112699 - protein, 30 aa, Artificial Sequence; identical to SEQ ID NO: 62018
  Cyclic GFR-binding peptide

SEQ ID NO: 112700 - protein, 24 aa, Artificial Sequence
  Cyclic GFR-binding peptide
IMVTAKKVKPKRGVIKRIQVPRLA

SEQ ID NO: 112701 - protein, 28 aa, Artificial Sequence
  Cyclic GFR-binding peptide
  MOD_RES (2)..(2): Xaa is C or S
KXSKVIMVQVEKIKPTKGIVKAIKVSRL

SEQ ID NO: 112702 - protein, 39 aa, Artificial Sequence; identical to SEQ ID NO: 63803
  Cyclic GFR-binding peptide
  MOD_RES (1)..(3)..(34)..(35): Xaa is C or S

SEQ ID NO: 112703 - protein, 40 aa, Artificial Sequence; identical to SEQ ID NO: 21606
  Cyclic GFR-binding peptide
  MOD_RES (2)..(36): Xaa is C or S

SEQ ID NO: 112704 - protein, 32 aa, Artificial Sequence; identical to SEQ ID NO: 63804
  Cyclic GFR-binding peptide
  MOD_RES (1)..(3): Xaa is C or S

SEQ ID NO: 112705 - protein, 33 aa, Artificial Sequence; identical to SEQ ID NO: 65441
  Cyclic GFR-binding peptide
  MOD_RES (28)..(29): Xaa is C or S

SEQ ID NO: 112706 - protein, 32 aa, Artificial Sequence; identical to SEQ ID NO: 63806
  Cyclic GFR-binding peptide
  MOD_RES (28)..(29): Xaa is C or S

SEQ ID NO: 112707 - protein, 31 aa, Artificial Sequence; identical to SEQ ID NO: 65444
  Cyclic GFR-binding peptide
  MOD_RES (30)..(31): Xaa is C or S

SEQ ID NO: 112708 - protein, 23 aa, Artificial Sequence
  Cyclic GFR-binding peptide
VTAKKHQGQHPKIRIKRMQVPRE

SEQ ID NO: 112709 - protein, 24 aa, Artificial Sequence
  Cyclic GFR-binding peptide
RVIMVQVEKVKPKRGVVKAIKVSR

SEQ ID NO: 112710 - protein, 31 aa, Artificial Sequence; identical to SEQ ID NO: 21612
  Cyclic GFR-binding peptide

SEQ ID NO: 112711 - protein, 24 aa, Artificial Sequence
  Cyclic GFR-binding peptide
MVQVEKVKPTRGVVKAIKVSRLDQ

SEQ ID NO: 112712 - protein, 39 aa, Artificial Sequence; identical to SEQ ID NO: 21614
  Cyclic GFR-binding peptide
  MOD_RES (36)..(36): Xaa is C or S

SEQ ID NO: 112713 - protein, 28 aa, Artificial Sequence
  Cyclic GFR-binding peptide
FVTAKKHQGQHPKIRIKRMQVPREETPV

SEQ ID NO: 112714 - protein, 39 aa, Artificial Sequence; identical to SEQ ID NO: 21616
  Cyclic GFR-binding peptide
  MOD_RES (1)..(35): Xaa is C or S

SEQ ID NO: 112715 - protein, 37 aa, Artificial Sequence; identical to SEQ ID NO: 21619
  Cyclic GFR-binding peptide
  MOD_RES (2)..(36): Xaa is C or S

SEQ ID NO: 112716 - protein, 35 aa, Artificial Sequence; identical to SEQ ID NO: 63826
  Cyclic GFR-binding peptide
  MOD_RES (29)..(30): Xaa is C or S

SEQ ID NO: 112717 - protein, 36 aa, Artificial Sequence; identical to SEQ ID NO: 21620
  Cyclic GFR-binding peptide
  MOD_RES (33)..(33): Xaa is C or S

SEQ ID NO: 112718 - protein, 30 aa, Artificial Sequence; identical to SEQ ID NO: 21621
  Cyclic GFR-binding peptide

SEQ ID NO: 112719 - protein, 40 aa, Artificial Sequence; identical to SEQ ID NO: 63830
  Cyclic GFR-binding peptide
  MOD_RES (2)..(4)..(35)..(36): Xaa is C or S

SEQ ID NO: 112720 - protein, 27 aa, Artificial Sequence
  Cyclic GFR-binding peptide
  MOD_RES (1)..(1): Xaa is C or S
XSKVIMVTAKKIKPTKGIIKRIQVPRL

SEQ ID NO: 112721 - protein, 37 aa, Artificial Sequence; identical to SEQ ID NO: 21629
  Cyclic GFR-binding peptide
  MOD_RES (2)..(4): Xaa is C or S

SEQ ID NO: 112722 - protein, 40 aa, Artificial Sequence; identical to SEQ ID NO: 21630
  Cyclic GFR-binding peptide
  MOD_RES (37)..(37): Xaa is C or S

SEQ ID NO: 112723 - protein, 35 aa, Artificial Sequence; identical to SEQ ID NO: 21631
  Cyclic GFR-binding peptide
  MOD_RES (33)..(33): Xaa is C or S

SEQ ID NO: 112724 - protein, 25 aa, Artificial Sequence
  Cyclic GFR-binding peptide
VQVEKHQGQHPKIRVKAMKVSREET

SEQ ID NO: 112725 - protein, 33 aa, Artificial Sequence; identical to SEQ ID NO: 63836
  Cyclic GFR-binding peptide
  MOD_RES (1)..(3): Xaa is C or S

SEQ ID NO: 112726 - protein, 34 aa, Artificial Sequence; identical to SEQ ID NO: 62051
  Cyclic GFR-binding peptide
  MOD_RES (1)..(32)..(33): Xaa is C or S

SEQ ID NO: 112727 - protein, 26 aa, Artificial Sequence
  Cyclic GFR-binding peptide
MVQVEKVKPTRGVVKAIKVSRLDQPV

SEQ ID NO: 112728 - protein, 31 aa, Artificial Sequence; identical to SEQ ID NO: 21641
  Cyclic GFR-binding peptide

SEQ ID NO: 112729 - protein, 29 aa, Artificial Sequence
  Cyclic GFR-binding peptide
  MOD_RES (29)..(29): Xaa is C or S
VIMVQVEKVKPKRGVVKAIKVSRLAQPVX

SEQ ID NO: 112730 - protein, 37 aa, Artificial Sequence; identical to SEQ ID NO: 21643
  Cyclic GFR-binding peptide
  MOD_RES (32)..(32): Xaa is C or S

SEQ ID NO: 112731 - protein, 34 aa, Artificial Sequence; identical to SEQ ID NO: 67171
  Cyclic GFR-binding peptide
  MOD_RES (28)..(29): Xaa is C or S

SEQ ID NO: 112732 - protein, 29 aa, Artificial Sequence
  Cyclic GFR-binding peptide
  MOD_RES (28)..(29): Xaa is C or S
VMVTAKKVKPTRGVIKRIQVPRLDQPVXX

SEQ ID NO: 112733 - protein, 27 aa, Artificial Sequence
  Cyclic GFR-binding peptide
IMVQVEKIKPTKGIVKAIKVSRLDQSV

SEQ ID NO: 112734 - protein, 42 aa, Artificial Sequence; identical to SEQ ID NO: 21647
  Cyclic GFR-binding peptide
  MOD_RES (2)..(4)..(38): Xaa is C or S

SEQ ID NO: 112735 - protein, 29 aa, Artificial Sequence
  Cyclic GFR-binding peptide
  MOD_RES (26)..(27): Xaa is C or S
VTAKKVKPTRGVIKRIQVPRLDQPVXXPS

SEQ ID NO: 112736 - protein, 33 aa, Artificial Sequence; identical to SEQ ID NO: 63846
  Cyclic GFR-binding peptide
  MOD_RES (2)..(4): Xaa is C or S

SEQ ID NO: 112737 - protein, 26 aa, Artificial Sequence
  Cyclic GFR-binding peptide
IMVQVEKIKPTKGIVKAIKVSRLDQS

SEQ ID NO: 112738 - protein, 41 aa, Artificial Sequence; identical to SEQ ID NO: 21651
  Cyclic GFR-binding peptide
  MOD_RES (2)..(4)..(38): Xaa is C or S

SEQ ID NO: 112739 - protein, 35 aa, Artificial Sequence; identical to SEQ ID NO: 21653
  Cyclic GFR-binding peptide
  MOD_RES (2)..(2): Xaa is C or S

SEQ ID NO: 112740 - protein, 38 aa, Artificial Sequence; identical to SEQ ID NO: 21654
  Cyclic GFR-binding peptide
  MOD_RES (33)..(33): Xaa is C or S

SEQ ID NO: 112741 - protein, 34 aa, Artificial Sequence; identical to SEQ ID NO: 65478
  Cyclic GFR-binding peptide
  MOD_RES (30)..(31): Xaa is C or S

SEQ ID NO: 112742 - protein, 28 aa, Artificial Sequence
  Cyclic GFR-binding peptide
  MOD_RES (27)..(28): Xaa is C or S
MVQVEKIKPTKGIVKAIKVSRLDQSVXX

SEQ ID NO: 112743 - protein, 24 aa, Artificial Sequence
  Cyclic GFR-binding peptide
LVQVEKHQGQHPKIRVKAMKVSRQ

SEQ ID NO: 112744 - protein, 35 aa, Artificial Sequence; identical to SEQ ID NO: 21659
  Cyclic GFR-binding peptide
  MOD_RES (31)..(31): Xaa is C or S

SEQ ID NO: 112745 - protein, 39 aa, Artificial Sequence; identical to SEQ ID NO: 21661
  Cyclic GFR-binding peptide
  MOD_RES (36)..(36): Xaa is C or S

SEQ ID NO: 112746 - protein, 25 aa, Artificial Sequence
  Cyclic GFR-binding peptide
MVTAKKVKPTRGVIKRIQVPRLDQP

SEQ ID NO: 112747 - protein, 41 aa, Artificial Sequence; identical to SEQ ID NO: 67189
  Cyclic GFR-binding peptide
  MOD_RES (2)..(4)..(35)..(36): Xaa is C or S

SEQ ID NO: 112748 - protein, 31 aa, Artificial Sequence; identical to SEQ ID NO: 67190
  Cyclic GFR-binding peptide
  MOD_RES (2)..(4): Xaa is C or S

SEQ ID NO: 112749 - protein, 34 aa, Artificial Sequence; identical to SEQ ID NO: 62080
  Cyclic GFR-binding peptide
  MOD_RES (30)..(31): Xaa is C or S

SEQ ID NO: 112750 - protein, 42 aa, Artificial Sequence; identical to SEQ ID NO: 21662
  Cyclic GFR-binding peptide
  MOD_RES (2)..(4)..(38): Xaa is C or S

SEQ ID NO: 112751 - protein, 29 aa, Artificial Sequence
  Cyclic GFR-binding peptide
SKVIMVQVEKIKPTKGIVKAIKVSRLDQS

SEQ ID NO: 112752 - protein, 43 aa, Artificial Sequence; identical to SEQ ID NO: 21665
  Cyclic GFR-binding peptide
  MOD_RES (1)..(3)..(37): Xaa is C or S

SEQ ID NO: 112753 - protein, 31 aa, Artificial Sequence; identical to SEQ ID NO: 21668
  Cyclic GFR-binding peptide
  MOD_RES (31)..(31): Xaa is C or S

SEQ ID NO: 112754 - protein, 34 aa, Artificial Sequence; identical to SEQ ID NO: 21669
  Cyclic GFR-binding peptide

SEQ ID NO: 112755 - protein, 33 aa, Artificial Sequence; identical to SEQ ID NO: 62086
  Cyclic GFR-binding peptide
  MOD_RES (1)..(32)..(33): Xaa is C or S

SEQ ID NO: 112756 - protein, 35 aa, Artificial Sequence; identical to SEQ ID NO: 63863
  Cyclic GFR-binding peptide
  MOD_RES (30)..(31): Xaa is C or S

SEQ ID NO: 112757 - protein, 27 aa, Artificial Sequence
  Cyclic GFR-binding peptide
SKVIMVQVEKIKPTKGIVKAIKVSRLD

SEQ ID NO: 112758 - protein, 32 aa, Artificial Sequence; identical to SEQ ID NO: 21671
  Cyclic GFR-binding peptide
  MOD_RES (30)..(30): Xaa is C or S

SEQ ID NO: 112759 - protein, 29 aa, Artificial Sequence
  Cyclic GFR-binding peptide
SKVVMVQVEKVKPTRGVVKAIKVSRLDQP

SEQ ID NO: 112760 - protein, 29 aa, Artificial Sequence
  Cyclic GFR-binding peptide
SRVIMVTAKKVKPKRGVIKRIQVPRLAQP

SEQ ID NO: 112761 - protein, 28 aa, Artificial Sequence
  Cyclic GFR-binding peptide
  MOD_RES (28)..(28): Xaa is C or S
IMVTAKKIKPTKGIIKRIQVPRLDQSVX

SEQ ID NO: 112762 - protein, 26 aa, Artificial Sequence
  Cyclic GFR-binding peptide
SKVVMVQVEKVKPTRGVVKAIKVSRL

SEQ ID NO: 112763 - protein, 37 aa, Artificial Sequence; identical to SEQ ID NO: 21675
  Cyclic GFR-binding peptide
  MOD_RES (31)..(31): Xaa is C or S

SEQ ID NO: 112764 - protein, 31 aa, Artificial Sequence; identical to SEQ ID NO: 65489
  Cyclic GFR-binding peptide
  MOD_RES (2)..(4): Xaa is C or S

SEQ ID NO: 112765 - protein, 22 aa, Artificial Sequence
  Cyclic GFR-binding peptide
IMVTAKKVKPKRGVIKRIQVPR

SEQ ID NO: 112766 - protein, 34 aa, Artificial Sequence; identical to SEQ ID NO: 21677
  Cyclic GFR-binding peptide
  MOD_RES (30)..(30): Xaa is C or S

SEQ ID NO: 112767 - protein, 25 aa, Artificial Sequence
  Cyclic GFR-binding peptide
RVIMVQVEKVKPKRGVVKAIKVSRL

SEQ ID NO: 112768 - protein, 27 aa, Artificial Sequence
  Cyclic GFR-binding peptide
  MOD_RES (26)..(27): Xaa is C or S
VQVEKVKPTRGVVKAIKVSRLDQPVXX

SEQ ID NO: 112769 - protein, 33 aa, Artificial Sequence; identical to SEQ ID NO: 21678
  Cyclic GFR-binding peptide

SEQ ID NO: 112770 - protein, 26 aa, Artificial Sequence
  Cyclic GFR-binding peptide
QLFVTAKKHQGQHPKIRIKRMQVPRE

SEQ ID NO: 112771 - protein, 32 aa, Artificial Sequence; identical to SEQ ID NO: 62093
  Cyclic GFR-binding peptide
  MOD_RES (29)..(30): Xaa is C or S

SEQ ID NO: 112772 - protein, 33 aa, Artificial Sequence; identical to SEQ ID NO: 67211
  Cyclic GFR-binding peptide
  MOD_RES (30)..(31): Xaa is C or S

SEQ ID NO: 112773 - protein, 30 aa, Artificial Sequence; identical to SEQ ID NO: 21682
  Cyclic GFR-binding peptide

SEQ ID NO: 112774 - protein, 27 aa, Artificial Sequence
  Cyclic GFR-binding peptide
HQLFVQVEKHQGQHPKIRVKAMKVSRE

SEQ ID NO: 112775 - protein, 29 aa, Artificial Sequence
  Cyclic GFR-binding peptide
SHEELVTAKKHQGQHPKIRIKRMQVPRQG

SEQ ID NO: 112776 - protein, 35 aa, Artificial Sequence; identical to SEQ ID NO: 21688
  Cyclic GFR-binding peptide
  MOD_RES (34)..(34): Xaa is C or S

SEQ ID NO: 112777 - protein, 26 aa, Artificial Sequence
  Cyclic GFR-binding peptide
LVQVEKHQGQHPKIRVKAMKVSRQGT

SEQ ID NO: 112778 - protein, 24 aa, Artificial Sequence
  Cyclic GFR-binding peptide
MVTAKKIKPTKGIIKRIQVPRLDQ

SEQ ID NO: 112779 - protein, 37 aa, Artificial Sequence; identical to SEQ ID NO: 63881
  Cyclic GFR-binding peptide
  MOD_RES (31)..(32): Xaa is C or S

SEQ ID NO: 112780 - protein, 35 aa, Artificial Sequence; identical to SEQ ID NO: 21692
  Cyclic GFR-binding peptide
  MOD_RES (32)..(32): Xaa is C or S

SEQ ID NO: 112781 - protein, 36 aa, Artificial Sequence; identical to SEQ ID NO: 21694
  Cyclic GFR-binding peptide
  MOD_RES (2)..(4): Xaa is C or S

SEQ ID NO: 112782 - protein, 36 aa, Artificial Sequence; identical to SEQ ID NO: 21695
  Cyclic GFR-binding peptide
  MOD_RES (1)..(35): Xaa is C or S

SEQ ID NO: 112783 - protein, 42 aa, Artificial Sequence; identical to SEQ ID NO: 21696
  Cyclic GFR-binding peptide
  MOD_RES (1)..(3)..(37): Xaa is C or S

SEQ ID NO: 112784 - protein, 38 aa, Artificial Sequence; identical to SEQ ID NO: 21697
  Cyclic GFR-binding peptide
  MOD_RES (2)..(36): Xaa is C or S

SEQ ID NO: 112785 - protein, 37 aa, Artificial Sequence; identical to SEQ ID NO: 21698
  Cyclic GFR-binding peptide
  MOD_RES (33)..(33): Xaa is C or S

SEQ ID NO: 112786 - protein, 22 aa, Artificial Sequence
  Cyclic GFR-binding peptide
VTAKKIKPTKGIIKRIQVPRLD

SEQ ID NO: 112787 - protein, 32 aa, Artificial Sequence; identical to SEQ ID NO: 63886
  Cyclic GFR-binding peptide
  MOD_RES (28)..(29): Xaa is C or S

SEQ ID NO: 112788 - protein, 38 aa, Artificial Sequence; identical to SEQ ID NO: 67223
  Cyclic GFR-binding peptide
  MOD_RES (2)..(4)..(35)..(36): Xaa is C or S

SEQ ID NO: 112789 - protein, 37 aa, Artificial Sequence; identical to SEQ ID NO: 63887
  Cyclic GFR-binding peptide
  MOD_RES (31)..(32): Xaa is C or S

SEQ ID NO: 112790 - protein, 30 aa, Artificial Sequence; identical to SEQ ID NO: 21700
  Cyclic GFR-binding peptide
  MOD_RES (29)..(29): Xaa is C or S

SEQ ID NO: 112791 - protein, 33 aa, Artificial Sequence; identical to SEQ ID NO: 21701
  Cyclic GFR-binding peptide
  MOD_RES (1)..(3): Xaa is C or S

SEQ ID NO: 112792 - protein, 25 aa, Artificial Sequence
  Cyclic GFR-binding peptide
FVTAKKHQGQHPKIRIKRMQVPREE

SEQ ID NO: 112793 - protein, 28 aa, Artificial Sequence
  Cyclic GFR-binding peptide
  MOD_RES (2)..(2): Xaa is C or S
KXSRVIMVQVEKVKPKRGVVKAIKVSRL

SEQ ID NO: 112794 - protein, 29 aa, Artificial Sequence
  Cyclic GFR-binding peptide
HEELVTAKKHQGQHPKIRIKRMQVPRQGT

SEQ ID NO: 112795 - protein, 35 aa, Artificial Sequence; identical to SEQ ID NO: 21705
  Cyclic GFR-binding peptide
  MOD_RES (33)..(33): Xaa is C or S

SEQ ID NO: 112796 - protein, 29 aa, Artificial Sequence
  Cyclic GFR-binding peptide
  MOD_RES (1)..(1): Xaa is C or S
XSKVIMVTAKKIKPTKGIIKRIQVPRLDQ

SEQ ID NO: 112797 - protein, 28 aa, Artificial Sequence
  Cyclic GFR-binding peptide
HDELTVQVEKFIPKKRVIEVKAVKVSRL

SEQ ID NO: 112798 - protein, 31 aa, Artificial Sequence; identical to SEQ ID NO: 67228
  Cyclic GFR-binding peptide
  MOD_RES (1)..(3): Xaa is C or S

SEQ ID NO: 112799 - protein, 21 aa, Artificial Sequence
  Cyclic GFR-binding peptide
MVTAKKIKPTKGIIKRIQVPR

SEQ ID NO: 112800 - protein, 38 aa, Artificial Sequence; identical to SEQ ID NO: 21710
  Cyclic GFR-binding peptide
  MOD_RES (32)..(32): Xaa is C or S

SEQ ID NO: 112801 - protein, 24 aa, Artificial Sequence
  Cyclic GFR-binding peptide
VIMVQVEKIKPTKGIVKAIKVSRL

SEQ ID NO: 112802 - protein, 30 aa, Artificial Sequence; identical to SEQ ID NO: 62128
  Cyclic GFR-binding peptide
  MOD_RES (28)..(29): Xaa is C or S

SEQ ID NO: 112803 - protein, 23 aa, Artificial Sequence
  Cyclic GFR-binding peptide
VVMVQVEKVKPTRGVVKAIKVSR

SEQ ID NO: 112804 - protein, 27 aa, Artificial Sequence
  Cyclic GFR-binding peptide
LTVQVEKFIPKKRVIEVKAVKVSRLQV

SEQ ID NO: 112805 - protein, 29 aa, Artificial Sequence
  Cyclic GFR-binding peptide
  MOD_RES (2)..(4): Xaa is C or S
SXKXSKVIMVTAKKIKPTKGIIKRIQVPR

SEQ ID NO: 112806 - protein, 29 aa, Artificial Sequence
  Cyclic GFR-binding peptide
  MOD_RES (1)..(1): Xaa is C or S
XQSHEELVQVEKHQGQHPKIRVKAMKVSR

SEQ ID NO: 112807 - protein, 33 aa, Artificial Sequence; identical to SEQ ID NO: 21717
  Cyclic GFR-binding peptide
  MOD_RES (2)..(2): Xaa is C or S

SEQ ID NO: 112808 - protein, 40 aa, Artificial Sequence; identical to SEQ ID NO: 21721
  Cyclic GFR-binding peptide
  MOD_RES (2)..(4): Xaa is C or S

SEQ ID NO: 112809 - protein, 33 aa, Artificial Sequence; identical to SEQ ID NO: 21723
  Cyclic GFR-binding peptide
  MOD_RES (30)..(30): Xaa is C or S

SEQ ID NO: 112810 - protein, 31 aa, Artificial Sequence; identical to SEQ ID NO: 21725
  Cyclic GFR-binding peptide
  MOD_RES (1)..(3): Xaa is C or S

SEQ ID NO: 112811 - protein, 35 aa, Artificial Sequence; identical to SEQ ID NO: 21726
  Cyclic GFR-binding peptide
  MOD_RES (2)..(2): Xaa is C or S

SEQ ID NO: 112812 - protein, 34 aa, Artificial Sequence; identical to SEQ ID NO: 65530
  Cyclic GFR-binding peptide
  MOD_RES (31)..(32): Xaa is C or S

SEQ ID NO: 112813 - protein, 36 aa, Artificial Sequence; identical to SEQ ID NO: 21731
  Cyclic GFR-binding peptide
  MOD_RES (32)..(32): Xaa is C or S

SEQ ID NO: 112814 - protein, 35 aa, Artificial Sequence; identical to SEQ ID NO: 65532
  Cyclic GFR-binding peptide
  MOD_RES (29)..(30): Xaa is C or S

SEQ ID NO: 112815 - protein, 32 aa, Artificial Sequence; identical to SEQ ID NO: 21736
  Cyclic GFR-binding peptide
  MOD_RES (31)..(31): Xaa is C or S

SEQ ID NO: 112816 - protein, 27 aa, Artificial Sequence
  Cyclic GFR-binding peptide
NHQLFVQVEKHQGQHPKIRVKAMKVSR

SEQ ID NO: 112817 - protein, 29 aa, Artificial Sequence
  Cyclic GFR-binding peptide
HQLFVTAKKHQGQHPKIRIKRMQVPREET

SEQ ID NO: 112818 - protein, 36 aa, Artificial Sequence; identical to SEQ ID NO: 63917
  Cyclic GFR-binding peptide
  MOD_RES (31)..(32): Xaa is C or S

SEQ ID NO: 112819 - protein, 28 aa, Artificial Sequence
  Cyclic GFR-binding peptide
FVQVEKHQGQHPKIRVKAMKVSREETPV

SEQ ID NO: 112820 - protein, 36 aa, Artificial Sequence; identical to SEQ ID NO: 67254
  Cyclic GFR-binding peptide
  MOD_RES (2)..(4)..(35)..(36): Xaa is C or S

SEQ ID NO: 112821 - protein, 39 aa, Artificial Sequence; identical to SEQ ID NO: 21749
  Cyclic GFR-binding peptide
  MOD_RES (1)..(3): Xaa is C or S

SEQ ID NO: 112822 - protein, 36 aa, Artificial Sequence; identical to SEQ ID NO: 62151
  Cyclic GFR-binding peptide
  MOD_RES (1)..(32)..(33): Xaa is C or S

SEQ ID NO: 112823 - protein, 39 aa, Artificial Sequence; identical to SEQ ID NO: 67257
  Cyclic GFR-binding peptide
  MOD_RES (1)..(3)..(34)..(35): Xaa is C or S

SEQ ID NO: 112824 - protein, 33 aa, Artificial Sequence; identical to SEQ ID NO: 21752
  Cyclic GFR-binding peptide
  MOD_RES (2)..(2): Xaa is C or S

SEQ ID NO: 112825 - protein, 33 aa, Artificial Sequence; identical to SEQ ID NO: 63923
  Cyclic GFR-binding peptide
  MOD_RES (2)..(33): Xaa is C or S

SEQ ID NO: 112826 - protein, 28 aa, Artificial Sequence
  Cyclic GFR-binding peptide
LFVQVEKHQGQHPKIRVKAMKVSREETP

SEQ ID NO: 112827 - protein, 36 aa, Artificial Sequence; identical to SEQ ID NO: 67260
  Cyclic GFR-binding peptide
  MOD_RES (30)..(31): Xaa is C or S

SEQ ID NO: 112828 - protein, 27 aa, Artificial Sequence
  Cyclic GFR-binding peptide
  MOD_RES (1)..(1): Xaa is C or S
XSKVVMVQVEKVKPTRGVVKAIKVSRL

SEQ ID NO: 112829 - protein, 29 aa, Artificial Sequence
  Cyclic GFR-binding peptide
  MOD_RES (1)..(3): Xaa is C or S
XKXSKVIMVQVEKIKPTKGIVKAIKVSRL

SEQ ID NO: 112830 - protein, 24 aa, Artificial Sequence
  Cyclic GFR-binding peptide
ELVTAKKHQGQHPKIRIKRMQVPR

SEQ ID NO: 112831 - protein, 25 aa, Artificial Sequence
  Cyclic GFR-binding peptide
SRVIMVQVEKVKPKRGVVKAIKVSR

SEQ ID NO: 112832 - protein, 29 aa, Artificial Sequence
  Cyclic GFR-binding peptide
  MOD_RES (26)..(27): Xaa is C or S
VQVEKIKPTKGIVKAIKVSRLDQSVXXPS

SEQ ID NO: 112833 - protein, 34 aa, Artificial Sequence; identical to SEQ ID NO: 63927
  Cyclic GFR-binding peptide
  MOD_RES (1)..(32)..(33): Xaa is C or S

SEQ ID NO: 112834 - protein, 24 aa, Artificial Sequence
  Cyclic GFR-binding peptide
VTAKKHQGQHPKIRIKRMQVPRQG

SEQ ID NO: 112835 - protein, 39 aa, Artificial Sequence; identical to SEQ ID NO: 21759
  Cyclic GFR-binding peptide
  MOD_RES (1)..(3)..(37): Xaa is C or S

SEQ ID NO: 112836 - protein, 24 aa, Artificial Sequence
  Cyclic GFR-binding peptide
LTVQVEKFIPKKRVIEVKAVKVSR

SEQ ID NO: 112837 - protein, 21 aa, Artificial Sequence
  Cyclic GFR-binding peptide
VQVEKVKPKRGVVKAIKVSRL

SEQ ID NO: 112838 - protein, 32 aa, Artificial Sequence; identical to SEQ ID NO: 63936
  Cyclic GFR-binding peptide
  MOD_RES (26)..(27): Xaa is C or S

SEQ ID NO: 112839 - protein, 26 aa, Artificial Sequence
  Cyclic GFR-binding peptide
KVIMVQVEKIKPTKGIVKAIKVSRLD

SEQ ID NO: 112840 - protein, 26 aa, Artificial Sequence
  Cyclic GFR-binding peptide
  MOD_RES (1)..(1): Xaa is C or S
XSRVIMVQVEKVKPKRGVVKAIKVSR

SEQ ID NO: 112841 - protein, 39 aa, Artificial Sequence; identical to SEQ ID NO: 65558
  Cyclic GFR-binding peptide
  MOD_RES (2)..(4)..(35)..(36): Xaa is C or S

SEQ ID NO: 112842 - protein, 32 aa, Artificial Sequence; identical to SEQ ID NO: 21765
  Cyclic GFR-binding peptide

SEQ ID NO: 112843 - protein, 30 aa, Artificial Sequence; identical to SEQ ID NO: 21767
  Cyclic GFR-binding peptide
  MOD_RES (28)..(28): Xaa is C or S

SEQ ID NO: 112844 - protein, 25 aa, Artificial Sequence
  Cyclic GFR-binding peptide
SKVVMVQVEKVKPTRGVVKAIKVSR

SEQ ID NO: 112845 - protein, 36 aa, Artificial Sequence; identical to SEQ ID NO: 62171
  Cyclic GFR-binding peptide
  MOD_RES (2)..(33)..(34): Xaa is C or S

SEQ ID NO: 112846 - protein, 35 aa, Artificial Sequence; identical to SEQ ID NO: 21768
  Cyclic GFR-binding peptide
  MOD_RES (1)..(1): Xaa is C or S

SEQ ID NO: 112847 - protein, 30 aa, Artificial Sequence; identical to SEQ ID NO: 62173
  Cyclic GFR-binding peptide
  MOD_RES (29)..(30): Xaa is C or S

SEQ ID NO: 112848 - protein, 30 aa, Artificial Sequence; identical to SEQ ID NO: 21771
  Cyclic GFR-binding peptide

SEQ ID NO: 112849 - protein, 32 aa, Artificial Sequence; identical to SEQ ID NO: 67276
  Cyclic GFR-binding peptide
  MOD_RES (1)..(3): Xaa is C or S

SEQ ID NO: 112850 - protein, 30 aa, Artificial Sequence; identical to SEQ ID NO: 67278
  Cyclic GFR-binding peptide
  MOD_RES (1)..(1): Xaa is C or S

SEQ ID NO: 112851 - protein, 26 aa, Artificial Sequence
  Cyclic GFR-binding peptide
KVVMVQVEKVKPTRGVVKAIKVSRLD

SEQ ID NO: 112852 - protein, 30 aa, Artificial Sequence; identical to SEQ ID NO: 21776
  Cyclic GFR-binding peptide
  MOD_RES (28)..(28): Xaa is C or S

SEQ ID NO: 112853 - protein, 42 aa, Artificial Sequence; identical to SEQ ID NO: 21777
  Cyclic GFR-binding peptide
  MOD_RES (2)..(36): Xaa is C or S

SEQ ID NO: 112854 - protein, 36 aa, Artificial Sequence; identical to SEQ ID NO: 21778
  Cyclic GFR-binding peptide
  MOD_RES (31)..(31): Xaa is C or S

SEQ ID NO: 112855 - protein, 21 aa, Artificial Sequence
  Cyclic GFR-binding peptide
MVTAKKVKPTRGVIKRIQVPR

SEQ ID NO: 112856 - protein, 28 aa, Artificial Sequence
  Cyclic GFR-binding peptide
  MOD_RES (28)..(28): Xaa is C or S
VQVEKHQGQHPKIRVKAMKVSREETPVX

SEQ ID NO: 112857 - protein, 29 aa, Artificial Sequence
  Cyclic GFR-binding peptide
  MOD_RES (2)..(4): Xaa is C or S
SXKXSKVIMVQVEKIKPTKGIVKAIKVSR

SEQ ID NO: 112858 - protein, 29 aa, Artificial Sequence
  Cyclic GFR-binding peptide
VQVEKFIPKKRVIEVKAVKVSRLQVQTPR

SEQ ID NO: 112859 - protein, 30 aa, Artificial Sequence; identical to SEQ ID NO: 62192
  Cyclic GFR-binding peptide
  MOD_RES (28)..(29): Xaa is C or S

SEQ ID NO: 112860 - protein, 36 aa, Artificial Sequence; identical to SEQ ID NO: 21784
  Cyclic GFR-binding peptide
  MOD_RES (1)..(35): Xaa is C or S

SEQ ID NO: 112861 - protein, 31 aa, Artificial Sequence; identical to SEQ ID NO: 21788
  Cyclic GFR-binding peptide
  MOD_RES (1)..(3): Xaa is C or S

SEQ ID NO: 112862 - protein, 32 aa, Artificial Sequence; identical to SEQ ID NO: 62194
  Cyclic GFR-binding peptide
  MOD_RES (30)..(31): Xaa is C or S

SEQ ID NO: 112863 - protein, 39 aa, Artificial Sequence; identical to SEQ ID NO: 21789
  Cyclic GFR-binding peptide
  MOD_RES (2)..(36): Xaa is C or S

SEQ ID NO: 112864 - protein, 33 aa, Artificial Sequence; identical to SEQ ID NO: 65578
  Cyclic GFR-binding peptide
  MOD_RES (30)..(31): Xaa is C or S

SEQ ID NO: 112865 - protein, 31 aa, Artificial Sequence; identical to SEQ ID NO: 21791
  Cyclic GFR-binding peptide
  MOD_RES (1)..(1): Xaa is C or S

SEQ ID NO: 112866 - protein, 37 aa, Artificial Sequence; identical to SEQ ID NO: 21792
  Cyclic GFR-binding peptide
  MOD_RES (33)..(33): Xaa is C or S

SEQ ID NO: 112867 - protein, 34 aa, Artificial Sequence; identical to SEQ ID NO: 67295
  Cyclic GFR-binding peptide
  MOD_RES (2)..(33)..(34): Xaa is C or S

SEQ ID NO: 112868 - protein, 27 aa, Artificial Sequence
  Cyclic GFR-binding peptide
FVQVEKHQGQHPKIRVKAMKVSREETP

SEQ ID NO: 112869 - protein, 33 aa, Artificial Sequence; identical to SEQ ID NO: 21798
  Cyclic GFR-binding peptide
  MOD_RES (28)..(28): Xaa is C or S

SEQ ID NO: 112870 - protein, 36 aa, Artificial Sequence; identical to SEQ ID NO: 63971
  Cyclic GFR-binding peptide
  MOD_RES (31)..(32): Xaa is C or S

SEQ ID NO: 112871 - protein, 43 aa, Artificial Sequence; identical to SEQ ID NO: 21800
  Cyclic GFR-binding peptide
  MOD_RES (2)..(4)..(38): Xaa is C or S

SEQ ID NO: 112872 - protein, 29 aa, Artificial Sequence
  Cyclic GFR-binding peptide
  MOD_RES (1)..(1): Xaa is C or S
XSKVVMVQVEKVKPTRGVVKAIKVSRLDQ

SEQ ID NO: 112873 - protein, 28 aa, Artificial Sequence
  Cyclic GFR-binding peptide
HQLFVTAKKHQGQHPKIRIKRMQVPREE

SEQ ID NO: 112874 - protein, 37 aa, Artificial Sequence; identical to SEQ ID NO: 67303
  Cyclic GFR-binding peptide
  MOD_RES (31)..(32): Xaa is C or S

SEQ ID NO: 112875 - protein, 28 aa, Artificial Sequence
  Cyclic GFR-binding peptide
  MOD_RES (2)..(2): Xaa is C or S
KXSRVIMVTAKKVKPKRGVIKRIQVPRL

SEQ ID NO: 112876 - protein, 33 aa, Artificial Sequence; identical to SEQ ID NO: 21804
  Cyclic GFR-binding peptide

SEQ ID NO: 112877 - protein, 35 aa, Artificial Sequence; identical to SEQ ID NO: 67307
  Cyclic GFR-binding peptide
  MOD_RES (2)..(33)..(34): Xaa is C or S

SEQ ID NO: 112878 - protein, 32 aa, Artificial Sequence; identical to SEQ ID NO: 65586
  Cyclic GFR-binding peptide
  MOD_RES (30)..(31): Xaa is C or S

SEQ ID NO: 112879 - protein, 36 aa, Artificial Sequence; identical to SEQ ID NO: 21805
  Cyclic GFR-binding peptide
  MOD_RES (2)..(2): Xaa is C or S

SEQ ID NO: 112880 - protein, 32 aa, Artificial Sequence; identical to SEQ ID NO: 65590
  Cyclic GFR-binding peptide
  MOD_RES (29)..(30): Xaa is C or S

SEQ ID NO: 112881 - protein, 30 aa, Artificial Sequence; identical to SEQ ID NO: 21807
  Cyclic GFR-binding peptide
  MOD_RES (30)..(30): Xaa is C or S

SEQ ID NO: 112882 - protein, 30 aa, Artificial Sequence; identical to SEQ ID NO: 21808
  Cyclic GFR-binding peptide
  MOD_RES (29)..(29): Xaa is C or S

SEQ ID NO: 112883 - protein, 27 aa, Artificial Sequence
  Cyclic GFR-binding peptide
  MOD_RES (2)..(2): Xaa is C or S
KXSKVVMVQVEKVKPTRGVVKAIKVSR

SEQ ID NO: 112884 - protein, 40 aa, Artificial Sequence; identical to SEQ ID NO: 21810
  Cyclic GFR-binding peptide
  MOD_RES (1)..(3)..(37): Xaa is C or S

SEQ ID NO: 112885 - protein, 40 aa, Artificial Sequence; identical to SEQ ID NO: 21811
  Cyclic GFR-binding peptide
  MOD_RES (2)..(36): Xaa is C or S

SEQ ID NO: 112886 - protein, 33 aa, Artificial Sequence; identical to SEQ ID NO: 62213
  Cyclic GFR-binding peptide
  MOD_RES (29)..(30): Xaa is C or S

SEQ ID NO: 112887 - protein, 24 aa, Artificial Sequence
  Cyclic GFR-binding peptide
VQVEKVKPTRGVVKAIKVSRLDQP

SEQ ID NO: 112888 - protein, 25 aa, Artificial Sequence
  Cyclic GFR-binding peptide
FVQVEKHQGQHPKIRVKAMKVSREE

SEQ ID NO: 112889 - protein, 35 aa, Artificial Sequence; identical to SEQ ID NO: 21815
  Cyclic GFR-binding peptide
  MOD_RES (30)..(30): Xaa is C or S

SEQ ID NO: 112890 - protein, 27 aa, Artificial Sequence
  Cyclic GFR-binding peptide
  MOD_RES (26)..(27): Xaa is C or S
VQVEKVKPKRGVVKAIKVSRLAQPVXX

SEQ ID NO: 112891 - protein, 32 aa, Artificial Sequence; identical to SEQ ID NO: 21818
  Cyclic GFR-binding peptide
  MOD_RES (31)..(31): Xaa is C or S

SEQ ID NO: 112892 - protein, 38 aa, Artificial Sequence; identical to SEQ ID NO: 65599
  Cyclic GFR-binding peptide
  MOD_RES (2)..(33)..(34): Xaa is C or S

SEQ ID NO: 112893 - protein, 31 aa, Artificial Sequence; identical to SEQ ID NO: 21819
  Cyclic GFR-binding peptide

SEQ ID NO: 112894 - protein, 39 aa, Artificial Sequence; identical to SEQ ID NO: 21820
  Cyclic GFR-binding peptide
  MOD_RES (33)..(33): Xaa is C or S

SEQ ID NO: 112895 - protein, 30 aa, Artificial Sequence; identical to SEQ ID NO: 63987
  Cyclic GFR-binding peptide
  MOD_RES (27)..(28): Xaa is C or S

SEQ ID NO: 112896 - protein, 39 aa, Artificial Sequence; identical to SEQ ID NO: 21826
  Cyclic GFR-binding peptide
  MOD_RES (33)..(33): Xaa is C or S

SEQ ID NO: 112897 - protein, 34 aa, Artificial Sequence; identical to SEQ ID NO: 21827
  Cyclic GFR-binding peptide
  MOD_RES (2)..(4): Xaa is C or S

SEQ ID NO: 112898 - protein, 27 aa, Artificial Sequence
  Cyclic GFR-binding peptide
IMVTAKKIKPTKGIIKRIQVPRLDQSV

SEQ ID NO: 112899 - protein, 38 aa, Artificial Sequence; identical to SEQ ID NO: 21831
  Cyclic GFR-binding peptide
  MOD_RES (33)..(33): Xaa is C or S

SEQ ID NO: 112900 - protein, 32 aa, Artificial Sequence; identical to SEQ ID NO: 21832
  Cyclic GFR-binding peptide
  MOD_RES (2)..(2): Xaa is C or S

SEQ ID NO: 112901 - protein, 33 aa, Artificial Sequence; identical to SEQ ID NO: 67334
  Cyclic GFR-binding peptide
  MOD_RES (29)..(30): Xaa is C or S

SEQ ID NO: 112902 - protein, 36 aa, Artificial Sequence; identical to SEQ ID NO: 63993
  Cyclic GFR-binding peptide
  MOD_RES (1)..(3)..(34)..(35): Xaa is C or S

SEQ ID NO: 112903 - protein, 25 aa, Artificial Sequence
  Cyclic GFR-binding peptide
MVQVEKIKPTKGIVKAIKVSRLDQS

SEQ ID NO: 112904 - protein, 33 aa, Artificial Sequence; identical to SEQ ID NO: 21834
  Cyclic GFR-binding peptide
  MOD_RES (2)..(4): Xaa is C or S

SEQ ID NO: 112905 - protein, 37 aa, Artificial Sequence; identical to SEQ ID NO: 21835
  Cyclic GFR-binding peptide
  MOD_RES (2)..(2): Xaa is C or S

SEQ ID NO: 112906 - protein, 25 aa, Artificial Sequence
  Cyclic GFR-binding peptide
VMVTAKKVKPTRGVIKRIQVPRLDQ

SEQ ID NO: 112907 - protein, 33 aa, Artificial Sequence; identical to SEQ ID NO: 21836
  Cyclic GFR-binding peptide
  MOD_RES (2)..(2): Xaa is C or S

SEQ ID NO: 112908 - protein, 29 aa, Artificial Sequence
  Cyclic GFR-binding peptide
  MOD_RES (27)..(28): Xaa is C or S
MVQVEKVKPKRGVVKAIKVSRLAQPVXXP

SEQ ID NO: 112909 - protein, 35 aa, Artificial Sequence; identical to SEQ ID NO: 65613
  Cyclic GFR-binding peptide
  MOD_RES (30)..(31): Xaa is C or S

SEQ ID NO: 112910 - protein, 35 aa, Artificial Sequence; identical to SEQ ID NO: 62233
  Cyclic GFR-binding peptide
  MOD_RES (31)..(32): Xaa is C or S

SEQ ID NO: 112911 - protein, 30 aa, Artificial Sequence; identical to SEQ ID NO: 21838
  Cyclic GFR-binding peptide

SEQ ID NO: 112912 - protein, 33 aa, Artificial Sequence; identical to SEQ ID NO: 62236
  Cyclic GFR-binding peptide
  MOD_RES (2)..(4): Xaa is C or S

SEQ ID NO: 112913 - protein, 34 aa, Artificial Sequence; identical to SEQ ID NO: 21840
  Cyclic GFR-binding peptide
  MOD_RES (2)..(2): Xaa is C or S

SEQ ID NO: 112914 - protein, 30 aa, Artificial Sequence; identical to SEQ ID NO: 21842
  Cyclic GFR-binding peptide

SEQ ID NO: 112915 - protein, 33 aa, Artificial Sequence; identical to SEQ ID NO: 21844
  Cyclic GFR-binding peptide
  MOD_RES (31)..(31): Xaa is C or S

SEQ ID NO: 112916 - protein, 36 aa, Artificial Sequence; identical to SEQ ID NO: 67346
  Cyclic GFR-binding peptide
  MOD_RES (1)..(3)..(34)..(35): Xaa is C or S

SEQ ID NO: 112917 - protein, 25 aa, Artificial Sequence
  Cyclic GFR-binding peptide
VTAKKLKPKKRVYEIKRVQVPRHHV

SEQ ID NO: 112918 - protein, 33 aa, Artificial Sequence; identical to SEQ ID NO: 65622
  Cyclic GFR-binding peptide
  MOD_RES (27)..(28): Xaa is C or S

SEQ ID NO: 112919 - protein, 32 aa, Artificial Sequence; identical to SEQ ID NO: 65624
  Cyclic GFR-binding peptide
  MOD_RES (2)..(4): Xaa is C or S

SEQ ID NO: 112920 - protein, 35 aa, Artificial Sequence; identical to SEQ ID NO: 21851
  Cyclic GFR-binding peptide
  MOD_RES (2)..(4): Xaa is C or S

SEQ ID NO: 112921 - protein, 25 aa, Artificial Sequence
  Cyclic GFR-binding peptide
SKVIMVQVEKIKPTKGIVKAIKVSR

SEQ ID NO: 112922 - protein, 24 aa, Artificial Sequence
  Cyclic GFR-binding peptide
LFVTAKKHQGQHPKIRIKRMQVPR

SEQ ID NO: 112923 - protein, 33 aa, Artificial Sequence; identical to SEQ ID NO: 64007
  Cyclic GFR-binding peptide
  MOD_RES (31)..(32): Xaa is C or S

SEQ ID NO: 112924 - protein, 24 aa, Artificial Sequence
  Cyclic GFR-binding peptide
RVIMVTAKKVKPKRGVIKRIQVPR

SEQ ID NO: 112925 - protein, 33 aa, Artificial Sequence; identical to SEQ ID NO: 21856
  Cyclic GFR-binding peptide
  MOD_RES (32)..(32): Xaa is C or S

SEQ ID NO: 112926 - protein, 30 aa, Artificial Sequence; identical to SEQ ID NO: 65633
  Cyclic GFR-binding peptide
  MOD_RES (28)..(29): Xaa is C or S

SEQ ID NO: 112927 - protein, 31 aa, Artificial Sequence; identical to SEQ ID NO: 21857
  Cyclic GFR-binding peptide
  MOD_RES (1)..(1): Xaa is C or S

SEQ ID NO: 112928 - protein, 26 aa, Artificial Sequence
  Cyclic GFR-binding peptide
HQLFVQVEKHQGQHPKIRVKAMKVSR

SEQ ID NO: 112929 - protein, 33 aa, Artificial Sequence; identical to SEQ ID NO: 21862
  Cyclic GFR-binding peptide
  MOD_RES (32)..(32): Xaa is C or S

SEQ ID NO: 112930 - protein, 30 aa, Artificial Sequence; identical to SEQ ID NO: 21864
  Cyclic GFR-binding peptide

SEQ ID NO: 112931 - protein, 39 aa, Artificial Sequence; identical to SEQ ID NO: 21865
  Cyclic GFR-binding peptide
  MOD_RES (1)..(35): Xaa is C or S

SEQ ID NO: 112932 - protein, 28 aa, Artificial Sequence
  Cyclic GFR-binding peptide
  MOD_RES (26)..(27): Xaa is C or S
VQVEKVKPKRGVVKAIKVSRLAQPVXXP

SEQ ID NO: 112933 - protein, 41 aa, Artificial Sequence; identical to SEQ ID NO: 21866
  Cyclic GFR-binding peptide
  MOD_RES (1)..(3)..(37): Xaa is C or S

SEQ ID NO: 112934 - protein, 29 aa, Artificial Sequence
  Cyclic GFR-binding peptide
  MOD_RES (27)..(28): Xaa is C or S
MVTAKKVKPTRGVIKRIQVPRLDQPVXXP

SEQ ID NO: 112935 - protein, 38 aa, Artificial Sequence; identical to SEQ ID NO: 21875
  Cyclic GFR-binding peptide
  MOD_RES (1)..(3): Xaa is C or S

SEQ ID NO: 112936 - protein, 35 aa, Artificial Sequence; identical to SEQ ID NO: 21877
  Cyclic GFR-binding peptide
  MOD_RES (32)..(32): Xaa is C or S

SEQ ID NO: 112937 - protein, 40 aa, Artificial Sequence; identical to SEQ ID NO: 21882
  Cyclic GFR-binding peptide
  MOD_RES (1)..(35): Xaa is C or S

SEQ ID NO: 112938 - protein, 30 aa, Artificial Sequence; identical to SEQ ID NO: 64037
  Cyclic GFR-binding peptide

SEQ ID NO: 112939 - protein, 38 aa, Artificial Sequence; identical to SEQ ID NO: 21887
  Cyclic GFR-binding peptide
  MOD_RES (1)..(3)..(37): Xaa is C or S

SEQ ID NO: 112940 - protein, 33 aa, Artificial Sequence; identical to SEQ ID NO: 62268
  Cyclic GFR-binding peptide
  MOD_RES (28)..(29): Xaa is C or S

SEQ ID NO: 112941 - protein, 32 aa, Artificial Sequence; identical to SEQ ID NO: 67380
  Cyclic GFR-binding peptide
  MOD_RES (1)..(32): Xaa is C or S

SEQ ID NO: 112942 - protein, 40 aa, Artificial Sequence; identical to SEQ ID NO: 62272
  Cyclic GFR-binding peptide
  MOD_RES (1)..(3)..(34)..(35): Xaa is C or S

SEQ ID NO: 112943 - protein, 33 aa, Artificial Sequence; identical to SEQ ID NO: 64041
  Cyclic GFR-binding peptide
  MOD_RES (2)..(33): Xaa is C or S

SEQ ID NO: 112944 - protein, 37 aa, Artificial Sequence; identical to SEQ ID NO: 21894
  Cyclic GFR-binding peptide
  MOD_RES (1)..(3)..(37): Xaa is C or S

SEQ ID NO: 112945 - protein, 26 aa, Artificial Sequence
  Cyclic GFR-binding peptide
HQLFVTAKKHQGQHPKIRIKRMQVPR

SEQ ID NO: 112946 - protein, 30 aa, Artificial Sequence; identical to SEQ ID NO: 21897
  Cyclic GFR-binding peptide

SEQ ID NO: 112947 - protein, 30 aa, Artificial Sequence; identical to SEQ ID NO: 62278
  Cyclic GFR-binding peptide
  MOD_RES (27)..(28): Xaa is C or S

SEQ ID NO: 112948 - protein, 29 aa, Artificial Sequence
  Cyclic GFR-binding peptide
  MOD_RES (28)..(28): Xaa is C or S
VTAKKHQGQHPKIRIKRMQVPREETPVXE

SEQ ID NO: 112949 - protein, 38 aa, Artificial Sequence; identical to SEQ ID NO: 65666
  Cyclic GFR-binding peptide
  MOD_RES (1)..(32)..(33): Xaa is C or S

SEQ ID NO: 112950 - protein, 27 aa, Artificial Sequence
  Cyclic GFR-binding peptide
SRVIMVTAKKVKPKRGVIKRIQVPRLA

SEQ ID NO: 112951 - protein, 42 aa, Artificial Sequence; identical to SEQ ID NO: 21903
  Cyclic GFR-binding peptide
  MOD_RES (2)..(36): Xaa is C or S

SEQ ID NO: 112952 - protein, 20 aa, Artificial Sequence
  Cyclic GFR-binding peptide
VQVEKVKPKRGVVKAIKVSR

SEQ ID NO: 112953 - protein, 33 aa, Artificial Sequence; identical to SEQ ID NO: 65675
  Cyclic GFR-binding peptide
  MOD_RES (30)..(31): Xaa is C or S

SEQ ID NO: 112954 - protein, 34 aa, Artificial Sequence; identical to SEQ ID NO: 21906
  Cyclic GFR-binding peptide
  MOD_RES (31)..(31): Xaa is C or S

SEQ ID NO: 112955 - protein, 26 aa, Artificial Sequence
  Cyclic GFR-binding peptide
QLFVQVEKHQGQHPKIRVKAMKVSRE

SEQ ID NO: 112956 - protein, 38 aa, Artificial Sequence; identical to SEQ ID NO: 21909
  Cyclic GFR-binding peptide
  MOD_RES (1)..(3): Xaa is C or S

SEQ ID NO: 112957 - protein, 31 aa, Artificial Sequence; identical to SEQ ID NO: 21910
  Cyclic GFR-binding peptide
  MOD_RES (28)..(28): Xaa is C or S

SEQ ID NO: 112958 - protein, 27 aa, Artificial Sequence
  Cyclic GFR-binding peptide
VIMVTAKKVKPKRGVIKRIQVPRLAQP

SEQ ID NO: 112959 - protein, 26 aa, Artificial Sequence
  Cyclic GFR-binding peptide
  MOD_RES (1)..(1): Xaa is C or S
XSKVVMVTAKKVKPTRGVIKRIQVPR

SEQ ID NO: 112960 - protein, 28 aa, Artificial Sequence
  Cyclic GFR-binding peptide
  MOD_RES (1)..(1): Xaa is C or S
XSRVIMVTAKKVKPKRGVIKRIQVPRLA

SEQ ID NO: 112961 - protein, 40 aa, Artificial Sequence; identical to SEQ ID NO: 21912
  Cyclic GFR-binding peptide
  MOD_RES (1)..(35): Xaa is C or S

SEQ ID NO: 112962 - protein, 39 aa, Artificial Sequence; identical to SEQ ID NO: 21915
  Cyclic GFR-binding peptide
  MOD_RES (2)..(4): Xaa is C or S

SEQ ID NO: 112963 - protein, 36 aa, Artificial Sequence; identical to SEQ ID NO: 67411
  Cyclic GFR-binding peptide
  MOD_RES (1)..(3)..(34)..(35): Xaa is C or S

SEQ ID NO: 112964 - protein, 35 aa, Artificial Sequence; identical to SEQ ID NO: 21917
  Cyclic GFR-binding peptide
  MOD_RES (30)..(30): Xaa is C or S

SEQ ID NO: 112965 - protein, 33 aa, Artificial Sequence; identical to SEQ ID NO: 21918
  Cyclic GFR-binding peptide
  MOD_RES (2)..(4): Xaa is C or S

SEQ ID NO: 112966 - protein, 39 aa, Artificial Sequence; identical to SEQ ID NO: 65695
  Cyclic GFR-binding peptide
  MOD_RES (2)..(4)..(35)..(36): Xaa is C or S

SEQ ID NO: 112967 - protein, 31 aa, Artificial Sequence; identical to SEQ ID NO: 64063
  Cyclic GFR-binding peptide
  MOD_RES (2)..(2): Xaa is C or S

SEQ ID NO: 112968 - protein, 36 aa, Artificial Sequence; identical to SEQ ID NO: 67413
  Cyclic GFR-binding peptide
  MOD_RES (1)..(3)..(34)..(35): Xaa is C or S

SEQ ID NO: 112969 - protein, 39 aa, Artificial Sequence; identical to SEQ ID NO: 21922
  Cyclic GFR-binding peptide
  MOD_RES (1)..(35): Xaa is C or S

SEQ ID NO: 112970 - protein, 35 aa, Artificial Sequence; identical to SEQ ID NO: 21926
  Cyclic GFR-binding peptide
  MOD_RES (30)..(30): Xaa is C or S

SEQ ID NO: 112971 - protein, 25 aa, Artificial Sequence
  Cyclic GFR-binding peptide
KVVMVTAKKVKPTRGVIKRIQVPRL

SEQ ID NO: 112972 - protein, 27 aa, Artificial Sequence
  Cyclic GFR-binding peptide
DELTVQVEKFIPKKRVIEVKAVKVSRL

SEQ ID NO: 112973 - protein, 38 aa, Artificial Sequence; identical to SEQ ID NO: 21932
  Cyclic GFR-binding peptide
  MOD_RES (1)..(3)..(37): Xaa is C or S

SEQ ID NO: 112974 - protein, 34 aa, Artificial Sequence; identical to SEQ ID NO: 65702
  Cyclic GFR-binding peptide
  MOD_RES (31)..(32): Xaa is C or S

SEQ ID NO: 112975 - protein, 27 aa, Artificial Sequence
  Cyclic GFR-binding peptide
  MOD_RES (2)..(2): Xaa is C or S
KXSRVIMVTAKKVKPKRGVIKRIQVPR

SEQ ID NO: 112976 - protein, 39 aa, Artificial Sequence; identical to SEQ ID NO: 21937
  Cyclic GFR-binding peptide
  MOD_RES (2)..(36): Xaa is C or S

SEQ ID NO: 112977 - protein, 35 aa, Artificial Sequence; identical to SEQ ID NO: 65704
  Cyclic GFR-binding peptide
  MOD_RES (30)..(31): Xaa is C or S

SEQ ID NO: 112978 - protein, 25 aa, Artificial Sequence
  Cyclic GFR-binding peptide
LVQVEKHQGQHPKIRVKAMKVSRQG

SEQ ID NO: 112979 - protein, 38 aa, Artificial Sequence; identical to SEQ ID NO: 21942
  Cyclic GFR-binding peptide
  MOD_RES (2)..(4): Xaa is C or S

SEQ ID NO: 112980 - protein, 35 aa, Artificial Sequence; identical to SEQ ID NO: 21943
  Cyclic GFR-binding peptide
  MOD_RES (32)..(32): Xaa is C or S

SEQ ID NO: 112981 - protein, 23 aa, Artificial Sequence
  Cyclic GFR-binding peptide
VQVEKHQGQHPKIRVKAMKVSRQ

SEQ ID NO: 112982 - protein, 39 aa, Artificial Sequence; identical to SEQ ID NO: 21953
  Cyclic GFR-binding peptide
  MOD_RES (34)..(34): Xaa is C or S

SEQ ID NO: 112983 - protein, 31 aa, Artificial Sequence; identical to SEQ ID NO: 62325
  Cyclic GFR-binding peptide
  MOD_RES (27)..(28): Xaa is C or S

SEQ ID NO: 112984 - protein, 32 aa, Artificial Sequence; identical to SEQ ID NO: 21958
  Cyclic GFR-binding peptide
  MOD_RES (1)..(1): Xaa is C or S

SEQ ID NO: 112985 - protein, 33 aa, Artificial Sequence; identical to SEQ ID NO: 21962
  Cyclic GFR-binding peptide

SEQ ID NO: 112986 - protein, 29 aa, Artificial Sequence
  Cyclic GFR-binding peptide
KVVMVTAKKVKPTRGVIKRIQVPRLDQPV

SEQ ID NO: 112987 - protein, 35 aa, Artificial Sequence; identical to SEQ ID NO: 65720
  Cyclic GFR-binding peptide
  MOD_RES (1)..(3)..(34)..(35): Xaa is C or S

SEQ ID NO: 112988 - protein, 34 aa, Artificial Sequence; identical to SEQ ID NO: 67437
  Cyclic GFR-binding peptide
  MOD_RES (29)..(30): Xaa is C or S

SEQ ID NO: 112989 - protein, 27 aa, Artificial Sequence
  Cyclic GFR-binding peptide
  MOD_RES (1)..(1): Xaa is C or S
XSRVIMVTAKKVKPKRGVIKRIQVPRL

SEQ ID NO: 112990 - protein, 25 aa, Artificial Sequence
  Cyclic GFR-binding peptide
IMVQVEKIKPTKGIVKAIKVSRLDQ

SEQ ID NO: 112991 - protein, 35 aa, Artificial Sequence; identical to SEQ ID NO: 65727
  Cyclic GFR-binding peptide
  MOD_RES (1)..(3)..(34)..(35): Xaa is C or S

SEQ ID NO: 112992 - protein, 31 aa, Artificial Sequence; identical to SEQ ID NO: 65728
  Cyclic GFR-binding peptide
  MOD_RES (30)..(31): Xaa is C or S

SEQ ID NO: 112993 - protein, 35 aa, Artificial Sequence; identical to SEQ ID NO: 21968
  Cyclic GFR-binding peptide
  MOD_RES (1)..(35): Xaa is C or S

SEQ ID NO: 112994 - protein, 31 aa, Artificial Sequence; identical to SEQ ID NO: 67446
  Cyclic GFR-binding peptide
  MOD_RES (2)..(4): Xaa is C or S

SEQ ID NO: 112995 - protein, 34 aa, Artificial Sequence; identical to SEQ ID NO: 21969
  Cyclic GFR-binding peptide
  MOD_RES (1)..(3): Xaa is C or S

SEQ ID NO: 112996 - protein, 38 aa, Artificial Sequence; identical to SEQ ID NO: 62343
  Cyclic GFR-binding peptide
  MOD_RES (1)..(3)..(34)..(35): Xaa is C or S

SEQ ID NO: 112997 - protein, 27 aa, Artificial Sequence
  Cyclic GFR-binding peptide
HEELVTAKKHQGQHPKIRIKRMQVPRQ

SEQ ID NO: 112998 - protein, 41 aa, Artificial Sequence; identical to SEQ ID NO: 64102
  Cyclic GFR-binding peptide
  MOD_RES (2)..(4)..(35)..(36): Xaa is C or S

SEQ ID NO: 112999 - protein, 34 aa, Artificial Sequence; identical to SEQ ID NO: 65731
  Cyclic GFR-binding peptide
  MOD_RES (1)..(3)..(34): Xaa is C or S

SEQ ID NO: 113000 - protein, 37 aa, Artificial Sequence; identical to SEQ ID NO: 21978
  Cyclic GFR-binding peptide
  MOD_RES (33)..(33): Xaa is C or S

SEQ ID NO: 113001 - protein, 32 aa, Artificial Sequence; identical to SEQ ID NO: 21980
  Cyclic GFR-binding peptide
  MOD_RES (1)..(1): Xaa is C or S

SEQ ID NO: 113002 - protein, 34 aa, Artificial Sequence; identical to SEQ ID NO: 21982
  Cyclic GFR-binding peptide
  MOD_RES (2)..(4): Xaa is C or S

SEQ ID NO: 113003 - protein, 28 aa, Artificial Sequence
  Cyclic GFR-binding peptide
VIMVTAKKIKPTKGIIKRIQVPRLDQSV

SEQ ID NO: 113004 - protein, 33 aa, Artificial Sequence; identical to SEQ ID NO: 62364
  Cyclic GFR-binding peptide
  MOD_RES (28)..(29): Xaa is C or S

SEQ ID NO: 113005 - protein, 27 aa, Artificial Sequence
  Cyclic GFR-binding peptide
LFVTAKKHQGQHPKIRIKRMQVPREET

SEQ ID NO: 113006 - protein, 21 aa, Artificial Sequence
  Cyclic GFR-binding peptide
MVQVEKVKPKRGVVKAIKVSR

SEQ ID NO: 113007 - protein, 20 aa, Artificial Sequence
  Cyclic GFR-binding peptide
VQVEKVKPTRGVVKAIKVSR

SEQ ID NO: 113008 - protein, 36 aa, Artificial Sequence; identical to SEQ ID NO: 21990
  Cyclic GFR-binding peptide
  MOD_RES (33)..(33): Xaa is C or S

SEQ ID NO: 113009 - protein, 35 aa, Artificial Sequence; identical to SEQ ID NO: 62369
  Cyclic GFR-binding peptide
  MOD_RES (29)..(30): Xaa is C or S

SEQ ID NO: 113010 - protein, 33 aa, Artificial Sequence; identical to SEQ ID NO: 21991
  Cyclic GFR-binding peptide
  MOD_RES (30)..(30): Xaa is C or S

SEQ ID NO: 113011 - protein, 40 aa, Artificial Sequence; identical to SEQ ID NO: 62373
  Cyclic GFR-binding peptide
  MOD_RES (2)..(4)..(35)..(36): Xaa is C or S

SEQ ID NO: 113012 - protein, 28 aa, Artificial Sequence
  Cyclic GFR-binding peptide
LVTAKKHQGQHPKIRIKRMQVPRQGTPV

SEQ ID NO: 113013 - protein, 31 aa, Artificial Sequence; identical to SEQ ID NO: 21994
  Cyclic GFR-binding peptide

SEQ ID NO: 113014 - protein, 33 aa, Artificial Sequence; identical to SEQ ID NO: 65746
  Cyclic GFR-binding peptide
  MOD_RES (27)..(28): Xaa is C or S

SEQ ID NO: 113015 - protein, 23 aa, Artificial Sequence
  Cyclic GFR-binding peptide
MVTAKKVKPTRGVIKRIQVPRLD

SEQ ID NO: 113016 - protein, 24 aa, Artificial Sequence
  Cyclic GFR-binding peptide
MVTAKKVKPKRGVIKRIQVPRLAQ

SEQ ID NO: 113017 - protein, 37 aa, Artificial Sequence; identical to SEQ ID NO: 21996
  Cyclic GFR-binding peptide
  MOD_RES (1)..(3)..(37): Xaa is C or S

SEQ ID NO: 113018 - protein, 35 aa, Artificial Sequence; identical to SEQ ID NO: 67466
  Cyclic GFR-binding peptide
  MOD_RES (2)..(4)..(35): Xaa is C or S

SEQ ID NO: 113019 - protein, 35 aa, Artificial Sequence; identical to SEQ ID NO: 21999
  Cyclic GFR-binding peptide
  MOD_RES (29)..(29): Xaa is C or S

SEQ ID NO: 113020 - protein, 36 aa, Artificial Sequence; identical to SEQ ID NO: 22002
  Cyclic GFR-binding peptide
  MOD_RES (33)..(33): Xaa is C or S

SEQ ID NO: 113021 - protein, 36 aa, Artificial Sequence; identical to SEQ ID NO: 65757
  Cyclic GFR-binding peptide
  MOD_RES (1)..(32)..(33): Xaa is C or S

SEQ ID NO: 113022 - protein, 34 aa, Artificial Sequence; identical to SEQ ID NO: 64132
  Cyclic GFR-binding peptide
  MOD_RES (2)..(4): Xaa is C or S

SEQ ID NO: 113023 - protein, 30 aa, Artificial Sequence; identical to SEQ ID NO: 65759
  Cyclic GFR-binding peptide
  MOD_RES (2)..(2): Xaa is C or S

SEQ ID NO: 113024 - protein, 31 aa, Artificial Sequence; identical to SEQ ID NO: 67475
  Cyclic GFR-binding peptide
  MOD_RES (1)..(1): Xaa is C or S

SEQ ID NO: 113025 - protein, 43 aa, Artificial Sequence; identical to SEQ ID NO: 22010
  Cyclic GFR-binding peptide
  MOD_RES (2)..(39): Xaa is C or S

SEQ ID NO: 113026 - protein, 30 aa, Artificial Sequence; identical to SEQ ID NO: 62396
  Cyclic GFR-binding peptide
  MOD_RES (27)..(28): Xaa is C or S

SEQ ID NO: 113027 - protein, 37 aa, Artificial Sequence; identical to SEQ ID NO: 22014
  Cyclic GFR-binding peptide
  MOD_RES (34)..(34): Xaa is C or S

SEQ ID NO: 113028 - protein, 37 aa, Artificial Sequence; identical to SEQ ID NO: 22015
  Cyclic GFR-binding peptide
  MOD_RES (1)..(3)..(37): Xaa is C or S

SEQ ID NO: 113029 - protein, 32 aa, Artificial Sequence; identical to SEQ ID NO: 62399
  Cyclic GFR-binding peptide
  MOD_RES (30)..(31): Xaa is C or S

SEQ ID NO: 113030 - protein, 25 aa, Artificial Sequence
  Cyclic GFR-binding peptide
ELVTAKKHQGQHPKIRIKRMQVPRQ

SEQ ID NO: 113031 - protein, 28 aa, Artificial Sequence
  Cyclic GFR-binding peptide
VQVEKFIPKKRVIEVKAVKVSRLQVQTP

SEQ ID NO: 113032 - protein, 26 aa, Artificial Sequence
  Cyclic GFR-binding peptide
  MOD_RES (1)..(1): Xaa is C or S
XSKVVMVQVEKVKPTRGVVKAIKVSR

SEQ ID NO: 113033 - protein, 44 aa, Artificial Sequence; identical to SEQ ID NO: 22025
  Cyclic GFR-binding peptide
  MOD_RES (2)..(4)..(38): Xaa is C or S

SEQ ID NO: 113034 - protein, 33 aa, Artificial Sequence; identical to SEQ ID NO: 67487
  Cyclic GFR-binding peptide
  MOD_RES (1)..(3): Xaa is C or S

SEQ ID NO: 113035 - protein, 29 aa, Artificial Sequence
  Cyclic GFR-binding peptide
LHDELTVQVEKFIPKKRVIEVKAVKVSRL

SEQ ID NO: 113036 - protein, 33 aa, Artificial Sequence; identical to SEQ ID NO: 22028
  Cyclic GFR-binding peptide
  MOD_RES (1)..(1): Xaa is C or S

SEQ ID NO: 113037 - protein, 35 aa, Artificial Sequence; identical to SEQ ID NO: 22029
  Cyclic GFR-binding peptide
  MOD_RES (1)..(35): Xaa is C or S

SEQ ID NO: 113038 - protein, 37 aa, Artificial Sequence; identical to SEQ ID NO: 22030
  Cyclic GFR-binding peptide
  MOD_RES (1)..(1): Xaa is C or S

SEQ ID NO: 113039 - protein, 45 aa, Artificial Sequence; identical to SEQ ID NO: 22032
  Cyclic GFR-binding peptide
  MOD_RES (2)..(4)..(41): Xaa is C or S

SEQ ID NO: 113040 - protein, 29 aa, Artificial Sequence
  Cyclic GFR-binding peptide
  MOD_RES (27)..(28): Xaa is C or S
MVTAKKIKPTKGIIKRIQVPRLDQSVXXP

SEQ ID NO: 113041 - protein, 33 aa, Artificial Sequence; identical to SEQ ID NO: 65778
  Cyclic GFR-binding peptide
  MOD_RES (1)..(3): Xaa is C or S

SEQ ID NO: 113042 - protein, 34 aa, Artificial Sequence; identical to SEQ ID NO: 67497
  Cyclic GFR-binding peptide
  MOD_RES (28)..(29): Xaa is C or S

SEQ ID NO: 113043 - protein, 40 aa, Artificial Sequence; identical to SEQ ID NO: 22034
  Cyclic GFR-binding peptide
  MOD_RES (1)..(3)..(40): Xaa is C or S

SEQ ID NO: 113044 - protein, 25 aa, Artificial Sequence
  Cyclic GFR-binding peptide
VQVEKVKPKRGVVKAIKVSRLAQPV

SEQ ID NO: 113045 - protein, 31 aa, Artificial Sequence; identical to SEQ ID NO: 65782
  Cyclic GFR-binding peptide
  MOD_RES (1)..(1): Xaa is C or S

SEQ ID NO: 113046 - protein, 37 aa, Artificial Sequence; identical to SEQ ID NO: 65783
  Cyclic GFR-binding peptide
  MOD_RES (1)..(32)..(33): Xaa is C or S

SEQ ID NO: 113047 - protein, 41 aa, Artificial Sequence; identical to SEQ ID NO: 62416
  Cyclic GFR-binding peptide
  MOD_RES (2)..(4)..(35)..(36): Xaa is C or S

SEQ ID NO: 113048 - protein, 22 aa, Artificial Sequence
  Cyclic GFR-binding peptide
MVTAKKVKPTRGVIKRIQVPRL

SEQ ID NO: 113049 - protein, 35 aa, Artificial Sequence; identical to SEQ ID NO: 22038
  Cyclic GFR-binding peptide
  MOD_RES (1)..(3): Xaa is C or S

SEQ ID NO: 113050 - protein, 31 aa, Artificial Sequence; identical to SEQ ID NO: 64161
  Cyclic GFR-binding peptide
  MOD_RES (30)..(31): Xaa is C or S

SEQ ID NO: 113051 - protein, 32 aa, Artificial Sequence; identical to SEQ ID NO: 22040
  Cyclic GFR-binding peptide
  MOD_RES (1)..(3): Xaa is C or S

SEQ ID NO: 113052 - protein, 38 aa, Artificial Sequence; identical to SEQ ID NO: 22042
  Cyclic GFR-binding peptide
  MOD_RES (35)..(35): Xaa is C or S

SEQ ID NO: 113053 - protein, 27 aa, Artificial Sequence
  Cyclic GFR-binding peptide
  MOD_RES (2)..(2): Xaa is C or S
KXSKVVMVTAKKVKPTRGVIKRIQVPR

SEQ ID NO: 113054 - protein, 40 aa, Artificial Sequence; identical to SEQ ID NO: 22046
  Cyclic GFR-binding peptide
  MOD_RES (2)..(4)..(38): Xaa is C or S

SEQ ID NO: 113055 - protein, 29 aa, Artificial Sequence
  Cyclic GFR-binding peptide
  MOD_RES (1)..(1): Xaa is C or S
XQSHEELVTAKKHQGQHPKIRIKRMQVPR

SEQ ID NO: 113056 - protein, 25 aa, Artificial Sequence
  Cyclic GFR-binding peptide
MVTAKKVKPKRGVIKRIQVPRLAQP

SEQ ID NO: 113057 - protein, 27 aa, Artificial Sequence
  Cyclic GFR-binding peptide
QLFVTAKKHQGQHPKIRIKRMQVPREE

SEQ ID NO: 113058 - protein, 24 aa, Artificial Sequence
  Cyclic GFR-binding peptide
IMVQVEKIKPTKGIVKAIKVSRLD

SEQ ID NO: 113059 - protein, 33 aa, Artificial Sequence; identical to SEQ ID NO: 65796
  Cyclic GFR-binding peptide
  MOD_RES (1)..(32)..(33): Xaa is C or S

SEQ ID NO: 113060 - protein, 32 aa, Artificial Sequence; identical to SEQ ID NO: 22051
  Cyclic GFR-binding peptide
  MOD_RES (32)..(32): Xaa is C or S

SEQ ID NO: 113061 - protein, 33 aa, Artificial Sequence; identical to SEQ ID NO: 22052
  Cyclic GFR-binding peptide
  MOD_RES (28)..(28): Xaa is C or S

SEQ ID NO: 113062 - protein, 25 aa, Artificial Sequence
  Cyclic GFR-binding peptide
RVIMVTAKKVKPKRGVIKRIQVPRL

SEQ ID NO: 113063 - protein, 36 aa, Artificial Sequence; identical to SEQ ID NO: 22054
  Cyclic GFR-binding peptide
  MOD_RES (1)..(1): Xaa is C or S

SEQ ID NO: 113064 - protein, 32 aa, Artificial Sequence; identical to SEQ ID NO: 22056
  Cyclic GFR-binding peptide
  MOD_RES (29)..(29): Xaa is C or S

SEQ ID NO: 113065 - protein, 32 aa, Artificial Sequence; identical to SEQ ID NO: 65799
  Cyclic GFR-binding peptide
  MOD_RES (2)..(2): Xaa is C or S

SEQ ID NO: 113066 - protein, 39 aa, Artificial Sequence; identical to SEQ ID NO: 22057
  Cyclic GFR-binding peptide
  MOD_RES (2)..(4): Xaa is C or S

SEQ ID NO: 113067 - protein, 42 aa, Artificial Sequence; identical to SEQ ID NO: 22059
  Cyclic GFR-binding peptide
  MOD_RES (2)..(4)..(38): Xaa is C or S

SEQ ID NO: 113068 - protein, 39 aa, Artificial Sequence; identical to SEQ ID NO: 22060
  Cyclic GFR-binding peptide
  MOD_RES (1)..(38): Xaa is C or S

SEQ ID NO: 113069 - protein, 33 aa, Artificial Sequence; identical to SEQ ID NO: 64175
  Cyclic GFR-binding peptide
  MOD_RES (29)..(30): Xaa is C or S

SEQ ID NO: 113070 - protein, 26 aa, Artificial Sequence
  Cyclic GFR-binding peptide
VMVTAKKVKPTRGVIKRIQVPRLDQP

SEQ ID NO: 113071 - protein, 34 aa, Artificial Sequence; identical to SEQ ID NO: 22063
  Cyclic GFR-binding peptide
  MOD_RES (32)..(32): Xaa is C or S

SEQ ID NO: 113072 - protein, 32 aa, Artificial Sequence; identical to SEQ ID NO: 64179
  Cyclic GFR-binding peptide
  MOD_RES (26)..(27): Xaa is C or S

SEQ ID NO: 113073 - protein, 37 aa, Artificial Sequence; identical to SEQ ID NO: 65804
  Cyclic GFR-binding peptide
  MOD_RES (1)..(3)..(34)..(35): Xaa is C or S

SEQ ID NO: 113074 - protein, 29 aa, Artificial Sequence
  Cyclic GFR-binding peptide
  MOD_RES (29)..(29): Xaa is C or S
LVTAKKHQGQHPKIRIKRMQVPRQGTPVX

SEQ ID NO: 113075 - protein, 43 aa, Artificial Sequence; identical to SEQ ID NO: 22065
  Cyclic GFR-binding peptide
  MOD_RES (1)..(3)..(37): Xaa is C or S

SEQ ID NO: 113076 - protein, 23 aa, Artificial Sequence
  Cyclic GFR-binding peptide
VIMVTAKKVKPKRGVIKRIQVPR

SEQ ID NO: 113077 - protein, 26 aa, Artificial Sequence
  Cyclic GFR-binding peptide
KVIMVTAKKIKPTKGIIKRIQVPRLD

SEQ ID NO: 113078 - protein, 32 aa, Artificial Sequence; identical to SEQ ID NO: 22067
  Cyclic GFR-binding peptide
  MOD_RES (1)..(3): Xaa is C or S

SEQ ID NO: 113079 - protein, 22 aa, Artificial Sequence
  Cyclic GFR-binding peptide
VQVEKVKPKRGVVKAIKVSRLA

SEQ ID NO: 113080 - protein, 34 aa, Artificial Sequence; identical to SEQ ID NO: 22070
  Cyclic GFR-binding peptide
  MOD_RES (2)..(4): Xaa is C or S

SEQ ID NO: 113081 - protein, 29 aa, Artificial Sequence
  Cyclic GFR-binding peptide
  MOD_RES (1)..(1): Xaa is C or S
XKNHQLFVTAKKHQGQHPKIRIKRMQVPR

SEQ ID NO: 113082 - protein, 37 aa, Artificial Sequence; identical to SEQ ID NO: 22076
  Cyclic GFR-binding peptide
  MOD_RES (2)..(36): Xaa is C or S

SEQ ID NO: 113083 - protein, 31 aa, Artificial Sequence; identical to SEQ ID NO: 22078
  Cyclic GFR-binding peptide

SEQ ID NO: 113084 - protein, 25 aa, Artificial Sequence
  Cyclic GFR-binding peptide
LFVTAKKHQGQHPKIRIKRMQVPRE

SEQ ID NO: 113085 - protein, 20 aa, Artificial Sequence
  Cyclic GFR-binding peptide
VTAKKVKPKRGVIKRIQVPR

SEQ ID NO: 113086 - protein, 36 aa, Artificial Sequence; identical to SEQ ID NO: 22080
  Cyclic GFR-binding peptide
  MOD_RES (2)..(4): Xaa is C or S

SEQ ID NO: 113087 - protein, 26 aa, Artificial Sequence
  Cyclic GFR-binding peptide
FVQVEKHQGQHPKIRVKAMKVSREET

SEQ ID NO: 113088 - protein, 29 aa, Artificial Sequence
  Cyclic GFR-binding peptide
  MOD_RES (27)..(28): Xaa is C or S
MVQVEKIKPTKGIVKAIKVSRLDQSVXXP

SEQ ID NO: 113089 - protein, 26 aa, Artificial Sequence
  Cyclic GFR-binding peptide
SKVIMVQVEKIKPTKGIVKAIKVSRL

SEQ ID NO: 113090 - protein, 32 aa, Artificial Sequence; identical to SEQ ID NO: 65827
  Cyclic GFR-binding peptide
  MOD_RES (1)..(32): Xaa is C or S

SEQ ID NO: 113091 - protein, 30 aa, Artificial Sequence; identical to SEQ ID NO: 22087
  Cyclic GFR-binding peptide
  MOD_RES (2)..(2): Xaa is C or S

SEQ ID NO: 113092 - protein, 28 aa, Artificial Sequence
  Cyclic GFR-binding peptide
ELTVQVEKFIPKKRVIEVKAVKVSRLQV

SEQ ID NO: 113093 - protein, 25 aa, Artificial Sequence
  Cyclic GFR-binding peptide
ELRVTAKKLKPKKRVYEIKRVQVPR

SEQ ID NO: 113094 - protein, 30 aa, Artificial Sequence; identical to SEQ ID NO: 22090
  Cyclic GFR-binding peptide

SEQ ID NO: 113095 - protein, 34 aa, Artificial Sequence; identical to SEQ ID NO: 67543
  Cyclic GFR-binding peptide
  MOD_RES (28)..(29): Xaa is C or S

SEQ ID NO: 113096 - protein, 28 aa, Artificial Sequence
  Cyclic GFR-binding peptide
QSHEELVTAKKHQGQHPKIRIKRMQVPR

SEQ ID NO: 113097 - protein, 41 aa, Artificial Sequence; identical to SEQ ID NO: 22092
  Cyclic GFR-binding peptide
  MOD_RES (1)..(3)..(40): Xaa is C or S

SEQ ID NO: 113098 - protein, 32 aa, Artificial Sequence; identical to SEQ ID NO: 22094
  Cyclic GFR-binding peptide
  MOD_RES (28)..(28): Xaa is C or S

SEQ ID NO: 113099 - protein, 22 aa, Artificial Sequence
  Cyclic GFR-binding peptide
MVQVEKIKPTKGIVKAIKVSRL

SEQ ID NO: 113100 - protein, 38 aa, Artificial Sequence; identical to SEQ ID NO: 22096
  Cyclic GFR-binding peptide
  MOD_RES (2)..(4): Xaa is C or S

SEQ ID NO: 113101 - protein, 32 aa, Artificial Sequence; identical to SEQ ID NO: 67547
  Cyclic GFR-binding peptide
  MOD_RES (2)..(2): Xaa is C or S

SEQ ID NO: 113102 - protein, 32 aa, Artificial Sequence; identical to SEQ ID NO: 22097
  Cyclic GFR-binding peptide
  MOD_RES (32)..(32): Xaa is C or S

SEQ ID NO: 113103 - protein, 27 aa, Artificial Sequence
  Cyclic GFR-binding peptide
SKVVMVQVEKVKPTRGVVKAIKVSRLD

SEQ ID NO: 113104 - protein, 31 aa, Artificial Sequence; identical to SEQ ID NO: 62467
  Cyclic GFR-binding peptide
  MOD_RES (29)..(30): Xaa is C or S

SEQ ID NO: 113105 - protein, 27 aa, Artificial Sequence
  Cyclic GFR-binding peptide
KVVMVTAKKVKPTRGVIKRIQVPRLDQ

SEQ ID NO: 113106 - protein, 26 aa, Artificial Sequence
  Cyclic GFR-binding peptide
MVQVEKVKPKRGVVKAIKVSRLAQPV

SEQ ID NO: 113107 - protein, 35 aa, Artificial Sequence; identical to SEQ ID NO: 67552
  Cyclic GFR-binding peptide
  MOD_RES (29)..(30): Xaa is C or S

SEQ ID NO: 113108 - protein, 28 aa, Artificial Sequence
  Cyclic GFR-binding peptide
  MOD_RES (26)..(27): Xaa is C or S
VTAKKVKPKRGVIKRIQVPRLAQPVXXP

SEQ ID NO: 113109 - protein, 37 aa, Artificial Sequence; identical to SEQ ID NO: 67554
  Cyclic GFR-binding peptide
  MOD_RES (31)..(32): Xaa is C or S

SEQ ID NO: 113110 - protein, 30 aa, Artificial Sequence; identical to SEQ ID NO: 67555
  Cyclic GFR-binding peptide
  MOD_RES (30)..(30): Xaa is C or S

SEQ ID NO: 113111 - protein, 32 aa, Artificial Sequence; identical to SEQ ID NO: 64207
  Cyclic GFR-binding peptide
  MOD_RES (27)..(28): Xaa is C or S

SEQ ID NO: 113112 - protein, 28 aa, Artificial Sequence
  Cyclic GFR-binding peptide
SHEELVQVEKHQGQHPKIRVKAMKVSRQ

SEQ ID NO: 113113 - protein, 23 aa, Artificial Sequence
  Cyclic GFR-binding peptide
VTAKKLKPKKRVYEIKRVQVPRH

SEQ ID NO: 113114 - protein, 41 aa, Artificial Sequence; identical to SEQ ID NO: 22103
  Cyclic GFR-binding peptide
  MOD_RES (1)..(35): Xaa is C or S

SEQ ID NO: 113115 - protein, 30 aa, Artificial Sequence; identical to SEQ ID NO: 65842
  Cyclic GFR-binding peptide
  MOD_RES (1)..(3): Xaa is C or S

SEQ ID NO: 113116 - protein, 39 aa, Artificial Sequence; identical to SEQ ID NO: 62474
  Cyclic GFR-binding peptide
  MOD_RES (1)..(3)..(34)..(35): Xaa is C or S

SEQ ID NO: 113117 - protein, 36 aa, Artificial Sequence; identical to SEQ ID NO: 64210
  Cyclic GFR-binding peptide
  MOD_RES (31)..(32): Xaa is C or S

SEQ ID NO: 113118 - protein, 26 aa, Artificial Sequence
  Cyclic GFR-binding peptide
IMVTAKKIKPTKGIIKRIQVPRLDQS

SEQ ID NO: 113119 - protein, 34 aa, Artificial Sequence; identical to SEQ ID NO: 67558
  Cyclic GFR-binding peptide
  MOD_RES (1)..(32)..(33): Xaa is C or S

SEQ ID NO: 113120 - protein, 36 aa, Artificial Sequence; identical to SEQ ID NO: 22107
  Cyclic GFR-binding peptide
  MOD_RES (34)..(34): Xaa is C or S

SEQ ID NO: 113121 - protein, 33 aa, Artificial Sequence; identical to SEQ ID NO: 22108
  Cyclic GFR-binding peptide
  MOD_RES (33)..(33): Xaa is C or S

SEQ ID NO: 113122 - protein, 29 aa, Artificial Sequence
  Cyclic GFR-binding peptide
  MOD_RES (29)..(29): Xaa is C or S
VIMVTAKKIKPTKGIIKRIQVPRLDQSVX

SEQ ID NO: 113123 - protein, 26 aa, Artificial Sequence
  Cyclic GFR-binding peptide
MVTAKKVKPKRGVIKRIQVPRLAQPV

SEQ ID NO: 113124 - protein, 34 aa, Artificial Sequence; identical to SEQ ID NO: 64215
  Cyclic GFR-binding peptide
  MOD_RES (1)..(3)..(34): Xaa is C or S

SEQ ID NO: 113125 - protein, 28 aa, Artificial Sequence
  Cyclic GFR-binding peptide
LTVQVEKFIPKKRVIEVKAVKVSRLQVQ

SEQ ID NO: 113126 - protein, 25 aa, Artificial Sequence
  Cyclic GFR-binding peptide
VIMVQVEKVKPKRGVVKAIKVSRLA

SEQ ID NO: 113127 - protein, 36 aa, Artificial Sequence; identical to SEQ ID NO: 22114
  Cyclic GFR-binding peptide
  MOD_RES (1)..(3): Xaa is C or S

SEQ ID NO: 113128 - protein, 33 aa, Artificial Sequence; identical to SEQ ID NO: 22116
  Cyclic GFR-binding peptide
  MOD_RES (33)..(33): Xaa is C or S

SEQ ID NO: 113129 - protein, 33 aa, Artificial Sequence; identical to SEQ ID NO: 22119
  Cyclic GFR-binding peptide
  MOD_RES (30)..(30): Xaa is C or S

SEQ ID NO: 113130 - protein, 30 aa, Artificial Sequence; identical to SEQ ID NO: 64218
  Cyclic GFR-binding peptide
  MOD_RES (1)..(3): Xaa is C or S

SEQ ID NO: 113131 - protein, 24 aa, Artificial Sequence
  Cyclic GFR-binding peptide
MVTAKKVKPTRGVIKRIQVPRLDQ

SEQ ID NO: 113132 - protein, 28 aa, Artificial Sequence
  Cyclic GFR-binding peptide
SHEELVTAKKHQGQHPKIRIKRMQVPRQ

SEQ ID NO: 113133 - protein, 38 aa, Artificial Sequence; identical to SEQ ID NO: 64222
  Cyclic GFR-binding peptide
  MOD_RES (2)..(33)..(34): Xaa is C or S

SEQ ID NO: 113134 - protein, 35 aa, Artificial Sequence; identical to SEQ ID NO: 22122
  Cyclic GFR-binding peptide
  MOD_RES (2)..(2): Xaa is C or S

SEQ ID NO: 113135 - protein, 38 aa, Artificial Sequence; identical to SEQ ID NO: 65858
  Cyclic GFR-binding peptide
  MOD_RES (2)..(4)..(35)..(36): Xaa is C or S

SEQ ID NO: 113136 - protein, 38 aa, Artificial Sequence; identical to SEQ ID NO: 64223
  Cyclic GFR-binding peptide
  MOD_RES (2)..(33)..(34): Xaa is C or S

SEQ ID NO: 113137 - protein, 34 aa, Artificial Sequence; identical to SEQ ID NO: 67569
  Cyclic GFR-binding peptide
  MOD_RES (28)..(29): Xaa is C or S

SEQ ID NO: 113138 - protein, 23 aa, Artificial Sequence
  Cyclic GFR-binding peptide
MVTAKKVKPKRGVIKRIQVPRLA

SEQ ID NO: 113139 - protein, 24 aa, Artificial Sequence
  Cyclic GFR-binding peptide
FVTAKKHQGQHPKIRIKRMQVPRE

SEQ ID NO: 113140 - protein, 32 aa, Artificial Sequence; identical to SEQ ID NO: 22131
  Cyclic GFR-binding peptide

SEQ ID NO: 113141 - protein, 29 aa, Artificial Sequence
  Cyclic GFR-binding peptide
KVVMVQVEKVKPTRGVVKAIKVSRLDQPV

SEQ ID NO: 113142 - protein, 28 aa, Artificial Sequence
  Cyclic GFR-binding peptide
SKVIMVTAKKIKPTKGIIKRIQVPRLDQ

SEQ ID NO: 113143 - protein, 31 aa, Artificial Sequence; identical to SEQ ID NO: 65869
  Cyclic GFR-binding peptide
  MOD_RES (28)..(29): Xaa is C or S

SEQ ID NO: 113144 - protein, 33 aa, Artificial Sequence; identical to SEQ ID NO: 65871
  Cyclic GFR-binding peptide
  MOD_RES (28)..(29): Xaa is C or S

SEQ ID NO: 113145 - protein, 41 aa, Artificial Sequence; identical to SEQ ID NO: 22133
  Cyclic GFR-binding peptide
  MOD_RES (2)..(4)..(41): Xaa is C or S

SEQ ID NO: 113146 - protein, 42 aa, Artificial Sequence; identical to SEQ ID NO: 22134
  Cyclic GFR-binding peptide
  MOD_RES (1)..(3)..(37): Xaa is C or S

SEQ ID NO: 113147 - protein, 33 aa, Artificial Sequence; identical to SEQ ID NO: 22135
  Cyclic GFR-binding peptide

SEQ ID NO: 113148 - protein, 42 aa, Artificial Sequence; identical to SEQ ID NO: 22136
  Cyclic GFR-binding peptide
  MOD_RES (2)..(4)..(41): Xaa is C or S

SEQ ID NO: 113149 - protein, 35 aa, Artificial Sequence; identical to SEQ ID NO: 65877
  Cyclic GFR-binding peptide
  MOD_RES (31)..(32): Xaa is C or S

SEQ ID NO: 113150 - protein, 39 aa, Artificial Sequence; identical to SEQ ID NO: 22138
  Cyclic GFR-binding peptide
  MOD_RES (34)..(34): Xaa is C or S

SEQ ID NO: 113151 - protein, 24 aa, Artificial Sequence
  Cyclic GFR-binding peptide
VVMVTAKKVKPTRGVIKRIQVPRL

SEQ ID NO: 113152 - protein, 29 aa, Artificial Sequence
  Cyclic GFR-binding peptide
HQLFVQVEKHQGQHPKIRVKAMKVSREET

SEQ ID NO: 113153 - protein, 36 aa, Artificial Sequence; identical to SEQ ID NO: 64236
  Cyclic GFR-binding peptide
  MOD_RES (31)..(32): Xaa is C or S

SEQ ID NO: 113154 - protein, 31 aa, Artificial Sequence; identical to SEQ ID NO: 22141
  Cyclic GFR-binding peptide
  MOD_RES (31)..(31): Xaa is C or S

SEQ ID NO: 113155 - protein, 29 aa, Artificial Sequence
  Cyclic GFR-binding peptide
  MOD_RES (1)..(1): Xaa is C or S
XSKVVMVTAKKVKPTRGVIKRIQVPRLDQ

SEQ ID NO: 113156 - protein, 38 aa, Artificial Sequence; identical to SEQ ID NO: 62512
  Cyclic GFR-binding peptide
  MOD_RES (1)..(32)..(33): Xaa is C or S

SEQ ID NO: 113157 - protein, 37 aa, Artificial Sequence; identical to SEQ ID NO: 64238
  Cyclic GFR-binding peptide
  MOD_RES (1)..(32)..(33): Xaa is C or S

SEQ ID NO: 113158 - protein, 32 aa, Artificial Sequence; identical to SEQ ID NO: 22144
  Cyclic GFR-binding peptide
  MOD_RES (1)..(3): Xaa is C or S

SEQ ID NO: 113159 - protein, 24 aa, Artificial Sequence
  Cyclic GFR-binding peptide
KVVMVTAKKVKPTRGVIKRIQVPR

SEQ ID NO: 113160 - protein, 36 aa, Artificial Sequence; identical to SEQ ID NO: 67585
  Cyclic GFR-binding peptide
  MOD_RES (30)..(31): Xaa is C or S

SEQ ID NO: 113161 - protein, 34 aa, Artificial Sequence; identical to SEQ ID NO: 65888
  Cyclic GFR-binding peptide
  MOD_RES (2)..(4): Xaa is C or S

SEQ ID NO: 113162 - protein, 33 aa, Artificial Sequence; identical to SEQ ID NO: 22146
  Cyclic GFR-binding peptide
  MOD_RES (2)..(2): Xaa is C or S

SEQ ID NO: 113163 - protein, 28 aa, Artificial Sequence
  Cyclic GFR-binding peptide
VTAKKLKPKKRVYEIKRVQVPRHHVRSP

SEQ ID NO: 113164 - protein, 29 aa, Artificial Sequence
  Cyclic GFR-binding peptide
QSHEELVTAKKHQGQHPKIRIKRMQVPRQ

SEQ ID NO: 113165 - protein, 33 aa, Artificial Sequence; identical to SEQ ID NO: 22150
  Cyclic GFR-binding peptide
  MOD_RES (1)..(1): Xaa is C or S

SEQ ID NO: 113166 - protein, 31 aa, Artificial Sequence; identical to SEQ ID NO: 22151
  Cyclic GFR-binding peptide
  MOD_RES (29)..(29): Xaa is C or S

SEQ ID NO: 113167 - protein, 29 aa, Artificial Sequence
  Cyclic GFR-binding peptide
  MOD_RES (2)..(2): Xaa is C or S
KXSKVVMVTAKKVKPTRGVIKRIQVPRLD

SEQ ID NO: 113168 - protein, 27 aa, Artificial Sequence
  Cyclic GFR-binding peptide
VTAKKLKPKKRVYEIKRVQVPRHHVRS

SEQ ID NO: 113169 - protein, 34 aa, Artificial Sequence; identical to SEQ ID NO: 22155
  Cyclic GFR-binding peptide
  MOD_RES (34)..(34): Xaa is C or S

SEQ ID NO: 113170 - protein, 28 aa, Artificial Sequence
  Cyclic GFR-binding peptide
  MOD_RES (27)..(28): Xaa is C or S
MVQVEKVKPKRGVVKAIKVSRLAQPVXX

SEQ ID NO: 113171 - protein, 37 aa, Artificial Sequence; identical to SEQ ID NO: 22156
  Cyclic GFR-binding peptide
  MOD_RES (2)..(4): Xaa is C or S

SEQ ID NO: 113172 - protein, 40 aa, Artificial Sequence; identical to SEQ ID NO: 62527
  Cyclic GFR-binding peptide
  MOD_RES (1)..(3)..(34)..(35): Xaa is C or S

SEQ ID NO: 113173 - protein, 21 aa, Artificial Sequence
  Cyclic GFR-binding peptide
VQVEKVKPTRGVVKAIKVSRL

SEQ ID NO: 113174 - protein, 22 aa, Artificial Sequence
  Cyclic GFR-binding peptide
VQVEKFIPKKRVIEVKAVKVSR

SEQ ID NO: 113175 - protein, 30 aa, Artificial Sequence; identical to SEQ ID NO: 22160
  Cyclic GFR-binding peptide
  MOD_RES (1)..(1): Xaa is C or S

SEQ ID NO: 113176 - protein, 26 aa, Artificial Sequence
  Cyclic GFR-binding peptide
RVIMVTAKKVKPKRGVIKRIQVPRLA

SEQ ID NO: 113177 - protein, 34 aa, Artificial Sequence; identical to SEQ ID NO: 22162
  Cyclic GFR-binding peptide
  MOD_RES (2)..(4): Xaa is C or S

SEQ ID NO: 113178 - protein, 28 aa, Artificial Sequence
  Cyclic GFR-binding peptide
  MOD_RES (1)..(3): Xaa is C or S
XKXSRVIMVTAKKVKPKRGVIKRIQVPR

SEQ ID NO: 113179 - protein, 28 aa, Artificial Sequence
  Cyclic GFR-binding peptide
  MOD_RES (28)..(28): Xaa is C or S
IMVTAKKVKPKRGVIKRIQVPRLAQPVX

SEQ ID NO: 113180 - protein, 33 aa, Artificial Sequence; identical to SEQ ID NO: 22163
  Cyclic GFR-binding peptide
  MOD_RES (33)..(33): Xaa is C or S

SEQ ID NO: 113181 - protein, 33 aa, Artificial Sequence; identical to SEQ ID NO: 67604
  Cyclic GFR-binding peptide
  MOD_RES (30)..(31): Xaa is C or S

SEQ ID NO: 113182 - protein, 37 aa, Artificial Sequence; identical to SEQ ID NO: 67606
  Cyclic GFR-binding peptide
  MOD_RES (2)..(33)..(34): Xaa is C or S

SEQ ID NO: 113183 - protein, 35 aa, Artificial Sequence; identical to SEQ ID NO: 22164
  Cyclic GFR-binding peptide
  MOD_RES (2)..(4): Xaa is C or S

SEQ ID NO: 113184 - protein, 32 aa, Artificial Sequence; identical to SEQ ID NO: 22165
  Cyclic GFR-binding peptide

SEQ ID NO: 113185 - protein, 30 aa, Artificial Sequence; identical to SEQ ID NO: 62542
  Cyclic GFR-binding peptide
  MOD_RES (26)..(27): Xaa is C or S

SEQ ID NO: 113186 - protein, 38 aa, Artificial Sequence; identical to SEQ ID NO: 22166
  Cyclic GFR-binding peptide
  MOD_RES (32)..(32): Xaa is C or S

SEQ ID NO: 113187 - protein, 28 aa, Artificial Sequence
  Cyclic GFR-binding peptide
  MOD_RES (1)..(3): Xaa is C or S
XKXSKVIMVTAKKIKPTKGIIKRIQVPR

SEQ ID NO: 113188 - protein, 41 aa, Artificial Sequence; identical to SEQ ID NO: 22167
  Cyclic GFR-binding peptide
  MOD_RES (2)..(4)..(38): Xaa is C or S

SEQ ID NO: 113189 - protein, 31 aa, Artificial Sequence; identical to SEQ ID NO: 22168
  Cyclic GFR-binding peptide

SEQ ID NO: 113190 - protein, 33 aa, Artificial Sequence; identical to SEQ ID NO: 67608
  Cyclic GFR-binding peptide
  MOD_RES (30)..(31): Xaa is C or S

SEQ ID NO: 113191 - protein, 30 aa, Artificial Sequence; identical to SEQ ID NO: 64268
  Cyclic GFR-binding peptide
  MOD_RES (1)..(1): Xaa is C or S

SEQ ID NO: 113192 - protein, 23 aa, Artificial Sequence
  Cyclic GFR-binding peptide
VIMVTAKKIKPTKGIIKRIQVPR

SEQ ID NO: 113193 - protein, 28 aa, Artificial Sequence
  Cyclic GFR-binding peptide
  MOD_RES (28)..(28): Xaa is C or S
VMVQVEKVKPTRGVVKAIKVSRLDQPVX

SEQ ID NO: 113194 - protein, 41 aa, Artificial Sequence; identical to SEQ ID NO: 22170
  Cyclic GFR-binding peptide
  MOD_RES (1)..(35): Xaa is C or S

SEQ ID NO: 113195 - protein, 26 aa, Artificial Sequence
  Cyclic GFR-binding peptide
KVVMVTAKKVKPTRGVIKRIQVPRLD

SEQ ID NO: 113196 - protein, 34 aa, Artificial Sequence; identical to SEQ ID NO: 22172
  Cyclic GFR-binding peptide
  MOD_RES (30)..(30): Xaa is C or S

SEQ ID NO: 113197 - protein, 30 aa, Artificial Sequence; identical to SEQ ID NO: 22173
  Cyclic GFR-binding peptide

SEQ ID NO: 113198 - protein, 35 aa, Artificial Sequence; identical to SEQ ID NO: 22174
  Cyclic GFR-binding peptide
  MOD_RES (33)..(33): Xaa is C or S

SEQ ID NO: 113199 - protein, 28 aa, Artificial Sequence
  Cyclic GFR-binding peptide
QSHEELVQVEKHQGQHPKIRVKAMKVSR

SEQ ID NO: 113200 - protein, 34 aa, Artificial Sequence; identical to SEQ ID NO: 22179
  Cyclic GFR-binding peptide
  MOD_RES (28)..(28): Xaa is C or S

SEQ ID NO: 113201 - protein, 30 aa, Artificial Sequence; identical to SEQ ID NO: 64274
  Cyclic GFR-binding peptide
  MOD_RES (29)..(30): Xaa is C or S

SEQ ID NO: 113202 - protein, 32 aa, Artificial Sequence; identical to SEQ ID NO: 22180
  Cyclic GFR-binding peptide
  MOD_RES (2)..(4): Xaa is C or S

SEQ ID NO: 113203 - protein, 30 aa, Artificial Sequence; identical to SEQ ID NO: 65925
  Cyclic GFR-binding peptide
  MOD_RES (28)..(29): Xaa is C or S

SEQ ID NO: 113204 - protein, 38 aa, Artificial Sequence; identical to SEQ ID NO: 62551
  Cyclic GFR-binding peptide
  MOD_RES (2)..(33)..(34): Xaa is C or S

SEQ ID NO: 113205 - protein, 40 aa, Artificial Sequence; identical to SEQ ID NO: 22181
  Cyclic GFR-binding peptide
  MOD_RES (1)..(3)..(37): Xaa is C or S

SEQ ID NO: 113206 - protein, 33 aa, Artificial Sequence; identical to SEQ ID NO: 22184
  Cyclic GFR-binding peptide
  MOD_RES (1)..(3): Xaa is C or S

SEQ ID NO: 113207 - protein, 27 aa, Artificial Sequence
  Cyclic GFR-binding peptide
VVMVQVEKVKPTRGVVKAIKVSRLDQP

SEQ ID NO: 113208 - protein, 23 aa, Artificial Sequence
  Cyclic GFR-binding peptide
IMVTAKKIKPTKGIIKRIQVPRL

SEQ ID NO: 113209 - protein, 35 aa, Artificial Sequence; identical to SEQ ID NO: 67631
  Cyclic GFR-binding peptide
  MOD_RES (31)..(32): Xaa is C or S

SEQ ID NO: 113210 - protein, 34 aa, Artificial Sequence; identical to SEQ ID NO: 22187
  Cyclic GFR-binding peptide
  MOD_RES (2)..(2): Xaa is C or S

SEQ ID NO: 113211 - protein, 32 aa, Artificial Sequence; identical to SEQ ID NO: 64284
  Cyclic GFR-binding peptide
  MOD_RES (29)..(30): Xaa is C or S

SEQ ID NO: 113212 - protein, 41 aa, Artificial Sequence; identical to SEQ ID NO: 67636
  Cyclic GFR-binding peptide
  MOD_RES (2)..(4)..(35)..(36): Xaa is C or S

SEQ ID NO: 113213 - protein, 41 aa, Artificial Sequence; identical to SEQ ID NO: 22188
  Cyclic GFR-binding peptide
  MOD_RES (1)..(3)..(37): Xaa is C or S

SEQ ID NO: 113214 - protein, 27 aa, Artificial Sequence
  Cyclic GFR-binding peptide
RVIMVQVEKVKPKRGVVKAIKVSRLAQ

SEQ ID NO: 113215 - protein, 35 aa, Artificial Sequence; identical to SEQ ID NO: 65937
  Cyclic GFR-binding peptide
  MOD_RES (2)..(4)..(35): Xaa is C or S

SEQ ID NO: 113216 - protein, 34 aa, Artificial Sequence; identical to SEQ ID NO: 22190
  Cyclic GFR-binding peptide
  MOD_RES (1)..(1): Xaa is C or S

SEQ ID NO: 113217 - protein, 25 aa, Artificial Sequence
  Cyclic GFR-binding peptide
IMVTAKKVKPKRGVIKRIQVPRLAQ

SEQ ID NO: 113218 - protein, 26 aa, Artificial Sequence
  Cyclic GFR-binding peptide
HEELVTAKKHQGQHPKIRIKRMQVPR

SEQ ID NO: 113219 - protein, 30 aa, Artificial Sequence; identical to SEQ ID NO: 65940
  Cyclic GFR-binding peptide
  MOD_RES (1)..(3): Xaa is C or S

SEQ ID NO: 113220 - protein, 36 aa, Artificial Sequence; identical to SEQ ID NO: 22194
  Cyclic GFR-binding peptide
  MOD_RES (34)..(34): Xaa is C or S

SEQ ID NO: 113221 - protein, 31 aa, Artificial Sequence; identical to SEQ ID NO: 67647
  Cyclic GFR-binding peptide
  MOD_RES (26)..(27): Xaa is C or S

SEQ ID NO: 113222 - protein, 39 aa, Artificial Sequence; identical to SEQ ID NO: 64295
  Cyclic GFR-binding peptide
  MOD_RES (2)..(33)..(34): Xaa is C or S

SEQ ID NO: 113223 - protein, 36 aa, Artificial Sequence; identical to SEQ ID NO: 67648
  Cyclic GFR-binding peptide
  MOD_RES (2)..(4)..(35)..(36): Xaa is C or S

SEQ ID NO: 113224 - protein, 37 aa, Artificial Sequence; identical to SEQ ID NO: 64297
  Cyclic GFR-binding peptide
  MOD_RES (2)..(4)..(35)..(36): Xaa is C or S

SEQ ID NO: 113225 - protein, 29 aa, Artificial Sequence
  Cyclic GFR-binding peptide
  MOD_RES (28)..(28): Xaa is C or S
VTAKKHQGQHPKIRIKRMQVPRQGTPVXE

SEQ ID NO: 113226 - protein, 36 aa, Artificial Sequence; identical to SEQ ID NO: 22201
  Cyclic GFR-binding peptide
  MOD_RES (2)..(36): Xaa is C or S

SEQ ID NO: 113227 - protein, 35 aa, Artificial Sequence; identical to SEQ ID NO: 22202
  Cyclic GFR-binding peptide

SEQ ID NO: 113228 - protein, 23 aa, Artificial Sequence
  Cyclic GFR-binding peptide
VTAKKVKPKRGVIKRIQVPRLAQ

SEQ ID NO: 113229 - protein, 28 aa, Artificial Sequence
  Cyclic GFR-binding peptide
QLFVTAKKHQGQHPKIRIKRMQVPREET

SEQ ID NO: 113230 - protein, 36 aa, Artificial Sequence; identical to SEQ ID NO: 22205
  Cyclic GFR-binding peptide
  MOD_RES (2)..(4): Xaa is C or S

SEQ ID NO: 113231 - protein, 32 aa, Artificial Sequence; identical to SEQ ID NO: 67660
  Cyclic GFR-binding peptide
  MOD_RES (27)..(28): Xaa is C or S

SEQ ID NO: 113232 - protein, 26 aa, Artificial Sequence
  Cyclic GFR-binding peptide
  MOD_RES (1)..(1): Xaa is C or S
XSRVIMVTAKKVKPKRGVIKRIQVPR

SEQ ID NO: 113233 - protein, 26 aa, Artificial Sequence
  Cyclic GFR-binding peptide
DELTVQVEKFIPKKRVIEVKAVKVSR

SEQ ID NO: 113234 - protein, 30 aa, Artificial Sequence; identical to SEQ ID NO: 22207
  Cyclic GFR-binding peptide
  MOD_RES (30)..(30): Xaa is C or S

SEQ ID NO: 113235 - protein, 26 aa, Artificial Sequence
  Cyclic GFR-binding peptide
VIMVTAKKIKPTKGIIKRIQVPRLDQ

SEQ ID NO: 113236 - protein, 33 aa, Artificial Sequence; identical to SEQ ID NO: 22209
  Cyclic GFR-binding peptide
  MOD_RES (30)..(30): Xaa is C or S

SEQ ID NO: 113237 - protein, 31 aa, Artificial Sequence; identical to SEQ ID NO: 22210
  Cyclic GFR-binding peptide
  MOD_RES (2)..(2): Xaa is C or S

SEQ ID NO: 113238 - protein, 34 aa, Artificial Sequence; identical to SEQ ID NO: 22211
  Cyclic GFR-binding peptide

SEQ ID NO: 113239 - protein, 37 aa, Artificial Sequence; identical to SEQ ID NO: 22212
  Cyclic GFR-binding peptide
  MOD_RES (32)..(32): Xaa is C or S

SEQ ID NO: 113240 - protein, 36 aa, Artificial Sequence; identical to SEQ ID NO: 22213
  Cyclic GFR-binding peptide
  MOD_RES (33)..(33): Xaa is C or S

SEQ ID NO: 113241 - protein, 38 aa, Artificial Sequence; identical to SEQ ID NO: 22214
  Cyclic GFR-binding peptide
  MOD_RES (1)..(35): Xaa is C or S

SEQ ID NO: 113242 - protein, 25 aa, Artificial Sequence
  Cyclic GFR-binding peptide
VVMVTAKKVKPTRGVIKRIQVPRLD

SEQ ID NO: 113243 - protein, 32 aa, Artificial Sequence; identical to SEQ ID NO: 22215
  Cyclic GFR-binding peptide

SEQ ID NO: 113244 - protein, 32 aa, Artificial Sequence; identical to SEQ ID NO: 22217
  Cyclic GFR-binding peptide
  MOD_RES (2)..(4): Xaa is C or S

SEQ ID NO: 113245 - protein, 36 aa, Artificial Sequence; identical to SEQ ID NO: 64315
  Cyclic GFR-binding peptide
  MOD_RES (1)..(3)..(34)..(35): Xaa is C or S

SEQ ID NO: 113246 - protein, 26 aa, Artificial Sequence
  Cyclic GFR-binding peptide
  MOD_RES (26)..(26): Xaa is C or S
VTAKKIKPTKGIIKRIQVPRLDQSVX

SEQ ID NO: 113247 - protein, 32 aa, Artificial Sequence; identical to SEQ ID NO: 22218
  Cyclic GFR-binding peptide
  MOD_RES (31)..(31): Xaa is C or S

SEQ ID NO: 113248 - protein, 37 aa, Artificial Sequence; identical to SEQ ID NO: 22219
  Cyclic GFR-binding peptide
  MOD_RES (34)..(34): Xaa is C or S

SEQ ID NO: 113249 - protein, 42 aa, Artificial Sequence; identical to SEQ ID NO: 22221
  Cyclic GFR-binding peptide
  MOD_RES (1)..(3)..(40): Xaa is C or S

SEQ ID NO: 113250 - protein, 28 aa, Artificial Sequence
  Cyclic GFR-binding peptide
  MOD_RES (1)..(1): Xaa is C or S
XSKVIMVQVEKIKPTKGIVKAIKVSRLD

SEQ ID NO: 113251 - protein, 28 aa, Artificial Sequence
  Cyclic GFR-binding peptide
VVMVQVEKVKPTRGVVKAIKVSRLDQPV

SEQ ID NO: 113252 - protein, 42 aa, Artificial Sequence; identical to SEQ ID NO: 22223
  Cyclic GFR-binding peptide
  MOD_RES (1)..(3)..(37): Xaa is C or S

SEQ ID NO: 113253 - protein, 41 aa, Artificial Sequence; identical to SEQ ID NO: 22225
  Cyclic GFR-binding peptide
  MOD_RES (37)..(37): Xaa is C or S

SEQ ID NO: 113254 - protein, 35 aa, Artificial Sequence; identical to SEQ ID NO: 64323
  Cyclic GFR-binding peptide
  MOD_RES (1)..(32)..(33): Xaa is C or S

SEQ ID NO: 113255 - protein, 36 aa, Artificial Sequence; identical to SEQ ID NO: 22228
  Cyclic GFR-binding peptide
  MOD_RES (33)..(33): Xaa is C or S

SEQ ID NO: 113256 - protein, 24 aa, Artificial Sequence
  Cyclic GFR-binding peptide
VTAKKIKPTKGIIKRIQVPRLDQS

SEQ ID NO: 113257 - protein, 37 aa, Artificial Sequence; identical to SEQ ID NO: 22231
  Cyclic GFR-binding peptide
  MOD_RES (36)..(36): Xaa is C or S

SEQ ID NO: 113258 - protein, 25 aa, Artificial Sequence
  Cyclic GFR-binding peptide
VQVEKFIPKKRVIEVKAVKVSRLQV

SEQ ID NO: 113259 - protein, 43 aa, Artificial Sequence; identical to SEQ ID NO: 22233
  Cyclic GFR-binding peptide
  MOD_RES (1)..(3)..(40): Xaa is C or S

SEQ ID NO: 113260 - protein, 28 aa, Artificial Sequence
  Cyclic GFR-binding peptide
  MOD_RES (28)..(28): Xaa is C or S
VTAKKHQGQHPKIRIKRMQVPRQGTPVX

SEQ ID NO: 113261 - protein, 25 aa, Artificial Sequence
  Cyclic GFR-binding peptide
VTAKKHQGQHPKIRIKRMQVPREET

SEQ ID NO: 113262 - protein, 23 aa, Artificial Sequence
  Cyclic GFR-binding peptide
TVQVEKFIPKKRVIEVKAVKVSR

SEQ ID NO: 113263 - protein, 31 aa, Artificial Sequence; identical to SEQ ID NO: 65981
  Cyclic GFR-binding peptide
  MOD_RES (30)..(31): Xaa is C or S

SEQ ID NO: 113264 - protein, 32 aa, Artificial Sequence; identical to SEQ ID NO: 22238
  Cyclic GFR-binding peptide
  MOD_RES (30)..(30): Xaa is C or S

SEQ ID NO: 113265 - protein, 31 aa, Artificial Sequence; identical to SEQ ID NO: 22239
  Cyclic GFR-binding peptide
  MOD_RES (2)..(2): Xaa is C or S

SEQ ID NO: 113266 - protein, 29 aa, Artificial Sequence
  Cyclic GFR-binding peptide
ELTVQVEKFIPKKRVIEVKAVKVSRLQVQ

SEQ ID NO: 113267 - protein, 35 aa, Artificial Sequence; identical to SEQ ID NO: 22242
  Cyclic GFR-binding peptide
  MOD_RES (2)..(4): Xaa is C or S

SEQ ID NO: 113268 - protein, 41 aa, Artificial Sequence; identical to SEQ ID NO: 22243
  Cyclic GFR-binding peptide
  MOD_RES (2)..(36): Xaa is C or S

SEQ ID NO: 113269 - protein, 29 aa, Artificial Sequence
  Cyclic GFR-binding peptide
  MOD_RES (1)..(3): Xaa is C or S
XKXSKVVMVQVEKVKPTRGVVKAIKVSRL

SEQ ID NO: 113270 - protein, 31 aa, Artificial Sequence; identical to SEQ ID NO: 64339
  Cyclic GFR-binding peptide
  MOD_RES (30)..(31): Xaa is C or S

SEQ ID NO: 113271 - protein, 32 aa, Artificial Sequence; identical to SEQ ID NO: 22245
  Cyclic GFR-binding peptide
  MOD_RES (1)..(3): Xaa is C or S

SEQ ID NO: 113272 - protein, 36 aa, Artificial Sequence; identical to SEQ ID NO: 22246
  Cyclic GFR-binding peptide
  MOD_RES (33)..(33): Xaa is C or S

SEQ ID NO: 113273 - protein, 36 aa, Artificial Sequence; identical to SEQ ID NO: 67702
  Cyclic GFR-binding peptide
  MOD_RES (2)..(33)..(34): Xaa is C or S

SEQ ID NO: 113274 - protein, 37 aa, Artificial Sequence; identical to SEQ ID NO: 22247
  Cyclic GFR-binding peptide
  MOD_RES (31)..(31): Xaa is C or S

SEQ ID NO: 113275 - protein, 31 aa, Artificial Sequence; identical to SEQ ID NO: 64345
  Cyclic GFR-binding peptide
  MOD_RES (2)..(4): Xaa is C or S

SEQ ID NO: 113276 - protein, 29 aa, Artificial Sequence
  Cyclic GFR-binding peptide
  MOD_RES (2)..(4): Xaa is C or S
SXKXSRVIMVQVEKVKPKRGVVKAIKVSR

SEQ ID NO: 113277 - protein, 23 aa, Artificial Sequence
  Cyclic GFR-binding peptide
VQVEKIKPTKGIVKAIKVSRLDQ

SEQ ID NO: 113278 - protein, 32 aa, Artificial Sequence; identical to SEQ ID NO: 22249
  Cyclic GFR-binding peptide

SEQ ID NO: 113279 - protein, 38 aa, Artificial Sequence; identical to SEQ ID NO: 22250
  Cyclic GFR-binding peptide
  MOD_RES (1)..(3)..(37): Xaa is C or S

SEQ ID NO: 113280 - protein, 29 aa, Artificial Sequence
  Cyclic GFR-binding peptide
ELVTAKKHQGQHPKIRIKRMQVPRQGTPV

SEQ ID NO: 113281 - protein, 31 aa, Artificial Sequence; identical to SEQ ID NO: 64351
  Cyclic GFR-binding peptide
  MOD_RES (26)..(27): Xaa is C or S

SEQ ID NO: 113282 - protein, 33 aa, Artificial Sequence; identical to SEQ ID NO: 22253
  Cyclic GFR-binding peptide
  MOD_RES (33)..(33): Xaa is C or S

SEQ ID NO: 113283 - protein, 27 aa, Artificial Sequence
  Cyclic GFR-binding peptide
VQVEKFIPKKRVIEVKAVKVSRLQVQT

SEQ ID NO: 113284 - protein, 34 aa, Artificial Sequence; identical to SEQ ID NO: 22255
  Cyclic GFR-binding peptide
  MOD_RES (1)..(1): Xaa is C or S

SEQ ID NO: 113285 - protein, 31 aa, Artificial Sequence; identical to SEQ ID NO: 22256
  Cyclic GFR-binding peptide
  MOD_RES (28)..(28): Xaa is C or S

SEQ ID NO: 113286 - protein, 36 aa, Artificial Sequence; identical to SEQ ID NO: 64356
  Cyclic GFR-binding peptide
  MOD_RES (1)..(32)..(33): Xaa is C or S

SEQ ID NO: 113287 - protein, 32 aa, Artificial Sequence; identical to SEQ ID NO: 22257
  Cyclic GFR-binding peptide
  MOD_RES (31)..(31): Xaa is C or S

SEQ ID NO: 113288 - protein, 37 aa, Artificial Sequence; identical to SEQ ID NO: 22258
  Cyclic GFR-binding peptide
  MOD_RES (36)..(36): Xaa is C or S

SEQ ID NO: 113289 - protein, 35 aa, Artificial Sequence; identical to SEQ ID NO: 66005
  Cyclic GFR-binding peptide
  MOD_RES (1)..(32)..(33): Xaa is C or S

SEQ ID NO: 113290 - protein, 32 aa, Artificial Sequence; identical to SEQ ID NO: 22261
  Cyclic GFR-binding peptide
  MOD_RES (2)..(4): Xaa is C or S

SEQ ID NO: 113291 - protein, 28 aa, Artificial Sequence
  Cyclic GFR-binding peptide
HEELVQVEKHQGQHPKIRVKAMKVSRQG

SEQ ID NO: 113292 - protein, 29 aa, Artificial Sequence
  Cyclic GFR-binding peptide
  MOD_RES (1)..(1): Xaa is C or S
XSRVIMVQVEKVKPKRGVVKAIKVSRLAQ

SEQ ID NO: 113293 - protein, 30 aa, Artificial Sequence; identical to SEQ ID NO: 22266
  Cyclic GFR-binding peptide
  MOD_RES (1)..(1): Xaa is C or S

SEQ ID NO: 113294 - protein, 40 aa, Artificial Sequence; identical to SEQ ID NO: 22268
  Cyclic GFR-binding peptide
  MOD_RES (2)..(4)..(38): Xaa is C or S

SEQ ID NO: 113295 - protein, 39 aa, Artificial Sequence; identical to SEQ ID NO: 67719
  Cyclic GFR-binding peptide
  MOD_RES (2)..(33)..(34): Xaa is C or S

SEQ ID NO: 113296 - protein, 39 aa, Artificial Sequence; identical to SEQ ID NO: 62645
  Cyclic GFR-binding peptide
  MOD_RES (1)..(3)..(34)..(35): Xaa is C or S

SEQ ID NO: 113297 - protein, 31 aa, Artificial Sequence; identical to SEQ ID NO: 66015
  Cyclic GFR-binding peptide
  MOD_RES (1)..(3): Xaa is C or S

SEQ ID NO: 113298 - protein, 24 aa, Artificial Sequence
  Cyclic GFR-binding peptide
VIMVQVEKVKPKRGVVKAIKVSRL

SEQ ID NO: 113299 - protein, 29 aa, Artificial Sequence
  Cyclic GFR-binding peptide
  MOD_RES (28)..(29): Xaa is C or S
IMVQVEKIKPTKGIVKAIKVSRLDQSVXX

SEQ ID NO: 113300 - protein, 37 aa, Artificial Sequence; identical to SEQ ID NO: 22273
  Cyclic GFR-binding peptide
  MOD_RES (2)..(2): Xaa is C or S

SEQ ID NO: 113301 - protein, 27 aa, Artificial Sequence
  Cyclic GFR-binding peptide
VTAKKHQGQHPKIRIKRMQVPRQGTPV

SEQ ID NO: 113302 - protein, 44 aa, Artificial Sequence; identical to SEQ ID NO: 22275
  Cyclic GFR-binding peptide
  MOD_RES (2)..(4)..(38): Xaa is C or S

SEQ ID NO: 113303 - protein, 26 aa, Artificial Sequence
  Cyclic GFR-binding peptide
VIMVQVEKVKPKRGVVKAIKVSRLAQ

SEQ ID NO: 113304 - protein, 28 aa, Artificial Sequence
  Cyclic GFR-binding peptide
  MOD_RES (26)..(27): Xaa is C or S
VQVEKIKPTKGIVKAIKVSRLDQSVXXP

SEQ ID NO: 113305 - protein, 32 aa, Artificial Sequence; identical to SEQ ID NO: 64380
  Cyclic GFR-binding peptide
  MOD_RES (28)..(29): Xaa is C or S

SEQ ID NO: 113306 - protein, 29 aa, Artificial Sequence
  Cyclic GFR-binding peptide
  MOD_RES (28)..(29): Xaa is C or S
IMVTAKKVKPKRGVIKRIQVPRLAQPVXX

SEQ ID NO: 113307 - protein, 36 aa, Artificial Sequence; identical to SEQ ID NO: 22280
  Cyclic GFR-binding peptide
  MOD_RES (32)..(32): Xaa is C or S

SEQ ID NO: 113308 - protein, 25 aa, Artificial Sequence
  Cyclic GFR-binding peptide
VTAKKHQGQHPKIRIKRMQVPRQGT

SEQ ID NO: 113309 - protein, 38 aa, Artificial Sequence; identical to SEQ ID NO: 67741
  Cyclic GFR-binding peptide
  MOD_RES (1)..(32)..(33): Xaa is C or S

SEQ ID NO: 113310 - protein, 35 aa, Artificial Sequence; identical to SEQ ID NO: 64383
  Cyclic GFR-binding peptide
  MOD_RES (1)..(3)..(34)..(35): Xaa is C or S

SEQ ID NO: 113311 - protein, 27 aa, Artificial Sequence
  Cyclic GFR-binding peptide
VTAKKHQGQHPKIRIKRMQVPREETPV

SEQ ID NO: 113312 - protein, 28 aa, Artificial Sequence
  Cyclic GFR-binding peptide
  MOD_RES (2)..(2): Xaa is C or S
KXSKVIMVTAKKIKPTKGIIKRIQVPRL

SEQ ID NO: 113313 - protein, 24 aa, Artificial Sequence
  Cyclic GFR-binding peptide
KVIMVQVEKIKPTKGIVKAIKVSR

SEQ ID NO: 113314 - protein, 37 aa, Artificial Sequence; identical to SEQ ID NO: 22289
  Cyclic GFR-binding peptide
  MOD_RES (34)..(34): Xaa is C or S

SEQ ID NO: 113315 - protein, 34 aa, Artificial Sequence; identical to SEQ ID NO: 22290
  Cyclic GFR-binding peptide
  MOD_RES (2)..(2): Xaa is C or S

SEQ ID NO: 113316 - protein, 37 aa, Artificial Sequence; identical to SEQ ID NO: 22291
  Cyclic GFR-binding peptide
  MOD_RES (1)..(35): Xaa is C or S

SEQ ID NO: 113317 - protein, 37 aa, Artificial Sequence; identical to SEQ ID NO: 22293
  Cyclic GFR-binding peptide
  MOD_RES (2)..(4): Xaa is C or S

SEQ ID NO: 113318 - protein, 39 aa, Artificial Sequence; identical to SEQ ID NO: 62681
  Cyclic GFR-binding peptide
  MOD_RES (1)..(3)..(34)..(35): Xaa is C or S

SEQ ID NO: 113319 - protein, 28 aa, Artificial Sequence
  Cyclic GFR-binding peptide
RVIMVTAKKVKPKRGVIKRIQVPRLAQP

SEQ ID NO: 113320 - protein, 31 aa, Artificial Sequence; identical to SEQ ID NO: 62684
  Cyclic GFR-binding peptide
  MOD_RES (2)..(2): Xaa is C or S

SEQ ID NO: 113321 - protein, 32 aa, Artificial Sequence; identical to SEQ ID NO: 22298
  Cyclic GFR-binding peptide

SEQ ID NO: 113322 - protein, 36 aa, Artificial Sequence; identical to SEQ ID NO: 22299
  Cyclic GFR-binding peptide
  MOD_RES (31)..(31): Xaa is C or S

SEQ ID NO: 113323 - protein, 26 aa, Artificial Sequence
  Cyclic GFR-binding peptide
EELVQVEKHQGQHPKIRVKAMKVSRQ

SEQ ID NO: 113324 - protein, 37 aa, Artificial Sequence; identical to SEQ ID NO: 66033
  Cyclic GFR-binding peptide
  MOD_RES (1)..(3)..(34)..(35): Xaa is C or S

SEQ ID NO: 113325 - protein, 27 aa, Artificial Sequence
  Cyclic GFR-binding peptide
  MOD_RES (27)..(27): Xaa is C or S
MVQVEKVKPKRGVVKAIKVSRLAQPVX

SEQ ID NO: 113326 - protein, 38 aa, Artificial Sequence; identical to SEQ ID NO: 22305
  Cyclic GFR-binding peptide
  MOD_RES (2)..(4)..(38): Xaa is C or S

SEQ ID NO: 113327 - protein, 34 aa, Artificial Sequence; identical to SEQ ID NO: 22306
  Cyclic GFR-binding peptide
  MOD_RES (33)..(33): Xaa is C or S

SEQ ID NO: 113328 - protein, 43 aa, Artificial Sequence; identical to SEQ ID NO: 22307
  Cyclic GFR-binding peptide
  MOD_RES (2)..(4)..(41): Xaa is C or S

SEQ ID NO: 113329 - protein, 29 aa, Artificial Sequence
  Cyclic GFR-binding peptide
LFVQVEKHQGQHPKIRVKAMKVSREETPV

SEQ ID NO: 113330 - protein, 30 aa, Artificial Sequence; identical to SEQ ID NO: 22309
  Cyclic GFR-binding peptide

SEQ ID NO: 113331 - protein, 36 aa, Artificial Sequence; identical to SEQ ID NO: 22310
  Cyclic GFR-binding peptide
  MOD_RES (2)..(4): Xaa is C or S

SEQ ID NO: 113332 - protein, 33 aa, Artificial Sequence; identical to SEQ ID NO: 22313
  Cyclic GFR-binding peptide
  MOD_RES (29)..(29): Xaa is C or S

SEQ ID NO: 113333 - protein, 22 aa, Artificial Sequence
  Cyclic GFR-binding peptide
VTAKKHQGQHPKIRIKRMQVPR

SEQ ID NO: 113334 - protein, 36 aa, Artificial Sequence; identical to SEQ ID NO: 64405
  Cyclic GFR-binding peptide
  MOD_RES (1)..(3)..(34)..(35): Xaa is C or S

SEQ ID NO: 113335 - protein, 39 aa, Artificial Sequence; identical to SEQ ID NO: 22317
  Cyclic GFR-binding peptide
  MOD_RES (2)..(39): Xaa is C or S

SEQ ID NO: 113336 - protein, 37 aa, Artificial Sequence; identical to SEQ ID NO: 66041
  Cyclic GFR-binding peptide
  MOD_RES (2)..(4)..(35)..(36): Xaa is C or S

SEQ ID NO: 113337 - protein, 30 aa, Artificial Sequence; identical to SEQ ID NO: 62707
  Cyclic GFR-binding peptide
  MOD_RES (26)..(27): Xaa is C or S

SEQ ID NO: 113338 - protein, 30 aa, Artificial Sequence; identical to SEQ ID NO: 62708
  Cyclic GFR-binding peptide
  MOD_RES (30)..(30): Xaa is C or S

SEQ ID NO: 113339 - protein, 23 aa, Artificial Sequence
  Cyclic GFR-binding peptide
VTAKKVKPTRGVIKRIQVPRLDQ

SEQ ID NO: 113340 - protein, 31 aa, Artificial Sequence; identical to SEQ ID NO: 67776
  Cyclic GFR-binding peptide
  MOD_RES (29)..(30): Xaa is C or S

SEQ ID NO: 113341 - protein, 36 aa, Artificial Sequence; identical to SEQ ID NO: 62711
  Cyclic GFR-binding peptide
  MOD_RES (30)..(31): Xaa is C or S

SEQ ID NO: 113342 - protein, 42 aa, Artificial Sequence; identical to SEQ ID NO: 22322
  Cyclic GFR-binding peptide
  MOD_RES (2)..(39): Xaa is C or S

SEQ ID NO: 113343 - protein, 24 aa, Artificial Sequence
  Cyclic GFR-binding peptide
KVVMVQVEKVKPTRGVVKAIKVSR

SEQ ID NO: 113344 - protein, 27 aa, Artificial Sequence
  Cyclic GFR-binding peptide
  MOD_RES (2)..(2): Xaa is C or S
KXSKVIMVQVEKIKPTKGIVKAIKVSR

SEQ ID NO: 113345 - protein, 30 aa, Artificial Sequence; identical to SEQ ID NO: 22326
  Cyclic GFR-binding peptide
  MOD_RES (30)..(30): Xaa is C or S

SEQ ID NO: 113346 - protein, 30 aa, Artificial Sequence; identical to SEQ ID NO: 64419
  Cyclic GFR-binding peptide
  MOD_RES (27)..(28): Xaa is C or S

SEQ ID NO: 113347 - protein, 27 aa, Artificial Sequence
  Cyclic GFR-binding peptide
SKVVMVTAKKVKPTRGVIKRIQVPRLD

SEQ ID NO: 113348 - protein, 33 aa, Artificial Sequence; identical to SEQ ID NO: 22327
  Cyclic GFR-binding peptide
  MOD_RES (2)..(2): Xaa is C or S

SEQ ID NO: 113349 - protein, 31 aa, Artificial Sequence; identical to SEQ ID NO: 64420
  Cyclic GFR-binding peptide
  MOD_RES (27)..(28): Xaa is C or S

SEQ ID NO: 113350 - protein, 32 aa, Artificial Sequence; identical to SEQ ID NO: 22330
  Cyclic GFR-binding peptide
  MOD_RES (2)..(2): Xaa is C or S

SEQ ID NO: 113351 - protein, 39 aa, Artificial Sequence; identical to SEQ ID NO: 22331
  Cyclic GFR-binding peptide
  MOD_RES (2)..(4)..(38): Xaa is C or S

SEQ ID NO: 113352 - protein, 35 aa, Artificial Sequence; identical to SEQ ID NO: 66062
  Cyclic GFR-binding peptide
  MOD_RES (2)..(33)..(34): Xaa is C or S

SEQ ID NO: 113353 - protein, 38 aa, Artificial Sequence; identical to SEQ ID NO: 62723
  Cyclic GFR-binding peptide
  MOD_RES (1)..(3)..(34)..(35): Xaa is C or S

SEQ ID NO: 113354 - protein, 31 aa, Artificial Sequence; identical to SEQ ID NO: 22337
  Cyclic GFR-binding peptide

SEQ ID NO: 113355 - protein, 23 aa, Artificial Sequence
  Cyclic GFR-binding peptide
VMVTAKKVKPTRGVIKRIQVPRL

SEQ ID NO: 113356 - protein, 29 aa, Artificial Sequence
  Cyclic GFR-binding peptide
  MOD_RES (29)..(29): Xaa is C or S
VVMVQVEKVKPTRGVVKAIKVSRLDQPVX

SEQ ID NO: 113357 - protein, 41 aa, Artificial Sequence; identical to SEQ ID NO: 67796
  Cyclic GFR-binding peptide
  MOD_RES (2)..(4)..(35)..(36): Xaa is C or S

SEQ ID NO: 113358 - protein, 32 aa, Artificial Sequence; identical to SEQ ID NO: 22340
  Cyclic GFR-binding peptide

SEQ ID NO: 113359 - protein, 24 aa, Artificial Sequence
  Cyclic GFR-binding peptide
KVIMVTAKKIKPTKGIIKRIQVPR

SEQ ID NO: 113360 - protein, 29 aa, Artificial Sequence
  Cyclic GFR-binding peptide
ELHEELRVTAKKLKPKKRVYEIKRVQVPR

SEQ ID NO: 113361 - protein, 28 aa, Artificial Sequence
  Cyclic GFR-binding peptide
VIMVTAKKVKPKRGVIKRIQVPRLAQPV

SEQ ID NO: 113362 - protein, 27 aa, Artificial Sequence
  Cyclic GFR-binding peptide
  MOD_RES (27)..(27): Xaa is C or S
MVTAKKVKPKRGVIKRIQVPRLAQPVX

SEQ ID NO: 113363 - protein, 34 aa, Artificial Sequence; identical to SEQ ID NO: 22347
  Cyclic GFR-binding peptide
  MOD_RES (28)..(28): Xaa is C or S

SEQ ID NO: 113364 - protein, 22 aa, Artificial Sequence
  Cyclic GFR-binding peptide
IMVQVEKVKPKRGVVKAIKVSR

SEQ ID NO: 113365 - protein, 41 aa, Artificial Sequence; identical to SEQ ID NO: 22350
  Cyclic GFR-binding peptide
  MOD_RES (1)..(3)..(37): Xaa is C or S

SEQ ID NO: 113366 - protein, 25 aa, Artificial Sequence
  Cyclic GFR-binding peptide
LFVQVEKHQGQHPKIRVKAMKVSRE

SEQ ID NO: 113367 - protein, 34 aa, Artificial Sequence; identical to SEQ ID NO: 66083
  Cyclic GFR-binding peptide
  MOD_RES (29)..(30): Xaa is C or S

SEQ ID NO: 113368 - protein, 24 aa, Artificial Sequence
  Cyclic GFR-binding peptide
VQVEKHQGQHPKIRVKAMKVSRQG

SEQ ID NO: 113369 - protein, 32 aa, Artificial Sequence; identical to SEQ ID NO: 22354
  Cyclic GFR-binding peptide

SEQ ID NO: 113370 - protein, 29 aa, Artificial Sequence
  Cyclic GFR-binding peptide
  MOD_RES (2)..(4): Xaa is C or S
SXKXSKVVMVTAKKVKPTRGVIKRIQVPR

SEQ ID NO: 113371 - protein, 40 aa, Artificial Sequence; identical to SEQ ID NO: 66089
  Cyclic GFR-binding peptide
  MOD_RES (2)..(4)..(35)..(36): Xaa is C or S

SEQ ID NO: 113372 - protein, 36 aa, Artificial Sequence; identical to SEQ ID NO: 22357
  Cyclic GFR-binding peptide
  MOD_RES (31)..(31): Xaa is C or S

SEQ ID NO: 113373 - protein, 23 aa, Artificial Sequence
  Cyclic GFR-binding peptide
VIMVQVEKIKPTKGIVKAIKVSR

SEQ ID NO: 113374 - protein, 29 aa, Artificial Sequence
  Cyclic GFR-binding peptide
  MOD_RES (1)..(1): Xaa is C or S
XKNHQLFVQVEKHQGQHPKIRVKAMKVSR

SEQ ID NO: 113375 - protein, 31 aa, Artificial Sequence; identical to SEQ ID NO: 22365
  Cyclic GFR-binding peptide
  MOD_RES (30)..(30): Xaa is C or S

SEQ ID NO: 113376 - protein, 34 aa, Artificial Sequence; identical to SEQ ID NO: 64453
  Cyclic GFR-binding peptide
  MOD_RES (30)..(31): Xaa is C or S

SEQ ID NO: 113377 - protein, 28 aa, Artificial Sequence
  Cyclic GFR-binding peptide
  MOD_RES (28)..(28): Xaa is C or S
IMVQVEKIKPTKGIVKAIKVSRLDQSVX

SEQ ID NO: 113378 - protein, 36 aa, Artificial Sequence; identical to SEQ ID NO: 22366
  Cyclic GFR-binding peptide
  MOD_RES (2)..(4): Xaa is C or S

SEQ ID NO: 113379 - protein, 43 aa, Artificial Sequence; identical to SEQ ID NO: 22368
  Cyclic GFR-binding peptide
  MOD_RES (2)..(4)..(38): Xaa is C or S

SEQ ID NO: 113380 - protein, 35 aa, Artificial Sequence; identical to SEQ ID NO: 22370
  Cyclic GFR-binding peptide
  MOD_RES (31)..(31): Xaa is C or S

SEQ ID NO: 113381 - protein, 29 aa, Artificial Sequence
  Cyclic GFR-binding peptide
  MOD_RES (28)..(29): Xaa is C or S
VMVQVEKVKPTRGVVKAIKVSRLDQPVXX

SEQ ID NO: 113382 - protein, 32 aa, Artificial Sequence; identical to SEQ ID NO: 66100
  Cyclic GFR-binding peptide
  MOD_RES (26)..(27): Xaa is C or S

SEQ ID NO: 113383 - protein, 40 aa, Artificial Sequence; identical to SEQ ID NO: 22373
  Cyclic GFR-binding peptide
  MOD_RES (36)..(36): Xaa is C or S

SEQ ID NO: 113384 - protein, 27 aa, Artificial Sequence
  Cyclic GFR-binding peptide
RVIMVTAKKVKPKRGVIKRIQVPRLAQ

SEQ ID NO: 113385 - protein, 27 aa, Artificial Sequence
  Cyclic GFR-binding peptide
RVTAKKLKPKKRVYEIKRVQVPRHHVR

SEQ ID NO: 113386 - protein, 34 aa, Artificial Sequence; identical to SEQ ID NO: 67825
  Cyclic GFR-binding peptide
  MOD_RES (2)..(33)..(34): Xaa is C or S

SEQ ID NO: 113387 - protein, 35 aa, Artificial Sequence; identical to SEQ ID NO: 22377
  Cyclic GFR-binding peptide

SEQ ID NO: 113388 - protein, 36 aa, Artificial Sequence; identical to SEQ ID NO: 22378
  Cyclic GFR-binding peptide
  MOD_RES (35)..(35): Xaa is C or S

SEQ ID NO: 113389 - protein, 30 aa, Artificial Sequence; identical to SEQ ID NO: 22379
  Cyclic GFR-binding peptide

SEQ ID NO: 113390 - protein, 35 aa, Artificial Sequence; identical to SEQ ID NO: 67829
  Cyclic GFR-binding peptide
  MOD_RES (1)..(32)..(33): Xaa is C or S

SEQ ID NO: 113391 - protein, 26 aa, Artificial Sequence
  Cyclic GFR-binding peptide
VQVEKHQGQHPKIRVKAMKVSREETP

SEQ ID NO: 113392 - protein, 33 aa, Artificial Sequence; identical to SEQ ID NO: 67833
  Cyclic GFR-binding peptide
  MOD_RES (1)..(32)..(33): Xaa is C or S

SEQ ID NO: 113393 - protein, 30 aa, Artificial Sequence; identical to SEQ ID NO: 62765
  Cyclic GFR-binding peptide
  MOD_RES (30)..(30): Xaa is C or S

SEQ ID NO: 113394 - protein, 37 aa, Artificial Sequence; identical to SEQ ID NO: 22387
  Cyclic GFR-binding peptide
  MOD_RES (1)..(3): Xaa is C or S

SEQ ID NO: 113395 - protein, 29 aa, Artificial Sequence
  Cyclic GFR-binding peptide
RVTAKKLKPKKRVYEIKRVQVPRHHVRSP

SEQ ID NO: 113396 - protein, 34 aa, Artificial Sequence; identical to SEQ ID NO: 67837
  Cyclic GFR-binding peptide
  MOD_RES (28)..(29): Xaa is C or S

SEQ ID NO: 113397 - protein, 34 aa, Artificial Sequence; identical to SEQ ID NO: 22391
  Cyclic GFR-binding peptide
  MOD_RES (29)..(29): Xaa is C or S

SEQ ID NO: 113398 - protein, 39 aa, Artificial Sequence; identical to SEQ ID NO: 22393
  Cyclic GFR-binding peptide
  MOD_RES (1)..(38): Xaa is C or S

SEQ ID NO: 113399 - protein, 30 aa, Artificial Sequence; identical to SEQ ID NO: 67839
  Cyclic GFR-binding peptide
  MOD_RES (1)..(1): Xaa is C or S

SEQ ID NO: 113400 - protein, 37 aa, Artificial Sequence; identical to SEQ ID NO: 22396
  Cyclic GFR-binding peptide
  MOD_RES (1)..(3): Xaa is C or S

SEQ ID NO: 113401 - protein, 33 aa, Artificial Sequence; identical to SEQ ID NO: 22397
  Cyclic GFR-binding peptide
  MOD_RES (29)..(29): Xaa is C or S

SEQ ID NO: 113402 - protein, 34 aa, Artificial Sequence; identical to SEQ ID NO: 67840
  Cyclic GFR-binding peptide
  MOD_RES (1)..(3)..(34): Xaa is C or S

SEQ ID NO: 113403 - protein, 26 aa, Artificial Sequence
  Cyclic GFR-binding peptide
VVMVTAKKVKPTRGVIKRIQVPRLDQ

SEQ ID NO: 113404 - protein, 43 aa, Artificial Sequence; identical to SEQ ID NO: 22398
  Cyclic GFR-binding peptide
  MOD_RES (2)..(4)..(38): Xaa is C or S

SEQ ID NO: 113405 - protein, 32 aa, Artificial Sequence; identical to SEQ ID NO: 67841
  Cyclic GFR-binding peptide
  MOD_RES (1)..(32): Xaa is C or S

SEQ ID NO: 113406 - protein, 33 aa, Artificial Sequence; identical to SEQ ID NO: 22400
  Cyclic GFR-binding peptide
  MOD_RES (28)..(28): Xaa is C or S

SEQ ID NO: 113407 - protein, 29 aa, Artificial Sequence
  Cyclic GFR-binding peptide
  MOD_RES (2)..(2): Xaa is C or S
KXSKVIMVTAKKIKPTKGIIKRIQVPRLD

SEQ ID NO: 113408 - protein, 30 aa, Artificial Sequence; identical to SEQ ID NO: 22403
  Cyclic GFR-binding peptide

SEQ ID NO: 113409 - protein, 25 aa, Artificial Sequence
  Cyclic GFR-binding peptide
VQVEKVKPTRGVVKAIKVSRLDQPV

SEQ ID NO: 113410 - protein, 33 aa, Artificial Sequence; identical to SEQ ID NO: 64480
  Cyclic GFR-binding peptide
  MOD_RES (1)..(3): Xaa is C or S

SEQ ID NO: 113411 - protein, 38 aa, Artificial Sequence; identical to SEQ ID NO: 22404
  Cyclic GFR-binding peptide
  MOD_RES (1)..(38): Xaa is C or S

SEQ ID NO: 113412 - protein, 31 aa, Artificial Sequence; identical to SEQ ID NO: 22405
  Cyclic GFR-binding peptide

SEQ ID NO: 113413 - protein, 35 aa, Artificial Sequence; identical to SEQ ID NO: 66123
  Cyclic GFR-binding peptide
  MOD_RES (1)..(3)..(34)..(35): Xaa is C or S

SEQ ID NO: 113414 - protein, 30 aa, Artificial Sequence; identical to SEQ ID NO: 64483
  Cyclic GFR-binding peptide
  MOD_RES (30)..(30): Xaa is C or S

SEQ ID NO: 113415 - protein, 29 aa, Artificial Sequence
  Cyclic GFR-binding peptide
  MOD_RES (29)..(29): Xaa is C or S
FVTAKKHQGQHPKIRIKRMQVPREETPVX

SEQ ID NO: 113416 - protein, 38 aa, Artificial Sequence; identical to SEQ ID NO: 22409
  Cyclic GFR-binding peptide
  MOD_RES (36)..(36): Xaa is C or S

SEQ ID NO: 113417 - protein, 26 aa, Artificial Sequence
  Cyclic GFR-binding peptide
VTAKKLKPKKRVYEIKRVQVPRHHVR

SEQ ID NO: 113418 - protein, 38 aa, Artificial Sequence; identical to SEQ ID NO: 64492
  Cyclic GFR-binding peptide
  MOD_RES (2)..(4)..(35)..(36): Xaa is C or S

SEQ ID NO: 113419 - protein, 28 aa, Artificial Sequence
  Cyclic GFR-binding peptide
  MOD_RES (28)..(28): Xaa is C or S
VTAKKHQGQHPKIRIKRMQVPREETPVX

SEQ ID NO: 113420 - protein, 24 aa, Artificial Sequence
  Cyclic GFR-binding peptide
ELVQVEKHQGQHPKIRVKAMKVSR

SEQ ID NO: 113421 - protein, 39 aa, Artificial Sequence; identical to SEQ ID NO: 22415
  Cyclic GFR-binding peptide
  MOD_RES (33)..(33): Xaa is C or S

SEQ ID NO: 113422 - protein, 26 aa, Artificial Sequence
  Cyclic GFR-binding peptide
  MOD_RES (26)..(26): Xaa is C or S
VQVEKVKPKRGVVKAIKVSRLAQPVX

SEQ ID NO: 113423 - protein, 29 aa, Artificial Sequence
  Cyclic GFR-binding peptide
  MOD_RES (1)..(1): Xaa is C or S
XSKVIMVQVEKIKPTKGIVKAIKVSRLDQ

SEQ ID NO: 113424 - protein, 37 aa, Artificial Sequence; identical to SEQ ID NO: 64501
  Cyclic GFR-binding peptide
  MOD_RES (2)..(4)..(35)..(36): Xaa is C or S

SEQ ID NO: 113425 - protein, 40 aa, Artificial Sequence; identical to SEQ ID NO: 22418
  Cyclic GFR-binding peptide
  MOD_RES (2)..(36): Xaa is C or S

SEQ ID NO: 113426 - protein, 30 aa, Artificial Sequence; identical to SEQ ID NO: 67855
  Cyclic GFR-binding peptide
  MOD_RES (2)..(4): Xaa is C or S

SEQ ID NO: 113427 - protein, 33 aa, Artificial Sequence; identical to SEQ ID NO: 22419
  Cyclic GFR-binding peptide
  MOD_RES (32)..(32): Xaa is C or S

SEQ ID NO: 113428 - protein, 39 aa, Artificial Sequence; identical to SEQ ID NO: 22420
  Cyclic GFR-binding peptide
  MOD_RES (1)..(3)..(37): Xaa is C or S

SEQ ID NO: 113429 - protein, 26 aa, Artificial Sequence
  Cyclic GFR-binding peptide
  MOD_RES (26)..(26): Xaa is C or S
VQVEKIKPTKGIVKAIKVSRLDQSVX

SEQ ID NO: 113430 - protein, 34 aa, Artificial Sequence; identical to SEQ ID NO: 22421
  Cyclic GFR-binding peptide
  MOD_RES (2)..(2): Xaa is C or S

SEQ ID NO: 113431 - protein, 34 aa, Artificial Sequence; identical to SEQ ID NO: 22424
  Cyclic GFR-binding peptide
  MOD_RES (2)..(4): Xaa is C or S

SEQ ID NO: 113432 - protein, 31 aa, Artificial Sequence; identical to SEQ ID NO: 22425
  Cyclic GFR-binding peptide
  MOD_RES (30)..(30): Xaa is C or S

SEQ ID NO: 113433 - protein, 34 aa, Artificial Sequence; identical to SEQ ID NO: 62806
  Cyclic GFR-binding peptide
  MOD_RES (2)..(33)..(34): Xaa is C or S

SEQ ID NO: 113434 - protein, 30 aa, Artificial Sequence; identical to SEQ ID NO: 62807
  Cyclic GFR-binding peptide
  MOD_RES (1)..(1): Xaa is C or S

SEQ ID NO: 113435 - protein, 30 aa, Artificial Sequence; identical to SEQ ID NO: 67857
  Cyclic GFR-binding peptide
  MOD_RES (27)..(28): Xaa is C or S

SEQ ID NO: 113436 - protein, 36 aa, Artificial Sequence; identical to SEQ ID NO: 67858
  Cyclic GFR-binding peptide
  MOD_RES (1)..(32)..(33): Xaa is C or S

SEQ ID NO: 113437 - protein, 29 aa, Artificial Sequence
  Cyclic GFR-binding peptide
NHQLFVTAKKHQGQHPKIRIKRMQVPREE

SEQ ID NO: 113438 - protein, 39 aa, Artificial Sequence; identical to SEQ ID NO: 22431
  Cyclic GFR-binding peptide
  MOD_RES (1)..(3)..(37): Xaa is C or S

SEQ ID NO: 113439 - protein, 32 aa, Artificial Sequence; identical to SEQ ID NO: 62815
  Cyclic GFR-binding peptide
  MOD_RES (30)..(31): Xaa is C or S

SEQ ID NO: 113440 - protein, 38 aa, Artificial Sequence; identical to SEQ ID NO: 22433
  Cyclic GFR-binding peptide
  MOD_RES (33)..(33): Xaa is C or S

SEQ ID NO: 113441 - protein, 33 aa, Artificial Sequence; identical to SEQ ID NO: 22434
  Cyclic GFR-binding peptide
  MOD_RES (1)..(1): Xaa is C or S

SEQ ID NO: 113442 - protein, 41 aa, Artificial Sequence; identical to SEQ ID NO: 22435
  Cyclic GFR-binding peptide
  MOD_RES (2)..(36): Xaa is C or S

SEQ ID NO: 113443 - protein, 27 aa, Artificial Sequence
  Cyclic GFR-binding peptide
VIMVTAKKIKPTKGIIKRIQVPRLDQS

SEQ ID NO: 113444 - protein, 27 aa, Artificial Sequence
  Cyclic GFR-binding peptide
  MOD_RES (27)..(27): Xaa is C or S
MVTAKKVKPTRGVIKRIQVPRLDQPVX

SEQ ID NO: 113445 - protein, 36 aa, Artificial Sequence; identical to SEQ ID NO: 22439
  Cyclic GFR-binding peptide
  MOD_RES (1)..(3): Xaa is C or S

SEQ ID NO: 113446 - protein, 23 aa, Artificial Sequence
  Cyclic GFR-binding peptide
MVQVEKVKPTRGVVKAIKVSRLD

SEQ ID NO: 113447 - protein, 34 aa, Artificial Sequence; identical to SEQ ID NO: 67866
  Cyclic GFR-binding peptide
  MOD_RES (1)..(3)..(34): Xaa is C or S

SEQ ID NO: 113448 - protein, 34 aa, Artificial Sequence; identical to SEQ ID NO: 22440
  Cyclic GFR-binding peptide
  MOD_RES (32)..(32): Xaa is C or S

SEQ ID NO: 113449 - protein, 23 aa, Artificial Sequence
  Cyclic GFR-binding peptide
IMVQVEKIKPTKGIVKAIKVSRL

SEQ ID NO: 113450 - protein, 34 aa, Artificial Sequence; identical to SEQ ID NO: 22442
  Cyclic GFR-binding peptide
  MOD_RES (1)..(3): Xaa is C or S

SEQ ID NO: 113451 - protein, 37 aa, Artificial Sequence; identical to SEQ ID NO: 22446
  Cyclic GFR-binding peptide
  MOD_RES (32)..(32): Xaa is C or S

SEQ ID NO: 113452 - protein, 30 aa, Artificial Sequence; identical to SEQ ID NO: 22449
  Cyclic GFR-binding peptide
  MOD_RES (30)..(30): Xaa is C or S

SEQ ID NO: 113453 - protein, 35 aa, Artificial Sequence; identical to SEQ ID NO: 66162
  Cyclic GFR-binding peptide
  MOD_RES (1)..(3)..(34)..(35): Xaa is C or S

SEQ ID NO: 113454 - protein, 42 aa, Artificial Sequence; identical to SEQ ID NO: 22452
  Cyclic GFR-binding peptide
  MOD_RES (2)..(39): Xaa is C or S

SEQ ID NO: 113455 - protein, 25 aa, Artificial Sequence
  Cyclic GFR-binding peptide
TVQVEKFIPKKRVIEVKAVKVSRLQ

SEQ ID NO: 113456 - protein, 34 aa, Artificial Sequence; identical to SEQ ID NO: 62826
  Cyclic GFR-binding peptide
  MOD_RES (31)..(32): Xaa is C or S

SEQ ID NO: 113457 - protein, 40 aa, Artificial Sequence; identical to SEQ ID NO: 22454
  Cyclic GFR-binding peptide
  MOD_RES (2)..(36): Xaa is C or S

SEQ ID NO: 113458 - protein, 33 aa, Artificial Sequence; identical to SEQ ID NO: 64540
  Cyclic GFR-binding peptide
  MOD_RES (27)..(28): Xaa is C or S

SEQ ID NO: 113459 - protein, 36 aa, Artificial Sequence; identical to SEQ ID NO: 64543
  Cyclic GFR-binding peptide
  MOD_RES (2)..(33)..(34): Xaa is C or S

SEQ ID NO: 113460 - protein, 42 aa, Artificial Sequence; identical to SEQ ID NO: 22457
  Cyclic GFR-binding peptide
  MOD_RES (2)..(4)..(41): Xaa is C or S

SEQ ID NO: 113461 - protein, 20 aa, Artificial Sequence
  Cyclic GFR-binding peptide
VQVEKIKPTKGIVKAIKVSR

SEQ ID NO: 113462 - protein, 34 aa, Artificial Sequence; identical to SEQ ID NO: 22458
  Cyclic GFR-binding peptide
  MOD_RES (34)..(34): Xaa is C or S

SEQ ID NO: 113463 - protein, 28 aa, Artificial Sequence
  Cyclic GFR-binding peptide
  MOD_RES (26)..(27): Xaa is C or S
VTAKKVKPTRGVIKRIQVPRLDQPVXXP

SEQ ID NO: 113464 - protein, 44 aa, Artificial Sequence; identical to SEQ ID NO: 22460
  Cyclic GFR-binding peptide
  MOD_RES (1)..(3)..(40): Xaa is C or S

SEQ ID NO: 113465 - protein, 31 aa, Artificial Sequence; identical to SEQ ID NO: 64552
  Cyclic GFR-binding peptide
  MOD_RES (28)..(29): Xaa is C or S

SEQ ID NO: 113466 - protein, 30 aa, Artificial Sequence; identical to SEQ ID NO: 22464
  Cyclic GFR-binding peptide
  MOD_RES (1)..(1): Xaa is C or S

SEQ ID NO: 113467 - protein, 28 aa, Artificial Sequence
  Cyclic GFR-binding peptide
RVIMVQVEKVKPKRGVVKAIKVSRLAQP

SEQ ID NO: 113468 - protein, 25 aa, Artificial Sequence
  Cyclic GFR-binding peptide
RVTAKKLKPKKRVYEIKRVQVPRHH

SEQ ID NO: 113469 - protein, 39 aa, Artificial Sequence; identical to SEQ ID NO: 22469
  Cyclic GFR-binding peptide
  MOD_RES (35)..(35): Xaa is C or S

SEQ ID NO: 113470 - protein, 35 aa, Artificial Sequence; identical to SEQ ID NO: 22471
  Cyclic GFR-binding peptide
  MOD_RES (29)..(29): Xaa is C or S

SEQ ID NO: 113471 - protein, 30 aa, Artificial Sequence; identical to SEQ ID NO: 67897
  Cyclic GFR-binding peptide
  MOD_RES (2)..(4): Xaa is C or S

SEQ ID NO: 113472 - protein, 33 aa, Artificial Sequence; identical to SEQ ID NO: 22477
  Cyclic GFR-binding peptide
  MOD_RES (2)..(4): Xaa is C or S

SEQ ID NO: 113473 - protein, 29 aa, Artificial Sequence
  Cyclic GFR-binding peptide
SKVIMVTAKKIKPTKGIIKRIQVPRLDQS

SEQ ID NO: 113474 - protein, 33 aa, Artificial Sequence; identical to SEQ ID NO: 64560
  Cyclic GFR-binding peptide
  MOD_RES (1)..(32)..(33): Xaa is C or S

SEQ ID NO: 113475 - protein, 32 aa, Artificial Sequence; identical to SEQ ID NO: 22482
  Cyclic GFR-binding peptide
  MOD_RES (1)..(1): Xaa is C or S

SEQ ID NO: 113476 - protein, 37 aa, Artificial Sequence; identical to SEQ ID NO: 22483
  Cyclic GFR-binding peptide
  MOD_RES (31)..(31): Xaa is C or S

SEQ ID NO: 113477 - protein, 36 aa, Artificial Sequence; identical to SEQ ID NO: 22484
  Cyclic GFR-binding peptide
  MOD_RES (32)..(32): Xaa is C or S

SEQ ID NO: 113478 - protein, 43 aa, Artificial Sequence; identical to SEQ ID NO: 22485
  Cyclic GFR-binding peptide
  MOD_RES (1)..(3)..(40): Xaa is C or S

SEQ ID NO: 113479 - protein, 34 aa, Artificial Sequence; identical to SEQ ID NO: 22486
  Cyclic GFR-binding peptide
  MOD_RES (30)..(30): Xaa is C or S

SEQ ID NO: 113480 - protein, 34 aa, Artificial Sequence; identical to SEQ ID NO: 22487
  Cyclic GFR-binding peptide
  MOD_RES (1)..(1): Xaa is C or S

SEQ ID NO: 113481 - protein, 35 aa, Artificial Sequence; identical to SEQ ID NO: 66193
  Cyclic GFR-binding peptide
  MOD_RES (2)..(33)..(34): Xaa is C or S

SEQ ID NO: 113482 - protein, 41 aa, Artificial Sequence; identical to SEQ ID NO: 22489
  Cyclic GFR-binding peptide
  MOD_RES (1)..(3)..(37): Xaa is C or S

SEQ ID NO: 113483 - protein, 39 aa, Artificial Sequence; identical to SEQ ID NO: 22490
  Cyclic GFR-binding peptide
  MOD_RES (34)..(34): Xaa is C or S

SEQ ID NO: 113484 - protein, 30 aa, Artificial Sequence; identical to SEQ ID NO: 66203
  Cyclic GFR-binding peptide
  MOD_RES (2)..(2): Xaa is C or S

SEQ ID NO: 113485 - protein, 34 aa, Artificial Sequence; identical to SEQ ID NO: 22494
  Cyclic GFR-binding peptide
  MOD_RES (32)..(32): Xaa is C or S

SEQ ID NO: 113486 - protein, 33 aa, Artificial Sequence; identical to SEQ ID NO: 22495
  Cyclic GFR-binding peptide

SEQ ID NO: 113487 - protein, 36 aa, Artificial Sequence; identical to SEQ ID NO: 22496
  Cyclic GFR-binding peptide
  MOD_RES (2)..(4): Xaa is C or S

SEQ ID NO: 113488 - protein, 33 aa, Artificial Sequence; identical to SEQ ID NO: 22499
  Cyclic GFR-binding peptide
  MOD_RES (1)..(3): Xaa is C or S

SEQ ID NO: 113489 - protein, 32 aa, Artificial Sequence; identical to SEQ ID NO: 22500
  Cyclic GFR-binding peptide
  MOD_RES (2)..(2): Xaa is C or S

SEQ ID NO: 113490 - protein, 27 aa, Artificial Sequence
  Cyclic GFR-binding peptide
VQVEKHQGQHPKIRVKAMKVSREETPV

SEQ ID NO: 113491 - protein, 27 aa, Artificial Sequence
  Cyclic GFR-binding peptide
  MOD_RES (1)..(1): Xaa is C or S
XSKVIMVQVEKIKPTKGIVKAIKVSRL

SEQ ID NO: 113492 - protein, 35 aa, Artificial Sequence; identical to SEQ ID NO: 66218
  Cyclic GFR-binding peptide
  MOD_RES (31)..(32): Xaa is C or S

SEQ ID NO: 113493 - protein, 36 aa, Artificial Sequence; identical to SEQ ID NO: 67922
  Cyclic GFR-binding peptide
  MOD_RES (2)..(4)..(35)..(36): Xaa is C or S

SEQ ID NO: 113494 - protein, 39 aa, Artificial Sequence; identical to SEQ ID NO: 66225
  Cyclic GFR-binding peptide
  MOD_RES (2)..(4)..(35)..(36): Xaa is C or S

SEQ ID NO: 113495 - protein, 28 aa, Artificial Sequence
  Cyclic GFR-binding peptide
EELVQVEKHQGQHPKIRVKAMKVSRQGT

SEQ ID NO: 113496 - protein, 32 aa, Artificial Sequence; identical to SEQ ID NO: 22509
  Cyclic GFR-binding peptide
  MOD_RES (1)..(1): Xaa is C or S

SEQ ID NO: 113497 - protein, 41 aa, Artificial Sequence; identical to SEQ ID NO: 22510
  Cyclic GFR-binding peptide
  MOD_RES (1)..(35): Xaa is C or S

SEQ ID NO: 113498 - protein, 29 aa, Artificial Sequence
  Cyclic GFR-binding peptide
VTAKKLKPKKRVYEIKRVQVPRHHVRSPQ

SEQ ID NO: 113499 - protein, 29 aa, Artificial Sequence
  Cyclic GFR-binding peptide
  MOD_RES (29)..(29): Xaa is C or S
FVQVEKHQGQHPKIRVKAMKVSREETPVX

SEQ ID NO: 113500 - protein, 30 aa, Artificial Sequence; identical to SEQ ID NO: 67932
  Cyclic GFR-binding peptide
  MOD_RES (1)..(3): Xaa is C or S

SEQ ID NO: 113501 - protein, 34 aa, Artificial Sequence; identical to SEQ ID NO: 22516
  Cyclic GFR-binding peptide
  MOD_RES (33)..(33): Xaa is C or S

SEQ ID NO: 113502 - protein, 44 aa, Artificial Sequence; identical to SEQ ID NO: 22517
  Cyclic GFR-binding peptide
  MOD_RES (1)..(3)..(40): Xaa is C or S

SEQ ID NO: 113503 - protein, 26 aa, Artificial Sequence
  Cyclic GFR-binding peptide
VTAKKHQGQHPKIRIKRMQVPRQGTP

SEQ ID NO: 113504 - protein, 25 aa, Artificial Sequence
  Cyclic GFR-binding peptide
SKVIMVTAKKIKPTKGIIKRIQVPR

SEQ ID NO: 113505 - protein, 32 aa, Artificial Sequence; identical to SEQ ID NO: 22520
  Cyclic GFR-binding peptide
  MOD_RES (31)..(31): Xaa is C or S

SEQ ID NO: 113506 - protein, 22 aa, Artificial Sequence
  Cyclic GFR-binding peptide
MVQVEKVKPTRGVVKAIKVSRL

SEQ ID NO: 113507 - protein, 30 aa, Artificial Sequence; identical to SEQ ID NO: 64587
  Cyclic GFR-binding peptide

SEQ ID NO: 113508 - protein, 37 aa, Artificial Sequence; identical to SEQ ID NO: 22524
  Cyclic GFR-binding peptide
  MOD_RES (2)..(4): Xaa is C or S

SEQ ID NO: 113509 - protein, 37 aa, Artificial Sequence; identical to SEQ ID NO: 22527
  Cyclic GFR-binding peptide
  MOD_RES (2)..(4): Xaa is C or S

SEQ ID NO: 113510 - protein, 33 aa, Artificial Sequence; identical to SEQ ID NO: 64594
  Cyclic GFR-binding peptide
  MOD_RES (31)..(32): Xaa is C or S

SEQ ID NO: 113511 - protein, 29 aa, Artificial Sequence
  Cyclic GFR-binding peptide
QLFVTAKKHQGQHPKIRIKRMQVPREETP

SEQ ID NO: 113512 - protein, 28 aa, Artificial Sequence
  Cyclic GFR-binding peptide
KVIMVTAKKIKPTKGIIKRIQVPRLDQS

SEQ ID NO: 113513 - protein, 37 aa, Artificial Sequence; identical to SEQ ID NO: 67949
  Cyclic GFR-binding peptide
  MOD_RES (2)..(33)..(34): Xaa is C or S

SEQ ID NO: 113514 - protein, 32 aa, Artificial Sequence; identical to SEQ ID NO: 22533
  Cyclic GFR-binding peptide
  MOD_RES (30)..(30): Xaa is C or S

SEQ ID NO: 113515 - protein, 35 aa, Artificial Sequence; identical to SEQ ID NO: 22534
  Cyclic GFR-binding peptide
  MOD_RES (2)..(4): Xaa is C or S

SEQ ID NO: 113516 - protein, 31 aa, Artificial Sequence; identical to SEQ ID NO: 22536
  Cyclic GFR-binding peptide

SEQ ID NO: 113517 - protein, 33 aa, Artificial Sequence; identical to SEQ ID NO: 22537
  Cyclic GFR-binding peptide

SEQ ID NO: 113518 - protein, 28 aa, Artificial Sequence
  Cyclic GFR-binding peptide
LFVTAKKHQGQHPKIRIKRMQVPREETP

SEQ ID NO: 113519 - protein, 22 aa, Artificial Sequence
  Cyclic GFR-binding peptide
VQVEKVKPTRGVVKAIKVSRLD

SEQ ID NO: 113520 - protein, 30 aa, Artificial Sequence; identical to SEQ ID NO: 66245
  Cyclic GFR-binding peptide
  MOD_RES (26)..(27): Xaa is C or S

SEQ ID NO: 113521 - protein, 32 aa, Artificial Sequence; identical to SEQ ID NO: 22542
  Cyclic GFR-binding peptide

SEQ ID NO: 113522 - protein, 30 aa, Artificial Sequence; identical to SEQ ID NO: 22543
  Cyclic GFR-binding peptide

SEQ ID NO: 113523 - protein, 23 aa, Artificial Sequence
  Cyclic GFR-binding peptide
MVQVEKVKPKRGVVKAIKVSRLA

SEQ ID NO: 113524 - protein, 34 aa, Artificial Sequence; identical to SEQ ID NO: 22548
  Cyclic GFR-binding peptide
  MOD_RES (1)..(1): Xaa is C or S

SEQ ID NO: 113525 - protein, 40 aa, Artificial Sequence; identical to SEQ ID NO: 64607
  Cyclic GFR-binding peptide
  MOD_RES (2)..(4)..(35)..(36): Xaa is C or S

SEQ ID NO: 113526 - protein, 38 aa, Artificial Sequence; identical to SEQ ID NO: 22551
  Cyclic GFR-binding peptide
  MOD_RES (2)..(4)..(38): Xaa is C or S

SEQ ID NO: 113527 - protein, 22 aa, Artificial Sequence
  Cyclic GFR-binding peptide
VQVEKHQGQHPKIRVKAMKVSR

SEQ ID NO: 113528 - protein, 29 aa, Artificial Sequence
  Cyclic GFR-binding peptide
KVIMVTAKKIKPTKGIIKRIQVPRLDQSV

SEQ ID NO: 113529 - protein, 33 aa, Artificial Sequence; identical to SEQ ID NO: 22553
  Cyclic GFR-binding peptide
  MOD_RES (31)..(31): Xaa is C or S

SEQ ID NO: 113530 - protein, 26 aa, Artificial Sequence
  Cyclic GFR-binding peptide
ELVTAKKHQGQHPKIRIKRMQVPRQG

SEQ ID NO: 113531 - protein, 45 aa, Artificial Sequence; identical to SEQ ID NO: 22556
  Cyclic GFR-binding peptide
  MOD_RES (2)..(4)..(41): Xaa is C or S

SEQ ID NO: 113532 - protein, 28 aa, Artificial Sequence
  Cyclic GFR-binding peptide
  MOD_RES (1)..(3): Xaa is C or S
XKXSKVVMVTAKKVKPTRGVIKRIQVPR

SEQ ID NO: 113533 - protein, 34 aa, Artificial Sequence; identical to SEQ ID NO: 67966
  Cyclic GFR-binding peptide
  MOD_RES (2)..(33)..(34): Xaa is C or S

SEQ ID NO: 113534 - protein, 37 aa, Artificial Sequence; identical to SEQ ID NO: 67967
  Cyclic GFR-binding peptide
  MOD_RES (1)..(32)..(33): Xaa is C or S

SEQ ID NO: 113535 - protein, 27 aa, Artificial Sequence
  Cyclic GFR-binding peptide
VIMVQVEKVKPKRGVVKAIKVSRLAQP

SEQ ID NO: 113536 - protein, 32 aa, Artificial Sequence; identical to SEQ ID NO: 22557
  Cyclic GFR-binding peptide

SEQ ID NO: 113537 - protein, 36 aa, Artificial Sequence; identical to SEQ ID NO: 22558
  Cyclic GFR-binding peptide
  MOD_RES (30)..(30): Xaa is C or S

SEQ ID NO: 113538 - protein, 30 aa, Artificial Sequence; identical to SEQ ID NO: 22561
  Cyclic GFR-binding peptide
  MOD_RES (2)..(2): Xaa is C or S

SEQ ID NO: 113539 - protein, 32 aa, Artificial Sequence; identical to SEQ ID NO: 22562
  Cyclic GFR-binding peptide
  MOD_RES (29)..(29): Xaa is C or S

SEQ ID NO: 113540 - protein, 29 aa, Artificial Sequence
  Cyclic GFR-binding peptide
  MOD_RES (2)..(2): Xaa is C or S
KXSKVIMVQVEKIKPTKGIVKAIKVSRLD

SEQ ID NO: 113541 - protein, 27 aa, Artificial Sequence
  Cyclic GFR-binding peptide
  MOD_RES (27)..(27): Xaa is C or S
MVTAKKIKPTKGIIKRIQVPRLDQSVX

SEQ ID NO: 113542 - protein, 34 aa, Artificial Sequence; identical to SEQ ID NO: 22566
  Cyclic GFR-binding peptide
  MOD_RES (29)..(29): Xaa is C or S

SEQ ID NO: 113543 - protein, 30 aa, Artificial Sequence; identical to SEQ ID NO: 66264
  Cyclic GFR-binding peptide
  MOD_RES (2)..(4): Xaa is C or S

SEQ ID NO: 113544 - protein, 38 aa, Artificial Sequence; identical to SEQ ID NO: 22571
  Cyclic GFR-binding peptide
  MOD_RES (2)..(36): Xaa is C or S

SEQ ID NO: 113545 - protein, 34 aa, Artificial Sequence; identical to SEQ ID NO: 22572
  Cyclic GFR-binding peptide
  MOD_RES (31)..(31): Xaa is C or S

SEQ ID NO: 113546 - protein, 33 aa, Artificial Sequence; identical to SEQ ID NO: 22574
  Cyclic GFR-binding peptide
  MOD_RES (1)..(1): Xaa is C or S

SEQ ID NO: 113547 - protein, 31 aa, Artificial Sequence; identical to SEQ ID NO: 64624
  Cyclic GFR-binding peptide
  MOD_RES (1)..(3): Xaa is C or S

SEQ ID NO: 113548 - protein, 28 aa, Artificial Sequence
  Cyclic GFR-binding peptide
RVTAKKLKPKKRVYEIKRVQVPRHHVRS

SEQ ID NO: 113549 - protein, 39 aa, Artificial Sequence; identical to SEQ ID NO: 22579
  Cyclic GFR-binding peptide
  MOD_RES (2)..(4)..(38): Xaa is C or S

SEQ ID NO: 113550 - protein, 30 aa, Artificial Sequence; identical to SEQ ID NO: 22580
  Cyclic GFR-binding peptide
  MOD_RES (30)..(30): Xaa is C or S

SEQ ID NO: 113551 - protein, 25 aa, Artificial Sequence
  Cyclic GFR-binding peptide
KVIMVQVEKIKPTKGIVKAIKVSRL

SEQ ID NO: 113552 - protein, 36 aa, Artificial Sequence; identical to SEQ ID NO: 22583
  Cyclic GFR-binding peptide
  MOD_RES (1)..(3): Xaa is C or S

SEQ ID NO: 113553 - protein, 31 aa, Artificial Sequence; identical to SEQ ID NO: 22584
  Cyclic GFR-binding peptide
  MOD_RES (31)..(31): Xaa is C or S

SEQ ID NO: 113554 - protein, 28 aa, Artificial Sequence
  Cyclic GFR-binding peptide
TVQVEKFIPKKRVIEVKAVKVSRLQVQT

SEQ ID NO: 113555 - protein, 32 aa, Artificial Sequence; identical to SEQ ID NO: 66278
  Cyclic GFR-binding peptide
  MOD_RES (2)..(4): Xaa is C or S

SEQ ID NO: 113556 - protein, 33 aa, Artificial Sequence; identical to SEQ ID NO: 64629
  Cyclic GFR-binding peptide
  MOD_RES (2)..(4): Xaa is C or S

SEQ ID NO: 113557 - protein, 34 aa, Artificial Sequence; identical to SEQ ID NO: 22587
  Cyclic GFR-binding peptide
  MOD_RES (1)..(3): Xaa is C or S

SEQ ID NO: 113558 - protein, 34 aa, Artificial Sequence; identical to SEQ ID NO: 67988
  Cyclic GFR-binding peptide
  MOD_RES (1)..(32)..(33): Xaa is C or S

SEQ ID NO: 113559 - protein, 34 aa, Artificial Sequence; identical to SEQ ID NO: 22590
  Cyclic GFR-binding peptide
  MOD_RES (1)..(3): Xaa is C or S

SEQ ID NO: 113560 - protein, 32 aa, Artificial Sequence; identical to SEQ ID NO: 22591
  Cyclic GFR-binding peptide

SEQ ID NO: 113561 - protein, 44 aa, Artificial Sequence; identical to SEQ ID NO: 22592
  Cyclic GFR-binding peptide
  MOD_RES (2)..(4)..(41): Xaa is C or S

SEQ ID NO: 113562 - protein, 22 aa, Artificial Sequence
  Cyclic GFR-binding peptide
MVTAKKIKPTKGIIKRIQVPRL

SEQ ID NO: 113563 - protein, 31 aa, Artificial Sequence; identical to SEQ ID NO: 22593
  Cyclic GFR-binding peptide
  MOD_RES (2)..(2): Xaa is C or S

SEQ ID NO: 113564 - protein, 29 aa, Artificial Sequence
  Cyclic GFR-binding peptide
HDELTVQVEKFIPKKRVIEVKAVKVSRLQ

SEQ ID NO: 113565 - protein, 25 aa, Artificial Sequence
  Cyclic GFR-binding peptide
SRVIMVTAKKVKPKRGVIKRIQVPR

SEQ ID NO: 113566 - protein, 24 aa, Artificial Sequence
  Cyclic GFR-binding peptide
LFVQVEKHQGQHPKIRVKAMKVSR

SEQ ID NO: 113567 - protein, 27 aa, Artificial Sequence
  Cyclic GFR-binding peptide
KVIMVTAKKIKPTKGIIKRIQVPRLDQ

SEQ ID NO: 113568 - protein, 26 aa, Artificial Sequence
  Cyclic GFR-binding peptide
LRVTAKKLKPKKRVYEIKRVQVPRHH

SEQ ID NO: 113569 - protein, 23 aa, Artificial Sequence
  Cyclic GFR-binding peptide
LVTAKKHQGQHPKIRIKRMQVPR

SEQ ID NO: 113570 - protein, 23 aa, Artificial Sequence
  Cyclic GFR-binding peptide
FVTAKKHQGQHPKIRIKRMQVPR

SEQ ID NO: 113571 - protein, 27 aa, Artificial Sequence
  Cyclic GFR-binding peptide
  MOD_RES (1)..(1): Xaa is C or S
XSKVVMVTAKKVKPTRGVIKRIQVPRL

SEQ ID NO: 113572 - protein, 26 aa, Artificial Sequence
  Cyclic GFR-binding peptide
ELTVQVEKFIPKKRVIEVKAVKVSRL

SEQ ID NO: 113573 - protein, 34 aa, Artificial Sequence; identical to SEQ ID NO: 66300
  Cyclic GFR-binding peptide
  MOD_RES (29)..(30): Xaa is C or S

SEQ ID NO: 113574 - protein, 37 aa, Artificial Sequence; identical to SEQ ID NO: 22607
  Cyclic GFR-binding peptide
  MOD_RES (1)..(35): Xaa is C or S

SEQ ID NO: 113575 - protein, 29 aa, Artificial Sequence
  Cyclic GFR-binding peptide
  MOD_RES (1)..(3): Xaa is C or S
XKXSKVVMVTAKKVKPTRGVIKRIQVPRL

SEQ ID NO: 113576 - protein, 32 aa, Artificial Sequence; identical to SEQ ID NO: 64649
  Cyclic GFR-binding peptide
  MOD_RES (27)..(28): Xaa is C or S

SEQ ID NO: 113577 - protein, 30 aa, Artificial Sequence; identical to SEQ ID NO: 22609
  Cyclic GFR-binding peptide
  MOD_RES (28)..(28): Xaa is C or S

SEQ ID NO: 113578 - protein, 28 aa, Artificial Sequence
  Cyclic GFR-binding peptide
KNHQLFVTAKKHQGQHPKIRIKRMQVPR

SEQ ID NO: 113579 - protein, 32 aa, Artificial Sequence; identical to SEQ ID NO: 62939
  Cyclic GFR-binding peptide
  MOD_RES (1)..(3): Xaa is C or S

SEQ ID NO: 113580 - protein, 28 aa, Artificial Sequence
  Cyclic GFR-binding peptide
ELVQVEKHQGQHPKIRVKAMKVSRQGTP

SEQ ID NO: 113581 - protein, 33 aa, Artificial Sequence; identical to SEQ ID NO: 22612
  Cyclic GFR-binding peptide
  MOD_RES (2)..(4): Xaa is C or S

SEQ ID NO: 113582 - protein, 36 aa, Artificial Sequence; identical to SEQ ID NO: 64653
  Cyclic GFR-binding peptide
  MOD_RES (2)..(4)..(35)..(36): Xaa is C or S

SEQ ID NO: 113583 - protein, 25 aa, Artificial Sequence
  Cyclic GFR-binding peptide
VTAKKVKPTRGVIKRIQVPRLDQPV

SEQ ID NO: 113584 - protein, 32 aa, Artificial Sequence; identical to SEQ ID NO: 68014
  Cyclic GFR-binding peptide
  MOD_RES (2)..(2): Xaa is C or S

SEQ ID NO: 113585 - protein, 41 aa, Artificial Sequence; identical to SEQ ID NO: 22615
  Cyclic GFR-binding peptide
  MOD_RES (1)..(38): Xaa is C or S

SEQ ID NO: 113586 - protein, 36 aa, Artificial Sequence; identical to SEQ ID NO: 62949
  Cyclic GFR-binding peptide
  MOD_RES (1)..(32)..(33): Xaa is C or S

SEQ ID NO: 113587 - protein, 23 aa, Artificial Sequence
  Cyclic GFR-binding peptide
IMVTAKKVKPKRGVIKRIQVPRL

SEQ ID NO: 113588 - protein, 40 aa, Artificial Sequence; identical to SEQ ID NO: 22621
  Cyclic GFR-binding peptide
  MOD_RES (1)..(3)..(37): Xaa is C or S

SEQ ID NO: 113589 - protein, 30 aa, Artificial Sequence; identical to SEQ ID NO: 22622
  Cyclic GFR-binding peptide

SEQ ID NO: 113590 - protein, 30 aa, Artificial Sequence; identical to SEQ ID NO: 66314
  Cyclic GFR-binding peptide
  MOD_RES (1)..(1): Xaa is C or S

SEQ ID NO: 113591 - protein, 27 aa, Artificial Sequence
  Cyclic GFR-binding peptide
  MOD_RES (27)..(27): Xaa is C or S
MVQVEKIKPTKGIVKAIKVSRLDQSVX

SEQ ID NO: 113592 - protein, 38 aa, Artificial Sequence; identical to SEQ ID NO: 22623
  Cyclic GFR-binding peptide
  MOD_RES (32)..(32): Xaa is C or S

SEQ ID NO: 113593 - protein, 33 aa, Artificial Sequence; identical to SEQ ID NO: 62957
  Cyclic GFR-binding peptide
  MOD_RES (27)..(28): Xaa is C or S

SEQ ID NO: 113594 - protein, 25 aa, Artificial Sequence
  Cyclic GFR-binding peptide
VMVQVEKVKPTRGVVKAIKVSRLDQ

SEQ ID NO: 113595 - protein, 28 aa, Artificial Sequence
  Cyclic GFR-binding peptide
HEELVTAKKHQGQHPKIRIKRMQVPRQG

SEQ ID NO: 113596 - protein, 35 aa, Artificial Sequence; identical to SEQ ID NO: 22625
  Cyclic GFR-binding peptide
  MOD_RES (1)..(35): Xaa is C or S

SEQ ID NO: 113597 - protein, 38 aa, Artificial Sequence; identical to SEQ ID NO: 22626
  Cyclic GFR-binding peptide
  MOD_RES (2)..(2): Xaa is C or S

SEQ ID NO: 113598 - protein, 34 aa, Artificial Sequence; identical to SEQ ID NO: 64665
  Cyclic GFR-binding peptide
  MOD_RES (31)..(32): Xaa is C or S

SEQ ID NO: 113599 - protein, 24 aa, Artificial Sequence
  Cyclic GFR-binding peptide
VTAKKLKPKKRVYEIKRVQVPRHH

SEQ ID NO: 113600 - protein, 28 aa, Artificial Sequence
  Cyclic GFR-binding peptide
SRVIMVQVEKVKPKRGVVKAIKVSRLAQ

SEQ ID NO: 113601 - protein, 32 aa, Artificial Sequence; identical to SEQ ID NO: 22629
  Cyclic GFR-binding peptide

SEQ ID NO: 113602 - protein, 32 aa, Artificial Sequence; identical to SEQ ID NO: 66329
  Cyclic GFR-binding peptide
  MOD_RES (31)..(32): Xaa is C or S

SEQ ID NO: 113603 - protein, 29 aa, Artificial Sequence
  Cyclic GFR-binding peptide
NHQLFVQVEKHQGQHPKIRVKAMKVSREE

SEQ ID NO: 113604 - protein, 30 aa, Artificial Sequence; identical to SEQ ID NO: 22632
  Cyclic GFR-binding peptide

SEQ ID NO: 113605 - protein, 34 aa, Artificial Sequence; identical to SEQ ID NO: 22633
  Cyclic GFR-binding peptide
  MOD_RES (33)..(33): Xaa is C or S

SEQ ID NO: 113606 - protein, 25 aa, Artificial Sequence
  Cyclic GFR-binding peptide
KVIMVTAKKIKPTKGIIKRIQVPRL

SEQ ID NO: 113607 - protein, 36 aa, Artificial Sequence; identical to SEQ ID NO: 22637
  Cyclic GFR-binding peptide

SEQ ID NO: 113608 - protein, 25 aa, Artificial Sequence
  Cyclic GFR-binding peptide
IMVTAKKIKPTKGIIKRIQVPRLDQ

SEQ ID NO: 113609 - protein, 36 aa, Artificial Sequence; identical to SEQ ID NO: 22638
  Cyclic GFR-binding peptide
  MOD_RES (1)..(1): Xaa is C or S

SEQ ID NO: 113610 - protein, 33 aa, Artificial Sequence; identical to SEQ ID NO: 22640
  Cyclic GFR-binding peptide

SEQ ID NO: 113611 - protein, 35 aa, Artificial Sequence; identical to SEQ ID NO: 22641
  Cyclic GFR-binding peptide
  MOD_RES (33)..(33): Xaa is C or S

SEQ ID NO: 113612 - protein, 30 aa, Artificial Sequence; identical to SEQ ID NO: 22642
  Cyclic GFR-binding peptide

SEQ ID NO: 113613 - protein, 31 aa, Artificial Sequence; identical to SEQ ID NO: 62969
  Cyclic GFR-binding peptide
  MOD_RES (28)..(29): Xaa is C or S

SEQ ID NO: 113614 - protein, 35 aa, Artificial Sequence; identical to SEQ ID NO: 22643
  Cyclic GFR-binding peptide
  MOD_RES (2)..(4): Xaa is C or S

SEQ ID NO: 113615 - protein, 38 aa, Artificial Sequence; identical to SEQ ID NO: 68047
  Cyclic GFR-binding peptide
  MOD_RES (1)..(3)..(34)..(35): Xaa is C or S

SEQ ID NO: 113616 - protein, 24 aa, Artificial Sequence
  Cyclic GFR-binding peptide
VMVTAKKVKPTRGVIKRIQVPRLD

SEQ ID NO: 113617 - protein, 34 aa, Artificial Sequence; identical to SEQ ID NO: 64681
  Cyclic GFR-binding peptide
  MOD_RES (2)..(33)..(34): Xaa is C or S

SEQ ID NO: 113618 - protein, 34 aa, Artificial Sequence; identical to SEQ ID NO: 22646
  Cyclic GFR-binding peptide
  MOD_RES (34)..(34): Xaa is C or S

SEQ ID NO: 113619 - protein, 30 aa, Artificial Sequence; identical to SEQ ID NO: 66341
  Cyclic GFR-binding peptide
  MOD_RES (30)..(30): Xaa is C or S

SEQ ID NO: 113620 - protein, 44 aa, Artificial Sequence; identical to SEQ ID NO: 22648
  Cyclic GFR-binding peptide
  MOD_RES (2)..(4)..(41): Xaa is C or S

SEQ ID NO: 113621 - protein, 25 aa, Artificial Sequence
  Cyclic GFR-binding peptide
QLFVTAKKHQGQHPKIRIKRMQVPR

SEQ ID NO: 113622 - protein, 32 aa, Artificial Sequence; identical to SEQ ID NO: 62977
  Cyclic GFR-binding peptide
  MOD_RES (2)..(4): Xaa is C or S

SEQ ID NO: 113623 - protein, 29 aa, Artificial Sequence
  Cyclic GFR-binding peptide
  MOD_RES (2)..(2): Xaa is C or S
KXSRVIMVQVEKVKPKRGVVKAIKVSRLA

SEQ ID NO: 113624 - protein, 32 aa, Artificial Sequence; identical to SEQ ID NO: 64686
  Cyclic GFR-binding peptide
  MOD_RES (2)..(2): Xaa is C or S

SEQ ID NO: 113625 - protein, 34 aa, Artificial Sequence; identical to SEQ ID NO: 22653
  Cyclic GFR-binding peptide
  MOD_RES (32)..(32): Xaa is C or S

SEQ ID NO: 113626 - protein, 34 aa, Artificial Sequence; identical to SEQ ID NO: 22654
  Cyclic GFR-binding peptide
  MOD_RES (28)..(28): Xaa is C or S

SEQ ID NO: 113627 - protein, 27 aa, Artificial Sequence
  Cyclic GFR-binding peptide
VIMVQVEKIKPTKGIVKAIKVSRLDQS

SEQ ID NO: 113628 - protein, 31 aa, Artificial Sequence; identical to SEQ ID NO: 66350
  Cyclic GFR-binding peptide
  MOD_RES (1)..(1): Xaa is C or S

SEQ ID NO: 113629 - protein, 40 aa, Artificial Sequence; identical to SEQ ID NO: 22656
  Cyclic GFR-binding peptide
  MOD_RES (37)..(37): Xaa is C or S

SEQ ID NO: 113630 - protein, 32 aa, Artificial Sequence; identical to SEQ ID NO: 62984
  Cyclic GFR-binding peptide
  MOD_RES (1)..(32): Xaa is C or S

SEQ ID NO: 113631 - protein, 34 aa, Artificial Sequence; identical to SEQ ID NO: 62986
  Cyclic GFR-binding peptide
  MOD_RES (29)..(30): Xaa is C or S

SEQ ID NO: 113632 - protein, 26 aa, Artificial Sequence
  Cyclic GFR-binding peptide
  MOD_RES (26)..(26): Xaa is C or S
VTAKKVKPKRGVIKRIQVPRLAQPVX

SEQ ID NO: 113633 - protein, 31 aa, Artificial Sequence; identical to SEQ ID NO: 22658
  Cyclic GFR-binding peptide
  MOD_RES (28)..(28): Xaa is C or S

SEQ ID NO: 113634 - protein, 41 aa, Artificial Sequence; identical to SEQ ID NO: 22659
  Cyclic GFR-binding peptide
  MOD_RES (2)..(39): Xaa is C or S

SEQ ID NO: 113635 - protein, 25 aa, Artificial Sequence
  Cyclic GFR-binding peptide
KVVMVQVEKVKPTRGVVKAIKVSRL

SEQ ID NO: 113636 - protein, 29 aa, Artificial Sequence
  Cyclic GFR-binding peptide
RVIMVQVEKVKPKRGVVKAIKVSRLAQPV

SEQ ID NO: 113637 - protein, 38 aa, Artificial Sequence; identical to SEQ ID NO: 22662
  Cyclic GFR-binding peptide
  MOD_RES (33)..(33): Xaa is C or S

SEQ ID NO: 113638 - protein, 39 aa, Artificial Sequence; identical to SEQ ID NO: 22663
  Cyclic GFR-binding peptide
  MOD_RES (33)..(33): Xaa is C or S

SEQ ID NO: 113639 - protein, 28 aa, Artificial Sequence
  Cyclic GFR-binding peptide
ELRVTAKKLKPKKRVYEIKRVQVPRHHV

SEQ ID NO: 113640 - protein, 29 aa, Artificial Sequence
  Cyclic GFR-binding peptide
  MOD_RES (1)..(1): Xaa is C or S
XSRVIMVTAKKVKPKRGVIKRIQVPRLAQ

SEQ ID NO: 113641 - protein, 34 aa, Artificial Sequence; identical to SEQ ID NO: 22666
  Cyclic GFR-binding peptide
  MOD_RES (33)..(33): Xaa is C or S

SEQ ID NO: 113642 - protein, 29 aa, Artificial Sequence
  Cyclic GFR-binding peptide
SRVIMVQVEKVKPKRGVVKAIKVSRLAQP

SEQ ID NO: 113643 - protein, 28 aa, Artificial Sequence
  Cyclic GFR-binding peptide
  MOD_RES (2)..(2): Xaa is C or S
KXSKVVMVTAKKVKPTRGVIKRIQVPRL

SEQ ID NO: 113644 - protein, 34 aa, Artificial Sequence; identical to SEQ ID NO: 22668
  Cyclic GFR-binding peptide
  MOD_RES (31)..(31): Xaa is C or S

SEQ ID NO: 113645 - protein, 45 aa, Artificial Sequence; identical to SEQ ID NO: 22669
  Cyclic GFR-binding peptide
  MOD_RES (2)..(4)..(41): Xaa is C or S

SEQ ID NO: 113646 - protein, 38 aa, Artificial Sequence; identical to SEQ ID NO: 64707
  Cyclic GFR-binding peptide
  MOD_RES (1)..(3)..(34)..(35): Xaa is C or S

SEQ ID NO: 113647 - protein, 25 aa, Artificial Sequence
  Cyclic GFR-binding peptide
EELVQVEKHQGQHPKIRVKAMKVSR

SEQ ID NO: 113648 - protein, 26 aa, Artificial Sequence
  Cyclic GFR-binding peptide
SKVIMVTAKKIKPTKGIIKRIQVPRL

SEQ ID NO: 113649 - protein, 26 aa, Artificial Sequence
  Cyclic GFR-binding peptide
LFVTAKKHQGQHPKIRIKRMQVPREE

SEQ ID NO: 113650 - protein, 32 aa, Artificial Sequence; identical to SEQ ID NO: 22674
  Cyclic GFR-binding peptide
  MOD_RES (1)..(1): Xaa is C or S

SEQ ID NO: 113651 - protein, 36 aa, Artificial Sequence; identical to SEQ ID NO: 22675
  Cyclic GFR-binding peptide
  MOD_RES (30)..(30): Xaa is C or S

SEQ ID NO: 113652 - protein, 33 aa, Artificial Sequence; identical to SEQ ID NO: 22676
  Cyclic GFR-binding peptide
  MOD_RES (29)..(29): Xaa is C or S

SEQ ID NO: 113653 - protein, 37 aa, Artificial Sequence; identical to SEQ ID NO: 64715
  Cyclic GFR-binding peptide
  MOD_RES (2)..(33)..(34): Xaa is C or S

SEQ ID NO: 113654 - protein, 34 aa, Artificial Sequence; identical to SEQ ID NO: 22677
  Cyclic GFR-binding peptide
  MOD_RES (31)..(31): Xaa is C or S

SEQ ID NO: 113655 - protein, 26 aa, Artificial Sequence
  Cyclic GFR-binding peptide
VVMVQVEKVKPTRGVVKAIKVSRLDQ

SEQ ID NO: 113656 - protein, 29 aa, Artificial Sequence
  Cyclic GFR-binding peptide
  MOD_RES (2)..(2): Xaa is C or S
KXSRVIMVTAKKVKPKRGVIKRIQVPRLA

SEQ ID NO: 113657 - protein, 31 aa, Artificial Sequence; identical to SEQ ID NO: 66382
  Cyclic GFR-binding peptide
  MOD_RES (29)..(30): Xaa is C or S

SEQ ID NO: 113658 - protein, 37 aa, Artificial Sequence; identical to SEQ ID NO: 22679
  Cyclic GFR-binding peptide
  MOD_RES (33)..(33): Xaa is C or S

SEQ ID NO: 113659 - protein, 34 aa, Artificial Sequence; identical to SEQ ID NO: 22680
  Cyclic GFR-binding peptide
  MOD_RES (29)..(29): Xaa is C or S

SEQ ID NO: 113660 - protein, 35 aa, Artificial Sequence; identical to SEQ ID NO: 68085
  Cyclic GFR-binding peptide
  MOD_RES (31)..(32): Xaa is C or S

SEQ ID NO: 113661 - protein, 41 aa, Artificial Sequence; identical to SEQ ID NO: 22681
  Cyclic GFR-binding peptide
  MOD_RES (2)..(36): Xaa is C or S

SEQ ID NO: 113662 - protein, 20 aa, Artificial Sequence
  Cyclic GFR-binding peptide
VTAKKIKPTKGIIKRIQVPR

SEQ ID NO: 113663 - protein, 28 aa, Artificial Sequence
  Cyclic GFR-binding peptide
  MOD_RES (26)..(27): Xaa is C or S
VQVEKVKPTRGVVKAIKVSRLDQPVXXP

SEQ ID NO: 113664 - protein, 40 aa, Artificial Sequence; identical to SEQ ID NO: 66389
  Cyclic GFR-binding peptide
  MOD_RES (2)..(4)..(35)..(36): Xaa is C or S

SEQ ID NO: 113665 - protein, 27 aa, Artificial Sequence
  Cyclic GFR-binding peptide
ELRVTAKKLKPKKRVYEIKRVQVPRHH

SEQ ID NO: 113666 - protein, 35 aa, Artificial Sequence; identical to SEQ ID NO: 66394
  Cyclic GFR-binding peptide
  MOD_RES (2)..(4)..(35): Xaa is C or S

SEQ ID NO: 113667 - protein, 30 aa, Artificial Sequence; identical to SEQ ID NO: 68094
  Cyclic GFR-binding peptide
  MOD_RES (1)..(3): Xaa is C or S

SEQ ID NO: 113668 - protein, 32 aa, Artificial Sequence; identical to SEQ ID NO: 68099
  Cyclic GFR-binding peptide
  MOD_RES (27)..(28): Xaa is C or S

SEQ ID NO: 113669 - protein, 34 aa, Artificial Sequence; identical to SEQ ID NO: 66400
  Cyclic GFR-binding peptide
  MOD_RES (2)..(4): Xaa is C or S

SEQ ID NO: 113670 - protein, 25 aa, Artificial Sequence
  Cyclic GFR-binding peptide
VQVEKIKPTKGIVKAIKVSRLDQSV

SEQ ID NO: 113671 - protein, 21 aa, Artificial Sequence
  Cyclic GFR-binding peptide
VTAKKIKPTKGIIKRIQVPRL

SEQ ID NO: 113672 - protein, 37 aa, Artificial Sequence; identical to SEQ ID NO: 64733
  Cyclic GFR-binding peptide
  MOD_RES (1)..(3)..(34)..(35): Xaa is C or S

SEQ ID NO: 113673 - protein, 35 aa, Artificial Sequence; identical to SEQ ID NO: 22697
  Cyclic GFR-binding peptide
  MOD_RES (1)..(3): Xaa is C or S

SEQ ID NO: 113674 - protein, 30 aa, Artificial Sequence; identical to SEQ ID NO: 68109
  Cyclic GFR-binding peptide
  MOD_RES (2)..(2): Xaa is C or S

SEQ ID NO: 113675 - protein, 36 aa, Artificial Sequence; identical to SEQ ID NO: 22699
  Cyclic GFR-binding peptide
  MOD_RES (2)..(4): Xaa is C or S

SEQ ID NO: 113676 - protein, 26 aa, Artificial Sequence
  Cyclic GFR-binding peptide
SKVVMVTAKKVKPTRGVIKRIQVPRL

SEQ ID NO: 113677 - protein, 39 aa, Artificial Sequence; identical to SEQ ID NO: 66413
  Cyclic GFR-binding peptide
  MOD_RES (2)..(33)..(34): Xaa is C or S

SEQ ID NO: 113678 - protein, 21 aa, Artificial Sequence
  Cyclic GFR-binding peptide
MVTAKKVKPKRGVIKRIQVPR

SEQ ID NO: 113679 - protein, 38 aa, Artificial Sequence; identical to SEQ ID NO: 64743
  Cyclic GFR-binding peptide
  MOD_RES (1)..(3)..(34)..(35): Xaa is C or S

SEQ ID NO: 113680 - protein, 29 aa, Artificial Sequence
  Cyclic GFR-binding peptide
  MOD_RES (1)..(3): Xaa is C or S
XKXSRVIMVQVEKVKPKRGVVKAIKVSRL

SEQ ID NO: 113681 - protein, 37 aa, Artificial Sequence; identical to SEQ ID NO: 63050
  Cyclic GFR-binding peptide
  MOD_RES (31)..(32): Xaa is C or S

SEQ ID NO: 113682 - protein, 27 aa, Artificial Sequence
  Cyclic GFR-binding peptide
LRVTAKKLKPKKRVYEIKRVQVPRHHV

SEQ ID NO: 113683 - protein, 28 aa, Artificial Sequence
  Cyclic GFR-binding peptide
DELTVQVEKFIPKKRVIEVKAVKVSRLQ

SEQ ID NO: 113684 - protein, 37 aa, Artificial Sequence; identical to SEQ ID NO: 64748
  Cyclic GFR-binding peptide
  MOD_RES (2)..(4)..(35)..(36): Xaa is C or S

SEQ ID NO: 113685 - protein, 28 aa, Artificial Sequence
  Cyclic GFR-binding peptide
LHEELRVTAKKLKPKKRVYEIKRVQVPR

SEQ ID NO: 113686 - protein, 32 aa, Artificial Sequence; identical to SEQ ID NO: 22712
  Cyclic GFR-binding peptide
  MOD_RES (28)..(28): Xaa is C or S

SEQ ID NO: 113687 - protein, 30 aa, Artificial Sequence; identical to SEQ ID NO: 66430
  Cyclic GFR-binding peptide

SEQ ID NO: 113688 - protein, 26 aa, Artificial Sequence
  Cyclic GFR-binding peptide
FVTAKKHQGQHPKIRIKRMQVPREET

SEQ ID NO: 113689 - protein, 30 aa, Artificial Sequence; identical to SEQ ID NO: 22719
  Cyclic GFR-binding peptide

SEQ ID NO: 113690 - protein, 31 aa, Artificial Sequence; identical to SEQ ID NO: 22720
  Cyclic GFR-binding peptide
  MOD_RES (2)..(2): Xaa is C or S

SEQ ID NO: 113691 - protein, 25 aa, Artificial Sequence
  Cyclic GFR-binding peptide
VTAKKVKPKRGVIKRIQVPRLAQPV

SEQ ID NO: 113692 - protein, 30 aa, Artificial Sequence; identical to SEQ ID NO: 22722
  Cyclic GFR-binding peptide
  MOD_RES (2)..(2): Xaa is C or S

SEQ ID NO: 113693 - protein, 27 aa, Artificial Sequence
  Cyclic GFR-binding peptide
KVVMVQVEKVKPTRGVVKAIKVSRLDQ

SEQ ID NO: 113694 - protein, 31 aa, Artificial Sequence; identical to SEQ ID NO: 63072
  Cyclic GFR-binding peptide
  MOD_RES (27)..(28): Xaa is C or S

SEQ ID NO: 113695 - protein, 25 aa, Artificial Sequence
  Cyclic GFR-binding peptide
VIMVTAKKIKPTKGIIKRIQVPRLD

SEQ ID NO: 113696 - protein, 34 aa, Artificial Sequence; identical to SEQ ID NO: 64765
  Cyclic GFR-binding peptide
  MOD_RES (2)..(4): Xaa is C or S

SEQ ID NO: 113697 - protein, 39 aa, Artificial Sequence; identical to SEQ ID NO: 63076
  Cyclic GFR-binding peptide
  MOD_RES (2)..(4)..(35)..(36): Xaa is C or S

SEQ ID NO: 113698 - protein, 31 aa, Artificial Sequence; identical to SEQ ID NO: 22729
  Cyclic GFR-binding peptide
  MOD_RES (30)..(30): Xaa is C or S

SEQ ID NO: 113699 - protein, 33 aa, Artificial Sequence; identical to SEQ ID NO: 22732
  Cyclic GFR-binding peptide
  MOD_RES (32)..(32): Xaa is C or S

SEQ ID NO: 113700 - protein, 42 aa, Artificial Sequence; identical to SEQ ID NO: 22739
  Cyclic GFR-binding peptide
  MOD_RES (2)..(36): Xaa is C or S

SEQ ID NO: 113701 - protein, 31 aa, Artificial Sequence; identical to SEQ ID NO: 68137
  Cyclic GFR-binding peptide
  MOD_RES (1)..(3): Xaa is C or S

SEQ ID NO: 113702 - protein, 29 aa, Artificial Sequence
  Cyclic GFR-binding peptide
  MOD_RES (26)..(27): Xaa is C or S
VQVEKVKPKRGVVKAIKVSRLAQPVXXPA

SEQ ID NO: 113703 - protein, 30 aa, Artificial Sequence; identical to SEQ ID NO: 22744
  Cyclic GFR-binding peptide

SEQ ID NO: 113704 - protein, 26 aa, Artificial Sequence
  Cyclic GFR-binding peptide
SRVIMVTAKKVKPKRGVIKRIQVPRL

SEQ ID NO: 113705 - protein, 37 aa, Artificial Sequence; identical to SEQ ID NO: 22745
  Cyclic GFR-binding peptide
  MOD_RES (34)..(34): Xaa is C or S

SEQ ID NO: 113706 - protein, 22 aa, Artificial Sequence
  Cyclic GFR-binding peptide
IMVTAKKIKPTKGIIKRIQVPR

SEQ ID NO: 113707 - protein, 36 aa, Artificial Sequence; identical to SEQ ID NO: 22746
  Cyclic GFR-binding peptide
  MOD_RES (2)..(4): Xaa is C or S

SEQ ID NO: 113708 - protein, 27 aa, Artificial Sequence
  Cyclic GFR-binding peptide
SRVIMVQVEKVKPKRGVVKAIKVSRLA

SEQ ID NO: 113709 - protein, 39 aa, Artificial Sequence; identical to SEQ ID NO: 22749
  Cyclic GFR-binding peptide
  MOD_RES (35)..(35): Xaa is C or S

SEQ ID NO: 113710 - protein, 37 aa, Artificial Sequence; identical to SEQ ID NO: 22752
  Cyclic GFR-binding peptide
  MOD_RES (32)..(32): Xaa is C or S

SEQ ID NO: 113711 - protein, 34 aa, Artificial Sequence; identical to SEQ ID NO: 22753
  Cyclic GFR-binding peptide

SEQ ID NO: 113712 - protein, 31 aa, Artificial Sequence; identical to SEQ ID NO: 22754
  Cyclic GFR-binding peptide
  MOD_RES (29)..(29): Xaa is C or S

SEQ ID NO: 113713 - protein, 32 aa, Artificial Sequence; identical to SEQ ID NO: 22755
  Cyclic GFR-binding peptide
  MOD_RES (29)..(29): Xaa is C or S

SEQ ID NO: 113714 - protein, 29 aa, Artificial Sequence
  Cyclic GFR-binding peptide
KNHQLFVQVEKHQGQHPKIRVKAMKVSRE

SEQ ID NO: 113715 - protein, 32 aa, Artificial Sequence; identical to SEQ ID NO: 68155
  Cyclic GFR-binding peptide
  MOD_RES (29)..(30): Xaa is C or S

SEQ ID NO: 113716 - protein, 24 aa, Artificial Sequence
  Cyclic GFR-binding peptide
VTAKKHQGQHPKIRIKRMQVPREE

SEQ ID NO: 113717 - protein, 28 aa, Artificial Sequence
  Cyclic GFR-binding peptide
KVIMVQVEKIKPTKGIVKAIKVSRLDQS

SEQ ID NO: 113718 - protein, 39 aa, Artificial Sequence; identical to SEQ ID NO: 22765
  Cyclic GFR-binding peptide
  MOD_RES (2)..(39): Xaa is C or S

SEQ ID NO: 113719 - protein, 29 aa, Artificial Sequence
  Cyclic GFR-binding peptide
RVIMVTAKKVKPKRGVIKRIQVPRLAQPV

SEQ ID NO: 113720 - protein, 37 aa, Artificial Sequence; identical to SEQ ID NO: 22767
  Cyclic GFR-binding peptide
  MOD_RES (34)..(34): Xaa is C or S

SEQ ID NO: 113721 - protein, 28 aa, Artificial Sequence
  Cyclic GFR-binding peptide
  MOD_RES (1)..(1): Xaa is C or S
XSRVIMVQVEKVKPKRGVVKAIKVSRLA

SEQ ID NO: 113722 - protein, 22 aa, Artificial Sequence
  Cyclic GFR-binding peptide
VMVQVEKVKPTRGVVKAIKVSR

SEQ ID NO: 113723 - protein, 42 aa, Artificial Sequence; identical to SEQ ID NO: 22770
  Cyclic GFR-binding peptide
  MOD_RES (2)..(4)..(38): Xaa is C or S

SEQ ID NO: 113724 - protein, 31 aa, Artificial Sequence; identical to SEQ ID NO: 66460
  Cyclic GFR-binding peptide
  MOD_RES (2)..(2): Xaa is C or S

SEQ ID NO: 113725 - protein, 26 aa, Artificial Sequence
  Cyclic GFR-binding peptide
  MOD_RES (26)..(26): Xaa is C or S
VQVEKVKPTRGVVKAIKVSRLDQPVX

SEQ ID NO: 113726 - protein, 35 aa, Artificial Sequence; identical to SEQ ID NO: 22771
  Cyclic GFR-binding peptide
  MOD_RES (1)..(3): Xaa is C or S

SEQ ID NO: 113727 - protein, 23 aa, Artificial Sequence
  Cyclic GFR-binding peptide
FVQVEKHQGQHPKIRVKAMKVSR

SEQ ID NO: 113728 - protein, 31 aa, Artificial Sequence; identical to SEQ ID NO: 63099
  Cyclic GFR-binding peptide
  MOD_RES (29)..(30): Xaa is C or S

SEQ ID NO: 113729 - protein, 30 aa, Artificial Sequence; identical to SEQ ID NO: 22773
  Cyclic GFR-binding peptide
  MOD_RES (2)..(2): Xaa is C or S

SEQ ID NO: 113730 - protein, 31 aa, Artificial Sequence; identical to SEQ ID NO: 64807
  Cyclic GFR-binding peptide
  MOD_RES (27)..(28): Xaa is C or S

SEQ ID NO: 113731 - protein, 23 aa, Artificial Sequence
  Cyclic GFR-binding peptide
LVQVEKHQGQHPKIRVKAMKVSR

SEQ ID NO: 113732 - protein, 38 aa, Artificial Sequence; identical to SEQ ID NO: 22783
  Cyclic GFR-binding peptide
  MOD_RES (1)..(3)..(37): Xaa is C or S

SEQ ID NO: 113733 - protein, 29 aa, Artificial Sequence
  Cyclic GFR-binding peptide
  MOD_RES (28)..(28): Xaa is C or S
VQVEKHQGQHPKIRVKAMKVSREETPVXE

SEQ ID NO: 113734 - protein, 33 aa, Artificial Sequence; identical to SEQ ID NO: 22788
  Cyclic GFR-binding peptide
  MOD_RES (28)..(28): Xaa is C or S

SEQ ID NO: 113735 - protein, 29 aa, Artificial Sequence
  Cyclic GFR-binding peptide
EELRVTAKKLKPKKRVYEIKRVQVPRHHV

SEQ ID NO: 113736 - protein, 42 aa, Artificial Sequence; identical to SEQ ID NO: 22790
  Cyclic GFR-binding peptide
  MOD_RES (1)..(38): Xaa is C or S

SEQ ID NO: 113737 - protein, 26 aa, Artificial Sequence
  Cyclic GFR-binding peptide
EELVTAKKHQGQHPKIRIKRMQVPRQ

SEQ ID NO: 113738 - protein, 31 aa, Artificial Sequence; identical to SEQ ID NO: 22792
  Cyclic GFR-binding peptide

SEQ ID NO: 113739 - protein, 23 aa, Artificial Sequence
  Cyclic GFR-binding peptide
MVTAKKIKPTKGIIKRIQVPRLD

SEQ ID NO: 113740 - protein, 33 aa, Artificial Sequence; identical to SEQ ID NO: 22795
  Cyclic GFR-binding peptide
  MOD_RES (33)..(33): Xaa is C or S

SEQ ID NO: 113741 - protein, 26 aa, Artificial Sequence
  Cyclic GFR-binding peptide
MVTAKKIKPTKGIIKRIQVPRLDQSV

SEQ ID NO: 113742 - protein, 28 aa, Artificial Sequence
  Cyclic GFR-binding peptide
  MOD_RES (1)..(3): Xaa is C or S
XKXSKVIMVQVEKIKPTKGIVKAIKVSR

SEQ ID NO: 113743 - protein, 28 aa, Artificial Sequence
  Cyclic GFR-binding peptide
LHDELTVQVEKFIPKKRVIEVKAVKVSR

SEQ ID NO: 113744 - protein, 38 aa, Artificial Sequence; identical to SEQ ID NO: 68189
  Cyclic GFR-binding peptide
  MOD_RES (2)..(4)..(35)..(36): Xaa is C or S

SEQ ID NO: 113745 - protein, 36 aa, Artificial Sequence; identical to SEQ ID NO: 68190
  Cyclic GFR-binding peptide
  MOD_RES (31)..(32): Xaa is C or S

SEQ ID NO: 113746 - protein, 27 aa, Artificial Sequence
  Cyclic GFR-binding peptide
KVIMVQVEKIKPTKGIVKAIKVSRLDQ

SEQ ID NO: 113747 - protein, 28 aa, Artificial Sequence
  Cyclic GFR-binding peptide
  MOD_RES (1)..(3): Xaa is C or S
XKXSRVIMVQVEKVKPKRGVVKAIKVSR

SEQ ID NO: 113748 - protein, 31 aa, Artificial Sequence; identical to SEQ ID NO: 66491
  Cyclic GFR-binding peptide
  MOD_RES (28)..(29): Xaa is C or S

SEQ ID NO: 113749 - protein, 29 aa, Artificial Sequence
  Cyclic GFR-binding peptide
EELVQVEKHQGQHPKIRVKAMKVSRQGTP

SEQ ID NO: 113750 - protein, 29 aa, Artificial Sequence
  Cyclic GFR-binding peptide
  MOD_RES (2)..(4): Xaa is C or S
SXKXSKVVMVQVEKVKPTRGVVKAIKVSR

SEQ ID NO: 113751 - protein, 35 aa, Artificial Sequence; identical to SEQ ID NO: 22809
  Cyclic GFR-binding peptide
  MOD_RES (29)..(29): Xaa is C or S

SEQ ID NO: 113752 - protein, 33 aa, Artificial Sequence; identical to SEQ ID NO: 66492
  Cyclic GFR-binding peptide
  MOD_RES (2)..(33): Xaa is C or S

SEQ ID NO: 113753 - protein, 30 aa, Artificial Sequence; identical to SEQ ID NO: 66494
  Cyclic GFR-binding peptide
  MOD_RES (29)..(30): Xaa is C or S

SEQ ID NO: 113754 - protein, 32 aa, Artificial Sequence; identical to SEQ ID NO: 68197
  Cyclic GFR-binding peptide
  MOD_RES (26)..(27): Xaa is C or S

SEQ ID NO: 113755 - protein, 36 aa, Artificial Sequence; identical to SEQ ID NO: 22811
  Cyclic GFR-binding peptide
  MOD_RES (34)..(34): Xaa is C or S

SEQ ID NO: 113756 - protein, 25 aa, Artificial Sequence
  Cyclic GFR-binding peptide
LRVTAKKLKPKKRVYEIKRVQVPRH

SEQ ID NO: 113757 - protein, 36 aa, Artificial Sequence; identical to SEQ ID NO: 22814
  Cyclic GFR-binding peptide
  MOD_RES (2)..(36): Xaa is C or S

SEQ ID NO: 113758 - protein, 38 aa, Artificial Sequence; identical to SEQ ID NO: 22817
  Cyclic GFR-binding peptide
  MOD_RES (34)..(34): Xaa is C or S

SEQ ID NO: 113759 - protein, 40 aa, Artificial Sequence; identical to SEQ ID NO: 66500
  Cyclic GFR-binding peptide
  MOD_RES (1)..(3)..(34)..(35): Xaa is C or S

SEQ ID NO: 113760 - protein, 35 aa, Artificial Sequence; identical to SEQ ID NO: 22818
  Cyclic GFR-binding peptide
  MOD_RES (2)..(2): Xaa is C or S

SEQ ID NO: 113761 - protein, 27 aa, Artificial Sequence
  Cyclic GFR-binding peptide
VMVTAKKVKPTRGVIKRIQVPRLDQPV

SEQ ID NO: 113762 - protein, 27 aa, Artificial Sequence
  Cyclic GFR-binding peptide
ELVTAKKHQGQHPKIRIKRMQVPRQGT

SEQ ID NO: 113763 - protein, 35 aa, Artificial Sequence; identical to SEQ ID NO: 22820
  Cyclic GFR-binding peptide
  MOD_RES (1)..(3): Xaa is C or S

SEQ ID NO: 113764 - protein, 31 aa, Artificial Sequence; identical to SEQ ID NO: 22822
  Cyclic GFR-binding peptide

SEQ ID NO: 113765 - protein, 36 aa, Artificial Sequence; identical to SEQ ID NO: 22823
  Cyclic GFR-binding peptide
  MOD_RES (32)..(32): Xaa is C or S

SEQ ID NO: 113766 - protein, 32 aa, Artificial Sequence; identical to SEQ ID NO: 63143
  Cyclic GFR-binding peptide
  MOD_RES (31)..(32): Xaa is C or S

SEQ ID NO: 113767 - protein, 33 aa, Artificial Sequence; identical to SEQ ID NO: 22824
  Cyclic GFR-binding peptide
  MOD_RES (1)..(1): Xaa is C or S

SEQ ID NO: 113768 - protein, 40 aa, Artificial Sequence; identical to SEQ ID NO: 22826
  Cyclic GFR-binding peptide
  MOD_RES (34)..(34): Xaa is C or S

SEQ ID NO: 113769 - protein, 32 aa, Artificial Sequence; identical to SEQ ID NO: 64843
  Cyclic GFR-binding peptide
  MOD_RES (2)..(4): Xaa is C or S

SEQ ID NO: 113770 - protein, 35 aa, Artificial Sequence; identical to SEQ ID NO: 22828
  Cyclic GFR-binding peptide
  MOD_RES (34)..(34): Xaa is C or S

SEQ ID NO: 113771 - protein, 31 aa, Artificial Sequence; identical to SEQ ID NO: 63146
  Cyclic GFR-binding peptide
  MOD_RES (31)..(31): Xaa is C or S

SEQ ID NO: 113772 - protein, 31 aa, Artificial Sequence; identical to SEQ ID NO: 22831
  Cyclic GFR-binding peptide
  MOD_RES (1)..(1): Xaa is C or S

SEQ ID NO: 113773 - protein, 25 aa, Artificial Sequence
  Cyclic GFR-binding peptide
VIMVQVEKIKPTKGIVKAIKVSRLD

SEQ ID NO: 113774 - protein, 38 aa, Artificial Sequence; identical to SEQ ID NO: 22832
  Cyclic GFR-binding peptide
  MOD_RES (1)..(35): Xaa is C or S

SEQ ID NO: 113775 - protein, 33 aa, Artificial Sequence; identical to SEQ ID NO: 66511
  Cyclic GFR-binding peptide
  MOD_RES (30)..(31): Xaa is C or S

SEQ ID NO: 113776 - protein, 25 aa, Artificial Sequence
  Cyclic GFR-binding peptide
QLFVQVEKHQGQHPKIRVKAMKVSR

SEQ ID NO: 113777 - protein, 35 aa, Artificial Sequence; identical to SEQ ID NO: 22834
  Cyclic GFR-binding peptide
  MOD_RES (35)..(35): Xaa is C or S

SEQ ID NO: 113778 - protein, 34 aa, Artificial Sequence; identical to SEQ ID NO: 22835
  Cyclic GFR-binding peptide
  MOD_RES (32)..(32): Xaa is C or S

SEQ ID NO: 113779 - protein, 31 aa, Artificial Sequence; identical to SEQ ID NO: 68212
  Cyclic GFR-binding peptide
  MOD_RES (2)..(2): Xaa is C or S

SEQ ID NO: 113780 - protein, 36 aa, Artificial Sequence; identical to SEQ ID NO: 22839
  Cyclic GFR-binding peptide
  MOD_RES (2)..(36): Xaa is C or S

SEQ ID NO: 113781 - protein, 34 aa, Artificial Sequence; identical to SEQ ID NO: 22840
  Cyclic GFR-binding peptide
  MOD_RES (30)..(30): Xaa is C or S

SEQ ID NO: 113782 - protein, 35 aa, Artificial Sequence; identical to SEQ ID NO: 22842
  Cyclic GFR-binding peptide
  MOD_RES (34)..(34): Xaa is C or S

SEQ ID NO: 113783 - protein, 32 aa, Artificial Sequence; identical to SEQ ID NO: 63160
  Cyclic GFR-binding peptide
  MOD_RES (27)..(28): Xaa is C or S

SEQ ID NO: 113784 - protein, 31 aa, Artificial Sequence; identical to SEQ ID NO: 63161
  Cyclic GFR-binding peptide
  MOD_RES (26)..(27): Xaa is C or S

SEQ ID NO: 113785 - protein, 34 aa, Artificial Sequence; identical to SEQ ID NO: 22843
  Cyclic GFR-binding peptide
  MOD_RES (29)..(29): Xaa is C or S

SEQ ID NO: 113786 - protein, 21 aa, Artificial Sequence
  Cyclic GFR-binding peptide
MVQVEKIKPTKGIVKAIKVSR

SEQ ID NO: 113787 - protein, 27 aa, Artificial Sequence
  Cyclic GFR-binding peptide
FVTAKKHQGQHPKIRIKRMQVPREETP

SEQ ID NO: 113788 - protein, 33 aa, Artificial Sequence; identical to SEQ ID NO: 63167
  Cyclic GFR-binding peptide
  MOD_RES (2)..(4): Xaa is C or S

SEQ ID NO: 113789 - protein, 35 aa, Artificial Sequence; identical to SEQ ID NO: 22848
  Cyclic GFR-binding peptide
  MOD_RES (33)..(33): Xaa is C or S

SEQ ID NO: 113790 - protein, 31 aa, Artificial Sequence; identical to SEQ ID NO: 63170
  Cyclic GFR-binding peptide
  MOD_RES (28)..(29): Xaa is C or S

SEQ ID NO: 113791 - protein, 36 aa, Artificial Sequence; identical to SEQ ID NO: 22851
  Cyclic GFR-binding peptide
  MOD_RES (36)..(36): Xaa is C or S

SEQ ID NO: 113792 - protein, 29 aa, Artificial Sequence
  Cyclic GFR-binding peptide
KVIMVQVEKIKPTKGIVKAIKVSRLDQSV

SEQ ID NO: 113793 - protein, 35 aa, Artificial Sequence; identical to SEQ ID NO: 22852
  Cyclic GFR-binding peptide
  MOD_RES (2)..(4): Xaa is C or S

SEQ ID NO: 113794 - protein, 35 aa, Artificial Sequence; identical to SEQ ID NO: 22855
  Cyclic GFR-binding peptide
  MOD_RES (32)..(32): Xaa is C or S

SEQ ID NO: 113795 - protein, 35 aa, Artificial Sequence; identical to SEQ ID NO: 22856
  Cyclic GFR-binding peptide
  MOD_RES (1)..(3): Xaa is C or S

SEQ ID NO: 113796 - protein, 35 aa, Artificial Sequence; identical to SEQ ID NO: 22859
  Cyclic GFR-binding peptide
  MOD_RES (32)..(32): Xaa is C or S

SEQ ID NO: 113797 - protein, 29 aa, Artificial Sequence
  Cyclic GFR-binding peptide
  MOD_RES (1)..(3): Xaa is C or S
XKXSRVIMVTAKKVKPKRGVIKRIQVPRL

SEQ ID NO: 113798 - protein, 27 aa, Artificial Sequence
  Cyclic GFR-binding peptide
  MOD_RES (2)..(2): Xaa is C or S
KXSRVIMVQVEKVKPKRGVVKAIKVSR

SEQ ID NO: 113799 - protein, 21 aa, Artificial Sequence
  Cyclic GFR-binding peptide
VQVEKIKPTKGIVKAIKVSRL

SEQ ID NO: 113800 - protein, 24 aa, Artificial Sequence
  Cyclic GFR-binding peptide
MVQVEKIKPTKGIVKAIKVSRLDQ

SEQ ID NO: 113801 - protein, 30 aa, Artificial Sequence; identical to SEQ ID NO: 22862
  Cyclic GFR-binding peptide

SEQ ID NO: 113802 - protein, 32 aa, Artificial Sequence; identical to SEQ ID NO: 22865
  Cyclic GFR-binding peptide

SEQ ID NO: 113803 - protein, 28 aa, Artificial Sequence
  Cyclic GFR-binding peptide
  MOD_RES (28)..(28): Xaa is C or S
VQVEKHQGQHPKIRVKAMKVSRQGTPVX

SEQ ID NO: 113804 - protein, 34 aa, Artificial Sequence; identical to SEQ ID NO: 22867
  Cyclic GFR-binding peptide
  MOD_RES (2)..(4): Xaa is C or S

SEQ ID NO: 113805 - protein, 32 aa, Artificial Sequence; identical to SEQ ID NO: 68242
  Cyclic GFR-binding peptide
  MOD_RES (30)..(31): Xaa is C or S

SEQ ID NO: 113806 - protein, 31 aa, Artificial Sequence; identical to SEQ ID NO: 66537
  Cyclic GFR-binding peptide
  MOD_RES (2)..(2): Xaa is C or S

SEQ ID NO: 113807 - protein, 38 aa, Artificial Sequence; identical to SEQ ID NO: 68245
  Cyclic GFR-binding peptide
  MOD_RES (2)..(4)..(35)..(36): Xaa is C or S

SEQ ID NO: 113808 - protein, 34 aa, Artificial Sequence; identical to SEQ ID NO: 64887
  Cyclic GFR-binding peptide
  MOD_RES (29)..(30): Xaa is C or S

SEQ ID NO: 113809 - protein, 33 aa, Artificial Sequence; identical to SEQ ID NO: 22869
  Cyclic GFR-binding peptide
  MOD_RES (2)..(4): Xaa is C or S

SEQ ID NO: 113810 - protein, 40 aa, Artificial Sequence; identical to SEQ ID NO: 66539
  Cyclic GFR-binding peptide
  MOD_RES (2)..(4)..(35)..(36): Xaa is C or S

SEQ ID NO: 113811 - protein, 41 aa, Artificial Sequence; identical to SEQ ID NO: 66541
  Cyclic GFR-binding peptide
  MOD_RES (2)..(4)..(35)..(36): Xaa is C or S

SEQ ID NO: 113812 - protein, 31 aa, Artificial Sequence; identical to SEQ ID NO: 68252
  Cyclic GFR-binding peptide
  MOD_RES (31)..(31): Xaa is C or S

SEQ ID NO: 113813 - protein, 32 aa, Artificial Sequence; identical to SEQ ID NO: 22875
  Cyclic GFR-binding peptide
  MOD_RES (30)..(30): Xaa is C or S

SEQ ID NO: 113814 - protein, 26 aa, Artificial Sequence
  Cyclic GFR-binding peptide
EELRVTAKKLKPKKRVYEIKRVQVPR

SEQ ID NO: 113815 - protein, 24 aa, Artificial Sequence
  Cyclic GFR-binding peptide
VVMVQVEKVKPTRGVVKAIKVSRL

SEQ ID NO: 113816 - protein, 31 aa, Artificial Sequence; identical to SEQ ID NO: 63206
  Cyclic GFR-binding peptide
  MOD_RES (1)..(1): Xaa is C or S

SEQ ID NO: 113817 - protein, 34 aa, Artificial Sequence; identical to SEQ ID NO: 22878
  Cyclic GFR-binding peptide
  MOD_RES (2)..(4): Xaa is C or S

SEQ ID NO: 113818 - protein, 39 aa, Artificial Sequence; identical to SEQ ID NO: 22879
  Cyclic GFR-binding peptide
  MOD_RES (34)..(34): Xaa is C or S

SEQ ID NO: 113819 - protein, 30 aa, Artificial Sequence; identical to SEQ ID NO: 66550
  Cyclic GFR-binding peptide

SEQ ID NO: 113820 - protein, 31 aa, Artificial Sequence; identical to SEQ ID NO: 22882
  Cyclic GFR-binding peptide
  MOD_RES (31)..(31): Xaa is C or S

SEQ ID NO: 113821 - protein, 44 aa, Artificial Sequence; identical to SEQ ID NO: 22883
  Cyclic GFR-binding peptide
  MOD_RES (2)..(4)..(38): Xaa is C or S

SEQ ID NO: 113822 - protein, 36 aa, Artificial Sequence; identical to SEQ ID NO: 22884
  Cyclic GFR-binding peptide
  MOD_RES (36)..(36): Xaa is C or S

SEQ ID NO: 113823 - protein, 25 aa, Artificial Sequence
  Cyclic GFR-binding peptide
VVMVQVEKVKPTRGVVKAIKVSRLD

SEQ ID NO: 113824 - protein, 30 aa, Artificial Sequence; identical to SEQ ID NO: 66555
  Cyclic GFR-binding peptide
  MOD_RES (28)..(29): Xaa is C or S

SEQ ID NO: 113825 - protein, 26 aa, Artificial Sequence
  Cyclic GFR-binding peptide
MVTAKKVKPTRGVIKRIQVPRLDQPV

SEQ ID NO: 113826 - protein, 28 aa, Artificial Sequence
  Cyclic GFR-binding peptide
ELVTAKKHQGQHPKIRIKRMQVPRQGTP

SEQ ID NO: 113827 - protein, 33 aa, Artificial Sequence; identical to SEQ ID NO: 22892
  Cyclic GFR-binding peptide
  MOD_RES (30)..(30): Xaa is C or S

SEQ ID NO: 113828 - protein, 28 aa, Artificial Sequence
  Cyclic GFR-binding peptide
KVVMVQVEKVKPTRGVVKAIKVSRLDQP

SEQ ID NO: 113829 - protein, 28 aa, Artificial Sequence
  Cyclic GFR-binding peptide
QLFVQVEKHQGQHPKIRVKAMKVSREET

SEQ ID NO: 113830 - protein, 29 aa, Artificial Sequence
  Cyclic GFR-binding peptide
ELVQVEKHQGQHPKIRVKAMKVSRQGTPV

SEQ ID NO: 113831 - protein, 34 aa, Artificial Sequence; identical to SEQ ID NO: 66563
  Cyclic GFR-binding peptide
  MOD_RES (31)..(32): Xaa is C or S

SEQ ID NO: 113832 - protein, 32 aa, Artificial Sequence; identical to SEQ ID NO: 22895
  Cyclic GFR-binding peptide
  MOD_RES (1)..(1): Xaa is C or S

SEQ ID NO: 113833 - protein, 44 aa, Artificial Sequence; identical to SEQ ID NO: 22896
  Cyclic GFR-binding peptide
  MOD_RES (2)..(4)..(38): Xaa is C or S

SEQ ID NO: 113834 - protein, 32 aa, Artificial Sequence; identical to SEQ ID NO: 68264
  Cyclic GFR-binding peptide
  MOD_RES (31)..(32): Xaa is C or S

SEQ ID NO: 113835 - protein, 37 aa, Artificial Sequence; identical to SEQ ID NO: 22897
  Cyclic GFR-binding peptide
  MOD_RES (33)..(33): Xaa is C or S

SEQ ID NO: 113836 - protein, 34 aa, Artificial Sequence; identical to SEQ ID NO: 64906
  Cyclic GFR-binding peptide
  MOD_RES (2)..(4): Xaa is C or S

SEQ ID NO: 113837 - protein, 30 aa, Artificial Sequence; identical to SEQ ID NO: 63226
  Cyclic GFR-binding peptide
  MOD_RES (2)..(2): Xaa is C or S

SEQ ID NO: 113838 - protein, 32 aa, Artificial Sequence; identical to SEQ ID NO: 22898
  Cyclic GFR-binding peptide
  MOD_RES (29)..(29): Xaa is C or S

SEQ ID NO: 113839 - protein, 35 aa, Artificial Sequence; identical to SEQ ID NO: 22904
  Cyclic GFR-binding peptide
  MOD_RES (31)..(31): Xaa is C or S

SEQ ID NO: 113840 - protein, 31 aa, Artificial Sequence; identical to SEQ ID NO: 22907
  Cyclic GFR-binding peptide

SEQ ID NO: 113841 - protein, 33 aa, Artificial Sequence; identical to SEQ ID NO: 22908
  Cyclic GFR-binding peptide
  MOD_RES (29)..(29): Xaa is C or S

SEQ ID NO: 113842 - protein, 27 aa, Artificial Sequence
  Cyclic GFR-binding peptide
HDELTVQVEKFIPKKRVIEVKAVKVSR

SEQ ID NO: 113843 - protein, 34 aa, Artificial Sequence; identical to SEQ ID NO: 66579
  Cyclic GFR-binding peptide
  MOD_RES (1)..(32)..(33): Xaa is C or S

SEQ ID NO: 113844 - protein, 34 aa, Artificial Sequence; identical to SEQ ID NO: 22910
  Cyclic GFR-binding peptide
  MOD_RES (33)..(33): Xaa is C or S

SEQ ID NO: 113845 - protein, 33 aa, Artificial Sequence; identical to SEQ ID NO: 63232
  Cyclic GFR-binding peptide
  MOD_RES (29)..(30): Xaa is C or S

SEQ ID NO: 113846 - protein, 31 aa, Artificial Sequence; identical to SEQ ID NO: 22911
  Cyclic GFR-binding peptide

SEQ ID NO: 113847 - protein, 27 aa, Artificial Sequence
  Cyclic GFR-binding peptide
VVMVTAKKVKPTRGVIKRIQVPRLDQP

SEQ ID NO: 113848 - protein, 23 aa, Artificial Sequence
  Cyclic GFR-binding peptide
VTAKKHQGQHPKIRIKRMQVPRQ

SEQ ID NO: 113849 - protein, 32 aa, Artificial Sequence; identical to SEQ ID NO: 66583
  Cyclic GFR-binding peptide
  MOD_RES (29)..(30): Xaa is C or S

SEQ ID NO: 113850 - protein, 34 aa, Artificial Sequence; identical to SEQ ID NO: 22914
  Cyclic GFR-binding peptide
  MOD_RES (32)..(32): Xaa is C or S

SEQ ID NO: 113851 - protein, 36 aa, Artificial Sequence; identical to SEQ ID NO: 63235
  Cyclic GFR-binding peptide
  MOD_RES (1)..(32)..(33): Xaa is C or S

SEQ ID NO: 113852 - protein, 36 aa, Artificial Sequence; identical to SEQ ID NO: 63237
  Cyclic GFR-binding peptide
  MOD_RES (2)..(4)..(35)..(36): Xaa is C or S

SEQ ID NO: 113853 - protein, 38 aa, Artificial Sequence; identical to SEQ ID NO: 22915
  Cyclic GFR-binding peptide
  MOD_RES (34)..(34): Xaa is C or S

SEQ ID NO: 113854 - protein, 30 aa, Artificial Sequence; identical to SEQ ID NO: 22916
  Cyclic GFR-binding peptide
  MOD_RES (28)..(28): Xaa is C or S

SEQ ID NO: 113855 - protein, 35 aa, Artificial Sequence; identical to SEQ ID NO: 63241
  Cyclic GFR-binding peptide
  MOD_RES (2)..(4)..(35): Xaa is C or S

SEQ ID NO: 113856 - protein, 20 aa, Artificial Sequence
  Cyclic GFR-binding peptide
VTAKKVKPTRGVIKRIQVPR

SEQ ID NO: 113857 - protein, 34 aa, Artificial Sequence; identical to SEQ ID NO: 22921
  Cyclic GFR-binding peptide
  MOD_RES (31)..(31): Xaa is C or S

SEQ ID NO: 113858 - protein, 30 aa, Artificial Sequence; identical to SEQ ID NO: 66596
  Cyclic GFR-binding peptide
  MOD_RES (2)..(2): Xaa is C or S

SEQ ID NO: 113859 - protein, 28 aa, Artificial Sequence
  Cyclic GFR-binding peptide
SKVVMVTAKKVKPTRGVIKRIQVPRLDQ

SEQ ID NO: 113860 - protein, 34 aa, Artificial Sequence; identical to SEQ ID NO: 64922
  Cyclic GFR-binding peptide
  MOD_RES (1)..(3)..(34): Xaa is C or S

SEQ ID NO: 113861 - protein, 32 aa, Artificial Sequence; identical to SEQ ID NO: 68288
  Cyclic GFR-binding peptide
  MOD_RES (2)..(4): Xaa is C or S

SEQ ID NO: 113862 - protein, 32 aa, Artificial Sequence; identical to SEQ ID NO: 22923
  Cyclic GFR-binding peptide

SEQ ID NO: 113863 - protein, 31 aa, Artificial Sequence; identical to SEQ ID NO: 22925
  Cyclic GFR-binding peptide
  MOD_RES (2)..(2): Xaa is C or S

SEQ ID NO: 113864 - protein, 34 aa, Artificial Sequence; identical to SEQ ID NO: 22928
  Cyclic GFR-binding peptide
  MOD_RES (34)..(34): Xaa is C or S

SEQ ID NO: 113865 - protein, 39 aa, Artificial Sequence; identical to SEQ ID NO: 22930
  Cyclic GFR-binding peptide
  MOD_RES (37)..(37): Xaa is C or S

SEQ ID NO: 113866 - protein, 30 aa, Artificial Sequence; identical to SEQ ID NO: 22933
  Cyclic GFR-binding peptide

SEQ ID NO: 113867 - protein, 24 aa, Artificial Sequence
  Cyclic GFR-binding peptide
VQVEKVKPKRGVVKAIKVSRLAQP

SEQ ID NO: 113868 - protein, 37 aa, Artificial Sequence; identical to SEQ ID NO: 22935
  Cyclic GFR-binding peptide
  MOD_RES (1)..(1): Xaa is C or S

SEQ ID NO: 113869 - protein, 36 aa, Artificial Sequence; identical to SEQ ID NO: 22937
  Cyclic GFR-binding peptide
  MOD_RES (2)..(36): Xaa is C or S

SEQ ID NO: 113870 - protein, 28 aa, Artificial Sequence
  Cyclic GFR-binding peptide
  MOD_RES (28)..(28): Xaa is C or S
IMVQVEKVKPKRGVVKAIKVSRLAQPVX

SEQ ID NO: 113871 - protein, 40 aa, Artificial Sequence; identical to SEQ ID NO: 22940
  Cyclic GFR-binding peptide
  MOD_RES (1)..(38): Xaa is C or S

SEQ ID NO: 113872 - protein, 36 aa, Artificial Sequence; identical to SEQ ID NO: 22943
  Cyclic GFR-binding peptide
  MOD_RES (35)..(35): Xaa is C or S

SEQ ID NO: 113873 - protein, 24 aa, Artificial Sequence
  Cyclic GFR-binding peptide
VTAKKVKPKRGVIKRIQVPRLAQP

SEQ ID NO: 113874 - protein, 33 aa, Artificial Sequence; identical to SEQ ID NO: 68310
  Cyclic GFR-binding peptide
  MOD_RES (1)..(3): Xaa is C or S

SEQ ID NO: 113875 - protein, 43 aa, Artificial Sequence; identical to SEQ ID NO: 22947
  Cyclic GFR-binding peptide
  MOD_RES (1)..(3)..(37): Xaa is C or S

SEQ ID NO: 113876 - protein, 40 aa, Artificial Sequence; identical to SEQ ID NO: 66628
  Cyclic GFR-binding peptide
  MOD_RES (1)..(3)..(34)..(35): Xaa is C or S

SEQ ID NO: 113877 - protein, 33 aa, Artificial Sequence; identical to SEQ ID NO: 22951
  Cyclic GFR-binding peptide
  MOD_RES (31)..(31): Xaa is C or S

SEQ ID NO: 113878 - protein, 31 aa, Artificial Sequence; identical to SEQ ID NO: 63265
  Cyclic GFR-binding peptide
  MOD_RES (2)..(2): Xaa is C or S

SEQ ID NO: 113879 - protein, 27 aa, Artificial Sequence
  Cyclic GFR-binding peptide
  MOD_RES (1)..(1): Xaa is C or S
XSRVIMVQVEKVKPKRGVVKAIKVSRL

SEQ ID NO: 113880 - protein, 29 aa, Artificial Sequence
  Cyclic GFR-binding peptide
  MOD_RES (29)..(29): Xaa is C or S
VIMVQVEKIKPTKGIVKAIKVSRLDQSVX

SEQ ID NO: 113881 - protein, 28 aa, Artificial Sequence
  Cyclic GFR-binding peptide
  MOD_RES (1)..(1): Xaa is C or S
XSKVIMVTAKKIKPTKGIIKRIQVPRLD

SEQ ID NO: 113882 - protein, 33 aa, Artificial Sequence; identical to SEQ ID NO: 22959
  Cyclic GFR-binding peptide

SEQ ID NO: 113883 - protein, 27 aa, Artificial Sequence
  Cyclic GFR-binding peptide
QLFVQVEKHQGQHPKIRVKAMKVSREE

SEQ ID NO: 113884 - protein, 28 aa, Artificial Sequence
  Cyclic GFR-binding peptide
EELVTAKKHQGQHPKIRIKRMQVPRQGT

SEQ ID NO: 113885 - protein, 27 aa, Artificial Sequence
  Cyclic GFR-binding peptide
  MOD_RES (2)..(2): Xaa is C or S
KXSKVIMVTAKKIKPTKGIIKRIQVPR

SEQ ID NO: 113886 - protein, 35 aa, Artificial Sequence; identical to SEQ ID NO: 63278
  Cyclic GFR-binding peptide
  MOD_RES (29)..(30): Xaa is C or S

SEQ ID NO: 113887 - protein, 28 aa, Artificial Sequence
  Cyclic GFR-binding peptide
  MOD_RES (2)..(2): Xaa is C or S
KXSKVVMVQVEKVKPTRGVVKAIKVSRL

SEQ ID NO: 113888 - protein, 31 aa, Artificial Sequence; identical to SEQ ID NO: 66640
  Cyclic GFR-binding peptide
  MOD_RES (31)..(31): Xaa is C or S

SEQ ID NO: 113889 - protein, 30 aa, Artificial Sequence; identical to SEQ ID NO: 22967
  Cyclic GFR-binding peptide

SEQ ID NO: 113890 - protein, 29 aa, Artificial Sequence
  Cyclic GFR-binding peptide
  MOD_RES (26)..(27): Xaa is C or S
VTAKKVKPKRGVIKRIQVPRLAQPVXXPA

SEQ ID NO: 113891 - protein, 29 aa, Artificial Sequence
  Cyclic GFR-binding peptide
  MOD_RES (28)..(29): Xaa is C or S
IMVQVEKVKPKRGVVKAIKVSRLAQPVXX

SEQ ID NO: 113892 - protein, 27 aa, Artificial Sequence
  Cyclic GFR-binding peptide
  MOD_RES (27)..(27): Xaa is C or S
MVQVEKVKPTRGVVKAIKVSRLDQPVX

SEQ ID NO: 113893 - protein, 31 aa, Artificial Sequence; identical to SEQ ID NO: 22969
  Cyclic GFR-binding peptide

SEQ ID NO: 113894 - protein, 33 aa, Artificial Sequence; identical to SEQ ID NO: 22971
  Cyclic GFR-binding peptide
  MOD_RES (1)..(1): Xaa is C or S

SEQ ID NO: 113895 - protein, 34 aa, Artificial Sequence; identical to SEQ ID NO: 22972
  Cyclic GFR-binding peptide
  MOD_RES (34)..(34): Xaa is C or S

SEQ ID NO: 113896 - protein, 32 aa, Artificial Sequence; identical to SEQ ID NO: 64961
  Cyclic GFR-binding peptide
  MOD_RES (2)..(4): Xaa is C or S

SEQ ID NO: 113897 - protein, 31 aa, Artificial Sequence; identical to SEQ ID NO: 22975
  Cyclic GFR-binding peptide

SEQ ID NO: 113898 - protein, 32 aa, Artificial Sequence; identical to SEQ ID NO: 64967
  Cyclic GFR-binding peptide
  MOD_RES (28)..(29): Xaa is C or S

SEQ ID NO: 113899 - protein, 40 aa, Artificial Sequence; identical to SEQ ID NO: 22977
  Cyclic GFR-binding peptide
  MOD_RES (34)..(34): Xaa is C or S

SEQ ID NO: 113900 - protein, 32 aa, Artificial Sequence; identical to SEQ ID NO: 22978
  Cyclic GFR-binding peptide
  MOD_RES (32)..(32): Xaa is C or S

SEQ ID NO: 113901 - protein, 28 aa, Artificial Sequence
  Cyclic GFR-binding peptide
  MOD_RES (27)..(28): Xaa is C or S
MVQVEKVKPTRGVVKAIKVSRLDQPVXX

SEQ ID NO: 113902 - protein, 31 aa, Artificial Sequence; identical to SEQ ID NO: 22979
  Cyclic GFR-binding peptide

SEQ ID NO: 113903 - protein, 36 aa, Artificial Sequence; identical to SEQ ID NO: 22980
  Cyclic GFR-binding peptide

SEQ ID NO: 113904 - protein, 25 aa, Artificial Sequence
  Cyclic GFR-binding peptide
LTVQVEKFIPKKRVIEVKAVKVSRL

SEQ ID NO: 113905 - protein, 39 aa, Artificial Sequence; identical to SEQ ID NO: 63294
  Cyclic GFR-binding peptide
  MOD_RES (2)..(4)..(35)..(36): Xaa is C or S

SEQ ID NO: 113906 - protein, 30 aa, Artificial Sequence; identical to SEQ ID NO: 66655
  Cyclic GFR-binding peptide
  MOD_RES (26)..(27): Xaa is C or S

SEQ ID NO: 113907 - protein, 34 aa, Artificial Sequence; identical to SEQ ID NO: 22985
  Cyclic GFR-binding peptide
  MOD_RES (2)..(4): Xaa is C or S

SEQ ID NO: 113908 - protein, 27 aa, Artificial Sequence
  Cyclic GFR-binding peptide
SHEELVQVEKHQGQHPKIRVKAMKVSR

SEQ ID NO: 113909 - protein, 38 aa, Artificial Sequence; identical to SEQ ID NO: 22987
  Cyclic GFR-binding peptide
  MOD_RES (36)..(36): Xaa is C or S

SEQ ID NO: 113910 - protein, 28 aa, Artificial Sequence
  Cyclic GFR-binding peptide
VIMVQVEKIKPTKGIVKAIKVSRLDQSV

SEQ ID NO: 113911 - protein, 32 aa, Artificial Sequence; identical to SEQ ID NO: 63301
  Cyclic GFR-binding peptide
  MOD_RES (1)..(3): Xaa is C or S

SEQ ID NO: 113912 - protein, 40 aa, Artificial Sequence; identical to SEQ ID NO: 22993
  Cyclic GFR-binding peptide
  MOD_RES (2)..(39): Xaa is C or S

SEQ ID NO: 113913 - protein, 37 aa, Artificial Sequence; identical to SEQ ID NO: 63304
  Cyclic GFR-binding peptide
  MOD_RES (2)..(4)..(35)..(36): Xaa is C or S

SEQ ID NO: 113914 - protein, 32 aa, Artificial Sequence; identical to SEQ ID NO: 63305
  Cyclic GFR-binding peptide
  MOD_RES (1)..(3): Xaa is C or S

SEQ ID NO: 113915 - protein, 24 aa, Artificial Sequence
  Cyclic GFR-binding peptide
VQVEKIKPTKGIVKAIKVSRLDQS

SEQ ID NO: 113916 - protein, 31 aa, Artificial Sequence; identical to SEQ ID NO: 63309
  Cyclic GFR-binding peptide
  MOD_RES (26)..(27): Xaa is C or S

SEQ ID NO: 113917 - protein, 43 aa, Artificial Sequence; identical to SEQ ID NO: 22998
  Cyclic GFR-binding peptide
  MOD_RES (2)..(4)..(41): Xaa is C or S

SEQ ID NO: 113918 - protein, 24 aa, Artificial Sequence
  Cyclic GFR-binding peptide
VQVEKHQGQHPKIRVKAMKVSREE

SEQ ID NO: 113919 - protein, 26 aa, Artificial Sequence
  Cyclic GFR-binding peptide
  MOD_RES (26)..(26): Xaa is C or S
VTAKKVKPTRGVIKRIQVPRLDQPVX

SEQ ID NO: 113920 - protein, 35 aa, Artificial Sequence; identical to SEQ ID NO: 23001
  Cyclic GFR-binding peptide
  MOD_RES (1)..(3): Xaa is C or S

SEQ ID NO: 113921 - protein, 37 aa, Artificial Sequence; identical to SEQ ID NO: 68344
  Cyclic GFR-binding peptide
  MOD_RES (1)..(3)..(34)..(35): Xaa is C or S

SEQ ID NO: 113922 - protein, 35 aa, Artificial Sequence; identical to SEQ ID NO: 64986
  Cyclic GFR-binding peptide
  MOD_RES (1)..(32)..(33): Xaa is C or S

SEQ ID NO: 113923 - protein, 29 aa, Artificial Sequence
  Cyclic GFR-binding peptide
QLFVQVEKHQGQHPKIRVKAMKVSREETP

SEQ ID NO: 113924 - protein, 32 aa, Artificial Sequence; identical to SEQ ID NO: 64989
  Cyclic GFR-binding peptide
  MOD_RES (28)..(29): Xaa is C or S

SEQ ID NO: 113925 - protein, 41 aa, Artificial Sequence; identical to SEQ ID NO: 23005
  Cyclic GFR-binding peptide
  MOD_RES (2)..(4)..(38): Xaa is C or S

SEQ ID NO: 113926 - protein, 26 aa, Artificial Sequence
  Cyclic GFR-binding peptide
HEELVQVEKHQGQHPKIRVKAMKVSR

SEQ ID NO: 113927 - protein, 36 aa, Artificial Sequence; identical to SEQ ID NO: 23010
  Cyclic GFR-binding peptide
  MOD_RES (34)..(34): Xaa is C or S

SEQ ID NO: 113928 - protein, 35 aa, Artificial Sequence; identical to SEQ ID NO: 23011
  Cyclic GFR-binding peptide
  MOD_RES (2)..(2): Xaa is C or S

SEQ ID NO: 113929 - protein, 27 aa, Artificial Sequence
  Cyclic GFR-binding peptide
EELRVTAKKLKPKKRVYEIKRVQVPRH

SEQ ID NO: 113930 - protein, 23 aa, Artificial Sequence
  Cyclic GFR-binding peptide
VMVQVEKVKPTRGVVKAIKVSRL

SEQ ID NO: 113931 - protein, 39 aa, Artificial Sequence; identical to SEQ ID NO: 23013
  Cyclic GFR-binding peptide
  MOD_RES (2)..(36): Xaa is C or S

SEQ ID NO: 113932 - protein, 32 aa, Artificial Sequence; identical to SEQ ID NO: 23014
  Cyclic GFR-binding peptide
  MOD_RES (2)..(2): Xaa is C or S

SEQ ID NO: 113933 - protein, 37 aa, Artificial Sequence; identical to SEQ ID NO: 23015
  Cyclic GFR-binding peptide
  MOD_RES (35)..(35): Xaa is C or S

SEQ ID NO: 113934 - protein, 29 aa, Artificial Sequence
  Cyclic GFR-binding peptide
  MOD_RES (2)..(2): Xaa is C or S
KXSKVVMVQVEKVKPTRGVVKAIKVSRLD

SEQ ID NO: 113935 - protein, 40 aa, Artificial Sequence; identical to SEQ ID NO: 23018
  Cyclic GFR-binding peptide
  MOD_RES (2)..(4)..(38): Xaa is C or S

SEQ ID NO: 113936 - protein, 36 aa, Artificial Sequence; identical to SEQ ID NO: 23019
  Cyclic GFR-binding peptide
  MOD_RES (31)..(31): Xaa is C or S

SEQ ID NO: 113937 - protein, 33 aa, Artificial Sequence; identical to SEQ ID NO: 68362
  Cyclic GFR-binding peptide
  MOD_RES (31)..(32): Xaa is C or S

SEQ ID NO: 113938 - protein, 32 aa, Artificial Sequence; identical to SEQ ID NO: 23022
  Cyclic GFR-binding peptide
  MOD_RES (30)..(30): Xaa is C or S

SEQ ID NO: 113939 - protein, 36 aa, Artificial Sequence; identical to SEQ ID NO: 23030
  Cyclic GFR-binding peptide
  MOD_RES (1)..(35): Xaa is C or S

SEQ ID NO: 113940 - protein, 33 aa, Artificial Sequence; identical to SEQ ID NO: 68370
  Cyclic GFR-binding peptide
  MOD_RES (2)..(33): Xaa is C or S

SEQ ID NO: 113941 - protein, 31 aa, Artificial Sequence; identical to SEQ ID NO: 23031
  Cyclic GFR-binding peptide
  MOD_RES (28)..(28): Xaa is C or S

SEQ ID NO: 113942 - protein, 31 aa, Artificial Sequence; identical to SEQ ID NO: 66690
  Cyclic GFR-binding peptide
  MOD_RES (28)..(29): Xaa is C or S

SEQ ID NO: 113943 - protein, 40 aa, Artificial Sequence; identical to SEQ ID NO: 23032
  Cyclic GFR-binding peptide
  MOD_RES (1)..(3)..(40): Xaa is C or S

SEQ ID NO: 113944 - protein, 33 aa, Artificial Sequence; identical to SEQ ID NO: 66692
  Cyclic GFR-binding peptide
  MOD_RES (2)..(33): Xaa is C or S

SEQ ID NO: 113945 - protein, 26 aa, Artificial Sequence
  Cyclic GFR-binding peptide
IMVQVEKVKPKRGVVKAIKVSRLAQP

SEQ ID NO: 113946 - protein, 31 aa, Artificial Sequence; identical to SEQ ID NO: 68374
  Cyclic GFR-binding peptide
  MOD_RES (29)..(30): Xaa is C or S

SEQ ID NO: 113947 - protein, 22 aa, Artificial Sequence
  Cyclic GFR-binding peptide
MVQVEKVKPKRGVVKAIKVSRL

SEQ ID NO: 113948 - protein, 37 aa, Artificial Sequence; identical to SEQ ID NO: 23036
  Cyclic GFR-binding peptide
  MOD_RES (34)..(34): Xaa is C or S

SEQ ID NO: 113949 - protein, 40 aa, Artificial Sequence; identical to SEQ ID NO: 23039
  Cyclic GFR-binding peptide
  MOD_RES (34)..(34): Xaa is C or S

SEQ ID NO: 113950 - protein, 37 aa, Artificial Sequence; identical to SEQ ID NO: 23040
  Cyclic GFR-binding peptide
  MOD_RES (1)..(3)..(37): Xaa is C or S

SEQ ID NO: 113951 - protein, 30 aa, Artificial Sequence; identical to SEQ ID NO: 23042
  Cyclic GFR-binding peptide
  MOD_RES (29)..(29): Xaa is C or S

SEQ ID NO: 113952 - protein, 34 aa, Artificial Sequence; identical to SEQ ID NO: 23043
  Cyclic GFR-binding peptide
  MOD_RES (33)..(33): Xaa is C or S

SEQ ID NO: 113953 - protein, 36 aa, Artificial Sequence; identical to SEQ ID NO: 68389
  Cyclic GFR-binding peptide
  MOD_RES (31)..(32): Xaa is C or S

SEQ ID NO: 113954 - protein, 28 aa, Artificial Sequence
  Cyclic GFR-binding peptide
  MOD_RES (26)..(27): Xaa is C or S
VTAKKIKPTKGIIKRIQVPRLDQSVXXP

SEQ ID NO: 113955 - protein, 31 aa, Artificial Sequence; identical to SEQ ID NO: 66701
  Cyclic GFR-binding peptide
  MOD_RES (31)..(31): Xaa is C or S

SEQ ID NO: 113956 - protein, 23 aa, Artificial Sequence
  Cyclic GFR-binding peptide
VIMVQVEKVKPKRGVVKAIKVSR

SEQ ID NO: 113957 - protein, 38 aa, Artificial Sequence; identical to SEQ ID NO: 68391
  Cyclic GFR-binding peptide
  MOD_RES (1)..(3)..(34)..(35): Xaa is C or S

SEQ ID NO: 113958 - protein, 28 aa, Artificial Sequence
  Cyclic GFR-binding peptide
KNHQLFVQVEKHQGQHPKIRVKAMKVSR

SEQ ID NO: 113959 - protein, 34 aa, Artificial Sequence; identical to SEQ ID NO: 23047
  Cyclic GFR-binding peptide

SEQ ID NO: 113960 - protein, 23 aa, Artificial Sequence
  Cyclic GFR-binding peptide
VQVEKVKPTRGVVKAIKVSRLDQ

SEQ ID NO: 113961 - protein, 41 aa, Artificial Sequence; identical to SEQ ID NO: 23049
  Cyclic GFR-binding peptide
  MOD_RES (2)..(4)..(41): Xaa is C or S

SEQ ID NO: 113962 - protein, 31 aa, Artificial Sequence; identical to SEQ ID NO: 23050
  Cyclic GFR-binding peptide
  MOD_RES (1)..(3): Xaa is C or S

SEQ ID NO: 113963 - protein, 32 aa, Artificial Sequence; identical to SEQ ID NO: 23051
  Cyclic GFR-binding peptide

SEQ ID NO: 113964 - protein, 27 aa, Artificial Sequence
  Cyclic GFR-binding peptide
HEELVQVEKHQGQHPKIRVKAMKVSRQ

SEQ ID NO: 113965 - protein, 26 aa, Artificial Sequence
  Cyclic GFR-binding peptide
SRVIMVQVEKVKPKRGVVKAIKVSRL

SEQ ID NO: 113966 - protein, 25 aa, Artificial Sequence
  Cyclic GFR-binding peptide
VIMVTAKKVKPKRGVIKRIQVPRLA

SEQ ID NO: 113967 - protein, 34 aa, Artificial Sequence; identical to SEQ ID NO: 23055
  Cyclic GFR-binding peptide
  MOD_RES (2)..(2): Xaa is C or S

SEQ ID NO: 113968 - protein, 30 aa, Artificial Sequence; identical to SEQ ID NO: 23056
  Cyclic GFR-binding peptide
  MOD_RES (30)..(30): Xaa is C or S

SEQ ID NO: 113969 - protein, 33 aa, Artificial Sequence; identical to SEQ ID NO: 68399
  Cyclic GFR-binding peptide
  MOD_RES (2)..(33): Xaa is C or S

SEQ ID NO: 113970 - protein, 29 aa, Artificial Sequence
  Cyclic GFR-binding peptide
  MOD_RES (28)..(29): Xaa is C or S
IMVTAKKIKPTKGIIKRIQVPRLDQSVXX

SEQ ID NO: 113971 - protein, 30 aa, Artificial Sequence; identical to SEQ ID NO: 66712
  Cyclic GFR-binding peptide
  MOD_RES (26)..(27): Xaa is C or S

SEQ ID NO: 113972 - protein, 36 aa, Artificial Sequence; identical to SEQ ID NO: 66713
  Cyclic GFR-binding peptide
  MOD_RES (30)..(31): Xaa is C or S

SEQ ID NO: 113973 - protein, 31 aa, Artificial Sequence; identical to SEQ ID NO: 23059
  Cyclic GFR-binding peptide
  MOD_RES (30)..(30): Xaa is C or S

SEQ ID NO: 113974 - protein, 38 aa, Artificial Sequence; identical to SEQ ID NO: 23061
  Cyclic GFR-binding peptide
  MOD_RES (37)..(37): Xaa is C or S

SEQ ID NO: 113975 - protein, 33 aa, Artificial Sequence; identical to SEQ ID NO: 23062
  Cyclic GFR-binding peptide
  MOD_RES (2)..(2): Xaa is C or S

SEQ ID NO: 113976 - protein, 25 aa, Artificial Sequence
  Cyclic GFR-binding peptide
VQVEKHQGQHPKIRVKAMKVSRQGT

SEQ ID NO: 113977 - protein, 38 aa, Artificial Sequence; identical to SEQ ID NO: 23070
  Cyclic GFR-binding peptide
  MOD_RES (34)..(34): Xaa is C or S

SEQ ID NO: 113978 - protein, 31 aa, Artificial Sequence; identical to SEQ ID NO: 65047
  Cyclic GFR-binding peptide
  MOD_RES (2)..(4): Xaa is C or S

SEQ ID NO: 113979 - protein, 28 aa, Artificial Sequence
  Cyclic GFR-binding peptide
NHQLFVTAKKHQGQHPKIRIKRMQVPRE

SEQ ID NO: 113980 - protein, 22 aa, Artificial Sequence
  Cyclic GFR-binding peptide
VMVTAKKVKPTRGVIKRIQVPR

SEQ ID NO: 113981 - protein, 31 aa, Artificial Sequence; identical to SEQ ID NO: 23077
  Cyclic GFR-binding peptide
  MOD_RES (1)..(1): Xaa is C or S

SEQ ID NO: 113982 - protein, 23 aa, Artificial Sequence
  Cyclic GFR-binding peptide
VTAKKIKPTKGIIKRIQVPRLDQ

SEQ ID NO: 113983 - protein, 38 aa, Artificial Sequence; identical to SEQ ID NO: 23079
  Cyclic GFR-binding peptide
  MOD_RES (34)..(34): Xaa is C or S

SEQ ID NO: 113984 - protein, 27 aa, Artificial Sequence
  Cyclic GFR-binding peptide
ELVQVEKHQGQHPKIRVKAMKVSRQGT

SEQ ID NO: 113985 - protein, 31 aa, Artificial Sequence; identical to SEQ ID NO: 66736
  Cyclic GFR-binding peptide
  MOD_RES (1)..(3): Xaa is C or S

SEQ ID NO: 113986 - protein, 32 aa, Artificial Sequence; identical to SEQ ID NO: 63375
  Cyclic GFR-binding peptide
  MOD_RES (1)..(3): Xaa is C or S

SEQ ID NO: 113987 - protein, 43 aa, Artificial Sequence; identical to SEQ ID NO: 23090
  Cyclic GFR-binding peptide
  MOD_RES (1)..(3)..(37): Xaa is C or S

SEQ ID NO: 113988 - protein, 29 aa, Artificial Sequence
  Cyclic GFR-binding peptide
LFVTAKKHQGQHPKIRIKRMQVPREETPV

SEQ ID NO: 113989 - protein, 30 aa, Artificial Sequence; identical to SEQ ID NO: 23092
  Cyclic GFR-binding peptide

SEQ ID NO: 113990 - protein, 28 aa, Artificial Sequence
  Cyclic GFR-binding peptide
NHQLFVQVEKHQGQHPKIRVKAMKVSRE

SEQ ID NO: 113991 - protein, 25 aa, Artificial Sequence
  Cyclic GFR-binding peptide
SKVVMVTAKKVKPTRGVIKRIQVPR

SEQ ID NO: 113992 - protein, 28 aa, Artificial Sequence
  Cyclic GFR-binding peptide
HQLFVQVEKHQGQHPKIRVKAMKVSREE

SEQ ID NO: 113993 - protein, 36 aa, Artificial Sequence; identical to SEQ ID NO: 66750
  Cyclic GFR-binding peptide
  MOD_RES (30)..(31): Xaa is C or S

SEQ ID NO: 113994 - protein, 35 aa, Artificial Sequence; identical to SEQ ID NO: 23099
  Cyclic GFR-binding peptide
  MOD_RES (31)..(31): Xaa is C or S

SEQ ID NO: 113995 - protein, 31 aa, Artificial Sequence; identical to SEQ ID NO: 23100
  Cyclic GFR-binding peptide
  MOD_RES (29)..(29): Xaa is C or S

SEQ ID NO: 113996 - protein, 33 aa, Artificial Sequence; identical to SEQ ID NO: 23102
  Cyclic GFR-binding peptide
  MOD_RES (31)..(31): Xaa is C or S

SEQ ID NO: 113997 - protein, 26 aa, Artificial Sequence
  Cyclic GFR-binding peptide
LTVQVEKFIPKKRVIEVKAVKVSRLQ

SEQ ID NO: 113998 - protein, 35 aa, Artificial Sequence; identical to SEQ ID NO: 23105
  Cyclic GFR-binding peptide
  MOD_RES (29)..(29): Xaa is C or S

SEQ ID NO: 113999 - protein, 22 aa, Artificial Sequence
  Cyclic GFR-binding peptide
VTAKKVKPKRGVIKRIQVPRLA

SEQ ID NO: 114000 - protein, 31 aa, Artificial Sequence; identical to SEQ ID NO: 23106
  Cyclic GFR-binding peptide

SEQ ID NO: 114001 - protein, 32 aa, Artificial Sequence; identical to SEQ ID NO: 23109
  Cyclic GFR-binding peptide
  MOD_RES (2)..(2): Xaa is C or S

SEQ ID NO: 114002 - protein, 32 aa, Artificial Sequence; identical to SEQ ID NO: 23110
  Cyclic GFR-binding peptide
  MOD_RES (2)..(2): Xaa is C or S

SEQ ID NO: 114003 - protein, 28 aa, Artificial Sequence
  Cyclic GFR-binding peptide
VIMVQVEKVKPKRGVVKAIKVSRLAQPV

SEQ ID NO: 114004 - protein, 33 aa, Artificial Sequence; identical to SEQ ID NO: 23112
  Cyclic GFR-binding peptide
  MOD_RES (2)..(4): Xaa is C or S

SEQ ID NO: 114005 - protein, 31 aa, Artificial Sequence; identical to SEQ ID NO: 23114
  Cyclic GFR-binding peptide
  MOD_RES (1)..(3): Xaa is C or S

SEQ ID NO: 114006 - protein, 33 aa, Artificial Sequence; identical to SEQ ID NO: 23116
  Cyclic GFR-binding peptide
  MOD_RES (1)..(3): Xaa is C or S

SEQ ID NO: 114007 - protein, 26 aa, Artificial Sequence
  Cyclic GFR-binding peptide
TVQVEKFIPKKRVIEVKAVKVSRLQV

SEQ ID NO: 114008 - protein, 31 aa, Artificial Sequence; identical to SEQ ID NO: 23119
  Cyclic GFR-binding peptide
  MOD_RES (31)..(31): Xaa is C or S

SEQ ID NO: 114009 - protein, 28 aa, Artificial Sequence
  Cyclic GFR-binding peptide
HEELRVTAKKLKPKKRVYEIKRVQVPRH

SEQ ID NO: 114010 - protein, 30 aa, Artificial Sequence; identical to SEQ ID NO: 23121
  Cyclic GFR-binding peptide

SEQ ID NO: 114011 - protein, 27 aa, Artificial Sequence
  Cyclic GFR-binding peptide
VQVEKHQGQHPKIRVKAMKVSRQGTPV

SEQ ID NO: 114012 - protein, 25 aa, Artificial Sequence
  Cyclic GFR-binding peptide
LVTAKKHQGQHPKIRIKRMQVPRQG

SEQ ID NO: 114013 - protein, 24 aa, Artificial Sequence
  Cyclic GFR-binding peptide
RVTAKKLKPKKRVYEIKRVQVPRH

SEQ ID NO: 114014 - protein, 35 aa, Artificial Sequence; identical to SEQ ID NO: 23130
  Cyclic GFR-binding peptide
  MOD_RES (34)..(34): Xaa is C or S

SEQ ID NO: 114015 - protein, 35 aa, Artificial Sequence; identical to SEQ ID NO: 23133
  Cyclic GFR-binding peptide
  MOD_RES (1)..(1): Xaa is C or S

SEQ ID NO: 114016 - protein, 38 aa, Artificial Sequence; identical to SEQ ID NO: 23135
  Cyclic GFR-binding peptide
  MOD_RES (34)..(34): Xaa is C or S

SEQ ID NO: 114017 - protein, 33 aa, Artificial Sequence; identical to SEQ ID NO: 23136
  Cyclic GFR-binding peptide

SEQ ID NO: 114018 - protein, 30 aa, Artificial Sequence; identical to SEQ ID NO: 65084
  Cyclic GFR-binding peptide
  MOD_RES (1)..(3): Xaa is C or S

SEQ ID NO: 114019 - protein, 30 aa, Artificial Sequence; identical to SEQ ID NO: 65087
  Cyclic GFR-binding peptide
  MOD_RES (26)..(27): Xaa is C or S

SEQ ID NO: 114020 - protein, 28 aa, Artificial Sequence
  Cyclic GFR-binding peptide
SKVVMVQVEKVKPTRGVVKAIKVSRLDQ

SEQ ID NO: 114021 - protein, 34 aa, Artificial Sequence; identical to SEQ ID NO: 23142
  Cyclic GFR-binding peptide
  MOD_RES (30)..(30): Xaa is C or S

SEQ ID NO: 114022 - protein, 28 aa, Artificial Sequence
  Cyclic GFR-binding peptide
  MOD_RES (1)..(1): Xaa is C or S
XSKVVMVQVEKVKPTRGVVKAIKVSRLD

SEQ ID NO: 114023 - protein, 37 aa, Artificial Sequence; identical to SEQ ID NO: 23144
  Cyclic GFR-binding peptide
  MOD_RES (1)..(35): Xaa is C or S

SEQ ID NO: 114024 - protein, 30 aa, Artificial Sequence; identical to SEQ ID NO: 65093
  Cyclic GFR-binding peptide
  MOD_RES (1)..(1): Xaa is C or S

SEQ ID NO: 114025 - protein, 33 aa, Artificial Sequence; identical to SEQ ID NO: 63420
  Cyclic GFR-binding peptide
  MOD_RES (1)..(32)..(33): Xaa is C or S

SEQ ID NO: 114026 - protein, 31 aa, Artificial Sequence; identical to SEQ ID NO: 68466
  Cyclic GFR-binding peptide
  MOD_RES (29)..(30): Xaa is C or S

SEQ ID NO: 114027 - protein, 33 aa, Artificial Sequence; identical to SEQ ID NO: 66789
  Cyclic GFR-binding peptide
  MOD_RES (29)..(30): Xaa is C or S

SEQ ID NO: 114028 - protein, 35 aa, Artificial Sequence; identical to SEQ ID NO: 66790
  Cyclic GFR-binding peptide
  MOD_RES (1)..(32)..(33): Xaa is C or S

SEQ ID NO: 114029 - protein, 26 aa, Artificial Sequence
  Cyclic GFR-binding peptide
VQVEKHQGQHPKIRVKAMKVSRQGTP

SEQ ID NO: 114030 - protein, 38 aa, Artificial Sequence; identical to SEQ ID NO: 23149
  Cyclic GFR-binding peptide
  MOD_RES (37)..(37): Xaa is C or S

SEQ ID NO: 114031 - protein, 32 aa, Artificial Sequence; identical to SEQ ID NO: 63424
  Cyclic GFR-binding peptide
  MOD_RES (2)..(2): Xaa is C or S

SEQ ID NO: 114032 - protein, 38 aa, Artificial Sequence; identical to SEQ ID NO: 66793
  Cyclic GFR-binding peptide
  MOD_RES (2)..(4)..(35)..(36): Xaa is C or S

SEQ ID NO: 114033 - protein, 33 aa, Artificial Sequence; identical to SEQ ID NO: 63427
  Cyclic GFR-binding peptide
  MOD_RES (31)..(32): Xaa is C or S

SEQ ID NO: 114034 - protein, 31 aa, Artificial Sequence; identical to SEQ ID NO: 23150
  Cyclic GFR-binding peptide

SEQ ID NO: 114035 - protein, 32 aa, Artificial Sequence; identical to SEQ ID NO: 23151
  Cyclic GFR-binding peptide
  MOD_RES (1)..(3): Xaa is C or S

SEQ ID NO: 114036 - protein, 40 aa, Artificial Sequence; identical to SEQ ID NO: 23152
  Cyclic GFR-binding peptide
  MOD_RES (1)..(35): Xaa is C or S

SEQ ID NO: 114037 - protein, 40 aa, Artificial Sequence; identical to SEQ ID NO: 23154
  Cyclic GFR-binding peptide
  MOD_RES (1)..(35): Xaa is C or S

SEQ ID NO: 114038 - protein, 39 aa, Artificial Sequence; identical to SEQ ID NO: 65100
  Cyclic GFR-binding peptide
  MOD_RES (2)..(33)..(34): Xaa is C or S

SEQ ID NO: 114039 - protein, 26 aa, Artificial Sequence
  Cyclic GFR-binding peptide
RVTAKKLKPKKRVYEIKRVQVPRHHV

SEQ ID NO: 114040 - protein, 40 aa, Artificial Sequence; identical to SEQ ID NO: 23160
  Cyclic GFR-binding peptide
  MOD_RES (2)..(4): Xaa is C or S

SEQ ID NO: 114041 - protein, 36 aa, Artificial Sequence; identical to SEQ ID NO: 23161
  Cyclic GFR-binding peptide
  MOD_RES (2)..(2): Xaa is C or S

SEQ ID NO: 114042 - protein, 33 aa, Artificial Sequence; identical to SEQ ID NO: 23164
  Cyclic GFR-binding peptide

SEQ ID NO: 114043 - protein, 36 aa, Artificial Sequence; identical to SEQ ID NO: 68484
  Cyclic GFR-binding peptide
  MOD_RES (2)..(4)..(35)..(36): Xaa is C or S

SEQ ID NO: 114044 - protein, 27 aa, Artificial Sequence
  Cyclic GFR-binding peptide
EELVTAKKHQGQHPKIRIKRMQVPRQG

SEQ ID NO: 114045 - protein, 29 aa, Artificial Sequence
  Cyclic GFR-binding peptide
  MOD_RES (27)..(28): Xaa is C or S
MVQVEKVKPTRGVVKAIKVSRLDQPVXXP

SEQ ID NO: 114046 - protein, 25 aa, Artificial Sequence
  Cyclic GFR-binding peptide
ELVQVEKHQGQHPKIRVKAMKVSRQ

SEQ ID NO: 114047 - protein, 29 aa, Artificial Sequence
  Cyclic GFR-binding peptide
TVQVEKFIPKKRVIEVKAVKVSRLQVQTP

SEQ ID NO: 114048 - protein, 36 aa, Artificial Sequence; identical to SEQ ID NO: 23175
  Cyclic GFR-binding peptide
  MOD_RES (32)..(32): Xaa is C or S

SEQ ID NO: 114049 - protein, 26 aa, Artificial Sequence
  Cyclic GFR-binding peptide
  MOD_RES (1)..(1): Xaa is C or S
XSKVIMVQVEKIKPTKGIVKAIKVSR

SEQ ID NO: 114050 - protein, 31 aa, Artificial Sequence; identical to SEQ ID NO: 65112
  Cyclic GFR-binding peptide
  MOD_RES (26)..(27): Xaa is C or S

SEQ ID NO: 114051 - protein, 34 aa, Artificial Sequence; identical to SEQ ID NO: 65114
  Cyclic GFR-binding peptide
  MOD_RES (30)..(31): Xaa is C or S

SEQ ID NO: 114052 - protein, 39 aa, Artificial Sequence; identical to SEQ ID NO: 23181
  Cyclic GFR-binding peptide
  MOD_RES (2)..(4)..(38): Xaa is C or S

SEQ ID NO: 114053 - protein, 37 aa, Artificial Sequence; identical to SEQ ID NO: 65116
  Cyclic GFR-binding peptide
  MOD_RES (2)..(33)..(34): Xaa is C or S

SEQ ID NO: 114054 - protein, 27 aa, Artificial Sequence
  Cyclic GFR-binding peptide
HEELRVTAKKLKPKKRVYEIKRVQVPR

SEQ ID NO: 114055 - protein, 26 aa, Artificial Sequence
  Cyclic GFR-binding peptide
VIMVTAKKVKPKRGVIKRIQVPRLAQ

SEQ ID NO: 114056 - protein, 26 aa, Artificial Sequence
  Cyclic GFR-binding peptide
LVTAKKHQGQHPKIRIKRMQVPRQGT

SEQ ID NO: 114057 - protein, 31 aa, Artificial Sequence; identical to SEQ ID NO: 23188
  Cyclic GFR-binding peptide

SEQ ID NO: 114058 - protein, 36 aa, Artificial Sequence; identical to SEQ ID NO: 23191
  Cyclic GFR-binding peptide
  MOD_RES (1)..(3): Xaa is C or S

SEQ ID NO: 114059 - protein, 24 aa, Artificial Sequence
  Cyclic GFR-binding peptide
MVQVEKVKPKRGVVKAIKVSRLAQ

SEQ ID NO: 114060 - protein, 32 aa, Artificial Sequence; identical to SEQ ID NO: 23192
  Cyclic GFR-binding peptide
  MOD_RES (32)..(32): Xaa is C or S

SEQ ID NO: 114061 - protein, 37 aa, Artificial Sequence; identical to SEQ ID NO: 66836
  Cyclic GFR-binding peptide
  MOD_RES (31)..(32): Xaa is C or S

SEQ ID NO: 114062 - protein, 39 aa, Artificial Sequence; identical to SEQ ID NO: 23198
  Cyclic GFR-binding peptide
  MOD_RES (2)..(4)..(38): Xaa is C or S

SEQ ID NO: 114063 - protein, 40 aa, Artificial Sequence; identical to SEQ ID NO: 23200
  Cyclic GFR-binding peptide
  MOD_RES (1)..(3)..(37): Xaa is C or S

SEQ ID NO: 114064 - protein, 34 aa, Artificial Sequence; identical to SEQ ID NO: 23201
  Cyclic GFR-binding peptide

SEQ ID NO: 114065 - protein, 27 aa, Artificial Sequence
  Cyclic GFR-binding peptide
HQLFVTAKKHQGQHPKIRIKRMQVPRE

SEQ ID NO: 114066 - protein, 28 aa, Artificial Sequence
  Cyclic GFR-binding peptide
LVQVEKHQGQHPKIRVKAMKVSRQGTPV

SEQ ID NO: 114067 - protein, 36 aa, Artificial Sequence; identical to SEQ ID NO: 23207
  Cyclic GFR-binding peptide
  MOD_RES (30)..(30): Xaa is C or S

SEQ ID NO: 114068 - protein, 25 aa, Artificial Sequence
  Cyclic GFR-binding peptide
MVTAKKIKPTKGIIKRIQVPRLDQS

SEQ ID NO: 114069 - protein, 38 aa, Artificial Sequence; identical to SEQ ID NO: 23210
  Cyclic GFR-binding peptide
  MOD_RES (1)..(35): Xaa is C or S

SEQ ID NO: 114070 - protein, 42 aa, Artificial Sequence; identical to SEQ ID NO: 23211
  Cyclic GFR-binding peptide
  MOD_RES (1)..(3)..(40): Xaa is C or S

SEQ ID NO: 114071 - protein, 41 aa, Artificial Sequence; identical to SEQ ID NO: 23212
  Cyclic GFR-binding peptide
  MOD_RES (1)..(35): Xaa is C or S

SEQ ID NO: 114072 - protein, 33 aa, Artificial Sequence; identical to SEQ ID NO: 23213
  Cyclic GFR-binding peptide
  MOD_RES (2)..(4): Xaa is C or S

SEQ ID NO: 114073 - protein, 35 aa, Artificial Sequence; identical to SEQ ID NO: 66845
  Cyclic GFR-binding peptide
  MOD_RES (30)..(31): Xaa is C or S

SEQ ID NO: 114074 - protein, 37 aa, Artificial Sequence; identical to SEQ ID NO: 23216
  Cyclic GFR-binding peptide
  MOD_RES (2)..(4): Xaa is C or S

SEQ ID NO: 114075 - protein, 26 aa, Artificial Sequence
  Cyclic GFR-binding peptide
ELVQVEKHQGQHPKIRVKAMKVSRQG

SEQ ID NO: 114076 - protein, 27 aa, Artificial Sequence
  Cyclic GFR-binding peptide
  MOD_RES (26)..(27): Xaa is C or S
VTAKKVKPTRGVIKRIQVPRLDQPVXX

SEQ ID NO: 114077 - protein, 27 aa, Artificial Sequence
  Cyclic GFR-binding peptide
SKVIMVTAKKIKPTKGIIKRIQVPRLD

SEQ ID NO: 114078 - protein, 33 aa, Artificial Sequence; identical to SEQ ID NO: 66852
  Cyclic GFR-binding peptide
  MOD_RES (31)..(32): Xaa is C or S

SEQ ID NO: 114079 - protein, 32 aa, Artificial Sequence; identical to SEQ ID NO: 68537
  Cyclic GFR-binding peptide
  MOD_RES (2)..(2): Xaa is C or S

SEQ ID NO: 114080 - protein, 37 aa, Artificial Sequence; identical to SEQ ID NO: 68539
  Cyclic GFR-binding peptide
  MOD_RES (1)..(32)..(33): Xaa is C or S

SEQ ID NO: 114081 - protein, 25 aa, Artificial Sequence
  Cyclic GFR-binding peptide
VTAKKIKPTKGIIKRIQVPRLDQSV

SEQ ID NO: 114082 - protein, 32 aa, Artificial Sequence; identical to SEQ ID NO: 63512
  Cyclic GFR-binding peptide
  MOD_RES (31)..(32): Xaa is C or S

SEQ ID NO: 114083 - protein, 33 aa, Artificial Sequence; identical to SEQ ID NO: 23221
  Cyclic GFR-binding peptide
  MOD_RES (31)..(31): Xaa is C or S

SEQ ID NO: 114084 - protein, 35 aa, Artificial Sequence; identical to SEQ ID NO: 23222
  Cyclic GFR-binding peptide
  MOD_RES (1)..(35): Xaa is C or S

SEQ ID NO: 114085 - protein, 22 aa, Artificial Sequence
  Cyclic GFR-binding peptide
VTAKKVKPTRGVIKRIQVPRLD

SEQ ID NO: 114086 - protein, 41 aa, Artificial Sequence; identical to SEQ ID NO: 23226
  Cyclic GFR-binding peptide
  MOD_RES (1)..(3)..(40): Xaa is C or S

SEQ ID NO: 114087 - protein, 33 aa, Artificial Sequence; identical to SEQ ID NO: 68545
  Cyclic GFR-binding peptide
  MOD_RES (27)..(28): Xaa is C or S

SEQ ID NO: 114088 - protein, 30 aa, Artificial Sequence; identical to SEQ ID NO: 65160
  Cyclic GFR-binding peptide
  MOD_RES (27)..(28): Xaa is C or S

SEQ ID NO: 114089 - protein, 37 aa, Artificial Sequence; identical to SEQ ID NO: 23227
  Cyclic GFR-binding peptide
  MOD_RES (2)..(4): Xaa is C or S

SEQ ID NO: 114090 - protein, 37 aa, Artificial Sequence; identical to SEQ ID NO: 23228
  Cyclic GFR-binding peptide
  MOD_RES (2)..(36): Xaa is C or S

SEQ ID NO: 114091 - protein, 31 aa, Artificial Sequence; identical to SEQ ID NO: 68547
  Cyclic GFR-binding peptide
  MOD_RES (31)..(31): Xaa is C or S

SEQ ID NO: 114092 - protein, 32 aa, Artificial Sequence; identical to SEQ ID NO: 68549
  Cyclic GFR-binding peptide
  MOD_RES (27)..(28): Xaa is C or S

SEQ ID NO: 114093 - protein, 33 aa, Artificial Sequence; identical to SEQ ID NO: 23233
  Cyclic GFR-binding peptide

SEQ ID NO: 114094 - protein, 29 aa, Artificial Sequence
  Cyclic GFR-binding peptide
  MOD_RES (29)..(29): Xaa is C or S
LVQVEKHQGQHPKIRVKAMKVSRQGTPVX

SEQ ID NO: 114095 - protein, 25 aa, Artificial Sequence
  Cyclic GFR-binding peptide
IMVQVEKVKPKRGVVKAIKVSRLAQ

SEQ ID NO: 114096 - protein, 31 aa, Artificial Sequence; identical to SEQ ID NO: 23236
  Cyclic GFR-binding peptide

SEQ ID NO: 114097 - protein, 33 aa, Artificial Sequence; identical to SEQ ID NO: 23237
  Cyclic GFR-binding peptide
  MOD_RES (32)..(32): Xaa is C or S

SEQ ID NO: 114098 - protein, 24 aa, Artificial Sequence
  Cyclic GFR-binding peptide
VIMVTAKKVKPKRGVIKRIQVPRL

SEQ ID NO: 114099 - protein, 29 aa, Artificial Sequence
  Cyclic GFR-binding peptide
  MOD_RES (29)..(29): Xaa is C or S
VVMVTAKKVKPTRGVIKRIQVPRLDQPVX

SEQ ID NO: 114100 - protein, 24 aa, Artificial Sequence
  Cyclic GFR-binding peptide
IMVQVEKVKPKRGVVKAIKVSRLA

SEQ ID NO: 114101 - protein, 38 aa, Artificial Sequence; identical to SEQ ID NO: 63529
  Cyclic GFR-binding peptide
  MOD_RES (2)..(33)..(34): Xaa is C or S

SEQ ID NO: 114102 - protein, 23 aa, Artificial Sequence
  Cyclic GFR-binding peptide
VQVEKFIPKKRVIEVKAVKVSRL

SEQ ID NO: 114103 - protein, 29 aa, Artificial Sequence
  Cyclic GFR-binding peptide
LHEELRVTAKKLKPKKRVYEIKRVQVPRH

SEQ ID NO: 114104 - protein, 37 aa, Artificial Sequence; identical to SEQ ID NO: 23245
  Cyclic GFR-binding peptide
  MOD_RES (2)..(36): Xaa is C or S

SEQ ID NO: 114105 - protein, 26 aa, Artificial Sequence
  Cyclic GFR-binding peptide
MVQVEKIKPTKGIVKAIKVSRLDQSV

SEQ ID NO: 114106 - protein, 34 aa, Artificial Sequence; identical to SEQ ID NO: 65181
  Cyclic GFR-binding peptide
  MOD_RES (30)..(31): Xaa is C or S

SEQ ID NO: 114107 - protein, 24 aa, Artificial Sequence
  Cyclic GFR-binding peptide
VQVEKFIPKKRVIEVKAVKVSRLQ

SEQ ID NO: 114108 - protein, 41 aa, Artificial Sequence; identical to SEQ ID NO: 23249
  Cyclic GFR-binding peptide
  MOD_RES (2)..(4)..(38): Xaa is C or S

SEQ ID NO: 114109 - protein, 28 aa, Artificial Sequence
  Cyclic GFR-binding peptide
  MOD_RES (1)..(3): Xaa is C or S
XKXSKVVMVQVEKVKPTRGVVKAIKVSR

SEQ ID NO: 114110 - protein, 40 aa, Artificial Sequence; identical to SEQ ID NO: 23251
  Cyclic GFR-binding peptide
  MOD_RES (2)..(4)..(38): Xaa is C or S

SEQ ID NO: 114111 - protein, 33 aa, Artificial Sequence; identical to SEQ ID NO: 23253
  Cyclic GFR-binding peptide
  MOD_RES (2)..(4): Xaa is C or S

SEQ ID NO: 114112 - protein, 27 aa, Artificial Sequence
  Cyclic GFR-binding peptide
LVQVEKHQGQHPKIRVKAMKVSRQGTP

SEQ ID NO: 114113 - protein, 39 aa, Artificial Sequence; identical to SEQ ID NO: 23255
  Cyclic GFR-binding peptide
  MOD_RES (1)..(3): Xaa is C or S

SEQ ID NO: 114114 - protein, 39 aa, Artificial Sequence; identical to SEQ ID NO: 23257
  Cyclic GFR-binding peptide
  MOD_RES (37)..(37): Xaa is C or S

SEQ ID NO: 114115 - protein, 40 aa, Artificial Sequence; identical to SEQ ID NO: 23258
  Cyclic GFR-binding peptide
  MOD_RES (34)..(34): Xaa is C or S

SEQ ID NO: 114116 - protein, 22 aa, Artificial Sequence
  Cyclic GFR-binding peptide
VQVEKIKPTKGIVKAIKVSRLD

SEQ ID NO: 114117 - protein, 32 aa, Artificial Sequence; identical to SEQ ID NO: 65189
  Cyclic GFR-binding peptide
  MOD_RES (26)..(27): Xaa is C or S

SEQ ID NO: 114118 - protein, 34 aa, Artificial Sequence; identical to SEQ ID NO: 68569
  Cyclic GFR-binding peptide
  MOD_RES (29)..(30): Xaa is C or S

SEQ ID NO: 114119 - protein, 30 aa, Artificial Sequence; identical to SEQ ID NO: 65191
  Cyclic GFR-binding peptide
  MOD_RES (30)..(30): Xaa is C or S

SEQ ID NO: 114120 - protein, 31 aa, Artificial Sequence; identical to SEQ ID NO: 68570
  Cyclic GFR-binding peptide
  MOD_RES (1)..(1): Xaa is C or S

SEQ ID NO: 114121 - protein, 38 aa, Artificial Sequence; identical to SEQ ID NO: 23261
  Cyclic GFR-binding peptide
  MOD_RES (2)..(36): Xaa is C or S

SEQ ID NO: 114122 - protein, 31 aa, Artificial Sequence; identical to SEQ ID NO: 23263
  Cyclic GFR-binding peptide

SEQ ID NO: 114123 - protein, 30 aa, Artificial Sequence; identical to SEQ ID NO: 63549
  Cyclic GFR-binding peptide
  MOD_RES (2)..(2): Xaa is C or S

SEQ ID NO: 114124 - protein, 35 aa, Artificial Sequence; identical to SEQ ID NO: 23265
  Cyclic GFR-binding peptide
  MOD_RES (34)..(34): Xaa is C or S

SEQ ID NO: 114125 - protein, 33 aa, Artificial Sequence; identical to SEQ ID NO: 68575
  Cyclic GFR-binding peptide
  MOD_RES (31)..(32): Xaa is C or S

SEQ ID NO: 114126 - protein, 29 aa, Artificial Sequence
  Cyclic GFR-binding peptide
SKVVMVTAKKVKPTRGVIKRIQVPRLDQP

SEQ ID NO: 114127 - protein, 34 aa, Artificial Sequence; identical to SEQ ID NO: 23267
  Cyclic GFR-binding peptide
  MOD_RES (30)..(30): Xaa is C or S

SEQ ID NO: 114128 - protein, 29 aa, Artificial Sequence
  Cyclic GFR-binding peptide
DELTVQVEKFIPKKRVIEVKAVKVSRLQV

SEQ ID NO: 114129 - protein, 27 aa, Artificial Sequence
  Cyclic GFR-binding peptide
  MOD_RES (26)..(27): Xaa is C or S
VQVEKIKPTKGIVKAIKVSRLDQSVXX

SEQ ID NO: 114130 - protein, 30 aa, Artificial Sequence; identical to SEQ ID NO: 68581
  Cyclic GFR-binding peptide
  MOD_RES (2)..(4): Xaa is C or S

SEQ ID NO: 114131 - protein, 32 aa, Artificial Sequence; identical to SEQ ID NO: 23272
  Cyclic GFR-binding peptide
  MOD_RES (28)..(28): Xaa is C or S

SEQ ID NO: 114132 - protein, 40 aa, Artificial Sequence; identical to SEQ ID NO: 23273
  Cyclic GFR-binding peptide
  MOD_RES (36)..(36): Xaa is C or S

SEQ ID NO: 114133 - protein, 30 aa, Artificial Sequence; identical to SEQ ID NO: 65207
  Cyclic GFR-binding peptide
  MOD_RES (29)..(30): Xaa is C or S

SEQ ID NO: 114134 - protein, 25 aa, Artificial Sequence
  Cyclic GFR-binding peptide
ELTVQVEKFIPKKRVIEVKAVKVSR

SEQ ID NO: 114135 - protein, 31 aa, Artificial Sequence; identical to SEQ ID NO: 23280
  Cyclic GFR-binding peptide
  MOD_RES (29)..(29): Xaa is C or S

SEQ ID NO: 114136 - protein, 37 aa, Artificial Sequence; identical to SEQ ID NO: 65210
  Cyclic GFR-binding peptide
  MOD_RES (1)..(32)..(33): Xaa is C or S

SEQ ID NO: 114137 - protein, 30 aa, Artificial Sequence; identical to SEQ ID NO: 23283
  Cyclic GFR-binding peptide
  MOD_RES (1)..(1): Xaa is C or S

SEQ ID NO: 114138 - protein, 41 aa, Artificial Sequence; identical to SEQ ID NO: 23285
  Cyclic GFR-binding peptide
  MOD_RES (1)..(38): Xaa is C or S

SEQ ID NO: 114139 - protein, 23 aa, Artificial Sequence
  Cyclic GFR-binding peptide
MVQVEKIKPTKGIVKAIKVSRLD

SEQ ID NO: 114140 - protein, 36 aa, Artificial Sequence; identical to SEQ ID NO: 23287
  Cyclic GFR-binding peptide
  MOD_RES (34)..(34): Xaa is C or S

SEQ ID NO: 114141 - protein, 31 aa, Artificial Sequence; identical to SEQ ID NO: 63566
  Cyclic GFR-binding peptide
  MOD_RES (27)..(28): Xaa is C or S

SEQ ID NO: 114142 - protein, 34 aa, Artificial Sequence; identical to SEQ ID NO: 65216
  Cyclic GFR-binding peptide
  MOD_RES (1)..(32)..(33): Xaa is C or S

SEQ ID NO: 114143 - protein, 38 aa, Artificial Sequence; identical to SEQ ID NO: 68591
  Cyclic GFR-binding peptide
  MOD_RES (2)..(33)..(34): Xaa is C or S

SEQ ID NO: 114144 - protein, 31 aa, Artificial Sequence; identical to SEQ ID NO: 63573
  Cyclic GFR-binding peptide
  MOD_RES (31)..(31): Xaa is C or S

SEQ ID NO: 114145 - protein, 31 aa, Artificial Sequence; identical to SEQ ID NO: 66912
  Cyclic GFR-binding peptide
  MOD_RES (30)..(31): Xaa is C or S

SEQ ID NO: 114146 - protein, 37 aa, Artificial Sequence; identical to SEQ ID NO: 65219
  Cyclic GFR-binding peptide
  MOD_RES (1)..(3)..(34)..(35): Xaa is C or S

SEQ ID NO: 114147 - protein, 35 aa, Artificial Sequence; identical to SEQ ID NO: 23292
  Cyclic GFR-binding peptide
  MOD_RES (2)..(4): Xaa is C or S

SEQ ID NO: 114148 - protein, 26 aa, Artificial Sequence
  Cyclic GFR-binding peptide
ELRVTAKKLKPKKRVYEIKRVQVPRH

SEQ ID NO: 114149 - protein, 37 aa, Artificial Sequence; identical to SEQ ID NO: 68598
  Cyclic GFR-binding peptide
  MOD_RES (1)..(3)..(34)..(35): Xaa is C or S

SEQ ID NO: 114150 - protein, 33 aa, Artificial Sequence; identical to SEQ ID NO: 66916
  Cyclic GFR-binding peptide
  MOD_RES (27)..(28): Xaa is C or S

SEQ ID NO: 114151 - protein, 32 aa, Artificial Sequence; identical to SEQ ID NO: 23295
  Cyclic GFR-binding peptide
  MOD_RES (30)..(30): Xaa is C or S

SEQ ID NO: 114152 - protein, 23 aa, Artificial Sequence
  Cyclic GFR-binding peptide
VQVEKHQGQHPKIRVKAMKVSRE

SEQ ID NO: 114153 - protein, 29 aa, Artificial Sequence
  Cyclic GFR-binding peptide
  MOD_RES (27)..(28): Xaa is C or S
MVTAKKVKPKRGVIKRIQVPRLAQPVXXP

SEQ ID NO: 114154 - protein, 29 aa, Artificial Sequence
  Cyclic GFR-binding peptide
HEELVQVEKHQGQHPKIRVKAMKVSRQGT

SEQ ID NO: 114155 - protein, 38 aa, Artificial Sequence; identical to SEQ ID NO: 23301
  Cyclic GFR-binding peptide
  MOD_RES (32)..(32): Xaa is C or S

SEQ ID NO: 114156 - protein, 35 aa, Artificial Sequence; identical to SEQ ID NO: 68599
  Cyclic GFR-binding peptide
  MOD_RES (2)..(33)..(34): Xaa is C or S

SEQ ID NO: 114157 - protein, 38 aa, Artificial Sequence; identical to SEQ ID NO: 68601
  Cyclic GFR-binding peptide
  MOD_RES (1)..(32)..(33): Xaa is C or S

SEQ ID NO: 114158 - protein, 30 aa, Artificial Sequence; identical to SEQ ID NO: 65228
  Cyclic GFR-binding peptide
  MOD_RES (2)..(4): Xaa is C or S

SEQ ID NO: 114159 - protein, 30 aa, Artificial Sequence; identical to SEQ ID NO: 23306
  Cyclic GFR-binding peptide

SEQ ID NO: 114160 - protein, 29 aa, Artificial Sequence
  Cyclic GFR-binding peptide
EELVTAKKHQGQHPKIRIKRMQVPRQGTP

SEQ ID NO: 114161 - protein, 27 aa, Artificial Sequence
  Cyclic GFR-binding peptide
IMVQVEKVKPKRGVVKAIKVSRLAQPV

SEQ ID NO: 114162 - protein, 34 aa, Artificial Sequence; identical to SEQ ID NO: 23309
  Cyclic GFR-binding peptide
  MOD_RES (1)..(1): Xaa is C or S

SEQ ID NO: 114163 - protein, 33 aa, Artificial Sequence; identical to SEQ ID NO: 63587
  Cyclic GFR-binding peptide
  MOD_RES (2)..(4): Xaa is C or S

SEQ ID NO: 114164 - protein, 35 aa, Artificial Sequence; identical to SEQ ID NO: 23310
  Cyclic GFR-binding peptide
  MOD_RES (31)..(31): Xaa is C or S

SEQ ID NO: 114165 - protein, 37 aa, Artificial Sequence; identical to SEQ ID NO: 68608
  Cyclic GFR-binding peptide
  MOD_RES (2)..(33)..(34): Xaa is C or S

SEQ ID NO: 114166 - protein, 37 aa, Artificial Sequence; identical to SEQ ID NO: 23317
  Cyclic GFR-binding peptide
  MOD_RES (1)..(35): Xaa is C or S

SEQ ID NO: 114167 - protein, 34 aa, Artificial Sequence; identical to SEQ ID NO: 66937
  Cyclic GFR-binding peptide
  MOD_RES (2)..(4): Xaa is C or S

SEQ ID NO: 114168 - protein, 30 aa, Artificial Sequence; identical to SEQ ID NO: 23318
  Cyclic GFR-binding peptide

SEQ ID NO: 114169 - protein, 28 aa, Artificial Sequence
  Cyclic GFR-binding peptide
EELRVTAKKLKPKKRVYEIKRVQVPRHH

SEQ ID NO: 114170 - protein, 33 aa, Artificial Sequence; identical to SEQ ID NO: 23320
  Cyclic GFR-binding peptide
  MOD_RES (30)..(30): Xaa is C or S

SEQ ID NO: 114171 - protein, 39 aa, Artificial Sequence; identical to SEQ ID NO: 73519
  Cyclic GFR-binding peptide
  MOD_RES (6)..(7)..(38): Xaa is C or S

SEQ ID NO: 114172 - protein, 27 aa, Artificial Sequence
  Cyclic GFR-binding peptide
  MOD_RES (1)..(2): Xaa is C or S
XXVPQALRPVQIRKIVGRKPKVKKATV

SEQ ID NO: 114173 - protein, 29 aa, Artificial Sequence
  Cyclic GFR-binding peptide
HHRPVQVRKIEYVRKKPKLKKATVRLEEH

SEQ ID NO: 114174 - protein, 27 aa, Artificial Sequence
  Cyclic GFR-binding peptide
  MOD_RES (1)..(2): Xaa is C or S
XXVSQDLRPVQIRKIIGKTPKIKKATV

SEQ ID NO: 114175 - protein, 23 aa, Artificial Sequence
  Cyclic GFR-binding peptide
RPVQVRKIEYVRKKPKLKKATVR

SEQ ID NO: 114176 - protein, 30 aa, Artificial Sequence; identical to SEQ ID NO: 73522
  Cyclic GFR-binding peptide
  MOD_RES (27)..(29): Xaa is C or S

SEQ ID NO: 114177 - protein, 34 aa, Artificial Sequence; identical to SEQ ID NO: 71904
  Cyclic GFR-binding peptide
  MOD_RES (1)..(32)..(34): Xaa is C or S

SEQ ID NO: 114178 - protein, 24 aa, Artificial Sequence
  Cyclic GFR-binding peptide
PQDLRPVQIRKIVGRTPKVKKATV

SEQ ID NO: 114179 - protein, 31 aa, Artificial Sequence; identical to SEQ ID NO: 68620
  Cyclic GFR-binding peptide
  MOD_RES (28)..(30): Xaa is C or S

SEQ ID NO: 114180 - protein, 26 aa, Artificial Sequence
  Cyclic GFR-binding peptide
EERSVKMAKVRIKPHQGQHKEVQVFL

SEQ ID NO: 114181 - protein, 36 aa, Artificial Sequence; identical to SEQ ID NO: 23333
  Cyclic GFR-binding peptide
  MOD_RES (7)..(7): Xaa is C or S

SEQ ID NO: 114182 - protein, 26 aa, Artificial Sequence
  Cyclic GFR-binding peptide
PQDLRSVKIAKVVGRTPKVKEVQVMV

SEQ ID NO: 114183 - protein, 26 aa, Artificial Sequence
  Cyclic GFR-binding peptide
PQALRPVQIRKIVGRKPKVKKATVMI

SEQ ID NO: 114184 - protein, 30 aa, Artificial Sequence; identical to SEQ ID NO: 23334
  Cyclic GFR-binding peptide

SEQ ID NO: 114185 - protein, 36 aa, Artificial Sequence; identical to SEQ ID NO: 71915
  Cyclic GFR-binding peptide
  MOD_RES (3)..(4)..(35): Xaa is C or S

SEQ ID NO: 114186 - protein, 32 aa, Artificial Sequence; identical to SEQ ID NO: 23335
  Cyclic GFR-binding peptide

SEQ ID NO: 114187 - protein, 24 aa, Artificial Sequence
  Cyclic GFR-binding peptide
DLRSVKIAKVVGRTPKVKEVQVMV

SEQ ID NO: 114188 - protein, 42 aa, Artificial Sequence; identical to SEQ ID NO: 23337
  Cyclic GFR-binding peptide
  MOD_RES (5)..(42): Xaa is C or S

SEQ ID NO: 114189 - protein, 27 aa, Artificial Sequence
  Cyclic GFR-binding peptide
PTGQRPVQMRKIRIKPHQGQHKKATVL

SEQ ID NO: 114190 - protein, 23 aa, Artificial Sequence
  Cyclic GFR-binding peptide
RPVQIRKIVGRTPKVKKATVMVV

SEQ ID NO: 114191 - protein, 31 aa, Artificial Sequence; identical to SEQ ID NO: 23342
  Cyclic GFR-binding peptide
  MOD_RES (1)..(1): Xaa is C or S

SEQ ID NO: 114192 - protein, 31 aa, Artificial Sequence; identical to SEQ ID NO: 23343
  Cyclic GFR-binding peptide
  MOD_RES (2)..(2): Xaa is C or S

SEQ ID NO: 114193 - protein, 26 aa, Artificial Sequence
  Cyclic GFR-binding peptide
QVQLRSVKVAKVEIVRKKPIFKEVQV

SEQ ID NO: 114194 - protein, 30 aa, Artificial Sequence; identical to SEQ ID NO: 68636
  Cyclic GFR-binding peptide

SEQ ID NO: 114195 - protein, 27 aa, Artificial Sequence
  Cyclic GFR-binding peptide
VPQALRPVQIRKIVGRKPKVKKATVMI

SEQ ID NO: 114196 - protein, 33 aa, Artificial Sequence; identical to SEQ ID NO: 71923
  Cyclic GFR-binding peptide
  MOD_RES (1)..(2)..(33): Xaa is C or S

SEQ ID NO: 114197 - protein, 35 aa, Artificial Sequence; identical to SEQ ID NO: 70343
  Cyclic GFR-binding peptide
  MOD_RES (1)..(32)..(34): Xaa is C or S

SEQ ID NO: 114198 - protein, 36 aa, Artificial Sequence; identical to SEQ ID NO: 23350
  Cyclic GFR-binding peptide
  MOD_RES (34)..(36): Xaa is C or S

SEQ ID NO: 114199 - protein, 32 aa, Artificial Sequence; identical to SEQ ID NO: 70346
  Cyclic GFR-binding peptide
  MOD_RES (6)..(7): Xaa is C or S

SEQ ID NO: 114200 - protein, 35 aa, Artificial Sequence; identical to SEQ ID NO: 23351
  Cyclic GFR-binding peptide
  MOD_RES (5)..(5): Xaa is C or S

SEQ ID NO: 114201 - protein, 26 aa, Artificial Sequence
  Cyclic GFR-binding peptide
QDLRSVKIAKVIGKTPKIKEVQVMIV

SEQ ID NO: 114202 - protein, 34 aa, Artificial Sequence; identical to SEQ ID NO: 73545
  Cyclic GFR-binding peptide
  MOD_RES (4)..(5): Xaa is C or S

SEQ ID NO: 114203 - protein, 39 aa, Artificial Sequence; identical to SEQ ID NO: 71927
  Cyclic GFR-binding peptide
  MOD_RES (6)..(7)..(38): Xaa is C or S

SEQ ID NO: 114204 - protein, 35 aa, Artificial Sequence; identical to SEQ ID NO: 70347
  Cyclic GFR-binding peptide
  MOD_RES (6)..(7): Xaa is C or S

SEQ ID NO: 114205 - protein, 37 aa, Artificial Sequence; identical to SEQ ID NO: 23352
  Cyclic GFR-binding peptide
  MOD_RES (1)..(1): Xaa is C or S

SEQ ID NO: 114206 - protein, 25 aa, Artificial Sequence
  Cyclic GFR-binding peptide
PQALRSVKIAKVVGRKPKVKEVQVM

SEQ ID NO: 114207 - protein, 26 aa, Artificial Sequence
  Cyclic GFR-binding peptide
ALRSVKIAKVVGRKPKVKEVQVMIVR

SEQ ID NO: 114208 - protein, 21 aa, Artificial Sequence
  Cyclic GFR-binding peptide
RSVKIAKVVGRTPKVKEVQVM

SEQ ID NO: 114209 - protein, 31 aa, Artificial Sequence; identical to SEQ ID NO: 23355
  Cyclic GFR-binding peptide
  MOD_RES (31)..(31): Xaa is C or S

SEQ ID NO: 114210 - protein, 34 aa, Artificial Sequence; identical to SEQ ID NO: 23356
  Cyclic GFR-binding peptide

SEQ ID NO: 114211 - protein, 29 aa, Artificial Sequence
  Cyclic GFR-binding peptide
  MOD_RES (3)..(4): Xaa is C or S
SPXXVPQDLRSVKIAKVVGRTPKVKEVQV

SEQ ID NO: 114212 - protein, 31 aa, Artificial Sequence; identical to SEQ ID NO: 71938
  Cyclic GFR-binding peptide
  MOD_RES (29)..(31): Xaa is C or S

SEQ ID NO: 114213 - protein, 37 aa, Artificial Sequence; identical to SEQ ID NO: 23358
  Cyclic GFR-binding peptide
  MOD_RES (34)..(36): Xaa is C or S

SEQ ID NO: 114214 - protein, 29 aa, Artificial Sequence
  Cyclic GFR-binding peptide
  MOD_RES (1)..(1): Xaa is C or S
XVPQALRPVQIRKIVGRKPKVKKATVMIV

SEQ ID NO: 114215 - protein, 34 aa, Artificial Sequence; identical to SEQ ID NO: 23360
  Cyclic GFR-binding peptide
  MOD_RES (33)..(33): Xaa is C or S

SEQ ID NO: 114216 - protein, 34 aa, Artificial Sequence; identical to SEQ ID NO: 23361
  Cyclic GFR-binding peptide
  MOD_RES (1)..(1): Xaa is C or S

SEQ ID NO: 114217 - protein, 33 aa, Artificial Sequence; identical to SEQ ID NO: 71943
  Cyclic GFR-binding peptide
  MOD_RES (31)..(33): Xaa is C or S

SEQ ID NO: 114218 - protein, 34 aa, Artificial Sequence; identical to SEQ ID NO: 23364
  Cyclic GFR-binding peptide
  MOD_RES (32)..(34): Xaa is C or S

SEQ ID NO: 114219 - protein, 36 aa, Artificial Sequence; identical to SEQ ID NO: 70360
  Cyclic GFR-binding peptide
  MOD_RES (3)..(4)..(35): Xaa is C or S

SEQ ID NO: 114220 - protein, 32 aa, Artificial Sequence; identical to SEQ ID NO: 23365
  Cyclic GFR-binding peptide
  MOD_RES (1)..(1): Xaa is C or S

SEQ ID NO: 114221 - protein, 35 aa, Artificial Sequence; identical to SEQ ID NO: 71947
  Cyclic GFR-binding peptide
  MOD_RES (1)..(2)..(33)..(35): Xaa is C or S

SEQ ID NO: 114222 - protein, 30 aa, Artificial Sequence; identical to SEQ ID NO: 23366
  Cyclic GFR-binding peptide

SEQ ID NO: 114223 - protein, 38 aa, Artificial Sequence; identical to SEQ ID NO: 23367
  Cyclic GFR-binding peptide
  MOD_RES (37)..(37): Xaa is C or S

SEQ ID NO: 114224 - protein, 38 aa, Artificial Sequence; identical to SEQ ID NO: 23368
  Cyclic GFR-binding peptide
  MOD_RES (3)..(37): Xaa is C or S

SEQ ID NO: 114225 - protein, 25 aa, Artificial Sequence
  Cyclic GFR-binding peptide
PQDLRSVKIAKVVGRTPKVKEVQVM

SEQ ID NO: 114226 - protein, 28 aa, Artificial Sequence
  Cyclic GFR-binding peptide
RVHHRPVQVRKIEYVRKKPKLKKATVRL

SEQ ID NO: 114227 - protein, 21 aa, Artificial Sequence
  Cyclic GFR-binding peptide
LRPVQIRKIVGRKPKVKKATV

SEQ ID NO: 114228 - protein, 23 aa, Artificial Sequence
  Cyclic GFR-binding peptide
LRSVKIAKVVGRKPKVKEVQVMI

SEQ ID NO: 114229 - protein, 27 aa, Artificial Sequence
  Cyclic GFR-binding peptide
VPQDLRSVKIAKVVGRTPKVKEVQVMV

SEQ ID NO: 114230 - protein, 33 aa, Artificial Sequence; identical to SEQ ID NO: 23374
  Cyclic GFR-binding peptide
  MOD_RES (2)..(2): Xaa is C or S

SEQ ID NO: 114231 - protein, 42 aa, Artificial Sequence; identical to SEQ ID NO: 23375
  Cyclic GFR-binding peptide
  MOD_RES (6)..(40)..(42): Xaa is C or S

SEQ ID NO: 114232 - protein, 23 aa, Artificial Sequence
  Cyclic GFR-binding peptide
QALRSVKIAKVVGRKPKVKEVQV

SEQ ID NO: 114233 - protein, 29 aa, Artificial Sequence
  Cyclic GFR-binding peptide
  MOD_RES (26)..(28): Xaa is C or S
RPVQIRKIVGRKPKVKKATVMIVRSXKXS

SEQ ID NO: 114234 - protein, 37 aa, Artificial Sequence; identical to SEQ ID NO: 70378
  Cyclic GFR-binding peptide
  MOD_RES (5)..(6)..(37): Xaa is C or S

SEQ ID NO: 114235 - protein, 38 aa, Artificial Sequence; identical to SEQ ID NO: 23377
  Cyclic GFR-binding peptide
  MOD_RES (4)..(4): Xaa is C or S

SEQ ID NO: 114236 - protein, 37 aa, Artificial Sequence; identical to SEQ ID NO: 23378
  Cyclic GFR-binding peptide
  MOD_RES (5)..(5): Xaa is C or S

SEQ ID NO: 114237 - protein, 38 aa, Artificial Sequence; identical to SEQ ID NO: 23379
  Cyclic GFR-binding peptide
  MOD_RES (1)..(35)..(37): Xaa is C or S

SEQ ID NO: 114238 - protein, 32 aa, Artificial Sequence; identical to SEQ ID NO: 70382
  Cyclic GFR-binding peptide
  MOD_RES (1)..(32): Xaa is C or S

SEQ ID NO: 114239 - protein, 30 aa, Artificial Sequence; identical to SEQ ID NO: 23381
  Cyclic GFR-binding peptide
  MOD_RES (2)..(2): Xaa is C or S

SEQ ID NO: 114240 - protein, 35 aa, Artificial Sequence; identical to SEQ ID NO: 23383
  Cyclic GFR-binding peptide
  MOD_RES (1)..(1): Xaa is C or S

SEQ ID NO: 114241 - protein, 36 aa, Artificial Sequence; identical to SEQ ID NO: 23385
  Cyclic GFR-binding peptide
  MOD_RES (3)..(3): Xaa is C or S

SEQ ID NO: 114242 - protein, 35 aa, Artificial Sequence; identical to SEQ ID NO: 23387
  Cyclic GFR-binding peptide
  MOD_RES (3)..(3): Xaa is C or S

SEQ ID NO: 114243 - protein, 28 aa, Artificial Sequence
  Cyclic GFR-binding peptide
  MOD_RES (1)..(2): Xaa is C or S
XXVSQDLRPVQIRKIIGKTPKIKKATVM

SEQ ID NO: 114244 - protein, 38 aa, Artificial Sequence; identical to SEQ ID NO: 23390
  Cyclic GFR-binding peptide
  MOD_RES (1)..(35)..(37): Xaa is C or S

SEQ ID NO: 114245 - protein, 38 aa, Artificial Sequence; identical to SEQ ID NO: 71965
  Cyclic GFR-binding peptide
  MOD_RES (6)..(7)..(38): Xaa is C or S

SEQ ID NO: 114246 - protein, 31 aa, Artificial Sequence; identical to SEQ ID NO: 23393
  Cyclic GFR-binding peptide

SEQ ID NO: 114247 - protein, 34 aa, Artificial Sequence; identical to SEQ ID NO: 23394
  Cyclic GFR-binding peptide
  MOD_RES (34)..(34): Xaa is C or S

SEQ ID NO: 114248 - protein, 33 aa, Artificial Sequence; identical to SEQ ID NO: 73592
  Cyclic GFR-binding peptide
  MOD_RES (4)..(5): Xaa is C or S

SEQ ID NO: 114249 - protein, 24 aa, Artificial Sequence
  Cyclic GFR-binding peptide
LRPVQIRKIIGKTPKIKKATVMIV

SEQ ID NO: 114250 - protein, 25 aa, Artificial Sequence
  Cyclic GFR-binding peptide
RPVQMRKIRIKPHQGQHKKATVLEE

SEQ ID NO: 114251 - protein, 28 aa, Artificial Sequence
  Cyclic GFR-binding peptide
  MOD_RES (1)..(2): Xaa is C or S
XXVPQALRPVQIRKIVGRKPKVKKATVM

SEQ ID NO: 114252 - protein, 29 aa, Artificial Sequence
  Cyclic GFR-binding peptide
RSVKVAKVEIVRKKPIFKEVQVTLEDHLA

SEQ ID NO: 114253 - protein, 24 aa, Artificial Sequence
  Cyclic GFR-binding peptide
DLRPVQIRKIIGKTPKIKKATVMI

SEQ ID NO: 114254 - protein, 40 aa, Artificial Sequence; identical to SEQ ID NO: 68694
  Cyclic GFR-binding peptide
  MOD_RES (6)..(7)..(38)..(40): Xaa is C or S

SEQ ID NO: 114255 - protein, 31 aa, Artificial Sequence; identical to SEQ ID NO: 23404
  Cyclic GFR-binding peptide
  MOD_RES (2)..(2): Xaa is C or S

SEQ ID NO: 114256 - protein, 27 aa, Artificial Sequence
  Cyclic GFR-binding peptide
GQRSVKMAKVRIKPHQGQHKEVQVLEE

SEQ ID NO: 114257 - protein, 29 aa, Artificial Sequence
  Cyclic GFR-binding peptide
GQRSVKMAKVRIKPHQGQHKEVQVLEEHS

SEQ ID NO: 114258 - protein, 32 aa, Artificial Sequence; identical to SEQ ID NO: 23410
  Cyclic GFR-binding peptide
  MOD_RES (30)..(32): Xaa is C or S

SEQ ID NO: 114259 - protein, 33 aa, Artificial Sequence; identical to SEQ ID NO: 23412
  Cyclic GFR-binding peptide

SEQ ID NO: 114260 - protein, 28 aa, Artificial Sequence
  Cyclic GFR-binding peptide
  MOD_RES (1)..(1): Xaa is C or S
XVPQDLRPVQIRKIVGRTPKVKKATVMV

SEQ ID NO: 114261 - protein, 22 aa, Artificial Sequence
  Cyclic GFR-binding peptide
RSVKIAKVIGKTPKIKEVQVMI

SEQ ID NO: 114262 - protein, 39 aa, Artificial Sequence; identical to SEQ ID NO: 68702
  Cyclic GFR-binding peptide
  MOD_RES (4)..(5)..(36)..(38): Xaa is C or S

SEQ ID NO: 114263 - protein, 36 aa, Artificial Sequence; identical to SEQ ID NO: 23414
  Cyclic GFR-binding peptide
  MOD_RES (5)..(5): Xaa is C or S

SEQ ID NO: 114264 - protein, 34 aa, Artificial Sequence; identical to SEQ ID NO: 73612
  Cyclic GFR-binding peptide
  MOD_RES (6)..(7): Xaa is C or S

SEQ ID NO: 114265 - protein, 37 aa, Artificial Sequence; identical to SEQ ID NO: 70404
  Cyclic GFR-binding peptide
  MOD_RES (2)..(3)..(34)..(36): Xaa is C or S

SEQ ID NO: 114266 - protein, 35 aa, Artificial Sequence; identical to SEQ ID NO: 23416
  Cyclic GFR-binding peptide

SEQ ID NO: 114267 - protein, 39 aa, Artificial Sequence; identical to SEQ ID NO: 23417
  Cyclic GFR-binding peptide
  MOD_RES (3)..(37)..(39): Xaa is C or S

SEQ ID NO: 114268 - protein, 21 aa, Artificial Sequence
  Cyclic GFR-binding peptide
LRPVQIRKIVGRTPKVKKATV

SEQ ID NO: 114269 - protein, 26 aa, Artificial Sequence
  Cyclic GFR-binding peptide
  MOD_RES (26)..(26): Xaa is C or S
RPVQIRKIIGKTPKIKKATVMIVKSX

SEQ ID NO: 114270 - protein, 41 aa, Artificial Sequence; identical to SEQ ID NO: 23418
  Cyclic GFR-binding peptide
  MOD_RES (5)..(5): Xaa is C or S

SEQ ID NO: 114271 - protein, 35 aa, Artificial Sequence; identical to SEQ ID NO: 23420
  Cyclic GFR-binding peptide
  MOD_RES (34)..(34): Xaa is C or S

SEQ ID NO: 114272 - protein, 31 aa, Artificial Sequence; identical to SEQ ID NO: 68712
  Cyclic GFR-binding peptide
  MOD_RES (5)..(6): Xaa is C or S

SEQ ID NO: 114273 - protein, 27 aa, Artificial Sequence
  Cyclic GFR-binding peptide
TEERSVKMAKVRIKPHQGQHKEVQVFL

SEQ ID NO: 114274 - protein, 29 aa, Artificial Sequence
  Cyclic GFR-binding peptide
  MOD_RES (2)..(2): Xaa is C or S
EXVPTGQRSVKMAKVRIKPHQGQHKEVQV

SEQ ID NO: 114275 - protein, 27 aa, Artificial Sequence
  Cyclic GFR-binding peptide
RPVQMRKIRIKPHQGQHKKATVFLQHN

SEQ ID NO: 114276 - protein, 32 aa, Artificial Sequence; identical to SEQ ID NO: 23426
  Cyclic GFR-binding peptide

SEQ ID NO: 114277 - protein, 30 aa, Artificial Sequence; identical to SEQ ID NO: 72002
  Cyclic GFR-binding peptide
  MOD_RES (2)..(3): Xaa is C or S

SEQ ID NO: 114278 - protein, 24 aa, Artificial Sequence
  Cyclic GFR-binding peptide
QRPVQMRKIRIKPHQGQHKKATVL

SEQ ID NO: 114279 - protein, 32 aa, Artificial Sequence; identical to SEQ ID NO: 23429
  Cyclic GFR-binding peptide
  MOD_RES (5)..(5): Xaa is C or S

SEQ ID NO: 114280 - protein, 34 aa, Artificial Sequence; identical to SEQ ID NO: 23432
  Cyclic GFR-binding peptide
  MOD_RES (4)..(4): Xaa is C or S

SEQ ID NO: 114281 - protein, 32 aa, Artificial Sequence; identical to SEQ ID NO: 70420
  Cyclic GFR-binding peptide
  MOD_RES (4)..(5): Xaa is C or S

SEQ ID NO: 114282 - protein, 32 aa, Artificial Sequence; identical to SEQ ID NO: 23433
  Cyclic GFR-binding peptide
  MOD_RES (2)..(2): Xaa is C or S

SEQ ID NO: 114283 - protein, 28 aa, Artificial Sequence
  Cyclic GFR-binding peptide
QDLRSVKIAKVIGKTPKIKEVQVMIVKS

SEQ ID NO: 114284 - protein, 36 aa, Artificial Sequence; identical to SEQ ID NO: 23435
  Cyclic GFR-binding peptide
  MOD_RES (2)..(36): Xaa is C or S

SEQ ID NO: 114285 - protein, 37 aa, Artificial Sequence; identical to SEQ ID NO: 23437
  Cyclic GFR-binding peptide
  MOD_RES (1)..(1): Xaa is C or S

SEQ ID NO: 114286 - protein, 40 aa, Artificial Sequence; identical to SEQ ID NO: 23438
  Cyclic GFR-binding peptide
  MOD_RES (3)..(40): Xaa is C or S

SEQ ID NO: 114287 - protein, 43 aa, Artificial Sequence; identical to SEQ ID NO: 23439
  Cyclic GFR-binding peptide
  MOD_RES (6)..(40)..(42): Xaa is C or S

SEQ ID NO: 114288 - protein, 30 aa, Artificial Sequence; identical to SEQ ID NO: 70427
  Cyclic GFR-binding peptide
  MOD_RES (1)..(2): Xaa is C or S

SEQ ID NO: 114289 - protein, 27 aa, Artificial Sequence
  Cyclic GFR-binding peptide
RPVQMRKIRIKPHQGQHKKATVLEEHS

SEQ ID NO: 114290 - protein, 40 aa, Artificial Sequence; identical to SEQ ID NO: 23441
  Cyclic GFR-binding peptide
  MOD_RES (2)..(39): Xaa is C or S

SEQ ID NO: 114291 - protein, 35 aa, Artificial Sequence; identical to SEQ ID NO: 23442
  Cyclic GFR-binding peptide
  MOD_RES (2)..(2): Xaa is C or S

SEQ ID NO: 114292 - protein, 28 aa, Artificial Sequence
  Cyclic GFR-binding peptide
PQDLRPVQIRKIVGRTPKVKKATVMVVK

SEQ ID NO: 114293 - protein, 34 aa, Artificial Sequence; identical to SEQ ID NO: 23445
  Cyclic GFR-binding peptide
  MOD_RES (7)..(7): Xaa is C or S

SEQ ID NO: 114294 - protein, 31 aa, Artificial Sequence; identical to SEQ ID NO: 23447
  Cyclic GFR-binding peptide

SEQ ID NO: 114295 - protein, 40 aa, Artificial Sequence; identical to SEQ ID NO: 68738
  Cyclic GFR-binding peptide
  MOD_RES (6)..(7)..(38)..(40): Xaa is C or S

SEQ ID NO: 114296 - protein, 35 aa, Artificial Sequence; identical to SEQ ID NO: 23448
  Cyclic GFR-binding peptide

SEQ ID NO: 114297 - protein, 32 aa, Artificial Sequence; identical to SEQ ID NO: 70434
  Cyclic GFR-binding peptide
  MOD_RES (1)..(32): Xaa is C or S

SEQ ID NO: 114298 - protein, 28 aa, Artificial Sequence
  Cyclic GFR-binding peptide
VPQDLRPVQIRKIVGRTPKVKKATVMVV

SEQ ID NO: 114299 - protein, 35 aa, Artificial Sequence; identical to SEQ ID NO: 23450
  Cyclic GFR-binding peptide
  MOD_RES (32)..(34): Xaa is C or S

SEQ ID NO: 114300 - protein, 29 aa, Artificial Sequence
  Cyclic GFR-binding peptide
RVHHRPVQVRKIEYVRKKPKLKKATVRLE

SEQ ID NO: 114301 - protein, 31 aa, Artificial Sequence; identical to SEQ ID NO: 73641
  Cyclic GFR-binding peptide
  MOD_RES (4)..(5): Xaa is C or S

SEQ ID NO: 114302 - protein, 38 aa, Artificial Sequence; identical to SEQ ID NO: 70442
  Cyclic GFR-binding peptide
  MOD_RES (6)..(7)..(38): Xaa is C or S

SEQ ID NO: 114303 - protein, 33 aa, Artificial Sequence; identical to SEQ ID NO: 72026
  Cyclic GFR-binding peptide
  MOD_RES (30)..(32): Xaa is C or S

SEQ ID NO: 114304 - protein, 24 aa, Artificial Sequence
  Cyclic GFR-binding peptide
RPVQVRKIEYVRKKPKLKKATVRL

SEQ ID NO: 114305 - protein, 26 aa, Artificial Sequence
  Cyclic GFR-binding peptide
PTEERPVQMRKIRIKPHQGQHKKATV

SEQ ID NO: 114306 - protein, 34 aa, Artificial Sequence; identical to SEQ ID NO: 72027
  Cyclic GFR-binding peptide
  MOD_RES (1)..(2)..(33): Xaa is C or S

SEQ ID NO: 114307 - protein, 33 aa, Artificial Sequence; identical to SEQ ID NO: 23456
  Cyclic GFR-binding peptide
  MOD_RES (31)..(33): Xaa is C or S

SEQ ID NO: 114308 - protein, 29 aa, Artificial Sequence
  Cyclic GFR-binding peptide
QRSVKMAKVRIKPHQGQHKEVQVLEEHSQ

SEQ ID NO: 114309 - protein, 27 aa, Artificial Sequence
  Cyclic GFR-binding peptide
QLRSVKVAKVEIVRKKPIFKEVQVTLE

SEQ ID NO: 114310 - protein, 35 aa, Artificial Sequence; identical to SEQ ID NO: 68747
  Cyclic GFR-binding peptide
  MOD_RES (3)..(4)..(35): Xaa is C or S

SEQ ID NO: 114311 - protein, 30 aa, Artificial Sequence; identical to SEQ ID NO: 68751
  Cyclic GFR-binding peptide
  MOD_RES (1)..(2): Xaa is C or S

SEQ ID NO: 114312 - protein, 35 aa, Artificial Sequence; identical to SEQ ID NO: 23462
  Cyclic GFR-binding peptide
  MOD_RES (4)..(4): Xaa is C or S

SEQ ID NO: 114313 - protein, 39 aa, Artificial Sequence; identical to SEQ ID NO: 68755
  Cyclic GFR-binding peptide
  MOD_RES (5)..(6)..(37)..(39): Xaa is C or S

SEQ ID NO: 114314 - protein, 36 aa, Artificial Sequence; identical to SEQ ID NO: 70451
  Cyclic GFR-binding peptide
  MOD_RES (3)..(4)..(35): Xaa is C or S

SEQ ID NO: 114315 - protein, 33 aa, Artificial Sequence; identical to SEQ ID NO: 68757
  Cyclic GFR-binding peptide
  MOD_RES (5)..(6): Xaa is C or S

SEQ ID NO: 114316 - protein, 38 aa, Artificial Sequence; identical to SEQ ID NO: 23463
  Cyclic GFR-binding peptide
  MOD_RES (5)..(5): Xaa is C or S

SEQ ID NO: 114317 - protein, 31 aa, Artificial Sequence; identical to SEQ ID NO: 23465
  Cyclic GFR-binding peptide

SEQ ID NO: 114318 - protein, 31 aa, Artificial Sequence; identical to SEQ ID NO: 23466
  Cyclic GFR-binding peptide
  MOD_RES (31)..(31): Xaa is C or S

SEQ ID NO: 114319 - protein, 29 aa, Artificial Sequence
  Cyclic GFR-binding peptide
TQVQLRSVKVAKVEIVRKKPIFKEVQVTL

SEQ ID NO: 114320 - protein, 31 aa, Artificial Sequence; identical to SEQ ID NO: 23471
  Cyclic GFR-binding peptide
  MOD_RES (30)..(30): Xaa is C or S

SEQ ID NO: 114321 - protein, 35 aa, Artificial Sequence; identical to SEQ ID NO: 23472
  Cyclic GFR-binding peptide
  MOD_RES (6)..(6): Xaa is C or S

SEQ ID NO: 114322 - protein, 38 aa, Artificial Sequence; identical to SEQ ID NO: 23475
  Cyclic GFR-binding peptide
  MOD_RES (4)..(38): Xaa is C or S

SEQ ID NO: 114323 - protein, 28 aa, Artificial Sequence
  Cyclic GFR-binding peptide
  MOD_RES (28)..(28): Xaa is C or S
DLRPVQIRKIVGRTPKVKKATVMVVKSX

SEQ ID NO: 114324 - protein, 37 aa, Artificial Sequence; identical to SEQ ID NO: 23477
  Cyclic GFR-binding peptide
  MOD_RES (3)..(3): Xaa is C or S

SEQ ID NO: 114325 - protein, 28 aa, Artificial Sequence
  Cyclic GFR-binding peptide
QALRPVQIRKIVGRKPKVKKATVMIVRS

SEQ ID NO: 114326 - protein, 33 aa, Artificial Sequence; identical to SEQ ID NO: 23479
  Cyclic GFR-binding peptide
  MOD_RES (3)..(3): Xaa is C or S

SEQ ID NO: 114327 - protein, 32 aa, Artificial Sequence; identical to SEQ ID NO: 73660
  Cyclic GFR-binding peptide
  MOD_RES (2)..(3): Xaa is C or S

SEQ ID NO: 114328 - protein, 24 aa, Artificial Sequence
  Cyclic GFR-binding peptide
LRSVKVAKVEIVRKKPIFKEVQVT

SEQ ID NO: 114329 - protein, 30 aa, Artificial Sequence; identical to SEQ ID NO: 23487
  Cyclic GFR-binding peptide
  MOD_RES (30)..(30): Xaa is C or S

SEQ ID NO: 114330 - protein, 39 aa, Artificial Sequence; identical to SEQ ID NO: 23488
  Cyclic GFR-binding peptide
  MOD_RES (4)..(38): Xaa is C or S

SEQ ID NO: 114331 - protein, 35 aa, Artificial Sequence; identical to SEQ ID NO: 68770
  Cyclic GFR-binding peptide
  MOD_RES (4)..(5): Xaa is C or S

SEQ ID NO: 114332 - protein, 32 aa, Artificial Sequence; identical to SEQ ID NO: 72052
  Cyclic GFR-binding peptide
  MOD_RES (1)..(2): Xaa is C or S

SEQ ID NO: 114333 - protein, 30 aa, Artificial Sequence; identical to SEQ ID NO: 23494
  Cyclic GFR-binding peptide

SEQ ID NO: 114334 - protein, 32 aa, Artificial Sequence; identical to SEQ ID NO: 73669
  Cyclic GFR-binding peptide
  MOD_RES (1)..(2): Xaa is C or S

SEQ ID NO: 114335 - protein, 43 aa, Artificial Sequence; identical to SEQ ID NO: 23495
  Cyclic GFR-binding peptide
  MOD_RES (5)..(42): Xaa is C or S

SEQ ID NO: 114336 - protein, 39 aa, Artificial Sequence; identical to SEQ ID NO: 23497
  Cyclic GFR-binding peptide
  MOD_RES (5)..(39): Xaa is C or S

SEQ ID NO: 114337 - protein, 36 aa, Artificial Sequence; identical to SEQ ID NO: 72058
  Cyclic GFR-binding peptide
  MOD_RES (6)..(7): Xaa is C or S

SEQ ID NO: 114338 - protein, 22 aa, Artificial Sequence
  Cyclic GFR-binding peptide
RPVQVRKIEYVRKKPKLKKATV

SEQ ID NO: 114339 - protein, 38 aa, Artificial Sequence; identical to SEQ ID NO: 23500
  Cyclic GFR-binding peptide
  MOD_RES (1)..(38): Xaa is C or S

SEQ ID NO: 114340 - protein, 28 aa, Artificial Sequence
  Cyclic GFR-binding peptide
  MOD_RES (1)..(2): Xaa is C or S
XXVPQDLRPVQIRKIVGRTPKVKKATVM

SEQ ID NO: 114341 - protein, 29 aa, Artificial Sequence
  Cyclic GFR-binding peptide
SRVHHRPVQVRKIEYVRKKPKLKKATVRL

SEQ ID NO: 114342 - protein, 32 aa, Artificial Sequence; identical to SEQ ID NO: 23504
  Cyclic GFR-binding peptide
  MOD_RES (1)..(1): Xaa is C or S

SEQ ID NO: 114343 - protein, 31 aa, Artificial Sequence; identical to SEQ ID NO: 68781
  Cyclic GFR-binding peptide
  MOD_RES (31)..(31): Xaa is C or S

SEQ ID NO: 114344 - protein, 35 aa, Artificial Sequence; identical to SEQ ID NO: 70477
  Cyclic GFR-binding peptide
  MOD_RES (1)..(32)..(34): Xaa is C or S

SEQ ID NO: 114345 - protein, 34 aa, Artificial Sequence; identical to SEQ ID NO: 68785
  Cyclic GFR-binding peptide
  MOD_RES (3)..(4): Xaa is C or S

SEQ ID NO: 114346 - protein, 32 aa, Artificial Sequence; identical to SEQ ID NO: 70481
  Cyclic GFR-binding peptide
  MOD_RES (3)..(4): Xaa is C or S

SEQ ID NO: 114347 - protein, 32 aa, Artificial Sequence; identical to SEQ ID NO: 23509
  Cyclic GFR-binding peptide
  MOD_RES (29)..(31): Xaa is C or S

SEQ ID NO: 114348 - protein, 33 aa, Artificial Sequence; identical to SEQ ID NO: 23511
  Cyclic GFR-binding peptide
  MOD_RES (1)..(1): Xaa is C or S

SEQ ID NO: 114349 - protein, 35 aa, Artificial Sequence; identical to SEQ ID NO: 72066
  Cyclic GFR-binding peptide
  MOD_RES (5)..(6): Xaa is C or S

SEQ ID NO: 114350 - protein, 37 aa, Artificial Sequence; identical to SEQ ID NO: 70485
  Cyclic GFR-binding peptide
  MOD_RES (4)..(5)..(36): Xaa is C or S

SEQ ID NO: 114351 - protein, 41 aa, Artificial Sequence; identical to SEQ ID NO: 23514
  Cyclic GFR-binding peptide
  MOD_RES (6)..(40): Xaa is C or S

SEQ ID NO: 114352 - protein, 35 aa, Artificial Sequence; identical to SEQ ID NO: 73683
  Cyclic GFR-binding peptide
  MOD_RES (5)..(6): Xaa is C or S

SEQ ID NO: 114353 - protein, 32 aa, Artificial Sequence; identical to SEQ ID NO: 23517
  Cyclic GFR-binding peptide

SEQ ID NO: 114354 - protein, 42 aa, Artificial Sequence; identical to SEQ ID NO: 23519
  Cyclic GFR-binding peptide
  MOD_RES (7)..(41): Xaa is C or S

SEQ ID NO: 114355 - protein, 29 aa, Artificial Sequence
  Cyclic GFR-binding peptide
  MOD_RES (3)..(4): Xaa is C or S
SPXXVSQDLRPVQIRKIIGKTPKIKKATV

SEQ ID NO: 114356 - protein, 30 aa, Artificial Sequence; identical to SEQ ID NO: 23520
  Cyclic GFR-binding peptide

SEQ ID NO: 114357 - protein, 27 aa, Artificial Sequence
  Cyclic GFR-binding peptide
QVQLRSVKVAKVEIVRKKPIFKEVQVT

SEQ ID NO: 114358 - protein, 45 aa, Artificial Sequence; identical to SEQ ID NO: 23524
  Cyclic GFR-binding peptide
  MOD_RES (5)..(42)..(44): Xaa is C or S

SEQ ID NO: 114359 - protein, 37 aa, Artificial Sequence; identical to SEQ ID NO: 23525
  Cyclic GFR-binding peptide
  MOD_RES (7)..(7): Xaa is C or S

SEQ ID NO: 114360 - protein, 36 aa, Artificial Sequence; identical to SEQ ID NO: 23526
  Cyclic GFR-binding peptide
  MOD_RES (34)..(36): Xaa is C or S

SEQ ID NO: 114361 - protein, 30 aa, Artificial Sequence; identical to SEQ ID NO: 23529
  Cyclic GFR-binding peptide

SEQ ID NO: 114362 - protein, 34 aa, Artificial Sequence; identical to SEQ ID NO: 23530
  Cyclic GFR-binding peptide
  MOD_RES (32)..(34): Xaa is C or S

SEQ ID NO: 114363 - protein, 29 aa, Artificial Sequence
  Cyclic GFR-binding peptide
ERPVQMRKIRIKPHQGQHKKATVFLQHNK

SEQ ID NO: 114364 - protein, 24 aa, Artificial Sequence
  Cyclic GFR-binding peptide
ERSVKMAKVRIKPHQGQHKEVQVF

SEQ ID NO: 114365 - protein, 33 aa, Artificial Sequence; identical to SEQ ID NO: 68801
  Cyclic GFR-binding peptide
  MOD_RES (5)..(6): Xaa is C or S

SEQ ID NO: 114366 - protein, 35 aa, Artificial Sequence; identical to SEQ ID NO: 68804
  Cyclic GFR-binding peptide
  MOD_RES (2)..(3)..(34): Xaa is C or S

SEQ ID NO: 114367 - protein, 30 aa, Artificial Sequence; identical to SEQ ID NO: 23535
  Cyclic GFR-binding peptide
  MOD_RES (30)..(30): Xaa is C or S

SEQ ID NO: 114368 - protein, 33 aa, Artificial Sequence; identical to SEQ ID NO: 23537
  Cyclic GFR-binding peptide
  MOD_RES (31)..(33): Xaa is C or S

SEQ ID NO: 114369 - protein, 35 aa, Artificial Sequence; identical to SEQ ID NO: 72080
  Cyclic GFR-binding peptide
  MOD_RES (2)..(3)..(34): Xaa is C or S

SEQ ID NO: 114370 - protein, 29 aa, Artificial Sequence
  Cyclic GFR-binding peptide
  MOD_RES (27)..(29): Xaa is C or S
LRPVQIRKIIGKTPKIKKATVMIVKSXKX

SEQ ID NO: 114371 - protein, 22 aa, Artificial Sequence
  Cyclic GFR-binding peptide
LRPVQIRKIVGRKPKVKKATVM

SEQ ID NO: 114372 - protein, 41 aa, Artificial Sequence; identical to SEQ ID NO: 23539
  Cyclic GFR-binding peptide
  MOD_RES (3)..(40): Xaa is C or S

SEQ ID NO: 114373 - protein, 30 aa, Artificial Sequence; identical to SEQ ID NO: 68808
  Cyclic GFR-binding peptide

SEQ ID NO: 114374 - protein, 24 aa, Artificial Sequence
  Cyclic GFR-binding peptide
ALRPVQIRKIVGRKPKVKKATVMI

SEQ ID NO: 114375 - protein, 28 aa, Artificial Sequence
  Cyclic GFR-binding peptide
  MOD_RES (27)..(27): Xaa is C or S
LRSVKIAKVIGKTPKIKEVQVMIVKSXK

SEQ ID NO: 114376 - protein, 39 aa, Artificial Sequence; identical to SEQ ID NO: 70515
  Cyclic GFR-binding peptide
  MOD_RES (5)..(6)..(37)..(39): Xaa is C or S

SEQ ID NO: 114377 - protein, 40 aa, Artificial Sequence; identical to SEQ ID NO: 23542
  Cyclic GFR-binding peptide
  MOD_RES (5)..(39): Xaa is C or S

SEQ ID NO: 114378 - protein, 32 aa, Artificial Sequence; identical to SEQ ID NO: 70516
  Cyclic GFR-binding peptide
  MOD_RES (30)..(32): Xaa is C or S

SEQ ID NO: 114379 - protein, 33 aa, Artificial Sequence; identical to SEQ ID NO: 72086
  Cyclic GFR-binding peptide
  MOD_RES (5)..(6): Xaa is C or S

SEQ ID NO: 114380 - protein, 32 aa, Artificial Sequence; identical to SEQ ID NO: 70518
  Cyclic GFR-binding peptide
  MOD_RES (4)..(5): Xaa is C or S

SEQ ID NO: 114381 - protein, 31 aa, Artificial Sequence; identical to SEQ ID NO: 72089
  Cyclic GFR-binding peptide
  MOD_RES (1)..(2): Xaa is C or S

SEQ ID NO: 114382 - protein, 23 aa, Artificial Sequence
  Cyclic GFR-binding peptide
ERPVQMRKIRIKPHQGQHKKATV

SEQ ID NO: 114383 - protein, 24 aa, Artificial Sequence
  Cyclic GFR-binding peptide
RSVKIAKVVGRKPKVKEVQVMIVR

SEQ ID NO: 114384 - protein, 31 aa, Artificial Sequence; identical to SEQ ID NO: 23548
  Cyclic GFR-binding peptide

SEQ ID NO: 114385 - protein, 24 aa, Artificial Sequence
  Cyclic GFR-binding peptide
QDLRSVKIAKVVGRTPKVKEVQVM

SEQ ID NO: 114386 - protein, 39 aa, Artificial Sequence; identical to SEQ ID NO: 23550
  Cyclic GFR-binding peptide
  MOD_RES (4)..(4): Xaa is C or S

SEQ ID NO: 114387 - protein, 28 aa, Artificial Sequence
  Cyclic GFR-binding peptide
VPTEERPVQMRKIRIKPHQGQHKKATVF

SEQ ID NO: 114388 - protein, 39 aa, Artificial Sequence; identical to SEQ ID NO: 23552
  Cyclic GFR-binding peptide
  MOD_RES (5)..(39): Xaa is C or S

SEQ ID NO: 114389 - protein, 37 aa, Artificial Sequence; identical to SEQ ID NO: 23554
  Cyclic GFR-binding peptide
  MOD_RES (2)..(36): Xaa is C or S

SEQ ID NO: 114390 - protein, 35 aa, Artificial Sequence; identical to SEQ ID NO: 70538
  Cyclic GFR-binding peptide
  MOD_RES (6)..(7): Xaa is C or S

SEQ ID NO: 114391 - protein, 36 aa, Artificial Sequence; identical to SEQ ID NO: 23555
  Cyclic GFR-binding peptide
  MOD_RES (4)..(4): Xaa is C or S

SEQ ID NO: 114392 - protein, 30 aa, Artificial Sequence; identical to SEQ ID NO: 23556
  Cyclic GFR-binding peptide

SEQ ID NO: 114393 - protein, 40 aa, Artificial Sequence; identical to SEQ ID NO: 70542
  Cyclic GFR-binding peptide
  MOD_RES (5)..(6)..(37)..(39): Xaa is C or S

SEQ ID NO: 114394 - protein, 27 aa, Artificial Sequence
  Cyclic GFR-binding peptide
  MOD_RES (27)..(27): Xaa is C or S
LRPVQIRKIIGKTPKIKKATVMIVKSX

SEQ ID NO: 114395 - protein, 40 aa, Artificial Sequence; identical to SEQ ID NO: 23564
  Cyclic GFR-binding peptide
  MOD_RES (4)..(4): Xaa is C or S

SEQ ID NO: 114396 - protein, 35 aa, Artificial Sequence; identical to SEQ ID NO: 23565
  Cyclic GFR-binding peptide
  MOD_RES (3)..(3): Xaa is C or S

SEQ ID NO: 114397 - protein, 25 aa, Artificial Sequence
  Cyclic GFR-binding peptide
TEERSVKMAKVRIKPHQGQHKEVQV

SEQ ID NO: 114398 - protein, 33 aa, Artificial Sequence; identical to SEQ ID NO: 70548
  Cyclic GFR-binding peptide
  MOD_RES (31)..(33): Xaa is C or S

SEQ ID NO: 114399 - protein, 34 aa, Artificial Sequence; identical to SEQ ID NO: 68840
  Cyclic GFR-binding peptide
  MOD_RES (2)..(3)..(34): Xaa is C or S

SEQ ID NO: 114400 - protein, 26 aa, Artificial Sequence
  Cyclic GFR-binding peptide
VPQDLRSVKIAKVVGRTPKVKEVQVM

SEQ ID NO: 114401 - protein, 31 aa, Artificial Sequence; identical to SEQ ID NO: 23575
  Cyclic GFR-binding peptide

SEQ ID NO: 114402 - protein, 29 aa, Artificial Sequence
  Cyclic GFR-binding peptide
  MOD_RES (1)..(1): Xaa is C or S
XVPQALRSVKIAKVVGRKPKVKEVQVMIV

SEQ ID NO: 114403 - protein, 37 aa, Artificial Sequence; identical to SEQ ID NO: 23577
  Cyclic GFR-binding peptide
  MOD_RES (6)..(6): Xaa is C or S

SEQ ID NO: 114404 - protein, 34 aa, Artificial Sequence; identical to SEQ ID NO: 73741
  Cyclic GFR-binding peptide
  MOD_RES (6)..(7): Xaa is C or S

SEQ ID NO: 114405 - protein, 29 aa, Artificial Sequence
  Cyclic GFR-binding peptide
  MOD_RES (1)..(2): Xaa is C or S
XXVPQDLRPVQIRKIVGRTPKVKKATVMV

SEQ ID NO: 114406 - protein, 27 aa, Artificial Sequence
  Cyclic GFR-binding peptide
VSQDLRSVKIAKVIGKTPKIKEVQVMI

SEQ ID NO: 114407 - protein, 42 aa, Artificial Sequence; identical to SEQ ID NO: 23580
  Cyclic GFR-binding peptide
  MOD_RES (5)..(39)..(41): Xaa is C or S

SEQ ID NO: 114408 - protein, 29 aa, Artificial Sequence
  Cyclic GFR-binding peptide
  MOD_RES (3)..(4): Xaa is C or S
SPXXVPQDLRPVQIRKIVGRTPKVKKATV

SEQ ID NO: 114409 - protein, 33 aa, Artificial Sequence; identical to SEQ ID NO: 70557
  Cyclic GFR-binding peptide
  MOD_RES (30)..(32): Xaa is C or S

SEQ ID NO: 114410 - protein, 26 aa, Artificial Sequence
  Cyclic GFR-binding peptide
SQDLRSVKIAKVIGKTPKIKEVQVMI

SEQ ID NO: 114411 - protein, 41 aa, Artificial Sequence; identical to SEQ ID NO: 23584
  Cyclic GFR-binding peptide
  MOD_RES (4)..(38)..(40): Xaa is C or S

SEQ ID NO: 114412 - protein, 35 aa, Artificial Sequence; identical to SEQ ID NO: 23586
  Cyclic GFR-binding peptide
  MOD_RES (34)..(34): Xaa is C or S

SEQ ID NO: 114413 - protein, 38 aa, Artificial Sequence; identical to SEQ ID NO: 23587
  Cyclic GFR-binding peptide
  MOD_RES (6)..(6): Xaa is C or S

SEQ ID NO: 114414 - protein, 34 aa, Artificial Sequence; identical to SEQ ID NO: 72121
  Cyclic GFR-binding peptide
  MOD_RES (4)..(5): Xaa is C or S

SEQ ID NO: 114415 - protein, 28 aa, Artificial Sequence
  Cyclic GFR-binding peptide
  MOD_RES (1)..(2): Xaa is C or S
XXVSQDLRSVKIAKVIGKTPKIKEVQVM

SEQ ID NO: 114416 - protein, 24 aa, Artificial Sequence
  Cyclic GFR-binding peptide
QRSVKMAKVRIKPHQGQHKEVQVL

SEQ ID NO: 114417 - protein, 35 aa, Artificial Sequence; identical to SEQ ID NO: 23591
  Cyclic GFR-binding peptide
  MOD_RES (5)..(5): Xaa is C or S

SEQ ID NO: 114418 - protein, 39 aa, Artificial Sequence; identical to SEQ ID NO: 23593
  Cyclic GFR-binding peptide
  MOD_RES (4)..(4): Xaa is C or S

SEQ ID NO: 114419 - protein, 25 aa, Artificial Sequence
  Cyclic GFR-binding peptide
PQDLRPVQIRKIVGRTPKVKKATVM

SEQ ID NO: 114420 - protein, 41 aa, Artificial Sequence; identical to SEQ ID NO: 73759
  Cyclic GFR-binding peptide
  MOD_RES (6)..(7)..(38)..(40): Xaa is C or S

SEQ ID NO: 114421 - protein, 31 aa, Artificial Sequence; identical to SEQ ID NO: 73760
  Cyclic GFR-binding peptide
  MOD_RES (28)..(30): Xaa is C or S

SEQ ID NO: 114422 - protein, 34 aa, Artificial Sequence; identical to SEQ ID NO: 68868
  Cyclic GFR-binding peptide
  MOD_RES (4)..(5): Xaa is C or S

SEQ ID NO: 114423 - protein, 42 aa, Artificial Sequence; identical to SEQ ID NO: 23594
  Cyclic GFR-binding peptide
  MOD_RES (5)..(39)..(41): Xaa is C or S

SEQ ID NO: 114424 - protein, 29 aa, Artificial Sequence
  Cyclic GFR-binding peptide
SQDLRSVKIAKVIGKTPKIKEVQVMIVKS

SEQ ID NO: 114425 - protein, 43 aa, Artificial Sequence; identical to SEQ ID NO: 23597
  Cyclic GFR-binding peptide
  MOD_RES (7)..(41)..(43): Xaa is C or S

SEQ ID NO: 114426 - protein, 31 aa, Artificial Sequence; identical to SEQ ID NO: 23600
  Cyclic GFR-binding peptide
  MOD_RES (1)..(1): Xaa is C or S

SEQ ID NO: 114427 - protein, 34 aa, Artificial Sequence; identical to SEQ ID NO: 23601
  Cyclic GFR-binding peptide

SEQ ID NO: 114428 - protein, 33 aa, Artificial Sequence; identical to SEQ ID NO: 68874
  Cyclic GFR-binding peptide
  MOD_RES (1)..(2)..(33): Xaa is C or S

SEQ ID NO: 114429 - protein, 35 aa, Artificial Sequence; identical to SEQ ID NO: 70574
  Cyclic GFR-binding peptide
  MOD_RES (5)..(6): Xaa is C or S

SEQ ID NO: 114430 - protein, 27 aa, Artificial Sequence
  Cyclic GFR-binding peptide
DLRSVKIAKVIGKTPKIKEVQVMIVKS

SEQ ID NO: 114431 - protein, 32 aa, Artificial Sequence; identical to SEQ ID NO: 23603
  Cyclic GFR-binding peptide
  MOD_RES (3)..(3): Xaa is C or S

SEQ ID NO: 114432 - protein, 29 aa, Artificial Sequence
  Cyclic GFR-binding peptide
PQDLRSVKIAKVVGRTPKVKEVQVMVVKS

SEQ ID NO: 114433 - protein, 29 aa, Artificial Sequence
  Cyclic GFR-binding peptide
PQALRPVQIRKIVGRKPKVKKATVMIVRS

SEQ ID NO: 114434 - protein, 28 aa, Artificial Sequence
  Cyclic GFR-binding peptide
  MOD_RES (1)..(1): Xaa is C or S
XVSQDLRPVQIRKIIGKTPKIKKATVMI

SEQ ID NO: 114435 - protein, 26 aa, Artificial Sequence
  Cyclic GFR-binding peptide
LRSVKIAKVVGRTPKVKEVQVMVVKS

SEQ ID NO: 114436 - protein, 37 aa, Artificial Sequence; identical to SEQ ID NO: 23605
  Cyclic GFR-binding peptide
  MOD_RES (7)..(7): Xaa is C or S

SEQ ID NO: 114437 - protein, 31 aa, Artificial Sequence; identical to SEQ ID NO: 72132
  Cyclic GFR-binding peptide
  MOD_RES (28)..(30): Xaa is C or S

SEQ ID NO: 114438 - protein, 22 aa, Artificial Sequence
  Cyclic GFR-binding peptide
RPVQIRKIVGRKPKVKKATVMI

SEQ ID NO: 114439 - protein, 34 aa, Artificial Sequence; identical to SEQ ID NO: 23607
  Cyclic GFR-binding peptide
  MOD_RES (5)..(5): Xaa is C or S

SEQ ID NO: 114440 - protein, 25 aa, Artificial Sequence
  Cyclic GFR-binding peptide
LRSVKIAKVVGRKPKVKEVQVMIVR

SEQ ID NO: 114441 - protein, 27 aa, Artificial Sequence
  Cyclic GFR-binding peptide
  MOD_RES (1)..(2): Xaa is C or S
XXVPQDLRSVKIAKVVGRTPKVKEVQV

SEQ ID NO: 114442 - protein, 33 aa, Artificial Sequence; identical to SEQ ID NO: 23608
  Cyclic GFR-binding peptide

SEQ ID NO: 114443 - protein, 26 aa, Artificial Sequence
  Cyclic GFR-binding peptide
ERPVQMRKIRIKPHQGQHKKATVFLQ

SEQ ID NO: 114444 - protein, 32 aa, Artificial Sequence; identical to SEQ ID NO: 68880
  Cyclic GFR-binding peptide
  MOD_RES (3)..(4): Xaa is C or S

SEQ ID NO: 114445 - protein, 33 aa, Artificial Sequence; identical to SEQ ID NO: 73779
  Cyclic GFR-binding peptide
  MOD_RES (3)..(4): Xaa is C or S

SEQ ID NO: 114446 - protein, 30 aa, Artificial Sequence; identical to SEQ ID NO: 23612
  Cyclic GFR-binding peptide

SEQ ID NO: 114447 - protein, 27 aa, Artificial Sequence
  Cyclic GFR-binding peptide
ERSVKMAKVRIKPHQGQHKEVQVFLQH

SEQ ID NO: 114448 - protein, 29 aa, Artificial Sequence
  Cyclic GFR-binding peptide
GQRPVQMRKIRIKPHQGQHKKATVLEEHS

SEQ ID NO: 114449 - protein, 35 aa, Artificial Sequence; identical to SEQ ID NO: 23617
  Cyclic GFR-binding peptide
  MOD_RES (2)..(2): Xaa is C or S

SEQ ID NO: 114450 - protein, 26 aa, Artificial Sequence
  Cyclic GFR-binding peptide
TGQRSVKMAKVRIKPHQGQHKEVQVL

SEQ ID NO: 114451 - protein, 24 aa, Artificial Sequence
  Cyclic GFR-binding peptide
QDLRPVQIRKIIGKTPKIKKATVM

SEQ ID NO: 114452 - protein, 37 aa, Artificial Sequence; identical to SEQ ID NO: 70592
  Cyclic GFR-binding peptide
  MOD_RES (6)..(7): Xaa is C or S

SEQ ID NO: 114453 - protein, 35 aa, Artificial Sequence; identical to SEQ ID NO: 23620
  Cyclic GFR-binding peptide
  MOD_RES (4)..(4): Xaa is C or S

SEQ ID NO: 114454 - protein, 36 aa, Artificial Sequence; identical to SEQ ID NO: 23622
  Cyclic GFR-binding peptide
  MOD_RES (33)..(35): Xaa is C or S

SEQ ID NO: 114455 - protein, 36 aa, Artificial Sequence; identical to SEQ ID NO: 23623
  Cyclic GFR-binding peptide
  MOD_RES (2)..(36): Xaa is C or S

SEQ ID NO: 114456 - protein, 42 aa, Artificial Sequence; identical to SEQ ID NO: 23624
  Cyclic GFR-binding peptide
  MOD_RES (6)..(40)..(42): Xaa is C or S

SEQ ID NO: 114457 - protein, 38 aa, Artificial Sequence; identical to SEQ ID NO: 23625
  Cyclic GFR-binding peptide
  MOD_RES (3)..(37): Xaa is C or S

SEQ ID NO: 114458 - protein, 37 aa, Artificial Sequence; identical to SEQ ID NO: 23626
  Cyclic GFR-binding peptide
  MOD_RES (5)..(5): Xaa is C or S

SEQ ID NO: 114459 - protein, 22 aa, Artificial Sequence
  Cyclic GFR-binding peptide
DLRPVQIRKIIGKTPKIKKATV

SEQ ID NO: 114460 - protein, 32 aa, Artificial Sequence; identical to SEQ ID NO: 70597
  Cyclic GFR-binding peptide
  MOD_RES (4)..(5): Xaa is C or S

SEQ ID NO: 114461 - protein, 38 aa, Artificial Sequence; identical to SEQ ID NO: 73789
  Cyclic GFR-binding peptide
  MOD_RES (3)..(4)..(35)..(37): Xaa is C or S

SEQ ID NO: 114462 - protein, 37 aa, Artificial Sequence; identical to SEQ ID NO: 70598
  Cyclic GFR-binding peptide
  MOD_RES (6)..(7): Xaa is C or S

SEQ ID NO: 114463 - protein, 30 aa, Artificial Sequence; identical to SEQ ID NO: 23627
  Cyclic GFR-binding peptide
  MOD_RES (2)..(2): Xaa is C or S

SEQ ID NO: 114464 - protein, 33 aa, Artificial Sequence; identical to SEQ ID NO: 23628
  Cyclic GFR-binding peptide
  MOD_RES (31)..(33): Xaa is C or S

SEQ ID NO: 114465 - protein, 25 aa, Artificial Sequence
  Cyclic GFR-binding peptide
EERPVQMRKIRIKPHQGQHKKATVF

SEQ ID NO: 114466 - protein, 28 aa, Artificial Sequence
  Cyclic GFR-binding peptide
  MOD_RES (27)..(27): Xaa is C or S
LRSVKIAKVVGRKPKVKEVQVMIVRSXK

SEQ ID NO: 114467 - protein, 29 aa, Artificial Sequence
  Cyclic GFR-binding peptide
TGQRPVQMRKIRIKPHQGQHKKATVLEEH

SEQ ID NO: 114468 - protein, 35 aa, Artificial Sequence; identical to SEQ ID NO: 23631
  Cyclic GFR-binding peptide
  MOD_RES (3)..(3): Xaa is C or S

SEQ ID NO: 114469 - protein, 29 aa, Artificial Sequence
  Cyclic GFR-binding peptide
  MOD_RES (29)..(29): Xaa is C or S
QDLRPVQIRKIIGKTPKIKKATVMIVKSX

SEQ ID NO: 114470 - protein, 28 aa, Artificial Sequence
  Cyclic GFR-binding peptide
LRSVKVAKVEIVRKKPIFKEVQVTLEDH

SEQ ID NO: 114471 - protein, 31 aa, Artificial Sequence; identical to SEQ ID NO: 73794
  Cyclic GFR-binding peptide
  MOD_RES (29)..(31): Xaa is C or S

SEQ ID NO: 114472 - protein, 21 aa, Artificial Sequence
  Cyclic GFR-binding peptide
RPVQIRKIIGKTPKIKKATVM

SEQ ID NO: 114473 - protein, 38 aa, Artificial Sequence; identical to SEQ ID NO: 23635
  Cyclic GFR-binding peptide
  MOD_RES (7)..(7): Xaa is C or S

SEQ ID NO: 114474 - protein, 24 aa, Artificial Sequence
  Cyclic GFR-binding peptide
LRSVKIAKVIGKTPKIKEVQVMIV

SEQ ID NO: 114475 - protein, 30 aa, Artificial Sequence; identical to SEQ ID NO: 68915
  Cyclic GFR-binding peptide
  MOD_RES (2)..(3): Xaa is C or S

SEQ ID NO: 114476 - protein, 23 aa, Artificial Sequence
  Cyclic GFR-binding peptide
RSVKIAKVVGRTPKVKEVQVMVV

SEQ ID NO: 114477 - protein, 27 aa, Artificial Sequence
  Cyclic GFR-binding peptide
VQLRSVKVAKVEIVRKKPIFKEVQVTL

SEQ ID NO: 114478 - protein, 29 aa, Artificial Sequence
  Cyclic GFR-binding peptide
  MOD_RES (26)..(28): Xaa is C or S
RPVQIRKIIGKTPKIKKATVMIVKSXKXS

SEQ ID NO: 114479 - protein, 29 aa, Artificial Sequence
  Cyclic GFR-binding peptide
  MOD_RES (29)..(29): Xaa is C or S
RSVKMAKVRIKPHQGQHKEVQVLEEHSQX

SEQ ID NO: 114480 - protein, 33 aa, Artificial Sequence; identical to SEQ ID NO: 23642
  Cyclic GFR-binding peptide
  MOD_RES (32)..(32): Xaa is C or S

SEQ ID NO: 114481 - protein, 40 aa, Artificial Sequence; identical to SEQ ID NO: 23644
  Cyclic GFR-binding peptide
  MOD_RES (37)..(39): Xaa is C or S

SEQ ID NO: 114482 - protein, 33 aa, Artificial Sequence; identical to SEQ ID NO: 23646
  Cyclic GFR-binding peptide
  MOD_RES (4)..(4): Xaa is C or S

SEQ ID NO: 114483 - protein, 31 aa, Artificial Sequence; identical to SEQ ID NO: 23648
  Cyclic GFR-binding peptide
  MOD_RES (29)..(31): Xaa is C or S

SEQ ID NO: 114484 - protein, 35 aa, Artificial Sequence; identical to SEQ ID NO: 23649
  Cyclic GFR-binding peptide
  MOD_RES (34)..(34): Xaa is C or S

SEQ ID NO: 114485 - protein, 34 aa, Artificial Sequence; identical to SEQ ID NO: 72171
  Cyclic GFR-binding peptide
  MOD_RES (3)..(4): Xaa is C or S

SEQ ID NO: 114486 - protein, 36 aa, Artificial Sequence; identical to SEQ ID NO: 23654
  Cyclic GFR-binding peptide
  MOD_RES (5)..(5): Xaa is C or S

SEQ ID NO: 114487 - protein, 35 aa, Artificial Sequence; identical to SEQ ID NO: 72173
  Cyclic GFR-binding peptide
  MOD_RES (6)..(7): Xaa is C or S

SEQ ID NO: 114488 - protein, 32 aa, Artificial Sequence; identical to SEQ ID NO: 23659
  Cyclic GFR-binding peptide
  MOD_RES (2)..(2): Xaa is C or S

SEQ ID NO: 114489 - protein, 27 aa, Artificial Sequence
  Cyclic GFR-binding peptide
RSVKMAKVRIKPHQGQHKEVQVFLQHN

SEQ ID NO: 114490 - protein, 29 aa, Artificial Sequence
  Cyclic GFR-binding peptide
TEERPVQMRKIRIKPHQGQHKKATVFLQH

SEQ ID NO: 114491 - protein, 36 aa, Artificial Sequence; identical to SEQ ID NO: 70626
  Cyclic GFR-binding peptide
  MOD_RES (5)..(6): Xaa is C or S

SEQ ID NO: 114492 - protein, 28 aa, Artificial Sequence
  Cyclic GFR-binding peptide
VPTEERSVKMAKVRIKPHQGQHKEVQVF

SEQ ID NO: 114493 - protein, 36 aa, Artificial Sequence; identical to SEQ ID NO: 73820
  Cyclic GFR-binding peptide
  MOD_RES (1)..(2)..(33)..(35): Xaa is C or S

SEQ ID NO: 114494 - protein, 39 aa, Artificial Sequence; identical to SEQ ID NO: 23670
  Cyclic GFR-binding peptide
  MOD_RES (37)..(39): Xaa is C or S

SEQ ID NO: 114495 - protein, 36 aa, Artificial Sequence; identical to SEQ ID NO: 68934
  Cyclic GFR-binding peptide
  MOD_RES (4)..(5)..(36): Xaa is C or S

SEQ ID NO: 114496 - protein, 39 aa, Artificial Sequence; identical to SEQ ID NO: 73823
  Cyclic GFR-binding peptide
  MOD_RES (5)..(6)..(37)..(39): Xaa is C or S

SEQ ID NO: 114497 - protein, 33 aa, Artificial Sequence; identical to SEQ ID NO: 23673
  Cyclic GFR-binding peptide
  MOD_RES (32)..(32): Xaa is C or S

SEQ ID NO: 114498 - protein, 33 aa, Artificial Sequence; identical to SEQ ID NO: 70632
  Cyclic GFR-binding peptide
  MOD_RES (1)..(32): Xaa is C or S

SEQ ID NO: 114499 - protein, 28 aa, Artificial Sequence
  Cyclic GFR-binding peptide
PTEERSVKMAKVRIKPHQGQHKEVQVFL

SEQ ID NO: 114500 - protein, 36 aa, Artificial Sequence; identical to SEQ ID NO: 73825
  Cyclic GFR-binding peptide
  MOD_RES (6)..(7): Xaa is C or S

SEQ ID NO: 114501 - protein, 27 aa, Artificial Sequence
  Cyclic GFR-binding peptide
  MOD_RES (27)..(27): Xaa is C or S
LRSVKIAKVVGRTPKVKEVQVMVVKSX

SEQ ID NO: 114502 - protein, 29 aa, Artificial Sequence
  Cyclic GFR-binding peptide
  MOD_RES (27)..(29): Xaa is C or S
LRSVKIAKVIGKTPKIKEVQVMIVKSXKX

SEQ ID NO: 114503 - protein, 24 aa, Artificial Sequence
  Cyclic GFR-binding peptide
RPVQMRKIRIKPHQGQHKKATVLE

SEQ ID NO: 114504 - protein, 25 aa, Artificial Sequence
  Cyclic GFR-binding peptide
RSVKIAKVVGRKPKVKEVQVMIVRS

SEQ ID NO: 114505 - protein, 29 aa, Artificial Sequence
  Cyclic GFR-binding peptide
  MOD_RES (3)..(4): Xaa is C or S
SPXXVSQDLRSVKIAKVIGKTPKIKEVQV

SEQ ID NO: 114506 - protein, 34 aa, Artificial Sequence; identical to SEQ ID NO: 70635
  Cyclic GFR-binding peptide
  MOD_RES (2)..(3)..(34): Xaa is C or S

SEQ ID NO: 114507 - protein, 24 aa, Artificial Sequence
  Cyclic GFR-binding peptide
GQRPVQMRKIRIKPHQGQHKKATV

SEQ ID NO: 114508 - protein, 39 aa, Artificial Sequence; identical to SEQ ID NO: 23679
  Cyclic GFR-binding peptide
  MOD_RES (3)..(37)..(39): Xaa is C or S

SEQ ID NO: 114509 - protein, 24 aa, Artificial Sequence
  Cyclic GFR-binding peptide
RSVKVAKVEIVRKKPIFKEVQVTL

SEQ ID NO: 114510 - protein, 21 aa, Artificial Sequence
  Cyclic GFR-binding peptide
LRSVKIAKVVGRKPKVKEVQV

SEQ ID NO: 114511 - protein, 32 aa, Artificial Sequence; identical to SEQ ID NO: 70644
  Cyclic GFR-binding peptide
  MOD_RES (6)..(7): Xaa is C or S

SEQ ID NO: 114512 - protein, 26 aa, Artificial Sequence
  Cyclic GFR-binding peptide
DLRSVKIAKVIGKTPKIKEVQVMIVK

SEQ ID NO: 114513 - protein, 26 aa, Artificial Sequence
  Cyclic GFR-binding peptide
  MOD_RES (26)..(26): Xaa is C or S
RSVKIAKVVGRKPKVKEVQVMIVRSX

SEQ ID NO: 114514 - protein, 39 aa, Artificial Sequence; identical to SEQ ID NO: 72198
  Cyclic GFR-binding peptide
  MOD_RES (4)..(5)..(36)..(38): Xaa is C or S

SEQ ID NO: 114515 - protein, 32 aa, Artificial Sequence; identical to SEQ ID NO: 23685
  Cyclic GFR-binding peptide

SEQ ID NO: 114516 - protein, 30 aa, Artificial Sequence; identical to SEQ ID NO: 23687
  Cyclic GFR-binding peptide
  MOD_RES (3)..(3): Xaa is C or S

SEQ ID NO: 114517 - protein, 25 aa, Artificial Sequence
  Cyclic GFR-binding peptide
RSVKIAKVVGRTPKVKEVQVMVVKS

SEQ ID NO: 114518 - protein, 36 aa, Artificial Sequence; identical to SEQ ID NO: 68954
  Cyclic GFR-binding peptide
  MOD_RES (3)..(4)..(35): Xaa is C or S

SEQ ID NO: 114519 - protein, 35 aa, Artificial Sequence; identical to SEQ ID NO: 23688
  Cyclic GFR-binding peptide
  MOD_RES (35)..(35): Xaa is C or S

SEQ ID NO: 114520 - protein, 30 aa, Artificial Sequence; identical to SEQ ID NO: 68956
  Cyclic GFR-binding peptide
  MOD_RES (1)..(2): Xaa is C or S

SEQ ID NO: 114521 - protein, 30 aa, Artificial Sequence; identical to SEQ ID NO: 23691
  Cyclic GFR-binding peptide

SEQ ID NO: 114522 - protein, 32 aa, Artificial Sequence; identical to SEQ ID NO: 73839
  Cyclic GFR-binding peptide
  MOD_RES (30)..(32): Xaa is C or S

SEQ ID NO: 114523 - protein, 30 aa, Artificial Sequence; identical to SEQ ID NO: 73841
  Cyclic GFR-binding peptide
  MOD_RES (30)..(30): Xaa is C or S

SEQ ID NO: 114524 - protein, 26 aa, Artificial Sequence
  Cyclic GFR-binding peptide
DLRSVKIAKVVGRTPKVKEVQVMVVK

SEQ ID NO: 114525 - protein, 30 aa, Artificial Sequence; identical to SEQ ID NO: 23695
  Cyclic GFR-binding peptide
  MOD_RES (3)..(3): Xaa is C or S

SEQ ID NO: 114526 - protein, 42 aa, Artificial Sequence; identical to SEQ ID NO: 23696
  Cyclic GFR-binding peptide
  MOD_RES (7)..(41): Xaa is C or S

SEQ ID NO: 114527 - protein, 36 aa, Artificial Sequence; identical to SEQ ID NO: 23697
  Cyclic GFR-binding peptide
  MOD_RES (6)..(6): Xaa is C or S

SEQ ID NO: 114528 - protein, 21 aa, Artificial Sequence
  Cyclic GFR-binding peptide
RPVQIRKIVGRTPKVKKATVM

SEQ ID NO: 114529 - protein, 28 aa, Artificial Sequence
  Cyclic GFR-binding peptide
  MOD_RES (1)..(1): Xaa is C or S
XVPTEERSVKMAKVRIKPHQGQHKEVQV

SEQ ID NO: 114530 - protein, 29 aa, Artificial Sequence
  Cyclic GFR-binding peptide
  MOD_RES (26)..(28): Xaa is C or S
RSVKIAKVIGKTPKIKEVQVMIVKSXKXS

SEQ ID NO: 114531 - protein, 29 aa, Artificial Sequence
  Cyclic GFR-binding peptide
RPTQVQLRSVKVAKVEIVRKKPIFKEVQV

SEQ ID NO: 114532 - protein, 30 aa, Artificial Sequence; identical to SEQ ID NO: 68975
  Cyclic GFR-binding peptide
  MOD_RES (2)..(3): Xaa is C or S

SEQ ID NO: 114533 - protein, 36 aa, Artificial Sequence; identical to SEQ ID NO: 23701
  Cyclic GFR-binding peptide
  MOD_RES (2)..(36): Xaa is C or S

SEQ ID NO: 114534 - protein, 31 aa, Artificial Sequence; identical to SEQ ID NO: 23704
  Cyclic GFR-binding peptide
  MOD_RES (29)..(31): Xaa is C or S

SEQ ID NO: 114535 - protein, 32 aa, Artificial Sequence; identical to SEQ ID NO: 68977
  Cyclic GFR-binding peptide
  MOD_RES (2)..(3): Xaa is C or S

SEQ ID NO: 114536 - protein, 39 aa, Artificial Sequence; identical to SEQ ID NO: 23705
  Cyclic GFR-binding peptide
  MOD_RES (4)..(38): Xaa is C or S

SEQ ID NO: 114537 - protein, 33 aa, Artificial Sequence; identical to SEQ ID NO: 72217
  Cyclic GFR-binding peptide
  MOD_RES (3)..(4): Xaa is C or S

SEQ ID NO: 114538 - protein, 31 aa, Artificial Sequence; identical to SEQ ID NO: 23707
  Cyclic GFR-binding peptide
  MOD_RES (31)..(31): Xaa is C or S

SEQ ID NO: 114539 - protein, 37 aa, Artificial Sequence; identical to SEQ ID NO: 23708
  Cyclic GFR-binding peptide
  MOD_RES (5)..(5): Xaa is C or S

SEQ ID NO: 114540 - protein, 34 aa, Artificial Sequence; identical to SEQ ID NO: 73857
  Cyclic GFR-binding peptide
  MOD_RES (1)..(2)..(33): Xaa is C or S

SEQ ID NO: 114541 - protein, 27 aa, Artificial Sequence
  Cyclic GFR-binding peptide
PTEERSVKMAKVRIKPHQGQHKEVQVF

SEQ ID NO: 114542 - protein, 33 aa, Artificial Sequence; identical to SEQ ID NO: 23713
  Cyclic GFR-binding peptide
  MOD_RES (6)..(6): Xaa is C or S

SEQ ID NO: 114543 - protein, 36 aa, Artificial Sequence; identical to SEQ ID NO: 70678
  Cyclic GFR-binding peptide
  MOD_RES (5)..(6): Xaa is C or S

SEQ ID NO: 114544 - protein, 43 aa, Artificial Sequence; identical to SEQ ID NO: 23715
  Cyclic GFR-binding peptide
  MOD_RES (6)..(40)..(42): Xaa is C or S

SEQ ID NO: 114545 - protein, 29 aa, Artificial Sequence
  Cyclic GFR-binding peptide
  MOD_RES (29)..(29): Xaa is C or S
QDLRSVKIAKVVGRTPKVKEVQVMVVKSX

SEQ ID NO: 114546 - protein, 28 aa, Artificial Sequence
  Cyclic GFR-binding peptide
EERPVQMRKIRIKPHQGQHKKATVFLQH

SEQ ID NO: 114547 - protein, 37 aa, Artificial Sequence; identical to SEQ ID NO: 73865
  Cyclic GFR-binding peptide
  MOD_RES (6)..(7): Xaa is C or S

SEQ ID NO: 114548 - protein, 28 aa, Artificial Sequence
  Cyclic GFR-binding peptide
  MOD_RES (27)..(27): Xaa is C or S
LRPVQIRKIVGRKPKVKKATVMIVRSXK

SEQ ID NO: 114549 - protein, 33 aa, Artificial Sequence; identical to SEQ ID NO: 23719
  Cyclic GFR-binding peptide

SEQ ID NO: 114550 - protein, 35 aa, Artificial Sequence; identical to SEQ ID NO: 73869
  Cyclic GFR-binding peptide
  MOD_RES (2)..(3)..(34): Xaa is C or S

SEQ ID NO: 114551 - protein, 32 aa, Artificial Sequence; identical to SEQ ID NO: 72225
  Cyclic GFR-binding peptide
  MOD_RES (2)..(3): Xaa is C or S

SEQ ID NO: 114552 - protein, 36 aa, Artificial Sequence; identical to SEQ ID NO: 23720
  Cyclic GFR-binding peptide
  MOD_RES (35)..(35): Xaa is C or S

SEQ ID NO: 114553 - protein, 32 aa, Artificial Sequence; identical to SEQ ID NO: 72229
  Cyclic GFR-binding peptide
  MOD_RES (3)..(4): Xaa is C or S

SEQ ID NO: 114554 - protein, 30 aa, Artificial Sequence; identical to SEQ ID NO: 23721
  Cyclic GFR-binding peptide
  MOD_RES (1)..(1): Xaa is C or S

SEQ ID NO: 114555 - protein, 30 aa, Artificial Sequence; identical to SEQ ID NO: 23722
  Cyclic GFR-binding peptide
  MOD_RES (2)..(2): Xaa is C or S

SEQ ID NO: 114556 - protein, 27 aa, Artificial Sequence
  Cyclic GFR-binding peptide
  MOD_RES (26)..(26): Xaa is C or S
RSVKIAKVVGRTPKVKEVQVMVVKSXK

SEQ ID NO: 114557 - protein, 40 aa, Artificial Sequence; identical to SEQ ID NO: 23724
  Cyclic GFR-binding peptide
  MOD_RES (4)..(38)..(40): Xaa is C or S

SEQ ID NO: 114558 - protein, 40 aa, Artificial Sequence; identical to SEQ ID NO: 23725
  Cyclic GFR-binding peptide
  MOD_RES (5)..(39): Xaa is C or S

SEQ ID NO: 114559 - protein, 33 aa, Artificial Sequence; identical to SEQ ID NO: 68995
  Cyclic GFR-binding peptide
  MOD_RES (4)..(5): Xaa is C or S

SEQ ID NO: 114560 - protein, 24 aa, Artificial Sequence
  Cyclic GFR-binding peptide
PQDLRSVKIAKVVGRTPKVKEVQV

SEQ ID NO: 114561 - protein, 25 aa, Artificial Sequence
  Cyclic GFR-binding peptide
EERSVKMAKVRIKPHQGQHKEVQVF

SEQ ID NO: 114562 - protein, 35 aa, Artificial Sequence; identical to SEQ ID NO: 23729
  Cyclic GFR-binding peptide
  MOD_RES (6)..(6): Xaa is C or S

SEQ ID NO: 114563 - protein, 27 aa, Artificial Sequence
  Cyclic GFR-binding peptide
  MOD_RES (1)..(2): Xaa is C or S
XXVPQALRSVKIAKVVGRKPKVKEVQV

SEQ ID NO: 114564 - protein, 32 aa, Artificial Sequence; identical to SEQ ID NO: 23732
  Cyclic GFR-binding peptide
  MOD_RES (2)..(2): Xaa is C or S

SEQ ID NO: 114565 - protein, 38 aa, Artificial Sequence; identical to SEQ ID NO: 72237
  Cyclic GFR-binding peptide
  MOD_RES (5)..(6)..(37): Xaa is C or S

SEQ ID NO: 114566 - protein, 31 aa, Artificial Sequence; identical to SEQ ID NO: 23733
  Cyclic GFR-binding peptide

SEQ ID NO: 114567 - protein, 39 aa, Artificial Sequence; identical to SEQ ID NO: 23734
  Cyclic GFR-binding peptide
  MOD_RES (7)..(7): Xaa is C or S

SEQ ID NO: 114568 - protein, 30 aa, Artificial Sequence; identical to SEQ ID NO: 70694
  Cyclic GFR-binding peptide
  MOD_RES (3)..(4): Xaa is C or S

SEQ ID NO: 114569 - protein, 39 aa, Artificial Sequence; identical to SEQ ID NO: 23740
  Cyclic GFR-binding peptide
  MOD_RES (7)..(7): Xaa is C or S

SEQ ID NO: 114570 - protein, 34 aa, Artificial Sequence; identical to SEQ ID NO: 23741
  Cyclic GFR-binding peptide
  MOD_RES (31)..(33): Xaa is C or S

SEQ ID NO: 114571 - protein, 27 aa, Artificial Sequence
  Cyclic GFR-binding peptide
VSQDLRPVQIRKIIGKTPKIKKATVMI

SEQ ID NO: 114572 - protein, 38 aa, Artificial Sequence; identical to SEQ ID NO: 23744
  Cyclic GFR-binding peptide
  MOD_RES (6)..(6): Xaa is C or S

SEQ ID NO: 114573 - protein, 32 aa, Artificial Sequence; identical to SEQ ID NO: 23745
  Cyclic GFR-binding peptide
  MOD_RES (31)..(31): Xaa is C or S

SEQ ID NO: 114574 - protein, 33 aa, Artificial Sequence; identical to SEQ ID NO: 73895
  Cyclic GFR-binding peptide
  MOD_RES (4)..(5): Xaa is C or S

SEQ ID NO: 114575 - protein, 36 aa, Artificial Sequence; identical to SEQ ID NO: 70700
  Cyclic GFR-binding peptide
  MOD_RES (2)..(3)..(34)..(36): Xaa is C or S

SEQ ID NO: 114576 - protein, 25 aa, Artificial Sequence
  Cyclic GFR-binding peptide
SQDLRSVKIAKVIGKTPKIKEVQVM

SEQ ID NO: 114577 - protein, 33 aa, Artificial Sequence; identical to SEQ ID NO: 23747
  Cyclic GFR-binding peptide
  MOD_RES (30)..(32): Xaa is C or S

SEQ ID NO: 114578 - protein, 37 aa, Artificial Sequence; identical to SEQ ID NO: 23748
  Cyclic GFR-binding peptide
  MOD_RES (36)..(36): Xaa is C or S

SEQ ID NO: 114579 - protein, 25 aa, Artificial Sequence
  Cyclic GFR-binding peptide
QDLRPVQIRKIVGRTPKVKKATVMV

SEQ ID NO: 114580 - protein, 33 aa, Artificial Sequence; identical to SEQ ID NO: 23749
  Cyclic GFR-binding peptide
  MOD_RES (32)..(32): Xaa is C or S

SEQ ID NO: 114581 - protein, 29 aa, Artificial Sequence
  Cyclic GFR-binding peptide
  MOD_RES (2)..(3): Xaa is C or S
PXXVPQALRSVKIAKVVGRKPKVKEVQVM

SEQ ID NO: 114582 - protein, 35 aa, Artificial Sequence; identical to SEQ ID NO: 72250
  Cyclic GFR-binding peptide
  MOD_RES (5)..(6): Xaa is C or S

SEQ ID NO: 114583 - protein, 35 aa, Artificial Sequence; identical to SEQ ID NO: 69014
  Cyclic GFR-binding peptide
  MOD_RES (4)..(5): Xaa is C or S

SEQ ID NO: 114584 - protein, 30 aa, Artificial Sequence; identical to SEQ ID NO: 23751
  Cyclic GFR-binding peptide

SEQ ID NO: 114585 - protein, 33 aa, Artificial Sequence; identical to SEQ ID NO: 69017
  Cyclic GFR-binding peptide
  MOD_RES (30)..(32): Xaa is C or S

SEQ ID NO: 114586 - protein, 34 aa, Artificial Sequence; identical to SEQ ID NO: 23753
  Cyclic GFR-binding peptide
  MOD_RES (33)..(33): Xaa is C or S

SEQ ID NO: 114587 - protein, 30 aa, Artificial Sequence; identical to SEQ ID NO: 23755
  Cyclic GFR-binding peptide

SEQ ID NO: 114588 - protein, 33 aa, Artificial Sequence; identical to SEQ ID NO: 23757
  Cyclic GFR-binding peptide
  MOD_RES (3)..(3): Xaa is C or S

SEQ ID NO: 114589 - protein, 36 aa, Artificial Sequence; identical to SEQ ID NO: 73906
  Cyclic GFR-binding peptide
  MOD_RES (2)..(3)..(34)..(36): Xaa is C or S

SEQ ID NO: 114590 - protein, 25 aa, Artificial Sequence
  Cyclic GFR-binding peptide
VHHRPVQVRKIEYVRKKPKLKKATV

SEQ ID NO: 114591 - protein, 33 aa, Artificial Sequence; identical to SEQ ID NO: 72258
  Cyclic GFR-binding peptide
  MOD_RES (6)..(7): Xaa is C or S

SEQ ID NO: 114592 - protein, 32 aa, Artificial Sequence; identical to SEQ ID NO: 72260
  Cyclic GFR-binding peptide
  MOD_RES (29)..(31): Xaa is C or S

SEQ ID NO: 114593 - protein, 35 aa, Artificial Sequence; identical to SEQ ID NO: 23764
  Cyclic GFR-binding peptide
  MOD_RES (32)..(34): Xaa is C or S

SEQ ID NO: 114594 - protein, 25 aa, Artificial Sequence
  Cyclic GFR-binding peptide
RSVKIAKVIGKTPKIKEVQVMIVKS

SEQ ID NO: 114595 - protein, 24 aa, Artificial Sequence
  Cyclic GFR-binding peptide
RPVQMRKIRIKPHQGQHKKATVFL

SEQ ID NO: 114596 - protein, 33 aa, Artificial Sequence; identical to SEQ ID NO: 70713
  Cyclic GFR-binding peptide
  MOD_RES (2)..(3): Xaa is C or S

SEQ ID NO: 114597 - protein, 24 aa, Artificial Sequence
  Cyclic GFR-binding peptide
RPVQIRKIVGRKPKVKKATVMIVR

SEQ ID NO: 114598 - protein, 33 aa, Artificial Sequence; identical to SEQ ID NO: 23769
  Cyclic GFR-binding peptide
  MOD_RES (2)..(2): Xaa is C or S

SEQ ID NO: 114599 - protein, 30 aa, Artificial Sequence; identical to SEQ ID NO: 72269
  Cyclic GFR-binding peptide
  MOD_RES (2)..(3): Xaa is C or S

SEQ ID NO: 114600 - protein, 31 aa, Artificial Sequence; identical to SEQ ID NO: 23770
  Cyclic GFR-binding peptide
  MOD_RES (31)..(31): Xaa is C or S

SEQ ID NO: 114601 - protein, 26 aa, Artificial Sequence
  Cyclic GFR-binding peptide
RSVKMAKVRIKPHQGQHKEVQVFLQH

SEQ ID NO: 114602 - protein, 33 aa, Artificial Sequence; identical to SEQ ID NO: 23773
  Cyclic GFR-binding peptide
  MOD_RES (2)..(2): Xaa is C or S

SEQ ID NO: 114603 - protein, 30 aa, Artificial Sequence; identical to SEQ ID NO: 23775
  Cyclic GFR-binding peptide

SEQ ID NO: 114604 - protein, 39 aa, Artificial Sequence; identical to SEQ ID NO: 23776
  Cyclic GFR-binding peptide
  MOD_RES (5)..(39): Xaa is C or S

SEQ ID NO: 114605 - protein, 28 aa, Artificial Sequence
  Cyclic GFR-binding peptide
  MOD_RES (2)..(3): Xaa is C or S
PXXVPQALRSVKIAKVVGRKPKVKEVQV

SEQ ID NO: 114606 - protein, 41 aa, Artificial Sequence; identical to SEQ ID NO: 23777
  Cyclic GFR-binding peptide
  MOD_RES (5)..(39)..(41): Xaa is C or S

SEQ ID NO: 114607 - protein, 29 aa, Artificial Sequence
  Cyclic GFR-binding peptide
  MOD_RES (2)..(3): Xaa is C or S
PXXVPQDLRPVQIRKIVGRTPKVKKATVM

SEQ ID NO: 114608 - protein, 38 aa, Artificial Sequence; identical to SEQ ID NO: 23784
  Cyclic GFR-binding peptide
  MOD_RES (36)..(38): Xaa is C or S

SEQ ID NO: 114609 - protein, 35 aa, Artificial Sequence; identical to SEQ ID NO: 23786
  Cyclic GFR-binding peptide
  MOD_RES (4)..(4): Xaa is C or S

SEQ ID NO: 114610 - protein, 40 aa, Artificial Sequence; identical to SEQ ID NO: 23791
  Cyclic GFR-binding peptide
  MOD_RES (6)..(40): Xaa is C or S

SEQ ID NO: 114611 - protein, 30 aa, Artificial Sequence; identical to SEQ ID NO: 70741
  Cyclic GFR-binding peptide

SEQ ID NO: 114612 - protein, 38 aa, Artificial Sequence; identical to SEQ ID NO: 23794
  Cyclic GFR-binding peptide
  MOD_RES (2)..(36)..(38): Xaa is C or S

SEQ ID NO: 114613 - protein, 33 aa, Artificial Sequence; identical to SEQ ID NO: 69048
  Cyclic GFR-binding peptide
  MOD_RES (5)..(6): Xaa is C or S

SEQ ID NO: 114614 - protein, 32 aa, Artificial Sequence; identical to SEQ ID NO: 73937
  Cyclic GFR-binding peptide
  MOD_RES (1)..(32): Xaa is C or S

SEQ ID NO: 114615 - protein, 40 aa, Artificial Sequence; identical to SEQ ID NO: 69052
  Cyclic GFR-binding peptide
  MOD_RES (6)..(7)..(38)..(40): Xaa is C or S

SEQ ID NO: 114616 - protein, 33 aa, Artificial Sequence; identical to SEQ ID NO: 70745
  Cyclic GFR-binding peptide
  MOD_RES (1)..(32): Xaa is C or S

SEQ ID NO: 114617 - protein, 37 aa, Artificial Sequence; identical to SEQ ID NO: 23800
  Cyclic GFR-binding peptide
  MOD_RES (1)..(35)..(37): Xaa is C or S

SEQ ID NO: 114618 - protein, 26 aa, Artificial Sequence
  Cyclic GFR-binding peptide
RPVQMRKIRIKPHQGQHKKATVFLQH

SEQ ID NO: 114619 - protein, 30 aa, Artificial Sequence; identical to SEQ ID NO: 23803
  Cyclic GFR-binding peptide

SEQ ID NO: 114620 - protein, 30 aa, Artificial Sequence; identical to SEQ ID NO: 69058
  Cyclic GFR-binding peptide
  MOD_RES (3)..(4): Xaa is C or S

SEQ ID NO: 114621 - protein, 29 aa, Artificial Sequence
  Cyclic GFR-binding peptide
  MOD_RES (2)..(2): Xaa is C or S
EXVPTEERPVQMRKIRIKPHQGQHKKATV

SEQ ID NO: 114622 - protein, 38 aa, Artificial Sequence; identical to SEQ ID NO: 72298
  Cyclic GFR-binding peptide
  MOD_RES (6)..(7)..(38): Xaa is C or S

SEQ ID NO: 114623 - protein, 27 aa, Artificial Sequence
  Cyclic GFR-binding peptide
ALRPVQIRKIVGRKPKVKKATVMIVRS

SEQ ID NO: 114624 - protein, 42 aa, Artificial Sequence; identical to SEQ ID NO: 23808
  Cyclic GFR-binding peptide
  MOD_RES (7)..(41): Xaa is C or S

SEQ ID NO: 114625 - protein, 20 aa, Artificial Sequence
  Cyclic GFR-binding peptide
RSVKIAKVVGRKPKVKEVQV

SEQ ID NO: 114626 - protein, 33 aa, Artificial Sequence; identical to SEQ ID NO: 72307
  Cyclic GFR-binding peptide
  MOD_RES (3)..(4): Xaa is C or S

SEQ ID NO: 114627 - protein, 34 aa, Artificial Sequence; identical to SEQ ID NO: 23811
  Cyclic GFR-binding peptide
  MOD_RES (4)..(4): Xaa is C or S

SEQ ID NO: 114628 - protein, 26 aa, Artificial Sequence
  Cyclic GFR-binding peptide
ERSVKMAKVRIKPHQGQHKEVQVFLQ

SEQ ID NO: 114629 - protein, 38 aa, Artificial Sequence; identical to SEQ ID NO: 23813
  Cyclic GFR-binding peptide
  MOD_RES (36)..(38): Xaa is C or S

SEQ ID NO: 114630 - protein, 31 aa, Artificial Sequence; identical to SEQ ID NO: 23814
  Cyclic GFR-binding peptide
  MOD_RES (4)..(4): Xaa is C or S

SEQ ID NO: 114631 - protein, 27 aa, Artificial Sequence
  Cyclic GFR-binding peptide
PQALRPVQIRKIVGRKPKVKKATVMIV

SEQ ID NO: 114632 - protein, 26 aa, Artificial Sequence
  Cyclic GFR-binding peptide
  MOD_RES (26)..(26): Xaa is C or S
RPVQIRKIVGRTPKVKKATVMVVKSX

SEQ ID NO: 114633 - protein, 28 aa, Artificial Sequence
  Cyclic GFR-binding peptide
  MOD_RES (28)..(28): Xaa is C or S
ALRPVQIRKIVGRKPKVKKATVMIVRSX

SEQ ID NO: 114634 - protein, 40 aa, Artificial Sequence; identical to SEQ ID NO: 23816
  Cyclic GFR-binding peptide
  MOD_RES (6)..(40): Xaa is C or S

SEQ ID NO: 114635 - protein, 39 aa, Artificial Sequence; identical to SEQ ID NO: 23819
  Cyclic GFR-binding peptide
  MOD_RES (36)..(38): Xaa is C or S

SEQ ID NO: 114636 - protein, 36 aa, Artificial Sequence; identical to SEQ ID NO: 73965
  Cyclic GFR-binding peptide
  MOD_RES (2)..(3)..(34)..(36): Xaa is C or S

SEQ ID NO: 114637 - protein, 35 aa, Artificial Sequence; identical to SEQ ID NO: 23821
  Cyclic GFR-binding peptide
  MOD_RES (6)..(6): Xaa is C or S

SEQ ID NO: 114638 - protein, 39 aa, Artificial Sequence; identical to SEQ ID NO: 72324
  Cyclic GFR-binding peptide
  MOD_RES (4)..(5)..(36)..(38): Xaa is C or S

SEQ ID NO: 114639 - protein, 31 aa, Artificial Sequence; identical to SEQ ID NO: 70764
  Cyclic GFR-binding peptide
  MOD_RES (30)..(30): Xaa is C or S

SEQ ID NO: 114640 - protein, 36 aa, Artificial Sequence; identical to SEQ ID NO: 73967
  Cyclic GFR-binding peptide
  MOD_RES (2)..(3)..(34)..(36): Xaa is C or S

SEQ ID NO: 114641 - protein, 39 aa, Artificial Sequence; identical to SEQ ID NO: 23825
  Cyclic GFR-binding peptide
  MOD_RES (5)..(39): Xaa is C or S

SEQ ID NO: 114642 - protein, 35 aa, Artificial Sequence; identical to SEQ ID NO: 23829
  Cyclic GFR-binding peptide
  MOD_RES (6)..(6): Xaa is C or S

SEQ ID NO: 114643 - protein, 25 aa, Artificial Sequence
  Cyclic GFR-binding peptide
LRPVQIRKIVGRTPKVKKATVMVVK

SEQ ID NO: 114644 - protein, 27 aa, Artificial Sequence
  Cyclic GFR-binding peptide
LRSVKVAKVEIVRKKPIFKEVQVTLED

SEQ ID NO: 114645 - protein, 38 aa, Artificial Sequence; identical to SEQ ID NO: 23833
  Cyclic GFR-binding peptide
  MOD_RES (2)..(36)..(38): Xaa is C or S

SEQ ID NO: 114646 - protein, 34 aa, Artificial Sequence; identical to SEQ ID NO: 72331
  Cyclic GFR-binding peptide
  MOD_RES (3)..(4): Xaa is C or S

SEQ ID NO: 114647 - protein, 27 aa, Artificial Sequence
  Cyclic GFR-binding peptide
  MOD_RES (26)..(26): Xaa is C or S
RPVQIRKIVGRKPKVKKATVMIVRSXK

SEQ ID NO: 114648 - protein, 39 aa, Artificial Sequence; identical to SEQ ID NO: 23838
  Cyclic GFR-binding peptide
  MOD_RES (4)..(38): Xaa is C or S

SEQ ID NO: 114649 - protein, 35 aa, Artificial Sequence; identical to SEQ ID NO: 72333
  Cyclic GFR-binding peptide
  MOD_RES (5)..(6): Xaa is C or S

SEQ ID NO: 114650 - protein, 25 aa, Artificial Sequence
  Cyclic GFR-binding peptide
GQRSVKMAKVRIKPHQGQHKEVQVL

SEQ ID NO: 114651 - protein, 38 aa, Artificial Sequence; identical to SEQ ID NO: 23843
  Cyclic GFR-binding peptide
  MOD_RES (35)..(37): Xaa is C or S

SEQ ID NO: 114652 - protein, 35 aa, Artificial Sequence; identical to SEQ ID NO: 23844
  Cyclic GFR-binding peptide
  MOD_RES (4)..(4): Xaa is C or S

SEQ ID NO: 114653 - protein, 23 aa, Artificial Sequence
  Cyclic GFR-binding peptide
QRSVKMAKVRIKPHQGQHKEVQV

SEQ ID NO: 114654 - protein, 39 aa, Artificial Sequence; identical to SEQ ID NO: 23853
  Cyclic GFR-binding peptide
  MOD_RES (6)..(6): Xaa is C or S

SEQ ID NO: 114655 - protein, 31 aa, Artificial Sequence; identical to SEQ ID NO: 69100
  Cyclic GFR-binding peptide
  MOD_RES (4)..(5): Xaa is C or S

SEQ ID NO: 114656 - protein, 32 aa, Artificial Sequence; identical to SEQ ID NO: 23858
  Cyclic GFR-binding peptide
  MOD_RES (32)..(32): Xaa is C or S

SEQ ID NO: 114657 - protein, 33 aa, Artificial Sequence; identical to SEQ ID NO: 23862
  Cyclic GFR-binding peptide

SEQ ID NO: 114658 - protein, 29 aa, Artificial Sequence
  Cyclic GFR-binding peptide
VPQDLRPVQIRKIVGRTPKVKKATVMVVK

SEQ ID NO: 114659 - protein, 35 aa, Artificial Sequence; identical to SEQ ID NO: 72349
  Cyclic GFR-binding peptide
  MOD_RES (1)..(2)..(33)..(35): Xaa is C or S

SEQ ID NO: 114660 - protein, 34 aa, Artificial Sequence; identical to SEQ ID NO: 73991
  Cyclic GFR-binding peptide
  MOD_RES (5)..(6): Xaa is C or S

SEQ ID NO: 114661 - protein, 27 aa, Artificial Sequence
  Cyclic GFR-binding peptide
  MOD_RES (27)..(27): Xaa is C or S
LRPVQIRKIVGRKPKVKKATVMIVRSX

SEQ ID NO: 114662 - protein, 25 aa, Artificial Sequence
  Cyclic GFR-binding peptide
QDLRSVKIAKVIGKTPKIKEVQVMI

SEQ ID NO: 114663 - protein, 35 aa, Artificial Sequence; identical to SEQ ID NO: 72356
  Cyclic GFR-binding peptide
  MOD_RES (1)..(2)..(33)..(35): Xaa is C or S

SEQ ID NO: 114664 - protein, 31 aa, Artificial Sequence; identical to SEQ ID NO: 72357
  Cyclic GFR-binding peptide
  MOD_RES (1)..(2): Xaa is C or S

SEQ ID NO: 114665 - protein, 35 aa, Artificial Sequence; identical to SEQ ID NO: 23867
  Cyclic GFR-binding peptide
  MOD_RES (1)..(35): Xaa is C or S

SEQ ID NO: 114666 - protein, 31 aa, Artificial Sequence; identical to SEQ ID NO: 74000
  Cyclic GFR-binding peptide
  MOD_RES (28)..(30): Xaa is C or S

SEQ ID NO: 114667 - protein, 34 aa, Artificial Sequence; identical to SEQ ID NO: 23868
  Cyclic GFR-binding peptide
  MOD_RES (32)..(34): Xaa is C or S

SEQ ID NO: 114668 - protein, 38 aa, Artificial Sequence; identical to SEQ ID NO: 69117
  Cyclic GFR-binding peptide
  MOD_RES (4)..(5)..(36)..(38): Xaa is C or S

SEQ ID NO: 114669 - protein, 27 aa, Artificial Sequence
  Cyclic GFR-binding peptide
QRPVQMRKIRIKPHQGQHKKATVLEEH

SEQ ID NO: 114670 - protein, 41 aa, Artificial Sequence; identical to SEQ ID NO: 70802
  Cyclic GFR-binding peptide
  MOD_RES (6)..(7)..(38)..(40): Xaa is C or S

SEQ ID NO: 114671 - protein, 34 aa, Artificial Sequence; identical to SEQ ID NO: 72360
  Cyclic GFR-binding peptide
  MOD_RES (1)..(32)..(34): Xaa is C or S

SEQ ID NO: 114672 - protein, 37 aa, Artificial Sequence; identical to SEQ ID NO: 23877
  Cyclic GFR-binding peptide
  MOD_RES (5)..(5): Xaa is C or S

SEQ ID NO: 114673 - protein, 32 aa, Artificial Sequence; identical to SEQ ID NO: 23879
  Cyclic GFR-binding peptide
  MOD_RES (32)..(32): Xaa is C or S

SEQ ID NO: 114674 - protein, 28 aa, Artificial Sequence
  Cyclic GFR-binding peptide
VSQDLRPVQIRKIIGKTPKIKKATVMIV

SEQ ID NO: 114675 - protein, 33 aa, Artificial Sequence; identical to SEQ ID NO: 69136
  Cyclic GFR-binding peptide
  MOD_RES (5)..(6): Xaa is C or S

SEQ ID NO: 114676 - protein, 27 aa, Artificial Sequence
  Cyclic GFR-binding peptide
TEERPVQMRKIRIKPHQGQHKKATVFL

SEQ ID NO: 114677 - protein, 21 aa, Artificial Sequence
  Cyclic GFR-binding peptide
RSVKIAKVVGRKPKVKEVQVM

SEQ ID NO: 114678 - protein, 20 aa, Artificial Sequence
  Cyclic GFR-binding peptide
RSVKIAKVVGRTPKVKEVQV

SEQ ID NO: 114679 - protein, 36 aa, Artificial Sequence; identical to SEQ ID NO: 23888
  Cyclic GFR-binding peptide
  MOD_RES (4)..(4): Xaa is C or S

SEQ ID NO: 114680 - protein, 35 aa, Artificial Sequence; identical to SEQ ID NO: 69141
  Cyclic GFR-binding peptide
  MOD_RES (6)..(7): Xaa is C or S

SEQ ID NO: 114681 - protein, 33 aa, Artificial Sequence; identical to SEQ ID NO: 23889
  Cyclic GFR-binding peptide
  MOD_RES (4)..(4): Xaa is C or S

SEQ ID NO: 114682 - protein, 40 aa, Artificial Sequence; identical to SEQ ID NO: 69144
  Cyclic GFR-binding peptide
  MOD_RES (5)..(6)..(37)..(39): Xaa is C or S

SEQ ID NO: 114683 - protein, 28 aa, Artificial Sequence
  Cyclic GFR-binding peptide
VPTGQRPVQMRKIRIKPHQGQHKKATVL

SEQ ID NO: 114684 - protein, 31 aa, Artificial Sequence; identical to SEQ ID NO: 23892
  Cyclic GFR-binding peptide

SEQ ID NO: 114685 - protein, 33 aa, Artificial Sequence; identical to SEQ ID NO: 72375
  Cyclic GFR-binding peptide
  MOD_RES (6)..(7): Xaa is C or S

SEQ ID NO: 114686 - protein, 23 aa, Artificial Sequence
  Cyclic GFR-binding peptide
DLRPVQIRKIVGRTPKVKKATVM

SEQ ID NO: 114687 - protein, 24 aa, Artificial Sequence
  Cyclic GFR-binding peptide
QALRPVQIRKIVGRKPKVKKATVM

SEQ ID NO: 114688 - protein, 37 aa, Artificial Sequence; identical to SEQ ID NO: 23893
  Cyclic GFR-binding peptide
  MOD_RES (1)..(35)..(37): Xaa is C or S

SEQ ID NO: 114689 - protein, 35 aa, Artificial Sequence; identical to SEQ ID NO: 74017
  Cyclic GFR-binding peptide
  MOD_RES (1)..(32)..(34): Xaa is C or S

SEQ ID NO: 114690 - protein, 35 aa, Artificial Sequence; identical to SEQ ID NO: 23896
  Cyclic GFR-binding peptide
  MOD_RES (7)..(7): Xaa is C or S

SEQ ID NO: 114691 - protein, 36 aa, Artificial Sequence; identical to SEQ ID NO: 23899
  Cyclic GFR-binding peptide
  MOD_RES (4)..(4): Xaa is C or S

SEQ ID NO: 114692 - protein, 36 aa, Artificial Sequence; identical to SEQ ID NO: 72386
  Cyclic GFR-binding peptide
  MOD_RES (4)..(5)..(36): Xaa is C or S

SEQ ID NO: 114693 - protein, 34 aa, Artificial Sequence; identical to SEQ ID NO: 70830
  Cyclic GFR-binding peptide
  MOD_RES (31)..(33): Xaa is C or S

SEQ ID NO: 114694 - protein, 30 aa, Artificial Sequence; identical to SEQ ID NO: 72388
  Cyclic GFR-binding peptide
  MOD_RES (29)..(29): Xaa is C or S

SEQ ID NO: 114695 - protein, 31 aa, Artificial Sequence; identical to SEQ ID NO: 74025
  Cyclic GFR-binding peptide
  MOD_RES (31)..(31): Xaa is C or S

SEQ ID NO: 114696 - protein, 43 aa, Artificial Sequence; identical to SEQ ID NO: 23905
  Cyclic GFR-binding peptide
  MOD_RES (5)..(42): Xaa is C or S

SEQ ID NO: 114697 - protein, 30 aa, Artificial Sequence; identical to SEQ ID NO: 69165
  Cyclic GFR-binding peptide
  MOD_RES (3)..(4): Xaa is C or S

SEQ ID NO: 114698 - protein, 37 aa, Artificial Sequence; identical to SEQ ID NO: 23909
  Cyclic GFR-binding peptide
  MOD_RES (4)..(4): Xaa is C or S

SEQ ID NO: 114699 - protein, 37 aa, Artificial Sequence; identical to SEQ ID NO: 23910
  Cyclic GFR-binding peptide
  MOD_RES (1)..(35)..(37): Xaa is C or S

SEQ ID NO: 114700 - protein, 32 aa, Artificial Sequence; identical to SEQ ID NO: 69168
  Cyclic GFR-binding peptide
  MOD_RES (2)..(3): Xaa is C or S

SEQ ID NO: 114701 - protein, 25 aa, Artificial Sequence
  Cyclic GFR-binding peptide
QRPVQMRKIRIKPHQGQHKKATVLE

SEQ ID NO: 114702 - protein, 28 aa, Artificial Sequence
  Cyclic GFR-binding peptide
PTQVQLRSVKVAKVEIVRKKPIFKEVQV

SEQ ID NO: 114703 - protein, 26 aa, Artificial Sequence
  Cyclic GFR-binding peptide
  MOD_RES (26)..(26): Xaa is C or S
RSVKIAKVVGRTPKVKEVQVMVVKSX

SEQ ID NO: 114704 - protein, 44 aa, Artificial Sequence; identical to SEQ ID NO: 23919
  Cyclic GFR-binding peptide
  MOD_RES (7)..(41)..(43): Xaa is C or S

SEQ ID NO: 114705 - protein, 33 aa, Artificial Sequence; identical to SEQ ID NO: 74037
  Cyclic GFR-binding peptide
  MOD_RES (31)..(33): Xaa is C or S

SEQ ID NO: 114706 - protein, 29 aa, Artificial Sequence
  Cyclic GFR-binding peptide
LRSVKVAKVEIVRKKPIFKEVQVTLEDHL

SEQ ID NO: 114707 - protein, 33 aa, Artificial Sequence; identical to SEQ ID NO: 23922
  Cyclic GFR-binding peptide
  MOD_RES (33)..(33): Xaa is C or S

SEQ ID NO: 114708 - protein, 35 aa, Artificial Sequence; identical to SEQ ID NO: 23923
  Cyclic GFR-binding peptide
  MOD_RES (1)..(35): Xaa is C or S

SEQ ID NO: 114709 - protein, 37 aa, Artificial Sequence; identical to SEQ ID NO: 23924
  Cyclic GFR-binding peptide
  MOD_RES (37)..(37): Xaa is C or S

SEQ ID NO: 114710 - protein, 29 aa, Artificial Sequence
  Cyclic GFR-binding peptide
  MOD_RES (2)..(3): Xaa is C or S
PXXVSQDLRPVQIRKIIGKTPKIKKATVM

SEQ ID NO: 114711 - protein, 33 aa, Artificial Sequence; identical to SEQ ID NO: 72406
  Cyclic GFR-binding peptide
  MOD_RES (31)..(33): Xaa is C or S

SEQ ID NO: 114712 - protein, 34 aa, Artificial Sequence; identical to SEQ ID NO: 74045
  Cyclic GFR-binding peptide
  MOD_RES (6)..(7): Xaa is C or S

SEQ ID NO: 114713 - protein, 40 aa, Artificial Sequence; identical to SEQ ID NO: 23927
  Cyclic GFR-binding peptide
  MOD_RES (1)..(38)..(40): Xaa is C or S

SEQ ID NO: 114714 - protein, 25 aa, Artificial Sequence
  Cyclic GFR-binding peptide
VPQALRSVKIAKVVGRKPKVKEVQV

SEQ ID NO: 114715 - protein, 31 aa, Artificial Sequence; identical to SEQ ID NO: 72410
  Cyclic GFR-binding peptide
  MOD_RES (31)..(31): Xaa is C or S

SEQ ID NO: 114716 - protein, 37 aa, Artificial Sequence; identical to SEQ ID NO: 72411
  Cyclic GFR-binding peptide
  MOD_RES (5)..(6)..(37): Xaa is C or S

SEQ ID NO: 114717 - protein, 41 aa, Artificial Sequence; identical to SEQ ID NO: 69184
  Cyclic GFR-binding peptide
  MOD_RES (6)..(7)..(38)..(40): Xaa is C or S

SEQ ID NO: 114718 - protein, 22 aa, Artificial Sequence
  Cyclic GFR-binding peptide
LRPVQIRKIVGRTPKVKKATVM

SEQ ID NO: 114719 - protein, 35 aa, Artificial Sequence; identical to SEQ ID NO: 23930
  Cyclic GFR-binding peptide
  MOD_RES (33)..(35): Xaa is C or S

SEQ ID NO: 114720 - protein, 31 aa, Artificial Sequence; identical to SEQ ID NO: 70859
  Cyclic GFR-binding peptide
  MOD_RES (1)..(2): Xaa is C or S

SEQ ID NO: 114721 - protein, 32 aa, Artificial Sequence; identical to SEQ ID NO: 23932
  Cyclic GFR-binding peptide
  MOD_RES (30)..(32): Xaa is C or S

SEQ ID NO: 114722 - protein, 38 aa, Artificial Sequence; identical to SEQ ID NO: 23934
  Cyclic GFR-binding peptide
  MOD_RES (4)..(4): Xaa is C or S

SEQ ID NO: 114723 - protein, 27 aa, Artificial Sequence
  Cyclic GFR-binding peptide
  MOD_RES (26)..(26): Xaa is C or S
RPVQIRKIVGRTPKVKKATVMVVKSXK

SEQ ID NO: 114724 - protein, 40 aa, Artificial Sequence; identical to SEQ ID NO: 23937
  Cyclic GFR-binding peptide
  MOD_RES (3)..(37)..(39): Xaa is C or S

SEQ ID NO: 114725 - protein, 29 aa, Artificial Sequence
  Cyclic GFR-binding peptide
  MOD_RES (29)..(29): Xaa is C or S
RPVQMRKIRIKPHQGQHKKATVLEEHSQX

SEQ ID NO: 114726 - protein, 25 aa, Artificial Sequence
  Cyclic GFR-binding peptide
PQALRPVQIRKIVGRKPKVKKATVM

SEQ ID NO: 114727 - protein, 27 aa, Artificial Sequence
  Cyclic GFR-binding peptide
EERPVQMRKIRIKPHQGQHKKATVFLQ

SEQ ID NO: 114728 - protein, 24 aa, Artificial Sequence
  Cyclic GFR-binding peptide
DLRSVKIAKVIGKTPKIKEVQVMI

SEQ ID NO: 114729 - protein, 33 aa, Artificial Sequence; identical to SEQ ID NO: 72423
  Cyclic GFR-binding peptide
  MOD_RES (1)..(2)..(33): Xaa is C or S

SEQ ID NO: 114730 - protein, 32 aa, Artificial Sequence; identical to SEQ ID NO: 23941
  Cyclic GFR-binding peptide
  MOD_RES (1)..(1): Xaa is C or S

SEQ ID NO: 114731 - protein, 33 aa, Artificial Sequence; identical to SEQ ID NO: 23942
  Cyclic GFR-binding peptide
  MOD_RES (6)..(6): Xaa is C or S

SEQ ID NO: 114732 - protein, 25 aa, Artificial Sequence
  Cyclic GFR-binding peptide
LRPVQIRKIVGRKPKVKKATVMIVR

SEQ ID NO: 114733 - protein, 36 aa, Artificial Sequence; identical to SEQ ID NO: 23944
  Cyclic GFR-binding peptide
  MOD_RES (36)..(36): Xaa is C or S

SEQ ID NO: 114734 - protein, 32 aa, Artificial Sequence; identical to SEQ ID NO: 23945
  Cyclic GFR-binding peptide
  MOD_RES (4)..(4): Xaa is C or S

SEQ ID NO: 114735 - protein, 32 aa, Artificial Sequence; identical to SEQ ID NO: 72426
  Cyclic GFR-binding peptide
  MOD_RES (31)..(31): Xaa is C or S

SEQ ID NO: 114736 - protein, 39 aa, Artificial Sequence; identical to SEQ ID NO: 23946
  Cyclic GFR-binding peptide
  MOD_RES (36)..(38): Xaa is C or S

SEQ ID NO: 114737 - protein, 42 aa, Artificial Sequence; identical to SEQ ID NO: 23948
  Cyclic GFR-binding peptide
  MOD_RES (5)..(39)..(41): Xaa is C or S

SEQ ID NO: 114738 - protein, 39 aa, Artificial Sequence; identical to SEQ ID NO: 23949
  Cyclic GFR-binding peptide
  MOD_RES (2)..(39): Xaa is C or S

SEQ ID NO: 114739 - protein, 33 aa, Artificial Sequence; identical to SEQ ID NO: 70873
  Cyclic GFR-binding peptide
  MOD_RES (4)..(5): Xaa is C or S

SEQ ID NO: 114740 - protein, 26 aa, Artificial Sequence
  Cyclic GFR-binding peptide
PQDLRPVQIRKIVGRTPKVKKATVMV

SEQ ID NO: 114741 - protein, 34 aa, Artificial Sequence; identical to SEQ ID NO: 23952
  Cyclic GFR-binding peptide
  MOD_RES (3)..(3): Xaa is C or S

SEQ ID NO: 114742 - protein, 32 aa, Artificial Sequence; identical to SEQ ID NO: 70877
  Cyclic GFR-binding peptide
  MOD_RES (6)..(7): Xaa is C or S

SEQ ID NO: 114743 - protein, 37 aa, Artificial Sequence; identical to SEQ ID NO: 72430
  Cyclic GFR-binding peptide
  MOD_RES (3)..(4)..(35)..(37): Xaa is C or S

SEQ ID NO: 114744 - protein, 29 aa, Artificial Sequence
  Cyclic GFR-binding peptide
  MOD_RES (1)..(1): Xaa is C or S
XVPTGQRPVQMRKIRIKPHQGQHKKATVL

SEQ ID NO: 114745 - protein, 43 aa, Artificial Sequence; identical to SEQ ID NO: 23954
  Cyclic GFR-binding peptide
  MOD_RES (7)..(41)..(43): Xaa is C or S

SEQ ID NO: 114746 - protein, 23 aa, Artificial Sequence
  Cyclic GFR-binding peptide
RPVQIRKIVGRKPKVKKATVMIV

SEQ ID NO: 114747 - protein, 26 aa, Artificial Sequence
  Cyclic GFR-binding peptide
DLRPVQIRKIIGKTPKIKKATVMIVK

SEQ ID NO: 114748 - protein, 32 aa, Artificial Sequence; identical to SEQ ID NO: 23956
  Cyclic GFR-binding peptide
  MOD_RES (30)..(32): Xaa is C or S

SEQ ID NO: 114749 - protein, 22 aa, Artificial Sequence
  Cyclic GFR-binding peptide
ALRSVKIAKVVGRKPKVKEVQV

SEQ ID NO: 114750 - protein, 34 aa, Artificial Sequence; identical to SEQ ID NO: 23959
  Cyclic GFR-binding peptide
  MOD_RES (31)..(33): Xaa is C or S

SEQ ID NO: 114751 - protein, 29 aa, Artificial Sequence
  Cyclic GFR-binding peptide
  MOD_RES (29)..(29): Xaa is C or S
RPVQMRKIRIKPHQGQHKKATVFLQHNKX

SEQ ID NO: 114752 - protein, 37 aa, Artificial Sequence; identical to SEQ ID NO: 23965
  Cyclic GFR-binding peptide
  MOD_RES (2)..(36): Xaa is C or S

SEQ ID NO: 114753 - protein, 31 aa, Artificial Sequence; identical to SEQ ID NO: 23967
  Cyclic GFR-binding peptide

SEQ ID NO: 114754 - protein, 25 aa, Artificial Sequence
  Cyclic GFR-binding peptide
ERPVQMRKIRIKPHQGQHKKATVFL

SEQ ID NO: 114755 - protein, 20 aa, Artificial Sequence
  Cyclic GFR-binding peptide
RPVQIRKIVGRKPKVKKATV

SEQ ID NO: 114756 - protein, 26 aa, Artificial Sequence
  Cyclic GFR-binding peptide
TEERSVKMAKVRIKPHQGQHKEVQVF

SEQ ID NO: 114757 - protein, 29 aa, Artificial Sequence
  Cyclic GFR-binding peptide
  MOD_RES (2)..(3): Xaa is C or S
PXXVSQDLRSVKIAKVIGKTPKIKEVQVM

SEQ ID NO: 114758 - protein, 26 aa, Artificial Sequence
  Cyclic GFR-binding peptide
LRSVKIAKVIGKTPKIKEVQVMIVKS

SEQ ID NO: 114759 - protein, 32 aa, Artificial Sequence; identical to SEQ ID NO: 72453
  Cyclic GFR-binding peptide
  MOD_RES (1)..(32): Xaa is C or S

SEQ ID NO: 114760 - protein, 30 aa, Artificial Sequence; identical to SEQ ID NO: 23973
  Cyclic GFR-binding peptide
  MOD_RES (29)..(29): Xaa is C or S

SEQ ID NO: 114761 - protein, 28 aa, Artificial Sequence
  Cyclic GFR-binding peptide
VQLRSVKVAKVEIVRKKPIFKEVQVTLE

SEQ ID NO: 114762 - protein, 25 aa, Artificial Sequence
  Cyclic GFR-binding peptide
RPVQVRKIEYVRKKPKLKKATVRLE

SEQ ID NO: 114763 - protein, 30 aa, Artificial Sequence; identical to SEQ ID NO: 23976
  Cyclic GFR-binding peptide

SEQ ID NO: 114764 - protein, 34 aa, Artificial Sequence; identical to SEQ ID NO: 74088
  Cyclic GFR-binding peptide
  MOD_RES (6)..(7): Xaa is C or S

SEQ ID NO: 114765 - protein, 28 aa, Artificial Sequence
  Cyclic GFR-binding peptide
RPVQMRKIRIKPHQGQHKKATVLEEHSQ

SEQ ID NO: 114766 - protein, 41 aa, Artificial Sequence; identical to SEQ ID NO: 23978
  Cyclic GFR-binding peptide
  MOD_RES (2)..(39)..(41): Xaa is C or S

SEQ ID NO: 114767 - protein, 32 aa, Artificial Sequence; identical to SEQ ID NO: 23980
  Cyclic GFR-binding peptide
  MOD_RES (5)..(5): Xaa is C or S

SEQ ID NO: 114768 - protein, 22 aa, Artificial Sequence
  Cyclic GFR-binding peptide
LRSVKIAKVIGKTPKIKEVQVM

SEQ ID NO: 114769 - protein, 38 aa, Artificial Sequence; identical to SEQ ID NO: 23982
  Cyclic GFR-binding peptide
  MOD_RES (35)..(37): Xaa is C or S

SEQ ID NO: 114770 - protein, 32 aa, Artificial Sequence; identical to SEQ ID NO: 74092
  Cyclic GFR-binding peptide
  MOD_RES (31)..(31): Xaa is C or S

SEQ ID NO: 114771 - protein, 32 aa, Artificial Sequence; identical to SEQ ID NO: 23983
  Cyclic GFR-binding peptide
  MOD_RES (1)..(1): Xaa is C or S

SEQ ID NO: 114772 - protein, 27 aa, Artificial Sequence
  Cyclic GFR-binding peptide
DLRSVKIAKVVGRTPKVKEVQVMVVKS

SEQ ID NO: 114773 - protein, 31 aa, Artificial Sequence; identical to SEQ ID NO: 69232
  Cyclic GFR-binding peptide
  MOD_RES (2)..(3): Xaa is C or S

SEQ ID NO: 114774 - protein, 27 aa, Artificial Sequence
  Cyclic GFR-binding peptide
QDLRPVQIRKIVGRTPKVKKATVMVVK

SEQ ID NO: 114775 - protein, 26 aa, Artificial Sequence
  Cyclic GFR-binding peptide
VPQALRSVKIAKVVGRKPKVKEVQVM

SEQ ID NO: 114776 - protein, 35 aa, Artificial Sequence; identical to SEQ ID NO: 74097
  Cyclic GFR-binding peptide
  MOD_RES (6)..(7): Xaa is C or S

SEQ ID NO: 114777 - protein, 28 aa, Artificial Sequence
  Cyclic GFR-binding peptide
  MOD_RES (2)..(3): Xaa is C or S
PXXVPQALRPVQIRKIVGRKPKVKKATV

SEQ ID NO: 114778 - protein, 37 aa, Artificial Sequence; identical to SEQ ID NO: 74099
  Cyclic GFR-binding peptide
  MOD_RES (6)..(7): Xaa is C or S

SEQ ID NO: 114779 - protein, 30 aa, Artificial Sequence; identical to SEQ ID NO: 74100
  Cyclic GFR-binding peptide
  MOD_RES (1)..(1): Xaa is C or S

SEQ ID NO: 114780 - protein, 32 aa, Artificial Sequence; identical to SEQ ID NO: 70903
  Cyclic GFR-binding peptide
  MOD_RES (5)..(6): Xaa is C or S

SEQ ID NO: 114781 - protein, 28 aa, Artificial Sequence
  Cyclic GFR-binding peptide
QRSVKMAKVRIKPHQGQHKEVQVLEEHS

SEQ ID NO: 114782 - protein, 23 aa, Artificial Sequence
  Cyclic GFR-binding peptide
HRPVQVRKIEYVRKKPKLKKATV

SEQ ID NO: 114783 - protein, 41 aa, Artificial Sequence; identical to SEQ ID NO: 23989
  Cyclic GFR-binding peptide
  MOD_RES (7)..(41): Xaa is C or S

SEQ ID NO: 114784 - protein, 30 aa, Artificial Sequence; identical to SEQ ID NO: 72467
  Cyclic GFR-binding peptide
  MOD_RES (28)..(30): Xaa is C or S

SEQ ID NO: 114785 - protein, 39 aa, Artificial Sequence; identical to SEQ ID NO: 69239
  Cyclic GFR-binding peptide
  MOD_RES (5)..(6)..(37)..(39): Xaa is C or S

SEQ ID NO: 114786 - protein, 36 aa, Artificial Sequence; identical to SEQ ID NO: 70906
  Cyclic GFR-binding peptide
  MOD_RES (5)..(6): Xaa is C or S

SEQ ID NO: 114787 - protein, 26 aa, Artificial Sequence
  Cyclic GFR-binding peptide
SQDLRPVQIRKIIGKTPKIKKATVMI

SEQ ID NO: 114788 - protein, 34 aa, Artificial Sequence; identical to SEQ ID NO: 74103
  Cyclic GFR-binding peptide
  MOD_RES (2)..(3)..(34): Xaa is C or S

SEQ ID NO: 114789 - protein, 36 aa, Artificial Sequence; identical to SEQ ID NO: 23992
  Cyclic GFR-binding peptide
  MOD_RES (3)..(3): Xaa is C or S

SEQ ID NO: 114790 - protein, 33 aa, Artificial Sequence; identical to SEQ ID NO: 23993
  Cyclic GFR-binding peptide
  MOD_RES (1)..(1): Xaa is C or S

SEQ ID NO: 114791 - protein, 29 aa, Artificial Sequence
  Cyclic GFR-binding peptide
  MOD_RES (1)..(1): Xaa is C or S
XVSQDLRPVQIRKIIGKTPKIKKATVMIV

SEQ ID NO: 114792 - protein, 26 aa, Artificial Sequence
  Cyclic GFR-binding peptide
VPQALRPVQIRKIVGRKPKVKKATVM

SEQ ID NO: 114793 - protein, 34 aa, Artificial Sequence; identical to SEQ ID NO: 70911
  Cyclic GFR-binding peptide
  MOD_RES (1)..(32)..(34): Xaa is C or S

SEQ ID NO: 114794 - protein, 28 aa, Artificial Sequence
  Cyclic GFR-binding peptide
QVQLRSVKVAKVEIVRKKPIFKEVQVTL

SEQ ID NO: 114795 - protein, 25 aa, Artificial Sequence
  Cyclic GFR-binding peptide
ALRSVKIAKVVGRKPKVKEVQVMIV

SEQ ID NO: 114796 - protein, 36 aa, Artificial Sequence; identical to SEQ ID NO: 23999
  Cyclic GFR-binding peptide
  MOD_RES (34)..(36): Xaa is C or S

SEQ ID NO: 114797 - protein, 33 aa, Artificial Sequence; identical to SEQ ID NO: 24001
  Cyclic GFR-binding peptide
  MOD_RES (1)..(1): Xaa is C or S

SEQ ID NO: 114798 - protein, 33 aa, Artificial Sequence; identical to SEQ ID NO: 24004
  Cyclic GFR-binding peptide
  MOD_RES (4)..(4): Xaa is C or S

SEQ ID NO: 114799 - protein, 30 aa, Artificial Sequence; identical to SEQ ID NO: 70914
  Cyclic GFR-binding peptide
  MOD_RES (28)..(30): Xaa is C or S

SEQ ID NO: 114800 - protein, 24 aa, Artificial Sequence
  Cyclic GFR-binding peptide
QDLRPVQIRKIVGRTPKVKKATVM

SEQ ID NO: 114801 - protein, 28 aa, Artificial Sequence
  Cyclic GFR-binding peptide
QRPVQMRKIRIKPHQGQHKKATVLEEHS

SEQ ID NO: 114802 - protein, 38 aa, Artificial Sequence; identical to SEQ ID NO: 70918
  Cyclic GFR-binding peptide
  MOD_RES (5)..(6)..(37): Xaa is C or S

SEQ ID NO: 114803 - protein, 35 aa, Artificial Sequence; identical to SEQ ID NO: 24007
  Cyclic GFR-binding peptide
  MOD_RES (34)..(34): Xaa is C or S

SEQ ID NO: 114804 - protein, 38 aa, Artificial Sequence; identical to SEQ ID NO: 72481
  Cyclic GFR-binding peptide
  MOD_RES (3)..(4)..(35)..(37): Xaa is C or S

SEQ ID NO: 114805 - protein, 38 aa, Artificial Sequence; identical to SEQ ID NO: 70919
  Cyclic GFR-binding peptide
  MOD_RES (5)..(6)..(37): Xaa is C or S

SEQ ID NO: 114806 - protein, 34 aa, Artificial Sequence; identical to SEQ ID NO: 74114
  Cyclic GFR-binding peptide
  MOD_RES (6)..(7): Xaa is C or S

SEQ ID NO: 114807 - protein, 23 aa, Artificial Sequence
  Cyclic GFR-binding peptide
ALRPVQIRKIVGRKPKVKKATVM

SEQ ID NO: 114808 - protein, 24 aa, Artificial Sequence
  Cyclic GFR-binding peptide
ERPVQMRKIRIKPHQGQHKKATVF

SEQ ID NO: 114809 - protein, 32 aa, Artificial Sequence; identical to SEQ ID NO: 24016
  Cyclic GFR-binding peptide

SEQ ID NO: 114810 - protein, 29 aa, Artificial Sequence
  Cyclic GFR-binding peptide
VPQDLRSVKIAKVVGRTPKVKEVQVMVVK

SEQ ID NO: 114811 - protein, 28 aa, Artificial Sequence
  Cyclic GFR-binding peptide
QDLRPVQIRKIIGKTPKIKKATVMIVKS

SEQ ID NO: 114812 - protein, 31 aa, Artificial Sequence; identical to SEQ ID NO: 72491
  Cyclic GFR-binding peptide
  MOD_RES (3)..(4): Xaa is C or S

SEQ ID NO: 114813 - protein, 33 aa, Artificial Sequence; identical to SEQ ID NO: 72493
  Cyclic GFR-binding peptide
  MOD_RES (5)..(6): Xaa is C or S

SEQ ID NO: 114814 - protein, 41 aa, Artificial Sequence; identical to SEQ ID NO: 24018
  Cyclic GFR-binding peptide
  MOD_RES (1)..(38)..(40): Xaa is C or S

SEQ ID NO: 114815 - protein, 42 aa, Artificial Sequence; identical to SEQ ID NO: 24019
  Cyclic GFR-binding peptide
  MOD_RES (6)..(40)..(42): Xaa is C or S

SEQ ID NO: 114816 - protein, 33 aa, Artificial Sequence; identical to SEQ ID NO: 24020
  Cyclic GFR-binding peptide

SEQ ID NO: 114817 - protein, 42 aa, Artificial Sequence; identical to SEQ ID NO: 24021
  Cyclic GFR-binding peptide
  MOD_RES (2)..(39)..(41): Xaa is C or S

SEQ ID NO: 114818 - protein, 35 aa, Artificial Sequence; identical to SEQ ID NO: 72498
  Cyclic GFR-binding peptide
  MOD_RES (4)..(5): Xaa is C or S

SEQ ID NO: 114819 - protein, 39 aa, Artificial Sequence; identical to SEQ ID NO: 24023
  Cyclic GFR-binding peptide
  MOD_RES (6)..(6): Xaa is C or S

SEQ ID NO: 114820 - protein, 24 aa, Artificial Sequence
  Cyclic GFR-binding peptide
LRPVQIRKIVGRTPKVKKATVMVV

SEQ ID NO: 114821 - protein, 29 aa, Artificial Sequence
  Cyclic GFR-binding peptide
TEERSVKMAKVRIKPHQGQHKEVQVFLQH

SEQ ID NO: 114822 - protein, 36 aa, Artificial Sequence; identical to SEQ ID NO: 70932
  Cyclic GFR-binding peptide
  MOD_RES (5)..(6): Xaa is C or S

SEQ ID NO: 114823 - protein, 31 aa, Artificial Sequence; identical to SEQ ID NO: 24026
  Cyclic GFR-binding peptide
  MOD_RES (1)..(1): Xaa is C or S

SEQ ID NO: 114824 - protein, 29 aa, Artificial Sequence
  Cyclic GFR-binding peptide
  MOD_RES (29)..(29): Xaa is C or S
QDLRPVQIRKIVGRTPKVKKATVMVVKSX

SEQ ID NO: 114825 - protein, 38 aa, Artificial Sequence; identical to SEQ ID NO: 69277
  Cyclic GFR-binding peptide
  MOD_RES (6)..(7)..(38): Xaa is C or S

SEQ ID NO: 114826 - protein, 37 aa, Artificial Sequence; identical to SEQ ID NO: 70934
  Cyclic GFR-binding peptide
  MOD_RES (5)..(6)..(37): Xaa is C or S

SEQ ID NO: 114827 - protein, 32 aa, Artificial Sequence; identical to SEQ ID NO: 24029
  Cyclic GFR-binding peptide
  MOD_RES (30)..(32): Xaa is C or S

SEQ ID NO: 114828 - protein, 24 aa, Artificial Sequence
  Cyclic GFR-binding peptide
RPVQIRKIVGRTPKVKKATVMVVK

SEQ ID NO: 114829 - protein, 36 aa, Artificial Sequence; identical to SEQ ID NO: 74129
  Cyclic GFR-binding peptide
  MOD_RES (6)..(7): Xaa is C or S

SEQ ID NO: 114830 - protein, 34 aa, Artificial Sequence; identical to SEQ ID NO: 72509
  Cyclic GFR-binding peptide
  MOD_RES (31)..(33): Xaa is C or S

SEQ ID NO: 114831 - protein, 33 aa, Artificial Sequence; identical to SEQ ID NO: 24031
  Cyclic GFR-binding peptide
  MOD_RES (32)..(32): Xaa is C or S

SEQ ID NO: 114832 - protein, 28 aa, Artificial Sequence
  Cyclic GFR-binding peptide
PSRVHHRPVQVRKIEYVRKKPKLKKATV

SEQ ID NO: 114833 - protein, 29 aa, Artificial Sequence
  Cyclic GFR-binding peptide
QRPVQMRKIRIKPHQGQHKKATVLEEHSQ

SEQ ID NO: 114834 - protein, 33 aa, Artificial Sequence; identical to SEQ ID NO: 24035
  Cyclic GFR-binding peptide
  MOD_RES (33)..(33): Xaa is C or S

SEQ ID NO: 114835 - protein, 31 aa, Artificial Sequence; identical to SEQ ID NO: 24036
  Cyclic GFR-binding peptide
  MOD_RES (3)..(3): Xaa is C or S

SEQ ID NO: 114836 - protein, 29 aa, Artificial Sequence
  Cyclic GFR-binding peptide
  MOD_RES (28)..(28): Xaa is C or S
DLRPVQIRKIVGRTPKVKKATVMVVKSXK

SEQ ID NO: 114837 - protein, 27 aa, Artificial Sequence
  Cyclic GFR-binding peptide
SRVHHRPVQVRKIEYVRKKPKLKKATV

SEQ ID NO: 114838 - protein, 34 aa, Artificial Sequence; identical to SEQ ID NO: 24040
  Cyclic GFR-binding peptide
  MOD_RES (1)..(1): Xaa is C or S

SEQ ID NO: 114839 - protein, 28 aa, Artificial Sequence
  Cyclic GFR-binding peptide
  MOD_RES (1)..(2): Xaa is C or S
XXVPQALRSVKIAKVVGRKPKVKEVQVM

SEQ ID NO: 114840 - protein, 37 aa, Artificial Sequence; identical to SEQ ID NO: 24041
  Cyclic GFR-binding peptide
  MOD_RES (34)..(36): Xaa is C or S

SEQ ID NO: 114841 - protein, 40 aa, Artificial Sequence; identical to SEQ ID NO: 69292
  Cyclic GFR-binding peptide
  MOD_RES (6)..(7)..(38)..(40): Xaa is C or S

SEQ ID NO: 114842 - protein, 21 aa, Artificial Sequence
  Cyclic GFR-binding peptide
LRSVKIAKVVGRTPKVKEVQV

SEQ ID NO: 114843 - protein, 22 aa, Artificial Sequence
  Cyclic GFR-binding peptide
RSVKVAKVEIVRKKPIFKEVQV

SEQ ID NO: 114844 - protein, 30 aa, Artificial Sequence; identical to SEQ ID NO: 24044
  Cyclic GFR-binding peptide
  MOD_RES (30)..(30): Xaa is C or S

SEQ ID NO: 114845 - protein, 26 aa, Artificial Sequence
  Cyclic GFR-binding peptide
ALRPVQIRKIVGRKPKVKKATVMIVR

SEQ ID NO: 114846 - protein, 34 aa, Artificial Sequence; identical to SEQ ID NO: 24046
  Cyclic GFR-binding peptide
  MOD_RES (31)..(33): Xaa is C or S

SEQ ID NO: 114847 - protein, 28 aa, Artificial Sequence
  Cyclic GFR-binding peptide
  MOD_RES (26)..(28): Xaa is C or S
RPVQIRKIVGRKPKVKKATVMIVRSXKX

SEQ ID NO: 114848 - protein, 28 aa, Artificial Sequence
  Cyclic GFR-binding peptide
  MOD_RES (1)..(1): Xaa is C or S
XVPQALRPVQIRKIVGRKPKVKKATVMI

SEQ ID NO: 114849 - protein, 33 aa, Artificial Sequence; identical to SEQ ID NO: 24047
  Cyclic GFR-binding peptide
  MOD_RES (1)..(1): Xaa is C or S

SEQ ID NO: 114850 - protein, 33 aa, Artificial Sequence; identical to SEQ ID NO: 74147
  Cyclic GFR-binding peptide
  MOD_RES (3)..(4): Xaa is C or S

SEQ ID NO: 114851 - protein, 37 aa, Artificial Sequence; identical to SEQ ID NO: 74149
  Cyclic GFR-binding peptide
  MOD_RES (4)..(5)..(36): Xaa is C or S

SEQ ID NO: 114852 - protein, 32 aa, Artificial Sequence; identical to SEQ ID NO: 24048
  Cyclic GFR-binding peptide

SEQ ID NO: 114853 - protein, 30 aa, Artificial Sequence; identical to SEQ ID NO: 69304
  Cyclic GFR-binding peptide
  MOD_RES (4)..(5): Xaa is C or S

SEQ ID NO: 114854 - protein, 38 aa, Artificial Sequence; identical to SEQ ID NO: 24049
  Cyclic GFR-binding peptide
  MOD_RES (7)..(7): Xaa is C or S

SEQ ID NO: 114855 - protein, 28 aa, Artificial Sequence
  Cyclic GFR-binding peptide
  MOD_RES (26)..(28): Xaa is C or S
RPVQIRKIIGKTPKIKKATVMIVKSXKX

SEQ ID NO: 114856 - protein, 41 aa, Artificial Sequence; identical to SEQ ID NO: 24050
  Cyclic GFR-binding peptide
  MOD_RES (4)..(38)..(40): Xaa is C or S

SEQ ID NO: 114857 - protein, 31 aa, Artificial Sequence; identical to SEQ ID NO: 24051
  Cyclic GFR-binding peptide

SEQ ID NO: 114858 - protein, 33 aa, Artificial Sequence; identical to SEQ ID NO: 74151
  Cyclic GFR-binding peptide
  MOD_RES (3)..(4): Xaa is C or S

SEQ ID NO: 114859 - protein, 30 aa, Artificial Sequence; identical to SEQ ID NO: 70963
  Cyclic GFR-binding peptide
  MOD_RES (30)..(30): Xaa is C or S

SEQ ID NO: 114860 - protein, 23 aa, Artificial Sequence
  Cyclic GFR-binding peptide
RPVQIRKIIGKTPKIKKATVMIV

SEQ ID NO: 114861 - protein, 28 aa, Artificial Sequence
  Cyclic GFR-binding peptide
  MOD_RES (1)..(1): Xaa is C or S
XVPQDLRSVKIAKVVGRTPKVKEVQVMV

SEQ ID NO: 114862 - protein, 41 aa, Artificial Sequence; identical to SEQ ID NO: 24053
  Cyclic GFR-binding peptide
  MOD_RES (7)..(41): Xaa is C or S

SEQ ID NO: 114863 - protein, 26 aa, Artificial Sequence
  Cyclic GFR-binding peptide
DLRPVQIRKIVGRTPKVKKATVMVVK

SEQ ID NO: 114864 - protein, 34 aa, Artificial Sequence; identical to SEQ ID NO: 24055
  Cyclic GFR-binding peptide
  MOD_RES (5)..(5): Xaa is C or S

SEQ ID NO: 114865 - protein, 30 aa, Artificial Sequence; identical to SEQ ID NO: 24056
  Cyclic GFR-binding peptide

SEQ ID NO: 114866 - protein, 35 aa, Artificial Sequence; identical to SEQ ID NO: 24057
  Cyclic GFR-binding peptide
  MOD_RES (3)..(3): Xaa is C or S

SEQ ID NO: 114867 - protein, 28 aa, Artificial Sequence
  Cyclic GFR-binding peptide
RSVKMAKVRIKPHQGQHKEVQVLEEHSQ

SEQ ID NO: 114868 - protein, 34 aa, Artificial Sequence; identical to SEQ ID NO: 24062
  Cyclic GFR-binding peptide
  MOD_RES (7)..(7): Xaa is C or S

SEQ ID NO: 114869 - protein, 30 aa, Artificial Sequence; identical to SEQ ID NO: 70969
  Cyclic GFR-binding peptide
  MOD_RES (1)..(2): Xaa is C or S

SEQ ID NO: 114870 - protein, 32 aa, Artificial Sequence; identical to SEQ ID NO: 24063
  Cyclic GFR-binding peptide
  MOD_RES (29)..(31): Xaa is C or S

SEQ ID NO: 114871 - protein, 30 aa, Artificial Sequence; identical to SEQ ID NO: 72546
  Cyclic GFR-binding peptide
  MOD_RES (2)..(3): Xaa is C or S

SEQ ID NO: 114872 - protein, 38 aa, Artificial Sequence; identical to SEQ ID NO: 69312
  Cyclic GFR-binding peptide
  MOD_RES (5)..(6)..(37): Xaa is C or S

SEQ ID NO: 114873 - protein, 40 aa, Artificial Sequence; identical to SEQ ID NO: 24064
  Cyclic GFR-binding peptide
  MOD_RES (4)..(38)..(40): Xaa is C or S

SEQ ID NO: 114874 - protein, 33 aa, Artificial Sequence; identical to SEQ ID NO: 24067
  Cyclic GFR-binding peptide
  MOD_RES (31)..(33): Xaa is C or S

SEQ ID NO: 114875 - protein, 27 aa, Artificial Sequence
  Cyclic GFR-binding peptide
PQDLRSVKIAKVVGRTPKVKEVQVMVV

SEQ ID NO: 114876 - protein, 23 aa, Artificial Sequence
  Cyclic GFR-binding peptide
LRPVQIRKIIGKTPKIKKATVMI

SEQ ID NO: 114877 - protein, 35 aa, Artificial Sequence; identical to SEQ ID NO: 74174
  Cyclic GFR-binding peptide
  MOD_RES (4)..(5): Xaa is C or S

SEQ ID NO: 114878 - protein, 34 aa, Artificial Sequence; identical to SEQ ID NO: 24070
  Cyclic GFR-binding peptide
  MOD_RES (33)..(33): Xaa is C or S

SEQ ID NO: 114879 - protein, 32 aa, Artificial Sequence; identical to SEQ ID NO: 70979
  Cyclic GFR-binding peptide
  MOD_RES (3)..(4): Xaa is C or S

SEQ ID NO: 114880 - protein, 41 aa, Artificial Sequence; identical to SEQ ID NO: 74179
  Cyclic GFR-binding peptide
  MOD_RES (6)..(7)..(38)..(40): Xaa is C or S

SEQ ID NO: 114881 - protein, 41 aa, Artificial Sequence; identical to SEQ ID NO: 24071
  Cyclic GFR-binding peptide
  MOD_RES (5)..(39)..(41): Xaa is C or S

SEQ ID NO: 114882 - protein, 27 aa, Artificial Sequence
  Cyclic GFR-binding peptide
QALRSVKIAKVVGRKPKVKEVQVMIVR

SEQ ID NO: 114883 - protein, 35 aa, Artificial Sequence; identical to SEQ ID NO: 72558
  Cyclic GFR-binding peptide
  MOD_RES (1)..(32)..(34): Xaa is C or S

SEQ ID NO: 114884 - protein, 34 aa, Artificial Sequence; identical to SEQ ID NO: 24073
  Cyclic GFR-binding peptide
  MOD_RES (34)..(34): Xaa is C or S

SEQ ID NO: 114885 - protein, 25 aa, Artificial Sequence
  Cyclic GFR-binding peptide
QALRPVQIRKIVGRKPKVKKATVMI

SEQ ID NO: 114886 - protein, 26 aa, Artificial Sequence
  Cyclic GFR-binding peptide
RPVQMRKIRIKPHQGQHKKATVLEEH

SEQ ID NO: 114887 - protein, 30 aa, Artificial Sequence; identical to SEQ ID NO: 72561
  Cyclic GFR-binding peptide
  MOD_RES (28)..(30): Xaa is C or S

SEQ ID NO: 114888 - protein, 36 aa, Artificial Sequence; identical to SEQ ID NO: 24077
  Cyclic GFR-binding peptide
  MOD_RES (3)..(3): Xaa is C or S

SEQ ID NO: 114889 - protein, 31 aa, Artificial Sequence; identical to SEQ ID NO: 74189
  Cyclic GFR-binding peptide
  MOD_RES (5)..(6): Xaa is C or S

SEQ ID NO: 114890 - protein, 39 aa, Artificial Sequence; identical to SEQ ID NO: 70989
  Cyclic GFR-binding peptide
  MOD_RES (6)..(7)..(38): Xaa is C or S

SEQ ID NO: 114891 - protein, 36 aa, Artificial Sequence; identical to SEQ ID NO: 74190
  Cyclic GFR-binding peptide
  MOD_RES (1)..(2)..(33)..(35): Xaa is C or S

SEQ ID NO: 114892 - protein, 37 aa, Artificial Sequence; identical to SEQ ID NO: 70991
  Cyclic GFR-binding peptide
  MOD_RES (2)..(3)..(34)..(36): Xaa is C or S

SEQ ID NO: 114893 - protein, 29 aa, Artificial Sequence
  Cyclic GFR-binding peptide
  MOD_RES (2)..(2): Xaa is C or S
EXVPTGQRPVQMRKIRIKPHQGQHKKATV

SEQ ID NO: 114894 - protein, 36 aa, Artificial Sequence; identical to SEQ ID NO: 24083
  Cyclic GFR-binding peptide
  MOD_RES (1)..(35): Xaa is C or S

SEQ ID NO: 114895 - protein, 35 aa, Artificial Sequence; identical to SEQ ID NO: 24084
  Cyclic GFR-binding peptide

SEQ ID NO: 114896 - protein, 23 aa, Artificial Sequence
  Cyclic GFR-binding peptide
QALRPVQIRKIVGRKPKVKKATV

SEQ ID NO: 114897 - protein, 28 aa, Artificial Sequence
  Cyclic GFR-binding peptide
TEERPVQMRKIRIKPHQGQHKKATVFLQ

SEQ ID NO: 114898 - protein, 36 aa, Artificial Sequence; identical to SEQ ID NO: 24087
  Cyclic GFR-binding peptide
  MOD_RES (33)..(35): Xaa is C or S

SEQ ID NO: 114899 - protein, 32 aa, Artificial Sequence; identical to SEQ ID NO: 74201
  Cyclic GFR-binding peptide
  MOD_RES (5)..(6): Xaa is C or S

SEQ ID NO: 114900 - protein, 26 aa, Artificial Sequence
  Cyclic GFR-binding peptide
  MOD_RES (26)..(26): Xaa is C or S
RPVQIRKIVGRKPKVKKATVMIVRSX

SEQ ID NO: 114901 - protein, 26 aa, Artificial Sequence
  Cyclic GFR-binding peptide
RSVKVAKVEIVRKKPIFKEVQVTLED

SEQ ID NO: 114902 - protein, 30 aa, Artificial Sequence; identical to SEQ ID NO: 24089
  Cyclic GFR-binding peptide
  MOD_RES (1)..(1): Xaa is C or S

SEQ ID NO: 114903 - protein, 26 aa, Artificial Sequence
  Cyclic GFR-binding peptide
QDLRPVQIRKIIGKTPKIKKATVMIV

SEQ ID NO: 114904 - protein, 33 aa, Artificial Sequence; identical to SEQ ID NO: 24091
  Cyclic GFR-binding peptide
  MOD_RES (4)..(4): Xaa is C or S

SEQ ID NO: 114905 - protein, 31 aa, Artificial Sequence; identical to SEQ ID NO: 24092
  Cyclic GFR-binding peptide
  MOD_RES (30)..(30): Xaa is C or S

SEQ ID NO: 114906 - protein, 34 aa, Artificial Sequence; identical to SEQ ID NO: 24093
  Cyclic GFR-binding peptide

SEQ ID NO: 114907 - protein, 37 aa, Artificial Sequence; identical to SEQ ID NO: 24094
  Cyclic GFR-binding peptide
  MOD_RES (6)..(6): Xaa is C or S

SEQ ID NO: 114908 - protein, 36 aa, Artificial Sequence; identical to SEQ ID NO: 24095
  Cyclic GFR-binding peptide
  MOD_RES (4)..(4): Xaa is C or S

SEQ ID NO: 114909 - protein, 38 aa, Artificial Sequence; identical to SEQ ID NO: 24096
  Cyclic GFR-binding peptide
  MOD_RES (4)..(38): Xaa is C or S

SEQ ID NO: 114910 - protein, 25 aa, Artificial Sequence
  Cyclic GFR-binding peptide
DLRPVQIRKIVGRTPKVKKATVMVV

SEQ ID NO: 114911 - protein, 32 aa, Artificial Sequence; identical to SEQ ID NO: 24097
  Cyclic GFR-binding peptide

SEQ ID NO: 114912 - protein, 32 aa, Artificial Sequence; identical to SEQ ID NO: 24099
  Cyclic GFR-binding peptide
  MOD_RES (29)..(31): Xaa is C or S

SEQ ID NO: 114913 - protein, 36 aa, Artificial Sequence; identical to SEQ ID NO: 71008
  Cyclic GFR-binding peptide
  MOD_RES (2)..(3)..(34)..(36): Xaa is C or S

SEQ ID NO: 114914 - protein, 26 aa, Artificial Sequence
  Cyclic GFR-binding peptide
  MOD_RES (1)..(1): Xaa is C or S
XVSQDLRPVQIRKIIGKTPKIKKATV

SEQ ID NO: 114915 - protein, 32 aa, Artificial Sequence; identical to SEQ ID NO: 24100
  Cyclic GFR-binding peptide
  MOD_RES (2)..(2): Xaa is C or S

SEQ ID NO: 114916 - protein, 37 aa, Artificial Sequence; identical to SEQ ID NO: 24101
  Cyclic GFR-binding peptide
  MOD_RES (4)..(4): Xaa is C or S

SEQ ID NO: 114917 - protein, 42 aa, Artificial Sequence; identical to SEQ ID NO: 24103
  Cyclic GFR-binding peptide
  MOD_RES (3)..(40)..(42): Xaa is C or S

SEQ ID NO: 114918 - protein, 28 aa, Artificial Sequence
  Cyclic GFR-binding peptide
  MOD_RES (28)..(28): Xaa is C or S
DLRSVKIAKVIGKTPKIKEVQVMIVKSX

SEQ ID NO: 114919 - protein, 28 aa, Artificial Sequence
  Cyclic GFR-binding peptide
VPQDLRSVKIAKVVGRTPKVKEVQVMVV

SEQ ID NO: 114920 - protein, 42 aa, Artificial Sequence; identical to SEQ ID NO: 24104
  Cyclic GFR-binding peptide
  MOD_RES (6)..(40)..(42): Xaa is C or S

SEQ ID NO: 114921 - protein, 41 aa, Artificial Sequence; identical to SEQ ID NO: 24106
  Cyclic GFR-binding peptide
  MOD_RES (5)..(5): Xaa is C or S

SEQ ID NO: 114922 - protein, 35 aa, Artificial Sequence; identical to SEQ ID NO: 71015
  Cyclic GFR-binding peptide
  MOD_RES (3)..(4)..(35): Xaa is C or S

SEQ ID NO: 114923 - protein, 36 aa, Artificial Sequence; identical to SEQ ID NO: 24109
  Cyclic GFR-binding peptide
  MOD_RES (4)..(4): Xaa is C or S

SEQ ID NO: 114924 - protein, 24 aa, Artificial Sequence
  Cyclic GFR-binding peptide
SQDLRPVQIRKIIGKTPKIKKATV

SEQ ID NO: 114925 - protein, 37 aa, Artificial Sequence; identical to SEQ ID NO: 24112
  Cyclic GFR-binding peptide
  MOD_RES (2)..(2): Xaa is C or S

SEQ ID NO: 114926 - protein, 25 aa, Artificial Sequence
  Cyclic GFR-binding peptide
VQLRSVKVAKVEIVRKKPIFKEVQV

SEQ ID NO: 114927 - protein, 43 aa, Artificial Sequence; identical to SEQ ID NO: 24114
  Cyclic GFR-binding peptide
  MOD_RES (4)..(41)..(43): Xaa is C or S

SEQ ID NO: 114928 - protein, 28 aa, Artificial Sequence
  Cyclic GFR-binding peptide
  MOD_RES (1)..(1): Xaa is C or S
XVPTGQRPVQMRKIRIKPHQGQHKKATV

SEQ ID NO: 114929 - protein, 25 aa, Artificial Sequence
  Cyclic GFR-binding peptide
TEERPVQMRKIRIKPHQGQHKKATV

SEQ ID NO: 114930 - protein, 23 aa, Artificial Sequence
  Cyclic GFR-binding peptide
RSVKVAKVEIVRKKPIFKEVQVT

SEQ ID NO: 114931 - protein, 31 aa, Artificial Sequence; identical to SEQ ID NO: 72601
  Cyclic GFR-binding peptide
  MOD_RES (1)..(2): Xaa is C or S

SEQ ID NO: 114932 - protein, 32 aa, Artificial Sequence; identical to SEQ ID NO: 24118
  Cyclic GFR-binding peptide
  MOD_RES (3)..(3): Xaa is C or S

SEQ ID NO: 114933 - protein, 31 aa, Artificial Sequence; identical to SEQ ID NO: 24119
  Cyclic GFR-binding peptide
  MOD_RES (30)..(30): Xaa is C or S

SEQ ID NO: 114934 - protein, 29 aa, Artificial Sequence
  Cyclic GFR-binding peptide
QVQLRSVKVAKVEIVRKKPIFKEVQVTLE

SEQ ID NO: 114935 - protein, 35 aa, Artificial Sequence; identical to SEQ ID NO: 24122
  Cyclic GFR-binding peptide
  MOD_RES (32)..(34): Xaa is C or S

SEQ ID NO: 114936 - protein, 41 aa, Artificial Sequence; identical to SEQ ID NO: 24123
  Cyclic GFR-binding peptide
  MOD_RES (6)..(40): Xaa is C or S

SEQ ID NO: 114937 - protein, 29 aa, Artificial Sequence
  Cyclic GFR-binding peptide
  MOD_RES (27)..(29): Xaa is C or S
LRSVKIAKVVGRTPKVKEVQVMVVKSXKX

SEQ ID NO: 114938 - protein, 31 aa, Artificial Sequence; identical to SEQ ID NO: 71031
  Cyclic GFR-binding peptide
  MOD_RES (1)..(2): Xaa is C or S

SEQ ID NO: 114939 - protein, 32 aa, Artificial Sequence; identical to SEQ ID NO: 24125
  Cyclic GFR-binding peptide
  MOD_RES (30)..(32): Xaa is C or S

SEQ ID NO: 114940 - protein, 36 aa, Artificial Sequence; identical to SEQ ID NO: 24126
  Cyclic GFR-binding peptide
  MOD_RES (4)..(4): Xaa is C or S

SEQ ID NO: 114941 - protein, 36 aa, Artificial Sequence; identical to SEQ ID NO: 74243
  Cyclic GFR-binding peptide
  MOD_RES (3)..(4)..(35): Xaa is C or S

SEQ ID NO: 114942 - protein, 37 aa, Artificial Sequence; identical to SEQ ID NO: 24127
  Cyclic GFR-binding peptide
  MOD_RES (7)..(7): Xaa is C or S

SEQ ID NO: 114943 - protein, 31 aa, Artificial Sequence; identical to SEQ ID NO: 71036
  Cyclic GFR-binding peptide
  MOD_RES (28)..(30): Xaa is C or S

SEQ ID NO: 114944 - protein, 29 aa, Artificial Sequence
  Cyclic GFR-binding peptide
  MOD_RES (26)..(28): Xaa is C or S
RSVKIAKVVGRKPKVKEVQVMIVRSXKXS

SEQ ID NO: 114945 - protein, 23 aa, Artificial Sequence
  Cyclic GFR-binding peptide
QDLRSVKIAKVIGKTPKIKEVQV

SEQ ID NO: 114946 - protein, 32 aa, Artificial Sequence; identical to SEQ ID NO: 24129
  Cyclic GFR-binding peptide

SEQ ID NO: 114947 - protein, 38 aa, Artificial Sequence; identical to SEQ ID NO: 24130
  Cyclic GFR-binding peptide
  MOD_RES (2)..(36)..(38): Xaa is C or S

SEQ ID NO: 114948 - protein, 29 aa, Artificial Sequence
  Cyclic GFR-binding peptide
VPTGQRPVQMRKIRIKPHQGQHKKATVLE

SEQ ID NO: 114949 - protein, 31 aa, Artificial Sequence; identical to SEQ ID NO: 71042
  Cyclic GFR-binding peptide
  MOD_RES (5)..(6): Xaa is C or S

SEQ ID NO: 114950 - protein, 33 aa, Artificial Sequence; identical to SEQ ID NO: 24133
  Cyclic GFR-binding peptide
  MOD_RES (1)..(1): Xaa is C or S

SEQ ID NO: 114951 - protein, 27 aa, Artificial Sequence
  Cyclic GFR-binding peptide
TQVQLRSVKVAKVEIVRKKPIFKEVQV

SEQ ID NO: 114952 - protein, 34 aa, Artificial Sequence; identical to SEQ ID NO: 24135
  Cyclic GFR-binding peptide
  MOD_RES (34)..(34): Xaa is C or S

SEQ ID NO: 114953 - protein, 31 aa, Artificial Sequence; identical to SEQ ID NO: 24136
  Cyclic GFR-binding peptide
  MOD_RES (4)..(4): Xaa is C or S

SEQ ID NO: 114954 - protein, 36 aa, Artificial Sequence; identical to SEQ ID NO: 71047
  Cyclic GFR-binding peptide
  MOD_RES (4)..(5)..(36): Xaa is C or S

SEQ ID NO: 114955 - protein, 32 aa, Artificial Sequence; identical to SEQ ID NO: 24137
  Cyclic GFR-binding peptide
  MOD_RES (2)..(2): Xaa is C or S

SEQ ID NO: 114956 - protein, 37 aa, Artificial Sequence; identical to SEQ ID NO: 24138
  Cyclic GFR-binding peptide
  MOD_RES (2)..(2): Xaa is C or S

SEQ ID NO: 114957 - protein, 35 aa, Artificial Sequence; identical to SEQ ID NO: 72622
  Cyclic GFR-binding peptide
  MOD_RES (3)..(4)..(35): Xaa is C or S

SEQ ID NO: 114958 - protein, 32 aa, Artificial Sequence; identical to SEQ ID NO: 24141
  Cyclic GFR-binding peptide
  MOD_RES (29)..(31): Xaa is C or S

SEQ ID NO: 114959 - protein, 28 aa, Artificial Sequence
  Cyclic GFR-binding peptide
GQRSVKMAKVRIKPHQGQHKEVQVLEEH

SEQ ID NO: 114960 - protein, 29 aa, Artificial Sequence
  Cyclic GFR-binding peptide
  MOD_RES (29)..(29): Xaa is C or S
QALRSVKIAKVVGRKPKVKEVQVMIVRSX

SEQ ID NO: 114961 - protein, 30 aa, Artificial Sequence; identical to SEQ ID NO: 24146
  Cyclic GFR-binding peptide
  MOD_RES (30)..(30): Xaa is C or S

SEQ ID NO: 114962 - protein, 40 aa, Artificial Sequence; identical to SEQ ID NO: 24148
  Cyclic GFR-binding peptide
  MOD_RES (3)..(37)..(39): Xaa is C or S

SEQ ID NO: 114963 - protein, 39 aa, Artificial Sequence; identical to SEQ ID NO: 74259
  Cyclic GFR-binding peptide
  MOD_RES (6)..(7)..(38): Xaa is C or S

SEQ ID NO: 114964 - protein, 39 aa, Artificial Sequence; identical to SEQ ID NO: 69401
  Cyclic GFR-binding peptide
  MOD_RES (5)..(6)..(37)..(39): Xaa is C or S

SEQ ID NO: 114965 - protein, 31 aa, Artificial Sequence; identical to SEQ ID NO: 72632
  Cyclic GFR-binding peptide
  MOD_RES (29)..(31): Xaa is C or S

SEQ ID NO: 114966 - protein, 24 aa, Artificial Sequence
  Cyclic GFR-binding peptide
LRSVKIAKVVGRKPKVKEVQVMIV

SEQ ID NO: 114967 - protein, 29 aa, Artificial Sequence
  Cyclic GFR-binding peptide
  MOD_RES (1)..(2): Xaa is C or S
XXVSQDLRSVKIAKVIGKTPKIKEVQVMI

SEQ ID NO: 114968 - protein, 37 aa, Artificial Sequence; identical to SEQ ID NO: 24153
  Cyclic GFR-binding peptide
  MOD_RES (36)..(36): Xaa is C or S

SEQ ID NO: 114969 - protein, 27 aa, Artificial Sequence
  Cyclic GFR-binding peptide
VPTGQRPVQMRKIRIKPHQGQHKKATV

SEQ ID NO: 114970 - protein, 44 aa, Artificial Sequence; identical to SEQ ID NO: 24155
  Cyclic GFR-binding peptide
  MOD_RES (7)..(41)..(43): Xaa is C or S

SEQ ID NO: 114971 - protein, 26 aa, Artificial Sequence
  Cyclic GFR-binding peptide
QALRSVKIAKVVGRKPKVKEVQVMIV

SEQ ID NO: 114972 - protein, 28 aa, Artificial Sequence
  Cyclic GFR-binding peptide
  MOD_RES (2)..(3): Xaa is C or S
PXXVSQDLRSVKIAKVIGKTPKIKEVQV

SEQ ID NO: 114973 - protein, 32 aa, Artificial Sequence; identical to SEQ ID NO: 71070
  Cyclic GFR-binding peptide
  MOD_RES (4)..(5): Xaa is C or S

SEQ ID NO: 114974 - protein, 29 aa, Artificial Sequence
  Cyclic GFR-binding peptide
  MOD_RES (1)..(2): Xaa is C or S
XXVPQALRPVQIRKIVGRKPKVKKATVMI

SEQ ID NO: 114975 - protein, 36 aa, Artificial Sequence; identical to SEQ ID NO: 24159
  Cyclic GFR-binding peptide
  MOD_RES (5)..(5): Xaa is C or S

SEQ ID NO: 114976 - protein, 25 aa, Artificial Sequence
  Cyclic GFR-binding peptide
TGQRPVQMRKIRIKPHQGQHKKATV

SEQ ID NO: 114977 - protein, 38 aa, Artificial Sequence; identical to SEQ ID NO: 74280
  Cyclic GFR-binding peptide
  MOD_RES (6)..(7)..(38): Xaa is C or S

SEQ ID NO: 114978 - protein, 35 aa, Artificial Sequence; identical to SEQ ID NO: 71073
  Cyclic GFR-binding peptide
  MOD_RES (1)..(2)..(33)..(35): Xaa is C or S

SEQ ID NO: 114979 - protein, 27 aa, Artificial Sequence
  Cyclic GFR-binding peptide
VPTEERPVQMRKIRIKPHQGQHKKATV

SEQ ID NO: 114980 - protein, 28 aa, Artificial Sequence
  Cyclic GFR-binding peptide
  MOD_RES (27)..(27): Xaa is C or S
LRPVQIRKIIGKTPKIKKATVMIVKSXK

SEQ ID NO: 114981 - protein, 24 aa, Artificial Sequence
  Cyclic GFR-binding peptide
RSVKIAKVIGKTPKIKEVQVMIVK

SEQ ID NO: 114982 - protein, 37 aa, Artificial Sequence; identical to SEQ ID NO: 24166
  Cyclic GFR-binding peptide
  MOD_RES (4)..(4): Xaa is C or S

SEQ ID NO: 114983 - protein, 34 aa, Artificial Sequence; identical to SEQ ID NO: 24167
  Cyclic GFR-binding peptide
  MOD_RES (33)..(33): Xaa is C or S

SEQ ID NO: 114984 - protein, 37 aa, Artificial Sequence; identical to SEQ ID NO: 24168
  Cyclic GFR-binding peptide
  MOD_RES (3)..(37): Xaa is C or S

SEQ ID NO: 114985 - protein, 37 aa, Artificial Sequence; identical to SEQ ID NO: 24170
  Cyclic GFR-binding peptide
  MOD_RES (34)..(36): Xaa is C or S

SEQ ID NO: 114986 - protein, 39 aa, Artificial Sequence; identical to SEQ ID NO: 69436
  Cyclic GFR-binding peptide
  MOD_RES (5)..(6)..(37)..(39): Xaa is C or S

SEQ ID NO: 114987 - protein, 28 aa, Artificial Sequence
  Cyclic GFR-binding peptide
PQALRPVQIRKIVGRKPKVKKATVMIVR

SEQ ID NO: 114988 - protein, 31 aa, Artificial Sequence; identical to SEQ ID NO: 69438
  Cyclic GFR-binding peptide
  MOD_RES (30)..(30): Xaa is C or S

SEQ ID NO: 114989 - protein, 32 aa, Artificial Sequence; identical to SEQ ID NO: 24173
  Cyclic GFR-binding peptide

SEQ ID NO: 114990 - protein, 36 aa, Artificial Sequence; identical to SEQ ID NO: 24174
  Cyclic GFR-binding peptide
  MOD_RES (6)..(6): Xaa is C or S

SEQ ID NO: 114991 - protein, 26 aa, Artificial Sequence
  Cyclic GFR-binding peptide
QRSVKMAKVRIKPHQGQHKEVQVLEE

SEQ ID NO: 114992 - protein, 37 aa, Artificial Sequence; identical to SEQ ID NO: 72650
  Cyclic GFR-binding peptide
  MOD_RES (3)..(4)..(35)..(37): Xaa is C or S

SEQ ID NO: 114993 - protein, 27 aa, Artificial Sequence
  Cyclic GFR-binding peptide
  MOD_RES (1)..(1): Xaa is C or S
XVPQALRSVKIAKVVGRKPKVKEVQVM

SEQ ID NO: 114994 - protein, 38 aa, Artificial Sequence; identical to SEQ ID NO: 24179
  Cyclic GFR-binding peptide
  MOD_RES (1)..(35)..(37): Xaa is C or S

SEQ ID NO: 114995 - protein, 34 aa, Artificial Sequence; identical to SEQ ID NO: 24180
  Cyclic GFR-binding peptide
  MOD_RES (2)..(2): Xaa is C or S

SEQ ID NO: 114996 - protein, 43 aa, Artificial Sequence; identical to SEQ ID NO: 24181
  Cyclic GFR-binding peptide
  MOD_RES (3)..(40)..(42): Xaa is C or S

SEQ ID NO: 114997 - protein, 29 aa, Artificial Sequence
  Cyclic GFR-binding peptide
VPTEERSVKMAKVRIKPHQGQHKEVQVFL

SEQ ID NO: 114998 - protein, 30 aa, Artificial Sequence; identical to SEQ ID NO: 24183
  Cyclic GFR-binding peptide

SEQ ID NO: 114999 - protein, 33 aa, Artificial Sequence; identical to SEQ ID NO: 24186
  Cyclic GFR-binding peptide
  MOD_RES (5)..(5): Xaa is C or S

SEQ ID NO: 115000 - protein, 22 aa, Artificial Sequence
  Cyclic GFR-binding peptide
RPVQMRKIRIKPHQGQHKKATV

SEQ ID NO: 115001 - protein, 36 aa, Artificial Sequence; identical to SEQ ID NO: 71094
  Cyclic GFR-binding peptide
  MOD_RES (2)..(3)..(34)..(36): Xaa is C or S

SEQ ID NO: 115002 - protein, 39 aa, Artificial Sequence; identical to SEQ ID NO: 24190
  Cyclic GFR-binding peptide
  MOD_RES (1)..(38): Xaa is C or S

SEQ ID NO: 115003 - protein, 37 aa, Artificial Sequence; identical to SEQ ID NO: 72658
  Cyclic GFR-binding peptide
  MOD_RES (2)..(3)..(34)..(36): Xaa is C or S

SEQ ID NO: 115004 - protein, 30 aa, Artificial Sequence; identical to SEQ ID NO: 69461
  Cyclic GFR-binding peptide
  MOD_RES (4)..(5): Xaa is C or S

SEQ ID NO: 115005 - protein, 30 aa, Artificial Sequence; identical to SEQ ID NO: 69462
  Cyclic GFR-binding peptide
  MOD_RES (1)..(1): Xaa is C or S

SEQ ID NO: 115006 - protein, 23 aa, Artificial Sequence
  Cyclic GFR-binding peptide
QDLRPVQIRKIVGRTPKVKKATV

SEQ ID NO: 115007 - protein, 31 aa, Artificial Sequence; identical to SEQ ID NO: 74314
  Cyclic GFR-binding peptide
  MOD_RES (2)..(3): Xaa is C or S

SEQ ID NO: 115008 - protein, 36 aa, Artificial Sequence; identical to SEQ ID NO: 69465
  Cyclic GFR-binding peptide
  MOD_RES (6)..(7): Xaa is C or S

SEQ ID NO: 115009 - protein, 42 aa, Artificial Sequence; identical to SEQ ID NO: 24195
  Cyclic GFR-binding peptide
  MOD_RES (4)..(41): Xaa is C or S

SEQ ID NO: 115010 - protein, 24 aa, Artificial Sequence
  Cyclic GFR-binding peptide
RSVKIAKVVGRTPKVKEVQVMVVK

SEQ ID NO: 115011 - protein, 27 aa, Artificial Sequence
  Cyclic GFR-binding peptide
  MOD_RES (26)..(26): Xaa is C or S
RSVKIAKVIGKTPKIKEVQVMIVKSXK

SEQ ID NO: 115012 - protein, 30 aa, Artificial Sequence; identical to SEQ ID NO: 24198
  Cyclic GFR-binding peptide
  MOD_RES (1)..(1): Xaa is C or S

SEQ ID NO: 115013 - protein, 30 aa, Artificial Sequence; identical to SEQ ID NO: 71108
  Cyclic GFR-binding peptide
  MOD_RES (3)..(4): Xaa is C or S

SEQ ID NO: 115014 - protein, 27 aa, Artificial Sequence
  Cyclic GFR-binding peptide
DLRPVQIRKIVGRTPKVKKATVMVVKS

SEQ ID NO: 115015 - protein, 33 aa, Artificial Sequence; identical to SEQ ID NO: 24199
  Cyclic GFR-binding peptide
  MOD_RES (32)..(32): Xaa is C or S

SEQ ID NO: 115016 - protein, 31 aa, Artificial Sequence; identical to SEQ ID NO: 71109
  Cyclic GFR-binding peptide
  MOD_RES (4)..(5): Xaa is C or S

SEQ ID NO: 115017 - protein, 32 aa, Artificial Sequence; identical to SEQ ID NO: 24202
  Cyclic GFR-binding peptide
  MOD_RES (31)..(31): Xaa is C or S

SEQ ID NO: 115018 - protein, 39 aa, Artificial Sequence; identical to SEQ ID NO: 24203
  Cyclic GFR-binding peptide
  MOD_RES (2)..(36)..(38): Xaa is C or S

SEQ ID NO: 115019 - protein, 35 aa, Artificial Sequence; identical to SEQ ID NO: 72678
  Cyclic GFR-binding peptide
  MOD_RES (2)..(3)..(34): Xaa is C or S

SEQ ID NO: 115020 - protein, 38 aa, Artificial Sequence; identical to SEQ ID NO: 69477
  Cyclic GFR-binding peptide
  MOD_RES (4)..(5)..(36)..(38): Xaa is C or S

SEQ ID NO: 115021 - protein, 31 aa, Artificial Sequence; identical to SEQ ID NO: 24208
  Cyclic GFR-binding peptide

SEQ ID NO: 115022 - protein, 23 aa, Artificial Sequence
  Cyclic GFR-binding peptide
LRPVQIRKIVGRTPKVKKATVMV

SEQ ID NO: 115023 - protein, 29 aa, Artificial Sequence
  Cyclic GFR-binding peptide
  MOD_RES (1)..(1): Xaa is C or S
XVPQDLRSVKIAKVVGRTPKVKEVQVMVV

SEQ ID NO: 115024 - protein, 41 aa, Artificial Sequence; identical to SEQ ID NO: 74332
  Cyclic GFR-binding peptide
  MOD_RES (6)..(7)..(38)..(40): Xaa is C or S

SEQ ID NO: 115025 - protein, 32 aa, Artificial Sequence; identical to SEQ ID NO: 24211
  Cyclic GFR-binding peptide

SEQ ID NO: 115026 - protein, 24 aa, Artificial Sequence
  Cyclic GFR-binding peptide
RPVQIRKIIGKTPKIKKATVMIVK

SEQ ID NO: 115027 - protein, 29 aa, Artificial Sequence
  Cyclic GFR-binding peptide
RPVQVRKIEYVRKKPKLKKATVRLEEHLE

SEQ ID NO: 115028 - protein, 28 aa, Artificial Sequence
  Cyclic GFR-binding peptide
VPQALRPVQIRKIVGRKPKVKKATVMIV

SEQ ID NO: 115029 - protein, 27 aa, Artificial Sequence
  Cyclic GFR-binding peptide
  MOD_RES (1)..(1): Xaa is C or S
XVPQALRPVQIRKIVGRKPKVKKATVM

SEQ ID NO: 115030 - protein, 34 aa, Artificial Sequence; identical to SEQ ID NO: 24217
  Cyclic GFR-binding peptide
  MOD_RES (7)..(7): Xaa is C or S

SEQ ID NO: 115031 - protein, 22 aa, Artificial Sequence
  Cyclic GFR-binding peptide
RSVKIAKVVGRKPKVKEVQVMI

SEQ ID NO: 115032 - protein, 41 aa, Artificial Sequence; identical to SEQ ID NO: 24220
  Cyclic GFR-binding peptide
  MOD_RES (5)..(39)..(41): Xaa is C or S

SEQ ID NO: 115033 - protein, 25 aa, Artificial Sequence
  Cyclic GFR-binding peptide
ERSVKMAKVRIKPHQGQHKEVQVFL

SEQ ID NO: 115034 - protein, 34 aa, Artificial Sequence; identical to SEQ ID NO: 72699
  Cyclic GFR-binding peptide
  MOD_RES (5)..(6): Xaa is C or S

SEQ ID NO: 115035 - protein, 24 aa, Artificial Sequence
  Cyclic GFR-binding peptide
GQRSVKMAKVRIKPHQGQHKEVQV

SEQ ID NO: 115036 - protein, 32 aa, Artificial Sequence; identical to SEQ ID NO: 24223
  Cyclic GFR-binding peptide

SEQ ID NO: 115037 - protein, 29 aa, Artificial Sequence
  Cyclic GFR-binding peptide
  MOD_RES (26)..(28): Xaa is C or S
RPVQIRKIVGRTPKVKKATVMVVKSXKXS

SEQ ID NO: 115038 - protein, 40 aa, Artificial Sequence; identical to SEQ ID NO: 72705
  Cyclic GFR-binding peptide
  MOD_RES (5)..(6)..(37)..(39): Xaa is C or S

SEQ ID NO: 115039 - protein, 36 aa, Artificial Sequence; identical to SEQ ID NO: 24225
  Cyclic GFR-binding peptide
  MOD_RES (6)..(6): Xaa is C or S

SEQ ID NO: 115040 - protein, 23 aa, Artificial Sequence
  Cyclic GFR-binding peptide
RSVKIAKVIGKTPKIKEVQVMIV

SEQ ID NO: 115041 - protein, 29 aa, Artificial Sequence
  Cyclic GFR-binding peptide
  MOD_RES (29)..(29): Xaa is C or S
RSVKMAKVRIKPHQGQHKEVQVFLQHNKX

SEQ ID NO: 115042 - protein, 31 aa, Artificial Sequence; identical to SEQ ID NO: 24231
  Cyclic GFR-binding peptide
  MOD_RES (2)..(2): Xaa is C or S

SEQ ID NO: 115043 - protein, 34 aa, Artificial Sequence; identical to SEQ ID NO: 71141
  Cyclic GFR-binding peptide
  MOD_RES (4)..(5): Xaa is C or S

SEQ ID NO: 115044 - protein, 28 aa, Artificial Sequence
  Cyclic GFR-binding peptide
  MOD_RES (1)..(1): Xaa is C or S
XVSQDLRSVKIAKVIGKTPKIKEVQVMI

SEQ ID NO: 115045 - protein, 36 aa, Artificial Sequence; identical to SEQ ID NO: 24232
  Cyclic GFR-binding peptide
  MOD_RES (33)..(35): Xaa is C or S

SEQ ID NO: 115046 - protein, 43 aa, Artificial Sequence; identical to SEQ ID NO: 24234
  Cyclic GFR-binding peptide
  MOD_RES (6)..(40)..(42): Xaa is C or S

SEQ ID NO: 115047 - protein, 35 aa, Artificial Sequence; identical to SEQ ID NO: 24236
  Cyclic GFR-binding peptide
  MOD_RES (5)..(5): Xaa is C or S

SEQ ID NO: 115048 - protein, 29 aa, Artificial Sequence
  Cyclic GFR-binding peptide
  MOD_RES (1)..(2): Xaa is C or S
XXVPQDLRSVKIAKVVGRTPKVKEVQVMV

SEQ ID NO: 115049 - protein, 32 aa, Artificial Sequence; identical to SEQ ID NO: 72715
  Cyclic GFR-binding peptide
  MOD_RES (6)..(7): Xaa is C or S

SEQ ID NO: 115050 - protein, 40 aa, Artificial Sequence; identical to SEQ ID NO: 24239
  Cyclic GFR-binding peptide
  MOD_RES (5)..(5): Xaa is C or S

SEQ ID NO: 115051 - protein, 27 aa, Artificial Sequence
  Cyclic GFR-binding peptide
QALRPVQIRKIVGRKPKVKKATVMIVR

SEQ ID NO: 115052 - protein, 27 aa, Artificial Sequence
  Cyclic GFR-binding peptide
RVHHRPVQVRKIEYVRKKPKLKKATVR

SEQ ID NO: 115053 - protein, 34 aa, Artificial Sequence; identical to SEQ ID NO: 74361
  Cyclic GFR-binding peptide
  MOD_RES (1)..(2)..(33): Xaa is C or S

SEQ ID NO: 115054 - protein, 35 aa, Artificial Sequence; identical to SEQ ID NO: 24243
  Cyclic GFR-binding peptide

SEQ ID NO: 115055 - protein, 36 aa, Artificial Sequence; identical to SEQ ID NO: 24244
  Cyclic GFR-binding peptide
  MOD_RES (2)..(2): Xaa is C or S

SEQ ID NO: 115056 - protein, 30 aa, Artificial Sequence; identical to SEQ ID NO: 24245
  Cyclic GFR-binding peptide

SEQ ID NO: 115057 - protein, 35 aa, Artificial Sequence; identical to SEQ ID NO: 74365
  Cyclic GFR-binding peptide
  MOD_RES (3)..(4)..(35): Xaa is C or S

SEQ ID NO: 115058 - protein, 26 aa, Artificial Sequence
  Cyclic GFR-binding peptide
PTEERSVKMAKVRIKPHQGQHKEVQV

SEQ ID NO: 115059 - protein, 33 aa, Artificial Sequence; identical to SEQ ID NO: 74369
  Cyclic GFR-binding peptide
  MOD_RES (1)..(2)..(33): Xaa is C or S

SEQ ID NO: 115060 - protein, 30 aa, Artificial Sequence; identical to SEQ ID NO: 69519
  Cyclic GFR-binding peptide
  MOD_RES (1)..(1): Xaa is C or S

SEQ ID NO: 115061 - protein, 37 aa, Artificial Sequence; identical to SEQ ID NO: 24253
  Cyclic GFR-binding peptide
  MOD_RES (35)..(37): Xaa is C or S

SEQ ID NO: 115062 - protein, 29 aa, Artificial Sequence
  Cyclic GFR-binding peptide
PSRVHHRPVQVRKIEYVRKKPKLKKATVR

SEQ ID NO: 115063 - protein, 34 aa, Artificial Sequence; identical to SEQ ID NO: 74373
  Cyclic GFR-binding peptide
  MOD_RES (6)..(7): Xaa is C or S

SEQ ID NO: 115064 - protein, 34 aa, Artificial Sequence; identical to SEQ ID NO: 24257
  Cyclic GFR-binding peptide
  MOD_RES (6)..(6): Xaa is C or S

SEQ ID NO: 115065 - protein, 39 aa, Artificial Sequence; identical to SEQ ID NO: 24259
  Cyclic GFR-binding peptide
  MOD_RES (2)..(39): Xaa is C or S

SEQ ID NO: 115066 - protein, 30 aa, Artificial Sequence; identical to SEQ ID NO: 74375
  Cyclic GFR-binding peptide
  MOD_RES (30)..(30): Xaa is C or S

SEQ ID NO: 115067 - protein, 37 aa, Artificial Sequence; identical to SEQ ID NO: 24261
  Cyclic GFR-binding peptide
  MOD_RES (35)..(37): Xaa is C or S

SEQ ID NO: 115068 - protein, 33 aa, Artificial Sequence; identical to SEQ ID NO: 24262
  Cyclic GFR-binding peptide
  MOD_RES (5)..(5): Xaa is C or S

SEQ ID NO: 115069 - protein, 34 aa, Artificial Sequence; identical to SEQ ID NO: 74376
  Cyclic GFR-binding peptide
  MOD_RES (1)..(32)..(34): Xaa is C or S

SEQ ID NO: 115070 - protein, 26 aa, Artificial Sequence
  Cyclic GFR-binding peptide
QDLRPVQIRKIVGRTPKVKKATVMVV

SEQ ID NO: 115071 - protein, 43 aa, Artificial Sequence; identical to SEQ ID NO: 24263
  Cyclic GFR-binding peptide
  MOD_RES (6)..(40)..(42): Xaa is C or S

SEQ ID NO: 115072 - protein, 32 aa, Artificial Sequence; identical to SEQ ID NO: 74377
  Cyclic GFR-binding peptide
  MOD_RES (1)..(32): Xaa is C or S

SEQ ID NO: 115073 - protein, 33 aa, Artificial Sequence; identical to SEQ ID NO: 24265
  Cyclic GFR-binding peptide
  MOD_RES (6)..(6): Xaa is C or S

SEQ ID NO: 115074 - protein, 29 aa, Artificial Sequence
  Cyclic GFR-binding peptide
  MOD_RES (28)..(28): Xaa is C or S
DLRPVQIRKIIGKTPKIKKATVMIVKSXK

SEQ ID NO: 115075 - protein, 30 aa, Artificial Sequence; identical to SEQ ID NO: 24268
  Cyclic GFR-binding peptide

SEQ ID NO: 115076 - protein, 25 aa, Artificial Sequence
  Cyclic GFR-binding peptide
VPQDLRSVKIAKVVGRTPKVKEVQV

SEQ ID NO: 115077 - protein, 33 aa, Artificial Sequence; identical to SEQ ID NO: 71166
  Cyclic GFR-binding peptide
  MOD_RES (31)..(33): Xaa is C or S

SEQ ID NO: 115078 - protein, 38 aa, Artificial Sequence; identical to SEQ ID NO: 24269
  Cyclic GFR-binding peptide
  MOD_RES (1)..(38): Xaa is C or S

SEQ ID NO: 115079 - protein, 31 aa, Artificial Sequence; identical to SEQ ID NO: 24270
  Cyclic GFR-binding peptide

SEQ ID NO: 115080 - protein, 35 aa, Artificial Sequence; identical to SEQ ID NO: 72737
  Cyclic GFR-binding peptide
  MOD_RES (1)..(2)..(33)..(35): Xaa is C or S

SEQ ID NO: 115081 - protein, 30 aa, Artificial Sequence; identical to SEQ ID NO: 71169
  Cyclic GFR-binding peptide
  MOD_RES (1)..(1): Xaa is C or S

SEQ ID NO: 115082 - protein, 29 aa, Artificial Sequence
  Cyclic GFR-binding peptide
  MOD_RES (1)..(1): Xaa is C or S
XVPTEERPVQMRKIRIKPHQGQHKKATVF

SEQ ID NO: 115083 - protein, 38 aa, Artificial Sequence; identical to SEQ ID NO: 24274
  Cyclic GFR-binding peptide
  MOD_RES (3)..(3): Xaa is C or S

SEQ ID NO: 115084 - protein, 26 aa, Artificial Sequence
  Cyclic GFR-binding peptide
RVHHRPVQVRKIEYVRKKPKLKKATV

SEQ ID NO: 115085 - protein, 38 aa, Artificial Sequence; identical to SEQ ID NO: 71178
  Cyclic GFR-binding peptide
  MOD_RES (3)..(4)..(35)..(37): Xaa is C or S

SEQ ID NO: 115086 - protein, 28 aa, Artificial Sequence
  Cyclic GFR-binding peptide
  MOD_RES (1)..(1): Xaa is C or S
XVPTEERPVQMRKIRIKPHQGQHKKATV

SEQ ID NO: 115087 - protein, 24 aa, Artificial Sequence
  Cyclic GFR-binding peptide
RSVKMAKVRIKPHQGQHKEVQVLE

SEQ ID NO: 115088 - protein, 39 aa, Artificial Sequence; identical to SEQ ID NO: 24280
  Cyclic GFR-binding peptide
  MOD_RES (7)..(7): Xaa is C or S

SEQ ID NO: 115089 - protein, 26 aa, Artificial Sequence
  Cyclic GFR-binding peptide
  MOD_RES (1)..(1): Xaa is C or S
XVPQALRSVKIAKVVGRKPKVKEVQV

SEQ ID NO: 115090 - protein, 29 aa, Artificial Sequence
  Cyclic GFR-binding peptide
  MOD_RES (29)..(29): Xaa is C or S
QDLRSVKIAKVIGKTPKIKEVQVMIVKSX

SEQ ID NO: 115091 - protein, 37 aa, Artificial Sequence; identical to SEQ ID NO: 71187
  Cyclic GFR-binding peptide
  MOD_RES (2)..(3)..(34)..(36): Xaa is C or S

SEQ ID NO: 115092 - protein, 40 aa, Artificial Sequence; identical to SEQ ID NO: 24282
  Cyclic GFR-binding peptide
  MOD_RES (5)..(39): Xaa is C or S

SEQ ID NO: 115093 - protein, 30 aa, Artificial Sequence; identical to SEQ ID NO: 74390
  Cyclic GFR-binding peptide
  MOD_RES (27)..(29): Xaa is C or S

SEQ ID NO: 115094 - protein, 33 aa, Artificial Sequence; identical to SEQ ID NO: 24283
  Cyclic GFR-binding peptide
  MOD_RES (2)..(2): Xaa is C or S

SEQ ID NO: 115095 - protein, 39 aa, Artificial Sequence; identical to SEQ ID NO: 24284
  Cyclic GFR-binding peptide
  MOD_RES (3)..(37)..(39): Xaa is C or S

SEQ ID NO: 115096 - protein, 26 aa, Artificial Sequence
  Cyclic GFR-binding peptide
  MOD_RES (1)..(1): Xaa is C or S
XVSQDLRSVKIAKVIGKTPKIKEVQV

SEQ ID NO: 115097 - protein, 34 aa, Artificial Sequence; identical to SEQ ID NO: 24285
  Cyclic GFR-binding peptide
  MOD_RES (33)..(33): Xaa is C or S

SEQ ID NO: 115098 - protein, 34 aa, Artificial Sequence; identical to SEQ ID NO: 24288
  Cyclic GFR-binding peptide
  MOD_RES (31)..(33): Xaa is C or S

SEQ ID NO: 115099 - protein, 31 aa, Artificial Sequence; identical to SEQ ID NO: 24289
  Cyclic GFR-binding peptide
  MOD_RES (2)..(2): Xaa is C or S

SEQ ID NO: 115100 - protein, 34 aa, Artificial Sequence; identical to SEQ ID NO: 69559
  Cyclic GFR-binding peptide
  MOD_RES (1)..(2)..(33): Xaa is C or S

SEQ ID NO: 115101 - protein, 30 aa, Artificial Sequence; identical to SEQ ID NO: 69560
  Cyclic GFR-binding peptide
  MOD_RES (30)..(30): Xaa is C or S

SEQ ID NO: 115102 - protein, 30 aa, Artificial Sequence; identical to SEQ ID NO: 74392
  Cyclic GFR-binding peptide
  MOD_RES (3)..(4): Xaa is C or S

SEQ ID NO: 115103 - protein, 36 aa, Artificial Sequence; identical to SEQ ID NO: 74393
  Cyclic GFR-binding peptide
  MOD_RES (4)..(5)..(36): Xaa is C or S

SEQ ID NO: 115104 - protein, 29 aa, Artificial Sequence
  Cyclic GFR-binding peptide
EERPVQMRKIRIKPHQGQHKKATVFLQHN

SEQ ID NO: 115105 - protein, 39 aa, Artificial Sequence; identical to SEQ ID NO: 24294
  Cyclic GFR-binding peptide
  MOD_RES (3)..(37)..(39): Xaa is C or S

SEQ ID NO: 115106 - protein, 32 aa, Artificial Sequence; identical to SEQ ID NO: 69568
  Cyclic GFR-binding peptide
  MOD_RES (2)..(3): Xaa is C or S

SEQ ID NO: 115107 - protein, 38 aa, Artificial Sequence; identical to SEQ ID NO: 24296
  Cyclic GFR-binding peptide
  MOD_RES (6)..(6): Xaa is C or S

SEQ ID NO: 115108 - protein, 33 aa, Artificial Sequence; identical to SEQ ID NO: 24297
  Cyclic GFR-binding peptide
  MOD_RES (33)..(33): Xaa is C or S

SEQ ID NO: 115109 - protein, 41 aa, Artificial Sequence; identical to SEQ ID NO: 24298
  Cyclic GFR-binding peptide
  MOD_RES (6)..(40): Xaa is C or S

SEQ ID NO: 115110 - protein, 27 aa, Artificial Sequence
  Cyclic GFR-binding peptide
SQDLRPVQIRKIIGKTPKIKKATVMIV

SEQ ID NO: 115111 - protein, 27 aa, Artificial Sequence
  Cyclic GFR-binding peptide
  MOD_RES (1)..(1): Xaa is C or S
XVPQDLRPVQIRKIVGRTPKVKKATVM

SEQ ID NO: 115112 - protein, 36 aa, Artificial Sequence; identical to SEQ ID NO: 24302
  Cyclic GFR-binding peptide
  MOD_RES (34)..(36): Xaa is C or S

SEQ ID NO: 115113 - protein, 23 aa, Artificial Sequence
  Cyclic GFR-binding peptide
DLRSVKIAKVVGRTPKVKEVQVM

SEQ ID NO: 115114 - protein, 34 aa, Artificial Sequence; identical to SEQ ID NO: 74401
  Cyclic GFR-binding peptide
  MOD_RES (1)..(32)..(34): Xaa is C or S

SEQ ID NO: 115115 - protein, 34 aa, Artificial Sequence; identical to SEQ ID NO: 24303
  Cyclic GFR-binding peptide
  MOD_RES (3)..(3): Xaa is C or S

SEQ ID NO: 115116 - protein, 23 aa, Artificial Sequence
  Cyclic GFR-binding peptide
LRSVKIAKVIGKTPKIKEVQVMI

SEQ ID NO: 115117 - protein, 34 aa, Artificial Sequence; identical to SEQ ID NO: 24305
  Cyclic GFR-binding peptide
  MOD_RES (32)..(34): Xaa is C or S

SEQ ID NO: 115118 - protein, 37 aa, Artificial Sequence; identical to SEQ ID NO: 24309
  Cyclic GFR-binding peptide
  MOD_RES (6)..(6): Xaa is C or S

SEQ ID NO: 115119 - protein, 30 aa, Artificial Sequence; identical to SEQ ID NO: 24312
  Cyclic GFR-binding peptide
  MOD_RES (1)..(1): Xaa is C or S

SEQ ID NO: 115120 - protein, 35 aa, Artificial Sequence; identical to SEQ ID NO: 72774
  Cyclic GFR-binding peptide
  MOD_RES (1)..(2)..(33)..(35): Xaa is C or S

SEQ ID NO: 115121 - protein, 42 aa, Artificial Sequence; identical to SEQ ID NO: 24315
  Cyclic GFR-binding peptide
  MOD_RES (4)..(41): Xaa is C or S

SEQ ID NO: 115122 - protein, 25 aa, Artificial Sequence
  Cyclic GFR-binding peptide
QLRSVKVAKVEIVRKKPIFKEVQVT

SEQ ID NO: 115123 - protein, 34 aa, Artificial Sequence; identical to SEQ ID NO: 69579
  Cyclic GFR-binding peptide
  MOD_RES (3)..(4): Xaa is C or S

SEQ ID NO: 115124 - protein, 40 aa, Artificial Sequence; identical to SEQ ID NO: 24317
  Cyclic GFR-binding peptide
  MOD_RES (5)..(39): Xaa is C or S

SEQ ID NO: 115125 - protein, 33 aa, Artificial Sequence; identical to SEQ ID NO: 71222
  Cyclic GFR-binding peptide
  MOD_RES (6)..(7): Xaa is C or S

SEQ ID NO: 115126 - protein, 36 aa, Artificial Sequence; identical to SEQ ID NO: 71225
  Cyclic GFR-binding peptide
  MOD_RES (3)..(4)..(35): Xaa is C or S

SEQ ID NO: 115127 - protein, 42 aa, Artificial Sequence; identical to SEQ ID NO: 24320
  Cyclic GFR-binding peptide
  MOD_RES (2)..(39)..(41): Xaa is C or S

SEQ ID NO: 115128 - protein, 20 aa, Artificial Sequence
  Cyclic GFR-binding peptide
RSVKIAKVIGKTPKIKEVQV

SEQ ID NO: 115129 - protein, 34 aa, Artificial Sequence; identical to SEQ ID NO: 24321
  Cyclic GFR-binding peptide
  MOD_RES (1)..(1): Xaa is C or S

SEQ ID NO: 115130 - protein, 28 aa, Artificial Sequence
  Cyclic GFR-binding peptide
  MOD_RES (2)..(3): Xaa is C or S
PXXVPQDLRPVQIRKIVGRTPKVKKATV

SEQ ID NO: 115131 - protein, 44 aa, Artificial Sequence; identical to SEQ ID NO: 24323
  Cyclic GFR-binding peptide
  MOD_RES (5)..(42)..(44): Xaa is C or S

SEQ ID NO: 115132 - protein, 31 aa, Artificial Sequence; identical to SEQ ID NO: 71234
  Cyclic GFR-binding peptide
  MOD_RES (3)..(4): Xaa is C or S

SEQ ID NO: 115133 - protein, 30 aa, Artificial Sequence; identical to SEQ ID NO: 24326
  Cyclic GFR-binding peptide
  MOD_RES (30)..(30): Xaa is C or S

SEQ ID NO: 115134 - protein, 28 aa, Artificial Sequence
  Cyclic GFR-binding peptide
PQALRSVKIAKVVGRKPKVKEVQVMIVR

SEQ ID NO: 115135 - protein, 25 aa, Artificial Sequence
  Cyclic GFR-binding peptide
HHRPVQVRKIEYVRKKPKLKKATVR

SEQ ID NO: 115136 - protein, 39 aa, Artificial Sequence; identical to SEQ ID NO: 24331
  Cyclic GFR-binding peptide
  MOD_RES (5)..(5): Xaa is C or S

SEQ ID NO: 115137 - protein, 35 aa, Artificial Sequence; identical to SEQ ID NO: 24333
  Cyclic GFR-binding peptide
  MOD_RES (7)..(7): Xaa is C or S

SEQ ID NO: 115138 - protein, 30 aa, Artificial Sequence; identical to SEQ ID NO: 74430
  Cyclic GFR-binding peptide
  MOD_RES (27)..(29): Xaa is C or S

SEQ ID NO: 115139 - protein, 33 aa, Artificial Sequence; identical to SEQ ID NO: 24338
  Cyclic GFR-binding peptide
  MOD_RES (30)..(32): Xaa is C or S

SEQ ID NO: 115140 - protein, 29 aa, Artificial Sequence
  Cyclic GFR-binding peptide
SQDLRPVQIRKIIGKTPKIKKATVMIVKS

SEQ ID NO: 115141 - protein, 33 aa, Artificial Sequence; identical to SEQ ID NO: 71242
  Cyclic GFR-binding peptide
  MOD_RES (1)..(2)..(33): Xaa is C or S

SEQ ID NO: 115142 - protein, 32 aa, Artificial Sequence; identical to SEQ ID NO: 24343
  Cyclic GFR-binding peptide
  MOD_RES (32)..(32): Xaa is C or S

SEQ ID NO: 115143 - protein, 37 aa, Artificial Sequence; identical to SEQ ID NO: 24344
  Cyclic GFR-binding peptide
  MOD_RES (7)..(7): Xaa is C or S

SEQ ID NO: 115144 - protein, 36 aa, Artificial Sequence; identical to SEQ ID NO: 24345
  Cyclic GFR-binding peptide
  MOD_RES (5)..(5): Xaa is C or S

SEQ ID NO: 115145 - protein, 43 aa, Artificial Sequence; identical to SEQ ID NO: 24346
  Cyclic GFR-binding peptide
  MOD_RES (4)..(41)..(43): Xaa is C or S

SEQ ID NO: 115146 - protein, 34 aa, Artificial Sequence; identical to SEQ ID NO: 24347
  Cyclic GFR-binding peptide
  MOD_RES (5)..(5): Xaa is C or S

SEQ ID NO: 115147 - protein, 34 aa, Artificial Sequence; identical to SEQ ID NO: 24348
  Cyclic GFR-binding peptide
  MOD_RES (34)..(34): Xaa is C or S

SEQ ID NO: 115148 - protein, 35 aa, Artificial Sequence; identical to SEQ ID NO: 72804
  Cyclic GFR-binding peptide
  MOD_RES (2)..(3)..(34): Xaa is C or S

SEQ ID NO: 115149 - protein, 41 aa, Artificial Sequence; identical to SEQ ID NO: 24349
  Cyclic GFR-binding peptide
  MOD_RES (5)..(39)..(41): Xaa is C or S

SEQ ID NO: 115150 - protein, 39 aa, Artificial Sequence; identical to SEQ ID NO: 24350
  Cyclic GFR-binding peptide
  MOD_RES (6)..(6): Xaa is C or S

SEQ ID NO: 115151 - protein, 30 aa, Artificial Sequence; identical to SEQ ID NO: 72814
  Cyclic GFR-binding peptide
  MOD_RES (29)..(29): Xaa is C or S

SEQ ID NO: 115152 - protein, 34 aa, Artificial Sequence; identical to SEQ ID NO: 24354
  Cyclic GFR-binding peptide
  MOD_RES (3)..(3): Xaa is C or S

SEQ ID NO: 115153 - protein, 33 aa, Artificial Sequence; identical to SEQ ID NO: 24355
  Cyclic GFR-binding peptide

SEQ ID NO: 115154 - protein, 36 aa, Artificial Sequence; identical to SEQ ID NO: 24356
  Cyclic GFR-binding peptide
  MOD_RES (33)..(35): Xaa is C or S

SEQ ID NO: 115155 - protein, 33 aa, Artificial Sequence; identical to SEQ ID NO: 24359
  Cyclic GFR-binding peptide
  MOD_RES (31)..(33): Xaa is C or S

SEQ ID NO: 115156 - protein, 32 aa, Artificial Sequence; identical to SEQ ID NO: 24360
  Cyclic GFR-binding peptide
  MOD_RES (31)..(31): Xaa is C or S

SEQ ID NO: 115157 - protein, 27 aa, Artificial Sequence
  Cyclic GFR-binding peptide
VPTEERSVKMAKVRIKPHQGQHKEVQV

SEQ ID NO: 115158 - protein, 27 aa, Artificial Sequence
  Cyclic GFR-binding peptide
  MOD_RES (27)..(27): Xaa is C or S
LRSVKIAKVIGKTPKIKEVQVMIVKSX

SEQ ID NO: 115159 - protein, 35 aa, Artificial Sequence; identical to SEQ ID NO: 72829
  Cyclic GFR-binding peptide
  MOD_RES (4)..(5): Xaa is C or S

SEQ ID NO: 115160 - protein, 36 aa, Artificial Sequence; identical to SEQ ID NO: 74455
  Cyclic GFR-binding peptide
  MOD_RES (1)..(2)..(33)..(35): Xaa is C or S

SEQ ID NO: 115161 - protein, 39 aa, Artificial Sequence; identical to SEQ ID NO: 72836
  Cyclic GFR-binding peptide
  MOD_RES (4)..(5)..(36)..(38): Xaa is C or S

SEQ ID NO: 115162 - protein, 28 aa, Artificial Sequence
  Cyclic GFR-binding peptide
TGQRSVKMAKVRIKPHQGQHKEVQVLEE

SEQ ID NO: 115163 - protein, 32 aa, Artificial Sequence; identical to SEQ ID NO: 24368
  Cyclic GFR-binding peptide
  MOD_RES (32)..(32): Xaa is C or S

SEQ ID NO: 115164 - protein, 41 aa, Artificial Sequence; identical to SEQ ID NO: 24369
  Cyclic GFR-binding peptide
  MOD_RES (7)..(41): Xaa is C or S

SEQ ID NO: 115165 - protein, 29 aa, Artificial Sequence
  Cyclic GFR-binding peptide
QPSRVHHRPVQVRKIEYVRKKPKLKKATV

SEQ ID NO: 115166 - protein, 29 aa, Artificial Sequence
  Cyclic GFR-binding peptide
  MOD_RES (1)..(1): Xaa is C or S
XVPTEERSVKMAKVRIKPHQGQHKEVQVF

SEQ ID NO: 115167 - protein, 30 aa, Artificial Sequence; identical to SEQ ID NO: 74464
  Cyclic GFR-binding peptide
  MOD_RES (28)..(30): Xaa is C or S

SEQ ID NO: 115168 - protein, 34 aa, Artificial Sequence; identical to SEQ ID NO: 24375
  Cyclic GFR-binding peptide
  MOD_RES (2)..(2): Xaa is C or S

SEQ ID NO: 115169 - protein, 44 aa, Artificial Sequence; identical to SEQ ID NO: 24376
  Cyclic GFR-binding peptide
  MOD_RES (5)..(42)..(44): Xaa is C or S

SEQ ID NO: 115170 - protein, 26 aa, Artificial Sequence
  Cyclic GFR-binding peptide
PTGQRPVQMRKIRIKPHQGQHKKATV

SEQ ID NO: 115171 - protein, 25 aa, Artificial Sequence
  Cyclic GFR-binding peptide
RPVQIRKIIGKTPKIKKATVMIVKS

SEQ ID NO: 115172 - protein, 32 aa, Artificial Sequence; identical to SEQ ID NO: 24378
  Cyclic GFR-binding peptide
  MOD_RES (2)..(2): Xaa is C or S

SEQ ID NO: 115173 - protein, 22 aa, Artificial Sequence
  Cyclic GFR-binding peptide
LRSVKIAKVVGRTPKVKEVQVM

SEQ ID NO: 115174 - protein, 30 aa, Artificial Sequence; identical to SEQ ID NO: 71268
  Cyclic GFR-binding peptide

SEQ ID NO: 115175 - protein, 37 aa, Artificial Sequence; identical to SEQ ID NO: 24384
  Cyclic GFR-binding peptide
  MOD_RES (34)..(36): Xaa is C or S

SEQ ID NO: 115176 - protein, 33 aa, Artificial Sequence; identical to SEQ ID NO: 71273
  Cyclic GFR-binding peptide
  MOD_RES (2)..(3): Xaa is C or S

SEQ ID NO: 115177 - protein, 29 aa, Artificial Sequence
  Cyclic GFR-binding peptide
PTEERPVQMRKIRIKPHQGQHKKATVFLQ

SEQ ID NO: 115178 - protein, 28 aa, Artificial Sequence
  Cyclic GFR-binding peptide
SQDLRPVQIRKIIGKTPKIKKATVMIVK

SEQ ID NO: 115179 - protein, 37 aa, Artificial Sequence; identical to SEQ ID NO: 74481
  Cyclic GFR-binding peptide
  MOD_RES (4)..(5)..(36): Xaa is C or S

SEQ ID NO: 115180 - protein, 32 aa, Artificial Sequence; identical to SEQ ID NO: 24389
  Cyclic GFR-binding peptide
  MOD_RES (3)..(3): Xaa is C or S

SEQ ID NO: 115181 - protein, 31 aa, Artificial Sequence; identical to SEQ ID NO: 24390
  Cyclic GFR-binding peptide

SEQ ID NO: 115182 - protein, 33 aa, Artificial Sequence; identical to SEQ ID NO: 24391
  Cyclic GFR-binding peptide

SEQ ID NO: 115183 - protein, 28 aa, Artificial Sequence
  Cyclic GFR-binding peptide
PTEERPVQMRKIRIKPHQGQHKKATVFL

SEQ ID NO: 115184 - protein, 22 aa, Artificial Sequence
  Cyclic GFR-binding peptide
DLRSVKIAKVVGRTPKVKEVQV

SEQ ID NO: 115185 - protein, 30 aa, Artificial Sequence; identical to SEQ ID NO: 72855
  Cyclic GFR-binding peptide
  MOD_RES (4)..(5): Xaa is C or S

SEQ ID NO: 115186 - protein, 32 aa, Artificial Sequence; identical to SEQ ID NO: 24396
  Cyclic GFR-binding peptide

SEQ ID NO: 115187 - protein, 30 aa, Artificial Sequence; identical to SEQ ID NO: 24397
  Cyclic GFR-binding peptide

SEQ ID NO: 115188 - protein, 23 aa, Artificial Sequence
  Cyclic GFR-binding peptide
ALRSVKIAKVVGRKPKVKEVQVM

SEQ ID NO: 115189 - protein, 34 aa, Artificial Sequence; identical to SEQ ID NO: 24402
  Cyclic GFR-binding peptide
  MOD_RES (34)..(34): Xaa is C or S

SEQ ID NO: 115190 - protein, 40 aa, Artificial Sequence; identical to SEQ ID NO: 71286
  Cyclic GFR-binding peptide
  MOD_RES (5)..(6)..(37)..(39): Xaa is C or S

SEQ ID NO: 115191 - protein, 38 aa, Artificial Sequence; identical to SEQ ID NO: 24405
  Cyclic GFR-binding peptide
  MOD_RES (1)..(35)..(37): Xaa is C or S

SEQ ID NO: 115192 - protein, 22 aa, Artificial Sequence
  Cyclic GFR-binding peptide
RSVKMAKVRIKPHQGQHKEVQV

SEQ ID NO: 115193 - protein, 29 aa, Artificial Sequence
  Cyclic GFR-binding peptide
VSQDLRPVQIRKIIGKTPKIKKATVMIVK

SEQ ID NO: 115194 - protein, 33 aa, Artificial Sequence; identical to SEQ ID NO: 24407
  Cyclic GFR-binding peptide
  MOD_RES (3)..(3): Xaa is C or S

SEQ ID NO: 115195 - protein, 26 aa, Artificial Sequence
  Cyclic GFR-binding peptide
GQRPVQMRKIRIKPHQGQHKKATVLE

SEQ ID NO: 115196 - protein, 45 aa, Artificial Sequence; identical to SEQ ID NO: 24410
  Cyclic GFR-binding peptide
  MOD_RES (5)..(42)..(44): Xaa is C or S

SEQ ID NO: 115197 - protein, 28 aa, Artificial Sequence
  Cyclic GFR-binding peptide
  MOD_RES (26)..(28): Xaa is C or S
RPVQIRKIVGRTPKVKKATVMVVKSXKX

SEQ ID NO: 115198 - protein, 34 aa, Artificial Sequence; identical to SEQ ID NO: 74497
  Cyclic GFR-binding peptide
  MOD_RES (1)..(2)..(33): Xaa is C or S

SEQ ID NO: 115199 - protein, 37 aa, Artificial Sequence; identical to SEQ ID NO: 74498
  Cyclic GFR-binding peptide
  MOD_RES (5)..(6)..(37): Xaa is C or S

SEQ ID NO: 115200 - protein, 27 aa, Artificial Sequence
  Cyclic GFR-binding peptide
PQALRSVKIAKVVGRKPKVKEVQVMIV

SEQ ID NO: 115201 - protein, 32 aa, Artificial Sequence; identical to SEQ ID NO: 24411
  Cyclic GFR-binding peptide

SEQ ID NO: 115202 - protein, 36 aa, Artificial Sequence; identical to SEQ ID NO: 24412
  Cyclic GFR-binding peptide
  MOD_RES (7)..(7): Xaa is C or S

SEQ ID NO: 115203 - protein, 30 aa, Artificial Sequence; identical to SEQ ID NO: 24415
  Cyclic GFR-binding peptide
  MOD_RES (29)..(29): Xaa is C or S

SEQ ID NO: 115204 - protein, 32 aa, Artificial Sequence; identical to SEQ ID NO: 24416
  Cyclic GFR-binding peptide
  MOD_RES (4)..(4): Xaa is C or S

SEQ ID NO: 115205 - protein, 29 aa, Artificial Sequence
  Cyclic GFR-binding peptide
  MOD_RES (28)..(28): Xaa is C or S
DLRSVKIAKVIGKTPKIKEVQVMIVKSXK

SEQ ID NO: 115206 - protein, 27 aa, Artificial Sequence
  Cyclic GFR-binding peptide
  MOD_RES (1)..(1): Xaa is C or S
XVSQDLRPVQIRKIIGKTPKIKKATVM

SEQ ID NO: 115207 - protein, 34 aa, Artificial Sequence; identical to SEQ ID NO: 24420
  Cyclic GFR-binding peptide
  MOD_RES (6)..(6): Xaa is C or S

SEQ ID NO: 115208 - protein, 30 aa, Artificial Sequence; identical to SEQ ID NO: 72873
  Cyclic GFR-binding peptide
  MOD_RES (27)..(29): Xaa is C or S

SEQ ID NO: 115209 - protein, 38 aa, Artificial Sequence; identical to SEQ ID NO: 24425
  Cyclic GFR-binding peptide
  MOD_RES (3)..(37): Xaa is C or S

SEQ ID NO: 115210 - protein, 34 aa, Artificial Sequence; identical to SEQ ID NO: 24426
  Cyclic GFR-binding peptide
  MOD_RES (4)..(4): Xaa is C or S

SEQ ID NO: 115211 - protein, 33 aa, Artificial Sequence; identical to SEQ ID NO: 24428
  Cyclic GFR-binding peptide
  MOD_RES (33)..(33): Xaa is C or S

SEQ ID NO: 115212 - protein, 31 aa, Artificial Sequence; identical to SEQ ID NO: 71303
  Cyclic GFR-binding peptide
  MOD_RES (29)..(31): Xaa is C or S

SEQ ID NO: 115213 - protein, 28 aa, Artificial Sequence
  Cyclic GFR-binding peptide
SRVHHRPVQVRKIEYVRKKPKLKKATVR

SEQ ID NO: 115214 - protein, 39 aa, Artificial Sequence; identical to SEQ ID NO: 24432
  Cyclic GFR-binding peptide
  MOD_RES (2)..(36)..(38): Xaa is C or S

SEQ ID NO: 115215 - protein, 30 aa, Artificial Sequence; identical to SEQ ID NO: 24433
  Cyclic GFR-binding peptide
  MOD_RES (1)..(1): Xaa is C or S

SEQ ID NO: 115216 - protein, 25 aa, Artificial Sequence
  Cyclic GFR-binding peptide
LRSVKIAKVIGKTPKIKEVQVMIVK

SEQ ID NO: 115217 - protein, 36 aa, Artificial Sequence; identical to SEQ ID NO: 24436
  Cyclic GFR-binding peptide
  MOD_RES (34)..(36): Xaa is C or S

SEQ ID NO: 115218 - protein, 31 aa, Artificial Sequence; identical to SEQ ID NO: 24437
  Cyclic GFR-binding peptide
  MOD_RES (1)..(1): Xaa is C or S

SEQ ID NO: 115219 - protein, 28 aa, Artificial Sequence
  Cyclic GFR-binding peptide
TQVQLRSVKVAKVEIVRKKPIFKEVQVT

SEQ ID NO: 115220 - protein, 32 aa, Artificial Sequence; identical to SEQ ID NO: 72887
  Cyclic GFR-binding peptide
  MOD_RES (29)..(31): Xaa is C or S

SEQ ID NO: 115221 - protein, 33 aa, Artificial Sequence; identical to SEQ ID NO: 71308
  Cyclic GFR-binding peptide
  MOD_RES (30)..(32): Xaa is C or S

SEQ ID NO: 115222 - protein, 34 aa, Artificial Sequence; identical to SEQ ID NO: 24440
  Cyclic GFR-binding peptide
  MOD_RES (32)..(34): Xaa is C or S

SEQ ID NO: 115223 - protein, 34 aa, Artificial Sequence; identical to SEQ ID NO: 74519
  Cyclic GFR-binding peptide
  MOD_RES (2)..(3)..(34): Xaa is C or S

SEQ ID NO: 115224 - protein, 34 aa, Artificial Sequence; identical to SEQ ID NO: 24442
  Cyclic GFR-binding peptide
  MOD_RES (32)..(34): Xaa is C or S

SEQ ID NO: 115225 - protein, 32 aa, Artificial Sequence; identical to SEQ ID NO: 24443
  Cyclic GFR-binding peptide

SEQ ID NO: 115226 - protein, 44 aa, Artificial Sequence; identical to SEQ ID NO: 24444
  Cyclic GFR-binding peptide
  MOD_RES (4)..(41)..(43): Xaa is C or S

SEQ ID NO: 115227 - protein, 22 aa, Artificial Sequence
  Cyclic GFR-binding peptide
LRPVQIRKIIGKTPKIKKATVM

SEQ ID NO: 115228 - protein, 31 aa, Artificial Sequence; identical to SEQ ID NO: 24445
  Cyclic GFR-binding peptide
  MOD_RES (30)..(30): Xaa is C or S

SEQ ID NO: 115229 - protein, 29 aa, Artificial Sequence
  Cyclic GFR-binding peptide
QLRSVKVAKVEIVRKKPIFKEVQVTLEDH

SEQ ID NO: 115230 - protein, 25 aa, Artificial Sequence
  Cyclic GFR-binding peptide
RPVQIRKIVGRKPKVKKATVMIVRS

SEQ ID NO: 115231 - protein, 24 aa, Artificial Sequence
  Cyclic GFR-binding peptide
RSVKMAKVRIKPHQGQHKEVQVFL

SEQ ID NO: 115232 - protein, 27 aa, Artificial Sequence
  Cyclic GFR-binding peptide
QDLRPVQIRKIIGKTPKIKKATVMIVK

SEQ ID NO: 115233 - protein, 26 aa, Artificial Sequence
  Cyclic GFR-binding peptide
HHRPVQVRKIEYVRKKPKLKKATVRL

SEQ ID NO: 115234 - protein, 23 aa, Artificial Sequence
  Cyclic GFR-binding peptide
RPVQMRKIRIKPHQGQHKKATVL

SEQ ID NO: 115235 - protein, 23 aa, Artificial Sequence
  Cyclic GFR-binding peptide
RPVQMRKIRIKPHQGQHKKATVF

SEQ ID NO: 115236 - protein, 27 aa, Artificial Sequence
  Cyclic GFR-binding peptide
  MOD_RES (27)..(27): Xaa is C or S
LRPVQIRKIVGRTPKVKKATVMVVKSX

SEQ ID NO: 115237 - protein, 26 aa, Artificial Sequence
  Cyclic GFR-binding peptide
LRSVKVAKVEIVRKKPIFKEVQVTLE

SEQ ID NO: 115238 - protein, 34 aa, Artificial Sequence; identical to SEQ ID NO: 72908
  Cyclic GFR-binding peptide
  MOD_RES (5)..(6): Xaa is C or S

SEQ ID NO: 115239 - protein, 37 aa, Artificial Sequence; identical to SEQ ID NO: 24459
  Cyclic GFR-binding peptide
  MOD_RES (3)..(37): Xaa is C or S

SEQ ID NO: 115240 - protein, 29 aa, Artificial Sequence
  Cyclic GFR-binding peptide
  MOD_RES (27)..(29): Xaa is C or S
LRPVQIRKIVGRTPKVKKATVMVVKSXKX

SEQ ID NO: 115241 - protein, 32 aa, Artificial Sequence; identical to SEQ ID NO: 71327
  Cyclic GFR-binding peptide
  MOD_RES (5)..(6): Xaa is C or S

SEQ ID NO: 115242 - protein, 30 aa, Artificial Sequence; identical to SEQ ID NO: 24461
  Cyclic GFR-binding peptide
  MOD_RES (3)..(3): Xaa is C or S

SEQ ID NO: 115243 - protein, 28 aa, Artificial Sequence
  Cyclic GFR-binding peptide
RPVQMRKIRIKPHQGQHKKATVFLQHNK

SEQ ID NO: 115244 - protein, 32 aa, Artificial Sequence; identical to SEQ ID NO: 69687
  Cyclic GFR-binding peptide
  MOD_RES (30)..(32): Xaa is C or S

SEQ ID NO: 115245 - protein, 28 aa, Artificial Sequence
  Cyclic GFR-binding peptide
PTGQRSVKMAKVRIKPHQGQHKEVQVLE

SEQ ID NO: 115246 - protein, 33 aa, Artificial Sequence; identical to SEQ ID NO: 24464
  Cyclic GFR-binding peptide
  MOD_RES (30)..(32): Xaa is C or S

SEQ ID NO: 115247 - protein, 36 aa, Artificial Sequence; identical to SEQ ID NO: 71331
  Cyclic GFR-binding peptide
  MOD_RES (1)..(2)..(33)..(35): Xaa is C or S

SEQ ID NO: 115248 - protein, 25 aa, Artificial Sequence
  Cyclic GFR-binding peptide
VPQDLRPVQIRKIVGRTPKVKKATV

SEQ ID NO: 115249 - protein, 32 aa, Artificial Sequence; identical to SEQ ID NO: 74544
  Cyclic GFR-binding peptide
  MOD_RES (31)..(31): Xaa is C or S

SEQ ID NO: 115250 - protein, 41 aa, Artificial Sequence; identical to SEQ ID NO: 24466
  Cyclic GFR-binding peptide
  MOD_RES (4)..(41): Xaa is C or S

SEQ ID NO: 115251 - protein, 36 aa, Artificial Sequence; identical to SEQ ID NO: 69697
  Cyclic GFR-binding peptide
  MOD_RES (4)..(5)..(36): Xaa is C or S

SEQ ID NO: 115252 - protein, 23 aa, Artificial Sequence
  Cyclic GFR-binding peptide
LRPVQIRKIVGRKPKVKKATVMI

SEQ ID NO: 115253 - protein, 40 aa, Artificial Sequence; identical to SEQ ID NO: 24471
  Cyclic GFR-binding peptide
  MOD_RES (4)..(38)..(40): Xaa is C or S

SEQ ID NO: 115254 - protein, 30 aa, Artificial Sequence; identical to SEQ ID NO: 24472
  Cyclic GFR-binding peptide

SEQ ID NO: 115255 - protein, 30 aa, Artificial Sequence; identical to SEQ ID NO: 72922
  Cyclic GFR-binding peptide
  MOD_RES (30)..(30): Xaa is C or S

SEQ ID NO: 115256 - protein, 27 aa, Artificial Sequence
  Cyclic GFR-binding peptide
  MOD_RES (1)..(1): Xaa is C or S
XVSQDLRSVKIAKVIGKTPKIKEVQVM

SEQ ID NO: 115257 - protein, 38 aa, Artificial Sequence; identical to SEQ ID NO: 24473
  Cyclic GFR-binding peptide
  MOD_RES (7)..(7): Xaa is C or S

SEQ ID NO: 115258 - protein, 33 aa, Artificial Sequence; identical to SEQ ID NO: 69705
  Cyclic GFR-binding peptide
  MOD_RES (6)..(7): Xaa is C or S

SEQ ID NO: 115259 - protein, 25 aa, Artificial Sequence
  Cyclic GFR-binding peptide
QDLRSVKIAKVVGRTPKVKEVQVMV

SEQ ID NO: 115260 - protein, 28 aa, Artificial Sequence
  Cyclic GFR-binding peptide
GQRPVQMRKIRIKPHQGQHKKATVLEEH

SEQ ID NO: 115261 - protein, 35 aa, Artificial Sequence; identical to SEQ ID NO: 24475
  Cyclic GFR-binding peptide
  MOD_RES (1)..(35): Xaa is C or S

SEQ ID NO: 115262 - protein, 38 aa, Artificial Sequence; identical to SEQ ID NO: 24476
  Cyclic GFR-binding peptide
  MOD_RES (37)..(37): Xaa is C or S

SEQ ID NO: 115263 - protein, 34 aa, Artificial Sequence; identical to SEQ ID NO: 71342
  Cyclic GFR-binding peptide
  MOD_RES (3)..(4): Xaa is C or S

SEQ ID NO: 115264 - protein, 24 aa, Artificial Sequence
  Cyclic GFR-binding peptide
HHRPVQVRKIEYVRKKPKLKKATV

SEQ ID NO: 115265 - protein, 28 aa, Artificial Sequence
  Cyclic GFR-binding peptide
QALRSVKIAKVVGRKPKVKEVQVMIVRS

SEQ ID NO: 115266 - protein, 32 aa, Artificial Sequence; identical to SEQ ID NO: 24479
  Cyclic GFR-binding peptide

SEQ ID NO: 115267 - protein, 32 aa, Artificial Sequence; identical to SEQ ID NO: 72937
  Cyclic GFR-binding peptide
  MOD_RES (1)..(2): Xaa is C or S

SEQ ID NO: 115268 - protein, 29 aa, Artificial Sequence
  Cyclic GFR-binding peptide
EERSVKMAKVRIKPHQGQHKEVQVFLQHN

SEQ ID NO: 115269 - protein, 30 aa, Artificial Sequence; identical to SEQ ID NO: 24482
  Cyclic GFR-binding peptide

SEQ ID NO: 115270 - protein, 34 aa, Artificial Sequence; identical to SEQ ID NO: 24483
  Cyclic GFR-binding peptide
  MOD_RES (2)..(2): Xaa is C or S

SEQ ID NO: 115271 - protein, 25 aa, Artificial Sequence
  Cyclic GFR-binding peptide
LRPVQIRKIIGKTPKIKKATVMIVK

SEQ ID NO: 115272 - protein, 36 aa, Artificial Sequence; identical to SEQ ID NO: 24487
  Cyclic GFR-binding peptide

SEQ ID NO: 115273 - protein, 25 aa, Artificial Sequence
  Cyclic GFR-binding peptide
QDLRPVQIRKIIGKTPKIKKATVMI

SEQ ID NO: 115274 - protein, 36 aa, Artificial Sequence; identical to SEQ ID NO: 24488
  Cyclic GFR-binding peptide
  MOD_RES (36)..(36): Xaa is C or S

SEQ ID NO: 115275 - protein, 33 aa, Artificial Sequence; identical to SEQ ID NO: 24490
  Cyclic GFR-binding peptide

SEQ ID NO: 115276 - protein, 35 aa, Artificial Sequence; identical to SEQ ID NO: 24491
  Cyclic GFR-binding peptide
  MOD_RES (3)..(3): Xaa is C or S

SEQ ID NO: 115277 - protein, 30 aa, Artificial Sequence; identical to SEQ ID NO: 24492
  Cyclic GFR-binding peptide

SEQ ID NO: 115278 - protein, 31 aa, Artificial Sequence; identical to SEQ ID NO: 69716
  Cyclic GFR-binding peptide
  MOD_RES (3)..(4): Xaa is C or S

SEQ ID NO: 115279 - protein, 35 aa, Artificial Sequence; identical to SEQ ID NO: 24493
  Cyclic GFR-binding peptide
  MOD_RES (32)..(34): Xaa is C or S

SEQ ID NO: 115280 - protein, 38 aa, Artificial Sequence; identical to SEQ ID NO: 74577
  Cyclic GFR-binding peptide
  MOD_RES (4)..(5)..(36)..(38): Xaa is C or S

SEQ ID NO: 115281 - protein, 24 aa, Artificial Sequence
  Cyclic GFR-binding peptide
DLRPVQIRKIVGRTPKVKKATVMV

SEQ ID NO: 115282 - protein, 34 aa, Artificial Sequence; identical to SEQ ID NO: 71357
  Cyclic GFR-binding peptide
  MOD_RES (1)..(2)..(33): Xaa is C or S

SEQ ID NO: 115283 - protein, 34 aa, Artificial Sequence; identical to SEQ ID NO: 24494
  Cyclic GFR-binding peptide
  MOD_RES (1)..(1): Xaa is C or S

SEQ ID NO: 115284 - protein, 30 aa, Artificial Sequence; identical to SEQ ID NO: 72949
  Cyclic GFR-binding peptide
  MOD_RES (1)..(1): Xaa is C or S

SEQ ID NO: 115285 - protein, 44 aa, Artificial Sequence; identical to SEQ ID NO: 24496
  Cyclic GFR-binding peptide
  MOD_RES (4)..(41)..(43): Xaa is C or S

SEQ ID NO: 115286 - protein, 25 aa, Artificial Sequence
  Cyclic GFR-binding peptide
RPVQMRKIRIKPHQGQHKKATVFLQ

SEQ ID NO: 115287 - protein, 32 aa, Artificial Sequence; identical to SEQ ID NO: 69724
  Cyclic GFR-binding peptide
  MOD_RES (29)..(31): Xaa is C or S

SEQ ID NO: 115288 - protein, 29 aa, Artificial Sequence
  Cyclic GFR-binding peptide
  MOD_RES (28)..(28): Xaa is C or S
ALRSVKIAKVVGRKPKVKEVQVMIVRSXK

SEQ ID NO: 115289 - protein, 32 aa, Artificial Sequence; identical to SEQ ID NO: 71361
  Cyclic GFR-binding peptide
  MOD_RES (31)..(31): Xaa is C or S

SEQ ID NO: 115290 - protein, 34 aa, Artificial Sequence; identical to SEQ ID NO: 24501
  Cyclic GFR-binding peptide
  MOD_RES (3)..(3): Xaa is C or S

SEQ ID NO: 115291 - protein, 34 aa, Artificial Sequence; identical to SEQ ID NO: 24502
  Cyclic GFR-binding peptide
  MOD_RES (7)..(7): Xaa is C or S

SEQ ID NO: 115292 - protein, 27 aa, Artificial Sequence
  Cyclic GFR-binding peptide
SQDLRSVKIAKVIGKTPKIKEVQVMIV

SEQ ID NO: 115293 - protein, 31 aa, Artificial Sequence; identical to SEQ ID NO: 72957
  Cyclic GFR-binding peptide
  MOD_RES (31)..(31): Xaa is C or S

SEQ ID NO: 115294 - protein, 40 aa, Artificial Sequence; identical to SEQ ID NO: 24504
  Cyclic GFR-binding peptide
  MOD_RES (4)..(4): Xaa is C or S

SEQ ID NO: 115295 - protein, 32 aa, Artificial Sequence; identical to SEQ ID NO: 69731
  Cyclic GFR-binding peptide
  MOD_RES (1)..(32): Xaa is C or S

SEQ ID NO: 115296 - protein, 34 aa, Artificial Sequence; identical to SEQ ID NO: 69733
  Cyclic GFR-binding peptide
  MOD_RES (5)..(6): Xaa is C or S

SEQ ID NO: 115297 - protein, 26 aa, Artificial Sequence
  Cyclic GFR-binding peptide
  MOD_RES (1)..(1): Xaa is C or S
XVPQALRPVQIRKIVGRKPKVKKATV

SEQ ID NO: 115298 - protein, 31 aa, Artificial Sequence; identical to SEQ ID NO: 24506
  Cyclic GFR-binding peptide
  MOD_RES (4)..(4): Xaa is C or S

SEQ ID NO: 115299 - protein, 41 aa, Artificial Sequence; identical to SEQ ID NO: 24507
  Cyclic GFR-binding peptide
  MOD_RES (3)..(40): Xaa is C or S

SEQ ID NO: 115300 - protein, 25 aa, Artificial Sequence
  Cyclic GFR-binding peptide
LRSVKIAKVVGRTPKVKEVQVMVVK

SEQ ID NO: 115301 - protein, 29 aa, Artificial Sequence
  Cyclic GFR-binding peptide
VPQALRSVKIAKVVGRKPKVKEVQVMIVR

SEQ ID NO: 115302 - protein, 38 aa, Artificial Sequence; identical to SEQ ID NO: 24510
  Cyclic GFR-binding peptide
  MOD_RES (6)..(6): Xaa is C or S

SEQ ID NO: 115303 - protein, 39 aa, Artificial Sequence; identical to SEQ ID NO: 24511
  Cyclic GFR-binding peptide
  MOD_RES (7)..(7): Xaa is C or S

SEQ ID NO: 115304 - protein, 28 aa, Artificial Sequence
  Cyclic GFR-binding peptide
VHHRPVQVRKIEYVRKKPKLKKATVRLE

SEQ ID NO: 115305 - protein, 29 aa, Artificial Sequence
  Cyclic GFR-binding peptide
  MOD_RES (29)..(29): Xaa is C or S
QALRPVQIRKIVGRKPKVKKATVMIVRSX

SEQ ID NO: 115306 - protein, 34 aa, Artificial Sequence; identical to SEQ ID NO: 24514
  Cyclic GFR-binding peptide
  MOD_RES (2)..(2): Xaa is C or S

SEQ ID NO: 115307 - protein, 29 aa, Artificial Sequence
  Cyclic GFR-binding peptide
PQALRSVKIAKVVGRKPKVKEVQVMIVRS

SEQ ID NO: 115308 - protein, 28 aa, Artificial Sequence
  Cyclic GFR-binding peptide
  MOD_RES (27)..(27): Xaa is C or S
LRPVQIRKIVGRTPKVKKATVMVVKSXK

SEQ ID NO: 115309 - protein, 34 aa, Artificial Sequence; identical to SEQ ID NO: 24516
  Cyclic GFR-binding peptide
  MOD_RES (4)..(4): Xaa is C or S

SEQ ID NO: 115310 - protein, 38 aa, Artificial Sequence; identical to SEQ ID NO: 71382
  Cyclic GFR-binding peptide
  MOD_RES (4)..(5)..(36)..(38): Xaa is C or S

SEQ ID NO: 115311 - protein, 25 aa, Artificial Sequence
  Cyclic GFR-binding peptide
RSVKMAKVRIKPHQGQHKEVQVLEE

SEQ ID NO: 115312 - protein, 26 aa, Artificial Sequence
  Cyclic GFR-binding peptide
LRPVQIRKIIGKTPKIKKATVMIVKS

SEQ ID NO: 115313 - protein, 26 aa, Artificial Sequence
  Cyclic GFR-binding peptide
EERPVQMRKIRIKPHQGQHKKATVFL

SEQ ID NO: 115314 - protein, 32 aa, Artificial Sequence; identical to SEQ ID NO: 24521
  Cyclic GFR-binding peptide
  MOD_RES (32)..(32): Xaa is C or S

SEQ ID NO: 115315 - protein, 36 aa, Artificial Sequence; identical to SEQ ID NO: 24522
  Cyclic GFR-binding peptide
  MOD_RES (7)..(7): Xaa is C or S

SEQ ID NO: 115316 - protein, 33 aa, Artificial Sequence; identical to SEQ ID NO: 24523
  Cyclic GFR-binding peptide
  MOD_RES (5)..(5): Xaa is C or S

SEQ ID NO: 115317 - protein, 37 aa, Artificial Sequence; identical to SEQ ID NO: 71390
  Cyclic GFR-binding peptide
  MOD_RES (4)..(5)..(36): Xaa is C or S

SEQ ID NO: 115318 - protein, 34 aa, Artificial Sequence; identical to SEQ ID NO: 24524
  Cyclic GFR-binding peptide
  MOD_RES (4)..(4): Xaa is C or S

SEQ ID NO: 115319 - protein, 26 aa, Artificial Sequence
  Cyclic GFR-binding peptide
QDLRSVKIAKVVGRTPKVKEVQVMVV

SEQ ID NO: 115320 - protein, 29 aa, Artificial Sequence
  Cyclic GFR-binding peptide
  MOD_RES (28)..(28): Xaa is C or S
ALRPVQIRKIVGRKPKVKKATVMIVRSXK

SEQ ID NO: 115321 - protein, 31 aa, Artificial Sequence; identical to SEQ ID NO: 72984
  Cyclic GFR-binding peptide
  MOD_RES (2)..(3): Xaa is C or S

SEQ ID NO: 115322 - protein, 37 aa, Artificial Sequence; identical to SEQ ID NO: 24526
  Cyclic GFR-binding peptide
  MOD_RES (5)..(5): Xaa is C or S

SEQ ID NO: 115323 - protein, 34 aa, Artificial Sequence; identical to SEQ ID NO: 24527
  Cyclic GFR-binding peptide
  MOD_RES (6)..(6): Xaa is C or S

SEQ ID NO: 115324 - protein, 35 aa, Artificial Sequence; identical to SEQ ID NO: 74615
  Cyclic GFR-binding peptide
  MOD_RES (4)..(5): Xaa is C or S

SEQ ID NO: 115325 - protein, 41 aa, Artificial Sequence; identical to SEQ ID NO: 24528
  Cyclic GFR-binding peptide
  MOD_RES (6)..(40): Xaa is C or S

SEQ ID NO: 115326 - protein, 20 aa, Artificial Sequence
  Cyclic GFR-binding peptide
RPVQIRKIIGKTPKIKKATV

SEQ ID NO: 115327 - protein, 28 aa, Artificial Sequence
  Cyclic GFR-binding peptide
  MOD_RES (2)..(3): Xaa is C or S
PXXVPQDLRSVKIAKVVGRTPKVKEVQV

SEQ ID NO: 115328 - protein, 40 aa, Artificial Sequence; identical to SEQ ID NO: 72991
  Cyclic GFR-binding peptide
  MOD_RES (5)..(6)..(37)..(39): Xaa is C or S

SEQ ID NO: 115329 - protein, 27 aa, Artificial Sequence
  Cyclic GFR-binding peptide
HHRPVQVRKIEYVRKKPKLKKATVRLE

SEQ ID NO: 115330 - protein, 35 aa, Artificial Sequence; identical to SEQ ID NO: 72996
  Cyclic GFR-binding peptide
  MOD_RES (1)..(32)..(34): Xaa is C or S

SEQ ID NO: 115331 - protein, 30 aa, Artificial Sequence; identical to SEQ ID NO: 74624
  Cyclic GFR-binding peptide
  MOD_RES (28)..(30): Xaa is C or S

SEQ ID NO: 115332 - protein, 32 aa, Artificial Sequence; identical to SEQ ID NO: 74628
  Cyclic GFR-binding peptide
  MOD_RES (5)..(6): Xaa is C or S

SEQ ID NO: 115333 - protein, 34 aa, Artificial Sequence; identical to SEQ ID NO: 73002
  Cyclic GFR-binding peptide
  MOD_RES (31)..(33): Xaa is C or S

SEQ ID NO: 115334 - protein, 25 aa, Artificial Sequence
  Cyclic GFR-binding peptide
VSQDLRSVKIAKVIGKTPKIKEVQV

SEQ ID NO: 115335 - protein, 21 aa, Artificial Sequence
  Cyclic GFR-binding peptide
LRPVQIRKIIGKTPKIKKATV

SEQ ID NO: 115336 - protein, 37 aa, Artificial Sequence; identical to SEQ ID NO: 71407
  Cyclic GFR-binding peptide
  MOD_RES (3)..(4)..(35)..(37): Xaa is C or S

SEQ ID NO: 115337 - protein, 35 aa, Artificial Sequence; identical to SEQ ID NO: 24543
  Cyclic GFR-binding peptide
  MOD_RES (33)..(35): Xaa is C or S

SEQ ID NO: 115338 - protein, 30 aa, Artificial Sequence; identical to SEQ ID NO: 74637
  Cyclic GFR-binding peptide
  MOD_RES (29)..(29): Xaa is C or S

SEQ ID NO: 115339 - protein, 36 aa, Artificial Sequence; identical to SEQ ID NO: 24545
  Cyclic GFR-binding peptide
  MOD_RES (33)..(35): Xaa is C or S

SEQ ID NO: 115340 - protein, 26 aa, Artificial Sequence
  Cyclic GFR-binding peptide
LRPVQIRKIVGRTPKVKKATVMVVKS

SEQ ID NO: 115341 - protein, 39 aa, Artificial Sequence; identical to SEQ ID NO: 73014
  Cyclic GFR-binding peptide
  MOD_RES (6)..(7)..(38): Xaa is C or S

SEQ ID NO: 115342 - protein, 21 aa, Artificial Sequence
  Cyclic GFR-binding peptide
RPVQIRKIVGRKPKVKKATVM

SEQ ID NO: 115343 - protein, 38 aa, Artificial Sequence; identical to SEQ ID NO: 71417
  Cyclic GFR-binding peptide
  MOD_RES (4)..(5)..(36)..(38): Xaa is C or S

SEQ ID NO: 115344 - protein, 29 aa, Artificial Sequence
  Cyclic GFR-binding peptide
  MOD_RES (27)..(29): Xaa is C or S
LRSVKIAKVVGRKPKVKEVQVMIVRSXKX

SEQ ID NO: 115345 - protein, 37 aa, Artificial Sequence; identical to SEQ ID NO: 69796
  Cyclic GFR-binding peptide
  MOD_RES (6)..(7): Xaa is C or S

SEQ ID NO: 115346 - protein, 27 aa, Artificial Sequence
  Cyclic GFR-binding peptide
VHHRPVQVRKIEYVRKKPKLKKATVRL

SEQ ID NO: 115347 - protein, 28 aa, Artificial Sequence
  Cyclic GFR-binding peptide
QLRSVKVAKVEIVRKKPIFKEVQVTLED

SEQ ID NO: 115348 - protein, 37 aa, Artificial Sequence; identical to SEQ ID NO: 71422
  Cyclic GFR-binding peptide
  MOD_RES (2)..(3)..(34)..(36): Xaa is C or S

SEQ ID NO: 115349 - protein, 28 aa, Artificial Sequence
  Cyclic GFR-binding peptide
RPVQVRKIEYVRKKPKLKKATVRLEEHL

SEQ ID NO: 115350 - protein, 32 aa, Artificial Sequence; identical to SEQ ID NO: 24556
  Cyclic GFR-binding peptide
  MOD_RES (5)..(5): Xaa is C or S

SEQ ID NO: 115351 - protein, 30 aa, Artificial Sequence; identical to SEQ ID NO: 73030
  Cyclic GFR-binding peptide

SEQ ID NO: 115352 - protein, 26 aa, Artificial Sequence
  Cyclic GFR-binding peptide
TEERPVQMRKIRIKPHQGQHKKATVF

SEQ ID NO: 115353 - protein, 30 aa, Artificial Sequence; identical to SEQ ID NO: 24561
  Cyclic GFR-binding peptide

SEQ ID NO: 115354 - protein, 31 aa, Artificial Sequence; identical to SEQ ID NO: 24562
  Cyclic GFR-binding peptide
  MOD_RES (30)..(30): Xaa is C or S

SEQ ID NO: 115355 - protein, 25 aa, Artificial Sequence
  Cyclic GFR-binding peptide
VPQALRPVQIRKIVGRKPKVKKATV

SEQ ID NO: 115356 - protein, 30 aa, Artificial Sequence; identical to SEQ ID NO: 24564
  Cyclic GFR-binding peptide
  MOD_RES (29)..(29): Xaa is C or S

SEQ ID NO: 115357 - protein, 27 aa, Artificial Sequence
  Cyclic GFR-binding peptide
QDLRSVKIAKVVGRTPKVKEVQVMVVK

SEQ ID NO: 115358 - protein, 31 aa, Artificial Sequence; identical to SEQ ID NO: 69818
  Cyclic GFR-binding peptide
  MOD_RES (4)..(5): Xaa is C or S

SEQ ID NO: 115359 - protein, 25 aa, Artificial Sequence
  Cyclic GFR-binding peptide
DLRPVQIRKIIGKTPKIKKATVMIV

SEQ ID NO: 115360 - protein, 34 aa, Artificial Sequence; identical to SEQ ID NO: 71438
  Cyclic GFR-binding peptide
  MOD_RES (31)..(33): Xaa is C or S

SEQ ID NO: 115361 - protein, 39 aa, Artificial Sequence; identical to SEQ ID NO: 69822
  Cyclic GFR-binding peptide
  MOD_RES (4)..(5)..(36)..(38): Xaa is C or S

SEQ ID NO: 115362 - protein, 31 aa, Artificial Sequence; identical to SEQ ID NO: 24568
  Cyclic GFR-binding peptide
  MOD_RES (2)..(2): Xaa is C or S

SEQ ID NO: 115363 - protein, 33 aa, Artificial Sequence; identical to SEQ ID NO: 24571
  Cyclic GFR-binding peptide
  MOD_RES (2)..(2): Xaa is C or S

SEQ ID NO: 115364 - protein, 42 aa, Artificial Sequence; identical to SEQ ID NO: 24578
  Cyclic GFR-binding peptide
  MOD_RES (7)..(41): Xaa is C or S

SEQ ID NO: 115365 - protein, 31 aa, Artificial Sequence; identical to SEQ ID NO: 74664
  Cyclic GFR-binding peptide
  MOD_RES (29)..(31): Xaa is C or S

SEQ ID NO: 115366 - protein, 29 aa, Artificial Sequence
  Cyclic GFR-binding peptide
  MOD_RES (3)..(4): Xaa is C or S
APXXVPQALRSVKIAKVVGRKPKVKEVQV

SEQ ID NO: 115367 - protein, 30 aa, Artificial Sequence; identical to SEQ ID NO: 24582
  Cyclic GFR-binding peptide

SEQ ID NO: 115368 - protein, 26 aa, Artificial Sequence
  Cyclic GFR-binding peptide
LRPVQIRKIVGRKPKVKKATVMIVRS

SEQ ID NO: 115369 - protein, 37 aa, Artificial Sequence; identical to SEQ ID NO: 24583
  Cyclic GFR-binding peptide
  MOD_RES (4)..(4): Xaa is C or S

SEQ ID NO: 115370 - protein, 22 aa, Artificial Sequence
  Cyclic GFR-binding peptide
RPVQIRKIIGKTPKIKKATVMI

SEQ ID NO: 115371 - protein, 36 aa, Artificial Sequence; identical to SEQ ID NO: 24584
  Cyclic GFR-binding peptide
  MOD_RES (33)..(35): Xaa is C or S

SEQ ID NO: 115372 - protein, 27 aa, Artificial Sequence
  Cyclic GFR-binding peptide
ALRSVKIAKVVGRKPKVKEVQVMIVRS

SEQ ID NO: 115373 - protein, 39 aa, Artificial Sequence; identical to SEQ ID NO: 24587
  Cyclic GFR-binding peptide
  MOD_RES (5)..(5): Xaa is C or S

SEQ ID NO: 115374 - protein, 37 aa, Artificial Sequence; identical to SEQ ID NO: 24589
  Cyclic GFR-binding peptide
  MOD_RES (6)..(6): Xaa is C or S

SEQ ID NO: 115375 - protein, 34 aa, Artificial Sequence; identical to SEQ ID NO: 24590
  Cyclic GFR-binding peptide

SEQ ID NO: 115376 - protein, 31 aa, Artificial Sequence; identical to SEQ ID NO: 24591
  Cyclic GFR-binding peptide
  MOD_RES (3)..(3): Xaa is C or S

SEQ ID NO: 115377 - protein, 32 aa, Artificial Sequence; identical to SEQ ID NO: 24592
  Cyclic GFR-binding peptide
  MOD_RES (4)..(4): Xaa is C or S

SEQ ID NO: 115378 - protein, 29 aa, Artificial Sequence
  Cyclic GFR-binding peptide
ERSVKMAKVRIKPHQGQHKEVQVFLQHNK

SEQ ID NO: 115379 - protein, 32 aa, Artificial Sequence; identical to SEQ ID NO: 74682
  Cyclic GFR-binding peptide
  MOD_RES (3)..(4): Xaa is C or S

SEQ ID NO: 115380 - protein, 24 aa, Artificial Sequence
  Cyclic GFR-binding peptide
EERPVQMRKIRIKPHQGQHKKATV

SEQ ID NO: 115381 - protein, 28 aa, Artificial Sequence
  Cyclic GFR-binding peptide
SQDLRSVKIAKVIGKTPKIKEVQVMIVK

SEQ ID NO: 115382 - protein, 39 aa, Artificial Sequence; identical to SEQ ID NO: 24602
  Cyclic GFR-binding peptide
  MOD_RES (1)..(38): Xaa is C or S

SEQ ID NO: 115383 - protein, 29 aa, Artificial Sequence
  Cyclic GFR-binding peptide
VPQALRPVQIRKIVGRKPKVKKATVMIVR

SEQ ID NO: 115384 - protein, 37 aa, Artificial Sequence; identical to SEQ ID NO: 24604
  Cyclic GFR-binding peptide
  MOD_RES (4)..(4): Xaa is C or S

SEQ ID NO: 115385 - protein, 28 aa, Artificial Sequence
  Cyclic GFR-binding peptide
  MOD_RES (28)..(28): Xaa is C or S
ALRSVKIAKVVGRKPKVKEVQVMIVRSX

SEQ ID NO: 115386 - protein, 22 aa, Artificial Sequence
  Cyclic GFR-binding peptide
RSVKIAKVVGRTPKVKEVQVMV

SEQ ID NO: 115387 - protein, 42 aa, Artificial Sequence; identical to SEQ ID NO: 24607
  Cyclic GFR-binding peptide
  MOD_RES (5)..(39)..(41): Xaa is C or S

SEQ ID NO: 115388 - protein, 31 aa, Artificial Sequence; identical to SEQ ID NO: 73060
  Cyclic GFR-binding peptide
  MOD_RES (30)..(30): Xaa is C or S

SEQ ID NO: 115389 - protein, 26 aa, Artificial Sequence
  Cyclic GFR-binding peptide
  MOD_RES (1)..(1): Xaa is C or S
XVPQDLRSVKIAKVVGRTPKVKEVQV

SEQ ID NO: 115390 - protein, 35 aa, Artificial Sequence; identical to SEQ ID NO: 24608
  Cyclic GFR-binding peptide
  MOD_RES (33)..(35): Xaa is C or S

SEQ ID NO: 115391 - protein, 23 aa, Artificial Sequence
  Cyclic GFR-binding peptide
RSVKMAKVRIKPHQGQHKEVQVF

SEQ ID NO: 115392 - protein, 31 aa, Artificial Sequence; identical to SEQ ID NO: 69845
  Cyclic GFR-binding peptide
  MOD_RES (2)..(3): Xaa is C or S

SEQ ID NO: 115393 - protein, 30 aa, Artificial Sequence; identical to SEQ ID NO: 24610
  Cyclic GFR-binding peptide
  MOD_RES (29)..(29): Xaa is C or S

SEQ ID NO: 115394 - protein, 31 aa, Artificial Sequence; identical to SEQ ID NO: 71480
  Cyclic GFR-binding peptide
  MOD_RES (4)..(5): Xaa is C or S

SEQ ID NO: 115395 - protein, 23 aa, Artificial Sequence
  Cyclic GFR-binding peptide
RSVKMAKVRIKPHQGQHKEVQVL

SEQ ID NO: 115396 - protein, 38 aa, Artificial Sequence; identical to SEQ ID NO: 24620
  Cyclic GFR-binding peptide
  MOD_RES (2)..(36)..(38): Xaa is C or S

SEQ ID NO: 115397 - protein, 29 aa, Artificial Sequence
  Cyclic GFR-binding peptide
  MOD_RES (2)..(2): Xaa is C or S
EXVPTEERSVKMAKVRIKPHQGQHKEVQV

SEQ ID NO: 115398 - protein, 33 aa, Artificial Sequence; identical to SEQ ID NO: 24624
  Cyclic GFR-binding peptide
  MOD_RES (6)..(6): Xaa is C or S

SEQ ID NO: 115399 - protein, 29 aa, Artificial Sequence
  Cyclic GFR-binding peptide
VHHRPVQVRKIEYVRKKPKLKKATVRLEE

SEQ ID NO: 115400 - protein, 42 aa, Artificial Sequence; identical to SEQ ID NO: 24626
  Cyclic GFR-binding peptide
  MOD_RES (5)..(42): Xaa is C or S

SEQ ID NO: 115401 - protein, 26 aa, Artificial Sequence
  Cyclic GFR-binding peptide
QRPVQMRKIRIKPHQGQHKKATVLEE

SEQ ID NO: 115402 - protein, 31 aa, Artificial Sequence; identical to SEQ ID NO: 24628
  Cyclic GFR-binding peptide

SEQ ID NO: 115403 - protein, 23 aa, Artificial Sequence
  Cyclic GFR-binding peptide
DLRPVQIRKIIGKTPKIKKATVM

SEQ ID NO: 115404 - protein, 33 aa, Artificial Sequence; identical to SEQ ID NO: 24631
  Cyclic GFR-binding peptide
  MOD_RES (1)..(1): Xaa is C or S

SEQ ID NO: 115405 - protein, 26 aa, Artificial Sequence
  Cyclic GFR-binding peptide
VSQDLRPVQIRKIIGKTPKIKKATVM

SEQ ID NO: 115406 - protein, 28 aa, Artificial Sequence
  Cyclic GFR-binding peptide
  MOD_RES (26)..(28): Xaa is C or S
RSVKIAKVIGKTPKIKEVQVMIVKSXKX

SEQ ID NO: 115407 - protein, 28 aa, Artificial Sequence
  Cyclic GFR-binding peptide
RSVKVAKVEIVRKKPIFKEVQVTLEDHL

SEQ ID NO: 115408 - protein, 38 aa, Artificial Sequence; identical to SEQ ID NO: 74714
  Cyclic GFR-binding peptide
  MOD_RES (3)..(4)..(35)..(37): Xaa is C or S

SEQ ID NO: 115409 - protein, 36 aa, Artificial Sequence; identical to SEQ ID NO: 74715
  Cyclic GFR-binding peptide
  MOD_RES (5)..(6): Xaa is C or S

SEQ ID NO: 115410 - protein, 27 aa, Artificial Sequence
  Cyclic GFR-binding peptide
QDLRSVKIAKVIGKTPKIKEVQVMIVK

SEQ ID NO: 115411 - protein, 28 aa, Artificial Sequence
  Cyclic GFR-binding peptide
  MOD_RES (26)..(28): Xaa is C or S
RSVKIAKVVGRKPKVKEVQVMIVRSXKX

SEQ ID NO: 115412 - protein, 31 aa, Artificial Sequence; identical to SEQ ID NO: 73091
  Cyclic GFR-binding peptide
  MOD_RES (3)..(4): Xaa is C or S

SEQ ID NO: 115413 - protein, 29 aa, Artificial Sequence
  Cyclic GFR-binding peptide
PTGQRSVKMAKVRIKPHQGQHKEVQVLEE

SEQ ID NO: 115414 - protein, 29 aa, Artificial Sequence
  Cyclic GFR-binding peptide
  MOD_RES (26)..(28): Xaa is C or S
RSVKIAKVVGRTPKVKEVQVMVVKSXKXS

SEQ ID NO: 115415 - protein, 35 aa, Artificial Sequence; identical to SEQ ID NO: 24643
  Cyclic GFR-binding peptide
  MOD_RES (7)..(7): Xaa is C or S

SEQ ID NO: 115416 - protein, 33 aa, Artificial Sequence; identical to SEQ ID NO: 73092
  Cyclic GFR-binding peptide
  MOD_RES (1)..(32): Xaa is C or S

SEQ ID NO: 115417 - protein, 30 aa, Artificial Sequence; identical to SEQ ID NO: 73094
  Cyclic GFR-binding peptide
  MOD_RES (1)..(2): Xaa is C or S

SEQ ID NO: 115418 - protein, 32 aa, Artificial Sequence; identical to SEQ ID NO: 74722
  Cyclic GFR-binding peptide
  MOD_RES (6)..(7): Xaa is C or S

SEQ ID NO: 115419 - protein, 36 aa, Artificial Sequence; identical to SEQ ID NO: 24645
  Cyclic GFR-binding peptide
  MOD_RES (3)..(3): Xaa is C or S

SEQ ID NO: 115420 - protein, 25 aa, Artificial Sequence
  Cyclic GFR-binding peptide
HRPVQVRKIEYVRKKPKLKKATVRL

SEQ ID NO: 115421 - protein, 36 aa, Artificial Sequence; identical to SEQ ID NO: 24648
  Cyclic GFR-binding peptide
  MOD_RES (1)..(35): Xaa is C or S

SEQ ID NO: 115422 - protein, 38 aa, Artificial Sequence; identical to SEQ ID NO: 24651
  Cyclic GFR-binding peptide
  MOD_RES (5)..(5): Xaa is C or S

SEQ ID NO: 115423 - protein, 40 aa, Artificial Sequence; identical to SEQ ID NO: 73099
  Cyclic GFR-binding peptide
  MOD_RES (6)..(7)..(38)..(40): Xaa is C or S

SEQ ID NO: 115424 - protein, 35 aa, Artificial Sequence; identical to SEQ ID NO: 24652
  Cyclic GFR-binding peptide
  MOD_RES (34)..(34): Xaa is C or S

SEQ ID NO: 115425 - protein, 27 aa, Artificial Sequence
  Cyclic GFR-binding peptide
VPQDLRPVQIRKIVGRTPKVKKATVMV

SEQ ID NO: 115426 - protein, 27 aa, Artificial Sequence
  Cyclic GFR-binding peptide
TGQRPVQMRKIRIKPHQGQHKKATVLE

SEQ ID NO: 115427 - protein, 35 aa, Artificial Sequence; identical to SEQ ID NO: 24654
  Cyclic GFR-binding peptide
  MOD_RES (33)..(35): Xaa is C or S

SEQ ID NO: 115428 - protein, 31 aa, Artificial Sequence; identical to SEQ ID NO: 24656
  Cyclic GFR-binding peptide

SEQ ID NO: 115429 - protein, 36 aa, Artificial Sequence; identical to SEQ ID NO: 24657
  Cyclic GFR-binding peptide
  MOD_RES (5)..(5): Xaa is C or S

SEQ ID NO: 115430 - protein, 32 aa, Artificial Sequence; identical to SEQ ID NO: 69889
  Cyclic GFR-binding peptide
  MOD_RES (1)..(2): Xaa is C or S

SEQ ID NO: 115431 - protein, 33 aa, Artificial Sequence; identical to SEQ ID NO: 24658
  Cyclic GFR-binding peptide
  MOD_RES (33)..(33): Xaa is C or S

SEQ ID NO: 115432 - protein, 40 aa, Artificial Sequence; identical to SEQ ID NO: 24660
  Cyclic GFR-binding peptide
  MOD_RES (7)..(7): Xaa is C or S

SEQ ID NO: 115433 - protein, 32 aa, Artificial Sequence; identical to SEQ ID NO: 71516
  Cyclic GFR-binding peptide
  MOD_RES (29)..(31): Xaa is C or S

SEQ ID NO: 115434 - protein, 35 aa, Artificial Sequence; identical to SEQ ID NO: 24662
  Cyclic GFR-binding peptide
  MOD_RES (2)..(2): Xaa is C or S

SEQ ID NO: 115435 - protein, 31 aa, Artificial Sequence; identical to SEQ ID NO: 69892
  Cyclic GFR-binding peptide
  MOD_RES (1)..(1): Xaa is C or S

SEQ ID NO: 115436 - protein, 31 aa, Artificial Sequence; identical to SEQ ID NO: 24665
  Cyclic GFR-binding peptide
  MOD_RES (31)..(31): Xaa is C or S

SEQ ID NO: 115437 - protein, 25 aa, Artificial Sequence
  Cyclic GFR-binding peptide
DLRSVKIAKVIGKTPKIKEVQVMIV

SEQ ID NO: 115438 - protein, 38 aa, Artificial Sequence; identical to SEQ ID NO: 24666
  Cyclic GFR-binding peptide
  MOD_RES (4)..(38): Xaa is C or S

SEQ ID NO: 115439 - protein, 33 aa, Artificial Sequence; identical to SEQ ID NO: 73110
  Cyclic GFR-binding peptide
  MOD_RES (3)..(4): Xaa is C or S

SEQ ID NO: 115440 - protein, 25 aa, Artificial Sequence
  Cyclic GFR-binding peptide
RSVKMAKVRIKPHQGQHKEVQVFLQ

SEQ ID NO: 115441 - protein, 35 aa, Artificial Sequence; identical to SEQ ID NO: 24668
  Cyclic GFR-binding peptide
  MOD_RES (1)..(1): Xaa is C or S

SEQ ID NO: 115442 - protein, 34 aa, Artificial Sequence; identical to SEQ ID NO: 24669
  Cyclic GFR-binding peptide
  MOD_RES (3)..(3): Xaa is C or S

SEQ ID NO: 115443 - protein, 31 aa, Artificial Sequence; identical to SEQ ID NO: 74737
  Cyclic GFR-binding peptide
  MOD_RES (30)..(30): Xaa is C or S

SEQ ID NO: 115444 - protein, 36 aa, Artificial Sequence; identical to SEQ ID NO: 24673
  Cyclic GFR-binding peptide
  MOD_RES (1)..(35): Xaa is C or S

SEQ ID NO: 115445 - protein, 34 aa, Artificial Sequence; identical to SEQ ID NO: 24674
  Cyclic GFR-binding peptide
  MOD_RES (5)..(5): Xaa is C or S

SEQ ID NO: 115446 - protein, 35 aa, Artificial Sequence; identical to SEQ ID NO: 24676
  Cyclic GFR-binding peptide
  MOD_RES (2)..(2): Xaa is C or S

SEQ ID NO: 115447 - protein, 32 aa, Artificial Sequence; identical to SEQ ID NO: 69905
  Cyclic GFR-binding peptide
  MOD_RES (5)..(6): Xaa is C or S

SEQ ID NO: 115448 - protein, 31 aa, Artificial Sequence; identical to SEQ ID NO: 69906
  Cyclic GFR-binding peptide
  MOD_RES (5)..(6): Xaa is C or S

SEQ ID NO: 115449 - protein, 34 aa, Artificial Sequence; identical to SEQ ID NO: 24677
  Cyclic GFR-binding peptide
  MOD_RES (6)..(6): Xaa is C or S

SEQ ID NO: 115450 - protein, 21 aa, Artificial Sequence
  Cyclic GFR-binding peptide
RSVKIAKVIGKTPKIKEVQVM

SEQ ID NO: 115451 - protein, 27 aa, Artificial Sequence
  Cyclic GFR-binding peptide
PTEERPVQMRKIRIKPHQGQHKKATVF

SEQ ID NO: 115452 - protein, 33 aa, Artificial Sequence; identical to SEQ ID NO: 69911
  Cyclic GFR-binding peptide
  MOD_RES (30)..(32): Xaa is C or S

SEQ ID NO: 115453 - protein, 35 aa, Artificial Sequence; identical to SEQ ID NO: 24682
  Cyclic GFR-binding peptide
  MOD_RES (3)..(3): Xaa is C or S

SEQ ID NO: 115454 - protein, 31 aa, Artificial Sequence; identical to SEQ ID NO: 69914
  Cyclic GFR-binding peptide
  MOD_RES (3)..(4): Xaa is C or S

SEQ ID NO: 115455 - protein, 36 aa, Artificial Sequence; identical to SEQ ID NO: 24685
  Cyclic GFR-binding peptide
  MOD_RES (1)..(1): Xaa is C or S

SEQ ID NO: 115456 - protein, 29 aa, Artificial Sequence
  Cyclic GFR-binding peptide
VSQDLRSVKIAKVIGKTPKIKEVQVMIVK

SEQ ID NO: 115457 - protein, 35 aa, Artificial Sequence; identical to SEQ ID NO: 24686
  Cyclic GFR-binding peptide
  MOD_RES (32)..(34): Xaa is C or S

SEQ ID NO: 115458 - protein, 35 aa, Artificial Sequence; identical to SEQ ID NO: 24688
  Cyclic GFR-binding peptide
  MOD_RES (4)..(4): Xaa is C or S

SEQ ID NO: 115459 - protein, 35 aa, Artificial Sequence; identical to SEQ ID NO: 24689
  Cyclic GFR-binding peptide
  MOD_RES (33)..(35): Xaa is C or S

SEQ ID NO: 115460 - protein, 35 aa, Artificial Sequence; identical to SEQ ID NO: 24692
  Cyclic GFR-binding peptide
  MOD_RES (4)..(4): Xaa is C or S

SEQ ID NO: 115461 - protein, 29 aa, Artificial Sequence
  Cyclic GFR-binding peptide
  MOD_RES (27)..(29): Xaa is C or S
LRPVQIRKIVGRKPKVKKATVMIVRSXKX

SEQ ID NO: 115462 - protein, 27 aa, Artificial Sequence
  Cyclic GFR-binding peptide
  MOD_RES (26)..(26): Xaa is C or S
RSVKIAKVVGRKPKVKEVQVMIVRSXK

SEQ ID NO: 115463 - protein, 21 aa, Artificial Sequence
  Cyclic GFR-binding peptide
LRSVKIAKVIGKTPKIKEVQV

SEQ ID NO: 115464 - protein, 24 aa, Artificial Sequence
  Cyclic GFR-binding peptide
QDLRSVKIAKVIGKTPKIKEVQVM

SEQ ID NO: 115465 - protein, 30 aa, Artificial Sequence; identical to SEQ ID NO: 24695
  Cyclic GFR-binding peptide

SEQ ID NO: 115466 - protein, 32 aa, Artificial Sequence; identical to SEQ ID NO: 24698
  Cyclic GFR-binding peptide

SEQ ID NO: 115467 - protein, 28 aa, Artificial Sequence
  Cyclic GFR-binding peptide
  MOD_RES (1)..(1): Xaa is C or S
XVPTGQRSVKMAKVRIKPHQGQHKEVQV

SEQ ID NO: 115468 - protein, 34 aa, Artificial Sequence; identical to SEQ ID NO: 24700
  Cyclic GFR-binding peptide
  MOD_RES (31)..(33): Xaa is C or S

SEQ ID NO: 115469 - protein, 32 aa, Artificial Sequence; identical to SEQ ID NO: 74766
  Cyclic GFR-binding peptide
  MOD_RES (2)..(3): Xaa is C or S

SEQ ID NO: 115470 - protein, 31 aa, Artificial Sequence; identical to SEQ ID NO: 73134
  Cyclic GFR-binding peptide
  MOD_RES (30)..(30): Xaa is C or S

SEQ ID NO: 115471 - protein, 38 aa, Artificial Sequence; identical to SEQ ID NO: 74769
  Cyclic GFR-binding peptide
  MOD_RES (3)..(4)..(35)..(37): Xaa is C or S

SEQ ID NO: 115472 - protein, 34 aa, Artificial Sequence; identical to SEQ ID NO: 71559
  Cyclic GFR-binding peptide
  MOD_RES (5)..(6): Xaa is C or S

SEQ ID NO: 115473 - protein, 40 aa, Artificial Sequence; identical to SEQ ID NO: 73136
  Cyclic GFR-binding peptide
  MOD_RES (5)..(6)..(37)..(39): Xaa is C or S

SEQ ID NO: 115474 - protein, 41 aa, Artificial Sequence; identical to SEQ ID NO: 73138
  Cyclic GFR-binding peptide
  MOD_RES (6)..(7)..(38)..(40): Xaa is C or S

SEQ ID NO: 115475 - protein, 31 aa, Artificial Sequence; identical to SEQ ID NO: 74776
  Cyclic GFR-binding peptide
  MOD_RES (1)..(1): Xaa is C or S

SEQ ID NO: 115476 - protein, 32 aa, Artificial Sequence; identical to SEQ ID NO: 24707
  Cyclic GFR-binding peptide
  MOD_RES (3)..(3): Xaa is C or S

SEQ ID NO: 115477 - protein, 26 aa, Artificial Sequence
  Cyclic GFR-binding peptide
RPVQVRKIEYVRKKPKLKKATVRLEE

SEQ ID NO: 115478 - protein, 24 aa, Artificial Sequence
  Cyclic GFR-binding peptide
LRSVKIAKVVGRTPKVKEVQVMVV

SEQ ID NO: 115479 - protein, 31 aa, Artificial Sequence; identical to SEQ ID NO: 69949
  Cyclic GFR-binding peptide
  MOD_RES (31)..(31): Xaa is C or S

SEQ ID NO: 115480 - protein, 34 aa, Artificial Sequence; identical to SEQ ID NO: 24710
  Cyclic GFR-binding peptide
  MOD_RES (31)..(33): Xaa is C or S

SEQ ID NO: 115481 - protein, 39 aa, Artificial Sequence; identical to SEQ ID NO: 24711
  Cyclic GFR-binding peptide
  MOD_RES (6)..(6): Xaa is C or S

SEQ ID NO: 115482 - protein, 30 aa, Artificial Sequence; identical to SEQ ID NO: 73147
  Cyclic GFR-binding peptide

SEQ ID NO: 115483 - protein, 31 aa, Artificial Sequence; identical to SEQ ID NO: 24714
  Cyclic GFR-binding peptide
  MOD_RES (1)..(1): Xaa is C or S

SEQ ID NO: 115484 - protein, 44 aa, Artificial Sequence; identical to SEQ ID NO: 24715
  Cyclic GFR-binding peptide
  MOD_RES (7)..(41)..(43): Xaa is C or S

SEQ ID NO: 115485 - protein, 36 aa, Artificial Sequence; identical to SEQ ID NO: 24716
  Cyclic GFR-binding peptide
  MOD_RES (1)..(1): Xaa is C or S

SEQ ID NO: 115486 - protein, 25 aa, Artificial Sequence
  Cyclic GFR-binding peptide
DLRSVKIAKVVGRTPKVKEVQVMVV

SEQ ID NO: 115487 - protein, 30 aa, Artificial Sequence; identical to SEQ ID NO: 73152
  Cyclic GFR-binding peptide
  MOD_RES (2)..(3): Xaa is C or S

SEQ ID NO: 115488 - protein, 26 aa, Artificial Sequence
  Cyclic GFR-binding peptide
VPQDLRPVQIRKIVGRTPKVKKATVM

SEQ ID NO: 115489 - protein, 28 aa, Artificial Sequence
  Cyclic GFR-binding peptide
PTGQRPVQMRKIRIKPHQGQHKKATVLE

SEQ ID NO: 115490 - protein, 33 aa, Artificial Sequence; identical to SEQ ID NO: 24724
  Cyclic GFR-binding peptide
  MOD_RES (4)..(4): Xaa is C or S

SEQ ID NO: 115491 - protein, 28 aa, Artificial Sequence
  Cyclic GFR-binding peptide
PQDLRSVKIAKVVGRTPKVKEVQVMVVK

SEQ ID NO: 115492 - protein, 28 aa, Artificial Sequence
  Cyclic GFR-binding peptide
TEERSVKMAKVRIKPHQGQHKEVQVFLQ

SEQ ID NO: 115493 - protein, 29 aa, Artificial Sequence
  Cyclic GFR-binding peptide
VPTGQRSVKMAKVRIKPHQGQHKEVQVLE

SEQ ID NO: 115494 - protein, 34 aa, Artificial Sequence; identical to SEQ ID NO: 73159
  Cyclic GFR-binding peptide
  MOD_RES (3)..(4): Xaa is C or S

SEQ ID NO: 115495 - protein, 32 aa, Artificial Sequence; identical to SEQ ID NO: 24727
  Cyclic GFR-binding peptide
  MOD_RES (32)..(32): Xaa is C or S

SEQ ID NO: 115496 - protein, 44 aa, Artificial Sequence; identical to SEQ ID NO: 24728
  Cyclic GFR-binding peptide
  MOD_RES (7)..(41)..(43): Xaa is C or S

SEQ ID NO: 115497 - protein, 32 aa, Artificial Sequence; identical to SEQ ID NO: 74787
  Cyclic GFR-binding peptide
  MOD_RES (1)..(2): Xaa is C or S

SEQ ID NO: 115498 - protein, 37 aa, Artificial Sequence; identical to SEQ ID NO: 24729
  Cyclic GFR-binding peptide
  MOD_RES (5)..(5): Xaa is C or S

SEQ ID NO: 115499 - protein, 34 aa, Artificial Sequence; identical to SEQ ID NO: 71576
  Cyclic GFR-binding peptide
  MOD_RES (31)..(33): Xaa is C or S

SEQ ID NO: 115500 - protein, 30 aa, Artificial Sequence; identical to SEQ ID NO: 69968
  Cyclic GFR-binding peptide
  MOD_RES (29)..(29): Xaa is C or S

SEQ ID NO: 115501 - protein, 32 aa, Artificial Sequence; identical to SEQ ID NO: 24730
  Cyclic GFR-binding peptide
  MOD_RES (4)..(4): Xaa is C or S

SEQ ID NO: 115502 - protein, 35 aa, Artificial Sequence; identical to SEQ ID NO: 24735
  Cyclic GFR-binding peptide
  MOD_RES (5)..(5): Xaa is C or S

SEQ ID NO: 115503 - protein, 31 aa, Artificial Sequence; identical to SEQ ID NO: 24737
  Cyclic GFR-binding peptide

SEQ ID NO: 115504 - protein, 33 aa, Artificial Sequence; identical to SEQ ID NO: 24738
  Cyclic GFR-binding peptide
  MOD_RES (5)..(5): Xaa is C or S

SEQ ID NO: 115505 - protein, 27 aa, Artificial Sequence
  Cyclic GFR-binding peptide
RSVKVAKVEIVRKKPIFKEVQVTLEDH

SEQ ID NO: 115506 - protein, 34 aa, Artificial Sequence; identical to SEQ ID NO: 73175
  Cyclic GFR-binding peptide
  MOD_RES (2)..(3)..(34): Xaa is C or S

SEQ ID NO: 115507 - protein, 34 aa, Artificial Sequence; identical to SEQ ID NO: 24740
  Cyclic GFR-binding peptide
  MOD_RES (2)..(2): Xaa is C or S

SEQ ID NO: 115508 - protein, 33 aa, Artificial Sequence; identical to SEQ ID NO: 69974
  Cyclic GFR-binding peptide
  MOD_RES (4)..(5): Xaa is C or S

SEQ ID NO: 115509 - protein, 31 aa, Artificial Sequence; identical to SEQ ID NO: 24741
  Cyclic GFR-binding peptide

SEQ ID NO: 115510 - protein, 27 aa, Artificial Sequence
  Cyclic GFR-binding peptide
PQDLRPVQIRKIVGRTPKVKKATVMVV

SEQ ID NO: 115511 - protein, 23 aa, Artificial Sequence
  Cyclic GFR-binding peptide
QRPVQMRKIRIKPHQGQHKKATV

SEQ ID NO: 115512 - protein, 32 aa, Artificial Sequence; identical to SEQ ID NO: 73179
  Cyclic GFR-binding peptide
  MOD_RES (3)..(4): Xaa is C or S

SEQ ID NO: 115513 - protein, 34 aa, Artificial Sequence; identical to SEQ ID NO: 24744
  Cyclic GFR-binding peptide
  MOD_RES (3)..(3): Xaa is C or S

SEQ ID NO: 115514 - protein, 36 aa, Artificial Sequence; identical to SEQ ID NO: 69976
  Cyclic GFR-binding peptide
  MOD_RES (4)..(5)..(36): Xaa is C or S

SEQ ID NO: 115515 - protein, 36 aa, Artificial Sequence; identical to SEQ ID NO: 69978
  Cyclic GFR-binding peptide
  MOD_RES (1)..(2)..(33)..(35): Xaa is C or S

SEQ ID NO: 115516 - protein, 38 aa, Artificial Sequence; identical to SEQ ID NO: 24745
  Cyclic GFR-binding peptide
  MOD_RES (5)..(5): Xaa is C or S

SEQ ID NO: 115517 - protein, 30 aa, Artificial Sequence; identical to SEQ ID NO: 24746
  Cyclic GFR-binding peptide
  MOD_RES (3)..(3): Xaa is C or S

SEQ ID NO: 115518 - protein, 35 aa, Artificial Sequence; identical to SEQ ID NO: 69982
  Cyclic GFR-binding peptide
  MOD_RES (1)..(32)..(34): Xaa is C or S

SEQ ID NO: 115519 - protein, 20 aa, Artificial Sequence
  Cyclic GFR-binding peptide
RPVQIRKIVGRTPKVKKATV

SEQ ID NO: 115520 - protein, 34 aa, Artificial Sequence; identical to SEQ ID NO: 24750
  Cyclic GFR-binding peptide
  MOD_RES (4)..(4): Xaa is C or S

SEQ ID NO: 115521 - protein, 30 aa, Artificial Sequence; identical to SEQ ID NO: 73190
  Cyclic GFR-binding peptide
  MOD_RES (29)..(29): Xaa is C or S

SEQ ID NO: 115522 - protein, 28 aa, Artificial Sequence
  Cyclic GFR-binding peptide
QDLRPVQIRKIVGRTPKVKKATVMVVKS

SEQ ID NO: 115523 - protein, 34 aa, Artificial Sequence; identical to SEQ ID NO: 71592
  Cyclic GFR-binding peptide
  MOD_RES (1)..(32)..(34): Xaa is C or S

SEQ ID NO: 115524 - protein, 32 aa, Artificial Sequence; identical to SEQ ID NO: 74811
  Cyclic GFR-binding peptide
  MOD_RES (29)..(31): Xaa is C or S

SEQ ID NO: 115525 - protein, 32 aa, Artificial Sequence; identical to SEQ ID NO: 24752
  Cyclic GFR-binding peptide

SEQ ID NO: 115526 - protein, 31 aa, Artificial Sequence; identical to SEQ ID NO: 24754
  Cyclic GFR-binding peptide
  MOD_RES (30)..(30): Xaa is C or S

SEQ ID NO: 115527 - protein, 34 aa, Artificial Sequence; identical to SEQ ID NO: 24757
  Cyclic GFR-binding peptide
  MOD_RES (1)..(1): Xaa is C or S

SEQ ID NO: 115528 - protein, 39 aa, Artificial Sequence; identical to SEQ ID NO: 24758
  Cyclic GFR-binding peptide
  MOD_RES (3)..(3): Xaa is C or S

SEQ ID NO: 115529 - protein, 30 aa, Artificial Sequence; identical to SEQ ID NO: 24761
  Cyclic GFR-binding peptide

SEQ ID NO: 115530 - protein, 24 aa, Artificial Sequence
  Cyclic GFR-binding peptide
PQALRSVKIAKVVGRKPKVKEVQV

SEQ ID NO: 115531 - protein, 37 aa, Artificial Sequence; identical to SEQ ID NO: 24763
  Cyclic GFR-binding peptide
  MOD_RES (37)..(37): Xaa is C or S

SEQ ID NO: 115532 - protein, 36 aa, Artificial Sequence; identical to SEQ ID NO: 24765
  Cyclic GFR-binding peptide
  MOD_RES (1)..(35): Xaa is C or S

SEQ ID NO: 115533 - protein, 28 aa, Artificial Sequence
  Cyclic GFR-binding peptide
  MOD_RES (1)..(1): Xaa is C or S
XVPQALRSVKIAKVVGRKPKVKEVQVMI

SEQ ID NO: 115534 - protein, 40 aa, Artificial Sequence; identical to SEQ ID NO: 24767
  Cyclic GFR-binding peptide
  MOD_RES (3)..(40): Xaa is C or S

SEQ ID NO: 115535 - protein, 36 aa, Artificial Sequence; identical to SEQ ID NO: 24770
  Cyclic GFR-binding peptide
  MOD_RES (2)..(2): Xaa is C or S

SEQ ID NO: 115536 - protein, 24 aa, Artificial Sequence
  Cyclic GFR-binding peptide
PQALRPVQIRKIVGRKPKVKKATV

SEQ ID NO: 115537 - protein, 33 aa, Artificial Sequence; identical to SEQ ID NO: 74833
  Cyclic GFR-binding peptide
  MOD_RES (31)..(33): Xaa is C or S

SEQ ID NO: 115538 - protein, 43 aa, Artificial Sequence; identical to SEQ ID NO: 24774
  Cyclic GFR-binding peptide
  MOD_RES (7)..(41)..(43): Xaa is C or S

SEQ ID NO: 115539 - protein, 40 aa, Artificial Sequence; identical to SEQ ID NO: 73222
  Cyclic GFR-binding peptide
  MOD_RES (6)..(7)..(38)..(40): Xaa is C or S

SEQ ID NO: 115540 - protein, 33 aa, Artificial Sequence; identical to SEQ ID NO: 24777
  Cyclic GFR-binding peptide
  MOD_RES (3)..(3): Xaa is C or S

SEQ ID NO: 115541 - protein, 31 aa, Artificial Sequence; identical to SEQ ID NO: 70004
  Cyclic GFR-binding peptide
  MOD_RES (30)..(30): Xaa is C or S

SEQ ID NO: 115542 - protein, 27 aa, Artificial Sequence
  Cyclic GFR-binding peptide
  MOD_RES (27)..(27): Xaa is C or S
LRSVKIAKVVGRKPKVKEVQVMIVRSX

SEQ ID NO: 115543 - protein, 29 aa, Artificial Sequence
  Cyclic GFR-binding peptide
  MOD_RES (1)..(1): Xaa is C or S
XVSQDLRSVKIAKVIGKTPKIKEVQVMIV

SEQ ID NO: 115544 - protein, 28 aa, Artificial Sequence
  Cyclic GFR-binding peptide
  MOD_RES (28)..(28): Xaa is C or S
DLRPVQIRKIIGKTPKIKKATVMIVKSX

SEQ ID NO: 115545 - protein, 33 aa, Artificial Sequence; identical to SEQ ID NO: 24783
  Cyclic GFR-binding peptide

SEQ ID NO: 115546 - protein, 27 aa, Artificial Sequence
  Cyclic GFR-binding peptide
EERSVKMAKVRIKPHQGQHKEVQVFLQ

SEQ ID NO: 115547 - protein, 28 aa, Artificial Sequence
  Cyclic GFR-binding peptide
TGQRPVQMRKIRIKPHQGQHKKATVLEE

SEQ ID NO: 115548 - protein, 27 aa, Artificial Sequence
  Cyclic GFR-binding peptide
  MOD_RES (26)..(26): Xaa is C or S
RPVQIRKIIGKTPKIKKATVMIVKSXK

SEQ ID NO: 115549 - protein, 35 aa, Artificial Sequence; identical to SEQ ID NO: 70016
  Cyclic GFR-binding peptide
  MOD_RES (6)..(7): Xaa is C or S

SEQ ID NO: 115550 - protein, 28 aa, Artificial Sequence
  Cyclic GFR-binding peptide
  MOD_RES (27)..(27): Xaa is C or S
LRSVKIAKVVGRTPKVKEVQVMVVKSXK

SEQ ID NO: 115551 - protein, 31 aa, Artificial Sequence; identical to SEQ ID NO: 73234
  Cyclic GFR-binding peptide
  MOD_RES (1)..(1): Xaa is C or S

SEQ ID NO: 115552 - protein, 30 aa, Artificial Sequence; identical to SEQ ID NO: 24791
  Cyclic GFR-binding peptide

SEQ ID NO: 115553 - protein, 29 aa, Artificial Sequence
  Cyclic GFR-binding peptide
  MOD_RES (3)..(4): Xaa is C or S
APXXVPQALRPVQIRKIVGRKPKVKKATV

SEQ ID NO: 115554 - protein, 29 aa, Artificial Sequence
  Cyclic GFR-binding peptide
  MOD_RES (1)..(2): Xaa is C or S
XXVPQALRSVKIAKVVGRKPKVKEVQVMI

SEQ ID NO: 115555 - protein, 27 aa, Artificial Sequence
  Cyclic GFR-binding peptide
  MOD_RES (1)..(1): Xaa is C or S
XVPQDLRSVKIAKVVGRTPKVKEVQVM

SEQ ID NO: 115556 - protein, 31 aa, Artificial Sequence; identical to SEQ ID NO: 24793
  Cyclic GFR-binding peptide

SEQ ID NO: 115557 - protein, 33 aa, Artificial Sequence; identical to SEQ ID NO: 24794
  Cyclic GFR-binding peptide
  MOD_RES (33)..(33): Xaa is C or S

SEQ ID NO: 115558 - protein, 34 aa, Artificial Sequence; identical to SEQ ID NO: 24795
  Cyclic GFR-binding peptide
  MOD_RES (1)..(1): Xaa is C or S

SEQ ID NO: 115559 - protein, 32 aa, Artificial Sequence; identical to SEQ ID NO: 71630
  Cyclic GFR-binding peptide
  MOD_RES (29)..(31): Xaa is C or S

SEQ ID NO: 115560 - protein, 31 aa, Artificial Sequence; identical to SEQ ID NO: 24798
  Cyclic GFR-binding peptide

SEQ ID NO: 115561 - protein, 32 aa, Artificial Sequence; identical to SEQ ID NO: 71636
  Cyclic GFR-binding peptide
  MOD_RES (4)..(5): Xaa is C or S

SEQ ID NO: 115562 - protein, 40 aa, Artificial Sequence; identical to SEQ ID NO: 24799
  Cyclic GFR-binding peptide
  MOD_RES (7)..(7): Xaa is C or S

SEQ ID NO: 115563 - protein, 32 aa, Artificial Sequence; identical to SEQ ID NO: 24800
  Cyclic GFR-binding peptide
  MOD_RES (1)..(1): Xaa is C or S

SEQ ID NO: 115564 - protein, 28 aa, Artificial Sequence
  Cyclic GFR-binding peptide
  MOD_RES (1)..(2): Xaa is C or S
XXVPQDLRSVKIAKVVGRTPKVKEVQVM

SEQ ID NO: 115565 - protein, 31 aa, Artificial Sequence; identical to SEQ ID NO: 24801
  Cyclic GFR-binding peptide

SEQ ID NO: 115566 - protein, 36 aa, Artificial Sequence; identical to SEQ ID NO: 24802
  Cyclic GFR-binding peptide

SEQ ID NO: 115567 - protein, 25 aa, Artificial Sequence
  Cyclic GFR-binding peptide
LRSVKVAKVEIVRKKPIFKEVQVTL

SEQ ID NO: 115568 - protein, 39 aa, Artificial Sequence; identical to SEQ ID NO: 70031
  Cyclic GFR-binding peptide
  MOD_RES (4)..(5)..(36)..(38): Xaa is C or S

SEQ ID NO: 115569 - protein, 30 aa, Artificial Sequence; identical to SEQ ID NO: 73249
  Cyclic GFR-binding peptide
  MOD_RES (4)..(5): Xaa is C or S

SEQ ID NO: 115570 - protein, 27 aa, Artificial Sequence
  Cyclic GFR-binding peptide
RSVKMAKVRIKPHQGQHKEVQVLEEHS

SEQ ID NO: 115571 - protein, 38 aa, Artificial Sequence; identical to SEQ ID NO: 24807
  Cyclic GFR-binding peptide
  MOD_RES (3)..(3): Xaa is C or S

SEQ ID NO: 115572 - protein, 28 aa, Artificial Sequence
  Cyclic GFR-binding peptide
VSQDLRSVKIAKVIGKTPKIKEVQVMIV

SEQ ID NO: 115573 - protein, 32 aa, Artificial Sequence; identical to SEQ ID NO: 70038
  Cyclic GFR-binding peptide
  MOD_RES (30)..(32): Xaa is C or S

SEQ ID NO: 115574 - protein, 40 aa, Artificial Sequence; identical to SEQ ID NO: 24813
  Cyclic GFR-binding peptide
  MOD_RES (2)..(39): Xaa is C or S

SEQ ID NO: 115575 - protein, 37 aa, Artificial Sequence; identical to SEQ ID NO: 70041
  Cyclic GFR-binding peptide
  MOD_RES (2)..(3)..(34)..(36): Xaa is C or S

SEQ ID NO: 115576 - protein, 32 aa, Artificial Sequence; identical to SEQ ID NO: 70042
  Cyclic GFR-binding peptide
  MOD_RES (30)..(32): Xaa is C or S

SEQ ID NO: 115577 - protein, 24 aa, Artificial Sequence
  Cyclic GFR-binding peptide
SQDLRSVKIAKVIGKTPKIKEVQV

SEQ ID NO: 115578 - protein, 31 aa, Artificial Sequence; identical to SEQ ID NO: 70046
  Cyclic GFR-binding peptide
  MOD_RES (5)..(6): Xaa is C or S

SEQ ID NO: 115579 - protein, 43 aa, Artificial Sequence; identical to SEQ ID NO: 24817
  Cyclic GFR-binding peptide
  MOD_RES (3)..(40)..(42): Xaa is C or S

SEQ ID NO: 115580 - protein, 24 aa, Artificial Sequence
  Cyclic GFR-binding peptide
EERSVKMAKVRIKPHQGQHKEVQV

SEQ ID NO: 115581 - protein, 26 aa, Artificial Sequence
  Cyclic GFR-binding peptide
  MOD_RES (1)..(1): Xaa is C or S
XVPQDLRPVQIRKIVGRTPKVKKATV

SEQ ID NO: 115582 - protein, 35 aa, Artificial Sequence; identical to SEQ ID NO: 24820
  Cyclic GFR-binding peptide
  MOD_RES (33)..(35): Xaa is C or S

SEQ ID NO: 115583 - protein, 37 aa, Artificial Sequence; identical to SEQ ID NO: 74866
  Cyclic GFR-binding peptide
  MOD_RES (3)..(4)..(35)..(37): Xaa is C or S

SEQ ID NO: 115584 - protein, 35 aa, Artificial Sequence; identical to SEQ ID NO: 71654
  Cyclic GFR-binding peptide
  MOD_RES (3)..(4)..(35): Xaa is C or S

SEQ ID NO: 115585 - protein, 29 aa, Artificial Sequence
  Cyclic GFR-binding peptide
PTEERSVKMAKVRIKPHQGQHKEVQVFLQ

SEQ ID NO: 115586 - protein, 32 aa, Artificial Sequence; identical to SEQ ID NO: 71657
  Cyclic GFR-binding peptide
  MOD_RES (4)..(5): Xaa is C or S

SEQ ID NO: 115587 - protein, 41 aa, Artificial Sequence; identical to SEQ ID NO: 24824
  Cyclic GFR-binding peptide
  MOD_RES (4)..(38)..(40): Xaa is C or S

SEQ ID NO: 115588 - protein, 26 aa, Artificial Sequence
  Cyclic GFR-binding peptide
RSVKMAKVRIKPHQGQHKEVQVLEEH

SEQ ID NO: 115589 - protein, 36 aa, Artificial Sequence; identical to SEQ ID NO: 24829
  Cyclic GFR-binding peptide
  MOD_RES (3)..(3): Xaa is C or S

SEQ ID NO: 115590 - protein, 35 aa, Artificial Sequence; identical to SEQ ID NO: 24830
  Cyclic GFR-binding peptide
  MOD_RES (34)..(34): Xaa is C or S

SEQ ID NO: 115591 - protein, 27 aa, Artificial Sequence
  Cyclic GFR-binding peptide
HRPVQVRKIEYVRKKPKLKKATVRLEE

SEQ ID NO: 115592 - protein, 23 aa, Artificial Sequence
  Cyclic GFR-binding peptide
LRSVKIAKVVGRTPKVKEVQVMV

SEQ ID NO: 115593 - protein, 39 aa, Artificial Sequence; identical to SEQ ID NO: 24832
  Cyclic GFR-binding peptide
  MOD_RES (4)..(38): Xaa is C or S

SEQ ID NO: 115594 - protein, 32 aa, Artificial Sequence; identical to SEQ ID NO: 24833
  Cyclic GFR-binding peptide
  MOD_RES (31)..(31): Xaa is C or S

SEQ ID NO: 115595 - protein, 37 aa, Artificial Sequence; identical to SEQ ID NO: 24834
  Cyclic GFR-binding peptide
  MOD_RES (3)..(3): Xaa is C or S

SEQ ID NO: 115596 - protein, 29 aa, Artificial Sequence
  Cyclic GFR-binding peptide
  MOD_RES (28)..(28): Xaa is C or S
DLRSVKIAKVVGRTPKVKEVQVMVVKSXK

SEQ ID NO: 115597 - protein, 40 aa, Artificial Sequence; identical to SEQ ID NO: 24837
  Cyclic GFR-binding peptide
  MOD_RES (3)..(37)..(39): Xaa is C or S

SEQ ID NO: 115598 - protein, 36 aa, Artificial Sequence; identical to SEQ ID NO: 24838
  Cyclic GFR-binding peptide
  MOD_RES (6)..(6): Xaa is C or S

SEQ ID NO: 115599 - protein, 33 aa, Artificial Sequence; identical to SEQ ID NO: 74884
  Cyclic GFR-binding peptide
  MOD_RES (2)..(3): Xaa is C or S

SEQ ID NO: 115600 - protein, 32 aa, Artificial Sequence; identical to SEQ ID NO: 24841
  Cyclic GFR-binding peptide
  MOD_RES (3)..(3): Xaa is C or S

SEQ ID NO: 115601 - protein, 36 aa, Artificial Sequence; identical to SEQ ID NO: 24847
  Cyclic GFR-binding peptide
  MOD_RES (2)..(36): Xaa is C or S

SEQ ID NO: 115602 - protein, 33 aa, Artificial Sequence; identical to SEQ ID NO: 74892
  Cyclic GFR-binding peptide
  MOD_RES (1)..(32): Xaa is C or S

SEQ ID NO: 115603 - protein, 31 aa, Artificial Sequence; identical to SEQ ID NO: 24848
  Cyclic GFR-binding peptide
  MOD_RES (4)..(4): Xaa is C or S

SEQ ID NO: 115604 - protein, 31 aa, Artificial Sequence; identical to SEQ ID NO: 73283
  Cyclic GFR-binding peptide
  MOD_RES (3)..(4): Xaa is C or S

SEQ ID NO: 115605 - protein, 40 aa, Artificial Sequence; identical to SEQ ID NO: 24849
  Cyclic GFR-binding peptide
  MOD_RES (1)..(38)..(40): Xaa is C or S

SEQ ID NO: 115606 - protein, 33 aa, Artificial Sequence; identical to SEQ ID NO: 73285
  Cyclic GFR-binding peptide
  MOD_RES (1)..(32): Xaa is C or S

SEQ ID NO: 115607 - protein, 26 aa, Artificial Sequence
  Cyclic GFR-binding peptide
PQALRSVKIAKVVGRKPKVKEVQVMI

SEQ ID NO: 115608 - protein, 31 aa, Artificial Sequence; identical to SEQ ID NO: 74895
  Cyclic GFR-binding peptide
  MOD_RES (2)..(3): Xaa is C or S

SEQ ID NO: 115609 - protein, 22 aa, Artificial Sequence
  Cyclic GFR-binding peptide
LRSVKIAKVVGRKPKVKEVQVM

SEQ ID NO: 115610 - protein, 37 aa, Artificial Sequence; identical to SEQ ID NO: 24852
  Cyclic GFR-binding peptide
  MOD_RES (4)..(4): Xaa is C or S

SEQ ID NO: 115611 - protein, 40 aa, Artificial Sequence; identical to SEQ ID NO: 24854
  Cyclic GFR-binding peptide
  MOD_RES (7)..(7): Xaa is C or S

SEQ ID NO: 115612 - protein, 37 aa, Artificial Sequence; identical to SEQ ID NO: 24855
  Cyclic GFR-binding peptide
  MOD_RES (1)..(35)..(37): Xaa is C or S

SEQ ID NO: 115613 - protein, 30 aa, Artificial Sequence; identical to SEQ ID NO: 24857
  Cyclic GFR-binding peptide
  MOD_RES (2)..(2): Xaa is C or S

SEQ ID NO: 115614 - protein, 34 aa, Artificial Sequence; identical to SEQ ID NO: 24858
  Cyclic GFR-binding peptide
  MOD_RES (2)..(2): Xaa is C or S

SEQ ID NO: 115615 - protein, 36 aa, Artificial Sequence; identical to SEQ ID NO: 74909
  Cyclic GFR-binding peptide
  MOD_RES (5)..(6): Xaa is C or S

SEQ ID NO: 115616 - protein, 28 aa, Artificial Sequence
  Cyclic GFR-binding peptide
  MOD_RES (2)..(3): Xaa is C or S
PXXVSQDLRPVQIRKIIGKTPKIKKATV

SEQ ID NO: 115617 - protein, 31 aa, Artificial Sequence; identical to SEQ ID NO: 73293
  Cyclic GFR-binding peptide
  MOD_RES (1)..(1): Xaa is C or S

SEQ ID NO: 115618 - protein, 23 aa, Artificial Sequence
  Cyclic GFR-binding peptide
RSVKIAKVVGRKPKVKEVQVMIV

SEQ ID NO: 115619 - protein, 38 aa, Artificial Sequence; identical to SEQ ID NO: 74911
  Cyclic GFR-binding peptide
  MOD_RES (4)..(5)..(36)..(38): Xaa is C or S

SEQ ID NO: 115620 - protein, 28 aa, Artificial Sequence
  Cyclic GFR-binding peptide
RSVKMAKVRIKPHQGQHKEVQVFLQHNK

SEQ ID NO: 115621 - protein, 34 aa, Artificial Sequence; identical to SEQ ID NO: 24862
  Cyclic GFR-binding peptide

SEQ ID NO: 115622 - protein, 23 aa, Artificial Sequence
  Cyclic GFR-binding peptide
QDLRSVKIAKVVGRTPKVKEVQV

SEQ ID NO: 115623 - protein, 41 aa, Artificial Sequence; identical to SEQ ID NO: 24864
  Cyclic GFR-binding peptide
  MOD_RES (1)..(38)..(40): Xaa is C or S

SEQ ID NO: 115624 - protein, 31 aa, Artificial Sequence; identical to SEQ ID NO: 24865
  Cyclic GFR-binding peptide
  MOD_RES (29)..(31): Xaa is C or S

SEQ ID NO: 115625 - protein, 32 aa, Artificial Sequence; identical to SEQ ID NO: 24866
  Cyclic GFR-binding peptide

SEQ ID NO: 115626 - protein, 27 aa, Artificial Sequence
  Cyclic GFR-binding peptide
QRSVKMAKVRIKPHQGQHKEVQVLEEH

SEQ ID NO: 115627 - protein, 26 aa, Artificial Sequence
  Cyclic GFR-binding peptide
LRSVKIAKVVGRKPKVKEVQVMIVRS

SEQ ID NO: 115628 - protein, 25 aa, Artificial Sequence
  Cyclic GFR-binding peptide
ALRPVQIRKIVGRKPKVKKATVMIV

SEQ ID NO: 115629 - protein, 34 aa, Artificial Sequence; identical to SEQ ID NO: 24870
  Cyclic GFR-binding peptide
  MOD_RES (33)..(33): Xaa is C or S

SEQ ID NO: 115630 - protein, 30 aa, Artificial Sequence; identical to SEQ ID NO: 24871
  Cyclic GFR-binding peptide
  MOD_RES (1)..(1): Xaa is C or S

SEQ ID NO: 115631 - protein, 33 aa, Artificial Sequence; identical to SEQ ID NO: 74919
  Cyclic GFR-binding peptide
  MOD_RES (1)..(32): Xaa is C or S

SEQ ID NO: 115632 - protein, 29 aa, Artificial Sequence
  Cyclic GFR-binding peptide
  MOD_RES (1)..(2): Xaa is C or S
XXVSQDLRPVQIRKIIGKTPKIKKATVMI

SEQ ID NO: 115633 - protein, 30 aa, Artificial Sequence; identical to SEQ ID NO: 73304
  Cyclic GFR-binding peptide
  MOD_RES (4)..(5): Xaa is C or S

SEQ ID NO: 115634 - protein, 36 aa, Artificial Sequence; identical to SEQ ID NO: 73305
  Cyclic GFR-binding peptide
  MOD_RES (6)..(7): Xaa is C or S

SEQ ID NO: 115635 - protein, 31 aa, Artificial Sequence; identical to SEQ ID NO: 24873
  Cyclic GFR-binding peptide
  MOD_RES (2)..(2): Xaa is C or S

SEQ ID NO: 115636 - protein, 38 aa, Artificial Sequence; identical to SEQ ID NO: 24875
  Cyclic GFR-binding peptide
  MOD_RES (2)..(2): Xaa is C or S

SEQ ID NO: 115637 - protein, 33 aa, Artificial Sequence; identical to SEQ ID NO: 24876
  Cyclic GFR-binding peptide
  MOD_RES (32)..(32): Xaa is C or S

SEQ ID NO: 115638 - protein, 25 aa, Artificial Sequence
  Cyclic GFR-binding peptide
TGQRSVKMAKVRIKPHQGQHKEVQV

SEQ ID NO: 115639 - protein, 38 aa, Artificial Sequence; identical to SEQ ID NO: 24882
  Cyclic GFR-binding peptide
  MOD_RES (5)..(5): Xaa is C or S

SEQ ID NO: 115640 - protein, 31 aa, Artificial Sequence; identical to SEQ ID NO: 71713
  Cyclic GFR-binding peptide
  MOD_RES (28)..(30): Xaa is C or S

SEQ ID NO: 115641 - protein, 28 aa, Artificial Sequence
  Cyclic GFR-binding peptide
ERPVQMRKIRIKPHQGQHKKATVFLQHN

SEQ ID NO: 115642 - protein, 22 aa, Artificial Sequence
  Cyclic GFR-binding peptide
RPVQIRKIVGRTPKVKKATVMV

SEQ ID NO: 115643 - protein, 31 aa, Artificial Sequence; identical to SEQ ID NO: 24887
  Cyclic GFR-binding peptide
  MOD_RES (31)..(31): Xaa is C or S

SEQ ID NO: 115644 - protein, 23 aa, Artificial Sequence
  Cyclic GFR-binding peptide
QDLRPVQIRKIIGKTPKIKKATV

SEQ ID NO: 115645 - protein, 38 aa, Artificial Sequence; identical to SEQ ID NO: 24889
  Cyclic GFR-binding peptide
  MOD_RES (5)..(5): Xaa is C or S

SEQ ID NO: 115646 - protein, 27 aa, Artificial Sequence
  Cyclic GFR-binding peptide
TGQRSVKMAKVRIKPHQGQHKEVQVLE

SEQ ID NO: 115647 - protein, 31 aa, Artificial Sequence; identical to SEQ ID NO: 73328
  Cyclic GFR-binding peptide
  MOD_RES (29)..(31): Xaa is C or S

SEQ ID NO: 115648 - protein, 32 aa, Artificial Sequence; identical to SEQ ID NO: 70107
  Cyclic GFR-binding peptide
  MOD_RES (30)..(32): Xaa is C or S

SEQ ID NO: 115649 - protein, 43 aa, Artificial Sequence; identical to SEQ ID NO: 24899
  Cyclic GFR-binding peptide
  MOD_RES (7)..(41)..(43): Xaa is C or S

SEQ ID NO: 115650 - protein, 29 aa, Artificial Sequence
  Cyclic GFR-binding peptide
VPTEERPVQMRKIRIKPHQGQHKKATVFL

SEQ ID NO: 115651 - protein, 30 aa, Artificial Sequence; identical to SEQ ID NO: 24901
  Cyclic GFR-binding peptide

SEQ ID NO: 115652 - protein, 28 aa, Artificial Sequence
  Cyclic GFR-binding peptide
ERSVKMAKVRIKPHQGQHKEVQVFLQHN

SEQ ID NO: 115653 - protein, 25 aa, Artificial Sequence
  Cyclic GFR-binding peptide
RPVQIRKIVGRTPKVKKATVMVVKS

SEQ ID NO: 115654 - protein, 28 aa, Artificial Sequence
  Cyclic GFR-binding peptide
EERSVKMAKVRIKPHQGQHKEVQVFLQH

SEQ ID NO: 115655 - protein, 36 aa, Artificial Sequence; identical to SEQ ID NO: 73341
  Cyclic GFR-binding peptide
  MOD_RES (6)..(7): Xaa is C or S

SEQ ID NO: 115656 - protein, 35 aa, Artificial Sequence; identical to SEQ ID NO: 24906
  Cyclic GFR-binding peptide
  MOD_RES (5)..(5): Xaa is C or S

SEQ ID NO: 115657 - protein, 31 aa, Artificial Sequence; identical to SEQ ID NO: 24907
  Cyclic GFR-binding peptide
  MOD_RES (3)..(3): Xaa is C or S

SEQ ID NO: 115658 - protein, 33 aa, Artificial Sequence; identical to SEQ ID NO: 24909
  Cyclic GFR-binding peptide
  MOD_RES (3)..(3): Xaa is C or S

SEQ ID NO: 115659 - protein, 26 aa, Artificial Sequence
  Cyclic GFR-binding peptide
QLRSVKVAKVEIVRKKPIFKEVQVTL

SEQ ID NO: 115660 - protein, 35 aa, Artificial Sequence; identical to SEQ ID NO: 24912
  Cyclic GFR-binding peptide
  MOD_RES (7)..(7): Xaa is C or S

SEQ ID NO: 115661 - protein, 22 aa, Artificial Sequence
  Cyclic GFR-binding peptide
ALRPVQIRKIVGRKPKVKKATV

SEQ ID NO: 115662 - protein, 31 aa, Artificial Sequence; identical to SEQ ID NO: 24913
  Cyclic GFR-binding peptide

SEQ ID NO: 115663 - protein, 32 aa, Artificial Sequence; identical to SEQ ID NO: 24916
  Cyclic GFR-binding peptide
  MOD_RES (31)..(31): Xaa is C or S

SEQ ID NO: 115664 - protein, 32 aa, Artificial Sequence; identical to SEQ ID NO: 24917
  Cyclic GFR-binding peptide
  MOD_RES (31)..(31): Xaa is C or S

SEQ ID NO: 115665 - protein, 28 aa, Artificial Sequence
  Cyclic GFR-binding peptide
VPQALRSVKIAKVVGRKPKVKEVQVMIV

SEQ ID NO: 115666 - protein, 33 aa, Artificial Sequence; identical to SEQ ID NO: 24919
  Cyclic GFR-binding peptide
  MOD_RES (30)..(32): Xaa is C or S

SEQ ID NO: 115667 - protein, 31 aa, Artificial Sequence; identical to SEQ ID NO: 24921
  Cyclic GFR-binding peptide
  MOD_RES (29)..(31): Xaa is C or S

SEQ ID NO: 115668 - protein, 33 aa, Artificial Sequence; identical to SEQ ID NO: 24923
  Cyclic GFR-binding peptide
  MOD_RES (31)..(33): Xaa is C or S

SEQ ID NO: 115669 - protein, 26 aa, Artificial Sequence
  Cyclic GFR-binding peptide
VQLRSVKVAKVEIVRKKPIFKEVQVT

SEQ ID NO: 115670 - protein, 31 aa, Artificial Sequence; identical to SEQ ID NO: 24926
  Cyclic GFR-binding peptide
  MOD_RES (1)..(1): Xaa is C or S

SEQ ID NO: 115671 - protein, 28 aa, Artificial Sequence
  Cyclic GFR-binding peptide
HRPVQVRKIEYVRKKPKLKKATVRLEEH

SEQ ID NO: 115672 - protein, 30 aa, Artificial Sequence; identical to SEQ ID NO: 24928
  Cyclic GFR-binding peptide

SEQ ID NO: 115673 - protein, 27 aa, Artificial Sequence
  Cyclic GFR-binding peptide
VPTGQRSVKMAKVRIKPHQGQHKEVQV

SEQ ID NO: 115674 - protein, 25 aa, Artificial Sequence
  Cyclic GFR-binding peptide
GQRPVQMRKIRIKPHQGQHKKATVL

SEQ ID NO: 115675 - protein, 24 aa, Artificial Sequence
  Cyclic GFR-binding peptide
HRPVQVRKIEYVRKKPKLKKATVR

SEQ ID NO: 115676 - protein, 35 aa, Artificial Sequence; identical to SEQ ID NO: 24937
  Cyclic GFR-binding peptide
  MOD_RES (2)..(2): Xaa is C or S

SEQ ID NO: 115677 - protein, 35 aa, Artificial Sequence; identical to SEQ ID NO: 24940
  Cyclic GFR-binding peptide
  MOD_RES (35)..(35): Xaa is C or S

SEQ ID NO: 115678 - protein, 38 aa, Artificial Sequence; identical to SEQ ID NO: 24942
  Cyclic GFR-binding peptide
  MOD_RES (5)..(5): Xaa is C or S

SEQ ID NO: 115679 - protein, 33 aa, Artificial Sequence; identical to SEQ ID NO: 24943
  Cyclic GFR-binding peptide

SEQ ID NO: 115680 - protein, 30 aa, Artificial Sequence; identical to SEQ ID NO: 71748
  Cyclic GFR-binding peptide
  MOD_RES (28)..(30): Xaa is C or S

SEQ ID NO: 115681 - protein, 30 aa, Artificial Sequence; identical to SEQ ID NO: 71751
  Cyclic GFR-binding peptide
  MOD_RES (4)..(5): Xaa is C or S

SEQ ID NO: 115682 - protein, 28 aa, Artificial Sequence
  Cyclic GFR-binding peptide
QDLRSVKIAKVVGRTPKVKEVQVMVVKS

SEQ ID NO: 115683 - protein, 34 aa, Artificial Sequence; identical to SEQ ID NO: 24949
  Cyclic GFR-binding peptide
  MOD_RES (5)..(5): Xaa is C or S

SEQ ID NO: 115684 - protein, 28 aa, Artificial Sequence
  Cyclic GFR-binding peptide
  MOD_RES (28)..(28): Xaa is C or S
DLRSVKIAKVVGRTPKVKEVQVMVVKSX

SEQ ID NO: 115685 - protein, 37 aa, Artificial Sequence; identical to SEQ ID NO: 24951
  Cyclic GFR-binding peptide
  MOD_RES (3)..(37): Xaa is C or S

SEQ ID NO: 115686 - protein, 30 aa, Artificial Sequence; identical to SEQ ID NO: 71757
  Cyclic GFR-binding peptide
  MOD_RES (30)..(30): Xaa is C or S

SEQ ID NO: 115687 - protein, 33 aa, Artificial Sequence; identical to SEQ ID NO: 70151
  Cyclic GFR-binding peptide
  MOD_RES (1)..(2)..(33): Xaa is C or S

SEQ ID NO: 115688 - protein, 31 aa, Artificial Sequence; identical to SEQ ID NO: 74982
  Cyclic GFR-binding peptide
  MOD_RES (2)..(3): Xaa is C or S

SEQ ID NO: 115689 - protein, 33 aa, Artificial Sequence; identical to SEQ ID NO: 73379
  Cyclic GFR-binding peptide
  MOD_RES (4)..(5): Xaa is C or S

SEQ ID NO: 115690 - protein, 35 aa, Artificial Sequence; identical to SEQ ID NO: 73380
  Cyclic GFR-binding peptide
  MOD_RES (3)..(4)..(35): Xaa is C or S

SEQ ID NO: 115691 - protein, 26 aa, Artificial Sequence
  Cyclic GFR-binding peptide
PTGQRSVKMAKVRIKPHQGQHKEVQV

SEQ ID NO: 115692 - protein, 38 aa, Artificial Sequence; identical to SEQ ID NO: 24956
  Cyclic GFR-binding peptide
  MOD_RES (2)..(2): Xaa is C or S

SEQ ID NO: 115693 - protein, 32 aa, Artificial Sequence; identical to SEQ ID NO: 70155
  Cyclic GFR-binding peptide
  MOD_RES (31)..(31): Xaa is C or S

SEQ ID NO: 115694 - protein, 38 aa, Artificial Sequence; identical to SEQ ID NO: 73383
  Cyclic GFR-binding peptide
  MOD_RES (3)..(4)..(35)..(37): Xaa is C or S

SEQ ID NO: 115695 - protein, 33 aa, Artificial Sequence; identical to SEQ ID NO: 70158
  Cyclic GFR-binding peptide
  MOD_RES (2)..(3): Xaa is C or S

SEQ ID NO: 115696 - protein, 31 aa, Artificial Sequence; identical to SEQ ID NO: 24957
  Cyclic GFR-binding peptide

SEQ ID NO: 115697 - protein, 32 aa, Artificial Sequence; identical to SEQ ID NO: 24958
  Cyclic GFR-binding peptide
  MOD_RES (30)..(32): Xaa is C or S

SEQ ID NO: 115698 - protein, 40 aa, Artificial Sequence; identical to SEQ ID NO: 24959
  Cyclic GFR-binding peptide
  MOD_RES (6)..(40): Xaa is C or S

SEQ ID NO: 115699 - protein, 40 aa, Artificial Sequence; identical to SEQ ID NO: 24961
  Cyclic GFR-binding peptide
  MOD_RES (6)..(40): Xaa is C or S

SEQ ID NO: 115700 - protein, 39 aa, Artificial Sequence; identical to SEQ ID NO: 71764
  Cyclic GFR-binding peptide
  MOD_RES (6)..(7)..(38): Xaa is C or S

SEQ ID NO: 115701 - protein, 26 aa, Artificial Sequence
  Cyclic GFR-binding peptide
VHHRPVQVRKIEYVRKKPKLKKATVR

SEQ ID NO: 115702 - protein, 40 aa, Artificial Sequence; identical to SEQ ID NO: 24967
  Cyclic GFR-binding peptide
  MOD_RES (37)..(39): Xaa is C or S

SEQ ID NO: 115703 - protein, 36 aa, Artificial Sequence; identical to SEQ ID NO: 24968
  Cyclic GFR-binding peptide
  MOD_RES (35)..(35): Xaa is C or S

SEQ ID NO: 115704 - protein, 33 aa, Artificial Sequence; identical to SEQ ID NO: 24971
  Cyclic GFR-binding peptide

SEQ ID NO: 115705 - protein, 36 aa, Artificial Sequence; identical to SEQ ID NO: 75000
  Cyclic GFR-binding peptide
  MOD_RES (1)..(2)..(33)..(35): Xaa is C or S

SEQ ID NO: 115706 - protein, 27 aa, Artificial Sequence
  Cyclic GFR-binding peptide
GQRPVQMRKIRIKPHQGQHKKATVLEE

SEQ ID NO: 115707 - protein, 29 aa, Artificial Sequence
  Cyclic GFR-binding peptide
  MOD_RES (2)..(3): Xaa is C or S
PXXVPQDLRSVKIAKVVGRTPKVKEVQVM

SEQ ID NO: 115708 - protein, 25 aa, Artificial Sequence
  Cyclic GFR-binding peptide
QRSVKMAKVRIKPHQGQHKEVQVLE

SEQ ID NO: 115709 - protein, 29 aa, Artificial Sequence
  Cyclic GFR-binding peptide
PTQVQLRSVKVAKVEIVRKKPIFKEVQVT

SEQ ID NO: 115710 - protein, 36 aa, Artificial Sequence; identical to SEQ ID NO: 24981
  Cyclic GFR-binding peptide
  MOD_RES (5)..(5): Xaa is C or S

SEQ ID NO: 115711 - protein, 26 aa, Artificial Sequence
  Cyclic GFR-binding peptide
  MOD_RES (26)..(26): Xaa is C or S
RSVKIAKVIGKTPKIKEVQVMIVKSX

SEQ ID NO: 115712 - protein, 31 aa, Artificial Sequence; identical to SEQ ID NO: 71775
  Cyclic GFR-binding peptide
  MOD_RES (5)..(6): Xaa is C or S

SEQ ID NO: 115713 - protein, 34 aa, Artificial Sequence; identical to SEQ ID NO: 71776
  Cyclic GFR-binding peptide
  MOD_RES (4)..(5): Xaa is C or S

SEQ ID NO: 115714 - protein, 39 aa, Artificial Sequence; identical to SEQ ID NO: 24986
  Cyclic GFR-binding peptide
  MOD_RES (2)..(36)..(38): Xaa is C or S

SEQ ID NO: 115715 - protein, 37 aa, Artificial Sequence; identical to SEQ ID NO: 71778
  Cyclic GFR-binding peptide
  MOD_RES (4)..(5)..(36): Xaa is C or S

SEQ ID NO: 115716 - protein, 27 aa, Artificial Sequence
  Cyclic GFR-binding peptide
RPVQVRKIEYVRKKPKLKKATVRLEEH

SEQ ID NO: 115717 - protein, 26 aa, Artificial Sequence
  Cyclic GFR-binding peptide
QALRPVQIRKIVGRKPKVKKATVMIV

SEQ ID NO: 115718 - protein, 26 aa, Artificial Sequence
  Cyclic GFR-binding peptide
TGQRPVQMRKIRIKPHQGQHKKATVL

SEQ ID NO: 115719 - protein, 31 aa, Artificial Sequence; identical to SEQ ID NO: 24991
  Cyclic GFR-binding peptide

SEQ ID NO: 115720 - protein, 36 aa, Artificial Sequence; identical to SEQ ID NO: 24993
  Cyclic GFR-binding peptide
  MOD_RES (34)..(36): Xaa is C or S

SEQ ID NO: 115721 - protein, 24 aa, Artificial Sequence
  Cyclic GFR-binding peptide
QALRSVKIAKVVGRKPKVKEVQVM

SEQ ID NO: 115722 - protein, 32 aa, Artificial Sequence; identical to SEQ ID NO: 24994
  Cyclic GFR-binding peptide
  MOD_RES (1)..(1): Xaa is C or S

SEQ ID NO: 115723 - protein, 37 aa, Artificial Sequence; identical to SEQ ID NO: 73422
  Cyclic GFR-binding peptide
  MOD_RES (6)..(7): Xaa is C or S

SEQ ID NO: 115724 - protein, 39 aa, Artificial Sequence; identical to SEQ ID NO: 25000
  Cyclic GFR-binding peptide
  MOD_RES (2)..(36)..(38): Xaa is C or S

SEQ ID NO: 115725 - protein, 40 aa, Artificial Sequence; identical to SEQ ID NO: 25002
  Cyclic GFR-binding peptide
  MOD_RES (4)..(38)..(40): Xaa is C or S

SEQ ID NO: 115726 - protein, 34 aa, Artificial Sequence; identical to SEQ ID NO: 25003
  Cyclic GFR-binding peptide

SEQ ID NO: 115727 - protein, 27 aa, Artificial Sequence
  Cyclic GFR-binding peptide
ERPVQMRKIRIKPHQGQHKKATVFLQH

SEQ ID NO: 115728 - protein, 28 aa, Artificial Sequence
  Cyclic GFR-binding peptide
VPTGQRSVKMAKVRIKPHQGQHKEVQVL

SEQ ID NO: 115729 - protein, 36 aa, Artificial Sequence; identical to SEQ ID NO: 25009
  Cyclic GFR-binding peptide
  MOD_RES (7)..(7): Xaa is C or S

SEQ ID NO: 115730 - protein, 25 aa, Artificial Sequence
  Cyclic GFR-binding peptide
SQDLRPVQIRKIIGKTPKIKKATVM

SEQ ID NO: 115731 - protein, 38 aa, Artificial Sequence; identical to SEQ ID NO: 25012
  Cyclic GFR-binding peptide
  MOD_RES (4)..(38): Xaa is C or S

SEQ ID NO: 115732 - protein, 42 aa, Artificial Sequence; identical to SEQ ID NO: 25013
  Cyclic GFR-binding peptide
  MOD_RES (3)..(40)..(42): Xaa is C or S

SEQ ID NO: 115733 - protein, 41 aa, Artificial Sequence; identical to SEQ ID NO: 25014
  Cyclic GFR-binding peptide
  MOD_RES (7)..(41): Xaa is C or S

SEQ ID NO: 115734 - protein, 33 aa, Artificial Sequence; identical to SEQ ID NO: 25015
  Cyclic GFR-binding peptide
  MOD_RES (30)..(32): Xaa is C or S

SEQ ID NO: 115735 - protein, 35 aa, Artificial Sequence; identical to SEQ ID NO: 73430
  Cyclic GFR-binding peptide
  MOD_RES (5)..(6): Xaa is C or S

SEQ ID NO: 115736 - protein, 37 aa, Artificial Sequence; identical to SEQ ID NO: 25017
  Cyclic GFR-binding peptide
  MOD_RES (34)..(36): Xaa is C or S

SEQ ID NO: 115737 - protein, 26 aa, Artificial Sequence
  Cyclic GFR-binding peptide
GQRSVKMAKVRIKPHQGQHKEVQVLE

SEQ ID NO: 115738 - protein, 27 aa, Artificial Sequence
  Cyclic GFR-binding peptide
  MOD_RES (1)..(2): Xaa is C or S
XXVPQDLRPVQIRKIVGRTPKVKKATV

SEQ ID NO: 115739 - protein, 27 aa, Artificial Sequence
  Cyclic GFR-binding peptide
DLRPVQIRKIIGKTPKIKKATVMIVKS

SEQ ID NO: 115740 - protein, 33 aa, Artificial Sequence; identical to SEQ ID NO: 73437
  Cyclic GFR-binding peptide
  MOD_RES (2)..(3): Xaa is C or S

SEQ ID NO: 115741 - protein, 32 aa, Artificial Sequence; identical to SEQ ID NO: 75051
  Cyclic GFR-binding peptide
  MOD_RES (31)..(31): Xaa is C or S

SEQ ID NO: 115742 - protein, 37 aa, Artificial Sequence; identical to SEQ ID NO: 75053
  Cyclic GFR-binding peptide
  MOD_RES (5)..(6)..(37): Xaa is C or S

SEQ ID NO: 115743 - protein, 25 aa, Artificial Sequence
  Cyclic GFR-binding peptide
VSQDLRPVQIRKIIGKTPKIKKATV

SEQ ID NO: 115744 - protein, 32 aa, Artificial Sequence; identical to SEQ ID NO: 70236
  Cyclic GFR-binding peptide
  MOD_RES (1)..(2): Xaa is C or S

SEQ ID NO: 115745 - protein, 33 aa, Artificial Sequence; identical to SEQ ID NO: 25022
  Cyclic GFR-binding peptide
  MOD_RES (3)..(3): Xaa is C or S

SEQ ID NO: 115746 - protein, 35 aa, Artificial Sequence; identical to SEQ ID NO: 25023
  Cyclic GFR-binding peptide
  MOD_RES (1)..(35): Xaa is C or S

SEQ ID NO: 115747 - protein, 22 aa, Artificial Sequence
  Cyclic GFR-binding peptide
DLRPVQIRKIVGRTPKVKKATV

SEQ ID NO: 115748 - protein, 41 aa, Artificial Sequence; identical to SEQ ID NO: 25027
  Cyclic GFR-binding peptide
  MOD_RES (2)..(39)..(41): Xaa is C or S

SEQ ID NO: 115749 - protein, 33 aa, Artificial Sequence; identical to SEQ ID NO: 75059
  Cyclic GFR-binding peptide
  MOD_RES (6)..(7): Xaa is C or S

SEQ ID NO: 115750 - protein, 30 aa, Artificial Sequence; identical to SEQ ID NO: 71820
  Cyclic GFR-binding peptide
  MOD_RES (3)..(4): Xaa is C or S

SEQ ID NO: 115751 - protein, 37 aa, Artificial Sequence; identical to SEQ ID NO: 25028
  Cyclic GFR-binding peptide
  MOD_RES (34)..(36): Xaa is C or S

SEQ ID NO: 115752 - protein, 37 aa, Artificial Sequence; identical to SEQ ID NO: 25029
  Cyclic GFR-binding peptide
  MOD_RES (2)..(36): Xaa is C or S

SEQ ID NO: 115753 - protein, 31 aa, Artificial Sequence; identical to SEQ ID NO: 75061
  Cyclic GFR-binding peptide
  MOD_RES (1)..(1): Xaa is C or S

SEQ ID NO: 115754 - protein, 32 aa, Artificial Sequence; identical to SEQ ID NO: 75063
  Cyclic GFR-binding peptide
  MOD_RES (5)..(6): Xaa is C or S

SEQ ID NO: 115755 - protein, 33 aa, Artificial Sequence; identical to SEQ ID NO: 25034
  Cyclic GFR-binding peptide

SEQ ID NO: 115756 - protein, 29 aa, Artificial Sequence
  Cyclic GFR-binding peptide
  MOD_RES (1)..(1): Xaa is C or S
XVPTGQRSVKMAKVRIKPHQGQHKEVQVL

SEQ ID NO: 115757 - protein, 25 aa, Artificial Sequence
  Cyclic GFR-binding peptide
QALRSVKIAKVVGRKPKVKEVQVMI

SEQ ID NO: 115758 - protein, 31 aa, Artificial Sequence; identical to SEQ ID NO: 25037
  Cyclic GFR-binding peptide

SEQ ID NO: 115759 - protein, 33 aa, Artificial Sequence; identical to SEQ ID NO: 25038
  Cyclic GFR-binding peptide
  MOD_RES (2)..(2): Xaa is C or S

SEQ ID NO: 115760 - protein, 24 aa, Artificial Sequence
  Cyclic GFR-binding peptide
LRPVQIRKIVGRKPKVKKATVMIV

SEQ ID NO: 115761 - protein, 29 aa, Artificial Sequence
  Cyclic GFR-binding peptide
  MOD_RES (1)..(1): Xaa is C or S
XVPQDLRPVQIRKIVGRTPKVKKATVMVV

SEQ ID NO: 115762 - protein, 24 aa, Artificial Sequence
  Cyclic GFR-binding peptide
ALRSVKIAKVVGRKPKVKEVQVMI

SEQ ID NO: 115763 - protein, 38 aa, Artificial Sequence; identical to SEQ ID NO: 70252
  Cyclic GFR-binding peptide
  MOD_RES (5)..(6)..(37): Xaa is C or S

SEQ ID NO: 115764 - protein, 23 aa, Artificial Sequence
  Cyclic GFR-binding peptide
LRSVKVAKVEIVRKKPIFKEVQV

SEQ ID NO: 115765 - protein, 29 aa, Artificial Sequence
  Cyclic GFR-binding peptide
HRPVQVRKIEYVRKKPKLKKATVRLEEHL

SEQ ID NO: 115766 - protein, 37 aa, Artificial Sequence; identical to SEQ ID NO: 25044
  Cyclic GFR-binding peptide
  MOD_RES (2)..(36): Xaa is C or S

SEQ ID NO: 115767 - protein, 26 aa, Artificial Sequence
  Cyclic GFR-binding peptide
VSQDLRSVKIAKVIGKTPKIKEVQVM

SEQ ID NO: 115768 - protein, 34 aa, Artificial Sequence; identical to SEQ ID NO: 71839
  Cyclic GFR-binding peptide
  MOD_RES (4)..(5): Xaa is C or S

SEQ ID NO: 115769 - protein, 24 aa, Artificial Sequence
  Cyclic GFR-binding peptide
QLRSVKVAKVEIVRKKPIFKEVQV

SEQ ID NO: 115770 - protein, 41 aa, Artificial Sequence; identical to SEQ ID NO: 25047
  Cyclic GFR-binding peptide
  MOD_RES (4)..(38)..(40): Xaa is C or S

SEQ ID NO: 115771 - protein, 28 aa, Artificial Sequence
  Cyclic GFR-binding peptide
  MOD_RES (26)..(28): Xaa is C or S
RSVKIAKVVGRTPKVKEVQVMVVKSXKX

SEQ ID NO: 115772 - protein, 40 aa, Artificial Sequence; identical to SEQ ID NO: 25049
  Cyclic GFR-binding peptide
  MOD_RES (3)..(37)..(39): Xaa is C or S

SEQ ID NO: 115773 - protein, 33 aa, Artificial Sequence; identical to SEQ ID NO: 25051
  Cyclic GFR-binding peptide
  MOD_RES (30)..(32): Xaa is C or S

SEQ ID NO: 115774 - protein, 27 aa, Artificial Sequence
  Cyclic GFR-binding peptide
PTGQRSVKMAKVRIKPHQGQHKEVQVL

SEQ ID NO: 115775 - protein, 39 aa, Artificial Sequence; identical to SEQ ID NO: 25053
  Cyclic GFR-binding peptide
  MOD_RES (37)..(39): Xaa is C or S

SEQ ID NO: 115776 - protein, 39 aa, Artificial Sequence; identical to SEQ ID NO: 25055
  Cyclic GFR-binding peptide
  MOD_RES (3)..(3): Xaa is C or S

SEQ ID NO: 115777 - protein, 40 aa, Artificial Sequence; identical to SEQ ID NO: 25056
  Cyclic GFR-binding peptide
  MOD_RES (7)..(7): Xaa is C or S

SEQ ID NO: 115778 - protein, 22 aa, Artificial Sequence
  Cyclic GFR-binding peptide
DLRSVKIAKVIGKTPKIKEVQV

SEQ ID NO: 115779 - protein, 32 aa, Artificial Sequence; identical to SEQ ID NO: 71847
  Cyclic GFR-binding peptide
  MOD_RES (6)..(7): Xaa is C or S

SEQ ID NO: 115780 - protein, 34 aa, Artificial Sequence; identical to SEQ ID NO: 75079
  Cyclic GFR-binding peptide
  MOD_RES (5)..(6): Xaa is C or S

SEQ ID NO: 115781 - protein, 30 aa, Artificial Sequence; identical to SEQ ID NO: 71849
  Cyclic GFR-binding peptide
  MOD_RES (1)..(1): Xaa is C or S

SEQ ID NO: 115782 - protein, 31 aa, Artificial Sequence; identical to SEQ ID NO: 75080
  Cyclic GFR-binding peptide
  MOD_RES (31)..(31): Xaa is C or S

SEQ ID NO: 115783 - protein, 38 aa, Artificial Sequence; identical to SEQ ID NO: 25059
  Cyclic GFR-binding peptide
  MOD_RES (3)..(37): Xaa is C or S

SEQ ID NO: 115784 - protein, 31 aa, Artificial Sequence; identical to SEQ ID NO: 25061
  Cyclic GFR-binding peptide

SEQ ID NO: 115785 - protein, 30 aa, Artificial Sequence; identical to SEQ ID NO: 70271
  Cyclic GFR-binding peptide
  MOD_RES (29)..(29): Xaa is C or S

SEQ ID NO: 115786 - protein, 35 aa, Artificial Sequence; identical to SEQ ID NO: 25063
  Cyclic GFR-binding peptide
  MOD_RES (2)..(2): Xaa is C or S

SEQ ID NO: 115787 - protein, 33 aa, Artificial Sequence; identical to SEQ ID NO: 75085
  Cyclic GFR-binding peptide
  MOD_RES (2)..(3): Xaa is C or S

SEQ ID NO: 115788 - protein, 29 aa, Artificial Sequence
  Cyclic GFR-binding peptide
PQDLRPVQIRKIVGRTPKVKKATVMVVKS

SEQ ID NO: 115789 - protein, 34 aa, Artificial Sequence; identical to SEQ ID NO: 25064
  Cyclic GFR-binding peptide
  MOD_RES (5)..(5): Xaa is C or S

SEQ ID NO: 115790 - protein, 29 aa, Artificial Sequence
  Cyclic GFR-binding peptide
VQLRSVKVAKVEIVRKKPIFKEVQVTLED

SEQ ID NO: 115791 - protein, 27 aa, Artificial Sequence
  Cyclic GFR-binding peptide
  MOD_RES (1)..(2): Xaa is C or S
XXVSQDLRSVKIAKVIGKTPKIKEVQV

SEQ ID NO: 115792 - protein, 30 aa, Artificial Sequence; identical to SEQ ID NO: 75091
  Cyclic GFR-binding peptide
  MOD_RES (27)..(29): Xaa is C or S

SEQ ID NO: 115793 - protein, 32 aa, Artificial Sequence; identical to SEQ ID NO: 25069
  Cyclic GFR-binding peptide
  MOD_RES (5)..(5): Xaa is C or S

SEQ ID NO: 115794 - protein, 40 aa, Artificial Sequence; identical to SEQ ID NO: 25070
  Cyclic GFR-binding peptide
  MOD_RES (5)..(5): Xaa is C or S

SEQ ID NO: 115795 - protein, 30 aa, Artificial Sequence; identical to SEQ ID NO: 71865
  Cyclic GFR-binding peptide
  MOD_RES (1)..(2): Xaa is C or S

SEQ ID NO: 115796 - protein, 25 aa, Artificial Sequence
  Cyclic GFR-binding peptide
RSVKVAKVEIVRKKPIFKEVQVTLE

SEQ ID NO: 115797 - protein, 31 aa, Artificial Sequence; identical to SEQ ID NO: 25075
  Cyclic GFR-binding peptide
  MOD_RES (3)..(3): Xaa is C or S

SEQ ID NO: 115798 - protein, 37 aa, Artificial Sequence; identical to SEQ ID NO: 71867
  Cyclic GFR-binding peptide
  MOD_RES (5)..(6)..(37): Xaa is C or S

SEQ ID NO: 115799 - protein, 30 aa, Artificial Sequence; identical to SEQ ID NO: 25078
  Cyclic GFR-binding peptide
  MOD_RES (30)..(30): Xaa is C or S

SEQ ID NO: 115800 - protein, 41 aa, Artificial Sequence; identical to SEQ ID NO: 25080
  Cyclic GFR-binding peptide
  MOD_RES (4)..(41): Xaa is C or S

SEQ ID NO: 115801 - protein, 23 aa, Artificial Sequence
  Cyclic GFR-binding peptide
DLRSVKIAKVIGKTPKIKEVQVM

SEQ ID NO: 115802 - protein, 36 aa, Artificial Sequence; identical to SEQ ID NO: 25081
  Cyclic GFR-binding peptide
  MOD_RES (3)..(3): Xaa is C or S

SEQ ID NO: 115803 - protein, 31 aa, Artificial Sequence; identical to SEQ ID NO: 70287
  Cyclic GFR-binding peptide
  MOD_RES (4)..(5): Xaa is C or S

SEQ ID NO: 115804 - protein, 34 aa, Artificial Sequence; identical to SEQ ID NO: 71873
  Cyclic GFR-binding peptide
  MOD_RES (2)..(3)..(34): Xaa is C or S

SEQ ID NO: 115805 - protein, 38 aa, Artificial Sequence; identical to SEQ ID NO: 75101
  Cyclic GFR-binding peptide
  MOD_RES (5)..(6)..(37): Xaa is C or S

SEQ ID NO: 115806 - protein, 31 aa, Artificial Sequence; identical to SEQ ID NO: 70294
  Cyclic GFR-binding peptide
  MOD_RES (1)..(1): Xaa is C or S

SEQ ID NO: 115807 - protein, 31 aa, Artificial Sequence; identical to SEQ ID NO: 73491
  Cyclic GFR-binding peptide
  MOD_RES (1)..(2): Xaa is C or S

SEQ ID NO: 115808 - protein, 37 aa, Artificial Sequence; identical to SEQ ID NO: 71876
  Cyclic GFR-binding peptide
  MOD_RES (3)..(4)..(35)..(37): Xaa is C or S

SEQ ID NO: 115809 - protein, 35 aa, Artificial Sequence; identical to SEQ ID NO: 25085
  Cyclic GFR-binding peptide
  MOD_RES (32)..(34): Xaa is C or S

SEQ ID NO: 115810 - protein, 26 aa, Artificial Sequence
  Cyclic GFR-binding peptide
HRPVQVRKIEYVRKKPKLKKATVRLE

SEQ ID NO: 115811 - protein, 37 aa, Artificial Sequence; identical to SEQ ID NO: 75108
  Cyclic GFR-binding peptide
  MOD_RES (3)..(4)..(35)..(37): Xaa is C or S

SEQ ID NO: 115812 - protein, 33 aa, Artificial Sequence; identical to SEQ ID NO: 73495
  Cyclic GFR-binding peptide
  MOD_RES (6)..(7): Xaa is C or S

SEQ ID NO: 115813 - protein, 32 aa, Artificial Sequence; identical to SEQ ID NO: 25087
  Cyclic GFR-binding peptide
  MOD_RES (3)..(3): Xaa is C or S

SEQ ID NO: 115814 - protein, 23 aa, Artificial Sequence
  Cyclic GFR-binding peptide
ERSVKMAKVRIKPHQGQHKEVQV

SEQ ID NO: 115815 - protein, 29 aa, Artificial Sequence
  Cyclic GFR-binding peptide
  MOD_RES (2)..(3): Xaa is C or S
PXXVPQALRPVQIRKIVGRKPKVKKATVM

SEQ ID NO: 115816 - protein, 29 aa, Artificial Sequence
  Cyclic GFR-binding peptide
TGQRSVKMAKVRIKPHQGQHKEVQVLEEH

SEQ ID NO: 115817 - protein, 38 aa, Artificial Sequence; identical to SEQ ID NO: 25092
  Cyclic GFR-binding peptide
  MOD_RES (7)..(7): Xaa is C or S

SEQ ID NO: 115818 - protein, 35 aa, Artificial Sequence; identical to SEQ ID NO: 75109
  Cyclic GFR-binding peptide
  MOD_RES (2)..(3)..(34): Xaa is C or S

SEQ ID NO: 115819 - protein, 38 aa, Artificial Sequence; identical to SEQ ID NO: 75111
  Cyclic GFR-binding peptide
  MOD_RES (6)..(7)..(38): Xaa is C or S

SEQ ID NO: 115820 - protein, 30 aa, Artificial Sequence; identical to SEQ ID NO: 71884
  Cyclic GFR-binding peptide
  MOD_RES (27)..(29): Xaa is C or S

SEQ ID NO: 115821 - protein, 30 aa, Artificial Sequence; identical to SEQ ID NO: 25097
  Cyclic GFR-binding peptide

SEQ ID NO: 115822 - protein, 29 aa, Artificial Sequence
  Cyclic GFR-binding peptide
PTGQRPVQMRKIRIKPHQGQHKKATVLEE

SEQ ID NO: 115823 - protein, 27 aa, Artificial Sequence
  Cyclic GFR-binding peptide
VPQALRSVKIAKVVGRKPKVKEVQVMI

SEQ ID NO: 115824 - protein, 34 aa, Artificial Sequence; identical to SEQ ID NO: 25100
  Cyclic GFR-binding peptide
  MOD_RES (34)..(34): Xaa is C or S

SEQ ID NO: 115825 - protein, 33 aa, Artificial Sequence; identical to SEQ ID NO: 70307
  Cyclic GFR-binding peptide
  MOD_RES (30)..(32): Xaa is C or S

SEQ ID NO: 115826 - protein, 35 aa, Artificial Sequence; identical to SEQ ID NO: 25101
  Cyclic GFR-binding peptide
  MOD_RES (5)..(5): Xaa is C or S

SEQ ID NO: 115827 - protein, 37 aa, Artificial Sequence; identical to SEQ ID NO: 75118
  Cyclic GFR-binding peptide
  MOD_RES (4)..(5)..(36): Xaa is C or S

SEQ ID NO: 115828 - protein, 37 aa, Artificial Sequence; identical to SEQ ID NO: 25107
  Cyclic GFR-binding peptide
  MOD_RES (3)..(37): Xaa is C or S

SEQ ID NO: 115829 - protein, 34 aa, Artificial Sequence; identical to SEQ ID NO: 73515
  Cyclic GFR-binding peptide
  MOD_RES (31)..(33): Xaa is C or S

SEQ ID NO: 115830 - protein, 30 aa, Artificial Sequence; identical to SEQ ID NO: 25108
  Cyclic GFR-binding peptide

SEQ ID NO: 115831 - protein, 28 aa, Artificial Sequence
  Cyclic GFR-binding peptide
HHRPVQVRKIEYVRKKPKLKKATVRLEE

SEQ ID NO: 115832 - protein, 33 aa, Artificial Sequence; identical to SEQ ID NO: 25110
  Cyclic GFR-binding peptide
  MOD_RES (4)..(4): Xaa is C or S

SEQ ID NO: 115833 - protein, 27 aa, Artificial Sequence
  Cyclic GFR-binding peptide
AAAAAAARYKKLIKPTKGIFYLISIAN

SEQ ID NO: 115834 - protein, 29 aa, Artificial Sequence
  Cyclic GFR-binding peptide
AAAAAAARHKRLFIPKKRVIEYYLVSTAS

SEQ ID NO: 115835 - protein, 27 aa, Artificial Sequence
  Cyclic GFR-binding peptide
AAAAAAAYHYKLVVKDYEDKYLMSIPS

SEQ ID NO: 115836 - protein, 27 aa, Artificial Sequence
  Cyclic GFR-binding peptide
AAAAAAAQYNKLIVNNSSDLYLVSIAS

SEQ ID NO: 115837 - protein, 27 aa, Artificial Sequence
  Cyclic GFR-binding peptide
AAAAAAARYKKLVVKDYEDFYLMSIAN

SEQ ID NO: 115838 - protein, 27 aa, Artificial Sequence
  Cyclic GFR-binding peptide
AAAAAAARYKKLVKPTRGVFYLISIAN

SEQ ID NO: 115839 - protein, 27 aa, Artificial Sequence
  Cyclic GFR-binding peptide
AAAAAAARHKRLVVKENEDYYLMSTAS

SEQ ID NO: 115840 - protein, 27 aa, Artificial Sequence
  Cyclic GFR-binding peptide
AAAAAAAYHYKLIKPTKGIKYLISIPS

SEQ ID NO: 115841 - protein, 29 aa, Artificial Sequence
  Cyclic GFR-binding peptide
AAAAAAARYKKLFIPKKRVIEFYLVSIAN

SEQ ID NO: 115842 - protein, 27 aa, Artificial Sequence
  Cyclic GFR-binding peptide
AAAAAAAYHYKLVVKENEDKYLMSIPS

SEQ ID NO: 115843 - protein, 27 aa, Artificial Sequence
  Cyclic GFR-binding peptide
AAAAAAARHKRLVKPKRGVYYLISTAS

SEQ ID NO: 115844 - protein, 27 aa, Artificial Sequence
  Cyclic GFR-binding peptide
AAAAAAAYHYKLVKPKRGVKYLISIPS

SEQ ID NO: 115845 - protein, 29 aa, Artificial Sequence
  Cyclic GFR-binding peptide
AAAAAAAQYNKLFIPKKRVIELYLVSIAS

SEQ ID NO: 115846 - protein, 27 aa, Artificial Sequence
  Cyclic GFR-binding peptide
AAAAAAAQYNKLVKPTRGVLYLISIAS

SEQ ID NO: 115847 - protein, 27 aa, Artificial Sequence
  Cyclic GFR-binding peptide
AAAAAAARYKKLVVKENEDFYLMSIAN

SEQ ID NO: 115848 - protein, 27 aa, Artificial Sequence
  Cyclic GFR-binding peptide
AAAAAAAQYNKLTPVGMDDLYLVSIAS

SEQ ID NO: 115849 - protein, 27 aa, Artificial Sequence
  Cyclic GFR-binding peptide
AAAAAAARYKKLTPVGMDDFYLVSIAN

SEQ ID NO: 115850 - protein, 27 aa, Artificial Sequence
  Cyclic GFR-binding peptide
AAAAAAARYKKLVKPKRGVFYLISIAN

SEQ ID NO: 115851 - protein, 27 aa, Artificial Sequence
  Cyclic GFR-binding peptide
AAAAAAAQYNKLVVKENEDLYLMSIAS

SEQ ID NO: 115852 - protein, 27 aa, Artificial Sequence
  Cyclic GFR-binding peptide
AAAAAAAYHYKLIVNSSDDKYLVSIPS

SEQ ID NO: 115853 - protein, 27 aa, Artificial Sequence
  Cyclic GFR-binding peptide
AAAAAAAQYNKLVKPKRGVLYLISIAS

SEQ ID NO: 115854 - protein, 27 aa, Artificial Sequence
  Cyclic GFR-binding peptide
AAAAAAARYKKLIVNNSSDFYLVSIAN

SEQ ID NO: 115855 - protein, 27 aa, Artificial Sequence
  Cyclic GFR-binding peptide
AAAAAAARYKKLIVNSSDDFYLVSIAN

SEQ ID NO: 115856 - protein, 27 aa, Artificial Sequence
  Cyclic GFR-binding peptide
AAAAAAARHKRLVKPTRGVYYLISTAS

SEQ ID NO: 115857 - protein, 29 aa, Artificial Sequence
  Cyclic GFR-binding peptide
AAAAAAAYHYKLFIPKKRVIEKYLVSIPS

SEQ ID NO: 115858 - protein, 27 aa, Artificial Sequence
  Cyclic GFR-binding peptide
AAAAAAARHKRLIKPTKGIYYLISTAS

SEQ ID NO: 115859 - protein, 27 aa, Artificial Sequence
  Cyclic GFR-binding peptide
AAAAAAARHKRLTPVGMDDYYLVSTAS

SEQ ID NO: 115860 - protein, 27 aa, Artificial Sequence
  Cyclic GFR-binding peptide
AAAAAAAYHYKLTPVGMDDKYLVSIPS

SEQ ID NO: 115861 - protein, 27 aa, Artificial Sequence
  Cyclic GFR-binding peptide
AAAAAAAYHYKLIVNNSSDKYLVSIPS

SEQ ID NO: 115862 - protein, 27 aa, Artificial Sequence
  Cyclic GFR-binding peptide
AAAAAAARHKRLIVNNSSDYYLVSTAS

SEQ ID NO: 115863 - protein, 27 aa, Artificial Sequence
  Cyclic GFR-binding peptide
AAAAAAAYHYKLVKPTRGVKYLISIPS

SEQ ID NO: 115864 - protein, 27 aa, Artificial Sequence
  Cyclic GFR-binding peptide
AAAAAAARHKRLIVNSSDDYYLVSTAS

SEQ ID NO: 115865 - protein, 27 aa, Artificial Sequence
  Cyclic GFR-binding peptide
AAAAAAARHKRLVVKDYEDYYLMSTAS

SEQ ID NO: 115866 - protein, 27 aa, Artificial Sequence
  Cyclic GFR-binding peptide
AAAAAAAQYNKLIKPTKGILYLISIAS

SEQ ID NO: 115867 - protein, 27 aa, Artificial Sequence
  Cyclic GFR-binding peptide
AAAAAAAQYNKLVVKDYEDLYLMSIAS

SEQ ID NO: 115868 - protein, 27 aa, Artificial Sequence
  Cyclic GFR-binding peptide
AAAAAAAQYNKLIVNSSDDLYLVSIAS

SEQ ID NO: 115869 - protein, 27 aa, Artificial Sequence
  Cyclic GFR-binding peptide
NAISILYFIGKTPKILKKYRAAAAAAA

SEQ ID NO: 115870 - protein, 29 aa, Artificial Sequence
  Cyclic GFR-binding peptide
SATSVLYYEIVRKKPIFLRKHRAAAAAAA

SEQ ID NO: 115871 - protein, 27 aa, Artificial Sequence
  Cyclic GFR-binding peptide
SPISMLYKDEYDKVVLKYHYAAAAAAA

SEQ ID NO: 115872 - protein, 27 aa, Artificial Sequence
  Cyclic GFR-binding peptide
SAISVLYLDSSNNVILKNYQAAAAAAA

SEQ ID NO: 115873 - protein, 27 aa, Artificial Sequence
  Cyclic GFR-binding peptide
NAISMLYFDEYDKVVLKKYRAAAAAAA

SEQ ID NO: 115874 - protein, 27 aa, Artificial Sequence
  Cyclic GFR-binding peptide
NAISILYFVGRTPKVLKKYRAAAAAAA

SEQ ID NO: 115875 - protein, 27 aa, Artificial Sequence
  Cyclic GFR-binding peptide
SATSMLYYDENEKVVLRKHRAAAAAAA

SEQ ID NO: 115876 - protein, 27 aa, Artificial Sequence
  Cyclic GFR-binding peptide
SPISILYKIGKTPKILKYHYAAAAAAA

SEQ ID NO: 115877 - protein, 29 aa, Artificial Sequence
  Cyclic GFR-binding peptide
NAISVLYFEIVRKKPIFLKKYRAAAAAAA

SEQ ID NO: 115878 - protein, 27 aa, Artificial Sequence
  Cyclic GFR-binding peptide
SPISMLYKDENEKVVLKYHYAAAAAAA

SEQ ID NO: 115879 - protein, 27 aa, Artificial Sequence
  Cyclic GFR-binding peptide
SATSILYYVGRKPKVLRKHRAAAAAAA

SEQ ID NO: 115880 - protein, 27 aa, Artificial Sequence
  Cyclic GFR-binding peptide
SPISILYKVGRKPKVLKYHYAAAAAAA

SEQ ID NO: 115881 - protein, 29 aa, Artificial Sequence
  Cyclic GFR-binding peptide
SAISVLYLEIVRKKPIFLKNYQAAAAAAA

SEQ ID NO: 115882 - protein, 27 aa, Artificial Sequence
  Cyclic GFR-binding peptide
SAISILYLVGRTPKVLKNYQAAAAAAA

SEQ ID NO: 115883 - protein, 27 aa, Artificial Sequence
  Cyclic GFR-binding peptide
NAISMLYFDENEKVVLKKYRAAAAAAA

SEQ ID NO: 115884 - protein, 27 aa, Artificial Sequence
  Cyclic GFR-binding peptide
SAISVLYLDDMGVPTLKNYQAAAAAAA

SEQ ID NO: 115885 - protein, 27 aa, Artificial Sequence
  Cyclic GFR-binding peptide
NAISVLYFDDMGVPTLKKYRAAAAAAA

SEQ ID NO: 115886 - protein, 27 aa, Artificial Sequence
  Cyclic GFR-binding peptide
NAISILYFVGRKPKVLKKYRAAAAAAA

SEQ ID NO: 115887 - protein, 27 aa, Artificial Sequence
  Cyclic GFR-binding peptide
SAISMLYLDENEKVVLKNYQAAAAAAA

SEQ ID NO: 115888 - protein, 27 aa, Artificial Sequence
  Cyclic GFR-binding peptide
SPISVLYKDDSSNVILKYHYAAAAAAA

SEQ ID NO: 115889 - protein, 27 aa, Artificial Sequence
  Cyclic GFR-binding peptide
SAISILYLVGRKPKVLKNYQAAAAAAA

SEQ ID NO: 115890 - protein, 27 aa, Artificial Sequence
  Cyclic GFR-binding peptide
NAISVLYFDSSNNVILKKYRAAAAAAA

SEQ ID NO: 115891 - protein, 27 aa, Artificial Sequence
  Cyclic GFR-binding peptide
NAISVLYFDDSSNVILKKYRAAAAAAA

SEQ ID NO: 115892 - protein, 27 aa, Artificial Sequence
  Cyclic GFR-binding peptide
SATSILYYVGRTPKVLRKHRAAAAAAA

SEQ ID NO: 115893 - protein, 29 aa, Artificial Sequence
  Cyclic GFR-binding peptide
SPISVLYKEIVRKKPIFLKYHYAAAAAAA

SEQ ID NO: 115894 - protein, 27 aa, Artificial Sequence
  Cyclic GFR-binding peptide
SATSILYYIGKTPKILRKHRAAAAAAA

SEQ ID NO: 115895 - protein, 27 aa, Artificial Sequence
  Cyclic GFR-binding peptide
SATSVLYYDDMGVPTLRKHRAAAAAAA

SEQ ID NO: 115896 - protein, 27 aa, Artificial Sequence
  Cyclic GFR-binding peptide
SPISVLYKDDMGVPTLKYHYAAAAAAA

SEQ ID NO: 115897 - protein, 27 aa, Artificial Sequence
  Cyclic GFR-binding peptide
SPISVLYKDSSNNVILKYHYAAAAAAA

SEQ ID NO: 115898 - protein, 27 aa, Artificial Sequence
  Cyclic GFR-binding peptide
SATSVLYYDSSNNVILRKHRAAAAAAA

SEQ ID NO: 115899 - protein, 27 aa, Artificial Sequence
  Cyclic GFR-binding peptide
SPISILYKVGRTPKVLKYHYAAAAAAA

SEQ ID NO: 115900 - protein, 27 aa, Artificial Sequence
  Cyclic GFR-binding peptide
SATSVLYYDDSSNVILRKHRAAAAAAA

SEQ ID NO: 115901 - protein, 27 aa, Artificial Sequence
  Cyclic GFR-binding peptide
SATSMLYYDEYDKVVLRKHRAAAAAAA

SEQ ID NO: 115902 - protein, 27 aa, Artificial Sequence
  Cyclic GFR-binding peptide
SAISILYLIGKTPKILKNYQAAAAAAA

SEQ ID NO: 115903 - protein, 27 aa, Artificial Sequence
  Cyclic GFR-binding peptide
SAISMLYLDEYDKVVLKNYQAAAAAAA

SEQ ID NO: 115904 - protein, 27 aa, Artificial Sequence
  Cyclic GFR-binding peptide
SAISVLYLDDSSNVILKNYQAAAAAAA

SEQ ID NO: 115905 - protein, 27 aa, Artificial Sequence
  Cyclic GFR-binding peptide
AAAAAAARYKKLIKPTKGIFYLISIAN

SEQ ID NO: 115906 - protein, 27 aa, Artificial Sequence
  Cyclic GFR-binding peptide
AAAAAAANSLQEVVKDYEDYYLMTLPE

SEQ ID NO: 115907 - protein, 27 aa, Artificial Sequence
  Cyclic GFR-binding peptide
AAAAAAANSLQEIKPTKGIYYVIPLPE

SEQ ID NO: 115908 - protein, 27 aa, Artificial Sequence
  Cyclic GFR-binding peptide
AAAAAAANSLQEVKPKRGVYYLITLPE

SEQ ID NO: 115909 - protein, 27 aa, Artificial Sequence
  Cyclic GFR-binding peptide
AAAAAAANSLQEVKPTRGVYYVIPLPE

SEQ ID NO: 115910 - protein, 27 aa, Artificial Sequence
  Cyclic GFR-binding peptide
AAAAAAARYKKLVVKDYEDFYLMSIAN

SEQ ID NO: 115911 - protein, 27 aa, Artificial Sequence
  Cyclic GFR-binding peptide
AAAAAAAEYQKYIVNSSDDIFLVSIPS

SEQ ID NO: 115912 - protein, 27 aa, Artificial Sequence
  Cyclic GFR-binding peptide
AAAAAAAEYQKYVKPTRGVIFLISIPS

SEQ ID NO: 115913 - protein, 27 aa, Artificial Sequence
  Cyclic GFR-binding peptide
AAAAAAANSLQEVVKENEDYYLMTLPE

SEQ ID NO: 115914 - protein, 27 aa, Artificial Sequence
  Cyclic GFR-binding peptide
AAAAAAARYKKLVKPTRGVFYLISIAN

SEQ ID NO: 115915 - protein, 27 aa, Artificial Sequence
  Cyclic GFR-binding peptide
AAAAAAANSLQEVVNNASDYYLITLPE

SEQ ID NO: 115916 - protein, 27 aa, Artificial Sequence
  Cyclic GFR-binding peptide
AAAAAAANSLQEVKPKRGVYYVIPLPE

SEQ ID NO: 115917 - protein, 27 aa, Artificial Sequence
  Cyclic GFR-binding peptide
AAAAAAANSLQEVVNNASDYYVIPLPE

SEQ ID NO: 115918 - protein, 27 aa, Artificial Sequence
  Cyclic GFR-binding peptide
AAAAAAANSLQEVKPTRGVYYLITLPE

SEQ ID NO: 115919 - protein, 27 aa, Artificial Sequence
  Cyclic GFR-binding peptide
AAAAAAAQYNKLVKPTRGVLYLISIAS

SEQ ID NO: 115920 - protein, 27 aa, Artificial Sequence
  Cyclic GFR-binding peptide
AAAAAAARYKKLVVKENEDFYLMSIAN

SEQ ID NO: 115921 - protein, 27 aa, Artificial Sequence
  Cyclic GFR-binding peptide
AAAAAAAEYQKYIKPTKGIIFLISIPS

SEQ ID NO: 115922 - protein, 27 aa, Artificial Sequence
  Cyclic GFR-binding peptide
AAAAAAAEYQKYVVNNASDIFLISIPS

SEQ ID NO: 115923 - protein, 27 aa, Artificial Sequence
  Cyclic GFR-binding peptide
AAAAAAARYKKLVKPKRGVFYLISIAN

SEQ ID NO: 115924 - protein, 27 aa, Artificial Sequence
  Cyclic GFR-binding peptide
AAAAAAANSLQEIVNSSDDYYVVPLPE

SEQ ID NO: 115925 - protein, 27 aa, Artificial Sequence
  Cyclic GFR-binding peptide
AAAAAAANSLQEVVKDYEDYYVMPLPE

SEQ ID NO: 115926 - protein, 27 aa, Artificial Sequence
  Cyclic GFR-binding peptide
AAAAAAAQYNKLVVKENEDLYLMSIAS

SEQ ID NO: 115927 - protein, 27 aa, Artificial Sequence
  Cyclic GFR-binding peptide
AAAAAAAEYQKYVVKENEDIFLMSIPS

SEQ ID NO: 115928 - protein, 27 aa, Artificial Sequence
  Cyclic GFR-binding peptide
AAAAAAAQYNKLVKPKRGVLYLISIAS

SEQ ID NO: 115929 - protein, 27 aa, Artificial Sequence
  Cyclic GFR-binding peptide
AAAAAAARYKKLIVNSSDDFYLVSIAN

SEQ ID NO: 115930 - protein, 27 aa, Artificial Sequence
  Cyclic GFR-binding peptide
AAAAAAANSLQEVVKENEDYYVMPLPE

SEQ ID NO: 115931 - protein, 27 aa, Artificial Sequence
  Cyclic GFR-binding peptide
AAAAAAAEYQKYVVKDYEDIFLMSIPS

SEQ ID NO: 115932 - protein, 27 aa, Artificial Sequence
  Cyclic GFR-binding peptide
AAAAAAAQYNKLVVNNASDLYLISIAS

SEQ ID NO: 115933 - protein, 27 aa, Artificial Sequence
  Cyclic GFR-binding peptide
AAAAAAAQYNKLIKPTKGILYLISIAS

SEQ ID NO: 115934 - protein, 27 aa, Artificial Sequence
  Cyclic GFR-binding peptide
AAAAAAANSLQEIKPTKGIYYLITLPE

SEQ ID NO: 115935 - protein, 27 aa, Artificial Sequence
  Cyclic GFR-binding peptide
AAAAAAAEYQKYVKPKRGVIFLISIPS

SEQ ID NO: 115936 - protein, 27 aa, Artificial Sequence
  Cyclic GFR-binding peptide
AAAAAAAQYNKLVVKDYEDLYLMSIAS

SEQ ID NO: 115937 - protein, 27 aa, Artificial Sequence
  Cyclic GFR-binding peptide
AAAAAAARYKKLVVNNASDFYLISIAN

SEQ ID NO: 115938 - protein, 27 aa, Artificial Sequence
  Cyclic GFR-binding peptide
AAAAAAANSLQEIVNSSDDYYLVTLPE

SEQ ID NO: 115939 - protein, 27 aa, Artificial Sequence
  Cyclic GFR-binding peptide
AAAAAAAQYNKLIVNSSDDLYLVSIAS

SEQ ID NO: 115940 - protein, 27 aa, Artificial Sequence
  Cyclic GFR-binding peptide
NAISILYFIGKTPKILKKYRAAAAAAA

SEQ ID NO: 115941 - protein, 27 aa, Artificial Sequence
  Cyclic GFR-binding peptide
EPLTMLYYDEYDKVVEQLSNAAAAAAA

SEQ ID NO: 115942 - protein, 27 aa, Artificial Sequence
  Cyclic GFR-binding peptide
EPLPIVYYIGKTPKIEQLSNAAAAAAA

SEQ ID NO: 115943 - protein, 27 aa, Artificial Sequence
  Cyclic GFR-binding peptide
EPLTILYYVGRKPKVEQLSNAAAAAAA

SEQ ID NO: 115944 - protein, 27 aa, Artificial Sequence
  Cyclic GFR-binding peptide
EPLPIVYYVGRTPKVEQLSNAAAAAAA

SEQ ID NO: 115945 - protein, 27 aa, Artificial Sequence
  Cyclic GFR-binding peptide
NAISMLYFDEYDKVVLKKYRAAAAAAA

SEQ ID NO: 115946 - protein, 27 aa, Artificial Sequence
  Cyclic GFR-binding peptide
SPISVLFIDDSSNVIYKQYEAAAAAAA

SEQ ID NO: 115947 - protein, 27 aa, Artificial Sequence
  Cyclic GFR-binding peptide
SPISILFIVGRTPKVYKQYEAAAAAAA

SEQ ID NO: 115948 - protein, 27 aa, Artificial Sequence
  Cyclic GFR-binding peptide
EPLTMLYYDENEKVVEQLSNAAAAAAA

SEQ ID NO: 115949 - protein, 27 aa, Artificial Sequence
  Cyclic GFR-binding peptide
NAISILYFVGRTPKVLKKYRAAAAAAA

SEQ ID NO: 115950 - protein, 27 aa, Artificial Sequence
  Cyclic GFR-binding peptide
EPLTILYYDSANNVVEQLSNAAAAAAA

SEQ ID NO: 115951 - protein, 27 aa, Artificial Sequence
  Cyclic GFR-binding peptide
EPLPIVYYVGRKPKVEQLSNAAAAAAA

SEQ ID NO: 115952 - protein, 27 aa, Artificial Sequence
  Cyclic GFR-binding peptide
EPLPIVYYDSANNVVEQLSNAAAAAAA

SEQ ID NO: 115953 - protein, 27 aa, Artificial Sequence
  Cyclic GFR-binding peptide
EPLTILYYVGRTPKVEQLSNAAAAAAA

SEQ ID NO: 115954 - protein, 27 aa, Artificial Sequence
  Cyclic GFR-binding peptide
SAISILYLVGRTPKVLKNYQAAAAAAA

SEQ ID NO: 115955 - protein, 27 aa, Artificial Sequence
  Cyclic GFR-binding peptide
NAISMLYFDENEKVVLKKYRAAAAAAA

SEQ ID NO: 115956 - protein, 27 aa, Artificial Sequence
  Cyclic GFR-binding peptide
SPISILFIIGKTPKIYKQYEAAAAAAA

SEQ ID NO: 115957 - protein, 27 aa, Artificial Sequence
  Cyclic GFR-binding peptide
SPISILFIDSANNVVYKQYEAAAAAAA

SEQ ID NO: 115958 - protein, 27 aa, Artificial Sequence
  Cyclic GFR-binding peptide
NAISILYFVGRKPKVLKKYRAAAAAAA

SEQ ID NO: 115959 - protein, 27 aa, Artificial Sequence
  Cyclic GFR-binding peptide
EPLPVVYYDDSSNVIEQLSNAAAAAAA

SEQ ID NO: 115960 - protein, 27 aa, Artificial Sequence
  Cyclic GFR-binding peptide
EPLPMVYYDEYDKVVEQLSNAAAAAAA

SEQ ID NO: 115961 - protein, 27 aa, Artificial Sequence
  Cyclic GFR-binding peptide
SAISMLYLDENEKVVLKNYQAAAAAAA

SEQ ID NO: 115962 - protein, 27 aa, Artificial Sequence
  Cyclic GFR-binding peptide
SPISMLFIDENEKVVYKQYEAAAAAAA

SEQ ID NO: 115963 - protein, 27 aa, Artificial Sequence
  Cyclic GFR-binding peptide
SAISILYLVGRKPKVLKNYQAAAAAAA

SEQ ID NO: 115964 - protein, 27 aa, Artificial Sequence
  Cyclic GFR-binding peptide
NAISVLYFDDSSNVILKKYRAAAAAAA

SEQ ID NO: 115965 - protein, 27 aa, Artificial Sequence
  Cyclic GFR-binding peptide
EPLPMVYYDENEKVVEQLSNAAAAAAA

SEQ ID NO: 115966 - protein, 27 aa, Artificial Sequence
  Cyclic GFR-binding peptide
SPISMLFIDEYDKVVYKQYEAAAAAAA

SEQ ID NO: 115967 - protein, 27 aa, Artificial Sequence
  Cyclic GFR-binding peptide
SAISILYLDSANNVVLKNYQAAAAAAA

SEQ ID NO: 115968 - protein, 27 aa, Artificial Sequence
  Cyclic GFR-binding peptide
SAISILYLIGKTPKILKNYQAAAAAAA

SEQ ID NO: 115969 - protein, 27 aa, Artificial Sequence
  Cyclic GFR-binding peptide
EPLTILYYIGKTPKIEQLSNAAAAAAA

SEQ ID NO: 115970 - protein, 27 aa, Artificial Sequence
  Cyclic GFR-binding peptide
SPISILFIVGRKPKVYKQYEAAAAAAA

SEQ ID NO: 115971 - protein, 27 aa, Artificial Sequence
  Cyclic GFR-binding peptide
SAISMLYLDEYDKVVLKNYQAAAAAAA

SEQ ID NO: 115972 - protein, 27 aa, Artificial Sequence
  Cyclic GFR-binding peptide
NAISILYFDSANNVVLKKYRAAAAAAA

SEQ ID NO: 115973 - protein, 27 aa, Artificial Sequence
  Cyclic GFR-binding peptide
EPLTVLYYDDSSNVIEQLSNAAAAAAA

SEQ ID NO: 115974 - protein, 27 aa, Artificial Sequence
  Cyclic GFR-binding peptide
SAISVLYLDDSSNVILKNYQAAAAAAA

SEQ ID NO: 115975 - protein, 29 aa, Artificial Sequence
  Cyclic GFR-binding peptide
AAAAAAAVTAKKLKPKKRVYEIKRVQVPR

SEQ ID NO: 115976 - protein, 29 aa, Artificial Sequence
  Cyclic GFR-binding peptide
AAAAAAAVQVEKLKPKKRVYEVKAVKVSR

SEQ ID NO: 115977 - protein, 29 aa, Artificial Sequence
  Cyclic GFR-binding peptide
AAAAAAAVQVEKFIPKKRVIEVKAVKVSR

SEQ ID NO: 115978 - protein, 29 aa, Artificial Sequence
  Cyclic GFR-binding peptide
AAAAAAAVQVEKHQGQHPKIRVKAMKVSR

SEQ ID NO: 115979 - protein, 29 aa, Artificial Sequence
  Cyclic GFR-binding peptide
AAAAAAAVTAKKHQGQHPKIRIKRMQVPR

SEQ ID NO: 115980 - protein, 29 aa, Artificial Sequence
  Cyclic GFR-binding peptide
AAAAAAASMEGLLKPKKRVYEMIQVTINS

SEQ ID NO: 115981 - protein, 29 aa, Artificial Sequence
  Cyclic GFR-binding peptide
AAAAAAASMEGIFIPKKRVIEMIQVTINS

SEQ ID NO: 115982 - protein, 29 aa, Artificial Sequence
  Cyclic GFR-binding peptide
AAAAAAASMEGLHQGQHPKIRMIQMTINS

SEQ ID NO: 115983 - protein, 29 aa, Artificial Sequence
  Cyclic GFR-binding peptide
AAAAAAASMEGILKPKKRVYEMIQVTINS

SEQ ID NO: 115984 - protein, 29 aa, Artificial Sequence
  Cyclic GFR-binding peptide
AAAAAAASMEGLFIPKKRVIEMIQVTINS

SEQ ID NO: 115985 - protein, 29 aa, Artificial Sequence
  Cyclic GFR-binding peptide
AAAAAAAVTAKKFIPKKRVIEIKRVQVPR

SEQ ID NO: 115986 - protein, 29 aa, Artificial Sequence
  Cyclic GFR-binding peptide
AAAAAAASMEGIHQGQHPKIRMIQMTINS

SEQ ID NO: 115987 - protein, 29 aa, Artificial Sequence
  Cyclic GFR-binding peptide
RPVQVRKIEYVRKKPKLKKATVAAAAAAA

SEQ ID NO: 115988 - protein, 29 aa, Artificial Sequence
  Cyclic GFR-binding peptide
RSVKVAKVEYVRKKPKLKEVQVAAAAAAA

SEQ ID NO: 115989 - protein, 29 aa, Artificial Sequence
  Cyclic GFR-binding peptide
RSVKVAKVEIVRKKPIFKEVQVAAAAAAA

SEQ ID NO: 115990 - protein, 29 aa, Artificial Sequence
  Cyclic GFR-binding peptide
RSVKMAKVRIKPHQGQHKEVQVAAAAAAA

SEQ ID NO: 115991 - protein, 29 aa, Artificial Sequence
  Cyclic GFR-binding peptide
RPVQMRKIRIKPHQGQHKKATVAAAAAAA

SEQ ID NO: 115992 - protein, 29 aa, Artificial Sequence
  Cyclic GFR-binding peptide
SNITVQIMEYVRKKPKLLGEMSAAAAAAA

SEQ ID NO: 115993 - protein, 29 aa, Artificial Sequence
  Cyclic GFR-binding peptide
SNITVQIMEIVRKKPIFIGEMSAAAAAAA

SEQ ID NO: 115994 - protein, 29 aa, Artificial Sequence
  Cyclic GFR-binding peptide
SNITMQIMRIKPHQGQHLGEMSAAAAAAA

SEQ ID NO: 115995 - protein, 29 aa, Artificial Sequence
  Cyclic GFR-binding peptide
SNITVQIMEYVRKKPKLIGEMSAAAAAAA

SEQ ID NO: 115996 - protein, 29 aa, Artificial Sequence
  Cyclic GFR-binding peptide
SNITVQIMEIVRKKPIFLGEMSAAAAAAA

SEQ ID NO: 115997 - protein, 29 aa, Artificial Sequence
  Cyclic GFR-binding peptide
RPVQVRKIEIVRKKPIFKKATVAAAAAAA

SEQ ID NO: 115998 - protein, 29 aa, Artificial Sequence
  Cyclic GFR-binding peptide
SNITMQIMRIKPHQGQHIGEMSAAAAAAA

SEQ ID NO: 115999 - protein, 29 aa, Artificial Sequence
  Cyclic GFR-binding peptide
AAAAAAAVTAKKLKPKKRVYEIKRVQVPR

SEQ ID NO: 116000 - protein, 29 aa, Artificial Sequence
  Cyclic GFR-binding peptide
AAAAAAAVQVEKLKPKKRVYEVKAVKVSR

SEQ ID NO: 116001 - protein, 29 aa, Artificial Sequence
  Cyclic GFR-binding peptide
AAAAAAAVQVEKFIPKKRVIEVKAVKVSR

SEQ ID NO: 116002 - protein, 29 aa, Artificial Sequence
  Cyclic GFR-binding peptide
AAAAAAAVQVEKHQGQHPKIRVKAMKVSR

SEQ ID NO: 116003 - protein, 29 aa, Artificial Sequence
  Cyclic GFR-binding peptide
AAAAAAAVTAKKHQGQHPKIRIKRMQVPR

SEQ ID NO: 116004 - protein, 29 aa, Artificial Sequence
  Cyclic GFR-binding peptide
AAAAAAASMEGLLKPKKRVYEMIQVTINS

SEQ ID NO: 116005 - protein, 29 aa, Artificial Sequence
  Cyclic GFR-binding peptide
AAAAAAASMEGIFIPKKRVIEMIQVTINS

SEQ ID NO: 116006 - protein, 29 aa, Artificial Sequence
  Cyclic GFR-binding peptide
AAAAAAASMEGLHQGQHPKIRMIQMTINS

SEQ ID NO: 116007 - protein, 29 aa, Artificial Sequence
  Cyclic GFR-binding peptide
AAAAAAASMEGILKPKKRVYEMIQVTINS

SEQ ID NO: 116008 - protein, 29 aa, Artificial Sequence
  Cyclic GFR-binding peptide
AAAAAAASMEGLFIPKKRVIEMIQVTINS

SEQ ID NO: 116009 - protein, 29 aa, Artificial Sequence
  Cyclic GFR-binding peptide
AAAAAAAVTAKKFIPKKRVIEIKRVQVPR

SEQ ID NO: 116010 - protein, 29 aa, Artificial Sequence
  Cyclic GFR-binding peptide
AAAAAAASMEGIHQGQHPKIRMIQMTINS

SEQ ID NO: 116011 - protein, 29 aa, Artificial Sequence
  Cyclic GFR-binding peptide
RPVQVRKIEYVRKKPKLKKATVAAAAAAA

SEQ ID NO: 116012 - protein, 29 aa, Artificial Sequence
  Cyclic GFR-binding peptide
RSVKVAKVEYVRKKPKLKEVQVAAAAAAA

SEQ ID NO: 116013 - protein, 29 aa, Artificial Sequence
  Cyclic GFR-binding peptide
RSVKVAKVEIVRKKPIFKEVQVAAAAAAA

SEQ ID NO: 116014 - protein, 29 aa, Artificial Sequence
  Cyclic GFR-binding peptide
RSVKMAKVRIKPHQGQHKEVQVAAAAAAA

SEQ ID NO: 116015 - protein, 29 aa, Artificial Sequence
  Cyclic GFR-binding peptide
RPVQMRKIRIKPHQGQHKKATVAAAAAAA

SEQ ID NO: 116016 - protein, 29 aa, Artificial Sequence
  Cyclic GFR-binding peptide
SNITVQIMEYVRKKPKLLGEMSAAAAAAA

SEQ ID NO: 116017 - protein, 29 aa, Artificial Sequence
  Cyclic GFR-binding peptide
SNITVQIMEIVRKKPIFIGEMSAAAAAAA

SEQ ID NO: 116018 - protein, 29 aa, Artificial Sequence
  Cyclic GFR-binding peptide
SNITMQIMRIKPHQGQHLGEMSAAAAAAA

SEQ ID NO: 116019 - protein, 29 aa, Artificial Sequence
  Cyclic GFR-binding peptide
SNITVQIMEYVRKKPKLIGEMSAAAAAAA

SEQ ID NO: 116020 - protein, 29 aa, Artificial Sequence
  Cyclic GFR-binding peptide
SNITVQIMEIVRKKPIFLGEMSAAAAAAA

SEQ ID NO: 116021 - protein, 29 aa, Artificial Sequence
  Cyclic GFR-binding peptide
RPVQVRKIEIVRKKPIFKKATVAAAAAAA

SEQ ID NO: 116022 - protein, 29 aa, Artificial Sequence
  Cyclic GFR-binding peptide
SNITMQIMRIKPHQGQHIGEMSAAAAAAA

SEQ ID NO: 116023 - protein, 27 aa, Artificial Sequence
  Cyclic GFR-binding peptide
AAAAAAAEYQKYVVKENEDIYLMSIPS

SEQ ID NO: 116024 - protein, 27 aa, Artificial Sequence
  Cyclic GFR-binding peptide
AAAAAAARYKKLIKPTKGIFYLISIAN

SEQ ID NO: 116025 - protein, 27 aa, Artificial Sequence
  Cyclic GFR-binding peptide
AAAAAAAEYKFKVKPTRGVLYLISIPE

SEQ ID NO: 116026 - protein, 27 aa, Artificial Sequence
  Cyclic GFR-binding peptide
AAAAAAAYHYKLVVKDYEDKYLMSIPS

SEQ ID NO: 116027 - protein, 27 aa, Artificial Sequence
  Cyclic GFR-binding peptide
AAAAAAAEYKFKTPVGMDDLYLVSIPE

SEQ ID NO: 116028 - protein, 27 aa, Artificial Sequence
  Cyclic GFR-binding peptide
AAAAAAAEYQKYVKPKRGVIYLISIPS

SEQ ID NO: 116029 - protein, 27 aa, Artificial Sequence
  Cyclic GFR-binding peptide
AAAAAAARYKKLVVKDYEDFYLMSIAN

SEQ ID NO: 116030 - protein, 27 aa, Artificial Sequence
  Cyclic GFR-binding peptide
AAAAAAAEYQKYVVKDYEDIYLMSIPS

SEQ ID NO: 116031 - protein, 27 aa, Artificial Sequence
  Cyclic GFR-binding peptide
AAAAAAARYKKLVKPTRGVFYLISIAN

SEQ ID NO: 116032 - protein, 27 aa, Artificial Sequence
  Cyclic GFR-binding peptide
AAAAAAAYHYKLIKPTKGIKYLISIPS

SEQ ID NO: 116033 - protein, 27 aa, Artificial Sequence
  Cyclic GFR-binding peptide
AAAAAAAYHYKLVVKENEDKYLMSIPS

SEQ ID NO: 116034 - protein, 27 aa, Artificial Sequence
  Cyclic GFR-binding peptide
AAAAAAAYHYKLVKPKRGVKYLISIPS

SEQ ID NO: 116035 - protein, 27 aa, Artificial Sequence
  Cyclic GFR-binding peptide
AAAAAAAEYKFKIKPTKGILYLISIPE

SEQ ID NO: 116036 - protein, 27 aa, Artificial Sequence
  Cyclic GFR-binding peptide
AAAAAAAEYQKYIKPTKGIIYLISIPS

SEQ ID NO: 116037 - protein, 27 aa, Artificial Sequence
  Cyclic GFR-binding peptide
AAAAAAARYKKLVVKENEDFYLMSIAN

SEQ ID NO: 116038 - protein, 27 aa, Artificial Sequence
  Cyclic GFR-binding peptide
AAAAAAARYKKLVVNNAADFYLISIAN

SEQ ID NO: 116039 - protein, 27 aa, Artificial Sequence
  Cyclic GFR-binding peptide
AAAAAAAYHYKLYTVVGKDKYLISIPS

SEQ ID NO: 116040 - protein, 27 aa, Artificial Sequence
  Cyclic GFR-binding peptide
AAAAAAARYKKLTPVGMDDFYLVSIAN

SEQ ID NO: 116041 - protein, 27 aa, Artificial Sequence
  Cyclic GFR-binding peptide
AAAAAAARYKKLVKPKRGVFYLISIAN

SEQ ID NO: 116042 - protein, 27 aa, Artificial Sequence
  Cyclic GFR-binding peptide
AAAAAAAYHYKLVVNNAADKYLISIPS

SEQ ID NO: 116043 - protein, 27 aa, Artificial Sequence
  Cyclic GFR-binding peptide
AAAAAAAYHYKLIVNSSDDKYLVSIPS

SEQ ID NO: 116044 - protein, 27 aa, Artificial Sequence
  Cyclic GFR-binding peptide
AAAAAAARYKKLIVNNSSDFYLVSIAN

SEQ ID NO: 116045 - protein, 27 aa, Artificial Sequence
  Cyclic GFR-binding peptide
AAAAAAARYKKLYTVVGKDFYLISIAN

SEQ ID NO: 116046 - protein, 27 aa, Artificial Sequence
  Cyclic GFR-binding peptide
AAAAAAAEYQKYVVNNAADIYLISIPS

SEQ ID NO: 116047 - protein, 27 aa, Artificial Sequence
  Cyclic GFR-binding peptide
AAAAAAARYKKLIVNSSDDFYLVSIAN

SEQ ID NO: 116048 - protein, 27 aa, Artificial Sequence
  Cyclic GFR-binding peptide
AAAAAAAEYKFKIVNNSSDLYLVSIPE

SEQ ID NO: 116049 - protein, 27 aa, Artificial Sequence
  Cyclic GFR-binding peptide
AAAAAAAEYQKYVKPTRGVIYLISIPS

SEQ ID NO: 116050 - protein, 27 aa, Artificial Sequence
  Cyclic GFR-binding peptide
AAAAAAAEYQKYIVNSSDDIYLVSIPS

SEQ ID NO: 116051 - protein, 27 aa, Artificial Sequence
  Cyclic GFR-binding peptide
AAAAAAAYHYKLTPVGMDDKYLVSIPS

SEQ ID NO: 116052 - protein, 27 aa, Artificial Sequence
  Cyclic GFR-binding peptide
AAAAAAAYHYKLIVNNSSDKYLVSIPS

SEQ ID NO: 116053 - protein, 27 aa, Artificial Sequence
  Cyclic GFR-binding peptide
AAAAAAAEYKFKIVNSSDDLYLVSIPE

SEQ ID NO: 116054 - protein, 27 aa, Artificial Sequence
  Cyclic GFR-binding peptide
AAAAAAAYHYKLVKPTRGVKYLISIPS

SEQ ID NO: 116055 - protein, 27 aa, Artificial Sequence
  Cyclic GFR-binding peptide
AAAAAAAEYKFKVKPKRGVLYLISIPE

SEQ ID NO: 116056 - protein, 27 aa, Artificial Sequence
  Cyclic GFR-binding peptide
AAAAAAAEYQKYYTVVGKDIYLISIPS

SEQ ID NO: 116057 - protein, 27 aa, Artificial Sequence
  Cyclic GFR-binding peptide
AAAAAAAEYKFKVVKENEDLYLMSIPE

SEQ ID NO: 116058 - protein, 27 aa, Artificial Sequence
  Cyclic GFR-binding peptide
AAAAAAAEYQKYTPVGMDDIYLVSIPS

SEQ ID NO: 116059 - protein, 27 aa, Artificial Sequence
  Cyclic GFR-binding peptide
AAAAAAAEYQKYIVNNSSDIYLVSIPS

SEQ ID NO: 116060 - protein, 27 aa, Artificial Sequence
  Cyclic GFR-binding peptide
AAAAAAAEYKFKVVKDYEDLYLMSIPE

SEQ ID NO: 116061 - protein, 27 aa, Artificial Sequence
  Cyclic GFR-binding peptide
AAAAAAAEYKFKYTVVGKDLYLISIPE

SEQ ID NO: 116062 - protein, 27 aa, Artificial Sequence
  Cyclic GFR-binding peptide
AAAAAAAEYKFKVVNNAADLYLISIPE

SEQ ID NO: 116063 - protein, 27 aa, Artificial Sequence
  Cyclic GFR-binding peptide
SPISMLYIDENEKVVYKQYEAAAAAAA

SEQ ID NO: 116064 - protein, 27 aa, Artificial Sequence
  Cyclic GFR-binding peptide
NAISILYFIGKTPKILKKYRAAAAAAA

SEQ ID NO: 116065 - protein, 27 aa, Artificial Sequence
  Cyclic GFR-binding peptide
EPISILYLVGRTPKVKFKYEAAAAAAA

SEQ ID NO: 116066 - protein, 27 aa, Artificial Sequence
  Cyclic GFR-binding peptide
SPISMLYKDEYDKVVLKYHYAAAAAAA

SEQ ID NO: 116067 - protein, 27 aa, Artificial Sequence
  Cyclic GFR-binding peptide
EPISVLYLDDMGVPTKFKYEAAAAAAA

SEQ ID NO: 116068 - protein, 27 aa, Artificial Sequence
  Cyclic GFR-binding peptide
SPISILYIVGRKPKVYKQYEAAAAAAA

SEQ ID NO: 116069 - protein, 27 aa, Artificial Sequence
  Cyclic GFR-binding peptide
NAISMLYFDEYDKVVLKKYRAAAAAAA

SEQ ID NO: 116070 - protein, 27 aa, Artificial Sequence
  Cyclic GFR-binding peptide
SPISMLYIDEYDKVVYKQYEAAAAAAA

SEQ ID NO: 116071 - protein, 27 aa, Artificial Sequence
  Cyclic GFR-binding peptide
NAISILYFVGRTPKVLKKYRAAAAAAA

SEQ ID NO: 116072 - protein, 27 aa, Artificial Sequence
  Cyclic GFR-binding peptide
SPISILYKIGKTPKILKYHYAAAAAAA

SEQ ID NO: 116073 - protein, 27 aa, Artificial Sequence
  Cyclic GFR-binding peptide
SPISMLYKDENEKVVLKYHYAAAAAAA

SEQ ID NO: 116074 - protein, 27 aa, Artificial Sequence
  Cyclic GFR-binding peptide
SPISILYKVGRKPKVLKYHYAAAAAAA

SEQ ID NO: 116075 - protein, 27 aa, Artificial Sequence
  Cyclic GFR-binding peptide
EPISILYLIGKTPKIKFKYEAAAAAAA

SEQ ID NO: 116076 - protein, 27 aa, Artificial Sequence
  Cyclic GFR-binding peptide
SPISILYIIGKTPKIYKQYEAAAAAAA

SEQ ID NO: 116077 - protein, 27 aa, Artificial Sequence
  Cyclic GFR-binding peptide
NAISMLYFDENEKVVLKKYRAAAAAAA

SEQ ID NO: 116078 - protein, 27 aa, Artificial Sequence
  Cyclic GFR-binding peptide
NAISILYFDAANNVVLKKYRAAAAAAA

SEQ ID NO: 116079 - protein, 27 aa, Artificial Sequence
  Cyclic GFR-binding peptide
SPISILYKDKGVVTYLKYHYAAAAAAA

SEQ ID NO: 116080 - protein, 27 aa, Artificial Sequence
  Cyclic GFR-binding peptide
NAISVLYFDDMGVPTLKKYRAAAAAAA

SEQ ID NO: 116081 - protein, 27 aa, Artificial Sequence
  Cyclic GFR-binding peptide
NAISILYFVGRKPKVLKKYRAAAAAAA

SEQ ID NO: 116082 - protein, 27 aa, Artificial Sequence
  Cyclic GFR-binding peptide
SPISILYKDAANNVVLKYHYAAAAAAA

SEQ ID NO: 116083 - protein, 27 aa, Artificial Sequence
  Cyclic GFR-binding peptide
SPISVLYKDDSSNVILKYHYAAAAAAA

SEQ ID NO: 116084 - protein, 27 aa, Artificial Sequence
  Cyclic GFR-binding peptide
NAISVLYFDSSNNVILKKYRAAAAAAA

SEQ ID NO: 116085 - protein, 27 aa, Artificial Sequence
  Cyclic GFR-binding peptide
NAISILYFDKGVVTYLKKYRAAAAAAA

SEQ ID NO: 116086 - protein, 27 aa, Artificial Sequence
  Cyclic GFR-binding peptide
SPISILYIDAANNVVYKQYEAAAAAAA

SEQ ID NO: 116087 - protein, 27 aa, Artificial Sequence
  Cyclic GFR-binding peptide
NAISVLYFDDSSNVILKKYRAAAAAAA

SEQ ID NO: 116088 - protein, 27 aa, Artificial Sequence
  Cyclic GFR-binding peptide
EPISVLYLDSSNNVIKFKYEAAAAAAA

SEQ ID NO: 116089 - protein, 27 aa, Artificial Sequence
  Cyclic GFR-binding peptide
SPISILYIVGRTPKVYKQYEAAAAAAA

SEQ ID NO: 116090 - protein, 27 aa, Artificial Sequence
  Cyclic GFR-binding peptide
SPISVLYIDDSSNVIYKQYEAAAAAAA

SEQ ID NO: 116091 - protein, 27 aa, Artificial Sequence
  Cyclic GFR-binding peptide
SPISVLYKDDMGVPTLKYHYAAAAAAA

SEQ ID NO: 116092 - protein, 27 aa, Artificial Sequence
  Cyclic GFR-binding peptide
SPISVLYKDSSNNVILKYHYAAAAAAA

SEQ ID NO: 116093 - protein, 27 aa, Artificial Sequence
  Cyclic GFR-binding peptide
EPISVLYLDDSSNVIKFKYEAAAAAAA

SEQ ID NO: 116094 - protein, 27 aa, Artificial Sequence
  Cyclic GFR-binding peptide
SPISILYKVGRTPKVLKYHYAAAAAAA

SEQ ID NO: 116095 - protein, 27 aa, Artificial Sequence
  Cyclic GFR-binding peptide
EPISILYLVGRKPKVKFKYEAAAAAAA

SEQ ID NO: 116096 - protein, 27 aa, Artificial Sequence
  Cyclic GFR-binding peptide
SPISILYIDKGVVTYYKQYEAAAAAAA

SEQ ID NO: 116097 - protein, 27 aa, Artificial Sequence
  Cyclic GFR-binding peptide
EPISMLYLDENEKVVKFKYEAAAAAAA

SEQ ID NO: 116098 - protein, 27 aa, Artificial Sequence
  Cyclic GFR-binding peptide
SPISVLYIDDMGVPTYKQYEAAAAAAA

SEQ ID NO: 116099 - protein, 27 aa, Artificial Sequence
  Cyclic GFR-binding peptide
SPISVLYIDSSNNVIYKQYEAAAAAAA

SEQ ID NO: 116100 - protein, 27 aa, Artificial Sequence
  Cyclic GFR-binding peptide
EPISMLYLDEYDKVVKFKYEAAAAAAA

SEQ ID NO: 116101 - protein, 27 aa, Artificial Sequence
  Cyclic GFR-binding peptide
EPISILYLDKGVVTYKFKYEAAAAAAA

SEQ ID NO: 116102 - protein, 27 aa, Artificial Sequence
  Cyclic GFR-binding peptide
EPISILYLDAANNVVKFKYEAAAAAAA

SEQ ID NO: 116103 - protein, 27 aa, Artificial Sequence
  Cyclic GFR-binding peptide
AAAAAAAPIKGYIIQQKDNFYLMNIPS

SEQ ID NO: 116104 - protein, 27 aa, Artificial Sequence
  Cyclic GFR-binding peptide
AAAAAAAPIKGYVVKDYEDFYLMNIPS

SEQ ID NO: 116105 - protein, 27 aa, Artificial Sequence
  Cyclic GFR-binding peptide
AAAAAAAPIKGYIVNSSDDFYLVNIPS

SEQ ID NO: 116106 - protein, 27 aa, Artificial Sequence
  Cyclic GFR-binding peptide
AAAAAAAPIKGYLLVRGNDFYLMNIPS

SEQ ID NO: 116107 - protein, 27 aa, Artificial Sequence
  Cyclic GFR-binding peptide
AAAAAAAPIKGYVVNNAADFYLINIPS

SEQ ID NO: 116108 - protein, 27 aa, Artificial Sequence
  Cyclic GFR-binding peptide
AAAAAAAPIKGYVVKENEDFYLMNIPS

SEQ ID NO: 116109 - protein, 27 aa, Artificial Sequence
  Cyclic GFR-binding peptide
AAAAAAAPIKGYVVNNASDFYLINIPS

SEQ ID NO: 116110 - protein, 27 aa, Artificial Sequence
  Cyclic GFR-binding peptide
AAAAAAAPIKGYYTVVGKDFYLINIPS

SEQ ID NO: 116111 - protein, 27 aa, Artificial Sequence
  Cyclic GFR-binding peptide
AAAAAAAPIKGYTPVGMDDFYLVNIPS

SEQ ID NO: 116112 - protein, 27 aa, Artificial Sequence
  Cyclic GFR-binding peptide
AAAAAAAPIKGYIVNNSSDFYLVNIPS

SEQ ID NO: 116113 - protein, 27 aa, Artificial Sequence
  Cyclic GFR-binding peptide
SPINMLYFNDKQQIIYGKIPAAAAAAA

SEQ ID NO: 116114 - protein, 27 aa, Artificial Sequence
  Cyclic GFR-binding peptide
SPINMLYFDEYDKVVYGKIPAAAAAAA

SEQ ID NO: 116115 - protein, 27 aa, Artificial Sequence
  Cyclic GFR-binding peptide
SPINVLYFDDSSNVIYGKIPAAAAAAA

SEQ ID NO: 116116 - protein, 27 aa, Artificial Sequence
  Cyclic GFR-binding peptide
SPINMLYFDNGRVLLYGKIPAAAAAAA

SEQ ID NO: 116117 - protein, 27 aa, Artificial Sequence
  Cyclic GFR-binding peptide
SPINILYFDAANNVVYGKIPAAAAAAA

SEQ ID NO: 116118 - protein, 27 aa, Artificial Sequence
  Cyclic GFR-binding peptide
SPINMLYFDENEKVVYGKIPAAAAAAA

SEQ ID NO: 116119 - protein, 27 aa, Artificial Sequence
  Cyclic GFR-binding peptide
SPINILYFDSANNVVYGKIPAAAAAAA

SEQ ID NO: 116120 - protein, 27 aa, Artificial Sequence
  Cyclic GFR-binding peptide
SPINILYFDKGVVTYYGKIPAAAAAAA

SEQ ID NO: 116121 - protein, 27 aa, Artificial Sequence
  Cyclic GFR-binding peptide
SPINVLYFDDMGVPTYGKIPAAAAAAA

SEQ ID NO: 116122 - protein, 27 aa, Artificial Sequence
  Cyclic GFR-binding peptide
SPINVLYFDSSNNVIYGKIPAAAAAAA

SEQ ID NO: 116123 - protein, 27 aa, Artificial Sequence
  Cyclic GFR-binding peptide
AAAAAAAPIKGYIIQQKDNFYLMNIPS

SEQ ID NO: 116124 - protein, 27 aa, Artificial Sequence
  Cyclic GFR-binding peptide
AAAAAAAPIKGYVVKDYEDFYLMNIPS

SEQ ID NO: 116125 - protein, 27 aa, Artificial Sequence
  Cyclic GFR-binding peptide
AAAAAAAPIKGYIVNSSDDFYLVNIPS

SEQ ID NO: 116126 - protein, 27 aa, Artificial Sequence
  Cyclic GFR-binding peptide
AAAAAAAPIKGYLLVRGNDFYLMNIPS

SEQ ID NO: 116127 - protein, 27 aa, Artificial Sequence
  Cyclic GFR-binding peptide
AAAAAAAPIKGYVVNNAADFYLINIPS

SEQ ID NO: 116128 - protein, 27 aa, Artificial Sequence
  Cyclic GFR-binding peptide
AAAAAAAPIKGYVVKENEDFYLMNIPS

SEQ ID NO: 116129 - protein, 27 aa, Artificial Sequence
  Cyclic GFR-binding peptide
AAAAAAAPIKGYVVNNASDFYLINIPS

SEQ ID NO: 116130 - protein, 27 aa, Artificial Sequence
  Cyclic GFR-binding peptide
AAAAAAAPIKGYYTVVGKDFYLINIPS

SEQ ID NO: 116131 - protein, 27 aa, Artificial Sequence
  Cyclic GFR-binding peptide
AAAAAAAPIKGYTPVGMDDFYLVNIPS

SEQ ID NO: 116132 - protein, 27 aa, Artificial Sequence
  Cyclic GFR-binding peptide
AAAAAAAPIKGYIVNNSSDFYLVNIPS

SEQ ID NO: 116133 - protein, 27 aa, Artificial Sequence
  Cyclic GFR-binding peptide
SPINMLYFNDKQQIIYGKIPAAAAAAA

SEQ ID NO: 116134 - protein, 27 aa, Artificial Sequence
  Cyclic GFR-binding peptide
SPINMLYFDEYDKVVYGKIPAAAAAAA

SEQ ID NO: 116135 - protein, 27 aa, Artificial Sequence
  Cyclic GFR-binding peptide
SPINVLYFDDSSNVIYGKIPAAAAAAA

SEQ ID NO: 116136 - protein, 27 aa, Artificial Sequence
  Cyclic GFR-binding peptide
SPINMLYFDNGRVLLYGKIPAAAAAAA

SEQ ID NO: 116137 - protein, 27 aa, Artificial Sequence
  Cyclic GFR-binding peptide
SPINILYFDAANNVVYGKIPAAAAAAA

SEQ ID NO: 116138 - protein, 27 aa, Artificial Sequence
  Cyclic GFR-binding peptide
SPINMLYFDENEKVVYGKIPAAAAAAA

SEQ ID NO: 116139 - protein, 27 aa, Artificial Sequence
  Cyclic GFR-binding peptide
SPINILYFDSANNVVYGKIPAAAAAAA

SEQ ID NO: 116140 - protein, 27 aa, Artificial Sequence
  Cyclic GFR-binding peptide
SPINILYFDKGVVTYYGKIPAAAAAAA

SEQ ID NO: 116141 - protein, 27 aa, Artificial Sequence
  Cyclic GFR-binding peptide
SPINVLYFDDMGVPTYGKIPAAAAAAA

SEQ ID NO: 116142 - protein, 27 aa, Artificial Sequence
  Cyclic GFR-binding peptide
SPINVLYFDSSNNVIYGKIPAAAAAAA

SEQ ID NO: 116143 - protein, 27 aa, Artificial Sequence
  Cyclic GFR-binding peptide
AAAAAAARYKKLIKPTKGIFYLISIAN

SEQ ID NO: 116144 - protein, 27 aa, Artificial Sequence
  Cyclic GFR-binding peptide
AAAAAAARYKKLVVKDYEDFYLMSIAN

SEQ ID NO: 116145 - protein, 27 aa, Artificial Sequence
  Cyclic GFR-binding peptide
AAAAAAARYKKLVKPTRGVFYLISIAN

SEQ ID NO: 116146 - protein, 27 aa, Artificial Sequence
  Cyclic GFR-binding peptide
AAAAAAARYKKLVVKENEDFYLMSIAN

SEQ ID NO: 116147 - protein, 27 aa, Artificial Sequence
  Cyclic GFR-binding peptide
AAAAAAARYKKLVKPKRGVFYLISIAN

SEQ ID NO: 116148 - protein, 27 aa, Artificial Sequence
  Cyclic GFR-binding peptide
AAAAAAARYKKLIVNSSDDFYLVSIAN

SEQ ID NO: 116149 - protein, 27 aa, Artificial Sequence
  Cyclic GFR-binding peptide
AAAAAAARYKKLVVNNASDFYLISIAN

SEQ ID NO: 116150 - protein, 27 aa, Artificial Sequence
  Cyclic GFR-binding peptide
NAISILYFIGKTPKILKKYRAAAAAAA

SEQ ID NO: 116151 - protein, 27 aa, Artificial Sequence
  Cyclic GFR-binding peptide
NAISMLYFDEYDKVVLKKYRAAAAAAA

SEQ ID NO: 116152 - protein, 27 aa, Artificial Sequence
  Cyclic GFR-binding peptide
NAISILYFVGRTPKVLKKYRAAAAAAA

SEQ ID NO: 116153 - protein, 27 aa, Artificial Sequence
  Cyclic GFR-binding peptide
NAISMLYFDENEKVVLKKYRAAAAAAA

SEQ ID NO: 116154 - protein, 27 aa, Artificial Sequence
  Cyclic GFR-binding peptide
NAISILYFVGRKPKVLKKYRAAAAAAA

SEQ ID NO: 116155 - protein, 27 aa, Artificial Sequence
  Cyclic GFR-binding peptide
NAISVLYFDDSSNVILKKYRAAAAAAA

SEQ ID NO: 116156 - protein, 27 aa, Artificial Sequence
  Cyclic GFR-binding peptide
NAISILYFDSANNVVLKKYRAAAAAAA

SEQ ID NO: 116157 - protein, 27 aa, Artificial Sequence
  Cyclic GFR-binding peptide
AAAAAAAEYQKYVVKENEDIYLMSIPS

SEQ ID NO: 116158 - protein, 27 aa, Artificial Sequence
  Cyclic GFR-binding peptide
AAAAAAANSLQEVVKDYEDYYLMTLPE

SEQ ID NO: 116159 - protein, 27 aa, Artificial Sequence
  Cyclic GFR-binding peptide
AAAAAAAEYQKYVVKENEDIFLMSIPS

SEQ ID NO: 116160 - protein, 27 aa, Artificial Sequence
  Cyclic GFR-binding peptide
AAAAAAANSLQEIKPTKGIYYVIPLPE

SEQ ID NO: 116161 - protein, 27 aa, Artificial Sequence
  Cyclic GFR-binding peptide
AAAAAAANSLQEVKPKRGVYYLITLPE

SEQ ID NO: 116162 - protein, 27 aa, Artificial Sequence
  Cyclic GFR-binding peptide
AAAAAAAEYQKYVVNNAADIYLISIPS

SEQ ID NO: 116163 - protein, 27 aa, Artificial Sequence
  Cyclic GFR-binding peptide
AAAAAAANSLQEVKPTRGVYYVIPLPE

SEQ ID NO: 116164 - protein, 27 aa, Artificial Sequence
  Cyclic GFR-binding peptide
AAAAAAAEYQKYIVNSSDDIFLVSIPS

SEQ ID NO: 116165 - protein, 27 aa, Artificial Sequence
  Cyclic GFR-binding peptide
AAAAAAAEYQKYVKPTRGVIFLISIPS

SEQ ID NO: 116166 - protein, 27 aa, Artificial Sequence
  Cyclic GFR-binding peptide
AAAAAAAEYQKYVVKDYEDIYLMSIPS

SEQ ID NO: 116167 - protein, 27 aa, Artificial Sequence
  Cyclic GFR-binding peptide
AAAAAAANSLQEVVKENEDYYLMTLPE

SEQ ID NO: 116168 - protein, 27 aa, Artificial Sequence
  Cyclic GFR-binding peptide
AAAAAAANSLQEVVNNASDYYLITLPE

SEQ ID NO: 116169 - protein, 27 aa, Artificial Sequence
  Cyclic GFR-binding peptide
AAAAAAANSLQEVKPKRGVYYVIPLPE

SEQ ID NO: 116170 - protein, 27 aa, Artificial Sequence
  Cyclic GFR-binding peptide
AAAAAAAEYQKYIVNSSDDIYLVSIPS

SEQ ID NO: 116171 - protein, 27 aa, Artificial Sequence
  Cyclic GFR-binding peptide
AAAAAAANSLQEVVKENEDYYVMPLPE

SEQ ID NO: 116172 - protein, 27 aa, Artificial Sequence
  Cyclic GFR-binding peptide
AAAAAAAEYQKYVVKDYEDIFLMSIPS

SEQ ID NO: 116173 - protein, 27 aa, Artificial Sequence
  Cyclic GFR-binding peptide
AAAAAAANSLQEVVNNASDYYVIPLPE

SEQ ID NO: 116174 - protein, 27 aa, Artificial Sequence
  Cyclic GFR-binding peptide
AAAAAAAEYQKYVVNNASDIYLISIPS

SEQ ID NO: 116175 - protein, 27 aa, Artificial Sequence
  Cyclic GFR-binding peptide
AAAAAAANSLQEVKPTRGVYYLITLPE

SEQ ID NO: 116176 - protein, 27 aa, Artificial Sequence
  Cyclic GFR-binding peptide
AAAAAAAEYQKYYTVVGKDIYLISIPS

SEQ ID NO: 116177 - protein, 27 aa, Artificial Sequence
  Cyclic GFR-binding peptide
AAAAAAAEYQKYIIQQKDNIYLMSIPS

SEQ ID NO: 116178 - protein, 27 aa, Artificial Sequence
  Cyclic GFR-binding peptide
AAAAAAAEYQKYTPVGMDDIYLVSIPS

SEQ ID NO: 116179 - protein, 27 aa, Artificial Sequence
  Cyclic GFR-binding peptide
AAAAAAAEYQKYIKPTKGIIFLISIPS

SEQ ID NO: 116180 - protein, 27 aa, Artificial Sequence
  Cyclic GFR-binding peptide
AAAAAAAEYQKYIVNNSSDIYLVSIPS

SEQ ID NO: 116181 - protein, 27 aa, Artificial Sequence
  Cyclic GFR-binding peptide
AAAAAAANSLQEIKPTKGIYYLITLPE

SEQ ID NO: 116182 - protein, 27 aa, Artificial Sequence
  Cyclic GFR-binding peptide
AAAAAAAEYQKYVVNNASDIFLISIPS

SEQ ID NO: 116183 - protein, 27 aa, Artificial Sequence
  Cyclic GFR-binding peptide
AAAAAAAEYQKYVKPKRGVIFLISIPS

SEQ ID NO: 116184 - protein, 27 aa, Artificial Sequence
  Cyclic GFR-binding peptide
AAAAAAANSLQEIVNSSDDYYVVPLPE

SEQ ID NO: 116185 - protein, 27 aa, Artificial Sequence
  Cyclic GFR-binding peptide
AAAAAAANSLQEVVKDYEDYYVMPLPE

SEQ ID NO: 116186 - protein, 27 aa, Artificial Sequence
  Cyclic GFR-binding peptide
AAAAAAAEYQKYLLVRGNDIYLMSIPS

SEQ ID NO: 116187 - protein, 27 aa, Artificial Sequence
  Cyclic GFR-binding peptide
AAAAAAANSLQEIVNSSDDYYLVTLPE

SEQ ID NO: 116188 - protein, 27 aa, Artificial Sequence
  Cyclic GFR-binding peptide
SPISMLYIDENEKVVYKQYEAAAAAAA

SEQ ID NO: 116189 - protein, 27 aa, Artificial Sequence
  Cyclic GFR-binding peptide
EPLTMLYYDEYDKVVEQLSNAAAAAAA

SEQ ID NO: 116190 - protein, 27 aa, Artificial Sequence
  Cyclic GFR-binding peptide
SPISMLFIDENEKVVYKQYEAAAAAAA

SEQ ID NO: 116191 - protein, 27 aa, Artificial Sequence
  Cyclic GFR-binding peptide
EPLPIVYYIGKTPKIEQLSNAAAAAAA

SEQ ID NO: 116192 - protein, 27 aa, Artificial Sequence
  Cyclic GFR-binding peptide
EPLTILYYVGRKPKVEQLSNAAAAAAA

SEQ ID NO: 116193 - protein, 27 aa, Artificial Sequence
  Cyclic GFR-binding peptide
SPISILYIDAANNVVYKQYEAAAAAAA

SEQ ID NO: 116194 - protein, 27 aa, Artificial Sequence
  Cyclic GFR-binding peptide
EPLPIVYYVGRTPKVEQLSNAAAAAAA

SEQ ID NO: 116195 - protein, 27 aa, Artificial Sequence
  Cyclic GFR-binding peptide
SPISVLFIDDSSNVIYKQYEAAAAAAA

SEQ ID NO: 116196 - protein, 27 aa, Artificial Sequence
  Cyclic GFR-binding peptide
SPISILFIVGRTPKVYKQYEAAAAAAA

SEQ ID NO: 116197 - protein, 27 aa, Artificial Sequence
  Cyclic GFR-binding peptide
SPISMLYIDEYDKVVYKQYEAAAAAAA

SEQ ID NO: 116198 - protein, 27 aa, Artificial Sequence
  Cyclic GFR-binding peptide
EPLTMLYYDENEKVVEQLSNAAAAAAA

SEQ ID NO: 116199 - protein, 27 aa, Artificial Sequence
  Cyclic GFR-binding peptide
EPLTILYYDSANNVVEQLSNAAAAAAA

SEQ ID NO: 116200 - protein, 27 aa, Artificial Sequence
  Cyclic GFR-binding peptide
EPLPIVYYVGRKPKVEQLSNAAAAAAA

SEQ ID NO: 116201 - protein, 27 aa, Artificial Sequence
  Cyclic GFR-binding peptide
SPISVLYIDDSSNVIYKQYEAAAAAAA

SEQ ID NO: 116202 - protein, 27 aa, Artificial Sequence
  Cyclic GFR-binding peptide
EPLPMVYYDENEKVVEQLSNAAAAAAA

SEQ ID NO: 116203 - protein, 27 aa, Artificial Sequence
  Cyclic GFR-binding peptide
SPISMLFIDEYDKVVYKQYEAAAAAAA

SEQ ID NO: 116204 - protein, 27 aa, Artificial Sequence
  Cyclic GFR-binding peptide
EPLPIVYYDSANNVVEQLSNAAAAAAA

SEQ ID NO: 116205 - protein, 27 aa, Artificial Sequence
  Cyclic GFR-binding peptide
SPISILYIDSANNVVYKQYEAAAAAAA

SEQ ID NO: 116206 - protein, 27 aa, Artificial Sequence
  Cyclic GFR-binding peptide
EPLTILYYVGRTPKVEQLSNAAAAAAA

SEQ ID NO: 116207 - protein, 27 aa, Artificial Sequence
  Cyclic GFR-binding peptide
SPISILYIDKGVVTYYKQYEAAAAAAA

SEQ ID NO: 116208 - protein, 27 aa, Artificial Sequence
  Cyclic GFR-binding peptide
SPISMLYINDKQQIIYKQYEAAAAAAA

SEQ ID NO: 116209 - protein, 27 aa, Artificial Sequence
  Cyclic GFR-binding peptide
SPISVLYIDDMGVPTYKQYEAAAAAAA

SEQ ID NO: 116210 - protein, 27 aa, Artificial Sequence
  Cyclic GFR-binding peptide
SPISILFIIGKTPKIYKQYEAAAAAAA

SEQ ID NO: 116211 - protein, 27 aa, Artificial Sequence
  Cyclic GFR-binding peptide
SPISVLYIDSSNNVIYKQYEAAAAAAA

SEQ ID NO: 116212 - protein, 27 aa, Artificial Sequence
  Cyclic GFR-binding peptide
EPLTILYYIGKTPKIEQLSNAAAAAAA

SEQ ID NO: 116213 - protein, 27 aa, Artificial Sequence
  Cyclic GFR-binding peptide
SPISILFIDSANNVVYKQYEAAAAAAA

SEQ ID NO: 116214 - protein, 27 aa, Artificial Sequence
  Cyclic GFR-binding peptide
SPISILFIVGRKPKVYKQYEAAAAAAA

SEQ ID NO: 116215 - protein, 27 aa, Artificial Sequence
  Cyclic GFR-binding peptide
EPLPVVYYDDSSNVIEQLSNAAAAAAA

SEQ ID NO: 116216 - protein, 27 aa, Artificial Sequence
  Cyclic GFR-binding peptide
EPLPMVYYDEYDKVVEQLSNAAAAAAA

SEQ ID NO: 116217 - protein, 27 aa, Artificial Sequence
  Cyclic GFR-binding peptide
SPISMLYIDNGRVLLYKQYEAAAAAAA

SEQ ID NO: 116218 - protein, 27 aa, Artificial Sequence
  Cyclic GFR-binding peptide
EPLTVLYYDDSSNVIEQLSNAAAAAAA

SEQ ID NO: 116219 - protein, 27 aa, Artificial Sequence
  Cyclic GFR-binding peptide
AAAAAAAPYVKLVVKENEDFFLMSLSS

SEQ ID NO: 116220 - protein, 29 aa, Artificial Sequence
  Cyclic GFR-binding peptide
AAAAAAAPYVKLHQGQHPKIRFFLMSLSS

SEQ ID NO: 116221 - protein, 27 aa, Artificial Sequence
  Cyclic GFR-binding peptide
AAAAAAAPYVKLVVNKNEDFFLISLSS

SEQ ID NO: 116222 - protein, 27 aa, Artificial Sequence
  Cyclic GFR-binding peptide
AAAAAAAPYVKLVKPKRGVLFFISLSS

SEQ ID NO: 116223 - protein, 27 aa, Artificial Sequence
  Cyclic GFR-binding peptide
AAAAAAAPYVKLVVNNAADFFLISLSS

SEQ ID NO: 116224 - protein, 27 aa, Artificial Sequence
  Cyclic GFR-binding peptide
AAAAAAAPYVKLIVNNSSDFFLVSLSS

SEQ ID NO: 116225 - protein, 27 aa, Artificial Sequence
  Cyclic GFR-binding peptide
AAAAAAAPYVKLIIQQKDNFFLMSLSS

SEQ ID NO: 116226 - protein, 27 aa, Artificial Sequence
  Cyclic GFR-binding peptide
AAAAAAAPYVKLLLVRGNDFFLMSLSS

SEQ ID NO: 116227 - protein, 27 aa, Artificial Sequence
  Cyclic GFR-binding peptide
AAAAAAAPYVKLVKPTRGVLFFISLSS

SEQ ID NO: 116228 - protein, 27 aa, Artificial Sequence
  Cyclic GFR-binding peptide
AAAAAAAPYVKLVVNNASDFFLISLSS

SEQ ID NO: 116229 - protein, 27 aa, Artificial Sequence
  Cyclic GFR-binding peptide
AAAAAAAPYVKLIKPTKGILFFISLSS

SEQ ID NO: 116230 - protein, 27 aa, Artificial Sequence
  Cyclic GFR-binding peptide
AAAAAAAPYVKLTPVGMDDFFLVSLSS

SEQ ID NO: 116231 - protein, 27 aa, Artificial Sequence
  Cyclic GFR-binding peptide
AAAAAAAPYVKLYTVVGKDFFLISLSS

SEQ ID NO: 116232 - protein, 27 aa, Artificial Sequence
  Cyclic GFR-binding peptide
AAAAAAAPYVKLVVKDYEDFFLMSLSS

SEQ ID NO: 116233 - protein, 27 aa, Artificial Sequence
  Cyclic GFR-binding peptide
AAAAAAAPYVKLIVNSSDDFFLVSLSS

SEQ ID NO: 116234 - protein, 29 aa, Artificial Sequence
  Cyclic GFR-binding peptide
AAAAAAAPYVKLLKPKKRVYEFFLVSLSS

SEQ ID NO: 116235 - protein, 27 aa, Artificial Sequence
  Cyclic GFR-binding peptide
SSLSMLFFDENEKVVLKVYPAAAAAAA

SEQ ID NO: 116236 - protein, 29 aa, Artificial Sequence
  Cyclic GFR-binding peptide
SSLSMLFFRIKPHQGQHLKVYPAAAAAAA

SEQ ID NO: 116237 - protein, 27 aa, Artificial Sequence
  Cyclic GFR-binding peptide
SSLSILFFDENKNVVLKVYPAAAAAAA

SEQ ID NO: 116238 - protein, 27 aa, Artificial Sequence
  Cyclic GFR-binding peptide
SSLSILFFVGRKPKVLKVYPAAAAAAA

SEQ ID NO: 116239 - protein, 27 aa, Artificial Sequence
  Cyclic GFR-binding peptide
SSLSILFFDAANNVVLKVYPAAAAAAA

SEQ ID NO: 116240 - protein, 27 aa, Artificial Sequence
  Cyclic GFR-binding peptide
SSLSVLFFDSSNNVILKVYPAAAAAAA

SEQ ID NO: 116241 - protein, 27 aa, Artificial Sequence
  Cyclic GFR-binding peptide
SSLSMLFFNDKQQIILKVYPAAAAAAA

SEQ ID NO: 116242 - protein, 27 aa, Artificial Sequence
  Cyclic GFR-binding peptide
SSLSMLFFDNGRVLLLKVYPAAAAAAA

SEQ ID NO: 116243 - protein, 27 aa, Artificial Sequence
  Cyclic GFR-binding peptide
SSLSILFFVGRTPKVLKVYPAAAAAAA

SEQ ID NO: 116244 - protein, 27 aa, Artificial Sequence
  Cyclic GFR-binding peptide
SSLSILFFDSANNVVLKVYPAAAAAAA

SEQ ID NO: 116245 - protein, 27 aa, Artificial Sequence
  Cyclic GFR-binding peptide
SSLSILFFIGKTPKILKVYPAAAAAAA

SEQ ID NO: 116246 - protein, 27 aa, Artificial Sequence
  Cyclic GFR-binding peptide
SSLSVLFFDDMGVPTLKVYPAAAAAAA

SEQ ID NO: 116247 - protein, 27 aa, Artificial Sequence
  Cyclic GFR-binding peptide
SSLSILFFDKGVVTYLKVYPAAAAAAA

SEQ ID NO: 116248 - protein, 27 aa, Artificial Sequence
  Cyclic GFR-binding peptide
SSLSMLFFDEYDKVVLKVYPAAAAAAA

SEQ ID NO: 116249 - protein, 27 aa, Artificial Sequence
  Cyclic GFR-binding peptide
SSLSVLFFDDSSNVILKVYPAAAAAAA

SEQ ID NO: 116250 - protein, 29 aa, Artificial Sequence
  Cyclic GFR-binding peptide
SSLSVLFFEYVRKKPKLLKVYPAAAAAAA

SEQ ID NO: 116251 - protein, 27 aa, Artificial Sequence
  Cyclic GFR-binding peptide
AAAAAAANSLQEVVKDYEDYYLMTLPE

SEQ ID NO: 116252 - protein, 27 aa, Artificial Sequence
  Cyclic GFR-binding peptide
AAAAAAANSLQEIKPTKGIYYVIPLPE

SEQ ID NO: 116253 - protein, 27 aa, Artificial Sequence
  Cyclic GFR-binding peptide
AAAAAAASMEGIIVNSSDDMIQVTINS

SEQ ID NO: 116254 - protein, 27 aa, Artificial Sequence
  Cyclic GFR-binding peptide
AAAAAAANSLQEVKPKRGVYYLITLPE

SEQ ID NO: 116255 - protein, 27 aa, Artificial Sequence
  Cyclic GFR-binding peptide
AAAAAAANSLQEVKPTRGVYYVIPLPE

SEQ ID NO: 116256 - protein, 27 aa, Artificial Sequence
  Cyclic GFR-binding peptide
AAAAAAAVTAKKVVKENEDIKRMQVPR

SEQ ID NO: 116257 - protein, 27 aa, Artificial Sequence
  Cyclic GFR-binding peptide
AAAAAAANSLQEIVNSSDDYYVVPLPE

SEQ ID NO: 116258 - protein, 29 aa, Artificial Sequence
  Cyclic GFR-binding peptide
AAAAAAASMEGIHQGQHPKIRMIQMTINS

SEQ ID NO: 116259 - protein, 29 aa, Artificial Sequence
  Cyclic GFR-binding peptide
AAAAAAAVTAKKLKPKKRVYEIKRVQVPR

SEQ ID NO: 116260 - protein, 27 aa, Artificial Sequence
  Cyclic GFR-binding peptide
AAAAAAASMEGIVVKDYEDMIQMTINS

SEQ ID NO: 116261 - protein, 29 aa, Artificial Sequence
  Cyclic GFR-binding peptide
AAAAAAAVQVEKHQGQHPKIRVKAMKVSR

SEQ ID NO: 116262 - protein, 27 aa, Artificial Sequence
  Cyclic GFR-binding peptide
AAAAAAAVTAKKIKPTKGIIKRIQVPR

SEQ ID NO: 116263 - protein, 27 aa, Artificial Sequence
  Cyclic GFR-binding peptide
AAAAAAASMEGIVKPTRGVMIQITINS

SEQ ID NO: 116264 - protein, 29 aa, Artificial Sequence
  Cyclic GFR-binding peptide
AAAAAAANSLQEFIPKKRVIEYYVVPLPE

SEQ ID NO: 116265 - protein, 27 aa, Artificial Sequence
  Cyclic GFR-binding peptide
AAAAAAAVQVEKVKPKRGVVKAIKVSR

SEQ ID NO: 116266 - protein, 27 aa, Artificial Sequence
  Cyclic GFR-binding peptide
AAAAAAAVQVEKVVKENEDVKAMKVSR

SEQ ID NO: 116267 - protein, 27 aa, Artificial Sequence
  Cyclic GFR-binding peptide
AAAAAAANSLQEVVKENEDYYVMPLPE

SEQ ID NO: 116268 - protein, 27 aa, Artificial Sequence
  Cyclic GFR-binding peptide
AAAAAAAVTAKKIVNSSDDIKRVQVPR

SEQ ID NO: 116269 - protein, 27 aa, Artificial Sequence
  Cyclic GFR-binding peptide
AAAAAAAVQVEKIKPTKGIVKAIKVSR

SEQ ID NO: 116270 - protein, 27 aa, Artificial Sequence
  Cyclic GFR-binding peptide
AAAAAAANSLQEIKPTKGIYYLITLPE

SEQ ID NO: 116271 - protein, 29 aa, Artificial Sequence
  Cyclic GFR-binding peptide
AAAAAAANSLQEFIPKKRVIEYYLVTLPE

SEQ ID NO: 116272 - protein, 27 aa, Artificial Sequence
  Cyclic GFR-binding peptide
AAAAAAAVQVEKIVNSSDDVKAVKVSR

SEQ ID NO: 116273 - protein, 27 aa, Artificial Sequence
  Cyclic GFR-binding peptide
AAAAAAANSLQEIVNSSDDYYLVTLPE

SEQ ID NO: 116274 - protein, 29 aa, Artificial Sequence
  Cyclic GFR-binding peptide
AAAAAAAVQVEKLKPKKRVYEVKAVKVSR

SEQ ID NO: 116275 - protein, 29 aa, Artificial Sequence
  Cyclic GFR-binding peptide
AAAAAAAVQVEKFIPKKRVIEVKAVKVSR

SEQ ID NO: 116276 - protein, 29 aa, Artificial Sequence
  Cyclic GFR-binding peptide
AAAAAAAVTAKKHQGQHPKIRIKRMQVPR

SEQ ID NO: 116277 - protein, 27 aa, Artificial Sequence
  Cyclic GFR-binding peptide
AAAAAAANSLQEVVKENEDYYLMTLPE

SEQ ID NO: 116278 - protein, 29 aa, Artificial Sequence
  Cyclic GFR-binding peptide
AAAAAAASMEGIFIPKKRVIEMIQVTINS

SEQ ID NO: 116279 - protein, 27 aa, Artificial Sequence
  Cyclic GFR-binding peptide
AAAAAAANSLQEVKPKRGVYYVIPLPE

SEQ ID NO: 116280 - protein, 27 aa, Artificial Sequence
  Cyclic GFR-binding peptide
AAAAAAAVTAKKVKPKRGVIKRIQVPR

SEQ ID NO: 116281 - protein, 27 aa, Artificial Sequence
  Cyclic GFR-binding peptide
AAAAAAANSLQEVKPTRGVYYLITLPE

SEQ ID NO: 116282 - protein, 27 aa, Artificial Sequence
  Cyclic GFR-binding peptide
AAAAAAAVQVEKVKPTRGVVKAIKVSR

SEQ ID NO: 116283 - protein, 29 aa, Artificial Sequence
  Cyclic GFR-binding peptide
AAAAAAASMEGILKPKKRVYEMIQVTINS

SEQ ID NO: 116284 - protein, 27 aa, Artificial Sequence
  Cyclic GFR-binding peptide
AAAAAAANSLQEVVKDYEDYYVMPLPE

SEQ ID NO: 116285 - protein, 27 aa, Artificial Sequence
  Cyclic GFR-binding peptide
AAAAAAAVTAKKVKPTRGVIKRIQVPR

SEQ ID NO: 116286 - protein, 29 aa, Artificial Sequence
  Cyclic GFR-binding peptide
AAAAAAANSLQELKPKKRVYEYYLVTLPE

SEQ ID NO: 116287 - protein, 27 aa, Artificial Sequence
  Cyclic GFR-binding peptide
AAAAAAASMEGIVKPKRGVMIQITINS

SEQ ID NO: 116288 - protein, 27 aa, Artificial Sequence
  Cyclic GFR-binding peptide
AAAAAAASMEGIVVKENEDMIQMTINS

SEQ ID NO: 116289 - protein, 27 aa, Artificial Sequence
  Cyclic GFR-binding peptide
AAAAAAASMEGIIKPTKGIMIQITINS

SEQ ID NO: 116290 - protein, 29 aa, Artificial Sequence
  Cyclic GFR-binding peptide
AAAAAAANSLQEHQGQHPKIRYYLMTLPE

SEQ ID NO: 116291 - protein, 27 aa, Artificial Sequence
  Cyclic GFR-binding peptide
AAAAAAAVTAKKVVKDYEDIKRMQVPR

SEQ ID NO: 116292 - protein, 29 aa, Artificial Sequence
  Cyclic GFR-binding peptide
AAAAAAANSLQEHQGQHPKIRYYVMPLPE

SEQ ID NO: 116293 - protein, 29 aa, Artificial Sequence
  Cyclic GFR-binding peptide
AAAAAAANSLQELKPKKRVYEYYVVPLPE

SEQ ID NO: 116294 - protein, 29 aa, Artificial Sequence
  Cyclic GFR-binding peptide
AAAAAAAVTAKKFIPKKRVIEIKRVQVPR

SEQ ID NO: 116295 - protein, 27 aa, Artificial Sequence
  Cyclic GFR-binding peptide
AAAAAAAVQVEKVVKDYEDVKAMKVSR

SEQ ID NO: 116296 - protein, 27 aa, Artificial Sequence
  Cyclic GFR-binding peptide
EPLTMLYYDEYDKVVEQLSNAAAAAAA

SEQ ID NO: 116297 - protein, 27 aa, Artificial Sequence
  Cyclic GFR-binding peptide
EPLPIVYYIGKTPKIEQLSNAAAAAAA

SEQ ID NO: 116298 - protein, 27 aa, Artificial Sequence
  Cyclic GFR-binding peptide
SNITVQIMDDSSNVIIGEMSAAAAAAA

SEQ ID NO: 116299 - protein, 27 aa, Artificial Sequence
  Cyclic GFR-binding peptide
EPLTILYYVGRKPKVEQLSNAAAAAAA

SEQ ID NO: 116300 - protein, 27 aa, Artificial Sequence
  Cyclic GFR-binding peptide
EPLPIVYYVGRTPKVEQLSNAAAAAAA

SEQ ID NO: 116301 - protein, 27 aa, Artificial Sequence
  Cyclic GFR-binding peptide
RPVQMRKIDENEKVVKKATVAAAAAAA

SEQ ID NO: 116302 - protein, 27 aa, Artificial Sequence
  Cyclic GFR-binding peptide
EPLPVVYYDDSSNVIEQLSNAAAAAAA

SEQ ID NO: 116303 - protein, 29 aa, Artificial Sequence
  Cyclic GFR-binding peptide
SNITMQIMRIKPHQGQHIGEMSAAAAAAA

SEQ ID NO: 116304 - protein, 29 aa, Artificial Sequence
  Cyclic GFR-binding peptide
RPVQVRKIEYVRKKPKLKKATVAAAAAAA

SEQ ID NO: 116305 - protein, 27 aa, Artificial Sequence
  Cyclic GFR-binding peptide
SNITMQIMDEYDKVVIGEMSAAAAAAA

SEQ ID NO: 116306 - protein, 29 aa, Artificial Sequence
  Cyclic GFR-binding peptide
RSVKMAKVRIKPHQGQHKEVQVAAAAAAA

SEQ ID NO: 116307 - protein, 27 aa, Artificial Sequence
  Cyclic GFR-binding peptide
RPVQIRKIIGKTPKIKKATVAAAAAAA

SEQ ID NO: 116308 - protein, 27 aa, Artificial Sequence
  Cyclic GFR-binding peptide
SNITIQIMVGRTPKVIGEMSAAAAAAA

SEQ ID NO: 116309 - protein, 29 aa, Artificial Sequence
  Cyclic GFR-binding peptide
EPLPVVYYEIVRKKPIFEQLSNAAAAAAA

SEQ ID NO: 116310 - protein, 27 aa, Artificial Sequence
  Cyclic GFR-binding peptide
RSVKIAKVVGRKPKVKEVQVAAAAAAA

SEQ ID NO: 116311 - protein, 27 aa, Artificial Sequence
  Cyclic GFR-binding peptide
RSVKMAKVDENEKVVKEVQVAAAAAAA

SEQ ID NO: 116312 - protein, 27 aa, Artificial Sequence
  Cyclic GFR-binding peptide
EPLPMVYYDENEKVVEQLSNAAAAAAA

SEQ ID NO: 116313 - protein, 27 aa, Artificial Sequence
  Cyclic GFR-binding peptide
RPVQVRKIDDSSNVIKKATVAAAAAAA

SEQ ID NO: 116314 - protein, 27 aa, Artificial Sequence
  Cyclic GFR-binding peptide
RSVKIAKVIGKTPKIKEVQVAAAAAAA

SEQ ID NO: 116315 - protein, 27 aa, Artificial Sequence
  Cyclic GFR-binding peptide
EPLTILYYIGKTPKIEQLSNAAAAAAA

SEQ ID NO: 116316 - protein, 29 aa, Artificial Sequence
  Cyclic GFR-binding peptide
EPLTVLYYEIVRKKPIFEQLSNAAAAAAA

SEQ ID NO: 116317 - protein, 27 aa, Artificial Sequence
  Cyclic GFR-binding peptide
RSVKVAKVDDSSNVIKEVQVAAAAAAA

SEQ ID NO: 116318 - protein, 27 aa, Artificial Sequence
  Cyclic GFR-binding peptide
EPLTVLYYDDSSNVIEQLSNAAAAAAA

SEQ ID NO: 116319 - protein, 29 aa, Artificial Sequence
  Cyclic GFR-binding peptide
RSVKVAKVEYVRKKPKLKEVQVAAAAAAA

SEQ ID NO: 116320 - protein, 29 aa, Artificial Sequence
  Cyclic GFR-binding peptide
RSVKVAKVEIVRKKPIFKEVQVAAAAAAA

SEQ ID NO: 116321 - protein, 29 aa, Artificial Sequence
  Cyclic GFR-binding peptide
RPVQMRKIRIKPHQGQHKKATVAAAAAAA

SEQ ID NO: 116322 - protein, 27 aa, Artificial Sequence
  Cyclic GFR-binding peptide
EPLTMLYYDENEKVVEQLSNAAAAAAA

SEQ ID NO: 116323 - protein, 29 aa, Artificial Sequence
  Cyclic GFR-binding peptide
SNITVQIMEIVRKKPIFIGEMSAAAAAAA

SEQ ID NO: 116324 - protein, 27 aa, Artificial Sequence
  Cyclic GFR-binding peptide
EPLPIVYYVGRKPKVEQLSNAAAAAAA

SEQ ID NO: 116325 - protein, 27 aa, Artificial Sequence
  Cyclic GFR-binding peptide
RPVQIRKIVGRKPKVKKATVAAAAAAA

SEQ ID NO: 116326 - protein, 27 aa, Artificial Sequence
  Cyclic GFR-binding peptide
EPLTILYYVGRTPKVEQLSNAAAAAAA

SEQ ID NO: 116327 - protein, 27 aa, Artificial Sequence
  Cyclic GFR-binding peptide
RSVKIAKVVGRTPKVKEVQVAAAAAAA

SEQ ID NO: 116328 - protein, 29 aa, Artificial Sequence
  Cyclic GFR-binding peptide
SNITVQIMEYVRKKPKLIGEMSAAAAAAA

SEQ ID NO: 116329 - protein, 27 aa, Artificial Sequence
  Cyclic GFR-binding peptide
EPLPMVYYDEYDKVVEQLSNAAAAAAA

SEQ ID NO: 116330 - protein, 27 aa, Artificial Sequence
  Cyclic GFR-binding peptide
RPVQIRKIVGRTPKVKKATVAAAAAAA

SEQ ID NO: 116331 - protein, 29 aa, Artificial Sequence
  Cyclic GFR-binding peptide
EPLTVLYYEYVRKKPKLEQLSNAAAAAAA

SEQ ID NO: 116332 - protein, 27 aa, Artificial Sequence
  Cyclic GFR-binding peptide
SNITIQIMVGRKPKVIGEMSAAAAAAA

SEQ ID NO: 116333 - protein, 27 aa, Artificial Sequence
  Cyclic GFR-binding peptide
SNITMQIMDENEKVVIGEMSAAAAAAA

SEQ ID NO: 116334 - protein, 27 aa, Artificial Sequence
  Cyclic GFR-binding peptide
SNITIQIMIGKTPKIIGEMSAAAAAAA

SEQ ID NO: 116335 - protein, 29 aa, Artificial Sequence
  Cyclic GFR-binding peptide
EPLTMLYYRIKPHQGQHEQLSNAAAAAAA

SEQ ID NO: 116336 - protein, 27 aa, Artificial Sequence
  Cyclic GFR-binding peptide
RPVQMRKIDEYDKVVKKATVAAAAAAA

SEQ ID NO: 116337 - protein, 29 aa, Artificial Sequence
  Cyclic GFR-binding peptide
EPLPMVYYRIKPHQGQHEQLSNAAAAAAA

SEQ ID NO: 116338 - protein, 29 aa, Artificial Sequence
  Cyclic GFR-binding peptide
EPLPVVYYEYVRKKPKLEQLSNAAAAAAA

SEQ ID NO: 116339 - protein, 29 aa, Artificial Sequence
  Cyclic GFR-binding peptide
RPVQVRKIEIVRKKPIFKKATVAAAAAAA

SEQ ID NO: 116340 - protein, 27 aa, Artificial Sequence
  Cyclic GFR-binding peptide
RSVKMAKVDEYDKVVKEVQVAAAAAAA

SEQ ID NO: 116341 - protein, 27 aa, Artificial Sequence
  Cyclic GFR-binding peptide
AAAAAAARYKKLIIQQKDNFYLMSIAN

SEQ ID NO: 116342 - protein, 27 aa, Artificial Sequence
  Cyclic GFR-binding peptide
AAAAAAARYKKLIVNNSSDFYLVSIAN

SEQ ID NO: 116343 - protein, 27 aa, Artificial Sequence
  Cyclic GFR-binding peptide
AAAAAAARYKKLYTVVGKDFYLISIAN

SEQ ID NO: 116344 - protein, 27 aa, Artificial Sequence
  Cyclic GFR-binding peptide
AAAAAAARYKKLIVNSSDDFYLVSIAN

SEQ ID NO: 116345 - protein, 27 aa, Artificial Sequence
  Cyclic GFR-binding peptide
AAAAAAARYKKLVVKDYEDFYLMSIAN

SEQ ID NO: 116346 - protein, 27 aa, Artificial Sequence
  Cyclic GFR-binding peptide
AAAAAAARYKKLLLVRGNDFYLMSIAN

SEQ ID NO: 116347 - protein, 27 aa, Artificial Sequence
  Cyclic GFR-binding peptide
AAAAAAARYKKLVVKENEDFYLMSIAN

SEQ ID NO: 116348 - protein, 27 aa, Artificial Sequence
  Cyclic GFR-binding peptide
AAAAAAARYKKLVVNNAADFYLISIAN

SEQ ID NO: 116349 - protein, 27 aa, Artificial Sequence
  Cyclic GFR-binding peptide
AAAAAAARYKKLTPVGMDDFYLVSIAN

SEQ ID NO: 116350 - protein, 27 aa, Artificial Sequence
  Cyclic GFR-binding peptide
AAAAAAARYKKLVVNNASDFYLISIAN

SEQ ID NO: 116351 - protein, 27 aa, Artificial Sequence
  Cyclic GFR-binding peptide
NAISMLYFNDKQQIILKKYRAAAAAAA

SEQ ID NO: 116352 - protein, 27 aa, Artificial Sequence
  Cyclic GFR-binding peptide
NAISVLYFDSSNNVILKKYRAAAAAAA

SEQ ID NO: 116353 - protein, 27 aa, Artificial Sequence
  Cyclic GFR-binding peptide
NAISILYFDKGVVTYLKKYRAAAAAAA

SEQ ID NO: 116354 - protein, 27 aa, Artificial Sequence
  Cyclic GFR-binding peptide
NAISVLYFDDSSNVILKKYRAAAAAAA

SEQ ID NO: 116355 - protein, 27 aa, Artificial Sequence
  Cyclic GFR-binding peptide
NAISMLYFDEYDKVVLKKYRAAAAAAA

SEQ ID NO: 116356 - protein, 27 aa, Artificial Sequence
  Cyclic GFR-binding peptide
NAISMLYFDNGRVLLLKKYRAAAAAAA

SEQ ID NO: 116357 - protein, 27 aa, Artificial Sequence
  Cyclic GFR-binding peptide
NAISMLYFDENEKVVLKKYRAAAAAAA

SEQ ID NO: 116358 - protein, 27 aa, Artificial Sequence
  Cyclic GFR-binding peptide
NAISILYFDAANNVVLKKYRAAAAAAA

SEQ ID NO: 116359 - protein, 27 aa, Artificial Sequence
  Cyclic GFR-binding peptide
NAISVLYFDDMGVPTLKKYRAAAAAAA

SEQ ID NO: 116360 - protein, 27 aa, Artificial Sequence
  Cyclic GFR-binding peptide
NAISILYFDSANNVVLKKYRAAAAAAA

SEQ ID NO: 116361 - protein, 27 aa, Artificial Sequence
  Cyclic GFR-binding peptide
AAAAAAAEYKFKVKPTRGVLYLISIPE

SEQ ID NO: 116362 - protein, 27 aa, Artificial Sequence
  Cyclic GFR-binding peptide
AAAAAAAYHYKLVVKDYEDKYLMSIPS

SEQ ID NO: 116363 - protein, 27 aa, Artificial Sequence
  Cyclic GFR-binding peptide
AAAAAAAEYKFKTPVGMDDLYLVSIPE

SEQ ID NO: 116364 - protein, 27 aa, Artificial Sequence
  Cyclic GFR-binding peptide
AAAAAAARYKKLVVKDYEDFYLMSIAN

SEQ ID NO: 116365 - protein, 27 aa, Artificial Sequence
  Cyclic GFR-binding peptide
AAAAAAARHKRLVKPKRGVYYLISTAS

SEQ ID NO: 116366 - protein, 27 aa, Artificial Sequence
  Cyclic GFR-binding peptide
AAAAAAAYHYKLVKPKRGVKYLISIPS

SEQ ID NO: 116367 - protein, 27 aa, Artificial Sequence
  Cyclic GFR-binding peptide
AAAAAAAEYKFKIKPTKGILYLISIPE

SEQ ID NO: 116368 - protein, 27 aa, Artificial Sequence
  Cyclic GFR-binding peptide
AAAAAAAEYKFKVVNKNEDLYLISIPE

SEQ ID NO: 116369 - protein, 27 aa, Artificial Sequence
  Cyclic GFR-binding peptide
AAAAAAAPIKGYVKPTRGVFYLINIPS

SEQ ID NO: 116370 - protein, 27 aa, Artificial Sequence
  Cyclic GFR-binding peptide
AAAAAAAPIKGYVVKENEDFYLMNIPS

SEQ ID NO: 116371 - protein, 27 aa, Artificial Sequence
  Cyclic GFR-binding peptide
AAAAAAAYHYKLYTVVGKDKYLISIPS

SEQ ID NO: 116372 - protein, 27 aa, Artificial Sequence
  Cyclic GFR-binding peptide
AAAAAAAEYKFKLLVRGNDLYLMSIPE

SEQ ID NO: 116373 - protein, 27 aa, Artificial Sequence
  Cyclic GFR-binding peptide
AAAAAAARYKKLVKPKRGVFYLISIAN

SEQ ID NO: 116374 - protein, 27 aa, Artificial Sequence
  Cyclic GFR-binding peptide
AAAAAAAPIKGYTPVGMDDFYLVNIPS

SEQ ID NO: 116375 - protein, 27 aa, Artificial Sequence
  Cyclic GFR-binding peptide
AAAAAAAYHYKLVVNKNEDKYLISIPS

SEQ ID NO: 116376 - protein, 27 aa, Artificial Sequence
  Cyclic GFR-binding peptide
AAAAAAAYHYKLIVNSSDDKYLVSIPS

SEQ ID NO: 116377 - protein, 27 aa, Artificial Sequence
  Cyclic GFR-binding peptide
AAAAAAAPIKGYIVNSSDDFYLVNIPS

SEQ ID NO: 116378 - protein, 27 aa, Artificial Sequence
  Cyclic GFR-binding peptide
AAAAAAARYKKLYTVVGKDFYLISIAN

SEQ ID NO: 116379 - protein, 27 aa, Artificial Sequence
  Cyclic GFR-binding peptide
AAAAAAARHKRLLLVRGNDYYLMSTAS

SEQ ID NO: 116380 - protein, 27 aa, Artificial Sequence
  Cyclic GFR-binding peptide
AAAAAAAYHYKLLLVRGNDKYLMSIPS

SEQ ID NO: 116381 - protein, 27 aa, Artificial Sequence
  Cyclic GFR-binding peptide
AAAAAAARYKKLIVNSSDDFYLVSIAN

SEQ ID NO: 116382 - protein, 27 aa, Artificial Sequence
  Cyclic GFR-binding peptide
AAAAAAARHKRLVVNKNEDYYLISTAS

SEQ ID NO: 116383 - protein, 27 aa, Artificial Sequence
  Cyclic GFR-binding peptide
AAAAAAARHKRLIKPTKGIYYLISTAS

SEQ ID NO: 116384 - protein, 27 aa, Artificial Sequence
  Cyclic GFR-binding peptide
AAAAAAAPIKGYYTVVGKDFYLINIPS

SEQ ID NO: 116385 - protein, 27 aa, Artificial Sequence
  Cyclic GFR-binding peptide
AAAAAAAYHYKLTPVGMDDKYLVSIPS

SEQ ID NO: 116386 - protein, 27 aa, Artificial Sequence
  Cyclic GFR-binding peptide
AAAAAAARHKRLIVNNSSDYYLVSTAS

SEQ ID NO: 116387 - protein, 27 aa, Artificial Sequence
  Cyclic GFR-binding peptide
AAAAAAARYKKLLLVRGNDFYLMSIAN

SEQ ID NO: 116388 - protein, 27 aa, Artificial Sequence
  Cyclic GFR-binding peptide
AAAAAAAYHYKLVKPTRGVKYLISIPS

SEQ ID NO: 116389 - protein, 27 aa, Artificial Sequence
  Cyclic GFR-binding peptide
AAAAAAARHKRLIVNSSDDYYLVSTAS

SEQ ID NO: 116390 - protein, 27 aa, Artificial Sequence
  Cyclic GFR-binding peptide
AAAAAAAPIKGYLLVRGNDFYLMNIPS

SEQ ID NO: 116391 - protein, 27 aa, Artificial Sequence
  Cyclic GFR-binding peptide
AAAAAAARYKKLVVNKNEDFYLISIAN

SEQ ID NO: 116392 - protein, 27 aa, Artificial Sequence
  Cyclic GFR-binding peptide
AAAAAAAEYKFKVVKDYEDLYLMSIPE

SEQ ID NO: 116393 - protein, 27 aa, Artificial Sequence
  Cyclic GFR-binding peptide
AAAAAAAPIKGYVVNKNEDFYLINIPS

SEQ ID NO: 116394 - protein, 27 aa, Artificial Sequence
  Cyclic GFR-binding peptide
AAAAAAAPIKGYIKPTKGIFYLINIPS

SEQ ID NO: 116395 - protein, 27 aa, Artificial Sequence
  Cyclic GFR-binding peptide
AAAAAAAEYKFKVVNNAADLYLISIPE

SEQ ID NO: 116396 - protein, 27 aa, Artificial Sequence
  Cyclic GFR-binding peptide
AAAAAAARHKRLYTVVGKDYYLISTAS

SEQ ID NO: 116397 - protein, 27 aa, Artificial Sequence
  Cyclic GFR-binding peptide
AAAAAAARYKKLIKPTKGIFYLISIAN

SEQ ID NO: 116398 - protein, 27 aa, Artificial Sequence
  Cyclic GFR-binding peptide
AAAAAAAPIKGYVVKDYEDFYLMNIPS

SEQ ID NO: 116399 - protein, 27 aa, Artificial Sequence
  Cyclic GFR-binding peptide
AAAAAAAEYKFKVVNNASDLYLISIPE

SEQ ID NO: 116400 - protein, 27 aa, Artificial Sequence
  Cyclic GFR-binding peptide
AAAAAAARYKKLVKPTRGVFYLISIAN

SEQ ID NO: 116401 - protein, 27 aa, Artificial Sequence
  Cyclic GFR-binding peptide
AAAAAAARHKRLVVKENEDYYLMSTAS

SEQ ID NO: 116402 - protein, 27 aa, Artificial Sequence
  Cyclic GFR-binding peptide
AAAAAAAYHYKLIKPTKGIKYLISIPS

SEQ ID NO: 116403 - protein, 27 aa, Artificial Sequence
  Cyclic GFR-binding peptide
AAAAAAAYHYKLVVKENEDKYLMSIPS

SEQ ID NO: 116404 - protein, 27 aa, Artificial Sequence
  Cyclic GFR-binding peptide
AAAAAAARHKRLIIQQKDNYYLMSTAS

SEQ ID NO: 116405 - protein, 27 aa, Artificial Sequence
  Cyclic GFR-binding peptide
AAAAAAARYKKLVVKENEDFYLMSIAN

SEQ ID NO: 116406 - protein, 27 aa, Artificial Sequence
  Cyclic GFR-binding peptide
AAAAAAARYKKLVVNNAADFYLISIAN

SEQ ID NO: 116407 - protein, 27 aa, Artificial Sequence
  Cyclic GFR-binding peptide
AAAAAAAEYKFKIIQQKDNLYLMSIPE

SEQ ID NO: 116408 - protein, 27 aa, Artificial Sequence
  Cyclic GFR-binding peptide
AAAAAAARYKKLTPVGMDDFYLVSIAN

SEQ ID NO: 116409 - protein, 27 aa, Artificial Sequence
  Cyclic GFR-binding peptide
AAAAAAAYHYKLVVNNAADKYLISIPS

SEQ ID NO: 116410 - protein, 27 aa, Artificial Sequence
  Cyclic GFR-binding peptide
AAAAAAAPIKGYIVNNSSDFYLVNIPS

SEQ ID NO: 116411 - protein, 27 aa, Artificial Sequence
  Cyclic GFR-binding peptide
AAAAAAAPIKGYVKPKRGVFYLINIPS

SEQ ID NO: 116412 - protein, 27 aa, Artificial Sequence
  Cyclic GFR-binding peptide
AAAAAAARYKKLIIQQKDNFYLMSIAN

SEQ ID NO: 116413 - protein, 27 aa, Artificial Sequence
  Cyclic GFR-binding peptide
AAAAAAAPIKGYIIQQKDNFYLMNIPS

SEQ ID NO: 116414 - protein, 27 aa, Artificial Sequence
  Cyclic GFR-binding peptide
AAAAAAARYKKLIVNNSSDFYLVSIAN

SEQ ID NO: 116415 - protein, 27 aa, Artificial Sequence
  Cyclic GFR-binding peptide
AAAAAAAPIKGYVVNNAADFYLINIPS

SEQ ID NO: 116416 - protein, 27 aa, Artificial Sequence
  Cyclic GFR-binding peptide
AAAAAAARHKRLVKPTRGVYYLISTAS

SEQ ID NO: 116417 - protein, 27 aa, Artificial Sequence
  Cyclic GFR-binding peptide
AAAAAAAEYKFKIVNNSSDLYLVSIPE

SEQ ID NO: 116418 - protein, 27 aa, Artificial Sequence
  Cyclic GFR-binding peptide
AAAAAAARHKRLVVNNASDYYLISTAS

SEQ ID NO: 116419 - protein, 27 aa, Artificial Sequence
  Cyclic GFR-binding peptide
AAAAAAARHKRLTPVGMDDYYLVSTAS

SEQ ID NO: 116420 - protein, 27 aa, Artificial Sequence
  Cyclic GFR-binding peptide
AAAAAAAYHYKLIVNNSSDKYLVSIPS

SEQ ID NO: 116421 - protein, 27 aa, Artificial Sequence
  Cyclic GFR-binding peptide
AAAAAAAYHYKLVVNNASDKYLISIPS

SEQ ID NO: 116422 - protein, 27 aa, Artificial Sequence
  Cyclic GFR-binding peptide
AAAAAAAEYKFKIVNSSDDLYLVSIPE

SEQ ID NO: 116423 - protein, 27 aa, Artificial Sequence
  Cyclic GFR-binding peptide
AAAAAAAEYKFKVKPKRGVLYLISIPE

SEQ ID NO: 116424 - protein, 27 aa, Artificial Sequence
  Cyclic GFR-binding peptide
AAAAAAARHKRLVVKDYEDYYLMSTAS

SEQ ID NO: 116425 - protein, 27 aa, Artificial Sequence
  Cyclic GFR-binding peptide
AAAAAAAEYKFKVVKENEDLYLMSIPE

SEQ ID NO: 116426 - protein, 27 aa, Artificial Sequence
  Cyclic GFR-binding peptide
AAAAAAAEYKFKYTVVGKDLYLISIPE

SEQ ID NO: 116427 - protein, 27 aa, Artificial Sequence
  Cyclic GFR-binding peptide
AAAAAAAPIKGYVVNNASDFYLINIPS

SEQ ID NO: 116428 - protein, 27 aa, Artificial Sequence
  Cyclic GFR-binding peptide
AAAAAAAYHYKLIIQQKDNKYLMSIPS

SEQ ID NO: 116429 - protein, 27 aa, Artificial Sequence
  Cyclic GFR-binding peptide
AAAAAAARYKKLVVNNASDFYLISIAN

SEQ ID NO: 116430 - protein, 27 aa, Artificial Sequence
  Cyclic GFR-binding peptide
AAAAAAARHKRLVVNNAADYYLISTAS

SEQ ID NO: 116431 - protein, 27 aa, Artificial Sequence
  Cyclic GFR-binding peptide
EPISILYLVGRTPKVKFKYEAAAAAAA

SEQ ID NO: 116432 - protein, 27 aa, Artificial Sequence
  Cyclic GFR-binding peptide
SPISMLYKDEYDKVVLKYHYAAAAAAA

SEQ ID NO: 116433 - protein, 27 aa, Artificial Sequence
  Cyclic GFR-binding peptide
EPISVLYLDDMGVPTKFKYEAAAAAAA

SEQ ID NO: 116434 - protein, 27 aa, Artificial Sequence
  Cyclic GFR-binding peptide
NAISMLYFDEYDKVVLKKYRAAAAAAA

SEQ ID NO: 116435 - protein, 27 aa, Artificial Sequence
  Cyclic GFR-binding peptide
SATSILYYVGRKPKVLRKHRAAAAAAA

SEQ ID NO: 116436 - protein, 27 aa, Artificial Sequence
  Cyclic GFR-binding peptide
SPISILYKVGRKPKVLKYHYAAAAAAA

SEQ ID NO: 116437 - protein, 27 aa, Artificial Sequence
  Cyclic GFR-binding peptide
EPISILYLIGKTPKIKFKYEAAAAAAA

SEQ ID NO: 116438 - protein, 27 aa, Artificial Sequence
  Cyclic GFR-binding peptide
EPISILYLDENKNVVKFKYEAAAAAAA

SEQ ID NO: 116439 - protein, 27 aa, Artificial Sequence
  Cyclic GFR-binding peptide
SPINILYFVGRTPKVYGKIPAAAAAAA

SEQ ID NO: 116440 - protein, 27 aa, Artificial Sequence
  Cyclic GFR-binding peptide
SPINMLYFDENEKVVYGKIPAAAAAAA

SEQ ID NO: 116441 - protein, 27 aa, Artificial Sequence
  Cyclic GFR-binding peptide
SPISILYKDKGVVTYLKYHYAAAAAAA

SEQ ID NO: 116442 - protein, 27 aa, Artificial Sequence
  Cyclic GFR-binding peptide
EPISMLYLDNGRVLLKFKYEAAAAAAA

SEQ ID NO: 116443 - protein, 27 aa, Artificial Sequence
  Cyclic GFR-binding peptide
NAISILYFVGRKPKVLKKYRAAAAAAA

SEQ ID NO: 116444 - protein, 27 aa, Artificial Sequence
  Cyclic GFR-binding peptide
SPINVLYFDDMGVPTYGKIPAAAAAAA

SEQ ID NO: 116445 - protein, 27 aa, Artificial Sequence
  Cyclic GFR-binding peptide
SPISILYKDENKNVVLKYHYAAAAAAA

SEQ ID NO: 116446 - protein, 27 aa, Artificial Sequence
  Cyclic GFR-binding peptide
SPISVLYKDDSSNVILKYHYAAAAAAA

SEQ ID NO: 116447 - protein, 27 aa, Artificial Sequence
  Cyclic GFR-binding peptide
SPINVLYFDDSSNVIYGKIPAAAAAAA

SEQ ID NO: 116448 - protein, 27 aa, Artificial Sequence
  Cyclic GFR-binding peptide
NAISILYFDKGVVTYLKKYRAAAAAAA

SEQ ID NO: 116449 - protein, 27 aa, Artificial Sequence
  Cyclic GFR-binding peptide
SATSMLYYDNGRVLLLRKHRAAAAAAA

SEQ ID NO: 116450 - protein, 27 aa, Artificial Sequence
  Cyclic GFR-binding peptide
SPISMLYKDNGRVLLLKYHYAAAAAAA

SEQ ID NO: 116451 - protein, 27 aa, Artificial Sequence
  Cyclic GFR-binding peptide
NAISVLYFDDSSNVILKKYRAAAAAAA

SEQ ID NO: 116452 - protein, 27 aa, Artificial Sequence
  Cyclic GFR-binding peptide
SATSILYYDENKNVVLRKHRAAAAAAA

SEQ ID NO: 116453 - protein, 27 aa, Artificial Sequence
  Cyclic GFR-binding peptide
SATSILYYIGKTPKILRKHRAAAAAAA

SEQ ID NO: 116454 - protein, 27 aa, Artificial Sequence
  Cyclic GFR-binding peptide
SPINILYFDKGVVTYYGKIPAAAAAAA

SEQ ID NO: 116455 - protein, 27 aa, Artificial Sequence
  Cyclic GFR-binding peptide
SPISVLYKDDMGVPTLKYHYAAAAAAA

SEQ ID NO: 116456 - protein, 27 aa, Artificial Sequence
  Cyclic GFR-binding peptide
SATSVLYYDSSNNVILRKHRAAAAAAA

SEQ ID NO: 116457 - protein, 27 aa, Artificial Sequence
  Cyclic GFR-binding peptide
NAISMLYFDNGRVLLLKKYRAAAAAAA

SEQ ID NO: 116458 - protein, 27 aa, Artificial Sequence
  Cyclic GFR-binding peptide
SPISILYKVGRTPKVLKYHYAAAAAAA

SEQ ID NO: 116459 - protein, 27 aa, Artificial Sequence
  Cyclic GFR-binding peptide
SATSVLYYDDSSNVILRKHRAAAAAAA

SEQ ID NO: 116460 - protein, 27 aa, Artificial Sequence
  Cyclic GFR-binding peptide
SPINMLYFDNGRVLLYGKIPAAAAAAA

SEQ ID NO: 116461 - protein, 27 aa, Artificial Sequence
  Cyclic GFR-binding peptide
NAISILYFDENKNVVLKKYRAAAAAAA

SEQ ID NO: 116462 - protein, 27 aa, Artificial Sequence
  Cyclic GFR-binding peptide
EPISMLYLDEYDKVVKFKYEAAAAAAA

SEQ ID NO: 116463 - protein, 27 aa, Artificial Sequence
  Cyclic GFR-binding peptide
SPINILYFDENKNVVYGKIPAAAAAAA

SEQ ID NO: 116464 - protein, 27 aa, Artificial Sequence
  Cyclic GFR-binding peptide
SPINILYFIGKTPKIYGKIPAAAAAAA

SEQ ID NO: 116465 - protein, 27 aa, Artificial Sequence
  Cyclic GFR-binding peptide
EPISILYLDAANNVVKFKYEAAAAAAA

SEQ ID NO: 116466 - protein, 27 aa, Artificial Sequence
  Cyclic GFR-binding peptide
SATSILYYDKGVVTYLRKHRAAAAAAA

SEQ ID NO: 116467 - protein, 27 aa, Artificial Sequence
  Cyclic GFR-binding peptide
NAISILYFIGKTPKILKKYRAAAAAAA

SEQ ID NO: 116468 - protein, 27 aa, Artificial Sequence
  Cyclic GFR-binding peptide
SPINMLYFDEYDKVVYGKIPAAAAAAA

SEQ ID NO: 116469 - protein, 27 aa, Artificial Sequence
  Cyclic GFR-binding peptide
EPISILYLDSANNVVKFKYEAAAAAAA

SEQ ID NO: 116470 - protein, 27 aa, Artificial Sequence
  Cyclic GFR-binding peptide
NAISILYFVGRTPKVLKKYRAAAAAAA

SEQ ID NO: 116471 - protein, 27 aa, Artificial Sequence
  Cyclic GFR-binding peptide
SATSMLYYDENEKVVLRKHRAAAAAAA

SEQ ID NO: 116472 - protein, 27 aa, Artificial Sequence
  Cyclic GFR-binding peptide
SPISILYKIGKTPKILKYHYAAAAAAA

SEQ ID NO: 116473 - protein, 27 aa, Artificial Sequence
  Cyclic GFR-binding peptide
SPISMLYKDENEKVVLKYHYAAAAAAA

SEQ ID NO: 116474 - protein, 27 aa, Artificial Sequence
  Cyclic GFR-binding peptide
SATSMLYYNDKQQIILRKHRAAAAAAA

SEQ ID NO: 116475 - protein, 27 aa, Artificial Sequence
  Cyclic GFR-binding peptide
NAISMLYFDENEKVVLKKYRAAAAAAA

SEQ ID NO: 116476 - protein, 27 aa, Artificial Sequence
  Cyclic GFR-binding peptide
NAISILYFDAANNVVLKKYRAAAAAAA

SEQ ID NO: 116477 - protein, 27 aa, Artificial Sequence
  Cyclic GFR-binding peptide
EPISMLYLNDKQQIIKFKYEAAAAAAA

SEQ ID NO: 116478 - protein, 27 aa, Artificial Sequence
  Cyclic GFR-binding peptide
NAISVLYFDDMGVPTLKKYRAAAAAAA

SEQ ID NO: 116479 - protein, 27 aa, Artificial Sequence
  Cyclic GFR-binding peptide
SPISILYKDAANNVVLKYHYAAAAAAA

SEQ ID NO: 116480 - protein, 27 aa, Artificial Sequence
  Cyclic GFR-binding peptide
SPINVLYFDSSNNVIYGKIPAAAAAAA

SEQ ID NO: 116481 - protein, 27 aa, Artificial Sequence
  Cyclic GFR-binding peptide
SPINILYFVGRKPKVYGKIPAAAAAAA

SEQ ID NO: 116482 - protein, 27 aa, Artificial Sequence
  Cyclic GFR-binding peptide
NAISMLYFNDKQQIILKKYRAAAAAAA

SEQ ID NO: 116483 - protein, 27 aa, Artificial Sequence
  Cyclic GFR-binding peptide
SPINMLYFNDKQQIIYGKIPAAAAAAA

SEQ ID NO: 116484 - protein, 27 aa, Artificial Sequence
  Cyclic GFR-binding peptide
NAISVLYFDSSNNVILKKYRAAAAAAA

SEQ ID NO: 116485 - protein, 27 aa, Artificial Sequence
  Cyclic GFR-binding peptide
SPINILYFDAANNVVYGKIPAAAAAAA

SEQ ID NO: 116486 - protein, 27 aa, Artificial Sequence
  Cyclic GFR-binding peptide
SATSILYYVGRTPKVLRKHRAAAAAAA

SEQ ID NO: 116487 - protein, 27 aa, Artificial Sequence
  Cyclic GFR-binding peptide
EPISVLYLDSSNNVIKFKYEAAAAAAA

SEQ ID NO: 116488 - protein, 27 aa, Artificial Sequence
  Cyclic GFR-binding peptide
SATSILYYDSANNVVLRKHRAAAAAAA

SEQ ID NO: 116489 - protein, 27 aa, Artificial Sequence
  Cyclic GFR-binding peptide
SATSVLYYDDMGVPTLRKHRAAAAAAA

SEQ ID NO: 116490 - protein, 27 aa, Artificial Sequence
  Cyclic GFR-binding peptide
SPISVLYKDSSNNVILKYHYAAAAAAA

SEQ ID NO: 116491 - protein, 27 aa, Artificial Sequence
  Cyclic GFR-binding peptide
SPISILYKDSANNVVLKYHYAAAAAAA

SEQ ID NO: 116492 - protein, 27 aa, Artificial Sequence
  Cyclic GFR-binding peptide
EPISVLYLDDSSNVIKFKYEAAAAAAA

SEQ ID NO: 116493 - protein, 27 aa, Artificial Sequence
  Cyclic GFR-binding peptide
EPISILYLVGRKPKVKFKYEAAAAAAA

SEQ ID NO: 116494 - protein, 27 aa, Artificial Sequence
  Cyclic GFR-binding peptide
SATSMLYYDEYDKVVLRKHRAAAAAAA

SEQ ID NO: 116495 - protein, 27 aa, Artificial Sequence
  Cyclic GFR-binding peptide
EPISMLYLDENEKVVKFKYEAAAAAAA

SEQ ID NO: 116496 - protein, 27 aa, Artificial Sequence
  Cyclic GFR-binding peptide
EPISILYLDKGVVTYKFKYEAAAAAAA

SEQ ID NO: 116497 - protein, 27 aa, Artificial Sequence
  Cyclic GFR-binding peptide
SPINILYFDSANNVVYGKIPAAAAAAA

SEQ ID NO: 116498 - protein, 27 aa, Artificial Sequence
  Cyclic GFR-binding peptide
SPISMLYKNDKQQIILKYHYAAAAAAA

SEQ ID NO: 116499 - protein, 27 aa, Artificial Sequence
  Cyclic GFR-binding peptide
NAISILYFDSANNVVLKKYRAAAAAAA

SEQ ID NO: 116500 - protein, 27 aa, Artificial Sequence
  Cyclic GFR-binding peptide
SATSILYYDAANNVVLRKHRAAAAAAA

SEQ ID NO: 116501 - protein, 27 aa, Artificial Sequence
  Cyclic GFR-binding peptide
AAAAAAASMEGIIIQQKDNMIQMTINS

SEQ ID NO: 116502 - protein, 27 aa, Artificial Sequence
  Cyclic GFR-binding peptide
AAAAAAASMEGIIVNSSDDMIQVTINS

SEQ ID NO: 116503 - protein, 27 aa, Artificial Sequence
  Cyclic GFR-binding peptide
AAAAAAASMEGLVKPKRGVMIQITINS

SEQ ID NO: 116504 - protein, 27 aa, Artificial Sequence
  Cyclic GFR-binding peptide
AAAAAAASMEGLVVNNASDMIQITINS

SEQ ID NO: 116505 - protein, 29 aa, Artificial Sequence
  Cyclic GFR-binding peptide
AAAAAAASMEGIFIPKKRVIEMIQVTINS

SEQ ID NO: 116506 - protein, 27 aa, Artificial Sequence
  Cyclic GFR-binding peptide
AAAAAAASMEGILLVRGNDMIQMTINS

SEQ ID NO: 116507 - protein, 29 aa, Artificial Sequence
  Cyclic GFR-binding peptide
AAAAAAASMEGILKPKKRVYEMIQVTINS

SEQ ID NO: 116508 - protein, 27 aa, Artificial Sequence
  Cyclic GFR-binding peptide
AAAAAAASMEGLIKPTKGIMIQITINS

SEQ ID NO: 116509 - protein, 27 aa, Artificial Sequence
  Cyclic GFR-binding peptide
AAAAAAASMEGLIVNSSDDMIQVTINS

SEQ ID NO: 116510 - protein, 29 aa, Artificial Sequence
  Cyclic GFR-binding peptide
AAAAAAASMEGIHQGQHPKIRMIQMTINS

SEQ ID NO: 116511 - protein, 27 aa, Artificial Sequence
  Cyclic GFR-binding peptide
AAAAAAASMEGIVVNNASDMIQITINS

SEQ ID NO: 116512 - protein, 29 aa, Artificial Sequence
  Cyclic GFR-binding peptide
AAAAAAASMEGLLKPKKRVYEMIQVTINS

SEQ ID NO: 116513 - protein, 27 aa, Artificial Sequence
  Cyclic GFR-binding peptide
AAAAAAASMEGIVKPKRGVMIQITINS

SEQ ID NO: 116514 - protein, 27 aa, Artificial Sequence
  Cyclic GFR-binding peptide
AAAAAAASMEGIVKPTRGVMIQITINS

SEQ ID NO: 116515 - protein, 27 aa, Artificial Sequence
  Cyclic GFR-binding peptide
AAAAAAASMEGLVVNNAADMIQITINS

SEQ ID NO: 116516 - protein, 27 aa, Artificial Sequence
  Cyclic GFR-binding peptide
AAAAAAASMEGLLLVRGNDMIQMTINS

SEQ ID NO: 116517 - protein, 27 aa, Artificial Sequence
  Cyclic GFR-binding peptide
AAAAAAASMEGIIKPTKGIMIQITINS

SEQ ID NO: 116518 - protein, 27 aa, Artificial Sequence
  Cyclic GFR-binding peptide
AAAAAAASMEGLIIQQKDNMIQMTINS

SEQ ID NO: 116519 - protein, 29 aa, Artificial Sequence
  Cyclic GFR-binding peptide
AAAAAAASMEGLHQGQHPKIRMIQMTINS

SEQ ID NO: 116520 - protein, 27 aa, Artificial Sequence
  Cyclic GFR-binding peptide
AAAAAAASMEGIVVNNAADMIQITINS

SEQ ID NO: 116521 - protein, 29 aa, Artificial Sequence
  Cyclic GFR-binding peptide
AAAAAAASMEGLFIPKKRVIEMIQVTINS

SEQ ID NO: 116522 - protein, 27 aa, Artificial Sequence
  Cyclic GFR-binding peptide
AAAAAAASMEGLVKPTRGVMIQITINS

SEQ ID NO: 116523 - protein, 27 aa, Artificial Sequence
  Cyclic GFR-binding peptide
SNITMQIMNDKQQIIIGEMSAAAAAAA

SEQ ID NO: 116524 - protein, 27 aa, Artificial Sequence
  Cyclic GFR-binding peptide
SNITVQIMDDSSNVIIGEMSAAAAAAA

SEQ ID NO: 116525 - protein, 27 aa, Artificial Sequence
  Cyclic GFR-binding peptide
SNITIQIMVGRKPKVLGEMSAAAAAAA

SEQ ID NO: 116526 - protein, 27 aa, Artificial Sequence
  Cyclic GFR-binding peptide
SNITIQIMDSANNVVLGEMSAAAAAAA

SEQ ID NO: 116527 - protein, 29 aa, Artificial Sequence
  Cyclic GFR-binding peptide
SNITVQIMEIVRKKPIFIGEMSAAAAAAA

SEQ ID NO: 116528 - protein, 27 aa, Artificial Sequence
  Cyclic GFR-binding peptide
SNITMQIMDNGRVLLIGEMSAAAAAAA

SEQ ID NO: 116529 - protein, 29 aa, Artificial Sequence
  Cyclic GFR-binding peptide
SNITVQIMEYVRKKPKLIGEMSAAAAAAA

SEQ ID NO: 116530 - protein, 27 aa, Artificial Sequence
  Cyclic GFR-binding peptide
SNITIQIMIGKTPKILGEMSAAAAAAA

SEQ ID NO: 116531 - protein, 27 aa, Artificial Sequence
  Cyclic GFR-binding peptide
SNITVQIMDDSSNVILGEMSAAAAAAA

SEQ ID NO: 116532 - protein, 29 aa, Artificial Sequence
  Cyclic GFR-binding peptide
SNITMQIMRIKPHQGQHIGEMSAAAAAAA

SEQ ID NO: 116533 - protein, 27 aa, Artificial Sequence
  Cyclic GFR-binding peptide
SNITIQIMDSANNVVIGEMSAAAAAAA

SEQ ID NO: 116534 - protein, 29 aa, Artificial Sequence
  Cyclic GFR-binding peptide
SNITVQIMEYVRKKPKLLGEMSAAAAAAA

SEQ ID NO: 116535 - protein, 27 aa, Artificial Sequence
  Cyclic GFR-binding peptide
SNITIQIMVGRKPKVIGEMSAAAAAAA

SEQ ID NO: 116536 - protein, 27 aa, Artificial Sequence
  Cyclic GFR-binding peptide
SNITIQIMVGRTPKVIGEMSAAAAAAA

SEQ ID NO: 116537 - protein, 27 aa, Artificial Sequence
  Cyclic GFR-binding peptide
SNITIQIMDAANNVVLGEMSAAAAAAA

SEQ ID NO: 116538 - protein, 27 aa, Artificial Sequence
  Cyclic GFR-binding peptide
SNITMQIMDNGRVLLLGEMSAAAAAAA

SEQ ID NO: 116539 - protein, 27 aa, Artificial Sequence
  Cyclic GFR-binding peptide
SNITIQIMIGKTPKIIGEMSAAAAAAA

SEQ ID NO: 116540 - protein, 27 aa, Artificial Sequence
  Cyclic GFR-binding peptide
SNITMQIMNDKQQIILGEMSAAAAAAA

SEQ ID NO: 116541 - protein, 29 aa, Artificial Sequence
  Cyclic GFR-binding peptide
SNITMQIMRIKPHQGQHLGEMSAAAAAAA

SEQ ID NO: 116542 - protein, 27 aa, Artificial Sequence
  Cyclic GFR-binding peptide
SNITIQIMDAANNVVIGEMSAAAAAAA

SEQ ID NO: 116543 - protein, 29 aa, Artificial Sequence
  Cyclic GFR-binding peptide
SNITVQIMEIVRKKPIFLGEMSAAAAAAA

SEQ ID NO: 116544 - protein, 27 aa, Artificial Sequence
  Cyclic GFR-binding peptide
SNITIQIMVGRTPKVLGEMSAAAAAAA

SEQ ID NO: 116545 - protein, 27 aa, Artificial Sequence
  Cyclic GFR-binding peptide
AAAAAAARYKKLIKPTKGIFYLISIAN

SEQ ID NO: 116546 - protein, 27 aa, Artificial Sequence
  Cyclic GFR-binding peptide
AAAAAAAQYNKLVVNKNEDLYLISIAS

SEQ ID NO: 116547 - protein, 27 aa, Artificial Sequence
  Cyclic GFR-binding peptide
AAAAAAAQYNKLVVNNAADLYLISIAS

SEQ ID NO: 116548 - protein, 27 aa, Artificial Sequence
  Cyclic GFR-binding peptide
AAAAAAAQYNKLIVNNSSDLYLVSIAS

SEQ ID NO: 116549 - protein, 27 aa, Artificial Sequence
  Cyclic GFR-binding peptide
AAAAAAARYKKLVVKDYEDFYLMSIAN

SEQ ID NO: 116550 - protein, 27 aa, Artificial Sequence
  Cyclic GFR-binding peptide
AAAAAAARYKKLVKPTRGVFYLISIAN

SEQ ID NO: 116551 - protein, 27 aa, Artificial Sequence
  Cyclic GFR-binding peptide
AAAAAAAQYNKLIIQQKDNLYLMSIAS

SEQ ID NO: 116552 - protein, 27 aa, Artificial Sequence
  Cyclic GFR-binding peptide
AAAAAAAQYNKLLLVRGNDLYLMSIAS

SEQ ID NO: 116553 - protein, 27 aa, Artificial Sequence
  Cyclic GFR-binding peptide
AAAAAAAQYNKLVKPTRGVLYLISIAS

SEQ ID NO: 116554 - protein, 27 aa, Artificial Sequence
  Cyclic GFR-binding peptide
AAAAAAARYKKLVVKENEDFYLMSIAN

SEQ ID NO: 116555 - protein, 27 aa, Artificial Sequence
  Cyclic GFR-binding peptide
AAAAAAARYKKLVVNNAADFYLISIAN

SEQ ID NO: 116556 - protein, 27 aa, Artificial Sequence
  Cyclic GFR-binding peptide
AAAAAAAQYNKLTPVGMDDLYLVSIAS

SEQ ID NO: 116557 - protein, 27 aa, Artificial Sequence
  Cyclic GFR-binding peptide
AAAAAAARYKKLTPVGMDDFYLVSIAN

SEQ ID NO: 116558 - protein, 27 aa, Artificial Sequence
  Cyclic GFR-binding peptide
AAAAAAARYKKLVKPKRGVFYLISIAN

SEQ ID NO: 116559 - protein, 27 aa, Artificial Sequence
  Cyclic GFR-binding peptide
AAAAAAAQYNKLVVKENEDLYLMSIAS

SEQ ID NO: 116560 - protein, 27 aa, Artificial Sequence
  Cyclic GFR-binding peptide
AAAAAAARYKKLIIQQKDNFYLMSIAN

SEQ ID NO: 116561 - protein, 27 aa, Artificial Sequence
  Cyclic GFR-binding peptide
AAAAAAAQYNKLVKPKRGVLYLISIAS

SEQ ID NO: 116562 - protein, 27 aa, Artificial Sequence
  Cyclic GFR-binding peptide
AAAAAAARYKKLIVNNSSDFYLVSIAN

SEQ ID NO: 116563 - protein, 27 aa, Artificial Sequence
  Cyclic GFR-binding peptide
AAAAAAARYKKLYTVVGKDFYLISIAN

SEQ ID NO: 116564 - protein, 27 aa, Artificial Sequence
  Cyclic GFR-binding peptide
AAAAAAARYKKLIVNSSDDFYLVSIAN

SEQ ID NO: 116565 - protein, 27 aa, Artificial Sequence
  Cyclic GFR-binding peptide
AAAAAAARYKKLLLVRGNDFYLMSIAN

SEQ ID NO: 116566 - protein, 27 aa, Artificial Sequence
  Cyclic GFR-binding peptide
AAAAAAAQYNKLVVNNASDLYLISIAS

SEQ ID NO: 116567 - protein, 27 aa, Artificial Sequence
  Cyclic GFR-binding peptide
AAAAAAAQYNKLIKPTKGILYLISIAS

SEQ ID NO: 116568 - protein, 27 aa, Artificial Sequence
  Cyclic GFR-binding peptide
AAAAAAARYKKLVVNKNEDFYLISIAN

SEQ ID NO: 116569 - protein, 27 aa, Artificial Sequence
  Cyclic GFR-binding peptide
AAAAAAAQYNKLYTVVGKDLYLISIAS

SEQ ID NO: 116570 - protein, 27 aa, Artificial Sequence
  Cyclic GFR-binding peptide
AAAAAAAQYNKLVVKDYEDLYLMSIAS

SEQ ID NO: 116571 - protein, 27 aa, Artificial Sequence
  Cyclic GFR-binding peptide
AAAAAAARYKKLVVNNASDFYLISIAN

SEQ ID NO: 116572 - protein, 27 aa, Artificial Sequence
  Cyclic GFR-binding peptide
AAAAAAAQYNKLIVNSSDDLYLVSIAS

SEQ ID NO: 116573 - protein, 27 aa, Artificial Sequence
  Cyclic GFR-binding peptide
NAISILYFIGKTPKILKKYRAAAAAAA

SEQ ID NO: 116574 - protein, 27 aa, Artificial Sequence
  Cyclic GFR-binding peptide
SAISILYLDENKNVVLKNYQAAAAAAA

SEQ ID NO: 116575 - protein, 27 aa, Artificial Sequence
  Cyclic GFR-binding peptide
SAISILYLDAANNVVLKNYQAAAAAAA

SEQ ID NO: 116576 - protein, 27 aa, Artificial Sequence
  Cyclic GFR-binding peptide
SAISVLYLDSSNNVILKNYQAAAAAAA

SEQ ID NO: 116577 - protein, 27 aa, Artificial Sequence
  Cyclic GFR-binding peptide
NAISMLYFDEYDKVVLKKYRAAAAAAA

SEQ ID NO: 116578 - protein, 27 aa, Artificial Sequence
  Cyclic GFR-binding peptide
NAISILYFVGRTPKVLKKYRAAAAAAA

SEQ ID NO: 116579 - protein, 27 aa, Artificial Sequence
  Cyclic GFR-binding peptide
SAISMLYLNDKQQIILKNYQAAAAAAA

SEQ ID NO: 116580 - protein, 27 aa, Artificial Sequence
  Cyclic GFR-binding peptide
SAISMLYLDNGRVLLLKNYQAAAAAAA

SEQ ID NO: 116581 - protein, 27 aa, Artificial Sequence
  Cyclic GFR-binding peptide
SAISILYLVGRTPKVLKNYQAAAAAAA

SEQ ID NO: 116582 - protein, 27 aa, Artificial Sequence
  Cyclic GFR-binding peptide
NAISMLYFDENEKVVLKKYRAAAAAAA

SEQ ID NO: 116583 - protein, 27 aa, Artificial Sequence
  Cyclic GFR-binding peptide
NAISILYFDAANNVVLKKYRAAAAAAA

SEQ ID NO: 116584 - protein, 27 aa, Artificial Sequence
  Cyclic GFR-binding peptide
SAISVLYLDDMGVPTLKNYQAAAAAAA

SEQ ID NO: 116585 - protein, 27 aa, Artificial Sequence
  Cyclic GFR-binding peptide
NAISVLYFDDMGVPTLKKYRAAAAAAA

SEQ ID NO: 116586 - protein, 27 aa, Artificial Sequence
  Cyclic GFR-binding peptide
NAISILYFVGRKPKVLKKYRAAAAAAA

SEQ ID NO: 116587 - protein, 27 aa, Artificial Sequence
  Cyclic GFR-binding peptide
SAISMLYLDENEKVVLKNYQAAAAAAA

SEQ ID NO: 116588 - protein, 27 aa, Artificial Sequence
  Cyclic GFR-binding peptide
NAISMLYFNDKQQIILKKYRAAAAAAA

SEQ ID NO: 116589 - protein, 27 aa, Artificial Sequence
  Cyclic GFR-binding peptide
SAISILYLVGRKPKVLKNYQAAAAAAA

SEQ ID NO: 116590 - protein, 27 aa, Artificial Sequence
  Cyclic GFR-binding peptide
NAISVLYFDSSNNVILKKYRAAAAAAA

SEQ ID NO: 116591 - protein, 27 aa, Artificial Sequence
  Cyclic GFR-binding peptide
NAISILYFDKGVVTYLKKYRAAAAAAA

SEQ ID NO: 116592 - protein, 27 aa, Artificial Sequence
  Cyclic GFR-binding peptide
NAISVLYFDDSSNVILKKYRAAAAAAA

SEQ ID NO: 116593 - protein, 27 aa, Artificial Sequence
  Cyclic GFR-binding peptide
NAISMLYFDNGRVLLLKKYRAAAAAAA

SEQ ID NO: 116594 - protein, 27 aa, Artificial Sequence
  Cyclic GFR-binding peptide
SAISILYLDSANNVVLKNYQAAAAAAA

SEQ ID NO: 116595 - protein, 27 aa, Artificial Sequence
  Cyclic GFR-binding peptide
SAISILYLIGKTPKILKNYQAAAAAAA

SEQ ID NO: 116596 - protein, 27 aa, Artificial Sequence
  Cyclic GFR-binding peptide
NAISILYFDENKNVVLKKYRAAAAAAA

SEQ ID NO: 116597 - protein, 27 aa, Artificial Sequence
  Cyclic GFR-binding peptide
SAISILYLDKGVVTYLKNYQAAAAAAA

SEQ ID NO: 116598 - protein, 27 aa, Artificial Sequence
  Cyclic GFR-binding peptide
SAISMLYLDEYDKVVLKNYQAAAAAAA

SEQ ID NO: 116599 - protein, 27 aa, Artificial Sequence
  Cyclic GFR-binding peptide
NAISILYFDSANNVVLKKYRAAAAAAA

SEQ ID NO: 116600 - protein, 27 aa, Artificial Sequence
  Cyclic GFR-binding peptide
SAISVLYLDDSSNVILKNYQAAAAAAA

SEQ ID NO: 116601 - protein, 29 aa, Artificial Sequence
  Cyclic GFR-binding peptide
AAAAAAAVTAKKLKPKKRVYEIKRVQVPR

SEQ ID NO: 116602 - protein, 29 aa, Artificial Sequence
  Cyclic GFR-binding peptide
AAAAAAAVQVEKLKPKKRVYEVKAVKVSR

SEQ ID NO: 116603 - protein, 27 aa, Artificial Sequence
  Cyclic GFR-binding peptide
AAAAAAAVTAKKVKPTRGVIKRIQVPR

SEQ ID NO: 116604 - protein, 29 aa, Artificial Sequence
  Cyclic GFR-binding peptide
AAAAAAAVQVEKFIPKKRVIEVKAVKVSR

SEQ ID NO: 116605 - protein, 29 aa, Artificial Sequence
  Cyclic GFR-binding peptide
AAAAAAAVQVEKHQGQHPKIRVKAMKVSR

SEQ ID NO: 116606 - protein, 29 aa, Artificial Sequence
  Cyclic GFR-binding peptide
AAAAAAAVTAKKHQGQHPKIRIKRMQVPR

SEQ ID NO: 116607 - protein, 27 aa, Artificial Sequence
  Cyclic GFR-binding peptide
AAAAAAAVTAKKIKPTKGIIKRIQVPR

SEQ ID NO: 116608 - protein, 27 aa, Artificial Sequence
  Cyclic GFR-binding peptide
AAAAAAAVQVEKVKPKRGVVKAIKVSR

SEQ ID NO: 116609 - protein, 27 aa, Artificial Sequence
  Cyclic GFR-binding peptide
AAAAAAAVTAKKVKPKRGVIKRIQVPR

SEQ ID NO: 116610 - protein, 27 aa, Artificial Sequence
  Cyclic GFR-binding peptide
AAAAAAAVQVEKIKPTKGIVKAIKVSR

SEQ ID NO: 116611 - protein, 27 aa, Artificial Sequence
  Cyclic GFR-binding peptide
AAAAAAAVQVEKVKPTRGVVKAIKVSR

SEQ ID NO: 116612 - protein, 29 aa, Artificial Sequence
  Cyclic GFR-binding peptide
AAAAAAAVTAKKFIPKKRVIEIKRVQVPR

SEQ ID NO: 116613 - protein, 29 aa, Artificial Sequence
  Cyclic GFR-binding peptide
RPVQVRKIEYVRKKPKLKKATVAAAAAAA

SEQ ID NO: 116614 - protein, 29 aa, Artificial Sequence
  Cyclic GFR-binding peptide
RSVKVAKVEYVRKKPKLKEVQVAAAAAAA

SEQ ID NO: 116615 - protein, 27 aa, Artificial Sequence
  Cyclic GFR-binding peptide
RPVQIRKIVGRTPKVKKATVAAAAAAA

SEQ ID NO: 116616 - protein, 29 aa, Artificial Sequence
  Cyclic GFR-binding peptide
RSVKVAKVEIVRKKPIFKEVQVAAAAAAA

SEQ ID NO: 116617 - protein, 29 aa, Artificial Sequence
  Cyclic GFR-binding peptide
RSVKMAKVRIKPHQGQHKEVQVAAAAAAA

SEQ ID NO: 116618 - protein, 29 aa, Artificial Sequence
  Cyclic GFR-binding peptide
RPVQMRKIRIKPHQGQHKKATVAAAAAAA

SEQ ID NO: 116619 - protein, 27 aa, Artificial Sequence
  Cyclic GFR-binding peptide
RPVQIRKIIGKTPKIKKATVAAAAAAA

SEQ ID NO: 116620 - protein, 27 aa, Artificial Sequence
  Cyclic GFR-binding peptide
RSVKIAKVVGRKPKVKEVQVAAAAAAA

SEQ ID NO: 116621 - protein, 27 aa, Artificial Sequence
  Cyclic GFR-binding peptide
RPVQIRKIVGRKPKVKKATVAAAAAAA

SEQ ID NO: 116622 - protein, 27 aa, Artificial Sequence
  Cyclic GFR-binding peptide
RSVKIAKVIGKTPKIKEVQVAAAAAAA

SEQ ID NO: 116623 - protein, 27 aa, Artificial Sequence
  Cyclic GFR-binding peptide
RSVKIAKVVGRTPKVKEVQVAAAAAAA

SEQ ID NO: 116624 - protein, 29 aa, Artificial Sequence
  Cyclic GFR-binding peptide
RPVQVRKIEIVRKKPIFKKATVAAAAAAA

SEQ ID NO: 116625 - protein, 27 aa, Artificial Sequence
  Cyclic GFR-binding peptide
GGGGGGGRYKKLIKPTKGIFYLISIAN

SEQ ID NO: 116626 - protein, 29 aa, Artificial Sequence
  Cyclic GFR-binding peptide
GGGGGGGRHKRLFIPKKRVIEYYLVSTAS

SEQ ID NO: 116627 - protein, 27 aa, Artificial Sequence
  Cyclic GFR-binding peptide
GGGGGGGYHYKLVVKDYEDKYLMSIPS

SEQ ID NO: 116628 - protein, 27 aa, Artificial Sequence
  Cyclic GFR-binding peptide
GGGGGGGQYNKLIVNNSSDLYLVSIAS

SEQ ID NO: 116629 - protein, 27 aa, Artificial Sequence
  Cyclic GFR-binding peptide
GGGGGGGRYKKLVVKDYEDFYLMSIAN

SEQ ID NO: 116630 - protein, 27 aa, Artificial Sequence
  Cyclic GFR-binding peptide
GGGGGGGRYKKLVKPTRGVFYLISIAN

SEQ ID NO: 116631 - protein, 27 aa, Artificial Sequence
  Cyclic GFR-binding peptide
GGGGGGGRHKRLVVKENEDYYLMSTAS

SEQ ID NO: 116632 - protein, 27 aa, Artificial Sequence
  Cyclic GFR-binding peptide
GGGGGGGYHYKLIKPTKGIKYLISIPS

SEQ ID NO: 116633 - protein, 29 aa, Artificial Sequence
  Cyclic GFR-binding peptide
GGGGGGGRYKKLFIPKKRVIEFYLVSIAN

SEQ ID NO: 116634 - protein, 27 aa, Artificial Sequence
  Cyclic GFR-binding peptide
GGGGGGGYHYKLVVKENEDKYLMSIPS

SEQ ID NO: 116635 - protein, 27 aa, Artificial Sequence
  Cyclic GFR-binding peptide
GGGGGGGRHKRLVKPKRGVYYLISTAS

SEQ ID NO: 116636 - protein, 27 aa, Artificial Sequence
  Cyclic GFR-binding peptide
GGGGGGGYHYKLVKPKRGVKYLISIPS

SEQ ID NO: 116637 - protein, 29 aa, Artificial Sequence
  Cyclic GFR-binding peptide
GGGGGGGQYNKLFIPKKRVIELYLVSIAS

SEQ ID NO: 116638 - protein, 27 aa, Artificial Sequence
  Cyclic GFR-binding peptide
GGGGGGGQYNKLVKPTRGVLYLISIAS

SEQ ID NO: 116639 - protein, 27 aa, Artificial Sequence
  Cyclic GFR-binding peptide
GGGGGGGRYKKLVVKENEDFYLMSIAN

SEQ ID NO: 116640 - protein, 27 aa, Artificial Sequence
  Cyclic GFR-binding peptide
GGGGGGGQYNKLTPVGMDDLYLVSIAS

SEQ ID NO: 116641 - protein, 27 aa, Artificial Sequence
  Cyclic GFR-binding peptide
GGGGGGGRYKKLTPVGMDDFYLVSIAN

SEQ ID NO: 116642 - protein, 27 aa, Artificial Sequence
  Cyclic GFR-binding peptide
GGGGGGGRYKKLVKPKRGVFYLISIAN

SEQ ID NO: 116643 - protein, 27 aa, Artificial Sequence
  Cyclic GFR-binding peptide
GGGGGGGQYNKLVVKENEDLYLMSIAS

SEQ ID NO: 116644 - protein, 27 aa, Artificial Sequence
  Cyclic GFR-binding peptide
GGGGGGGYHYKLIVNSSDDKYLVSIPS

SEQ ID NO: 116645 - protein, 27 aa, Artificial Sequence
  Cyclic GFR-binding peptide
GGGGGGGQYNKLVKPKRGVLYLISIAS

SEQ ID NO: 116646 - protein, 27 aa, Artificial Sequence
  Cyclic GFR-binding peptide
GGGGGGGRYKKLIVNNSSDFYLVSIAN

SEQ ID NO: 116647 - protein, 27 aa, Artificial Sequence
  Cyclic GFR-binding peptide
GGGGGGGRYKKLIVNSSDDFYLVSIAN

SEQ ID NO: 116648 - protein, 27 aa, Artificial Sequence
  Cyclic GFR-binding peptide
GGGGGGGRHKRLVKPTRGVYYLISTAS

SEQ ID NO: 116649 - protein, 29 aa, Artificial Sequence
  Cyclic GFR-binding peptide
GGGGGGGYHYKLFIPKKRVIEKYLVSIPS

SEQ ID NO: 116650 - protein, 27 aa, Artificial Sequence
  Cyclic GFR-binding peptide
GGGGGGGRHKRLIKPTKGIYYLISTAS

SEQ ID NO: 116651 - protein, 27 aa, Artificial Sequence
  Cyclic GFR-binding peptide
GGGGGGGRHKRLTPVGMDDYYLVSTAS

SEQ ID NO: 116652 - protein, 27 aa, Artificial Sequence
  Cyclic GFR-binding peptide
GGGGGGGYHYKLTPVGMDDKYLVSIPS

SEQ ID NO: 116653 - protein, 27 aa, Artificial Sequence
  Cyclic GFR-binding peptide
GGGGGGGYHYKLIVNNSSDKYLVSIPS

SEQ ID NO: 116654 - protein, 27 aa, Artificial Sequence
  Cyclic GFR-binding peptide
GGGGGGGRHKRLIVNNSSDYYLVSTAS

SEQ ID NO: 116655 - protein, 27 aa, Artificial Sequence
  Cyclic GFR-binding peptide
GGGGGGGYHYKLVKPTRGVKYLISIPS

SEQ ID NO: 116656 - protein, 27 aa, Artificial Sequence
  Cyclic GFR-binding peptide
GGGGGGGRHKRLIVNSSDDYYLVSTAS

SEQ ID NO: 116657 - protein, 27 aa, Artificial Sequence
  Cyclic GFR-binding peptide
GGGGGGGRHKRLVVKDYEDYYLMSTAS

SEQ ID NO: 116658 - protein, 27 aa, Artificial Sequence
  Cyclic GFR-binding peptide
GGGGGGGQYNKLIKPTKGILYLISIAS

SEQ ID NO: 116659 - protein, 27 aa, Artificial Sequence
  Cyclic GFR-binding peptide
GGGGGGGQYNKLVVKDYEDLYLMSIAS

SEQ ID NO: 116660 - protein, 27 aa, Artificial Sequence
  Cyclic GFR-binding peptide
GGGGGGGQYNKLIVNSSDDLYLVSIAS

SEQ ID NO: 116661 - protein, 27 aa, Artificial Sequence
  Cyclic GFR-binding peptide
NAISILYFIGKTPKILKKYRGGGGGGG

SEQ ID NO: 116662 - protein, 29 aa, Artificial Sequence
  Cyclic GFR-binding peptide
SATSVLYYEIVRKKPIFLRKHRGGGGGGG

SEQ ID NO: 116663 - protein, 27 aa, Artificial Sequence
  Cyclic GFR-binding peptide
SPISMLYKDEYDKVVLKYHYGGGGGGG

SEQ ID NO: 116664 - protein, 27 aa, Artificial Sequence
  Cyclic GFR-binding peptide
SAISVLYLDSSNNVILKNYQGGGGGGG

SEQ ID NO: 116665 - protein, 27 aa, Artificial Sequence
  Cyclic GFR-binding peptide
NAISMLYFDEYDKVVLKKYRGGGGGGG

SEQ ID NO: 116666 - protein, 27 aa, Artificial Sequence
  Cyclic GFR-binding peptide
NAISILYFVGRTPKVLKKYRGGGGGGG

SEQ ID NO: 116667 - protein, 27 aa, Artificial Sequence
  Cyclic GFR-binding peptide
SATSMLYYDENEKVVLRKHRGGGGGGG

SEQ ID NO: 116668 - protein, 27 aa, Artificial Sequence
  Cyclic GFR-binding peptide
SPISILYKIGKTPKILKYHYGGGGGGG

SEQ ID NO: 116669 - protein, 29 aa, Artificial Sequence
  Cyclic GFR-binding peptide
NAISVLYFEIVRKKPIFLKKYRGGGGGGG

SEQ ID NO: 116670 - protein, 27 aa, Artificial Sequence
  Cyclic GFR-binding peptide
SPISMLYKDENEKVVLKYHYGGGGGGG

SEQ ID NO: 116671 - protein, 27 aa, Artificial Sequence
  Cyclic GFR-binding peptide
SATSILYYVGRKPKVLRKHRGGGGGGG

SEQ ID NO: 116672 - protein, 27 aa, Artificial Sequence
  Cyclic GFR-binding peptide
SPISILYKVGRKPKVLKYHYGGGGGGG

SEQ ID NO: 116673 - protein, 29 aa, Artificial Sequence
  Cyclic GFR-binding peptide
SAISVLYLEIVRKKPIFLKNYQGGGGGGG

SEQ ID NO: 116674 - protein, 27 aa, Artificial Sequence
  Cyclic GFR-binding peptide
SAISILYLVGRTPKVLKNYQGGGGGGG

SEQ ID NO: 116675 - protein, 27 aa, Artificial Sequence
  Cyclic GFR-binding peptide
NAISMLYFDENEKVVLKKYRGGGGGGG

SEQ ID NO: 116676 - protein, 27 aa, Artificial Sequence
  Cyclic GFR-binding peptide
SAISVLYLDDMGVPTLKNYQGGGGGGG

SEQ ID NO: 116677 - protein, 27 aa, Artificial Sequence
  Cyclic GFR-binding peptide
NAISVLYFDDMGVPTLKKYRGGGGGGG

SEQ ID NO: 116678 - protein, 27 aa, Artificial Sequence
  Cyclic GFR-binding peptide
NAISILYFVGRKPKVLKKYRGGGGGGG

SEQ ID NO: 116679 - protein, 27 aa, Artificial Sequence
  Cyclic GFR-binding peptide
SAISMLYLDENEKVVLKNYQGGGGGGG

SEQ ID NO: 116680 - protein, 27 aa, Artificial Sequence
  Cyclic GFR-binding peptide
SPISVLYKDDSSNVILKYHYGGGGGGG

SEQ ID NO: 116681 - protein, 27 aa, Artificial Sequence
  Cyclic GFR-binding peptide
SAISILYLVGRKPKVLKNYQGGGGGGG

SEQ ID NO: 116682 - protein, 27 aa, Artificial Sequence
  Cyclic GFR-binding peptide
NAISVLYFDSSNNVILKKYRGGGGGGG

SEQ ID NO: 116683 - protein, 27 aa, Artificial Sequence
  Cyclic GFR-binding peptide
NAISVLYFDDSSNVILKKYRGGGGGGG

SEQ ID NO: 116684 - protein, 27 aa, Artificial Sequence
  Cyclic GFR-binding peptide
SATSILYYVGRTPKVLRKHRGGGGGGG

SEQ ID NO: 116685 - protein, 29 aa, Artificial Sequence
  Cyclic GFR-binding peptide
SPISVLYKEIVRKKPIFLKYHYGGGGGGG

SEQ ID NO: 116686 - protein, 27 aa, Artificial Sequence
  Cyclic GFR-binding peptide
SATSILYYIGKTPKILRKHRGGGGGGG

SEQ ID NO: 116687 - protein, 27 aa, Artificial Sequence
  Cyclic GFR-binding peptide
SATSVLYYDDMGVPTLRKHRGGGGGGG

SEQ ID NO: 116688 - protein, 27 aa, Artificial Sequence
  Cyclic GFR-binding peptide
SPISVLYKDDMGVPTLKYHYGGGGGGG

SEQ ID NO: 116689 - protein, 27 aa, Artificial Sequence
  Cyclic GFR-binding peptide
SPISVLYKDSSNNVILKYHYGGGGGGG

SEQ ID NO: 116690 - protein, 27 aa, Artificial Sequence
  Cyclic GFR-binding peptide
SATSVLYYDSSNNVILRKHRGGGGGGG

SEQ ID NO: 116691 - protein, 27 aa, Artificial Sequence
  Cyclic GFR-binding peptide
SPISILYKVGRTPKVLKYHYGGGGGGG

SEQ ID NO: 116692 - protein, 27 aa, Artificial Sequence
  Cyclic GFR-binding peptide
SATSVLYYDDSSNVILRKHRGGGGGGG

SEQ ID NO: 116693 - protein, 27 aa, Artificial Sequence
  Cyclic GFR-binding peptide
SATSMLYYDEYDKVVLRKHRGGGGGGG

SEQ ID NO: 116694 - protein, 27 aa, Artificial Sequence
  Cyclic GFR-binding peptide
SAISILYLIGKTPKILKNYQGGGGGGG

SEQ ID NO: 116695 - protein, 27 aa, Artificial Sequence
  Cyclic GFR-binding peptide
SAISMLYLDEYDKVVLKNYQGGGGGGG

SEQ ID NO: 116696 - protein, 27 aa, Artificial Sequence
  Cyclic GFR-binding peptide
SAISVLYLDDSSNVILKNYQGGGGGGG

SEQ ID NO: 116697 - protein, 27 aa, Artificial Sequence
  Cyclic GFR-binding peptide
GGGGGGGRYKKLIKPTKGIFYLISIAN

SEQ ID NO: 116698 - protein, 27 aa, Artificial Sequence
  Cyclic GFR-binding peptide
GGGGGGGNSLQEVVKDYEDYYLMTLPE

SEQ ID NO: 116699 - protein, 27 aa, Artificial Sequence
  Cyclic GFR-binding peptide
GGGGGGGNSLQEIKPTKGIYYVIPLPE

SEQ ID NO: 116700 - protein, 27 aa, Artificial Sequence
  Cyclic GFR-binding peptide
GGGGGGGNSLQEVKPKRGVYYLITLPE

SEQ ID NO: 116701 - protein, 27 aa, Artificial Sequence
  Cyclic GFR-binding peptide
GGGGGGGNSLQEVKPTRGVYYVIPLPE

SEQ ID NO: 116702 - protein, 27 aa, Artificial Sequence
  Cyclic GFR-binding peptide
GGGGGGGRYKKLVVKDYEDFYLMSIAN

SEQ ID NO: 116703 - protein, 27 aa, Artificial Sequence
  Cyclic GFR-binding peptide
GGGGGGGEYQKYIVNSSDDIFLVSIPS

SEQ ID NO: 116704 - protein, 27 aa, Artificial Sequence
  Cyclic GFR-binding peptide
GGGGGGGEYQKYVKPTRGVIFLISIPS

SEQ ID NO: 116705 - protein, 27 aa, Artificial Sequence
  Cyclic GFR-binding peptide
GGGGGGGNSLQEVVKENEDYYLMTLPE

SEQ ID NO: 116706 - protein, 27 aa, Artificial Sequence
  Cyclic GFR-binding peptide
GGGGGGGRYKKLVKPTRGVFYLISIAN

SEQ ID NO: 116707 - protein, 27 aa, Artificial Sequence
  Cyclic GFR-binding peptide
GGGGGGGNSLQEVVNNASDYYLITLPE

SEQ ID NO: 116708 - protein, 27 aa, Artificial Sequence
  Cyclic GFR-binding peptide
GGGGGGGNSLQEVKPKRGVYYVIPLPE

SEQ ID NO: 116709 - protein, 27 aa, Artificial Sequence
  Cyclic GFR-binding peptide
GGGGGGGNSLQEVVNNASDYYVIPLPE

SEQ ID NO: 116710 - protein, 27 aa, Artificial Sequence
  Cyclic GFR-binding peptide
GGGGGGGNSLQEVKPTRGVYYLITLPE

SEQ ID NO: 116711 - protein, 27 aa, Artificial Sequence
  Cyclic GFR-binding peptide
GGGGGGGQYNKLVKPTRGVLYLISIAS

SEQ ID NO: 116712 - protein, 27 aa, Artificial Sequence
  Cyclic GFR-binding peptide
GGGGGGGRYKKLVVKENEDFYLMSIAN

SEQ ID NO: 116713 - protein, 27 aa, Artificial Sequence
  Cyclic GFR-binding peptide
GGGGGGGEYQKYIKPTKGIIFLISIPS

SEQ ID NO: 116714 - protein, 27 aa, Artificial Sequence
  Cyclic GFR-binding peptide
GGGGGGGEYQKYVVNNASDIFLISIPS

SEQ ID NO: 116715 - protein, 27 aa, Artificial Sequence
  Cyclic GFR-binding peptide
GGGGGGGRYKKLVKPKRGVFYLISIAN

SEQ ID NO: 116716 - protein, 27 aa, Artificial Sequence
  Cyclic GFR-binding peptide
GGGGGGGNSLQEIVNSSDDYYVVPLPE

SEQ ID NO: 116717 - protein, 27 aa, Artificial Sequence
  Cyclic GFR-binding peptide
GGGGGGGNSLQEVVKDYEDYYVMPLPE

SEQ ID NO: 116718 - protein, 27 aa, Artificial Sequence
  Cyclic GFR-binding peptide
GGGGGGGQYNKLVVKENEDLYLMSIAS

SEQ ID NO: 116719 - protein, 27 aa, Artificial Sequence
  Cyclic GFR-binding peptide
GGGGGGGEYQKYVVKENEDIFLMSIPS

SEQ ID NO: 116720 - protein, 27 aa, Artificial Sequence
  Cyclic GFR-binding peptide
GGGGGGGQYNKLVKPKRGVLYLISIAS

SEQ ID NO: 116721 - protein, 27 aa, Artificial Sequence
  Cyclic GFR-binding peptide
GGGGGGGRYKKLIVNSSDDFYLVSIAN

SEQ ID NO: 116722 - protein, 27 aa, Artificial Sequence
  Cyclic GFR-binding peptide
GGGGGGGNSLQEVVKENEDYYVMPLPE

SEQ ID NO: 116723 - protein, 27 aa, Artificial Sequence
  Cyclic GFR-binding peptide
GGGGGGGEYQKYVVKDYEDIFLMSIPS

SEQ ID NO: 116724 - protein, 27 aa, Artificial Sequence
  Cyclic GFR-binding peptide
GGGGGGGQYNKLVVNNASDLYLISIAS

SEQ ID NO: 116725 - protein, 27 aa, Artificial Sequence
  Cyclic GFR-binding peptide
GGGGGGGQYNKLIKPTKGILYLISIAS

SEQ ID NO: 116726 - protein, 27 aa, Artificial Sequence
  Cyclic GFR-binding peptide
GGGGGGGNSLQEIKPTKGIYYLITLPE

SEQ ID NO: 116727 - protein, 27 aa, Artificial Sequence
  Cyclic GFR-binding peptide
GGGGGGGEYQKYVKPKRGVIFLISIPS

SEQ ID NO: 116728 - protein, 27 aa, Artificial Sequence
  Cyclic GFR-binding peptide
GGGGGGGQYNKLVVKDYEDLYLMSIAS

SEQ ID NO: 116729 - protein, 27 aa, Artificial Sequence
  Cyclic GFR-binding peptide
GGGGGGGRYKKLVVNNASDFYLISIAN

SEQ ID NO: 116730 - protein, 27 aa, Artificial Sequence
  Cyclic GFR-binding peptide
GGGGGGGNSLQEIVNSSDDYYLVTLPE

SEQ ID NO: 116731 - protein, 27 aa, Artificial Sequence
  Cyclic GFR-binding peptide
GGGGGGGQYNKLIVNSSDDLYLVSIAS

SEQ ID NO: 116732 - protein, 27 aa, Artificial Sequence
  Cyclic GFR-binding peptide
NAISILYFIGKTPKILKKYRGGGGGGG

SEQ ID NO: 116733 - protein, 27 aa, Artificial Sequence
  Cyclic GFR-binding peptide
EPLTMLYYDEYDKVVEQLSNGGGGGGG

SEQ ID NO: 116734 - protein, 27 aa, Artificial Sequence
  Cyclic GFR-binding peptide
EPLPIVYYIGKTPKIEQLSNGGGGGGG

SEQ ID NO: 116735 - protein, 27 aa, Artificial Sequence
  Cyclic GFR-binding peptide
EPLTILYYVGRKPKVEQLSNGGGGGGG

SEQ ID NO: 116736 - protein, 27 aa, Artificial Sequence
  Cyclic GFR-binding peptide
EPLPIVYYVGRTPKVEQLSNGGGGGGG

SEQ ID NO: 116737 - protein, 27 aa, Artificial Sequence
  Cyclic GFR-binding peptide
NAISMLYFDEYDKVVLKKYRGGGGGGG

SEQ ID NO: 116738 - protein, 27 aa, Artificial Sequence
  Cyclic GFR-binding peptide
SPISVLFIDDSSNVIYKQYEGGGGGGG

SEQ ID NO: 116739 - protein, 27 aa, Artificial Sequence
  Cyclic GFR-binding peptide
SPISILFIVGRTPKVYKQYEGGGGGGG

SEQ ID NO: 116740 - protein, 27 aa, Artificial Sequence
  Cyclic GFR-binding peptide
EPLTMLYYDENEKVVEQLSNGGGGGGG

SEQ ID NO: 116741 - protein, 27 aa, Artificial Sequence
  Cyclic GFR-binding peptide
NAISILYFVGRTPKVLKKYRGGGGGGG

SEQ ID NO: 116742 - protein, 27 aa, Artificial Sequence
  Cyclic GFR-binding peptide
EPLTILYYDSANNVVEQLSNGGGGGGG

SEQ ID NO: 116743 - protein, 27 aa, Artificial Sequence
  Cyclic GFR-binding peptide
EPLPIVYYVGRKPKVEQLSNGGGGGGG

SEQ ID NO: 116744 - protein, 27 aa, Artificial Sequence
  Cyclic GFR-binding peptide
EPLPIVYYDSANNVVEQLSNGGGGGGG

SEQ ID NO: 116745 - protein, 27 aa, Artificial Sequence
  Cyclic GFR-binding peptide
EPLTILYYVGRTPKVEQLSNGGGGGGG

SEQ ID NO: 116746 - protein, 27 aa, Artificial Sequence
  Cyclic GFR-binding peptide
SAISILYLVGRTPKVLKNYQGGGGGGG

SEQ ID NO: 116747 - protein, 27 aa, Artificial Sequence
  Cyclic GFR-binding peptide
NAISMLYFDENEKVVLKKYRGGGGGGG

SEQ ID NO: 116748 - protein, 27 aa, Artificial Sequence
  Cyclic GFR-binding peptide
SPISILFIIGKTPKIYKQYEGGGGGGG

SEQ ID NO: 116749 - protein, 27 aa, Artificial Sequence
  Cyclic GFR-binding peptide
SPISILFIDSANNVVYKQYEGGGGGGG

SEQ ID NO: 116750 - protein, 27 aa, Artificial Sequence
  Cyclic GFR-binding peptide
NAISILYFVGRKPKVLKKYRGGGGGGG

SEQ ID NO: 116751 - protein, 27 aa, Artificial Sequence
  Cyclic GFR-binding peptide
EPLPVVYYDDSSNVIEQLSNGGGGGGG

SEQ ID NO: 116752 - protein, 27 aa, Artificial Sequence
  Cyclic GFR-binding peptide
EPLPMVYYDEYDKVVEQLSNGGGGGGG

SEQ ID NO: 116753 - protein, 27 aa, Artificial Sequence
  Cyclic GFR-binding peptide
SAISMLYLDENEKVVLKNYQGGGGGGG

SEQ ID NO: 116754 - protein, 27 aa, Artificial Sequence
  Cyclic GFR-binding peptide
SPISMLFIDENEKVVYKQYEGGGGGGG

SEQ ID NO: 116755 - protein, 27 aa, Artificial Sequence
  Cyclic GFR-binding peptide
SAISILYLVGRKPKVLKNYQGGGGGGG

SEQ ID NO: 116756 - protein, 27 aa, Artificial Sequence
  Cyclic GFR-binding peptide
NAISVLYFDDSSNVILKKYRGGGGGGG

SEQ ID NO: 116757 - protein, 27 aa, Artificial Sequence
  Cyclic GFR-binding peptide
EPLPMVYYDENEKVVEQLSNGGGGGGG

SEQ ID NO: 116758 - protein, 27 aa, Artificial Sequence
  Cyclic GFR-binding peptide
SPISMLFIDEYDKVVYKQYEGGGGGGG

SEQ ID NO: 116759 - protein, 27 aa, Artificial Sequence
  Cyclic GFR-binding peptide
SAISILYLDSANNVVLKNYQGGGGGGG

SEQ ID NO: 116760 - protein, 27 aa, Artificial Sequence
  Cyclic GFR-binding peptide
SAISILYLIGKTPKILKNYQGGGGGGG

SEQ ID NO: 116761 - protein, 27 aa, Artificial Sequence
  Cyclic GFR-binding peptide
EPLTILYYIGKTPKIEQLSNGGGGGGG

SEQ ID NO: 116762 - protein, 27 aa, Artificial Sequence
  Cyclic GFR-binding peptide
SPISILFIVGRKPKVYKQYEGGGGGGG

SEQ ID NO: 116763 - protein, 27 aa, Artificial Sequence
  Cyclic GFR-binding peptide
SAISMLYLDEYDKVVLKNYQGGGGGGG

SEQ ID NO: 116764 - protein, 27 aa, Artificial Sequence
  Cyclic GFR-binding peptide
NAISILYFDSANNVVLKKYRGGGGGGG

SEQ ID NO: 116765 - protein, 27 aa, Artificial Sequence
  Cyclic GFR-binding peptide
EPLTVLYYDDSSNVIEQLSNGGGGGGG

SEQ ID NO: 116766 - protein, 27 aa, Artificial Sequence
  Cyclic GFR-binding peptide
SAISVLYLDDSSNVILKNYQGGGGGGG

SEQ ID NO: 116767 - protein, 29 aa, Artificial Sequence
  Cyclic GFR-binding peptide
GGGGGGGVTAKKLKPKKRVYEIKRVQVPR

SEQ ID NO: 116768 - protein, 29 aa, Artificial Sequence
  Cyclic GFR-binding peptide
GGGGGGGVQVEKLKPKKRVYEVKAVKVSR

SEQ ID NO: 116769 - protein, 29 aa, Artificial Sequence
  Cyclic GFR-binding peptide
GGGGGGGVQVEKFIPKKRVIEVKAVKVSR

SEQ ID NO: 116770 - protein, 29 aa, Artificial Sequence
  Cyclic GFR-binding peptide
GGGGGGGVQVEKHQGQHPKIRVKAMKVSR

SEQ ID NO: 116771 - protein, 29 aa, Artificial Sequence
  Cyclic GFR-binding peptide
GGGGGGGVTAKKHQGQHPKIRIKRMQVPR

SEQ ID NO: 116772 - protein, 29 aa, Artificial Sequence
  Cyclic GFR-binding peptide
GGGGGGGSMEGLLKPKKRVYEMIQVTINS

SEQ ID NO: 116773 - protein, 29 aa, Artificial Sequence
  Cyclic GFR-binding peptide
GGGGGGGSMEGIFIPKKRVIEMIQVTINS

SEQ ID NO: 116774 - protein, 29 aa, Artificial Sequence
  Cyclic GFR-binding peptide
GGGGGGGSMEGLHQGQHPKIRMIQMTINS

SEQ ID NO: 116775 - protein, 29 aa, Artificial Sequence
  Cyclic GFR-binding peptide
GGGGGGGSMEGILKPKKRVYEMIQVTINS

SEQ ID NO: 116776 - protein, 29 aa, Artificial Sequence
  Cyclic GFR-binding peptide
GGGGGGGSMEGLFIPKKRVIEMIQVTINS

SEQ ID NO: 116777 - protein, 29 aa, Artificial Sequence
  Cyclic GFR-binding peptide
GGGGGGGVTAKKFIPKKRVIEIKRVQVPR

SEQ ID NO: 116778 - protein, 29 aa, Artificial Sequence
  Cyclic GFR-binding peptide
GGGGGGGSMEGIHQGQHPKIRMIQMTINS

SEQ ID NO: 116779 - protein, 29 aa, Artificial Sequence
  Cyclic GFR-binding peptide
RPVQVRKIEYVRKKPKLKKATVGGGGGGG

SEQ ID NO: 116780 - protein, 29 aa, Artificial Sequence
  Cyclic GFR-binding peptide
RSVKVAKVEYVRKKPKLKEVQVGGGGGGG

SEQ ID NO: 116781 - protein, 29 aa, Artificial Sequence
  Cyclic GFR-binding peptide
RSVKVAKVEIVRKKPIFKEVQVGGGGGGG

SEQ ID NO: 116782 - protein, 29 aa, Artificial Sequence
  Cyclic GFR-binding peptide
RSVKMAKVRIKPHQGQHKEVQVGGGGGGG

SEQ ID NO: 116783 - protein, 29 aa, Artificial Sequence
  Cyclic GFR-binding peptide
RPVQMRKIRIKPHQGQHKKATVGGGGGGG

SEQ ID NO: 116784 - protein, 29 aa, Artificial Sequence
  Cyclic GFR-binding peptide
SNITVQIMEYVRKKPKLLGEMSGGGGGGG

SEQ ID NO: 116785 - protein, 29 aa, Artificial Sequence
  Cyclic GFR-binding peptide
SNITVQIMEIVRKKPIFIGEMSGGGGGGG

SEQ ID NO: 116786 - protein, 29 aa, Artificial Sequence
  Cyclic GFR-binding peptide
SNITMQIMRIKPHQGQHLGEMSGGGGGGG

SEQ ID NO: 116787 - protein, 29 aa, Artificial Sequence
  Cyclic GFR-binding peptide
SNITVQIMEYVRKKPKLIGEMSGGGGGGG

SEQ ID NO: 116788 - protein, 29 aa, Artificial Sequence
  Cyclic GFR-binding peptide
SNITVQIMEIVRKKPIFLGEMSGGGGGGG

SEQ ID NO: 116789 - protein, 29 aa, Artificial Sequence
  Cyclic GFR-binding peptide
RPVQVRKIEIVRKKPIFKKATVGGGGGGG

SEQ ID NO: 116790 - protein, 29 aa, Artificial Sequence
  Cyclic GFR-binding peptide
SNITMQIMRIKPHQGQHIGEMSGGGGGGG

SEQ ID NO: 116791 - protein, 29 aa, Artificial Sequence
  Cyclic GFR-binding peptide
GGGGGGGVTAKKLKPKKRVYEIKRVQVPR

SEQ ID NO: 116792 - protein, 29 aa, Artificial Sequence
  Cyclic GFR-binding peptide
GGGGGGGVQVEKLKPKKRVYEVKAVKVSR

SEQ ID NO: 116793 - protein, 29 aa, Artificial Sequence
  Cyclic GFR-binding peptide
GGGGGGGVQVEKFIPKKRVIEVKAVKVSR

SEQ ID NO: 116794 - protein, 29 aa, Artificial Sequence
  Cyclic GFR-binding peptide
GGGGGGGVQVEKHQGQHPKIRVKAMKVSR

SEQ ID NO: 116795 - protein, 29 aa, Artificial Sequence
  Cyclic GFR-binding peptide
GGGGGGGVTAKKHQGQHPKIRIKRMQVPR

SEQ ID NO: 116796 - protein, 29 aa, Artificial Sequence
  Cyclic GFR-binding peptide
GGGGGGGSMEGLLKPKKRVYEMIQVTINS

SEQ ID NO: 116797 - protein, 29 aa, Artificial Sequence
  Cyclic GFR-binding peptide
GGGGGGGSMEGIFIPKKRVIEMIQVTINS

SEQ ID NO: 116798 - protein, 29 aa, Artificial Sequence
  Cyclic GFR-binding peptide
GGGGGGGSMEGLHQGQHPKIRMIQMTINS

SEQ ID NO: 116799 - protein, 29 aa, Artificial Sequence
  Cyclic GFR-binding peptide
GGGGGGGSMEGILKPKKRVYEMIQVTINS

SEQ ID NO: 116800 - protein, 29 aa, Artificial Sequence
  Cyclic GFR-binding peptide
GGGGGGGSMEGLFIPKKRVIEMIQVTINS

SEQ ID NO: 116801 - protein, 29 aa, Artificial Sequence
  Cyclic GFR-binding peptide
GGGGGGGVTAKKFIPKKRVIEIKRVQVPR

SEQ ID NO: 116802 - protein, 29 aa, Artificial Sequence
  Cyclic GFR-binding peptide
GGGGGGGSMEGIHQGQHPKIRMIQMTINS

SEQ ID NO: 116803 - protein, 29 aa, Artificial Sequence
  Cyclic GFR-binding peptide
RPVQVRKIEYVRKKPKLKKATVGGGGGGG

SEQ ID NO: 116804 - protein, 29 aa, Artificial Sequence
  Cyclic GFR-binding peptide
RSVKVAKVEYVRKKPKLKEVQVGGGGGGG

SEQ ID NO: 116805 - protein, 29 aa, Artificial Sequence
  Cyclic GFR-binding peptide
RSVKVAKVEIVRKKPIFKEVQVGGGGGGG

SEQ ID NO: 116806 - protein, 29 aa, Artificial Sequence
  Cyclic GFR-binding peptide
RSVKMAKVRIKPHQGQHKEVQVGGGGGGG

SEQ ID NO: 116807 - protein, 29 aa, Artificial Sequence
  Cyclic GFR-binding peptide
RPVQMRKIRIKPHQGQHKKATVGGGGGGG

SEQ ID NO: 116808 - protein, 29 aa, Artificial Sequence
  Cyclic GFR-binding peptide
SNITVQIMEYVRKKPKLLGEMSGGGGGGG

SEQ ID NO: 116809 - protein, 29 aa, Artificial Sequence
  Cyclic GFR-binding peptide
SNITVQIMEIVRKKPIFIGEMSGGGGGGG

SEQ ID NO: 116810 - protein, 29 aa, Artificial Sequence
  Cyclic GFR-binding peptide
SNITMQIMRIKPHQGQHLGEMSGGGGGGG

SEQ ID NO: 116811 - protein, 29 aa, Artificial Sequence
  Cyclic GFR-binding peptide
SNITVQIMEYVRKKPKLIGEMSGGGGGGG

SEQ ID NO: 116812 - protein, 29 aa, Artificial Sequence
  Cyclic GFR-binding peptide
SNITVQIMEIVRKKPIFLGEMSGGGGGGG

SEQ ID NO: 116813 - protein, 29 aa, Artificial Sequence
  Cyclic GFR-binding peptide
RPVQVRKIEIVRKKPIFKKATVGGGGGGG

SEQ ID NO: 116814 - protein, 29 aa, Artificial Sequence
  Cyclic GFR-binding peptide
SNITMQIMRIKPHQGQHIGEMSGGGGGGG

SEQ ID NO: 116815 - protein, 27 aa, Artificial Sequence
  Cyclic GFR-binding peptide
GGGGGGGEYQKYVVKENEDIYLMSIPS

SEQ ID NO: 116816 - protein, 27 aa, Artificial Sequence
  Cyclic GFR-binding peptide
GGGGGGGRYKKLIKPTKGIFYLISIAN

SEQ ID NO: 116817 - protein, 27 aa, Artificial Sequence
  Cyclic GFR-binding peptide
GGGGGGGEYKFKVKPTRGVLYLISIPE

SEQ ID NO: 116818 - protein, 27 aa, Artificial Sequence
  Cyclic GFR-binding peptide
GGGGGGGYHYKLVVKDYEDKYLMSIPS

SEQ ID NO: 116819 - protein, 27 aa, Artificial Sequence
  Cyclic GFR-binding peptide
GGGGGGGEYKFKTPVGMDDLYLVSIPE

SEQ ID NO: 116820 - protein, 27 aa, Artificial Sequence
  Cyclic GFR-binding peptide
GGGGGGGEYQKYVKPKRGVIYLISIPS

SEQ ID NO: 116821 - protein, 27 aa, Artificial Sequence
  Cyclic GFR-binding peptide
GGGGGGGRYKKLVVKDYEDFYLMSIAN

SEQ ID NO: 116822 - protein, 27 aa, Artificial Sequence
  Cyclic GFR-binding peptide
GGGGGGGEYQKYVVKDYEDIYLMSIPS

SEQ ID NO: 116823 - protein, 27 aa, Artificial Sequence
  Cyclic GFR-binding peptide
GGGGGGGRYKKLVKPTRGVFYLISIAN

SEQ ID NO: 116824 - protein, 27 aa, Artificial Sequence
  Cyclic GFR-binding peptide
GGGGGGGYHYKLIKPTKGIKYLISIPS

SEQ ID NO: 116825 - protein, 27 aa, Artificial Sequence
  Cyclic GFR-binding peptide
GGGGGGGYHYKLVVKENEDKYLMSIPS

SEQ ID NO: 116826 - protein, 27 aa, Artificial Sequence
  Cyclic GFR-binding peptide
GGGGGGGYHYKLVKPKRGVKYLISIPS

SEQ ID NO: 116827 - protein, 27 aa, Artificial Sequence
  Cyclic GFR-binding peptide
GGGGGGGEYKFKIKPTKGILYLISIPE

SEQ ID NO: 116828 - protein, 27 aa, Artificial Sequence
  Cyclic GFR-binding peptide
GGGGGGGEYQKYIKPTKGIIYLISIPS

SEQ ID NO: 116829 - protein, 27 aa, Artificial Sequence
  Cyclic GFR-binding peptide
GGGGGGGRYKKLVVKENEDFYLMSIAN

SEQ ID NO: 116830 - protein, 27 aa, Artificial Sequence
  Cyclic GFR-binding peptide
GGGGGGGRYKKLVVNNAADFYLISIAN

SEQ ID NO: 116831 - protein, 27 aa, Artificial Sequence
  Cyclic GFR-binding peptide
GGGGGGGYHYKLYTVVGKDKYLISIPS

SEQ ID NO: 116832 - protein, 27 aa, Artificial Sequence
  Cyclic GFR-binding peptide
GGGGGGGRYKKLTPVGMDDFYLVSIAN

SEQ ID NO: 116833 - protein, 27 aa, Artificial Sequence
  Cyclic GFR-binding peptide
GGGGGGGRYKKLVKPKRGVFYLISIAN

SEQ ID NO: 116834 - protein, 27 aa, Artificial Sequence
  Cyclic GFR-binding peptide
GGGGGGGYHYKLVVNNAADKYLISIPS

SEQ ID NO: 116835 - protein, 27 aa, Artificial Sequence
  Cyclic GFR-binding peptide
GGGGGGGYHYKLIVNSSDDKYLVSIPS

SEQ ID NO: 116836 - protein, 27 aa, Artificial Sequence
  Cyclic GFR-binding peptide
GGGGGGGRYKKLIVNNSSDFYLVSIAN

SEQ ID NO: 116837 - protein, 27 aa, Artificial Sequence
  Cyclic GFR-binding peptide
GGGGGGGRYKKLYTVVGKDFYLISIAN

SEQ ID NO: 116838 - protein, 27 aa, Artificial Sequence
  Cyclic GFR-binding peptide
GGGGGGGEYQKYVVNNAADIYLISIPS

SEQ ID NO: 116839 - protein, 27 aa, Artificial Sequence
  Cyclic GFR-binding peptide
GGGGGGGRYKKLIVNSSDDFYLVSIAN

SEQ ID NO: 116840 - protein, 27 aa, Artificial Sequence
  Cyclic GFR-binding peptide
GGGGGGGEYKFKIVNNSSDLYLVSIPE

SEQ ID NO: 116841 - protein, 27 aa, Artificial Sequence
  Cyclic GFR-binding peptide
GGGGGGGEYQKYVKPTRGVIYLISIPS

SEQ ID NO: 116842 - protein, 27 aa, Artificial Sequence
  Cyclic GFR-binding peptide
GGGGGGGEYQKYIVNSSDDIYLVSIPS

SEQ ID NO: 116843 - protein, 27 aa, Artificial Sequence
  Cyclic GFR-binding peptide
GGGGGGGYHYKLTPVGMDDKYLVSIPS

SEQ ID NO: 116844 - protein, 27 aa, Artificial Sequence
  Cyclic GFR-binding peptide
GGGGGGGYHYKLIVNNSSDKYLVSIPS

SEQ ID NO: 116845 - protein, 27 aa, Artificial Sequence
  Cyclic GFR-binding peptide
GGGGGGGEYKFKIVNSSDDLYLVSIPE

SEQ ID NO: 116846 - protein, 27 aa, Artificial Sequence
  Cyclic GFR-binding peptide
GGGGGGGYHYKLVKPTRGVKYLISIPS

SEQ ID NO: 116847 - protein, 27 aa, Artificial Sequence
  Cyclic GFR-binding peptide
GGGGGGGEYKFKVKPKRGVLYLISIPE

SEQ ID NO: 116848 - protein, 27 aa, Artificial Sequence
  Cyclic GFR-binding peptide
GGGGGGGEYQKYYTVVGKDIYLISIPS

SEQ ID NO: 116849 - protein, 27 aa, Artificial Sequence
  Cyclic GFR-binding peptide
GGGGGGGEYKFKVVKENEDLYLMSIPE

SEQ ID NO: 116850 - protein, 27 aa, Artificial Sequence
  Cyclic GFR-binding peptide
GGGGGGGEYQKYTPVGMDDIYLVSIPS

SEQ ID NO: 116851 - protein, 27 aa, Artificial Sequence
  Cyclic GFR-binding peptide
GGGGGGGEYQKYIVNNSSDIYLVSIPS

SEQ ID NO: 116852 - protein, 27 aa, Artificial Sequence
  Cyclic GFR-binding peptide
GGGGGGGEYKFKVVKDYEDLYLMSIPE

SEQ ID NO: 116853 - protein, 27 aa, Artificial Sequence
  Cyclic GFR-binding peptide
GGGGGGGEYKFKYTVVGKDLYLISIPE

SEQ ID NO: 116854 - protein, 27 aa, Artificial Sequence
  Cyclic GFR-binding peptide
GGGGGGGEYKFKVVNNAADLYLISIPE

SEQ ID NO: 116855 - protein, 27 aa, Artificial Sequence
  Cyclic GFR-binding peptide
SPISMLYIDENEKVVYKQYEGGGGGGG

SEQ ID NO: 116856 - protein, 27 aa, Artificial Sequence
  Cyclic GFR-binding peptide
NAISILYFIGKTPKILKKYRGGGGGGG

SEQ ID NO: 116857 - protein, 27 aa, Artificial Sequence
  Cyclic GFR-binding peptide
EPISILYLVGRTPKVKFKYEGGGGGGG

SEQ ID NO: 116858 - protein, 27 aa, Artificial Sequence
  Cyclic GFR-binding peptide
SPISMLYKDEYDKVVLKYHYGGGGGGG

SEQ ID NO: 116859 - protein, 27 aa, Artificial Sequence
  Cyclic GFR-binding peptide
EPISVLYLDDMGVPTKFKYEGGGGGGG

SEQ ID NO: 116860 - protein, 27 aa, Artificial Sequence
  Cyclic GFR-binding peptide
SPISILYIVGRKPKVYKQYEGGGGGGG

SEQ ID NO: 116861 - protein, 27 aa, Artificial Sequence
  Cyclic GFR-binding peptide
NAISMLYFDEYDKVVLKKYRGGGGGGG

SEQ ID NO: 116862 - protein, 27 aa, Artificial Sequence
  Cyclic GFR-binding peptide
SPISMLYIDEYDKVVYKQYEGGGGGGG

SEQ ID NO: 116863 - protein, 27 aa, Artificial Sequence
  Cyclic GFR-binding peptide
NAISILYFVGRTPKVLKKYRGGGGGGG

SEQ ID NO: 116864 - protein, 27 aa, Artificial Sequence
  Cyclic GFR-binding peptide
SPISILYKIGKTPKILKYHYGGGGGGG

SEQ ID NO: 116865 - protein, 27 aa, Artificial Sequence
  Cyclic GFR-binding peptide
SPISMLYKDENEKVVLKYHYGGGGGGG

SEQ ID NO: 116866 - protein, 27 aa, Artificial Sequence
  Cyclic GFR-binding peptide
SPISILYKVGRKPKVLKYHYGGGGGGG

SEQ ID NO: 116867 - protein, 27 aa, Artificial Sequence
  Cyclic GFR-binding peptide
EPISILYLIGKTPKIKFKYEGGGGGGG

SEQ ID NO: 116868 - protein, 27 aa, Artificial Sequence
  Cyclic GFR-binding peptide
SPISILYIIGKTPKIYKQYEGGGGGGG

SEQ ID NO: 116869 - protein, 27 aa, Artificial Sequence
  Cyclic GFR-binding peptide
NAISMLYFDENEKVVLKKYRGGGGGGG

SEQ ID NO: 116870 - protein, 27 aa, Artificial Sequence
  Cyclic GFR-binding peptide
NAISILYFDAANNVVLKKYRGGGGGGG

SEQ ID NO: 116871 - protein, 27 aa, Artificial Sequence
  Cyclic GFR-binding peptide
SPISILYKDKGVVTYLKYHYGGGGGGG

SEQ ID NO: 116872 - protein, 27 aa, Artificial Sequence
  Cyclic GFR-binding peptide
NAISVLYFDDMGVPTLKKYRGGGGGGG

SEQ ID NO: 116873 - protein, 27 aa, Artificial Sequence
  Cyclic GFR-binding peptide
NAISILYFVGRKPKVLKKYRGGGGGGG

SEQ ID NO: 116874 - protein, 27 aa, Artificial Sequence
  Cyclic GFR-binding peptide
SPISILYKDAANNVVLKYHYGGGGGGG

SEQ ID NO: 116875 - protein, 27 aa, Artificial Sequence
  Cyclic GFR-binding peptide
SPISVLYKDDSSNVILKYHYGGGGGGG

SEQ ID NO: 116876 - protein, 27 aa, Artificial Sequence
  Cyclic GFR-binding peptide
NAISVLYFDSSNNVILKKYRGGGGGGG

SEQ ID NO: 116877 - protein, 27 aa, Artificial Sequence
  Cyclic GFR-binding peptide
NAISILYFDKGVVTYLKKYRGGGGGGG

SEQ ID NO: 116878 - protein, 27 aa, Artificial Sequence
  Cyclic GFR-binding peptide
SPISILYIDAANNVVYKQYEGGGGGGG

SEQ ID NO: 116879 - protein, 27 aa, Artificial Sequence
  Cyclic GFR-binding peptide
NAISVLYFDDSSNVILKKYRGGGGGGG

SEQ ID NO: 116880 - protein, 27 aa, Artificial Sequence
  Cyclic GFR-binding peptide
EPISVLYLDSSNNVIKFKYEGGGGGGG

SEQ ID NO: 116881 - protein, 27 aa, Artificial Sequence
  Cyclic GFR-binding peptide
SPISILYIVGRTPKVYKQYEGGGGGGG

SEQ ID NO: 116882 - protein, 27 aa, Artificial Sequence
  Cyclic GFR-binding peptide
SPISVLYIDDSSNVIYKQYEGGGGGGG

SEQ ID NO: 116883 - protein, 27 aa, Artificial Sequence
  Cyclic GFR-binding peptide
SPISVLYKDDMGVPTLKYHYGGGGGGG

SEQ ID NO: 116884 - protein, 27 aa, Artificial Sequence
  Cyclic GFR-binding peptide
SPISVLYKDSSNNVILKYHYGGGGGGG

SEQ ID NO: 116885 - protein, 27 aa, Artificial Sequence
  Cyclic GFR-binding peptide
EPISVLYLDDSSNVIKFKYEGGGGGGG

SEQ ID NO: 116886 - protein, 27 aa, Artificial Sequence
  Cyclic GFR-binding peptide
SPISILYKVGRTPKVLKYHYGGGGGGG

SEQ ID NO: 116887 - protein, 27 aa, Artificial Sequence
  Cyclic GFR-binding peptide
EPISILYLVGRKPKVKFKYEGGGGGGG

SEQ ID NO: 116888 - protein, 27 aa, Artificial Sequence
  Cyclic GFR-binding peptide
SPISILYIDKGVVTYYKQYEGGGGGGG

SEQ ID NO: 116889 - protein, 27 aa, Artificial Sequence
  Cyclic GFR-binding peptide
EPISMLYLDENEKVVKFKYEGGGGGGG

SEQ ID NO: 116890 - protein, 27 aa, Artificial Sequence
  Cyclic GFR-binding peptide
SPISVLYIDDMGVPTYKQYEGGGGGGG

SEQ ID NO: 116891 - protein, 27 aa, Artificial Sequence
  Cyclic GFR-binding peptide
SPISVLYIDSSNNVIYKQYEGGGGGGG

SEQ ID NO: 116892 - protein, 27 aa, Artificial Sequence
  Cyclic GFR-binding peptide
EPISMLYLDEYDKVVKFKYEGGGGGGG

SEQ ID NO: 116893 - protein, 27 aa, Artificial Sequence
  Cyclic GFR-binding peptide
EPISILYLDKGVVTYKFKYEGGGGGGG

SEQ ID NO: 116894 - protein, 27 aa, Artificial Sequence
  Cyclic GFR-binding peptide
EPISILYLDAANNVVKFKYEGGGGGGG

SEQ ID NO: 116895 - protein, 27 aa, Artificial Sequence
  Cyclic GFR-binding peptide
GGGGGGGPIKGYIIQQKDNFYLMNIPS

SEQ ID NO: 116896 - protein, 27 aa, Artificial Sequence
  Cyclic GFR-binding peptide
GGGGGGGPIKGYVVKDYEDFYLMNIPS

SEQ ID NO: 116897 - protein, 27 aa, Artificial Sequence
  Cyclic GFR-binding peptide
GGGGGGGPIKGYIVNSSDDFYLVNIPS

SEQ ID NO: 116898 - protein, 27 aa, Artificial Sequence
  Cyclic GFR-binding peptide
GGGGGGGPIKGYLLVRGNDFYLMNIPS

SEQ ID NO: 116899 - protein, 27 aa, Artificial Sequence
  Cyclic GFR-binding peptide
GGGGGGGPIKGYVVNNAADFYLINIPS

SEQ ID NO: 116900 - protein, 27 aa, Artificial Sequence
  Cyclic GFR-binding peptide
GGGGGGGPIKGYVVKENEDFYLMNIPS

SEQ ID NO: 116901 - protein, 27 aa, Artificial Sequence
  Cyclic GFR-binding peptide
GGGGGGGPIKGYVVNNASDFYLINIPS

SEQ ID NO: 116902 - protein, 27 aa, Artificial Sequence
  Cyclic GFR-binding peptide
GGGGGGGPIKGYYTVVGKDFYLINIPS

SEQ ID NO: 116903 - protein, 27 aa, Artificial Sequence
  Cyclic GFR-binding peptide
GGGGGGGPIKGYTPVGMDDFYLVNIPS

SEQ ID NO: 116904 - protein, 27 aa, Artificial Sequence
  Cyclic GFR-binding peptide
GGGGGGGPIKGYIVNNSSDFYLVNIPS

SEQ ID NO: 116905 - protein, 27 aa, Artificial Sequence
  Cyclic GFR-binding peptide
SPINMLYFNDKQQIIYGKIPGGGGGGG

SEQ ID NO: 116906 - protein, 27 aa, Artificial Sequence
  Cyclic GFR-binding peptide
SPINMLYFDEYDKVVYGKIPGGGGGGG

SEQ ID NO: 116907 - protein, 27 aa, Artificial Sequence
  Cyclic GFR-binding peptide
SPINVLYFDDSSNVIYGKIPGGGGGGG

SEQ ID NO: 116908 - protein, 27 aa, Artificial Sequence
  Cyclic GFR-binding peptide
SPINMLYFDNGRVLLYGKIPGGGGGGG

SEQ ID NO: 116909 - protein, 27 aa, Artificial Sequence
  Cyclic GFR-binding peptide
SPINILYFDAANNVVYGKIPGGGGGGG

SEQ ID NO: 116910 - protein, 27 aa, Artificial Sequence
  Cyclic GFR-binding peptide
SPINMLYFDENEKVVYGKIPGGGGGGG

SEQ ID NO: 116911 - protein, 27 aa, Artificial Sequence
  Cyclic GFR-binding peptide
SPINILYFDSANNVVYGKIPGGGGGGG

SEQ ID NO: 116912 - protein, 27 aa, Artificial Sequence
  Cyclic GFR-binding peptide
SPINILYFDKGVVTYYGKIPGGGGGGG

SEQ ID NO: 116913 - protein, 27 aa, Artificial Sequence
  Cyclic GFR-binding peptide
SPINVLYFDDMGVPTYGKIPGGGGGGG

SEQ ID NO: 116914 - protein, 27 aa, Artificial Sequence
  Cyclic GFR-binding peptide
SPINVLYFDSSNNVIYGKIPGGGGGGG

SEQ ID NO: 116915 - protein, 27 aa, Artificial Sequence
  Cyclic GFR-binding peptide
GGGGGGGPIKGYIIQQKDNFYLMNIPS

SEQ ID NO: 116916 - protein, 27 aa, Artificial Sequence
  Cyclic GFR-binding peptide
GGGGGGGPIKGYVVKDYEDFYLMNIPS

SEQ ID NO: 116917 - protein, 27 aa, Artificial Sequence
  Cyclic GFR-binding peptide
GGGGGGGPIKGYIVNSSDDFYLVNIPS

SEQ ID NO: 116918 - protein, 27 aa, Artificial Sequence
  Cyclic GFR-binding peptide
GGGGGGGPIKGYLLVRGNDFYLMNIPS

SEQ ID NO: 116919 - protein, 27 aa, Artificial Sequence
  Cyclic GFR-binding peptide
GGGGGGGPIKGYVVNNAADFYLINIPS

SEQ ID NO: 116920 - protein, 27 aa, Artificial Sequence
  Cyclic GFR-binding peptide
GGGGGGGPIKGYVVKENEDFYLMNIPS

SEQ ID NO: 116921 - protein, 27 aa, Artificial Sequence
  Cyclic GFR-binding peptide
GGGGGGGPIKGYVVNNASDFYLINIPS

SEQ ID NO: 116922 - protein, 27 aa, Artificial Sequence
  Cyclic GFR-binding peptide
GGGGGGGPIKGYYTVVGKDFYLINIPS

SEQ ID NO: 116923 - protein, 27 aa, Artificial Sequence
  Cyclic GFR-binding peptide
GGGGGGGPIKGYTPVGMDDFYLVNIPS

SEQ ID NO: 116924 - protein, 27 aa, Artificial Sequence
  Cyclic GFR-binding peptide
GGGGGGGPIKGYIVNNSSDFYLVNIPS

SEQ ID NO: 116925 - protein, 27 aa, Artificial Sequence
  Cyclic GFR-binding peptide
SPINMLYFNDKQQIIYGKIPGGGGGGG

SEQ ID NO: 116926 - protein, 27 aa, Artificial Sequence
  Cyclic GFR-binding peptide
SPINMLYFDEYDKVVYGKIPGGGGGGG

SEQ ID NO: 116927 - protein, 27 aa, Artificial Sequence
  Cyclic GFR-binding peptide
SPINVLYFDDSSNVIYGKIPGGGGGGG

SEQ ID NO: 116928 - protein, 27 aa, Artificial Sequence
  Cyclic GFR-binding peptide
SPINMLYFDNGRVLLYGKIPGGGGGGG

SEQ ID NO: 116929 - protein, 27 aa, Artificial Sequence
  Cyclic GFR-binding peptide
SPINILYFDAANNVVYGKIPGGGGGGG

SEQ ID NO: 116930 - protein, 27 aa, Artificial Sequence
  Cyclic GFR-binding peptide
SPINMLYFDENEKVVYGKIPGGGGGGG

SEQ ID NO: 116931 - protein, 27 aa, Artificial Sequence
  Cyclic GFR-binding peptide
SPINILYFDSANNVVYGKIPGGGGGGG

SEQ ID NO: 116932 - protein, 27 aa, Artificial Sequence
  Cyclic GFR-binding peptide
SPINILYFDKGVVTYYGKIPGGGGGGG

SEQ ID NO: 116933 - protein, 27 aa, Artificial Sequence
  Cyclic GFR-binding peptide
SPINVLYFDDMGVPTYGKIPGGGGGGG

SEQ ID NO: 116934 - protein, 27 aa, Artificial Sequence
  Cyclic GFR-binding peptide
SPINVLYFDSSNNVIYGKIPGGGGGGG

SEQ ID NO: 116935 - protein, 27 aa, Artificial Sequence
  Cyclic GFR-binding peptide
GGGGGGGRYKKLIKPTKGIFYLISIAN

SEQ ID NO: 116936 - protein, 27 aa, Artificial Sequence
  Cyclic GFR-binding peptide
GGGGGGGRYKKLVVKDYEDFYLMSIAN

SEQ ID NO: 116937 - protein, 27 aa, Artificial Sequence
  Cyclic GFR-binding peptide
GGGGGGGRYKKLVKPTRGVFYLISIAN

SEQ ID NO: 116938 - protein, 27 aa, Artificial Sequence
  Cyclic GFR-binding peptide
GGGGGGGRYKKLVVKENEDFYLMSIAN

SEQ ID NO: 116939 - protein, 27 aa, Artificial Sequence
  Cyclic GFR-binding peptide
GGGGGGGRYKKLVKPKRGVFYLISIAN

SEQ ID NO: 116940 - protein, 27 aa, Artificial Sequence
  Cyclic GFR-binding peptide
GGGGGGGRYKKLIVNSSDDFYLVSIAN

SEQ ID NO: 116941 - protein, 27 aa, Artificial Sequence
  Cyclic GFR-binding peptide
GGGGGGGRYKKLVVNNASDFYLISIAN

SEQ ID NO: 116942 - protein, 27 aa, Artificial Sequence
  Cyclic GFR-binding peptide
NAISILYFIGKTPKILKKYRGGGGGGG

SEQ ID NO: 116943 - protein, 27 aa, Artificial Sequence
  Cyclic GFR-binding peptide
NAISMLYFDEYDKVVLKKYRGGGGGGG

SEQ ID NO: 116944 - protein, 27 aa, Artificial Sequence
  Cyclic GFR-binding peptide
NAISILYFVGRTPKVLKKYRGGGGGGG

SEQ ID NO: 116945 - protein, 27 aa, Artificial Sequence
  Cyclic GFR-binding peptide
NAISMLYFDENEKVVLKKYRGGGGGGG

SEQ ID NO: 116946 - protein, 27 aa, Artificial Sequence
  Cyclic GFR-binding peptide
NAISILYFVGRKPKVLKKYRGGGGGGG

SEQ ID NO: 116947 - protein, 27 aa, Artificial Sequence
  Cyclic GFR-binding peptide
NAISVLYFDDSSNVILKKYRGGGGGGG

SEQ ID NO: 116948 - protein, 27 aa, Artificial Sequence
  Cyclic GFR-binding peptide
NAISILYFDSANNVVLKKYRGGGGGGG

SEQ ID NO: 116949 - protein, 27 aa, Artificial Sequence
  Cyclic GFR-binding peptide
GGGGGGGEYQKYVVKENEDIYLMSIPS

SEQ ID NO: 116950 - protein, 27 aa, Artificial Sequence
  Cyclic GFR-binding peptide
GGGGGGGNSLQEVVKDYEDYYLMTLPE

SEQ ID NO: 116951 - protein, 27 aa, Artificial Sequence
  Cyclic GFR-binding peptide
GGGGGGGEYQKYVVKENEDIFLMSIPS

SEQ ID NO: 116952 - protein, 27 aa, Artificial Sequence
  Cyclic GFR-binding peptide
GGGGGGGNSLQEIKPTKGIYYVIPLPE

SEQ ID NO: 116953 - protein, 27 aa, Artificial Sequence
  Cyclic GFR-binding peptide
GGGGGGGNSLQEVKPKRGVYYLITLPE

SEQ ID NO: 116954 - protein, 27 aa, Artificial Sequence
  Cyclic GFR-binding peptide
GGGGGGGEYQKYVVNNAADIYLISIPS

SEQ ID NO: 116955 - protein, 27 aa, Artificial Sequence
  Cyclic GFR-binding peptide
GGGGGGGNSLQEVKPTRGVYYVIPLPE

SEQ ID NO: 116956 - protein, 27 aa, Artificial Sequence
  Cyclic GFR-binding peptide
GGGGGGGEYQKYIVNSSDDIFLVSIPS

SEQ ID NO: 116957 - protein, 27 aa, Artificial Sequence
  Cyclic GFR-binding peptide
GGGGGGGEYQKYVKPTRGVIFLISIPS

SEQ ID NO: 116958 - protein, 27 aa, Artificial Sequence
  Cyclic GFR-binding peptide
GGGGGGGEYQKYVVKDYEDIYLMSIPS

SEQ ID NO: 116959 - protein, 27 aa, Artificial Sequence
  Cyclic GFR-binding peptide
GGGGGGGNSLQEVVKENEDYYLMTLPE

SEQ ID NO: 116960 - protein, 27 aa, Artificial Sequence
  Cyclic GFR-binding peptide
GGGGGGGNSLQEVVNNASDYYLITLPE

SEQ ID NO: 116961 - protein, 27 aa, Artificial Sequence
  Cyclic GFR-binding peptide
GGGGGGGNSLQEVKPKRGVYYVIPLPE

SEQ ID NO: 116962 - protein, 27 aa, Artificial Sequence
  Cyclic GFR-binding peptide
GGGGGGGEYQKYIVNSSDDIYLVSIPS

SEQ ID NO: 116963 - protein, 27 aa, Artificial Sequence
  Cyclic GFR-binding peptide
GGGGGGGNSLQEVVKENEDYYVMPLPE

SEQ ID NO: 116964 - protein, 27 aa, Artificial Sequence
  Cyclic GFR-binding peptide
GGGGGGGEYQKYVVKDYEDIFLMSIPS

SEQ ID NO: 116965 - protein, 27 aa, Artificial Sequence
  Cyclic GFR-binding peptide
GGGGGGGNSLQEVVNNASDYYVIPLPE

SEQ ID NO: 116966 - protein, 27 aa, Artificial Sequence
  Cyclic GFR-binding peptide
GGGGGGGEYQKYVVNNASDIYLISIPS

SEQ ID NO: 116967 - protein, 27 aa, Artificial Sequence
  Cyclic GFR-binding peptide
GGGGGGGNSLQEVKPTRGVYYLITLPE

SEQ ID NO: 116968 - protein, 27 aa, Artificial Sequence
  Cyclic GFR-binding peptide
GGGGGGGEYQKYYTVVGKDIYLISIPS

SEQ ID NO: 116969 - protein, 27 aa, Artificial Sequence
  Cyclic GFR-binding peptide
GGGGGGGEYQKYIIQQKDNIYLMSIPS

SEQ ID NO: 116970 - protein, 27 aa, Artificial Sequence
  Cyclic GFR-binding peptide
GGGGGGGEYQKYTPVGMDDIYLVSIPS

SEQ ID NO: 116971 - protein, 27 aa, Artificial Sequence
  Cyclic GFR-binding peptide
GGGGGGGEYQKYIKPTKGIIFLISIPS

SEQ ID NO: 116972 - protein, 27 aa, Artificial Sequence
  Cyclic GFR-binding peptide
GGGGGGGEYQKYIVNNSSDIYLVSIPS

SEQ ID NO: 116973 - protein, 27 aa, Artificial Sequence
  Cyclic GFR-binding peptide
GGGGGGGNSLQEIKPTKGIYYLITLPE

SEQ ID NO: 116974 - protein, 27 aa, Artificial Sequence
  Cyclic GFR-binding peptide
GGGGGGGEYQKYVVNNASDIFLISIPS

SEQ ID NO: 116975 - protein, 27 aa, Artificial Sequence
  Cyclic GFR-binding peptide
GGGGGGGEYQKYVKPKRGVIFLISIPS

SEQ ID NO: 116976 - protein, 27 aa, Artificial Sequence
  Cyclic GFR-binding peptide
GGGGGGGNSLQEIVNSSDDYYVVPLPE

SEQ ID NO: 116977 - protein, 27 aa, Artificial Sequence
  Cyclic GFR-binding peptide
GGGGGGGNSLQEVVKDYEDYYVMPLPE

SEQ ID NO: 116978 - protein, 27 aa, Artificial Sequence
  Cyclic GFR-binding peptide
GGGGGGGEYQKYLLVRGNDIYLMSIPS

SEQ ID NO: 116979 - protein, 27 aa, Artificial Sequence
  Cyclic GFR-binding peptide
GGGGGGGNSLQEIVNSSDDYYLVTLPE

SEQ ID NO: 116980 - protein, 27 aa, Artificial Sequence
  Cyclic GFR-binding peptide
SPISMLYIDENEKVVYKQYEGGGGGGG

SEQ ID NO: 116981 - protein, 27 aa, Artificial Sequence
  Cyclic GFR-binding peptide
EPLTMLYYDEYDKVVEQLSNGGGGGGG

SEQ ID NO: 116982 - protein, 27 aa, Artificial Sequence
  Cyclic GFR-binding peptide
SPISMLFIDENEKVVYKQYEGGGGGGG

SEQ ID NO: 116983 - protein, 27 aa, Artificial Sequence
  Cyclic GFR-binding peptide
EPLPIVYYIGKTPKIEQLSNGGGGGGG

SEQ ID NO: 116984 - protein, 27 aa, Artificial Sequence
  Cyclic GFR-binding peptide
EPLTILYYVGRKPKVEQLSNGGGGGGG

SEQ ID NO: 116985 - protein, 27 aa, Artificial Sequence
  Cyclic GFR-binding peptide
SPISILYIDAANNVVYKQYEGGGGGGG

SEQ ID NO: 116986 - protein, 27 aa, Artificial Sequence
  Cyclic GFR-binding peptide
EPLPIVYYVGRTPKVEQLSNGGGGGGG

SEQ ID NO: 116987 - protein, 27 aa, Artificial Sequence
  Cyclic GFR-binding peptide
SPISVLFIDDSSNVIYKQYEGGGGGGG

SEQ ID NO: 116988 - protein, 27 aa, Artificial Sequence
  Cyclic GFR-binding peptide
SPISILFIVGRTPKVYKQYEGGGGGGG

SEQ ID NO: 116989 - protein, 27 aa, Artificial Sequence
  Cyclic GFR-binding peptide
SPISMLYIDEYDKVVYKQYEGGGGGGG

SEQ ID NO: 116990 - protein, 27 aa, Artificial Sequence
  Cyclic GFR-binding peptide
EPLTMLYYDENEKVVEQLSNGGGGGGG

SEQ ID NO: 116991 - protein, 27 aa, Artificial Sequence
  Cyclic GFR-binding peptide
EPLTILYYDSANNVVEQLSNGGGGGGG

SEQ ID NO: 116992 - protein, 27 aa, Artificial Sequence
  Cyclic GFR-binding peptide
EPLPIVYYVGRKPKVEQLSNGGGGGGG

SEQ ID NO: 116993 - protein, 27 aa, Artificial Sequence
  Cyclic GFR-binding peptide
SPISVLYIDDSSNVIYKQYEGGGGGGG

SEQ ID NO: 116994 - protein, 27 aa, Artificial Sequence
  Cyclic GFR-binding peptide
EPLPMVYYDENEKVVEQLSNGGGGGGG

SEQ ID NO: 116995 - protein, 27 aa, Artificial Sequence
  Cyclic GFR-binding peptide
SPISMLFIDEYDKVVYKQYEGGGGGGG

SEQ ID NO: 116996 - protein, 27 aa, Artificial Sequence
  Cyclic GFR-binding peptide
EPLPIVYYDSANNVVEQLSNGGGGGGG

SEQ ID NO: 116997 - protein, 27 aa, Artificial Sequence
  Cyclic GFR-binding peptide
SPISILYIDSANNVVYKQYEGGGGGGG

SEQ ID NO: 116998 - protein, 27 aa, Artificial Sequence
  Cyclic GFR-binding peptide
EPLTILYYVGRTPKVEQLSNGGGGGGG

SEQ ID NO: 116999 - protein, 27 aa, Artificial Sequence
  Cyclic GFR-binding peptide
SPISILYIDKGVVTYYKQYEGGGGGGG

SEQ ID NO: 117000 - protein, 27 aa, Artificial Sequence
  Cyclic GFR-binding peptide
SPISMLYINDKQQIIYKQYEGGGGGGG

SEQ ID NO: 117001 - protein, 27 aa, Artificial Sequence
  Cyclic GFR-binding peptide
SPISVLYIDDMGVPTYKQYEGGGGGGG

SEQ ID NO: 117002 - protein, 27 aa, Artificial Sequence
  Cyclic GFR-binding peptide
SPISILFIIGKTPKIYKQYEGGGGGGG

SEQ ID NO: 117003 - protein, 27 aa, Artificial Sequence
  Cyclic GFR-binding peptide
SPISVLYIDSSNNVIYKQYEGGGGGGG

SEQ ID NO: 117004 - protein, 27 aa, Artificial Sequence
  Cyclic GFR-binding peptide
EPLTILYYIGKTPKIEQLSNGGGGGGG

SEQ ID NO: 117005 - protein, 27 aa, Artificial Sequence
  Cyclic GFR-binding peptide
SPISILFIDSANNVVYKQYEGGGGGGG

SEQ ID NO: 117006 - protein, 27 aa, Artificial Sequence
  Cyclic GFR-binding peptide
SPISILFIVGRKPKVYKQYEGGGGGGG

SEQ ID NO: 117007 - protein, 27 aa, Artificial Sequence
  Cyclic GFR-binding peptide
EPLPVVYYDDSSNVIEQLSNGGGGGGG

SEQ ID NO: 117008 - protein, 27 aa, Artificial Sequence
  Cyclic GFR-binding peptide
EPLPMVYYDEYDKVVEQLSNGGGGGGG

SEQ ID NO: 117009 - protein, 27 aa, Artificial Sequence
  Cyclic GFR-binding peptide
SPISMLYIDNGRVLLYKQYEGGGGGGG

SEQ ID NO: 117010 - protein, 27 aa, Artificial Sequence
  Cyclic GFR-binding peptide
EPLTVLYYDDSSNVIEQLSNGGGGGGG

SEQ ID NO: 117011 - protein, 27 aa, Artificial Sequence
  Cyclic GFR-binding peptide
GGGGGGGPYVKLVVKENEDFFLMSLSS

SEQ ID NO: 117012 - protein, 29 aa, Artificial Sequence
  Cyclic GFR-binding peptide
GGGGGGGPYVKLHQGQHPKIRFFLMSLSS

SEQ ID NO: 117013 - protein, 27 aa, Artificial Sequence
  Cyclic GFR-binding peptide
GGGGGGGPYVKLVVNKNEDFFLISLSS

SEQ ID NO: 117014 - protein, 27 aa, Artificial Sequence
  Cyclic GFR-binding peptide
GGGGGGGPYVKLVKPKRGVLFFISLSS

SEQ ID NO: 117015 - protein, 27 aa, Artificial Sequence
  Cyclic GFR-binding peptide
GGGGGGGPYVKLVVNNAADFFLISLSS

SEQ ID NO: 117016 - protein, 27 aa, Artificial Sequence
  Cyclic GFR-binding peptide
GGGGGGGPYVKLIVNNSSDFFLVSLSS

SEQ ID NO: 117017 - protein, 27 aa, Artificial Sequence
  Cyclic GFR-binding peptide
GGGGGGGPYVKLIIQQKDNFFLMSLSS

SEQ ID NO: 117018 - protein, 27 aa, Artificial Sequence
  Cyclic GFR-binding peptide
GGGGGGGPYVKLLLVRGNDFFLMSLSS

SEQ ID NO: 117019 - protein, 27 aa, Artificial Sequence
  Cyclic GFR-binding peptide
GGGGGGGPYVKLVKPTRGVLFFISLSS

SEQ ID NO: 117020 - protein, 27 aa, Artificial Sequence
  Cyclic GFR-binding peptide
GGGGGGGPYVKLVVNNASDFFLISLSS

SEQ ID NO: 117021 - protein, 27 aa, Artificial Sequence
  Cyclic GFR-binding peptide
GGGGGGGPYVKLIKPTKGILFFISLSS

SEQ ID NO: 117022 - protein, 27 aa, Artificial Sequence
  Cyclic GFR-binding peptide
GGGGGGGPYVKLTPVGMDDFFLVSLSS

SEQ ID NO: 117023 - protein, 27 aa, Artificial Sequence
  Cyclic GFR-binding peptide
GGGGGGGPYVKLYTVVGKDFFLISLSS

SEQ ID NO: 117024 - protein, 27 aa, Artificial Sequence
  Cyclic GFR-binding peptide
GGGGGGGPYVKLVVKDYEDFFLMSLSS

SEQ ID NO: 117025 - protein, 27 aa, Artificial Sequence
  Cyclic GFR-binding peptide
GGGGGGGPYVKLIVNSSDDFFLVSLSS

SEQ ID NO: 117026 - protein, 29 aa, Artificial Sequence
  Cyclic GFR-binding peptide
GGGGGGGPYVKLLKPKKRVYEFFLVSLSS

SEQ ID NO: 117027 - protein, 27 aa, Artificial Sequence
  Cyclic GFR-binding peptide
SSLSMLFFDENEKVVLKVYPGGGGGGG

SEQ ID NO: 117028 - protein, 29 aa, Artificial Sequence
  Cyclic GFR-binding peptide
SSLSMLFFRIKPHQGQHLKVYPGGGGGGG

SEQ ID NO: 117029 - protein, 27 aa, Artificial Sequence
  Cyclic GFR-binding peptide
SSLSILFFDENKNVVLKVYPGGGGGGG

SEQ ID NO: 117030 - protein, 27 aa, Artificial Sequence
  Cyclic GFR-binding peptide
SSLSILFFVGRKPKVLKVYPGGGGGGG

SEQ ID NO: 117031 - protein, 27 aa, Artificial Sequence
  Cyclic GFR-binding peptide
SSLSILFFDAANNVVLKVYPGGGGGGG

SEQ ID NO: 117032 - protein, 27 aa, Artificial Sequence
  Cyclic GFR-binding peptide
SSLSVLFFDSSNNVILKVYPGGGGGGG

SEQ ID NO: 117033 - protein, 27 aa, Artificial Sequence
  Cyclic GFR-binding peptide
SSLSMLFFNDKQQIILKVYPGGGGGGG

SEQ ID NO: 117034 - protein, 27 aa, Artificial Sequence
  Cyclic GFR-binding peptide
SSLSMLFFDNGRVLLLKVYPGGGGGGG

SEQ ID NO: 117035 - protein, 27 aa, Artificial Sequence
  Cyclic GFR-binding peptide
SSLSILFFVGRTPKVLKVYPGGGGGGG

SEQ ID NO: 117036 - protein, 27 aa, Artificial Sequence
  Cyclic GFR-binding peptide
SSLSILFFDSANNVVLKVYPGGGGGGG

SEQ ID NO: 117037 - protein, 27 aa, Artificial Sequence
  Cyclic GFR-binding peptide
SSLSILFFIGKTPKILKVYPGGGGGGG

SEQ ID NO: 117038 - protein, 27 aa, Artificial Sequence
  Cyclic GFR-binding peptide
SSLSVLFFDDMGVPTLKVYPGGGGGGG

SEQ ID NO: 117039 - protein, 27 aa, Artificial Sequence
  Cyclic GFR-binding peptide
SSLSILFFDKGVVTYLKVYPGGGGGGG

SEQ ID NO: 117040 - protein, 27 aa, Artificial Sequence
  Cyclic GFR-binding peptide
SSLSMLFFDEYDKVVLKVYPGGGGGGG

SEQ ID NO: 117041 - protein, 27 aa, Artificial Sequence
  Cyclic GFR-binding peptide
SSLSVLFFDDSSNVILKVYPGGGGGGG

SEQ ID NO: 117042 - protein, 29 aa, Artificial Sequence
  Cyclic GFR-binding peptide
SSLSVLFFEYVRKKPKLLKVYPGGGGGGG

SEQ ID NO: 117043 - protein, 27 aa, Artificial Sequence
  Cyclic GFR-binding peptide
GGGGGGGNSLQEVVKDYEDYYLMTLPE

SEQ ID NO: 117044 - protein, 27 aa, Artificial Sequence
  Cyclic GFR-binding peptide
GGGGGGGNSLQEIKPTKGIYYVIPLPE

SEQ ID NO: 117045 - protein, 27 aa, Artificial Sequence
  Cyclic GFR-binding peptide
GGGGGGGSMEGIIVNSSDDMIQVTINS

SEQ ID NO: 117046 - protein, 27 aa, Artificial Sequence
  Cyclic GFR-binding peptide
GGGGGGGNSLQEVKPKRGVYYLITLPE

SEQ ID NO: 117047 - protein, 27 aa, Artificial Sequence
  Cyclic GFR-binding peptide
GGGGGGGNSLQEVKPTRGVYYVIPLPE

SEQ ID NO: 117048 - protein, 27 aa, Artificial Sequence
  Cyclic GFR-binding peptide
GGGGGGGVTAKKVVKENEDIKRMQVPR

SEQ ID NO: 117049 - protein, 27 aa, Artificial Sequence
  Cyclic GFR-binding peptide
GGGGGGGNSLQEIVNSSDDYYVVPLPE

SEQ ID NO: 117050 - protein, 29 aa, Artificial Sequence
  Cyclic GFR-binding peptide
GGGGGGGSMEGIHQGQHPKIRMIQMTINS

SEQ ID NO: 117051 - protein, 29 aa, Artificial Sequence
  Cyclic GFR-binding peptide
GGGGGGGVTAKKLKPKKRVYEIKRVQVPR

SEQ ID NO: 117052 - protein, 27 aa, Artificial Sequence
  Cyclic GFR-binding peptide
GGGGGGGSMEGIVVKDYEDMIQMTINS

SEQ ID NO: 117053 - protein, 29 aa, Artificial Sequence
  Cyclic GFR-binding peptide
GGGGGGGVQVEKHQGQHPKIRVKAMKVSR

SEQ ID NO: 117054 - protein, 27 aa, Artificial Sequence
  Cyclic GFR-binding peptide
GGGGGGGVTAKKIKPTKGIIKRIQVPR

SEQ ID NO: 117055 - protein, 27 aa, Artificial Sequence
  Cyclic GFR-binding peptide
GGGGGGGSMEGIVKPTRGVMIQITINS

SEQ ID NO: 117056 - protein, 29 aa, Artificial Sequence
  Cyclic GFR-binding peptide
GGGGGGGNSLQEFIPKKRVIEYYVVPLPE

SEQ ID NO: 117057 - protein, 27 aa, Artificial Sequence
  Cyclic GFR-binding peptide
GGGGGGGVQVEKVKPKRGVVKAIKVSR

SEQ ID NO: 117058 - protein, 27 aa, Artificial Sequence
  Cyclic GFR-binding peptide
GGGGGGGVQVEKVVKENEDVKAMKVSR

SEQ ID NO: 117059 - protein, 27 aa, Artificial Sequence
  Cyclic GFR-binding peptide
GGGGGGGNSLQEVVKENEDYYVMPLPE

SEQ ID NO: 117060 - protein, 27 aa, Artificial Sequence
  Cyclic GFR-binding peptide
GGGGGGGVTAKKIVNSSDDIKRVQVPR

SEQ ID NO: 117061 - protein, 27 aa, Artificial Sequence
  Cyclic GFR-binding peptide
GGGGGGGVQVEKIKPTKGIVKAIKVSR

SEQ ID NO: 117062 - protein, 27 aa, Artificial Sequence
  Cyclic GFR-binding peptide
GGGGGGGNSLQEIKPTKGIYYLITLPE

SEQ ID NO: 117063 - protein, 29 aa, Artificial Sequence
  Cyclic GFR-binding peptide
GGGGGGGNSLQEFIPKKRVIEYYLVTLPE

SEQ ID NO: 117064 - protein, 27 aa, Artificial Sequence
  Cyclic GFR-binding peptide
GGGGGGGVQVEKIVNSSDDVKAVKVSR

SEQ ID NO: 117065 - protein, 27 aa, Artificial Sequence
  Cyclic GFR-binding peptide
GGGGGGGNSLQEIVNSSDDYYLVTLPE

SEQ ID NO: 117066 - protein, 29 aa, Artificial Sequence
  Cyclic GFR-binding peptide
GGGGGGGVQVEKLKPKKRVYEVKAVKVSR

SEQ ID NO: 117067 - protein, 29 aa, Artificial Sequence
  Cyclic GFR-binding peptide
GGGGGGGVQVEKFIPKKRVIEVKAVKVSR

SEQ ID NO: 117068 - protein, 29 aa, Artificial Sequence
  Cyclic GFR-binding peptide
GGGGGGGVTAKKHQGQHPKIRIKRMQVPR

SEQ ID NO: 117069 - protein, 27 aa, Artificial Sequence
  Cyclic GFR-binding peptide
GGGGGGGNSLQEVVKENEDYYLMTLPE

SEQ ID NO: 117070 - protein, 29 aa, Artificial Sequence
  Cyclic GFR-binding peptide
GGGGGGGSMEGIFIPKKRVIEMIQVTINS

SEQ ID NO: 117071 - protein, 27 aa, Artificial Sequence
  Cyclic GFR-binding peptide
GGGGGGGNSLQEVKPKRGVYYVIPLPE

SEQ ID NO: 117072 - protein, 27 aa, Artificial Sequence
  Cyclic GFR-binding peptide
GGGGGGGVTAKKVKPKRGVIKRIQVPR

SEQ ID NO: 117073 - protein, 27 aa, Artificial Sequence
  Cyclic GFR-binding peptide
GGGGGGGNSLQEVKPTRGVYYLITLPE

SEQ ID NO: 117074 - protein, 27 aa, Artificial Sequence
  Cyclic GFR-binding peptide
GGGGGGGVQVEKVKPTRGVVKAIKVSR

SEQ ID NO: 117075 - protein, 29 aa, Artificial Sequence
  Cyclic GFR-binding peptide
GGGGGGGSMEGILKPKKRVYEMIQVTINS

SEQ ID NO: 117076 - protein, 27 aa, Artificial Sequence
  Cyclic GFR-binding peptide
GGGGGGGNSLQEVVKDYEDYYVMPLPE

SEQ ID NO: 117077 - protein, 27 aa, Artificial Sequence
  Cyclic GFR-binding peptide
GGGGGGGVTAKKVKPTRGVIKRIQVPR

SEQ ID NO: 117078 - protein, 29 aa, Artificial Sequence
  Cyclic GFR-binding peptide
GGGGGGGNSLQELKPKKRVYEYYLVTLPE

SEQ ID NO: 117079 - protein, 27 aa, Artificial Sequence
  Cyclic GFR-binding peptide
GGGGGGGSMEGIVKPKRGVMIQITINS

SEQ ID NO: 117080 - protein, 27 aa, Artificial Sequence
  Cyclic GFR-binding peptide
GGGGGGGSMEGIVVKENEDMIQMTINS

SEQ ID NO: 117081 - protein, 27 aa, Artificial Sequence
  Cyclic GFR-binding peptide
GGGGGGGSMEGIIKPTKGIMIQITINS

SEQ ID NO: 117082 - protein, 29 aa, Artificial Sequence
  Cyclic GFR-binding peptide
GGGGGGGNSLQEHQGQHPKIRYYLMTLPE

SEQ ID NO: 117083 - protein, 27 aa, Artificial Sequence
  Cyclic GFR-binding peptide
GGGGGGGVTAKKVVKDYEDIKRMQVPR

SEQ ID NO: 117084 - protein, 29 aa, Artificial Sequence
  Cyclic GFR-binding peptide
GGGGGGGNSLQEHQGQHPKIRYYVMPLPE

SEQ ID NO: 117085 - protein, 29 aa, Artificial Sequence
  Cyclic GFR-binding peptide
GGGGGGGNSLQELKPKKRVYEYYVVPLPE

SEQ ID NO: 117086 - protein, 29 aa, Artificial Sequence
  Cyclic GFR-binding peptide
GGGGGGGVTAKKFIPKKRVIEIKRVQVPR

SEQ ID NO: 117087 - protein, 27 aa, Artificial Sequence
  Cyclic GFR-binding peptide
GGGGGGGVQVEKVVKDYEDVKAMKVSR

SEQ ID NO: 117088 - protein, 27 aa, Artificial Sequence
  Cyclic GFR-binding peptide
EPLTMLYYDEYDKVVEQLSNGGGGGGG

SEQ ID NO: 117089 - protein, 27 aa, Artificial Sequence
  Cyclic GFR-binding peptide
EPLPIVYYIGKTPKIEQLSNGGGGGGG

SEQ ID NO: 117090 - protein, 27 aa, Artificial Sequence
  Cyclic GFR-binding peptide
SNITVQIMDDSSNVIIGEMSGGGGGGG

SEQ ID NO: 117091 - protein, 27 aa, Artificial Sequence
  Cyclic GFR-binding peptide
EPLTILYYVGRKPKVEQLSNGGGGGGG

SEQ ID NO: 117092 - protein, 27 aa, Artificial Sequence
  Cyclic GFR-binding peptide
EPLPIVYYVGRTPKVEQLSNGGGGGGG

SEQ ID NO: 117093 - protein, 27 aa, Artificial Sequence
  Cyclic GFR-binding peptide
RPVQMRKIDENEKVVKKATVGGGGGGG

SEQ ID NO: 117094 - protein, 27 aa, Artificial Sequence
  Cyclic GFR-binding peptide
EPLPVVYYDDSSNVIEQLSNGGGGGGG

SEQ ID NO: 117095 - protein, 29 aa, Artificial Sequence
  Cyclic GFR-binding peptide
SNITMQIMRIKPHQGQHIGEMSGGGGGGG

SEQ ID NO: 117096 - protein, 29 aa, Artificial Sequence
  Cyclic GFR-binding peptide
RPVQVRKIEYVRKKPKLKKATVGGGGGGG

SEQ ID NO: 117097 - protein, 27 aa, Artificial Sequence
  Cyclic GFR-binding peptide
SNITMQIMDEYDKVVIGEMSGGGGGGG

SEQ ID NO: 117098 - protein, 29 aa, Artificial Sequence
  Cyclic GFR-binding peptide
RSVKMAKVRIKPHQGQHKEVQVGGGGGGG

SEQ ID NO: 117099 - protein, 27 aa, Artificial Sequence
  Cyclic GFR-binding peptide
RPVQIRKIIGKTPKIKKATVGGGGGGG

SEQ ID NO: 117100 - protein, 27 aa, Artificial Sequence
  Cyclic GFR-binding peptide
SNITIQIMVGRTPKVIGEMSGGGGGGG

SEQ ID NO: 117101 - protein, 29 aa, Artificial Sequence
  Cyclic GFR-binding peptide
EPLPVVYYEIVRKKPIFEQLSNGGGGGGG

SEQ ID NO: 117102 - protein, 27 aa, Artificial Sequence
  Cyclic GFR-binding peptide
RSVKIAKVVGRKPKVKEVQVGGGGGGG

SEQ ID NO: 117103 - protein, 27 aa, Artificial Sequence
  Cyclic GFR-binding peptide
RSVKMAKVDENEKVVKEVQVGGGGGGG

SEQ ID NO: 117104 - protein, 27 aa, Artificial Sequence
  Cyclic GFR-binding peptide
EPLPMVYYDENEKVVEQLSNGGGGGGG

SEQ ID NO: 117105 - protein, 27 aa, Artificial Sequence
  Cyclic GFR-binding peptide
RPVQVRKIDDSSNVIKKATVGGGGGGG

SEQ ID NO: 117106 - protein, 27 aa, Artificial Sequence
  Cyclic GFR-binding peptide
RSVKIAKVIGKTPKIKEVQVGGGGGGG

SEQ ID NO: 117107 - protein, 27 aa, Artificial Sequence
  Cyclic GFR-binding peptide
EPLTILYYIGKTPKIEQLSNGGGGGGG

SEQ ID NO: 117108 - protein, 29 aa, Artificial Sequence
  Cyclic GFR-binding peptide
EPLTVLYYEIVRKKPIFEQLSNGGGGGGG

SEQ ID NO: 117109 - protein, 27 aa, Artificial Sequence
  Cyclic GFR-binding peptide
RSVKVAKVDDSSNVIKEVQVGGGGGGG

SEQ ID NO: 117110 - protein, 27 aa, Artificial Sequence
  Cyclic GFR-binding peptide
EPLTVLYYDDSSNVIEQLSNGGGGGGG

SEQ ID NO: 117111 - protein, 29 aa, Artificial Sequence
  Cyclic GFR-binding peptide
RSVKVAKVEYVRKKPKLKEVQVGGGGGGG

SEQ ID NO: 117112 - protein, 29 aa, Artificial Sequence
  Cyclic GFR-binding peptide
RSVKVAKVEIVRKKPIFKEVQVGGGGGGG

SEQ ID NO: 117113 - protein, 29 aa, Artificial Sequence
  Cyclic GFR-binding peptide
RPVQMRKIRIKPHQGQHKKATVGGGGGGG

SEQ ID NO: 117114 - protein, 27 aa, Artificial Sequence
  Cyclic GFR-binding peptide
EPLTMLYYDENEKVVEQLSNGGGGGGG

SEQ ID NO: 117115 - protein, 29 aa, Artificial Sequence
  Cyclic GFR-binding peptide
SNITVQIMEIVRKKPIFIGEMSGGGGGGG

SEQ ID NO: 117116 - protein, 27 aa, Artificial Sequence
  Cyclic GFR-binding peptide
EPLPIVYYVGRKPKVEQLSNGGGGGGG

SEQ ID NO: 117117 - protein, 27 aa, Artificial Sequence
  Cyclic GFR-binding peptide
RPVQIRKIVGRKPKVKKATVGGGGGGG

SEQ ID NO: 117118 - protein, 27 aa, Artificial Sequence
  Cyclic GFR-binding peptide
EPLTILYYVGRTPKVEQLSNGGGGGGG

SEQ ID NO: 117119 - protein, 27 aa, Artificial Sequence
  Cyclic GFR-binding peptide
RSVKIAKVVGRTPKVKEVQVGGGGGGG

SEQ ID NO: 117120 - protein, 29 aa, Artificial Sequence
  Cyclic GFR-binding peptide
SNITVQIMEYVRKKPKLIGEMSGGGGGGG

SEQ ID NO: 117121 - protein, 27 aa, Artificial Sequence
  Cyclic GFR-binding peptide
EPLPMVYYDEYDKVVEQLSNGGGGGGG

SEQ ID NO: 117122 - protein, 27 aa, Artificial Sequence
  Cyclic GFR-binding peptide
RPVQIRKIVGRTPKVKKATVGGGGGGG

SEQ ID NO: 117123 - protein, 29 aa, Artificial Sequence
  Cyclic GFR-binding peptide
EPLTVLYYEYVRKKPKLEQLSNGGGGGGG

SEQ ID NO: 117124 - protein, 27 aa, Artificial Sequence
  Cyclic GFR-binding peptide
SNITIQIMVGRKPKVIGEMSGGGGGGG

SEQ ID NO: 117125 - protein, 27 aa, Artificial Sequence
  Cyclic GFR-binding peptide
SNITMQIMDENEKVVIGEMSGGGGGGG

SEQ ID NO: 117126 - protein, 27 aa, Artificial Sequence
  Cyclic GFR-binding peptide
SNITIQIMIGKTPKIIGEMSGGGGGGG

SEQ ID NO: 117127 - protein, 29 aa, Artificial Sequence
  Cyclic GFR-binding peptide
EPLTMLYYRIKPHQGQHEQLSNGGGGGGG

SEQ ID NO: 117128 - protein, 27 aa, Artificial Sequence
  Cyclic GFR-binding peptide
RPVQMRKIDEYDKVVKKATVGGGGGGG

SEQ ID NO: 117129 - protein, 29 aa, Artificial Sequence
  Cyclic GFR-binding peptide
EPLPMVYYRIKPHQGQHEQLSNGGGGGGG

SEQ ID NO: 117130 - protein, 29 aa, Artificial Sequence
  Cyclic GFR-binding peptide
EPLPVVYYEYVRKKPKLEQLSNGGGGGGG

SEQ ID NO: 117131 - protein, 29 aa, Artificial Sequence
  Cyclic GFR-binding peptide
RPVQVRKIEIVRKKPIFKKATVGGGGGGG

SEQ ID NO: 117132 - protein, 27 aa, Artificial Sequence
  Cyclic GFR-binding peptide
RSVKMAKVDEYDKVVKEVQVGGGGGGG

SEQ ID NO: 117133 - protein, 27 aa, Artificial Sequence
  Cyclic GFR-binding peptide
GGGGGGGRYKKLIIQQKDNFYLMSIAN

SEQ ID NO: 117134 - protein, 27 aa, Artificial Sequence
  Cyclic GFR-binding peptide
GGGGGGGRYKKLIVNNSSDFYLVSIAN

SEQ ID NO: 117135 - protein, 27 aa, Artificial Sequence
  Cyclic GFR-binding peptide
GGGGGGGRYKKLYTVVGKDFYLISIAN

SEQ ID NO: 117136 - protein, 27 aa, Artificial Sequence
  Cyclic GFR-binding peptide
GGGGGGGRYKKLIVNSSDDFYLVSIAN

SEQ ID NO: 117137 - protein, 27 aa, Artificial Sequence
  Cyclic GFR-binding peptide
GGGGGGGRYKKLVVKDYEDFYLMSIAN

SEQ ID NO: 117138 - protein, 27 aa, Artificial Sequence
  Cyclic GFR-binding peptide
GGGGGGGRYKKLLLVRGNDFYLMSIAN

SEQ ID NO: 117139 - protein, 27 aa, Artificial Sequence
  Cyclic GFR-binding peptide
GGGGGGGRYKKLVVKENEDFYLMSIAN

SEQ ID NO: 117140 - protein, 27 aa, Artificial Sequence
  Cyclic GFR-binding peptide
GGGGGGGRYKKLVVNNAADFYLISIAN

SEQ ID NO: 117141 - protein, 27 aa, Artificial Sequence
  Cyclic GFR-binding peptide
GGGGGGGRYKKLTPVGMDDFYLVSIAN

SEQ ID NO: 117142 - protein, 27 aa, Artificial Sequence
  Cyclic GFR-binding peptide
GGGGGGGRYKKLVVNNASDFYLISIAN

SEQ ID NO: 117143 - protein, 27 aa, Artificial Sequence
  Cyclic GFR-binding peptide
NAISMLYFNDKQQIILKKYRGGGGGGG

SEQ ID NO: 117144 - protein, 27 aa, Artificial Sequence
  Cyclic GFR-binding peptide
NAISVLYFDSSNNVILKKYRGGGGGGG

SEQ ID NO: 117145 - protein, 27 aa, Artificial Sequence
  Cyclic GFR-binding peptide
NAISILYFDKGVVTYLKKYRGGGGGGG

SEQ ID NO: 117146 - protein, 27 aa, Artificial Sequence
  Cyclic GFR-binding peptide
NAISVLYFDDSSNVILKKYRGGGGGGG

SEQ ID NO: 117147 - protein, 27 aa, Artificial Sequence
  Cyclic GFR-binding peptide
NAISMLYFDEYDKVVLKKYRGGGGGGG

SEQ ID NO: 117148 - protein, 27 aa, Artificial Sequence
  Cyclic GFR-binding peptide
NAISMLYFDNGRVLLLKKYRGGGGGGG

SEQ ID NO: 117149 - protein, 27 aa, Artificial Sequence
  Cyclic GFR-binding peptide
NAISMLYFDENEKVVLKKYRGGGGGGG

SEQ ID NO: 117150 - protein, 27 aa, Artificial Sequence
  Cyclic GFR-binding peptide
NAISILYFDAANNVVLKKYRGGGGGGG

SEQ ID NO: 117151 - protein, 27 aa, Artificial Sequence
  Cyclic GFR-binding peptide
NAISVLYFDDMGVPTLKKYRGGGGGGG

SEQ ID NO: 117152 - protein, 27 aa, Artificial Sequence
  Cyclic GFR-binding peptide
NAISILYFDSANNVVLKKYRGGGGGGG

SEQ ID NO: 117153 - protein, 27 aa, Artificial Sequence
  Cyclic GFR-binding peptide
GGGGGGGEYKFKVKPTRGVLYLISIPE

SEQ ID NO: 117154 - protein, 27 aa, Artificial Sequence
  Cyclic GFR-binding peptide
GGGGGGGYHYKLVVKDYEDKYLMSIPS

SEQ ID NO: 117155 - protein, 27 aa, Artificial Sequence
  Cyclic GFR-binding peptide
GGGGGGGEYKFKTPVGMDDLYLVSIPE

SEQ ID NO: 117156 - protein, 27 aa, Artificial Sequence
  Cyclic GFR-binding peptide
GGGGGGGRYKKLVVKDYEDFYLMSIAN

SEQ ID NO: 117157 - protein, 27 aa, Artificial Sequence
  Cyclic GFR-binding peptide
GGGGGGGRHKRLVKPKRGVYYLISTAS

SEQ ID NO: 117158 - protein, 27 aa, Artificial Sequence
  Cyclic GFR-binding peptide
GGGGGGGYHYKLVKPKRGVKYLISIPS

SEQ ID NO: 117159 - protein, 27 aa, Artificial Sequence
  Cyclic GFR-binding peptide
GGGGGGGEYKFKIKPTKGILYLISIPE

SEQ ID NO: 117160 - protein, 27 aa, Artificial Sequence
  Cyclic GFR-binding peptide
GGGGGGGEYKFKVVNKNEDLYLISIPE

SEQ ID NO: 117161 - protein, 27 aa, Artificial Sequence
  Cyclic GFR-binding peptide
GGGGGGGPIKGYVKPTRGVFYLINIPS

SEQ ID NO: 117162 - protein, 27 aa, Artificial Sequence
  Cyclic GFR-binding peptide
GGGGGGGPIKGYVVKENEDFYLMNIPS

SEQ ID NO: 117163 - protein, 27 aa, Artificial Sequence
  Cyclic GFR-binding peptide
GGGGGGGYHYKLYTVVGKDKYLISIPS

SEQ ID NO: 117164 - protein, 27 aa, Artificial Sequence
  Cyclic GFR-binding peptide
GGGGGGGEYKFKLLVRGNDLYLMSIPE

SEQ ID NO: 117165 - protein, 27 aa, Artificial Sequence
  Cyclic GFR-binding peptide
GGGGGGGRYKKLVKPKRGVFYLISIAN

SEQ ID NO: 117166 - protein, 27 aa, Artificial Sequence
  Cyclic GFR-binding peptide
GGGGGGGPIKGYTPVGMDDFYLVNIPS

SEQ ID NO: 117167 - protein, 27 aa, Artificial Sequence
  Cyclic GFR-binding peptide
GGGGGGGYHYKLVVNKNEDKYLISIPS

SEQ ID NO: 117168 - protein, 27 aa, Artificial Sequence
  Cyclic GFR-binding peptide
GGGGGGGYHYKLIVNSSDDKYLVSIPS

SEQ ID NO: 117169 - protein, 27 aa, Artificial Sequence
  Cyclic GFR-binding peptide
GGGGGGGPIKGYIVNSSDDFYLVNIPS

SEQ ID NO: 117170 - protein, 27 aa, Artificial Sequence
  Cyclic GFR-binding peptide
GGGGGGGRYKKLYTVVGKDFYLISIAN

SEQ ID NO: 117171 - protein, 27 aa, Artificial Sequence
  Cyclic GFR-binding peptide
GGGGGGGRHKRLLLVRGNDYYLMSTAS

SEQ ID NO: 117172 - protein, 27 aa, Artificial Sequence
  Cyclic GFR-binding peptide
GGGGGGGYHYKLLLVRGNDKYLMSIPS

SEQ ID NO: 117173 - protein, 27 aa, Artificial Sequence
  Cyclic GFR-binding peptide
GGGGGGGRYKKLIVNSSDDFYLVSIAN

SEQ ID NO: 117174 - protein, 27 aa, Artificial Sequence
  Cyclic GFR-binding peptide
GGGGGGGRHKRLVVNKNEDYYLISTAS

SEQ ID NO: 117175 - protein, 27 aa, Artificial Sequence
  Cyclic GFR-binding peptide
GGGGGGGRHKRLIKPTKGIYYLISTAS

SEQ ID NO: 117176 - protein, 27 aa, Artificial Sequence
  Cyclic GFR-binding peptide
GGGGGGGPIKGYYTVVGKDFYLINIPS

SEQ ID NO: 117177 - protein, 27 aa, Artificial Sequence
  Cyclic GFR-binding peptide
GGGGGGGYHYKLTPVGMDDKYLVSIPS

SEQ ID NO: 117178 - protein, 27 aa, Artificial Sequence
  Cyclic GFR-binding peptide
GGGGGGGRHKRLIVNNSSDYYLVSTAS

SEQ ID NO: 117179 - protein, 27 aa, Artificial Sequence
  Cyclic GFR-binding peptide
GGGGGGGRYKKLLLVRGNDFYLMSIAN

SEQ ID NO: 117180 - protein, 27 aa, Artificial Sequence
  Cyclic GFR-binding peptide
GGGGGGGYHYKLVKPTRGVKYLISIPS

SEQ ID NO: 117181 - protein, 27 aa, Artificial Sequence
  Cyclic GFR-binding peptide
GGGGGGGRHKRLIVNSSDDYYLVSTAS

SEQ ID NO: 117182 - protein, 27 aa, Artificial Sequence
  Cyclic GFR-binding peptide
GGGGGGGPIKGYLLVRGNDFYLMNIPS

SEQ ID NO: 117183 - protein, 27 aa, Artificial Sequence
  Cyclic GFR-binding peptide
GGGGGGGRYKKLVVNKNEDFYLISIAN

SEQ ID NO: 117184 - protein, 27 aa, Artificial Sequence
  Cyclic GFR-binding peptide
GGGGGGGEYKFKVVKDYEDLYLMSIPE

SEQ ID NO: 117185 - protein, 27 aa, Artificial Sequence
  Cyclic GFR-binding peptide
GGGGGGGPIKGYVVNKNEDFYLINIPS

SEQ ID NO: 117186 - protein, 27 aa, Artificial Sequence
  Cyclic GFR-binding peptide
GGGGGGGPIKGYIKPTKGIFYLINIPS

SEQ ID NO: 117187 - protein, 27 aa, Artificial Sequence
  Cyclic GFR-binding peptide
GGGGGGGEYKFKVVNNAADLYLISIPE

SEQ ID NO: 117188 - protein, 27 aa, Artificial Sequence
  Cyclic GFR-binding peptide
GGGGGGGRHKRLYTVVGKDYYLISTAS

SEQ ID NO: 117189 - protein, 27 aa, Artificial Sequence
  Cyclic GFR-binding peptide
GGGGGGGRYKKLIKPTKGIFYLISIAN

SEQ ID NO: 117190 - protein, 27 aa, Artificial Sequence
  Cyclic GFR-binding peptide
GGGGGGGPIKGYVVKDYEDFYLMNIPS

SEQ ID NO: 117191 - protein, 27 aa, Artificial Sequence
  Cyclic GFR-binding peptide
GGGGGGGEYKFKVVNNASDLYLISIPE

SEQ ID NO: 117192 - protein, 27 aa, Artificial Sequence
  Cyclic GFR-binding peptide
GGGGGGGRYKKLVKPTRGVFYLISIAN

SEQ ID NO: 117193 - protein, 27 aa, Artificial Sequence
  Cyclic GFR-binding peptide
GGGGGGGRHKRLVVKENEDYYLMSTAS

SEQ ID NO: 117194 - protein, 27 aa, Artificial Sequence
  Cyclic GFR-binding peptide
GGGGGGGYHYKLIKPTKGIKYLISIPS

SEQ ID NO: 117195 - protein, 27 aa, Artificial Sequence
  Cyclic GFR-binding peptide
GGGGGGGYHYKLVVKENEDKYLMSIPS

SEQ ID NO: 117196 - protein, 27 aa, Artificial Sequence
  Cyclic GFR-binding peptide
GGGGGGGRHKRLIIQQKDNYYLMSTAS

SEQ ID NO: 117197 - protein, 27 aa, Artificial Sequence
  Cyclic GFR-binding peptide
GGGGGGGRYKKLVVKENEDFYLMSIAN

SEQ ID NO: 117198 - protein, 27 aa, Artificial Sequence
  Cyclic GFR-binding peptide
GGGGGGGRYKKLVVNNAADFYLISIAN

SEQ ID NO: 117199 - protein, 27 aa, Artificial Sequence
  Cyclic GFR-binding peptide
GGGGGGGEYKFKIIQQKDNLYLMSIPE

SEQ ID NO: 117200 - protein, 27 aa, Artificial Sequence
  Cyclic GFR-binding peptide
GGGGGGGRYKKLTPVGMDDFYLVSIAN

SEQ ID NO: 117201 - protein, 27 aa, Artificial Sequence
  Cyclic GFR-binding peptide
GGGGGGGYHYKLVVNNAADKYLISIPS

SEQ ID NO: 117202 - protein, 27 aa, Artificial Sequence
  Cyclic GFR-binding peptide
GGGGGGGPIKGYIVNNSSDFYLVNIPS

SEQ ID NO: 117203 - protein, 27 aa, Artificial Sequence
  Cyclic GFR-binding peptide
GGGGGGGPIKGYVKPKRGVFYLINIPS

SEQ ID NO: 117204 - protein, 27 aa, Artificial Sequence
  Cyclic GFR-binding peptide
GGGGGGGRYKKLIIQQKDNFYLMSIAN

SEQ ID NO: 117205 - protein, 27 aa, Artificial Sequence
  Cyclic GFR-binding peptide
GGGGGGGPIKGYIIQQKDNFYLMNIPS

SEQ ID NO: 117206 - protein, 27 aa, Artificial Sequence
  Cyclic GFR-binding peptide
GGGGGGGRYKKLIVNNSSDFYLVSIAN

SEQ ID NO: 117207 - protein, 27 aa, Artificial Sequence
  Cyclic GFR-binding peptide
GGGGGGGPIKGYVVNNAADFYLINIPS

SEQ ID NO: 117208 - protein, 27 aa, Artificial Sequence
  Cyclic GFR-binding peptide
GGGGGGGRHKRLVKPTRGVYYLISTAS

SEQ ID NO: 117209 - protein, 27 aa, Artificial Sequence
  Cyclic GFR-binding peptide
GGGGGGGEYKFKIVNNSSDLYLVSIPE

SEQ ID NO: 117210 - protein, 27 aa, Artificial Sequence
  Cyclic GFR-binding peptide
GGGGGGGRHKRLVVNNASDYYLISTAS

SEQ ID NO: 117211 - protein, 27 aa, Artificial Sequence
  Cyclic GFR-binding peptide
GGGGGGGRHKRLTPVGMDDYYLVSTAS

SEQ ID NO: 117212 - protein, 27 aa, Artificial Sequence
  Cyclic GFR-binding peptide
GGGGGGGYHYKLIVNNSSDKYLVSIPS

SEQ ID NO: 117213 - protein, 27 aa, Artificial Sequence
  Cyclic GFR-binding peptide
GGGGGGGYHYKLVVNNASDKYLISIPS

SEQ ID NO: 117214 - protein, 27 aa, Artificial Sequence
  Cyclic GFR-binding peptide
GGGGGGGEYKFKIVNSSDDLYLVSIPE

SEQ ID NO: 117215 - protein, 27 aa, Artificial Sequence
  Cyclic GFR-binding peptide
GGGGGGGEYKFKVKPKRGVLYLISIPE

SEQ ID NO: 117216 - protein, 27 aa, Artificial Sequence
  Cyclic GFR-binding peptide
GGGGGGGRHKRLVVKDYEDYYLMSTAS

SEQ ID NO: 117217 - protein, 27 aa, Artificial Sequence
  Cyclic GFR-binding peptide
GGGGGGGEYKFKVVKENEDLYLMSIPE

SEQ ID NO: 117218 - protein, 27 aa, Artificial Sequence
  Cyclic GFR-binding peptide
GGGGGGGEYKFKYTVVGKDLYLISIPE

SEQ ID NO: 117219 - protein, 27 aa, Artificial Sequence
  Cyclic GFR-binding peptide
GGGGGGGPIKGYVVNNASDFYLINIPS

SEQ ID NO: 117220 - protein, 27 aa, Artificial Sequence
  Cyclic GFR-binding peptide
GGGGGGGYHYKLIIQQKDNKYLMSIPS

SEQ ID NO: 117221 - protein, 27 aa, Artificial Sequence
  Cyclic GFR-binding peptide
GGGGGGGRYKKLVVNNASDFYLISIAN

SEQ ID NO: 117222 - protein, 27 aa, Artificial Sequence
  Cyclic GFR-binding peptide
GGGGGGGRHKRLVVNNAADYYLISTAS

SEQ ID NO: 117223 - protein, 27 aa, Artificial Sequence
  Cyclic GFR-binding peptide
EPISILYLVGRTPKVKFKYEGGGGGGG

SEQ ID NO: 117224 - protein, 27 aa, Artificial Sequence
  Cyclic GFR-binding peptide
SPISMLYKDEYDKVVLKYHYGGGGGGG

SEQ ID NO: 117225 - protein, 27 aa, Artificial Sequence
  Cyclic GFR-binding peptide
EPISVLYLDDMGVPTKFKYEGGGGGGG

SEQ ID NO: 117226 - protein, 27 aa, Artificial Sequence
  Cyclic GFR-binding peptide
NAISMLYFDEYDKVVLKKYRGGGGGGG

SEQ ID NO: 117227 - protein, 27 aa, Artificial Sequence
  Cyclic GFR-binding peptide
SATSILYYVGRKPKVLRKHRGGGGGGG

SEQ ID NO: 117228 - protein, 27 aa, Artificial Sequence
  Cyclic GFR-binding peptide
SPISILYKVGRKPKVLKYHYGGGGGGG

SEQ ID NO: 117229 - protein, 27 aa, Artificial Sequence
  Cyclic GFR-binding peptide
EPISILYLIGKTPKIKFKYEGGGGGGG

SEQ ID NO: 117230 - protein, 27 aa, Artificial Sequence
  Cyclic GFR-binding peptide
EPISILYLDENKNVVKFKYEGGGGGGG

SEQ ID NO: 117231 - protein, 27 aa, Artificial Sequence
  Cyclic GFR-binding peptide
SPINILYFVGRTPKVYGKIPGGGGGGG

SEQ ID NO: 117232 - protein, 27 aa, Artificial Sequence
  Cyclic GFR-binding peptide
SPINMLYFDENEKVVYGKIPGGGGGGG

SEQ ID NO: 117233 - protein, 27 aa, Artificial Sequence
  Cyclic GFR-binding peptide
SPISILYKDKGVVTYLKYHYGGGGGGG

SEQ ID NO: 117234 - protein, 27 aa, Artificial Sequence
  Cyclic GFR-binding peptide
EPISMLYLDNGRVLLKFKYEGGGGGGG

SEQ ID NO: 117235 - protein, 27 aa, Artificial Sequence
  Cyclic GFR-binding peptide
NAISILYFVGRKPKVLKKYRGGGGGGG

SEQ ID NO: 117236 - protein, 27 aa, Artificial Sequence
  Cyclic GFR-binding peptide
SPINVLYFDDMGVPTYGKIPGGGGGGG

SEQ ID NO: 117237 - protein, 27 aa, Artificial Sequence
  Cyclic GFR-binding peptide
SPISILYKDENKNVVLKYHYGGGGGGG

SEQ ID NO: 117238 - protein, 27 aa, Artificial Sequence
  Cyclic GFR-binding peptide
SPISVLYKDDSSNVILKYHYGGGGGGG

SEQ ID NO: 117239 - protein, 27 aa, Artificial Sequence
  Cyclic GFR-binding peptide
SPINVLYFDDSSNVIYGKIPGGGGGGG

SEQ ID NO: 117240 - protein, 27 aa, Artificial Sequence
  Cyclic GFR-binding peptide
NAISILYFDKGVVTYLKKYRGGGGGGG

SEQ ID NO: 117241 - protein, 27 aa, Artificial Sequence
  Cyclic GFR-binding peptide
SATSMLYYDNGRVLLLRKHRGGGGGGG

SEQ ID NO: 117242 - protein, 27 aa, Artificial Sequence
  Cyclic GFR-binding peptide
SPISMLYKDNGRVLLLKYHYGGGGGGG

SEQ ID NO: 117243 - protein, 27 aa, Artificial Sequence
  Cyclic GFR-binding peptide
NAISVLYFDDSSNVILKKYRGGGGGGG

SEQ ID NO: 117244 - protein, 27 aa, Artificial Sequence
  Cyclic GFR-binding peptide
SATSILYYDENKNVVLRKHRGGGGGGG

SEQ ID NO: 117245 - protein, 27 aa, Artificial Sequence
  Cyclic GFR-binding peptide
SATSILYYIGKTPKILRKHRGGGGGGG

SEQ ID NO: 117246 - protein, 27 aa, Artificial Sequence
  Cyclic GFR-binding peptide
SPINILYFDKGVVTYYGKIPGGGGGGG

SEQ ID NO: 117247 - protein, 27 aa, Artificial Sequence
  Cyclic GFR-binding peptide
SPISVLYKDDMGVPTLKYHYGGGGGGG

SEQ ID NO: 117248 - protein, 27 aa, Artificial Sequence
  Cyclic GFR-binding peptide
SATSVLYYDSSNNVILRKHRGGGGGGG

SEQ ID NO: 117249 - protein, 27 aa, Artificial Sequence
  Cyclic GFR-binding peptide
NAISMLYFDNGRVLLLKKYRGGGGGGG

SEQ ID NO: 117250 - protein, 27 aa, Artificial Sequence
  Cyclic GFR-binding peptide
SPISILYKVGRTPKVLKYHYGGGGGGG

SEQ ID NO: 117251 - protein, 27 aa, Artificial Sequence
  Cyclic GFR-binding peptide
SATSVLYYDDSSNVILRKHRGGGGGGG

SEQ ID NO: 117252 - protein, 27 aa, Artificial Sequence
  Cyclic GFR-binding peptide
SPINMLYFDNGRVLLYGKIPGGGGGGG

SEQ ID NO: 117253 - protein, 27 aa, Artificial Sequence
  Cyclic GFR-binding peptide
NAISILYFDENKNVVLKKYRGGGGGGG

SEQ ID NO: 117254 - protein, 27 aa, Artificial Sequence
  Cyclic GFR-binding peptide
EPISMLYLDEYDKVVKFKYEGGGGGGG

SEQ ID NO: 117255 - protein, 27 aa, Artificial Sequence
  Cyclic GFR-binding peptide
SPINILYFDENKNVVYGKIPGGGGGGG

SEQ ID NO: 117256 - protein, 27 aa, Artificial Sequence
  Cyclic GFR-binding peptide
SPINILYFIGKTPKIYGKIPGGGGGGG

SEQ ID NO: 117257 - protein, 27 aa, Artificial Sequence
  Cyclic GFR-binding peptide
EPISILYLDAANNVVKFKYEGGGGGGG

SEQ ID NO: 117258 - protein, 27 aa, Artificial Sequence
  Cyclic GFR-binding peptide
SATSILYYDKGVVTYLRKHRGGGGGGG

SEQ ID NO: 117259 - protein, 27 aa, Artificial Sequence
  Cyclic GFR-binding peptide
NAISILYFIGKTPKILKKYRGGGGGGG

SEQ ID NO: 117260 - protein, 27 aa, Artificial Sequence
  Cyclic GFR-binding peptide
SPINMLYFDEYDKVVYGKIPGGGGGGG

SEQ ID NO: 117261 - protein, 27 aa, Artificial Sequence
  Cyclic GFR-binding peptide
EPISILYLDSANNVVKFKYEGGGGGGG

SEQ ID NO: 117262 - protein, 27 aa, Artificial Sequence
  Cyclic GFR-binding peptide
NAISILYFVGRTPKVLKKYRGGGGGGG

SEQ ID NO: 117263 - protein, 27 aa, Artificial Sequence
  Cyclic GFR-binding peptide
SATSMLYYDENEKVVLRKHRGGGGGGG

SEQ ID NO: 117264 - protein, 27 aa, Artificial Sequence
  Cyclic GFR-binding peptide
SPISILYKIGKTPKILKYHYGGGGGGG

SEQ ID NO: 117265 - protein, 27 aa, Artificial Sequence
  Cyclic GFR-binding peptide
SPISMLYKDENEKVVLKYHYGGGGGGG

SEQ ID NO: 117266 - protein, 27 aa, Artificial Sequence
  Cyclic GFR-binding peptide
SATSMLYYNDKQQIILRKHRGGGGGGG

SEQ ID NO: 117267 - protein, 27 aa, Artificial Sequence
  Cyclic GFR-binding peptide
NAISMLYFDENEKVVLKKYRGGGGGGG

SEQ ID NO: 117268 - protein, 27 aa, Artificial Sequence
  Cyclic GFR-binding peptide
NAISILYFDAANNVVLKKYRGGGGGGG

SEQ ID NO: 117269 - protein, 27 aa, Artificial Sequence
  Cyclic GFR-binding peptide
EPISMLYLNDKQQIIKFKYEGGGGGGG

SEQ ID NO: 117270 - protein, 27 aa, Artificial Sequence
  Cyclic GFR-binding peptide
NAISVLYFDDMGVPTLKKYRGGGGGGG

SEQ ID NO: 117271 - protein, 27 aa, Artificial Sequence
  Cyclic GFR-binding peptide
SPISILYKDAANNVVLKYHYGGGGGGG

SEQ ID NO: 117272 - protein, 27 aa, Artificial Sequence
  Cyclic GFR-binding peptide
SPINVLYFDSSNNVIYGKIPGGGGGGG

SEQ ID NO: 117273 - protein, 27 aa, Artificial Sequence
  Cyclic GFR-binding peptide
SPINILYFVGRKPKVYGKIPGGGGGGG

SEQ ID NO: 117274 - protein, 27 aa, Artificial Sequence
  Cyclic GFR-binding peptide
NAISMLYFNDKQQIILKKYRGGGGGGG

SEQ ID NO: 117275 - protein, 27 aa, Artificial Sequence
  Cyclic GFR-binding peptide
SPINMLYFNDKQQIIYGKIPGGGGGGG

SEQ ID NO: 117276 - protein, 27 aa, Artificial Sequence
  Cyclic GFR-binding peptide
NAISVLYFDSSNNVILKKYRGGGGGGG

SEQ ID NO: 117277 - protein, 27 aa, Artificial Sequence
  Cyclic GFR-binding peptide
SPINILYFDAANNVVYGKIPGGGGGGG

SEQ ID NO: 117278 - protein, 27 aa, Artificial Sequence
  Cyclic GFR-binding peptide
SATSILYYVGRTPKVLRKHRGGGGGGG

SEQ ID NO: 117279 - protein, 27 aa, Artificial Sequence
  Cyclic GFR-binding peptide
EPISVLYLDSSNNVIKFKYEGGGGGGG

SEQ ID NO: 117280 - protein, 27 aa, Artificial Sequence
  Cyclic GFR-binding peptide
SATSILYYDSANNVVLRKHRGGGGGGG

SEQ ID NO: 117281 - protein, 27 aa, Artificial Sequence
  Cyclic GFR-binding peptide
SATSVLYYDDMGVPTLRKHRGGGGGGG

SEQ ID NO: 117282 - protein, 27 aa, Artificial Sequence
  Cyclic GFR-binding peptide
SPISVLYKDSSNNVILKYHYGGGGGGG

SEQ ID NO: 117283 - protein, 27 aa, Artificial Sequence
  Cyclic GFR-binding peptide
SPISILYKDSANNVVLKYHYGGGGGGG

SEQ ID NO: 117284 - protein, 27 aa, Artificial Sequence
  Cyclic GFR-binding peptide
EPISVLYLDDSSNVIKFKYEGGGGGGG

SEQ ID NO: 117285 - protein, 27 aa, Artificial Sequence
  Cyclic GFR-binding peptide
EPISILYLVGRKPKVKFKYEGGGGGGG

SEQ ID NO: 117286 - protein, 27 aa, Artificial Sequence
  Cyclic GFR-binding peptide
SATSMLYYDEYDKVVLRKHRGGGGGGG

SEQ ID NO: 117287 - protein, 27 aa, Artificial Sequence
  Cyclic GFR-binding peptide
EPISMLYLDENEKVVKFKYEGGGGGGG

SEQ ID NO: 117288 - protein, 27 aa, Artificial Sequence
  Cyclic GFR-binding peptide
EPISILYLDKGVVTYKFKYEGGGGGGG

SEQ ID NO: 117289 - protein, 27 aa, Artificial Sequence
  Cyclic GFR-binding peptide
SPINILYFDSANNVVYGKIPGGGGGGG

SEQ ID NO: 117290 - protein, 27 aa, Artificial Sequence
  Cyclic GFR-binding peptide
SPISMLYKNDKQQIILKYHYGGGGGGG

SEQ ID NO: 117291 - protein, 27 aa, Artificial Sequence
  Cyclic GFR-binding peptide
NAISILYFDSANNVVLKKYRGGGGGGG

SEQ ID NO: 117292 - protein, 27 aa, Artificial Sequence
  Cyclic GFR-binding peptide
SATSILYYDAANNVVLRKHRGGGGGGG

SEQ ID NO: 117293 - protein, 27 aa, Artificial Sequence
  Cyclic GFR-binding peptide
GGGGGGGSMEGIIIQQKDNMIQMTINS

SEQ ID NO: 117294 - protein, 27 aa, Artificial Sequence
  Cyclic GFR-binding peptide
GGGGGGGSMEGIIVNSSDDMIQVTINS

SEQ ID NO: 117295 - protein, 27 aa, Artificial Sequence
  Cyclic GFR-binding peptide
GGGGGGGSMEGLVKPKRGVMIQITINS

SEQ ID NO: 117296 - protein, 27 aa, Artificial Sequence
  Cyclic GFR-binding peptide
GGGGGGGSMEGLVVNNASDMIQITINS

SEQ ID NO: 117297 - protein, 29 aa, Artificial Sequence
  Cyclic GFR-binding peptide
GGGGGGGSMEGIFIPKKRVIEMIQVTINS

SEQ ID NO: 117298 - protein, 27 aa, Artificial Sequence
  Cyclic GFR-binding peptide
GGGGGGGSMEGILLVRGNDMIQMTINS

SEQ ID NO: 117299 - protein, 29 aa, Artificial Sequence
  Cyclic GFR-binding peptide
GGGGGGGSMEGILKPKKRVYEMIQVTINS

SEQ ID NO: 117300 - protein, 27 aa, Artificial Sequence
  Cyclic GFR-binding peptide
GGGGGGGSMEGLIKPTKGIMIQITINS

SEQ ID NO: 117301 - protein, 27 aa, Artificial Sequence
  Cyclic GFR-binding peptide
GGGGGGGSMEGLIVNSSDDMIQVTINS

SEQ ID NO: 117302 - protein, 29 aa, Artificial Sequence
  Cyclic GFR-binding peptide
GGGGGGGSMEGIHQGQHPKIRMIQMTINS

SEQ ID NO: 117303 - protein, 27 aa, Artificial Sequence
  Cyclic GFR-binding peptide
GGGGGGGSMEGIVVNNASDMIQITINS

SEQ ID NO: 117304 - protein, 29 aa, Artificial Sequence
  Cyclic GFR-binding peptide
GGGGGGGSMEGLLKPKKRVYEMIQVTINS

SEQ ID NO: 117305 - protein, 27 aa, Artificial Sequence
  Cyclic GFR-binding peptide
GGGGGGGSMEGIVKPKRGVMIQITINS

SEQ ID NO: 117306 - protein, 27 aa, Artificial Sequence
  Cyclic GFR-binding peptide
GGGGGGGSMEGIVKPTRGVMIQITINS

SEQ ID NO: 117307 - protein, 27 aa, Artificial Sequence
  Cyclic GFR-binding peptide
GGGGGGGSMEGLVVNNAADMIQITINS

SEQ ID NO: 117308 - protein, 27 aa, Artificial Sequence
  Cyclic GFR-binding peptide
GGGGGGGSMEGLLLVRGNDMIQMTINS

SEQ ID NO: 117309 - protein, 27 aa, Artificial Sequence
  Cyclic GFR-binding peptide
GGGGGGGSMEGIIKPTKGIMIQITINS

SEQ ID NO: 117310 - protein, 27 aa, Artificial Sequence
  Cyclic GFR-binding peptide
GGGGGGGSMEGLIIQQKDNMIQMTINS

SEQ ID NO: 117311 - protein, 29 aa, Artificial Sequence
  Cyclic GFR-binding peptide
GGGGGGGSMEGLHQGQHPKIRMIQMTINS

SEQ ID NO: 117312 - protein, 27 aa, Artificial Sequence
  Cyclic GFR-binding peptide
GGGGGGGSMEGIVVNNAADMIQITINS

SEQ ID NO: 117313 - protein, 29 aa, Artificial Sequence
  Cyclic GFR-binding peptide
GGGGGGGSMEGLFIPKKRVIEMIQVTINS

SEQ ID NO: 117314 - protein, 27 aa, Artificial Sequence
  Cyclic GFR-binding peptide
GGGGGGGSMEGLVKPTRGVMIQITINS

SEQ ID NO: 117315 - protein, 27 aa, Artificial Sequence
  Cyclic GFR-binding peptide
SNITMQIMNDKQQIIIGEMSGGGGGGG

SEQ ID NO: 117316 - protein, 27 aa, Artificial Sequence
  Cyclic GFR-binding peptide
SNITVQIMDDSSNVIIGEMSGGGGGGG

SEQ ID NO: 117317 - protein, 27 aa, Artificial Sequence
  Cyclic GFR-binding peptide
SNITIQIMVGRKPKVLGEMSGGGGGGG

SEQ ID NO: 117318 - protein, 27 aa, Artificial Sequence
  Cyclic GFR-binding peptide
SNITIQIMDSANNVVLGEMSGGGGGGG

SEQ ID NO: 117319 - protein, 29 aa, Artificial Sequence
  Cyclic GFR-binding peptide
SNITVQIMEIVRKKPIFIGEMSGGGGGGG

SEQ ID NO: 117320 - protein, 27 aa, Artificial Sequence
  Cyclic GFR-binding peptide
SNITMQIMDNGRVLLIGEMSGGGGGGG

SEQ ID NO: 117321 - protein, 29 aa, Artificial Sequence
  Cyclic GFR-binding peptide
SNITVQIMEYVRKKPKLIGEMSGGGGGGG

SEQ ID NO: 117322 - protein, 27 aa, Artificial Sequence
  Cyclic GFR-binding peptide
SNITIQIMIGKTPKILGEMSGGGGGGG

SEQ ID NO: 117323 - protein, 27 aa, Artificial Sequence
  Cyclic GFR-binding peptide
SNITVQIMDDSSNVILGEMSGGGGGGG

SEQ ID NO: 117324 - protein, 29 aa, Artificial Sequence
  Cyclic GFR-binding peptide
SNITMQIMRIKPHQGQHIGEMSGGGGGGG

SEQ ID NO: 117325 - protein, 27 aa, Artificial Sequence
  Cyclic GFR-binding peptide
SNITIQIMDSANNVVIGEMSGGGGGGG

SEQ ID NO: 117326 - protein, 29 aa, Artificial Sequence
  Cyclic GFR-binding peptide
SNITVQIMEYVRKKPKLLGEMSGGGGGGG

SEQ ID NO: 117327 - protein, 27 aa, Artificial Sequence
  Cyclic GFR-binding peptide
SNITIQIMVGRKPKVIGEMSGGGGGGG

SEQ ID NO: 117328 - protein, 27 aa, Artificial Sequence
  Cyclic GFR-binding peptide
SNITIQIMVGRTPKVIGEMSGGGGGGG

SEQ ID NO: 117329 - protein, 27 aa, Artificial Sequence
  Cyclic GFR-binding peptide
SNITIQIMDAANNVVLGEMSGGGGGGG

SEQ ID NO: 117330 - protein, 27 aa, Artificial Sequence
  Cyclic GFR-binding peptide
SNITMQIMDNGRVLLLGEMSGGGGGGG

SEQ ID NO: 117331 - protein, 27 aa, Artificial Sequence
  Cyclic GFR-binding peptide
SNITIQIMIGKTPKIIGEMSGGGGGGG

SEQ ID NO: 117332 - protein, 27 aa, Artificial Sequence
  Cyclic GFR-binding peptide
SNITMQIMNDKQQIILGEMSGGGGGGG

SEQ ID NO: 117333 - protein, 29 aa, Artificial Sequence
  Cyclic GFR-binding peptide
SNITMQIMRIKPHQGQHLGEMSGGGGGGG

SEQ ID NO: 117334 - protein, 27 aa, Artificial Sequence
  Cyclic GFR-binding peptide
SNITIQIMDAANNVVIGEMSGGGGGGG

SEQ ID NO: 117335 - protein, 29 aa, Artificial Sequence
  Cyclic GFR-binding peptide
SNITVQIMEIVRKKPIFLGEMSGGGGGGG

SEQ ID NO: 117336 - protein, 27 aa, Artificial Sequence
  Cyclic GFR-binding peptide
SNITIQIMVGRTPKVLGEMSGGGGGGG

SEQ ID NO: 117337 - protein, 27 aa, Artificial Sequence
  Cyclic GFR-binding peptide
GGGGGGGRYKKLIKPTKGIFYLISIAN

SEQ ID NO: 117338 - protein, 27 aa, Artificial Sequence
  Cyclic GFR-binding peptide
GGGGGGGQYNKLVVNKNEDLYLISIAS

SEQ ID NO: 117339 - protein, 27 aa, Artificial Sequence
  Cyclic GFR-binding peptide
GGGGGGGQYNKLVVNNAADLYLISIAS

SEQ ID NO: 117340 - protein, 27 aa, Artificial Sequence
  Cyclic GFR-binding peptide
GGGGGGGQYNKLIVNNSSDLYLVSIAS

SEQ ID NO: 117341 - protein, 27 aa, Artificial Sequence
  Cyclic GFR-binding peptide
GGGGGGGRYKKLVVKDYEDFYLMSIAN

SEQ ID NO: 117342 - protein, 27 aa, Artificial Sequence
  Cyclic GFR-binding peptide
GGGGGGGRYKKLVKPTRGVFYLISIAN

SEQ ID NO: 117343 - protein, 27 aa, Artificial Sequence
  Cyclic GFR-binding peptide
GGGGGGGQYNKLIIQQKDNLYLMSIAS

SEQ ID NO: 117344 - protein, 27 aa, Artificial Sequence
  Cyclic GFR-binding peptide
GGGGGGGQYNKLLLVRGNDLYLMSIAS

SEQ ID NO: 117345 - protein, 27 aa, Artificial Sequence
  Cyclic GFR-binding peptide
GGGGGGGQYNKLVKPTRGVLYLISIAS

SEQ ID NO: 117346 - protein, 27 aa, Artificial Sequence
  Cyclic GFR-binding peptide
GGGGGGGRYKKLVVKENEDFYLMSIAN

SEQ ID NO: 117347 - protein, 27 aa, Artificial Sequence
  Cyclic GFR-binding peptide
GGGGGGGRYKKLVVNNAADFYLISIAN

SEQ ID NO: 117348 - protein, 27 aa, Artificial Sequence
  Cyclic GFR-binding peptide
GGGGGGGQYNKLTPVGMDDLYLVSIAS

SEQ ID NO: 117349 - protein, 27 aa, Artificial Sequence
  Cyclic GFR-binding peptide
GGGGGGGRYKKLTPVGMDDFYLVSIAN

SEQ ID NO: 117350 - protein, 27 aa, Artificial Sequence
  Cyclic GFR-binding peptide
GGGGGGGRYKKLVKPKRGVFYLISIAN

SEQ ID NO: 117351 - protein, 27 aa, Artificial Sequence
  Cyclic GFR-binding peptide
GGGGGGGQYNKLVVKENEDLYLMSIAS

SEQ ID NO: 117352 - protein, 27 aa, Artificial Sequence
  Cyclic GFR-binding peptide
GGGGGGGRYKKLIIQQKDNFYLMSIAN

SEQ ID NO: 117353 - protein, 27 aa, Artificial Sequence
  Cyclic GFR-binding peptide
GGGGGGGQYNKLVKPKRGVLYLISIAS

SEQ ID NO: 117354 - protein, 27 aa, Artificial Sequence
  Cyclic GFR-binding peptide
GGGGGGGRYKKLIVNNSSDFYLVSIAN

SEQ ID NO: 117355 - protein, 27 aa, Artificial Sequence
  Cyclic GFR-binding peptide
GGGGGGGRYKKLYTVVGKDFYLISIAN

SEQ ID NO: 117356 - protein, 27 aa, Artificial Sequence
  Cyclic GFR-binding peptide
GGGGGGGRYKKLIVNSSDDFYLVSIAN

SEQ ID NO: 117357 - protein, 27 aa, Artificial Sequence
  Cyclic GFR-binding peptide
GGGGGGGRYKKLLLVRGNDFYLMSIAN

SEQ ID NO: 117358 - protein, 27 aa, Artificial Sequence
  Cyclic GFR-binding peptide
GGGGGGGQYNKLVVNNASDLYLISIAS

SEQ ID NO: 117359 - protein, 27 aa, Artificial Sequence
  Cyclic GFR-binding peptide
GGGGGGGQYNKLIKPTKGILYLISIAS

SEQ ID NO: 117360 - protein, 27 aa, Artificial Sequence
  Cyclic GFR-binding peptide
GGGGGGGRYKKLVVNKNEDFYLISIAN

SEQ ID NO: 117361 - protein, 27 aa, Artificial Sequence
  Cyclic GFR-binding peptide
GGGGGGGQYNKLYTVVGKDLYLISIAS

SEQ ID NO: 117362 - protein, 27 aa, Artificial Sequence
  Cyclic GFR-binding peptide
GGGGGGGQYNKLVVKDYEDLYLMSIAS

SEQ ID NO: 117363 - protein, 27 aa, Artificial Sequence
  Cyclic GFR-binding peptide
GGGGGGGRYKKLVVNNASDFYLISIAN

SEQ ID NO: 117364 - protein, 27 aa, Artificial Sequence
  Cyclic GFR-binding peptide
GGGGGGGQYNKLIVNSSDDLYLVSIAS

SEQ ID NO: 117365 - protein, 27 aa, Artificial Sequence
  Cyclic GFR-binding peptide
NAISILYFIGKTPKILKKYRGGGGGGG

SEQ ID NO: 117366 - protein, 27 aa, Artificial Sequence
  Cyclic GFR-binding peptide
SAISILYLDENKNVVLKNYQGGGGGGG

SEQ ID NO: 117367 - protein, 27 aa, Artificial Sequence
  Cyclic GFR-binding peptide
SAISILYLDAANNVVLKNYQGGGGGGG

SEQ ID NO: 117368 - protein, 27 aa, Artificial Sequence
  Cyclic GFR-binding peptide
SAISVLYLDSSNNVILKNYQGGGGGGG

SEQ ID NO: 117369 - protein, 27 aa, Artificial Sequence
  Cyclic GFR-binding peptide
NAISMLYFDEYDKVVLKKYRGGGGGGG

SEQ ID NO: 117370 - protein, 27 aa, Artificial Sequence
  Cyclic GFR-binding peptide
NAISILYFVGRTPKVLKKYRGGGGGGG

SEQ ID NO: 117371 - protein, 27 aa, Artificial Sequence
  Cyclic GFR-binding peptide
SAISMLYLNDKQQIILKNYQGGGGGGG

SEQ ID NO: 117372 - protein, 27 aa, Artificial Sequence
  Cyclic GFR-binding peptide
SAISMLYLDNGRVLLLKNYQGGGGGGG

SEQ ID NO: 117373 - protein, 27 aa, Artificial Sequence
  Cyclic GFR-binding peptide
SAISILYLVGRTPKVLKNYQGGGGGGG

SEQ ID NO: 117374 - protein, 27 aa, Artificial Sequence
  Cyclic GFR-binding peptide
NAISMLYFDENEKVVLKKYRGGGGGGG

SEQ ID NO: 117375 - protein, 27 aa, Artificial Sequence
  Cyclic GFR-binding peptide
NAISILYFDAANNVVLKKYRGGGGGGG

SEQ ID NO: 117376 - protein, 27 aa, Artificial Sequence
  Cyclic GFR-binding peptide
SAISVLYLDDMGVPTLKNYQGGGGGGG

SEQ ID NO: 117377 - protein, 27 aa, Artificial Sequence
  Cyclic GFR-binding peptide
NAISVLYFDDMGVPTLKKYRGGGGGGG

SEQ ID NO: 117378 - protein, 27 aa, Artificial Sequence
  Cyclic GFR-binding peptide
NAISILYFVGRKPKVLKKYRGGGGGGG

SEQ ID NO: 117379 - protein, 27 aa, Artificial Sequence
  Cyclic GFR-binding peptide
SAISMLYLDENEKVVLKNYQGGGGGGG

SEQ ID NO: 117380 - protein, 27 aa, Artificial Sequence
  Cyclic GFR-binding peptide
NAISMLYFNDKQQIILKKYRGGGGGGG

SEQ ID NO: 117381 - protein, 27 aa, Artificial Sequence
  Cyclic GFR-binding peptide
SAISILYLVGRKPKVLKNYQGGGGGGG

SEQ ID NO: 117382 - protein, 27 aa, Artificial Sequence
  Cyclic GFR-binding peptide
NAISVLYFDSSNNVILKKYRGGGGGGG

SEQ ID NO: 117383 - protein, 27 aa, Artificial Sequence
  Cyclic GFR-binding peptide
NAISILYFDKGVVTYLKKYRGGGGGGG

SEQ ID NO: 117384 - protein, 27 aa, Artificial Sequence
  Cyclic GFR-binding peptide
NAISVLYFDDSSNVILKKYRGGGGGGG

SEQ ID NO: 117385 - protein, 27 aa, Artificial Sequence
  Cyclic GFR-binding peptide
NAISMLYFDNGRVLLLKKYRGGGGGGG

SEQ ID NO: 117386 - protein, 27 aa, Artificial Sequence
  Cyclic GFR-binding peptide
SAISILYLDSANNVVLKNYQGGGGGGG

SEQ ID NO: 117387 - protein, 27 aa, Artificial Sequence
  Cyclic GFR-binding peptide
SAISILYLIGKTPKILKNYQGGGGGGG

SEQ ID NO: 117388 - protein, 27 aa, Artificial Sequence
  Cyclic GFR-binding peptide
NAISILYFDENKNVVLKKYRGGGGGGG

SEQ ID NO: 117389 - protein, 27 aa, Artificial Sequence
  Cyclic GFR-binding peptide
SAISILYLDKGVVTYLKNYQGGGGGGG

SEQ ID NO: 117390 - protein, 27 aa, Artificial Sequence
  Cyclic GFR-binding peptide
SAISMLYLDEYDKVVLKNYQGGGGGGG

SEQ ID NO: 117391 - protein, 27 aa, Artificial Sequence
  Cyclic GFR-binding peptide
NAISILYFDSANNVVLKKYRGGGGGGG

SEQ ID NO: 117392 - protein, 27 aa, Artificial Sequence
  Cyclic GFR-binding peptide
SAISVLYLDDSSNVILKNYQGGGGGGG

SEQ ID NO: 117393 - protein, 29 aa, Artificial Sequence
  Cyclic GFR-binding peptide
GGGGGGGVTAKKLKPKKRVYEIKRVQVPR

SEQ ID NO: 117394 - protein, 29 aa, Artificial Sequence
  Cyclic GFR-binding peptide
GGGGGGGVQVEKLKPKKRVYEVKAVKVSR

SEQ ID NO: 117395 - protein, 27 aa, Artificial Sequence
  Cyclic GFR-binding peptide
GGGGGGGVTAKKVKPTRGVIKRIQVPR

SEQ ID NO: 117396 - protein, 29 aa, Artificial Sequence
  Cyclic GFR-binding peptide
GGGGGGGVQVEKFIPKKRVIEVKAVKVSR

SEQ ID NO: 117397 - protein, 29 aa, Artificial Sequence
  Cyclic GFR-binding peptide
GGGGGGGVQVEKHQGQHPKIRVKAMKVSR

SEQ ID NO: 117398 - protein, 29 aa, Artificial Sequence
  Cyclic GFR-binding peptide
GGGGGGGVTAKKHQGQHPKIRIKRMQVPR

SEQ ID NO: 117399 - protein, 27 aa, Artificial Sequence
  Cyclic GFR-binding peptide
GGGGGGGVTAKKIKPTKGIIKRIQVPR

SEQ ID NO: 117400 - protein, 27 aa, Artificial Sequence
  Cyclic GFR-binding peptide
GGGGGGGVQVEKVKPKRGVVKAIKVSR

SEQ ID NO: 117401 - protein, 27 aa, Artificial Sequence
  Cyclic GFR-binding peptide
GGGGGGGVTAKKVKPKRGVIKRIQVPR

SEQ ID NO: 117402 - protein, 27 aa, Artificial Sequence
  Cyclic GFR-binding peptide
GGGGGGGVQVEKIKPTKGIVKAIKVSR

SEQ ID NO: 117403 - protein, 27 aa, Artificial Sequence
  Cyclic GFR-binding peptide
GGGGGGGVQVEKVKPTRGVVKAIKVSR

SEQ ID NO: 117404 - protein, 29 aa, Artificial Sequence
  Cyclic GFR-binding peptide
GGGGGGGVTAKKFIPKKRVIEIKRVQVPR

SEQ ID NO: 117405 - protein, 29 aa, Artificial Sequence
  Cyclic GFR-binding peptide
RPVQVRKIEYVRKKPKLKKATVGGGGGGG

SEQ ID NO: 117406 - protein, 29 aa, Artificial Sequence
  Cyclic GFR-binding peptide
RSVKVAKVEYVRKKPKLKEVQVGGGGGGG

SEQ ID NO: 117407 - protein, 27 aa, Artificial Sequence
  Cyclic GFR-binding peptide
RPVQIRKIVGRTPKVKKATVGGGGGGG

SEQ ID NO: 117408 - protein, 29 aa, Artificial Sequence
  Cyclic GFR-binding peptide
RSVKVAKVEIVRKKPIFKEVQVGGGGGGG

SEQ ID NO: 117409 - protein, 29 aa, Artificial Sequence
  Cyclic GFR-binding peptide
RSVKMAKVRIKPHQGQHKEVQVGGGGGGG

SEQ ID NO: 117410 - protein, 29 aa, Artificial Sequence
  Cyclic GFR-binding peptide
RPVQMRKIRIKPHQGQHKKATVGGGGGGG

SEQ ID NO: 117411 - protein, 27 aa, Artificial Sequence
  Cyclic GFR-binding peptide
RPVQIRKIIGKTPKIKKATVGGGGGGG

SEQ ID NO: 117412 - protein, 27 aa, Artificial Sequence
  Cyclic GFR-binding peptide
RSVKIAKVVGRKPKVKEVQVGGGGGGG

SEQ ID NO: 117413 - protein, 27 aa, Artificial Sequence
  Cyclic GFR-binding peptide
RPVQIRKIVGRKPKVKKATVGGGGGGG

SEQ ID NO: 117414 - protein, 27 aa, Artificial Sequence
  Cyclic GFR-binding peptide
RSVKIAKVIGKTPKIKEVQVGGGGGGG

SEQ ID NO: 117415 - protein, 27 aa, Artificial Sequence
  Cyclic GFR-binding peptide
RSVKIAKVVGRTPKVKEVQVGGGGGGG

SEQ ID NO: 117416 - protein, 29 aa, Artificial Sequence
  Cyclic GFR-binding peptide
RPVQVRKIEIVRKKPIFKKATVGGGGGGG

SEQ ID NO: 117417 - protein, 27 aa, Artificial Sequence
  Cyclic GFR-binding peptide
DENEKVVRYKKLIKPTKGIFYLISIAN

SEQ ID NO: 117418 - protein, 29 aa, Artificial Sequence
  Cyclic GFR-binding peptide
DENEKVVRHKRLFIPKKRVIEYYLVSTAS

SEQ ID NO: 117419 - protein, 27 aa, Artificial Sequence
  Cyclic GFR-binding peptide
DENEKVVYHYKLVVKDYEDKYLMSIPS

SEQ ID NO: 117420 - protein, 27 aa, Artificial Sequence
  Cyclic GFR-binding peptide
DENEKVVQYNKLIVNNSSDLYLVSIAS

SEQ ID NO: 117421 - protein, 27 aa, Artificial Sequence
  Cyclic GFR-binding peptide
DENEKVVRYKKLVVKDYEDFYLMSIAN

SEQ ID NO: 117422 - protein, 27 aa, Artificial Sequence
  Cyclic GFR-binding peptide
DENEKVVRYKKLVKPTRGVFYLISIAN

SEQ ID NO: 117423 - protein, 27 aa, Artificial Sequence
  Cyclic GFR-binding peptide
DENEKVVRHKRLVVKENEDYYLMSTAS

SEQ ID NO: 117424 - protein, 27 aa, Artificial Sequence
  Cyclic GFR-binding peptide
DENEKVVYHYKLIKPTKGIKYLISIPS

SEQ ID NO: 117425 - protein, 29 aa, Artificial Sequence
  Cyclic GFR-binding peptide
DENEKVVRYKKLFIPKKRVIEFYLVSIAN

SEQ ID NO: 117426 - protein, 27 aa, Artificial Sequence
  Cyclic GFR-binding peptide
DENEKVVYHYKLVVKENEDKYLMSIPS

SEQ ID NO: 117427 - protein, 27 aa, Artificial Sequence
  Cyclic GFR-binding peptide
DENEKVVRHKRLVKPKRGVYYLISTAS

SEQ ID NO: 117428 - protein, 27 aa, Artificial Sequence
  Cyclic GFR-binding peptide
DENEKVVYHYKLVKPKRGVKYLISIPS

SEQ ID NO: 117429 - protein, 29 aa, Artificial Sequence
  Cyclic GFR-binding peptide
DENEKVVQYNKLFIPKKRVIELYLVSIAS

SEQ ID NO: 117430 - protein, 27 aa, Artificial Sequence
  Cyclic GFR-binding peptide
DENEKVVQYNKLVKPTRGVLYLISIAS

SEQ ID NO: 117431 - protein, 27 aa, Artificial Sequence
  Cyclic GFR-binding peptide
DENEKVVRYKKLVVKENEDFYLMSIAN

SEQ ID NO: 117432 - protein, 27 aa, Artificial Sequence
  Cyclic GFR-binding peptide
DENEKVVQYNKLTPVGMDDLYLVSIAS

SEQ ID NO: 117433 - protein, 27 aa, Artificial Sequence
  Cyclic GFR-binding peptide
DENEKVVRYKKLTPVGMDDFYLVSIAN

SEQ ID NO: 117434 - protein, 27 aa, Artificial Sequence
  Cyclic GFR-binding peptide
DENEKVVRYKKLVKPKRGVFYLISIAN

SEQ ID NO: 117435 - protein, 27 aa, Artificial Sequence
  Cyclic GFR-binding peptide
DENEKVVQYNKLVVKENEDLYLMSIAS

SEQ ID NO: 117436 - protein, 27 aa, Artificial Sequence
  Cyclic GFR-binding peptide
DENEKVVYHYKLIVNSSDDKYLVSIPS

SEQ ID NO: 117437 - protein, 27 aa, Artificial Sequence
  Cyclic GFR-binding peptide
DENEKVVQYNKLVKPKRGVLYLISIAS

SEQ ID NO: 117438 - protein, 27 aa, Artificial Sequence
  Cyclic GFR-binding peptide
DENEKVVRYKKLIVNNSSDFYLVSIAN

SEQ ID NO: 117439 - protein, 27 aa, Artificial Sequence
  Cyclic GFR-binding peptide
DENEKVVRYKKLIVNSSDDFYLVSIAN

SEQ ID NO: 117440 - protein, 27 aa, Artificial Sequence
  Cyclic GFR-binding peptide
DENEKVVRHKRLVKPTRGVYYLISTAS

SEQ ID NO: 117441 - protein, 29 aa, Artificial Sequence
  Cyclic GFR-binding peptide
DENEKVVYHYKLFIPKKRVIEKYLVSIPS

SEQ ID NO: 117442 - protein, 27 aa, Artificial Sequence
  Cyclic GFR-binding peptide
DENEKVVRHKRLIKPTKGIYYLISTAS

SEQ ID NO: 117443 - protein, 27 aa, Artificial Sequence
  Cyclic GFR-binding peptide
DENEKVVRHKRLTPVGMDDYYLVSTAS

SEQ ID NO: 117444 - protein, 27 aa, Artificial Sequence
  Cyclic GFR-binding peptide
DENEKVVYHYKLTPVGMDDKYLVSIPS

SEQ ID NO: 117445 - protein, 27 aa, Artificial Sequence
  Cyclic GFR-binding peptide
DENEKVVYHYKLIVNNSSDKYLVSIPS

SEQ ID NO: 117446 - protein, 27 aa, Artificial Sequence
  Cyclic GFR-binding peptide
DENEKVVRHKRLIVNNSSDYYLVSTAS

SEQ ID NO: 117447 - protein, 27 aa, Artificial Sequence
  Cyclic GFR-binding peptide
DENEKVVYHYKLVKPTRGVKYLISIPS

SEQ ID NO: 117448 - protein, 27 aa, Artificial Sequence
  Cyclic GFR-binding peptide
DENEKVVRHKRLIVNSSDDYYLVSTAS

SEQ ID NO: 117449 - protein, 27 aa, Artificial Sequence
  Cyclic GFR-binding peptide
DENEKVVRHKRLVVKDYEDYYLMSTAS

SEQ ID NO: 117450 - protein, 27 aa, Artificial Sequence
  Cyclic GFR-binding peptide
DENEKVVQYNKLIKPTKGILYLISIAS

SEQ ID NO: 117451 - protein, 27 aa, Artificial Sequence
  Cyclic GFR-binding peptide
DENEKVVQYNKLVVKDYEDLYLMSIAS

SEQ ID NO: 117452 - protein, 27 aa, Artificial Sequence
  Cyclic GFR-binding peptide
DENEKVVQYNKLIVNSSDDLYLVSIAS

SEQ ID NO: 117453 - protein, 27 aa, Artificial Sequence
  Cyclic GFR-binding peptide
NAISILYFIGKTPKILKKYRDENEKVV

SEQ ID NO: 117454 - protein, 29 aa, Artificial Sequence
  Cyclic GFR-binding peptide
SATSVLYYEIVRKKPIFLRKHRDENEKVV

SEQ ID NO: 117455 - protein, 27 aa, Artificial Sequence
  Cyclic GFR-binding peptide
SPISMLYKDEYDKVVLKYHYDENEKVV

SEQ ID NO: 117456 - protein, 27 aa, Artificial Sequence
  Cyclic GFR-binding peptide
SAISVLYLDSSNNVILKNYQDENEKVV

SEQ ID NO: 117457 - protein, 27 aa, Artificial Sequence
  Cyclic GFR-binding peptide
NAISMLYFDEYDKVVLKKYRDENEKVV

SEQ ID NO: 117458 - protein, 27 aa, Artificial Sequence
  Cyclic GFR-binding peptide
NAISILYFVGRTPKVLKKYRDENEKVV

SEQ ID NO: 117459 - protein, 27 aa, Artificial Sequence
  Cyclic GFR-binding peptide
SATSMLYYDENEKVVLRKHRDENEKVV

SEQ ID NO: 117460 - protein, 27 aa, Artificial Sequence
  Cyclic GFR-binding peptide
SPISILYKIGKTPKILKYHYDENEKVV

SEQ ID NO: 117461 - protein, 29 aa, Artificial Sequence
  Cyclic GFR-binding peptide
NAISVLYFEIVRKKPIFLKKYRDENEKVV

SEQ ID NO: 117462 - protein, 27 aa, Artificial Sequence
  Cyclic GFR-binding peptide
SPISMLYKDENEKVVLKYHYDENEKVV

SEQ ID NO: 117463 - protein, 27 aa, Artificial Sequence
  Cyclic GFR-binding peptide
SATSILYYVGRKPKVLRKHRDENEKVV

SEQ ID NO: 117464 - protein, 27 aa, Artificial Sequence
  Cyclic GFR-binding peptide
SPISILYKVGRKPKVLKYHYDENEKVV

SEQ ID NO: 117465 - protein, 29 aa, Artificial Sequence
  Cyclic GFR-binding peptide
SAISVLYLEIVRKKPIFLKNYQDENEKVV

SEQ ID NO: 117466 - protein, 27 aa, Artificial Sequence
  Cyclic GFR-binding peptide
SAISILYLVGRTPKVLKNYQDENEKVV

SEQ ID NO: 117467 - protein, 27 aa, Artificial Sequence
  Cyclic GFR-binding peptide
NAISMLYFDENEKVVLKKYRDENEKVV

SEQ ID NO: 117468 - protein, 27 aa, Artificial Sequence
  Cyclic GFR-binding peptide
SAISVLYLDDMGVPTLKNYQDENEKVV

SEQ ID NO: 117469 - protein, 27 aa, Artificial Sequence
  Cyclic GFR-binding peptide
NAISVLYFDDMGVPTLKKYRDENEKVV

SEQ ID NO: 117470 - protein, 27 aa, Artificial Sequence
  Cyclic GFR-binding peptide
NAISILYFVGRKPKVLKKYRDENEKVV

SEQ ID NO: 117471 - protein, 27 aa, Artificial Sequence
  Cyclic GFR-binding peptide
SAISMLYLDENEKVVLKNYQDENEKVV

SEQ ID NO: 117472 - protein, 27 aa, Artificial Sequence
  Cyclic GFR-binding peptide
SPISVLYKDDSSNVILKYHYDENEKVV

SEQ ID NO: 117473 - protein, 27 aa, Artificial Sequence
  Cyclic GFR-binding peptide
SAISILYLVGRKPKVLKNYQDENEKVV

SEQ ID NO: 117474 - protein, 27 aa, Artificial Sequence
  Cyclic GFR-binding peptide
NAISVLYFDSSNNVILKKYRDENEKVV

SEQ ID NO: 117475 - protein, 27 aa, Artificial Sequence
  Cyclic GFR-binding peptide
NAISVLYFDDSSNVILKKYRDENEKVV

SEQ ID NO: 117476 - protein, 27 aa, Artificial Sequence
  Cyclic GFR-binding peptide
SATSILYYVGRTPKVLRKHRDENEKVV

SEQ ID NO: 117477 - protein, 29 aa, Artificial Sequence
  Cyclic GFR-binding peptide
SPISVLYKEIVRKKPIFLKYHYDENEKVV

SEQ ID NO: 117478 - protein, 27 aa, Artificial Sequence
  Cyclic GFR-binding peptide
SATSILYYIGKTPKILRKHRDENEKVV

SEQ ID NO: 117479 - protein, 27 aa, Artificial Sequence
  Cyclic GFR-binding peptide
SATSVLYYDDMGVPTLRKHRDENEKVV

SEQ ID NO: 117480 - protein, 27 aa, Artificial Sequence
  Cyclic GFR-binding peptide
SPISVLYKDDMGVPTLKYHYDENEKVV

SEQ ID NO: 117481 - protein, 27 aa, Artificial Sequence
  Cyclic GFR-binding peptide
SPISVLYKDSSNNVILKYHYDENEKVV

SEQ ID NO: 117482 - protein, 27 aa, Artificial Sequence
  Cyclic GFR-binding peptide
SATSVLYYDSSNNVILRKHRDENEKVV

SEQ ID NO: 117483 - protein, 27 aa, Artificial Sequence
  Cyclic GFR-binding peptide
SPISILYKVGRTPKVLKYHYDENEKVV

SEQ ID NO: 117484 - protein, 27 aa, Artificial Sequence
  Cyclic GFR-binding peptide
SATSVLYYDDSSNVILRKHRDENEKVV

SEQ ID NO: 117485 - protein, 27 aa, Artificial Sequence
  Cyclic GFR-binding peptide
SATSMLYYDEYDKVVLRKHRDENEKVV

SEQ ID NO: 117486 - protein, 27 aa, Artificial Sequence
  Cyclic GFR-binding peptide
SAISILYLIGKTPKILKNYQDENEKVV

SEQ ID NO: 117487 - protein, 27 aa, Artificial Sequence
  Cyclic GFR-binding peptide
SAISMLYLDEYDKVVLKNYQDENEKVV

SEQ ID NO: 117488 - protein, 27 aa, Artificial Sequence
  Cyclic GFR-binding peptide
SAISVLYLDDSSNVILKNYQDENEKVV

SEQ ID NO: 117489 - protein, 27 aa, Artificial Sequence
  Cyclic GFR-binding peptide
DENEKVVRYKKLIKPTKGIFYLISIAN

SEQ ID NO: 117490 - protein, 27 aa, Artificial Sequence
  Cyclic GFR-binding peptide
DENEKVVNSLQEVVKDYEDYYLMTLPE

SEQ ID NO: 117491 - protein, 27 aa, Artificial Sequence
  Cyclic GFR-binding peptide
DENEKVVNSLQEIKPTKGIYYVIPLPE

SEQ ID NO: 117492 - protein, 27 aa, Artificial Sequence
  Cyclic GFR-binding peptide
DENEKVVNSLQEVKPKRGVYYLITLPE

SEQ ID NO: 117493 - protein, 27 aa, Artificial Sequence
  Cyclic GFR-binding peptide
DENEKVVNSLQEVKPTRGVYYVIPLPE

SEQ ID NO: 117494 - protein, 27 aa, Artificial Sequence
  Cyclic GFR-binding peptide
DENEKVVRYKKLVVKDYEDFYLMSIAN

SEQ ID NO: 117495 - protein, 27 aa, Artificial Sequence
  Cyclic GFR-binding peptide
DENEKVVEYQKYIVNSSDDIFLVSIPS

SEQ ID NO: 117496 - protein, 27 aa, Artificial Sequence
  Cyclic GFR-binding peptide
DENEKVVEYQKYVKPTRGVIFLISIPS

SEQ ID NO: 117497 - protein, 27 aa, Artificial Sequence
  Cyclic GFR-binding peptide
DENEKVVNSLQEVVKENEDYYLMTLPE

SEQ ID NO: 117498 - protein, 27 aa, Artificial Sequence
  Cyclic GFR-binding peptide
DENEKVVRYKKLVKPTRGVFYLISIAN

SEQ ID NO: 117499 - protein, 27 aa, Artificial Sequence
  Cyclic GFR-binding peptide
DENEKVVNSLQEVVNNASDYYLITLPE

SEQ ID NO: 117500 - protein, 27 aa, Artificial Sequence
  Cyclic GFR-binding peptide
DENEKVVNSLQEVKPKRGVYYVIPLPE

SEQ ID NO: 117501 - protein, 27 aa, Artificial Sequence
  Cyclic GFR-binding peptide
DENEKVVNSLQEVVNNASDYYVIPLPE

SEQ ID NO: 117502 - protein, 27 aa, Artificial Sequence
  Cyclic GFR-binding peptide
DENEKVVNSLQEVKPTRGVYYLITLPE

SEQ ID NO: 117503 - protein, 27 aa, Artificial Sequence
  Cyclic GFR-binding peptide
DENEKVVQYNKLVKPTRGVLYLISIAS

SEQ ID NO: 117504 - protein, 27 aa, Artificial Sequence
  Cyclic GFR-binding peptide
DENEKVVRYKKLVVKENEDFYLMSIAN

SEQ ID NO: 117505 - protein, 27 aa, Artificial Sequence
  Cyclic GFR-binding peptide
DENEKVVEYQKYIKPTKGIIFLISIPS

SEQ ID NO: 117506 - protein, 27 aa, Artificial Sequence
  Cyclic GFR-binding peptide
DENEKVVEYQKYVVNNASDIFLISIPS

SEQ ID NO: 117507 - protein, 27 aa, Artificial Sequence
  Cyclic GFR-binding peptide
DENEKVVRYKKLVKPKRGVFYLISIAN

SEQ ID NO: 117508 - protein, 27 aa, Artificial Sequence
  Cyclic GFR-binding peptide
DENEKVVNSLQEIVNSSDDYYVVPLPE

SEQ ID NO: 117509 - protein, 27 aa, Artificial Sequence
  Cyclic GFR-binding peptide
DENEKVVNSLQEVVKDYEDYYVMPLPE

SEQ ID NO: 117510 - protein, 27 aa, Artificial Sequence
  Cyclic GFR-binding peptide
DENEKVVQYNKLVVKENEDLYLMSIAS

SEQ ID NO: 117511 - protein, 27 aa, Artificial Sequence
  Cyclic GFR-binding peptide
DENEKVVEYQKYVVKENEDIFLMSIPS

SEQ ID NO: 117512 - protein, 27 aa, Artificial Sequence
  Cyclic GFR-binding peptide
DENEKVVQYNKLVKPKRGVLYLISIAS

SEQ ID NO: 117513 - protein, 27 aa, Artificial Sequence
  Cyclic GFR-binding peptide
DENEKVVRYKKLIVNSSDDFYLVSIAN

SEQ ID NO: 117514 - protein, 27 aa, Artificial Sequence
  Cyclic GFR-binding peptide
DENEKVVNSLQEVVKENEDYYVMPLPE

SEQ ID NO: 117515 - protein, 27 aa, Artificial Sequence
  Cyclic GFR-binding peptide
DENEKVVEYQKYVVKDYEDIFLMSIPS

SEQ ID NO: 117516 - protein, 27 aa, Artificial Sequence
  Cyclic GFR-binding peptide
DENEKVVQYNKLVVNNASDLYLISIAS

SEQ ID NO: 117517 - protein, 27 aa, Artificial Sequence
  Cyclic GFR-binding peptide
DENEKVVQYNKLIKPTKGILYLISIAS

SEQ ID NO: 117518 - protein, 27 aa, Artificial Sequence
  Cyclic GFR-binding peptide
DENEKVVNSLQEIKPTKGIYYLITLPE

SEQ ID NO: 117519 - protein, 27 aa, Artificial Sequence
  Cyclic GFR-binding peptide
DENEKVVEYQKYVKPKRGVIFLISIPS

SEQ ID NO: 117520 - protein, 27 aa, Artificial Sequence
  Cyclic GFR-binding peptide
DENEKVVQYNKLVVKDYEDLYLMSIAS

SEQ ID NO: 117521 - protein, 27 aa, Artificial Sequence
  Cyclic GFR-binding peptide
DENEKVVRYKKLVVNNASDFYLISIAN

SEQ ID NO: 117522 - protein, 27 aa, Artificial Sequence
  Cyclic GFR-binding peptide
DENEKVVNSLQEIVNSSDDYYLVTLPE

SEQ ID NO: 117523 - protein, 27 aa, Artificial Sequence
  Cyclic GFR-binding peptide
DENEKVVQYNKLIVNSSDDLYLVSIAS

SEQ ID NO: 117524 - protein, 27 aa, Artificial Sequence
  Cyclic GFR-binding peptide
NAISILYFIGKTPKILKKYRDENEKVV

SEQ ID NO: 117525 - protein, 27 aa, Artificial Sequence
  Cyclic GFR-binding peptide
EPLTMLYYDEYDKVVEQLSNDENEKVV

SEQ ID NO: 117526 - protein, 27 aa, Artificial Sequence
  Cyclic GFR-binding peptide
EPLPIVYYIGKTPKIEQLSNDENEKVV

SEQ ID NO: 117527 - protein, 27 aa, Artificial Sequence
  Cyclic GFR-binding peptide
EPLTILYYVGRKPKVEQLSNDENEKVV

SEQ ID NO: 117528 - protein, 27 aa, Artificial Sequence
  Cyclic GFR-binding peptide
EPLPIVYYVGRTPKVEQLSNDENEKVV

SEQ ID NO: 117529 - protein, 27 aa, Artificial Sequence
  Cyclic GFR-binding peptide
NAISMLYFDEYDKVVLKKYRDENEKVV

SEQ ID NO: 117530 - protein, 27 aa, Artificial Sequence
  Cyclic GFR-binding peptide
SPISVLFIDDSSNVIYKQYEDENEKVV

SEQ ID NO: 117531 - protein, 27 aa, Artificial Sequence
  Cyclic GFR-binding peptide
SPISILFIVGRTPKVYKQYEDENEKVV

SEQ ID NO: 117532 - protein, 27 aa, Artificial Sequence
  Cyclic GFR-binding peptide
EPLTMLYYDENEKVVEQLSNDENEKVV

SEQ ID NO: 117533 - protein, 27 aa, Artificial Sequence
  Cyclic GFR-binding peptide
NAISILYFVGRTPKVLKKYRDENEKVV

SEQ ID NO: 117534 - protein, 27 aa, Artificial Sequence
  Cyclic GFR-binding peptide
EPLTILYYDSANNVVEQLSNDENEKVV

SEQ ID NO: 117535 - protein, 27 aa, Artificial Sequence
  Cyclic GFR-binding peptide
EPLPIVYYVGRKPKVEQLSNDENEKVV

SEQ ID NO: 117536 - protein, 27 aa, Artificial Sequence
  Cyclic GFR-binding peptide
EPLPIVYYDSANNVVEQLSNDENEKVV

SEQ ID NO: 117537 - protein, 27 aa, Artificial Sequence
  Cyclic GFR-binding peptide
EPLTILYYVGRTPKVEQLSNDENEKVV

SEQ ID NO: 117538 - protein, 27 aa, Artificial Sequence
  Cyclic GFR-binding peptide
SAISILYLVGRTPKVLKNYQDENEKVV

SEQ ID NO: 117539 - protein, 27 aa, Artificial Sequence
  Cyclic GFR-binding peptide
NAISMLYFDENEKVVLKKYRDENEKVV

SEQ ID NO: 117540 - protein, 27 aa, Artificial Sequence
  Cyclic GFR-binding peptide
SPISILFIIGKTPKIYKQYEDENEKVV

SEQ ID NO: 117541 - protein, 27 aa, Artificial Sequence
  Cyclic GFR-binding peptide
SPISILFIDSANNVVYKQYEDENEKVV

SEQ ID NO: 117542 - protein, 27 aa, Artificial Sequence
  Cyclic GFR-binding peptide
NAISILYFVGRKPKVLKKYRDENEKVV

SEQ ID NO: 117543 - protein, 27 aa, Artificial Sequence
  Cyclic GFR-binding peptide
EPLPVVYYDDSSNVIEQLSNDENEKVV

SEQ ID NO: 117544 - protein, 27 aa, Artificial Sequence
  Cyclic GFR-binding peptide
EPLPMVYYDEYDKVVEQLSNDENEKVV

SEQ ID NO: 117545 - protein, 27 aa, Artificial Sequence
  Cyclic GFR-binding peptide
SAISMLYLDENEKVVLKNYQDENEKVV

SEQ ID NO: 117546 - protein, 27 aa, Artificial Sequence
  Cyclic GFR-binding peptide
SPISMLFIDENEKVVYKQYEDENEKVV

SEQ ID NO: 117547 - protein, 27 aa, Artificial Sequence
  Cyclic GFR-binding peptide
SAISILYLVGRKPKVLKNYQDENEKVV

SEQ ID NO: 117548 - protein, 27 aa, Artificial Sequence
  Cyclic GFR-binding peptide
NAISVLYFDDSSNVILKKYRDENEKVV

SEQ ID NO: 117549 - protein, 27 aa, Artificial Sequence
  Cyclic GFR-binding peptide
EPLPMVYYDENEKVVEQLSNDENEKVV

SEQ ID NO: 117550 - protein, 27 aa, Artificial Sequence
  Cyclic GFR-binding peptide
SPISMLFIDEYDKVVYKQYEDENEKVV

SEQ ID NO: 117551 - protein, 27 aa, Artificial Sequence
  Cyclic GFR-binding peptide
SAISILYLDSANNVVLKNYQDENEKVV

SEQ ID NO: 117552 - protein, 27 aa, Artificial Sequence
  Cyclic GFR-binding peptide
SAISILYLIGKTPKILKNYQDENEKVV

SEQ ID NO: 117553 - protein, 27 aa, Artificial Sequence
  Cyclic GFR-binding peptide
EPLTILYYIGKTPKIEQLSNDENEKVV

SEQ ID NO: 117554 - protein, 27 aa, Artificial Sequence
  Cyclic GFR-binding peptide
SPISILFIVGRKPKVYKQYEDENEKVV

SEQ ID NO: 117555 - protein, 27 aa, Artificial Sequence
  Cyclic GFR-binding peptide
SAISMLYLDEYDKVVLKNYQDENEKVV

SEQ ID NO: 117556 - protein, 27 aa, Artificial Sequence
  Cyclic GFR-binding peptide
NAISILYFDSANNVVLKKYRDENEKVV

SEQ ID NO: 117557 - protein, 27 aa, Artificial Sequence
  Cyclic GFR-binding peptide
EPLTVLYYDDSSNVIEQLSNDENEKVV

SEQ ID NO: 117558 - protein, 27 aa, Artificial Sequence
  Cyclic GFR-binding peptide
SAISVLYLDDSSNVILKNYQDENEKVV

SEQ ID NO: 117559 - protein, 29 aa, Artificial Sequence
  Cyclic GFR-binding peptide
DENEKVVVTAKKLKPKKRVYEIKRVQVPR

SEQ ID NO: 117560 - protein, 29 aa, Artificial Sequence
  Cyclic GFR-binding peptide
DENEKVVVQVEKLKPKKRVYEVKAVKVSR

SEQ ID NO: 117561 - protein, 29 aa, Artificial Sequence
  Cyclic GFR-binding peptide
DENEKVVVQVEKFIPKKRVIEVKAVKVSR

SEQ ID NO: 117562 - protein, 29 aa, Artificial Sequence
  Cyclic GFR-binding peptide
DENEKVVVQVEKHQGQHPKIRVKAMKVSR

SEQ ID NO: 117563 - protein, 29 aa, Artificial Sequence
  Cyclic GFR-binding peptide
DENEKVVVTAKKHQGQHPKIRIKRMQVPR

SEQ ID NO: 117564 - protein, 29 aa, Artificial Sequence
  Cyclic GFR-binding peptide
DENEKVVSMEGLLKPKKRVYEMIQVTINS

SEQ ID NO: 117565 - protein, 29 aa, Artificial Sequence
  Cyclic GFR-binding peptide
DENEKVVSMEGIFIPKKRVIEMIQVTINS

SEQ ID NO: 117566 - protein, 29 aa, Artificial Sequence
  Cyclic GFR-binding peptide
DENEKVVSMEGLHQGQHPKIRMIQMTINS

SEQ ID NO: 117567 - protein, 29 aa, Artificial Sequence
  Cyclic GFR-binding peptide
DENEKVVSMEGILKPKKRVYEMIQVTINS

SEQ ID NO: 117568 - protein, 29 aa, Artificial Sequence
  Cyclic GFR-binding peptide
DENEKVVSMEGLFIPKKRVIEMIQVTINS

SEQ ID NO: 117569 - protein, 29 aa, Artificial Sequence
  Cyclic GFR-binding peptide
DENEKVVVTAKKFIPKKRVIEIKRVQVPR

SEQ ID NO: 117570 - protein, 29 aa, Artificial Sequence
  Cyclic GFR-binding peptide
DENEKVVSMEGIHQGQHPKIRMIQMTINS

SEQ ID NO: 117571 - protein, 29 aa, Artificial Sequence
  Cyclic GFR-binding peptide
RPVQVRKIEYVRKKPKLKKATVDENEKVV

SEQ ID NO: 117572 - protein, 29 aa, Artificial Sequence
  Cyclic GFR-binding peptide
RSVKVAKVEYVRKKPKLKEVQVDENEKVV

SEQ ID NO: 117573 - protein, 29 aa, Artificial Sequence
  Cyclic GFR-binding peptide
RSVKVAKVEIVRKKPIFKEVQVDENEKVV

SEQ ID NO: 117574 - protein, 29 aa, Artificial Sequence
  Cyclic GFR-binding peptide
RSVKMAKVRIKPHQGQHKEVQVDENEKVV

SEQ ID NO: 117575 - protein, 29 aa, Artificial Sequence
  Cyclic GFR-binding peptide
RPVQMRKIRIKPHQGQHKKATVDENEKVV

SEQ ID NO: 117576 - protein, 29 aa, Artificial Sequence
  Cyclic GFR-binding peptide
SNITVQIMEYVRKKPKLLGEMSDENEKVV

SEQ ID NO: 117577 - protein, 29 aa, Artificial Sequence
  Cyclic GFR-binding peptide
SNITVQIMEIVRKKPIFIGEMSDENEKVV

SEQ ID NO: 117578 - protein, 29 aa, Artificial Sequence
  Cyclic GFR-binding peptide
SNITMQIMRIKPHQGQHLGEMSDENEKVV

SEQ ID NO: 117579 - protein, 29 aa, Artificial Sequence
  Cyclic GFR-binding peptide
SNITVQIMEYVRKKPKLIGEMSDENEKVV

SEQ ID NO: 117580 - protein, 29 aa, Artificial Sequence
  Cyclic GFR-binding peptide
SNITVQIMEIVRKKPIFLGEMSDENEKVV

SEQ ID NO: 117581 - protein, 29 aa, Artificial Sequence
  Cyclic GFR-binding peptide
RPVQVRKIEIVRKKPIFKKATVDENEKVV

SEQ ID NO: 117582 - protein, 29 aa, Artificial Sequence
  Cyclic GFR-binding peptide
SNITMQIMRIKPHQGQHIGEMSDENEKVV

SEQ ID NO: 117583 - protein, 29 aa, Artificial Sequence
  Cyclic GFR-binding peptide
DENEKVVVTAKKLKPKKRVYEIKRVQVPR

SEQ ID NO: 117584 - protein, 29 aa, Artificial Sequence
  Cyclic GFR-binding peptide
DENEKVVVQVEKLKPKKRVYEVKAVKVSR

SEQ ID NO: 117585 - protein, 29 aa, Artificial Sequence
  Cyclic GFR-binding peptide
DENEKVVVQVEKFIPKKRVIEVKAVKVSR

SEQ ID NO: 117586 - protein, 29 aa, Artificial Sequence
  Cyclic GFR-binding peptide
DENEKVVVQVEKHQGQHPKIRVKAMKVSR

SEQ ID NO: 117587 - protein, 29 aa, Artificial Sequence
  Cyclic GFR-binding peptide
DENEKVVVTAKKHQGQHPKIRIKRMQVPR

SEQ ID NO: 117588 - protein, 29 aa, Artificial Sequence
  Cyclic GFR-binding peptide
DENEKVVSMEGLLKPKKRVYEMIQVTINS

SEQ ID NO: 117589 - protein, 29 aa, Artificial Sequence
  Cyclic GFR-binding peptide
DENEKVVSMEGIFIPKKRVIEMIQVTINS

SEQ ID NO: 117590 - protein, 29 aa, Artificial Sequence
  Cyclic GFR-binding peptide
DENEKVVSMEGLHQGQHPKIRMIQMTINS

SEQ ID NO: 117591 - protein, 29 aa, Artificial Sequence
  Cyclic GFR-binding peptide
DENEKVVSMEGILKPKKRVYEMIQVTINS

SEQ ID NO: 117592 - protein, 29 aa, Artificial Sequence
  Cyclic GFR-binding peptide
DENEKVVSMEGLFIPKKRVIEMIQVTINS

SEQ ID NO: 117593 - protein, 29 aa, Artificial Sequence
  Cyclic GFR-binding peptide
DENEKVVVTAKKFIPKKRVIEIKRVQVPR

SEQ ID NO: 117594 - protein, 29 aa, Artificial Sequence
  Cyclic GFR-binding peptide
DENEKVVSMEGIHQGQHPKIRMIQMTINS

SEQ ID NO: 117595 - protein, 29 aa, Artificial Sequence
  Cyclic GFR-binding peptide
RPVQVRKIEYVRKKPKLKKATVDENEKVV

SEQ ID NO: 117596 - protein, 29 aa, Artificial Sequence
  Cyclic GFR-binding peptide
RSVKVAKVEYVRKKPKLKEVQVDENEKVV

SEQ ID NO: 117597 - protein, 29 aa, Artificial Sequence
  Cyclic GFR-binding peptide
RSVKVAKVEIVRKKPIFKEVQVDENEKVV

SEQ ID NO: 117598 - protein, 29 aa, Artificial Sequence
  Cyclic GFR-binding peptide
RSVKMAKVRIKPHQGQHKEVQVDENEKVV

SEQ ID NO: 117599 - protein, 29 aa, Artificial Sequence
  Cyclic GFR-binding peptide
RPVQMRKIRIKPHQGQHKKATVDENEKVV

SEQ ID NO: 117600 - protein, 29 aa, Artificial Sequence
  Cyclic GFR-binding peptide
SNITVQIMEYVRKKPKLLGEMSDENEKVV

SEQ ID NO: 117601 - protein, 29 aa, Artificial Sequence
  Cyclic GFR-binding peptide
SNITVQIMEIVRKKPIFIGEMSDENEKVV

SEQ ID NO: 117602 - protein, 29 aa, Artificial Sequence
  Cyclic GFR-binding peptide
SNITMQIMRIKPHQGQHLGEMSDENEKVV

SEQ ID NO: 117603 - protein, 29 aa, Artificial Sequence
  Cyclic GFR-binding peptide
SNITVQIMEYVRKKPKLIGEMSDENEKVV

SEQ ID NO: 117604 - protein, 29 aa, Artificial Sequence
  Cyclic GFR-binding peptide
SNITVQIMEIVRKKPIFLGEMSDENEKVV

SEQ ID NO: 117605 - protein, 29 aa, Artificial Sequence
  Cyclic GFR-binding peptide
RPVQVRKIEIVRKKPIFKKATVDENEKVV

SEQ ID NO: 117606 - protein, 29 aa, Artificial Sequence
  Cyclic GFR-binding peptide
SNITMQIMRIKPHQGQHIGEMSDENEKVV

SEQ ID NO: 117607 - protein, 27 aa, Artificial Sequence
  Cyclic GFR-binding peptide
DENEKVVEYQKYVVKENEDIYLMSIPS

SEQ ID NO: 117608 - protein, 27 aa, Artificial Sequence
  Cyclic GFR-binding peptide
DENEKVVRYKKLIKPTKGIFYLISIAN

SEQ ID NO: 117609 - protein, 27 aa, Artificial Sequence
  Cyclic GFR-binding peptide
DENEKVVEYKFKVKPTRGVLYLISIPE

SEQ ID NO: 117610 - protein, 27 aa, Artificial Sequence
  Cyclic GFR-binding peptide
DENEKVVYHYKLVVKDYEDKYLMSIPS

SEQ ID NO: 117611 - protein, 27 aa, Artificial Sequence
  Cyclic GFR-binding peptide
DENEKVVEYKFKTPVGMDDLYLVSIPE

SEQ ID NO: 117612 - protein, 27 aa, Artificial Sequence
  Cyclic GFR-binding peptide
DENEKVVEYQKYVKPKRGVIYLISIPS

SEQ ID NO: 117613 - protein, 27 aa, Artificial Sequence
  Cyclic GFR-binding peptide
DENEKVVRYKKLVVKDYEDFYLMSIAN

SEQ ID NO: 117614 - protein, 27 aa, Artificial Sequence
  Cyclic GFR-binding peptide
DENEKVVEYQKYVVKDYEDIYLMSIPS

SEQ ID NO: 117615 - protein, 27 aa, Artificial Sequence
  Cyclic GFR-binding peptide
DENEKVVRYKKLVKPTRGVFYLISIAN

SEQ ID NO: 117616 - protein, 27 aa, Artificial Sequence
  Cyclic GFR-binding peptide
DENEKVVYHYKLIKPTKGIKYLISIPS

SEQ ID NO: 117617 - protein, 27 aa, Artificial Sequence
  Cyclic GFR-binding peptide
DENEKVVYHYKLVVKENEDKYLMSIPS

SEQ ID NO: 117618 - protein, 27 aa, Artificial Sequence
  Cyclic GFR-binding peptide
DENEKVVYHYKLVKPKRGVKYLISIPS

SEQ ID NO: 117619 - protein, 27 aa, Artificial Sequence
  Cyclic GFR-binding peptide
DENEKVVEYKFKIKPTKGILYLISIPE

SEQ ID NO: 117620 - protein, 27 aa, Artificial Sequence
  Cyclic GFR-binding peptide
DENEKVVEYQKYIKPTKGIIYLISIPS

SEQ ID NO: 117621 - protein, 27 aa, Artificial Sequence
  Cyclic GFR-binding peptide
DENEKVVRYKKLVVKENEDFYLMSIAN

SEQ ID NO: 117622 - protein, 27 aa, Artificial Sequence
  Cyclic GFR-binding peptide
DENEKVVRYKKLVVNNAADFYLISIAN

SEQ ID NO: 117623 - protein, 27 aa, Artificial Sequence
  Cyclic GFR-binding peptide
DENEKVVYHYKLYTVVGKDKYLISIPS

SEQ ID NO: 117624 - protein, 27 aa, Artificial Sequence
  Cyclic GFR-binding peptide
DENEKVVRYKKLTPVGMDDFYLVSIAN

SEQ ID NO: 117625 - protein, 27 aa, Artificial Sequence
  Cyclic GFR-binding peptide
DENEKVVRYKKLVKPKRGVFYLISIAN

SEQ ID NO: 117626 - protein, 27 aa, Artificial Sequence
  Cyclic GFR-binding peptide
DENEKVVYHYKLVVNNAADKYLISIPS

SEQ ID NO: 117627 - protein, 27 aa, Artificial Sequence
  Cyclic GFR-binding peptide
DENEKVVYHYKLIVNSSDDKYLVSIPS

SEQ ID NO: 117628 - protein, 27 aa, Artificial Sequence
  Cyclic GFR-binding peptide
DENEKVVRYKKLIVNNSSDFYLVSIAN

SEQ ID NO: 117629 - protein, 27 aa, Artificial Sequence
  Cyclic GFR-binding peptide
DENEKVVRYKKLYTVVGKDFYLISIAN

SEQ ID NO: 117630 - protein, 27 aa, Artificial Sequence
  Cyclic GFR-binding peptide
DENEKVVEYQKYVVNNAADIYLISIPS

SEQ ID NO: 117631 - protein, 27 aa, Artificial Sequence
  Cyclic GFR-binding peptide
DENEKVVRYKKLIVNSSDDFYLVSIAN

SEQ ID NO: 117632 - protein, 27 aa, Artificial Sequence
  Cyclic GFR-binding peptide
DENEKVVEYKFKIVNNSSDLYLVSIPE

SEQ ID NO: 117633 - protein, 27 aa, Artificial Sequence
  Cyclic GFR-binding peptide
DENEKVVEYQKYVKPTRGVIYLISIPS

SEQ ID NO: 117634 - protein, 27 aa, Artificial Sequence
  Cyclic GFR-binding peptide
DENEKVVEYQKYIVNSSDDIYLVSIPS

SEQ ID NO: 117635 - protein, 27 aa, Artificial Sequence
  Cyclic GFR-binding peptide
DENEKVVYHYKLTPVGMDDKYLVSIPS

SEQ ID NO: 117636 - protein, 27 aa, Artificial Sequence
  Cyclic GFR-binding peptide
DENEKVVYHYKLIVNNSSDKYLVSIPS

SEQ ID NO: 117637 - protein, 27 aa, Artificial Sequence
  Cyclic GFR-binding peptide
DENEKVVEYKFKIVNSSDDLYLVSIPE

SEQ ID NO: 117638 - protein, 27 aa, Artificial Sequence
  Cyclic GFR-binding peptide
DENEKVVYHYKLVKPTRGVKYLISIPS

SEQ ID NO: 117639 - protein, 27 aa, Artificial Sequence
  Cyclic GFR-binding peptide
DENEKVVEYKFKVKPKRGVLYLISIPE

SEQ ID NO: 117640 - protein, 27 aa, Artificial Sequence
  Cyclic GFR-binding peptide
DENEKVVEYQKYYTVVGKDIYLISIPS

SEQ ID NO: 117641 - protein, 27 aa, Artificial Sequence
  Cyclic GFR-binding peptide
DENEKVVEYKFKVVKENEDLYLMSIPE

SEQ ID NO: 117642 - protein, 27 aa, Artificial Sequence
  Cyclic GFR-binding peptide
DENEKVVEYQKYTPVGMDDIYLVSIPS

SEQ ID NO: 117643 - protein, 27 aa, Artificial Sequence
  Cyclic GFR-binding peptide
DENEKVVEYQKYIVNNSSDIYLVSIPS

SEQ ID NO: 117644 - protein, 27 aa, Artificial Sequence
  Cyclic GFR-binding peptide
DENEKVVEYKFKVVKDYEDLYLMSIPE

SEQ ID NO: 117645 - protein, 27 aa, Artificial Sequence
  Cyclic GFR-binding peptide
DENEKVVEYKFKYTVVGKDLYLISIPE

SEQ ID NO: 117646 - protein, 27 aa, Artificial Sequence
  Cyclic GFR-binding peptide
DENEKVVEYKFKVVNNAADLYLISIPE

SEQ ID NO: 117647 - protein, 27 aa, Artificial Sequence
  Cyclic GFR-binding peptide
SPISMLYIDENEKVVYKQYEDENEKVV

SEQ ID NO: 117648 - protein, 27 aa, Artificial Sequence
  Cyclic GFR-binding peptide
NAISILYFIGKTPKILKKYRDENEKVV

SEQ ID NO: 117649 - protein, 27 aa, Artificial Sequence
  Cyclic GFR-binding peptide
EPISILYLVGRTPKVKFKYEDENEKVV

SEQ ID NO: 117650 - protein, 27 aa, Artificial Sequence
  Cyclic GFR-binding peptide
SPISMLYKDEYDKVVLKYHYDENEKVV

SEQ ID NO: 117651 - protein, 27 aa, Artificial Sequence
  Cyclic GFR-binding peptide
EPISVLYLDDMGVPTKFKYEDENEKVV

SEQ ID NO: 117652 - protein, 27 aa, Artificial Sequence
  Cyclic GFR-binding peptide
SPISILYIVGRKPKVYKQYEDENEKVV

SEQ ID NO: 117653 - protein, 27 aa, Artificial Sequence
  Cyclic GFR-binding peptide
NAISMLYFDEYDKVVLKKYRDENEKVV

SEQ ID NO: 117654 - protein, 27 aa, Artificial Sequence
  Cyclic GFR-binding peptide
SPISMLYIDEYDKVVYKQYEDENEKVV

SEQ ID NO: 117655 - protein, 27 aa, Artificial Sequence
  Cyclic GFR-binding peptide
NAISILYFVGRTPKVLKKYRDENEKVV

SEQ ID NO: 117656 - protein, 27 aa, Artificial Sequence
  Cyclic GFR-binding peptide
SPISILYKIGKTPKILKYHYDENEKVV

SEQ ID NO: 117657 - protein, 27 aa, Artificial Sequence
  Cyclic GFR-binding peptide
SPISMLYKDENEKVVLKYHYDENEKVV

SEQ ID NO: 117658 - protein, 27 aa, Artificial Sequence
  Cyclic GFR-binding peptide
SPISILYKVGRKPKVLKYHYDENEKVV

SEQ ID NO: 117659 - protein, 27 aa, Artificial Sequence
  Cyclic GFR-binding peptide
EPISILYLIGKTPKIKFKYEDENEKVV

SEQ ID NO: 117660 - protein, 27 aa, Artificial Sequence
  Cyclic GFR-binding peptide
SPISILYIIGKTPKIYKQYEDENEKVV

SEQ ID NO: 117661 - protein, 27 aa, Artificial Sequence
  Cyclic GFR-binding peptide
NAISMLYFDENEKVVLKKYRDENEKVV

SEQ ID NO: 117662 - protein, 27 aa, Artificial Sequence
  Cyclic GFR-binding peptide
NAISILYFDAANNVVLKKYRDENEKVV

SEQ ID NO: 117663 - protein, 27 aa, Artificial Sequence
  Cyclic GFR-binding peptide
SPISILYKDKGVVTYLKYHYDENEKVV

SEQ ID NO: 117664 - protein, 27 aa, Artificial Sequence
  Cyclic GFR-binding peptide
NAISVLYFDDMGVPTLKKYRDENEKVV

SEQ ID NO: 117665 - protein, 27 aa, Artificial Sequence
  Cyclic GFR-binding peptide
NAISILYFVGRKPKVLKKYRDENEKVV

SEQ ID NO: 117666 - protein, 27 aa, Artificial Sequence
  Cyclic GFR-binding peptide
SPISILYKDAANNVVLKYHYDENEKVV

SEQ ID NO: 117667 - protein, 27 aa, Artificial Sequence
  Cyclic GFR-binding peptide
SPISVLYKDDSSNVILKYHYDENEKVV

SEQ ID NO: 117668 - protein, 27 aa, Artificial Sequence
  Cyclic GFR-binding peptide
NAISVLYFDSSNNVILKKYRDENEKVV

SEQ ID NO: 117669 - protein, 27 aa, Artificial Sequence
  Cyclic GFR-binding peptide
NAISILYFDKGVVTYLKKYRDENEKVV

SEQ ID NO: 117670 - protein, 27 aa, Artificial Sequence
  Cyclic GFR-binding peptide
SPISILYIDAANNVVYKQYEDENEKVV

SEQ ID NO: 117671 - protein, 27 aa, Artificial Sequence
  Cyclic GFR-binding peptide
NAISVLYFDDSSNVILKKYRDENEKVV

SEQ ID NO: 117672 - protein, 27 aa, Artificial Sequence
  Cyclic GFR-binding peptide
EPISVLYLDSSNNVIKFKYEDENEKVV

SEQ ID NO: 117673 - protein, 27 aa, Artificial Sequence
  Cyclic GFR-binding peptide
SPISILYIVGRTPKVYKQYEDENEKVV

SEQ ID NO: 117674 - protein, 27 aa, Artificial Sequence
  Cyclic GFR-binding peptide
SPISVLYIDDSSNVIYKQYEDENEKVV

SEQ ID NO: 117675 - protein, 27 aa, Artificial Sequence
  Cyclic GFR-binding peptide
SPISVLYKDDMGVPTLKYHYDENEKVV

SEQ ID NO: 117676 - protein, 27 aa, Artificial Sequence
  Cyclic GFR-binding peptide
SPISVLYKDSSNNVILKYHYDENEKVV

SEQ ID NO: 117677 - protein, 27 aa, Artificial Sequence
  Cyclic GFR-binding peptide
EPISVLYLDDSSNVIKFKYEDENEKVV

SEQ ID NO: 117678 - protein, 27 aa, Artificial Sequence
  Cyclic GFR-binding peptide
SPISILYKVGRTPKVLKYHYDENEKVV

SEQ ID NO: 117679 - protein, 27 aa, Artificial Sequence
  Cyclic GFR-binding peptide
EPISILYLVGRKPKVKFKYEDENEKVV

SEQ ID NO: 117680 - protein, 27 aa, Artificial Sequence
  Cyclic GFR-binding peptide
SPISILYIDKGVVTYYKQYEDENEKVV

SEQ ID NO: 117681 - protein, 27 aa, Artificial Sequence
  Cyclic GFR-binding peptide
EPISMLYLDENEKVVKFKYEDENEKVV

SEQ ID NO: 117682 - protein, 27 aa, Artificial Sequence
  Cyclic GFR-binding peptide
SPISVLYIDDMGVPTYKQYEDENEKVV

SEQ ID NO: 117683 - protein, 27 aa, Artificial Sequence
  Cyclic GFR-binding peptide
SPISVLYIDSSNNVIYKQYEDENEKVV

SEQ ID NO: 117684 - protein, 27 aa, Artificial Sequence
  Cyclic GFR-binding peptide
EPISMLYLDEYDKVVKFKYEDENEKVV

SEQ ID NO: 117685 - protein, 27 aa, Artificial Sequence
  Cyclic GFR-binding peptide
EPISILYLDKGVVTYKFKYEDENEKVV

SEQ ID NO: 117686 - protein, 27 aa, Artificial Sequence
  Cyclic GFR-binding peptide
EPISILYLDAANNVVKFKYEDENEKVV

SEQ ID NO: 117687 - protein, 27 aa, Artificial Sequence
  Cyclic GFR-binding peptide
DENEKVVPIKGYIIQQKDNFYLMNIPS

SEQ ID NO: 117688 - protein, 27 aa, Artificial Sequence
  Cyclic GFR-binding peptide
DENEKVVPIKGYVVKDYEDFYLMNIPS

SEQ ID NO: 117689 - protein, 27 aa, Artificial Sequence
  Cyclic GFR-binding peptide
DENEKVVPIKGYIVNSSDDFYLVNIPS

SEQ ID NO: 117690 - protein, 27 aa, Artificial Sequence
  Cyclic GFR-binding peptide
DENEKVVPIKGYLLVRGNDFYLMNIPS

SEQ ID NO: 117691 - protein, 27 aa, Artificial Sequence
  Cyclic GFR-binding peptide
DENEKVVPIKGYVVNNAADFYLINIPS

SEQ ID NO: 117692 - protein, 27 aa, Artificial Sequence
  Cyclic GFR-binding peptide
DENEKVVPIKGYVVKENEDFYLMNIPS

SEQ ID NO: 117693 - protein, 27 aa, Artificial Sequence
  Cyclic GFR-binding peptide
DENEKVVPIKGYVVNNASDFYLINIPS

SEQ ID NO: 117694 - protein, 27 aa, Artificial Sequence
  Cyclic GFR-binding peptide
DENEKVVPIKGYYTVVGKDFYLINIPS

SEQ ID NO: 117695 - protein, 27 aa, Artificial Sequence
  Cyclic GFR-binding peptide
DENEKVVPIKGYTPVGMDDFYLVNIPS

SEQ ID NO: 117696 - protein, 27 aa, Artificial Sequence
  Cyclic GFR-binding peptide
DENEKVVPIKGYIVNNSSDFYLVNIPS

SEQ ID NO: 117697 - protein, 27 aa, Artificial Sequence
  Cyclic GFR-binding peptide
SPINMLYFNDKQQIIYGKIPDENEKVV

SEQ ID NO: 117698 - protein, 27 aa, Artificial Sequence
  Cyclic GFR-binding peptide
SPINMLYFDEYDKVVYGKIPDENEKVV

SEQ ID NO: 117699 - protein, 27 aa, Artificial Sequence
  Cyclic GFR-binding peptide
SPINVLYFDDSSNVIYGKIPDENEKVV

SEQ ID NO: 117700 - protein, 27 aa, Artificial Sequence
  Cyclic GFR-binding peptide
SPINMLYFDNGRVLLYGKIPDENEKVV

SEQ ID NO: 117701 - protein, 27 aa, Artificial Sequence
  Cyclic GFR-binding peptide
SPINILYFDAANNVVYGKIPDENEKVV

SEQ ID NO: 117702 - protein, 27 aa, Artificial Sequence
  Cyclic GFR-binding peptide
SPINMLYFDENEKVVYGKIPDENEKVV

SEQ ID NO: 117703 - protein, 27 aa, Artificial Sequence
  Cyclic GFR-binding peptide
SPINILYFDSANNVVYGKIPDENEKVV

SEQ ID NO: 117704 - protein, 27 aa, Artificial Sequence
  Cyclic GFR-binding peptide
SPINILYFDKGVVTYYGKIPDENEKVV

SEQ ID NO: 117705 - protein, 27 aa, Artificial Sequence
  Cyclic GFR-binding peptide
SPINVLYFDDMGVPTYGKIPDENEKVV

SEQ ID NO: 117706 - protein, 27 aa, Artificial Sequence
  Cyclic GFR-binding peptide
SPINVLYFDSSNNVIYGKIPDENEKVV

SEQ ID NO: 117707 - protein, 27 aa, Artificial Sequence
  Cyclic GFR-binding peptide
DENEKVVPIKGYIIQQKDNFYLMNIPS

SEQ ID NO: 117708 - protein, 27 aa, Artificial Sequence
  Cyclic GFR-binding peptide
DENEKVVPIKGYVVKDYEDFYLMNIPS

SEQ ID NO: 117709 - protein, 27 aa, Artificial Sequence
  Cyclic GFR-binding peptide
DENEKVVPIKGYIVNSSDDFYLVNIPS

SEQ ID NO: 117710 - protein, 27 aa, Artificial Sequence
  Cyclic GFR-binding peptide
DENEKVVPIKGYLLVRGNDFYLMNIPS

SEQ ID NO: 117711 - protein, 27 aa, Artificial Sequence
  Cyclic GFR-binding peptide
DENEKVVPIKGYVVNNAADFYLINIPS

SEQ ID NO: 117712 - protein, 27 aa, Artificial Sequence
  Cyclic GFR-binding peptide
DENEKVVPIKGYVVKENEDFYLMNIPS

SEQ ID NO: 117713 - protein, 27 aa, Artificial Sequence
  Cyclic GFR-binding peptide
DENEKVVPIKGYVVNNASDFYLINIPS

SEQ ID NO: 117714 - protein, 27 aa, Artificial Sequence
  Cyclic GFR-binding peptide
DENEKVVPIKGYYTVVGKDFYLINIPS

SEQ ID NO: 117715 - protein, 27 aa, Artificial Sequence
  Cyclic GFR-binding peptide
DENEKVVPIKGYTPVGMDDFYLVNIPS

SEQ ID NO: 117716 - protein, 27 aa, Artificial Sequence
  Cyclic GFR-binding peptide
DENEKVVPIKGYIVNNSSDFYLVNIPS

SEQ ID NO: 117717 - protein, 27 aa, Artificial Sequence
  Cyclic GFR-binding peptide
SPINMLYFNDKQQIIYGKIPDENEKVV

SEQ ID NO: 117718 - protein, 27 aa, Artificial Sequence
  Cyclic GFR-binding peptide
SPINMLYFDEYDKVVYGKIPDENEKVV

SEQ ID NO: 117719 - protein, 27 aa, Artificial Sequence
  Cyclic GFR-binding peptide
SPINVLYFDDSSNVIYGKIPDENEKVV

SEQ ID NO: 117720 - protein, 27 aa, Artificial Sequence
  Cyclic GFR-binding peptide
SPINMLYFDNGRVLLYGKIPDENEKVV

SEQ ID NO: 117721 - protein, 27 aa, Artificial Sequence
  Cyclic GFR-binding peptide
SPINILYFDAANNVVYGKIPDENEKVV

SEQ ID NO: 117722 - protein, 27 aa, Artificial Sequence
  Cyclic GFR-binding peptide
SPINMLYFDENEKVVYGKIPDENEKVV

SEQ ID NO: 117723 - protein, 27 aa, Artificial Sequence
  Cyclic GFR-binding peptide
SPINILYFDSANNVVYGKIPDENEKVV

SEQ ID NO: 117724 - protein, 27 aa, Artificial Sequence
  Cyclic GFR-binding peptide
SPINILYFDKGVVTYYGKIPDENEKVV

SEQ ID NO: 117725 - protein, 27 aa, Artificial Sequence
  Cyclic GFR-binding peptide
SPINVLYFDDMGVPTYGKIPDENEKVV

SEQ ID NO: 117726 - protein, 27 aa, Artificial Sequence
  Cyclic GFR-binding peptide
SPINVLYFDSSNNVIYGKIPDENEKVV

SEQ ID NO: 117727 - protein, 27 aa, Artificial Sequence
  Cyclic GFR-binding peptide
DENEKVVRYKKLIKPTKGIFYLISIAN

SEQ ID NO: 117728 - protein, 27 aa, Artificial Sequence
  Cyclic GFR-binding peptide
DENEKVVRYKKLVVKDYEDFYLMSIAN

SEQ ID NO: 117729 - protein, 27 aa, Artificial Sequence
  Cyclic GFR-binding peptide
DENEKVVRYKKLVKPTRGVFYLISIAN

SEQ ID NO: 117730 - protein, 27 aa, Artificial Sequence
  Cyclic GFR-binding peptide
DENEKVVRYKKLVVKENEDFYLMSIAN

SEQ ID NO: 117731 - protein, 27 aa, Artificial Sequence
  Cyclic GFR-binding peptide
DENEKVVRYKKLVKPKRGVFYLISIAN

SEQ ID NO: 117732 - protein, 27 aa, Artificial Sequence
  Cyclic GFR-binding peptide
DENEKVVRYKKLIVNSSDDFYLVSIAN

SEQ ID NO: 117733 - protein, 27 aa, Artificial Sequence
  Cyclic GFR-binding peptide
DENEKVVRYKKLVVNNASDFYLISIAN

SEQ ID NO: 117734 - protein, 27 aa, Artificial Sequence
  Cyclic GFR-binding peptide
NAISILYFIGKTPKILKKYRDENEKVV

SEQ ID NO: 117735 - protein, 27 aa, Artificial Sequence
  Cyclic GFR-binding peptide
NAISMLYFDEYDKVVLKKYRDENEKVV

SEQ ID NO: 117736 - protein, 27 aa, Artificial Sequence
  Cyclic GFR-binding peptide
NAISILYFVGRTPKVLKKYRDENEKVV

SEQ ID NO: 117737 - protein, 27 aa, Artificial Sequence
  Cyclic GFR-binding peptide
NAISMLYFDENEKVVLKKYRDENEKVV

SEQ ID NO: 117738 - protein, 27 aa, Artificial Sequence
  Cyclic GFR-binding peptide
NAISILYFVGRKPKVLKKYRDENEKVV

SEQ ID NO: 117739 - protein, 27 aa, Artificial Sequence
  Cyclic GFR-binding peptide
NAISVLYFDDSSNVILKKYRDENEKVV

SEQ ID NO: 117740 - protein, 27 aa, Artificial Sequence
  Cyclic GFR-binding peptide
NAISILYFDSANNVVLKKYRDENEKVV

SEQ ID NO: 117741 - protein, 27 aa, Artificial Sequence
  Cyclic GFR-binding peptide
DENEKVVEYQKYVVKENEDIYLMSIPS

SEQ ID NO: 117742 - protein, 27 aa, Artificial Sequence
  Cyclic GFR-binding peptide
DENEKVVNSLQEVVKDYEDYYLMTLPE

SEQ ID NO: 117743 - protein, 27 aa, Artificial Sequence
  Cyclic GFR-binding peptide
DENEKVVEYQKYVVKENEDIFLMSIPS

SEQ ID NO: 117744 - protein, 27 aa, Artificial Sequence
  Cyclic GFR-binding peptide
DENEKVVNSLQEIKPTKGIYYVIPLPE

SEQ ID NO: 117745 - protein, 27 aa, Artificial Sequence
  Cyclic GFR-binding peptide
DENEKVVNSLQEVKPKRGVYYLITLPE

SEQ ID NO: 117746 - protein, 27 aa, Artificial Sequence
  Cyclic GFR-binding peptide
DENEKVVEYQKYVVNNAADIYLISIPS

SEQ ID NO: 117747 - protein, 27 aa, Artificial Sequence
  Cyclic GFR-binding peptide
DENEKVVNSLQEVKPTRGVYYVIPLPE

SEQ ID NO: 117748 - protein, 27 aa, Artificial Sequence
  Cyclic GFR-binding peptide
DENEKVVEYQKYIVNSSDDIFLVSIPS

SEQ ID NO: 117749 - protein, 27 aa, Artificial Sequence
  Cyclic GFR-binding peptide
DENEKVVEYQKYVKPTRGVIFLISIPS

SEQ ID NO: 117750 - protein, 27 aa, Artificial Sequence
  Cyclic GFR-binding peptide
DENEKVVEYQKYVVKDYEDIYLMSIPS

SEQ ID NO: 117751 - protein, 27 aa, Artificial Sequence
  Cyclic GFR-binding peptide
DENEKVVNSLQEVVKENEDYYLMTLPE

SEQ ID NO: 117752 - protein, 27 aa, Artificial Sequence
  Cyclic GFR-binding peptide
DENEKVVNSLQEVVNNASDYYLITLPE

SEQ ID NO: 117753 - protein, 27 aa, Artificial Sequence
  Cyclic GFR-binding peptide
DENEKVVNSLQEVKPKRGVYYVIPLPE

SEQ ID NO: 117754 - protein, 27 aa, Artificial Sequence
  Cyclic GFR-binding peptide
DENEKVVEYQKYIVNSSDDIYLVSIPS

SEQ ID NO: 117755 - protein, 27 aa, Artificial Sequence
  Cyclic GFR-binding peptide
DENEKVVNSLQEVVKENEDYYVMPLPE

SEQ ID NO: 117756 - protein, 27 aa, Artificial Sequence
  Cyclic GFR-binding peptide
DENEKVVEYQKYVVKDYEDIFLMSIPS

SEQ ID NO: 117757 - protein, 27 aa, Artificial Sequence
  Cyclic GFR-binding peptide
DENEKVVNSLQEVVNNASDYYVIPLPE

SEQ ID NO: 117758 - protein, 27 aa, Artificial Sequence
  Cyclic GFR-binding peptide
DENEKVVEYQKYVVNNASDIYLISIPS

SEQ ID NO: 117759 - protein, 27 aa, Artificial Sequence
  Cyclic GFR-binding peptide
DENEKVVNSLQEVKPTRGVYYLITLPE

SEQ ID NO: 117760 - protein, 27 aa, Artificial Sequence
  Cyclic GFR-binding peptide
DENEKVVEYQKYYTVVGKDIYLISIPS

SEQ ID NO: 117761 - protein, 27 aa, Artificial Sequence
  Cyclic GFR-binding peptide
DENEKVVEYQKYIIQQKDNIYLMSIPS

SEQ ID NO: 117762 - protein, 27 aa, Artificial Sequence
  Cyclic GFR-binding peptide
DENEKVVEYQKYTPVGMDDIYLVSIPS

SEQ ID NO: 117763 - protein, 27 aa, Artificial Sequence
  Cyclic GFR-binding peptide
DENEKVVEYQKYIKPTKGIIFLISIPS

SEQ ID NO: 117764 - protein, 27 aa, Artificial Sequence
  Cyclic GFR-binding peptide
DENEKVVEYQKYIVNNSSDIYLVSIPS

SEQ ID NO: 117765 - protein, 27 aa, Artificial Sequence
  Cyclic GFR-binding peptide
DENEKVVNSLQEIKPTKGIYYLITLPE

SEQ ID NO: 117766 - protein, 27 aa, Artificial Sequence
  Cyclic GFR-binding peptide
DENEKVVEYQKYVVNNASDIFLISIPS

SEQ ID NO: 117767 - protein, 27 aa, Artificial Sequence
  Cyclic GFR-binding peptide
DENEKVVEYQKYVKPKRGVIFLISIPS

SEQ ID NO: 117768 - protein, 27 aa, Artificial Sequence
  Cyclic GFR-binding peptide
DENEKVVNSLQEIVNSSDDYYVVPLPE

SEQ ID NO: 117769 - protein, 27 aa, Artificial Sequence
  Cyclic GFR-binding peptide
DENEKVVNSLQEVVKDYEDYYVMPLPE

SEQ ID NO: 117770 - protein, 27 aa, Artificial Sequence
  Cyclic GFR-binding peptide
DENEKVVEYQKYLLVRGNDIYLMSIPS

SEQ ID NO: 117771 - protein, 27 aa, Artificial Sequence
  Cyclic GFR-binding peptide
DENEKVVNSLQEIVNSSDDYYLVTLPE

SEQ ID NO: 117772 - protein, 27 aa, Artificial Sequence
  Cyclic GFR-binding peptide
SPISMLYIDENEKVVYKQYEDENEKVV

SEQ ID NO: 117773 - protein, 27 aa, Artificial Sequence
  Cyclic GFR-binding peptide
EPLTMLYYDEYDKVVEQLSNDENEKVV

SEQ ID NO: 117774 - protein, 27 aa, Artificial Sequence
  Cyclic GFR-binding peptide
SPISMLFIDENEKVVYKQYEDENEKVV

SEQ ID NO: 117775 - protein, 27 aa, Artificial Sequence
  Cyclic GFR-binding peptide
EPLPIVYYIGKTPKIEQLSNDENEKVV

SEQ ID NO: 117776 - protein, 27 aa, Artificial Sequence
  Cyclic GFR-binding peptide
EPLTILYYVGRKPKVEQLSNDENEKVV

SEQ ID NO: 117777 - protein, 27 aa, Artificial Sequence
  Cyclic GFR-binding peptide
SPISILYIDAANNVVYKQYEDENEKVV

SEQ ID NO: 117778 - protein, 27 aa, Artificial Sequence
  Cyclic GFR-binding peptide
EPLPIVYYVGRTPKVEQLSNDENEKVV

SEQ ID NO: 117779 - protein, 27 aa, Artificial Sequence
  Cyclic GFR-binding peptide
SPISVLFIDDSSNVIYKQYEDENEKVV

SEQ ID NO: 117780 - protein, 27 aa, Artificial Sequence
  Cyclic GFR-binding peptide
SPISILFIVGRTPKVYKQYEDENEKVV

SEQ ID NO: 117781 - protein, 27 aa, Artificial Sequence
  Cyclic GFR-binding peptide
SPISMLYIDEYDKVVYKQYEDENEKVV

SEQ ID NO: 117782 - protein, 27 aa, Artificial Sequence
  Cyclic GFR-binding peptide
EPLTMLYYDENEKVVEQLSNDENEKVV

SEQ ID NO: 117783 - protein, 27 aa, Artificial Sequence
  Cyclic GFR-binding peptide
EPLTILYYDSANNVVEQLSNDENEKVV

SEQ ID NO: 117784 - protein, 27 aa, Artificial Sequence
  Cyclic GFR-binding peptide
EPLPIVYYVGRKPKVEQLSNDENEKVV

SEQ ID NO: 117785 - protein, 27 aa, Artificial Sequence
  Cyclic GFR-binding peptide
SPISVLYIDDSSNVIYKQYEDENEKVV

SEQ ID NO: 117786 - protein, 27 aa, Artificial Sequence
  Cyclic GFR-binding peptide
EPLPMVYYDENEKVVEQLSNDENEKVV

SEQ ID NO: 117787 - protein, 27 aa, Artificial Sequence
  Cyclic GFR-binding peptide
SPISMLFIDEYDKVVYKQYEDENEKVV

SEQ ID NO: 117788 - protein, 27 aa, Artificial Sequence
  Cyclic GFR-binding peptide
EPLPIVYYDSANNVVEQLSNDENEKVV

SEQ ID NO: 117789 - protein, 27 aa, Artificial Sequence
  Cyclic GFR-binding peptide
SPISILYIDSANNVVYKQYEDENEKVV

SEQ ID NO: 117790 - protein, 27 aa, Artificial Sequence
  Cyclic GFR-binding peptide
EPLTILYYVGRTPKVEQLSNDENEKVV

SEQ ID NO: 117791 - protein, 27 aa, Artificial Sequence
  Cyclic GFR-binding peptide
SPISILYIDKGVVTYYKQYEDENEKVV

SEQ ID NO: 117792 - protein, 27 aa, Artificial Sequence
  Cyclic GFR-binding peptide
SPISMLYINDKQQIIYKQYEDENEKVV

SEQ ID NO: 117793 - protein, 27 aa, Artificial Sequence
  Cyclic GFR-binding peptide
SPISVLYIDDMGVPTYKQYEDENEKVV

SEQ ID NO: 117794 - protein, 27 aa, Artificial Sequence
  Cyclic GFR-binding peptide
SPISILFIIGKTPKIYKQYEDENEKVV

SEQ ID NO: 117795 - protein, 27 aa, Artificial Sequence
  Cyclic GFR-binding peptide
SPISVLYIDSSNNVIYKQYEDENEKVV

SEQ ID NO: 117796 - protein, 27 aa, Artificial Sequence
  Cyclic GFR-binding peptide
EPLTILYYIGKTPKIEQLSNDENEKVV

SEQ ID NO: 117797 - protein, 27 aa, Artificial Sequence
  Cyclic GFR-binding peptide
SPISILFIDSANNVVYKQYEDENEKVV

SEQ ID NO: 117798 - protein, 27 aa, Artificial Sequence
  Cyclic GFR-binding peptide
SPISILFIVGRKPKVYKQYEDENEKVV

SEQ ID NO: 117799 - protein, 27 aa, Artificial Sequence
  Cyclic GFR-binding peptide
EPLPVVYYDDSSNVIEQLSNDENEKVV

SEQ ID NO: 117800 - protein, 27 aa, Artificial Sequence
  Cyclic GFR-binding peptide
EPLPMVYYDEYDKVVEQLSNDENEKVV

SEQ ID NO: 117801 - protein, 27 aa, Artificial Sequence
  Cyclic GFR-binding peptide
SPISMLYIDNGRVLLYKQYEDENEKVV

SEQ ID NO: 117802 - protein, 27 aa, Artificial Sequence
  Cyclic GFR-binding peptide
EPLTVLYYDDSSNVIEQLSNDENEKVV

SEQ ID NO: 117803 - protein, 27 aa, Artificial Sequence
  Cyclic GFR-binding peptide
DENEKVVPYVKLVVKENEDFFLMSLSS

SEQ ID NO: 117804 - protein, 29 aa, Artificial Sequence
  Cyclic GFR-binding peptide
DENEKVVPYVKLHQGQHPKIRFFLMSLSS

SEQ ID NO: 117805 - protein, 27 aa, Artificial Sequence
  Cyclic GFR-binding peptide
DENEKVVPYVKLVVNKNEDFFLISLSS

SEQ ID NO: 117806 - protein, 27 aa, Artificial Sequence
  Cyclic GFR-binding peptide
DENEKVVPYVKLVKPKRGVLFFISLSS

SEQ ID NO: 117807 - protein, 27 aa, Artificial Sequence
  Cyclic GFR-binding peptide
DENEKVVPYVKLVVNNAADFFLISLSS

SEQ ID NO: 117808 - protein, 27 aa, Artificial Sequence
  Cyclic GFR-binding peptide
DENEKVVPYVKLIVNNSSDFFLVSLSS

SEQ ID NO: 117809 - protein, 27 aa, Artificial Sequence
  Cyclic GFR-binding peptide
DENEKVVPYVKLIIQQKDNFFLMSLSS

SEQ ID NO: 117810 - protein, 27 aa, Artificial Sequence
  Cyclic GFR-binding peptide
DENEKVVPYVKLLLVRGNDFFLMSLSS

SEQ ID NO: 117811 - protein, 27 aa, Artificial Sequence
  Cyclic GFR-binding peptide
DENEKVVPYVKLVKPTRGVLFFISLSS

SEQ ID NO: 117812 - protein, 27 aa, Artificial Sequence
  Cyclic GFR-binding peptide
DENEKVVPYVKLVVNNASDFFLISLSS

SEQ ID NO: 117813 - protein, 27 aa, Artificial Sequence
  Cyclic GFR-binding peptide
DENEKVVPYVKLIKPTKGILFFISLSS

SEQ ID NO: 117814 - protein, 27 aa, Artificial Sequence
  Cyclic GFR-binding peptide
DENEKVVPYVKLTPVGMDDFFLVSLSS

SEQ ID NO: 117815 - protein, 27 aa, Artificial Sequence
  Cyclic GFR-binding peptide
DENEKVVPYVKLYTVVGKDFFLISLSS

SEQ ID NO: 117816 - protein, 27 aa, Artificial Sequence
  Cyclic GFR-binding peptide
DENEKVVPYVKLVVKDYEDFFLMSLSS

SEQ ID NO: 117817 - protein, 27 aa, Artificial Sequence
  Cyclic GFR-binding peptide
DENEKVVPYVKLIVNSSDDFFLVSLSS

SEQ ID NO: 117818 - protein, 29 aa, Artificial Sequence
  Cyclic GFR-binding peptide
DENEKVVPYVKLLKPKKRVYEFFLVSLSS

SEQ ID NO: 117819 - protein, 27 aa, Artificial Sequence
  Cyclic GFR-binding peptide
SSLSMLFFDENEKVVLKVYPDENEKVV

SEQ ID NO: 117820 - protein, 29 aa, Artificial Sequence
  Cyclic GFR-binding peptide
SSLSMLFFRIKPHQGQHLKVYPDENEKVV

SEQ ID NO: 117821 - protein, 27 aa, Artificial Sequence
  Cyclic GFR-binding peptide
SSLSILFFDENKNVVLKVYPDENEKVV

SEQ ID NO: 117822 - protein, 27 aa, Artificial Sequence
  Cyclic GFR-binding peptide
SSLSILFFVGRKPKVLKVYPDENEKVV

SEQ ID NO: 117823 - protein, 27 aa, Artificial Sequence
  Cyclic GFR-binding peptide
SSLSILFFDAANNVVLKVYPDENEKVV

SEQ ID NO: 117824 - protein, 27 aa, Artificial Sequence
  Cyclic GFR-binding peptide
SSLSVLFFDSSNNVILKVYPDENEKVV

SEQ ID NO: 117825 - protein, 27 aa, Artificial Sequence
  Cyclic GFR-binding peptide
SSLSMLFFNDKQQIILKVYPDENEKVV

SEQ ID NO: 117826 - protein, 27 aa, Artificial Sequence
  Cyclic GFR-binding peptide
SSLSMLFFDNGRVLLLKVYPDENEKVV

SEQ ID NO: 117827 - protein, 27 aa, Artificial Sequence
  Cyclic GFR-binding peptide
SSLSILFFVGRTPKVLKVYPDENEKVV

SEQ ID NO: 117828 - protein, 27 aa, Artificial Sequence
  Cyclic GFR-binding peptide
SSLSILFFDSANNVVLKVYPDENEKVV

SEQ ID NO: 117829 - protein, 27 aa, Artificial Sequence
  Cyclic GFR-binding peptide
SSLSILFFIGKTPKILKVYPDENEKVV

SEQ ID NO: 117830 - protein, 27 aa, Artificial Sequence
  Cyclic GFR-binding peptide
SSLSVLFFDDMGVPTLKVYPDENEKVV

SEQ ID NO: 117831 - protein, 27 aa, Artificial Sequence
  Cyclic GFR-binding peptide
SSLSILFFDKGVVTYLKVYPDENEKVV

SEQ ID NO: 117832 - protein, 27 aa, Artificial Sequence
  Cyclic GFR-binding peptide
SSLSMLFFDEYDKVVLKVYPDENEKVV

SEQ ID NO: 117833 - protein, 27 aa, Artificial Sequence
  Cyclic GFR-binding peptide
SSLSVLFFDDSSNVILKVYPDENEKVV

SEQ ID NO: 117834 - protein, 29 aa, Artificial Sequence
  Cyclic GFR-binding peptide
SSLSVLFFEYVRKKPKLLKVYPDENEKVV

SEQ ID NO: 117835 - protein, 27 aa, Artificial Sequence
  Cyclic GFR-binding peptide
DENEKVVNSLQEVVKDYEDYYLMTLPE

SEQ ID NO: 117836 - protein, 27 aa, Artificial Sequence
  Cyclic GFR-binding peptide
DENEKVVNSLQEIKPTKGIYYVIPLPE

SEQ ID NO: 117837 - protein, 27 aa, Artificial Sequence
  Cyclic GFR-binding peptide
DENEKVVSMEGIIVNSSDDMIQVTINS

SEQ ID NO: 117838 - protein, 27 aa, Artificial Sequence
  Cyclic GFR-binding peptide
DENEKVVNSLQEVKPKRGVYYLITLPE

SEQ ID NO: 117839 - protein, 27 aa, Artificial Sequence
  Cyclic GFR-binding peptide
DENEKVVNSLQEVKPTRGVYYVIPLPE

SEQ ID NO: 117840 - protein, 27 aa, Artificial Sequence
  Cyclic GFR-binding peptide
DENEKVVVTAKKVVKENEDIKRMQVPR

SEQ ID NO: 117841 - protein, 27 aa, Artificial Sequence
  Cyclic GFR-binding peptide
DENEKVVNSLQEIVNSSDDYYVVPLPE

SEQ ID NO: 117842 - protein, 29 aa, Artificial Sequence
  Cyclic GFR-binding peptide
DENEKVVSMEGIHQGQHPKIRMIQMTINS

SEQ ID NO: 117843 - protein, 29 aa, Artificial Sequence
  Cyclic GFR-binding peptide
DENEKVVVTAKKLKPKKRVYEIKRVQVPR

SEQ ID NO: 117844 - protein, 27 aa, Artificial Sequence
  Cyclic GFR-binding peptide
DENEKVVSMEGIVVKDYEDMIQMTINS

SEQ ID NO: 117845 - protein, 29 aa, Artificial Sequence
  Cyclic GFR-binding peptide
DENEKVVVQVEKHQGQHPKIRVKAMKVSR

SEQ ID NO: 117846 - protein, 27 aa, Artificial Sequence
  Cyclic GFR-binding peptide
DENEKVVVTAKKIKPTKGIIKRIQVPR

SEQ ID NO: 117847 - protein, 27 aa, Artificial Sequence
  Cyclic GFR-binding peptide
DENEKVVSMEGIVKPTRGVMIQITINS

SEQ ID NO: 117848 - protein, 29 aa, Artificial Sequence
  Cyclic GFR-binding peptide
DENEKVVNSLQEFIPKKRVIEYYVVPLPE

SEQ ID NO: 117849 - protein, 27 aa, Artificial Sequence
  Cyclic GFR-binding peptide
DENEKVVVQVEKVKPKRGVVKAIKVSR

SEQ ID NO: 117850 - protein, 27 aa, Artificial Sequence
  Cyclic GFR-binding peptide
DENEKVVVQVEKVVKENEDVKAMKVSR

SEQ ID NO: 117851 - protein, 27 aa, Artificial Sequence
  Cyclic GFR-binding peptide
DENEKVVNSLQEVVKENEDYYVMPLPE

SEQ ID NO: 117852 - protein, 27 aa, Artificial Sequence
  Cyclic GFR-binding peptide
DENEKVVVTAKKIVNSSDDIKRVQVPR

SEQ ID NO: 117853 - protein, 27 aa, Artificial Sequence
  Cyclic GFR-binding peptide
DENEKVVVQVEKIKPTKGIVKAIKVSR

SEQ ID NO: 117854 - protein, 27 aa, Artificial Sequence
  Cyclic GFR-binding peptide
DENEKVVNSLQEIKPTKGIYYLITLPE

SEQ ID NO: 117855 - protein, 29 aa, Artificial Sequence
  Cyclic GFR-binding peptide
DENEKVVNSLQEFIPKKRVIEYYLVTLPE

SEQ ID NO: 117856 - protein, 27 aa, Artificial Sequence
  Cyclic GFR-binding peptide
DENEKVVVQVEKIVNSSDDVKAVKVSR

SEQ ID NO: 117857 - protein, 27 aa, Artificial Sequence
  Cyclic GFR-binding peptide
DENEKVVNSLQEIVNSSDDYYLVTLPE

SEQ ID NO: 117858 - protein, 29 aa, Artificial Sequence
  Cyclic GFR-binding peptide
DENEKVVVQVEKLKPKKRVYEVKAVKVSR

SEQ ID NO: 117859 - protein, 29 aa, Artificial Sequence
  Cyclic GFR-binding peptide
DENEKVVVQVEKFIPKKRVIEVKAVKVSR

SEQ ID NO: 117860 - protein, 29 aa, Artificial Sequence
  Cyclic GFR-binding peptide
DENEKVVVTAKKHQGQHPKIRIKRMQVPR

SEQ ID NO: 117861 - protein, 27 aa, Artificial Sequence
  Cyclic GFR-binding peptide
DENEKVVNSLQEVVKENEDYYLMTLPE

SEQ ID NO: 117862 - protein, 29 aa, Artificial Sequence
  Cyclic GFR-binding peptide
DENEKVVSMEGIFIPKKRVIEMIQVTINS

SEQ ID NO: 117863 - protein, 27 aa, Artificial Sequence
  Cyclic GFR-binding peptide
DENEKVVNSLQEVKPKRGVYYVIPLPE

SEQ ID NO: 117864 - protein, 27 aa, Artificial Sequence
  Cyclic GFR-binding peptide
DENEKVVVTAKKVKPKRGVIKRIQVPR

SEQ ID NO: 117865 - protein, 27 aa, Artificial Sequence
  Cyclic GFR-binding peptide
DENEKVVNSLQEVKPTRGVYYLITLPE

SEQ ID NO: 117866 - protein, 27 aa, Artificial Sequence
  Cyclic GFR-binding peptide
DENEKVVVQVEKVKPTRGVVKAIKVSR

SEQ ID NO: 117867 - protein, 29 aa, Artificial Sequence
  Cyclic GFR-binding peptide
DENEKVVSMEGILKPKKRVYEMIQVTINS

SEQ ID NO: 117868 - protein, 27 aa, Artificial Sequence
  Cyclic GFR-binding peptide
DENEKVVNSLQEVVKDYEDYYVMPLPE

SEQ ID NO: 117869 - protein, 27 aa, Artificial Sequence
  Cyclic GFR-binding peptide
DENEKVVVTAKKVKPTRGVIKRIQVPR

SEQ ID NO: 117870 - protein, 29 aa, Artificial Sequence
  Cyclic GFR-binding peptide
DENEKVVNSLQELKPKKRVYEYYLVTLPE

SEQ ID NO: 117871 - protein, 27 aa, Artificial Sequence
  Cyclic GFR-binding peptide
DENEKVVSMEGIVKPKRGVMIQITINS

SEQ ID NO: 117872 - protein, 27 aa, Artificial Sequence
  Cyclic GFR-binding peptide
DENEKVVSMEGIVVKENEDMIQMTINS

SEQ ID NO: 117873 - protein, 27 aa, Artificial Sequence
  Cyclic GFR-binding peptide
DENEKVVSMEGIIKPTKGIMIQITINS

SEQ ID NO: 117874 - protein, 29 aa, Artificial Sequence
  Cyclic GFR-binding peptide
DENEKVVNSLQEHQGQHPKIRYYLMTLPE

SEQ ID NO: 117875 - protein, 27 aa, Artificial Sequence
  Cyclic GFR-binding peptide
DENEKVVVTAKKVVKDYEDIKRMQVPR

SEQ ID NO: 117876 - protein, 29 aa, Artificial Sequence
  Cyclic GFR-binding peptide
DENEKVVNSLQEHQGQHPKIRYYVMPLPE

SEQ ID NO: 117877 - protein, 29 aa, Artificial Sequence
  Cyclic GFR-binding peptide
DENEKVVNSLQELKPKKRVYEYYVVPLPE

SEQ ID NO: 117878 - protein, 29 aa, Artificial Sequence
  Cyclic GFR-binding peptide
DENEKVVVTAKKFIPKKRVIEIKRVQVPR

SEQ ID NO: 117879 - protein, 27 aa, Artificial Sequence
  Cyclic GFR-binding peptide
DENEKVVVQVEKVVKDYEDVKAMKVSR

SEQ ID NO: 117880 - protein, 27 aa, Artificial Sequence
  Cyclic GFR-binding peptide
EPLTMLYYDEYDKVVEQLSNDENEKVV

SEQ ID NO: 117881 - protein, 27 aa, Artificial Sequence
  Cyclic GFR-binding peptide
EPLPIVYYIGKTPKIEQLSNDENEKVV

SEQ ID NO: 117882 - protein, 27 aa, Artificial Sequence
  Cyclic GFR-binding peptide
SNITVQIMDDSSNVIIGEMSDENEKVV

SEQ ID NO: 117883 - protein, 27 aa, Artificial Sequence
  Cyclic GFR-binding peptide
EPLTILYYVGRKPKVEQLSNDENEKVV

SEQ ID NO: 117884 - protein, 27 aa, Artificial Sequence
  Cyclic GFR-binding peptide
EPLPIVYYVGRTPKVEQLSNDENEKVV

SEQ ID NO: 117885 - protein, 27 aa, Artificial Sequence
  Cyclic GFR-binding peptide
RPVQMRKIDENEKVVKKATVDENEKVV

SEQ ID NO: 117886 - protein, 27 aa, Artificial Sequence
  Cyclic GFR-binding peptide
EPLPVVYYDDSSNVIEQLSNDENEKVV

SEQ ID NO: 117887 - protein, 29 aa, Artificial Sequence
  Cyclic GFR-binding peptide
SNITMQIMRIKPHQGQHIGEMSDENEKVV

SEQ ID NO: 117888 - protein, 29 aa, Artificial Sequence
  Cyclic GFR-binding peptide
RPVQVRKIEYVRKKPKLKKATVDENEKVV

SEQ ID NO: 117889 - protein, 27 aa, Artificial Sequence
  Cyclic GFR-binding peptide
SNITMQIMDEYDKVVIGEMSDENEKVV

SEQ ID NO: 117890 - protein, 29 aa, Artificial Sequence
  Cyclic GFR-binding peptide
RSVKMAKVRIKPHQGQHKEVQVDENEKVV

SEQ ID NO: 117891 - protein, 27 aa, Artificial Sequence
  Cyclic GFR-binding peptide
RPVQIRKIIGKTPKIKKATVDENEKVV

SEQ ID NO: 117892 - protein, 27 aa, Artificial Sequence
  Cyclic GFR-binding peptide
SNITIQIMVGRTPKVIGEMSDENEKVV

SEQ ID NO: 117893 - protein, 29 aa, Artificial Sequence
  Cyclic GFR-binding peptide
EPLPVVYYEIVRKKPIFEQLSNDENEKVV

SEQ ID NO: 117894 - protein, 27 aa, Artificial Sequence
  Cyclic GFR-binding peptide
RSVKIAKVVGRKPKVKEVQVDENEKVV

SEQ ID NO: 117895 - protein, 27 aa, Artificial Sequence
  Cyclic GFR-binding peptide
RSVKMAKVDENEKVVKEVQVDENEKVV

SEQ ID NO: 117896 - protein, 27 aa, Artificial Sequence
  Cyclic GFR-binding peptide
EPLPMVYYDENEKVVEQLSNDENEKVV

SEQ ID NO: 117897 - protein, 27 aa, Artificial Sequence
  Cyclic GFR-binding peptide
RPVQVRKIDDSSNVIKKATVDENEKVV

SEQ ID NO: 117898 - protein, 27 aa, Artificial Sequence
  Cyclic GFR-binding peptide
RSVKIAKVIGKTPKIKEVQVDENEKVV

SEQ ID NO: 117899 - protein, 27 aa, Artificial Sequence
  Cyclic GFR-binding peptide
EPLTILYYIGKTPKIEQLSNDENEKVV

SEQ ID NO: 117900 - protein, 29 aa, Artificial Sequence
  Cyclic GFR-binding peptide
EPLTVLYYEIVRKKPIFEQLSNDENEKVV

SEQ ID NO: 117901 - protein, 27 aa, Artificial Sequence
  Cyclic GFR-binding peptide
RSVKVAKVDDSSNVIKEVQVDENEKVV

SEQ ID NO: 117902 - protein, 27 aa, Artificial Sequence
  Cyclic GFR-binding peptide
EPLTVLYYDDSSNVIEQLSNDENEKVV

SEQ ID NO: 117903 - protein, 29 aa, Artificial Sequence
  Cyclic GFR-binding peptide
RSVKVAKVEYVRKKPKLKEVQVDENEKVV

SEQ ID NO: 117904 - protein, 29 aa, Artificial Sequence
  Cyclic GFR-binding peptide
RSVKVAKVEIVRKKPIFKEVQVDENEKVV

SEQ ID NO: 117905 - protein, 29 aa, Artificial Sequence
  Cyclic GFR-binding peptide
RPVQMRKIRIKPHQGQHKKATVDENEKVV

SEQ ID NO: 117906 - protein, 27 aa, Artificial Sequence
  Cyclic GFR-binding peptide
EPLTMLYYDENEKVVEQLSNDENEKVV

SEQ ID NO: 117907 - protein, 29 aa, Artificial Sequence
  Cyclic GFR-binding peptide
SNITVQIMEIVRKKPIFIGEMSDENEKVV

SEQ ID NO: 117908 - protein, 27 aa, Artificial Sequence
  Cyclic GFR-binding peptide
EPLPIVYYVGRKPKVEQLSNDENEKVV

SEQ ID NO: 117909 - protein, 27 aa, Artificial Sequence
  Cyclic GFR-binding peptide
RPVQIRKIVGRKPKVKKATVDENEKVV

SEQ ID NO: 117910 - protein, 27 aa, Artificial Sequence
  Cyclic GFR-binding peptide
EPLTILYYVGRTPKVEQLSNDENEKVV

SEQ ID NO: 117911 - protein, 27 aa, Artificial Sequence
  Cyclic GFR-binding peptide
RSVKIAKVVGRTPKVKEVQVDENEKVV

SEQ ID NO: 117912 - protein, 29 aa, Artificial Sequence
  Cyclic GFR-binding peptide
SNITVQIMEYVRKKPKLIGEMSDENEKVV

SEQ ID NO: 117913 - protein, 27 aa, Artificial Sequence
  Cyclic GFR-binding peptide
EPLPMVYYDEYDKVVEQLSNDENEKVV

SEQ ID NO: 117914 - protein, 27 aa, Artificial Sequence
  Cyclic GFR-binding peptide
RPVQIRKIVGRTPKVKKATVDENEKVV

SEQ ID NO: 117915 - protein, 29 aa, Artificial Sequence
  Cyclic GFR-binding peptide
EPLTVLYYEYVRKKPKLEQLSNDENEKVV

SEQ ID NO: 117916 - protein, 27 aa, Artificial Sequence
  Cyclic GFR-binding peptide
SNITIQIMVGRKPKVIGEMSDENEKVV

SEQ ID NO: 117917 - protein, 27 aa, Artificial Sequence
  Cyclic GFR-binding peptide
SNITMQIMDENEKVVIGEMSDENEKVV

SEQ ID NO: 117918 - protein, 27 aa, Artificial Sequence
  Cyclic GFR-binding peptide
SNITIQIMIGKTPKIIGEMSDENEKVV

SEQ ID NO: 117919 - protein, 29 aa, Artificial Sequence
  Cyclic GFR-binding peptide
EPLTMLYYRIKPHQGQHEQLSNDENEKVV

SEQ ID NO: 117920 - protein, 27 aa, Artificial Sequence
  Cyclic GFR-binding peptide
RPVQMRKIDEYDKVVKKATVDENEKVV

SEQ ID NO: 117921 - protein, 29 aa, Artificial Sequence
  Cyclic GFR-binding peptide
EPLPMVYYRIKPHQGQHEQLSNDENEKVV

SEQ ID NO: 117922 - protein, 29 aa, Artificial Sequence
  Cyclic GFR-binding peptide
EPLPVVYYEYVRKKPKLEQLSNDENEKVV

SEQ ID NO: 117923 - protein, 29 aa, Artificial Sequence
  Cyclic GFR-binding peptide
RPVQVRKIEIVRKKPIFKKATVDENEKVV

SEQ ID NO: 117924 - protein, 27 aa, Artificial Sequence
  Cyclic GFR-binding peptide
RSVKMAKVDEYDKVVKEVQVDENEKVV

SEQ ID NO: 117925 - protein, 27 aa, Artificial Sequence
  Cyclic GFR-binding peptide
DENEKVVRYKKLIIQQKDNFYLMSIAN

SEQ ID NO: 117926 - protein, 27 aa, Artificial Sequence
  Cyclic GFR-binding peptide
DENEKVVRYKKLIVNNSSDFYLVSIAN

SEQ ID NO: 117927 - protein, 27 aa, Artificial Sequence
  Cyclic GFR-binding peptide
DENEKVVRYKKLYTVVGKDFYLISIAN

SEQ ID NO: 117928 - protein, 27 aa, Artificial Sequence
  Cyclic GFR-binding peptide
DENEKVVRYKKLIVNSSDDFYLVSIAN

SEQ ID NO: 117929 - protein, 27 aa, Artificial Sequence
  Cyclic GFR-binding peptide
DENEKVVRYKKLVVKDYEDFYLMSIAN

SEQ ID NO: 117930 - protein, 27 aa, Artificial Sequence
  Cyclic GFR-binding peptide
DENEKVVRYKKLLLVRGNDFYLMSIAN

SEQ ID NO: 117931 - protein, 27 aa, Artificial Sequence
  Cyclic GFR-binding peptide
DENEKVVRYKKLVVKENEDFYLMSIAN

SEQ ID NO: 117932 - protein, 27 aa, Artificial Sequence
  Cyclic GFR-binding peptide
DENEKVVRYKKLVVNNAADFYLISIAN

SEQ ID NO: 117933 - protein, 27 aa, Artificial Sequence
  Cyclic GFR-binding peptide
DENEKVVRYKKLTPVGMDDFYLVSIAN

SEQ ID NO: 117934 - protein, 27 aa, Artificial Sequence
  Cyclic GFR-binding peptide
DENEKVVRYKKLVVNNASDFYLISIAN

SEQ ID NO: 117935 - protein, 27 aa, Artificial Sequence
  Cyclic GFR-binding peptide
NAISMLYFNDKQQIILKKYRDENEKVV

SEQ ID NO: 117936 - protein, 27 aa, Artificial Sequence
  Cyclic GFR-binding peptide
NAISVLYFDSSNNVILKKYRDENEKVV

SEQ ID NO: 117937 - protein, 27 aa, Artificial Sequence
  Cyclic GFR-binding peptide
NAISILYFDKGVVTYLKKYRDENEKVV

SEQ ID NO: 117938 - protein, 27 aa, Artificial Sequence
  Cyclic GFR-binding peptide
NAISVLYFDDSSNVILKKYRDENEKVV

SEQ ID NO: 117939 - protein, 27 aa, Artificial Sequence
  Cyclic GFR-binding peptide
NAISMLYFDEYDKVVLKKYRDENEKVV

SEQ ID NO: 117940 - protein, 27 aa, Artificial Sequence
  Cyclic GFR-binding peptide
NAISMLYFDNGRVLLLKKYRDENEKVV

SEQ ID NO: 117941 - protein, 27 aa, Artificial Sequence
  Cyclic GFR-binding peptide
NAISMLYFDENEKVVLKKYRDENEKVV

SEQ ID NO: 117942 - protein, 27 aa, Artificial Sequence
  Cyclic GFR-binding peptide
NAISILYFDAANNVVLKKYRDENEKVV

SEQ ID NO: 117943 - protein, 27 aa, Artificial Sequence
  Cyclic GFR-binding peptide
NAISVLYFDDMGVPTLKKYRDENEKVV

SEQ ID NO: 117944 - protein, 27 aa, Artificial Sequence
  Cyclic GFR-binding peptide
NAISILYFDSANNVVLKKYRDENEKVV

SEQ ID NO: 117945 - protein, 27 aa, Artificial Sequence
  Cyclic GFR-binding peptide
DENEKVVEYKFKVKPTRGVLYLISIPE

SEQ ID NO: 117946 - protein, 27 aa, Artificial Sequence
  Cyclic GFR-binding peptide
DENEKVVYHYKLVVKDYEDKYLMSIPS

SEQ ID NO: 117947 - protein, 27 aa, Artificial Sequence
  Cyclic GFR-binding peptide
DENEKVVEYKFKTPVGMDDLYLVSIPE

SEQ ID NO: 117948 - protein, 27 aa, Artificial Sequence
  Cyclic GFR-binding peptide
DENEKVVRYKKLVVKDYEDFYLMSIAN

SEQ ID NO: 117949 - protein, 27 aa, Artificial Sequence
  Cyclic GFR-binding peptide
DENEKVVRHKRLVKPKRGVYYLISTAS

SEQ ID NO: 117950 - protein, 27 aa, Artificial Sequence
  Cyclic GFR-binding peptide
DENEKVVYHYKLVKPKRGVKYLISIPS

SEQ ID NO: 117951 - protein, 27 aa, Artificial Sequence
  Cyclic GFR-binding peptide
DENEKVVEYKFKIKPTKGILYLISIPE

SEQ ID NO: 117952 - protein, 27 aa, Artificial Sequence
  Cyclic GFR-binding peptide
DENEKVVEYKFKVVNKNEDLYLISIPE

SEQ ID NO: 117953 - protein, 27 aa, Artificial Sequence
  Cyclic GFR-binding peptide
DENEKVVPIKGYVKPTRGVFYLINIPS

SEQ ID NO: 117954 - protein, 27 aa, Artificial Sequence
  Cyclic GFR-binding peptide
DENEKVVPIKGYVVKENEDFYLMNIPS

SEQ ID NO: 117955 - protein, 27 aa, Artificial Sequence
  Cyclic GFR-binding peptide
DENEKVVYHYKLYTVVGKDKYLISIPS

SEQ ID NO: 117956 - protein, 27 aa, Artificial Sequence
  Cyclic GFR-binding peptide
DENEKVVEYKFKLLVRGNDLYLMSIPE

SEQ ID NO: 117957 - protein, 27 aa, Artificial Sequence
  Cyclic GFR-binding peptide
DENEKVVRYKKLVKPKRGVFYLISIAN

SEQ ID NO: 117958 - protein, 27 aa, Artificial Sequence
  Cyclic GFR-binding peptide
DENEKVVPIKGYTPVGMDDFYLVNIPS

SEQ ID NO: 117959 - protein, 27 aa, Artificial Sequence
  Cyclic GFR-binding peptide
DENEKVVYHYKLVVNKNEDKYLISIPS

SEQ ID NO: 117960 - protein, 27 aa, Artificial Sequence
  Cyclic GFR-binding peptide
DENEKVVYHYKLIVNSSDDKYLVSIPS

SEQ ID NO: 117961 - protein, 27 aa, Artificial Sequence
  Cyclic GFR-binding peptide
DENEKVVPIKGYIVNSSDDFYLVNIPS

SEQ ID NO: 117962 - protein, 27 aa, Artificial Sequence
  Cyclic GFR-binding peptide
DENEKVVRYKKLYTVVGKDFYLISIAN

SEQ ID NO: 117963 - protein, 27 aa, Artificial Sequence
  Cyclic GFR-binding peptide
DENEKVVRHKRLLLVRGNDYYLMSTAS

SEQ ID NO: 117964 - protein, 27 aa, Artificial Sequence
  Cyclic GFR-binding peptide
DENEKVVYHYKLLLVRGNDKYLMSIPS

SEQ ID NO: 117965 - protein, 27 aa, Artificial Sequence
  Cyclic GFR-binding peptide
DENEKVVRYKKLIVNSSDDFYLVSIAN

SEQ ID NO: 117966 - protein, 27 aa, Artificial Sequence
  Cyclic GFR-binding peptide
DENEKVVRHKRLVVNKNEDYYLISTAS

SEQ ID NO: 117967 - protein, 27 aa, Artificial Sequence
  Cyclic GFR-binding peptide
DENEKVVRHKRLIKPTKGIYYLISTAS

SEQ ID NO: 117968 - protein, 27 aa, Artificial Sequence
  Cyclic GFR-binding peptide
DENEKVVPIKGYYTVVGKDFYLINIPS

SEQ ID NO: 117969 - protein, 27 aa, Artificial Sequence
  Cyclic GFR-binding peptide
DENEKVVYHYKLTPVGMDDKYLVSIPS

SEQ ID NO: 117970 - protein, 27 aa, Artificial Sequence
  Cyclic GFR-binding peptide
DENEKVVRHKRLIVNNSSDYYLVSTAS

SEQ ID NO: 117971 - protein, 27 aa, Artificial Sequence
  Cyclic GFR-binding peptide
DENEKVVRYKKLLLVRGNDFYLMSIAN

SEQ ID NO: 117972 - protein, 27 aa, Artificial Sequence
  Cyclic GFR-binding peptide
DENEKVVYHYKLVKPTRGVKYLISIPS

SEQ ID NO: 117973 - protein, 27 aa, Artificial Sequence
  Cyclic GFR-binding peptide
DENEKVVRHKRLIVNSSDDYYLVSTAS

SEQ ID NO: 117974 - protein, 27 aa, Artificial Sequence
  Cyclic GFR-binding peptide
DENEKVVPIKGYLLVRGNDFYLMNIPS

SEQ ID NO: 117975 - protein, 27 aa, Artificial Sequence
  Cyclic GFR-binding peptide
DENEKVVRYKKLVVNKNEDFYLISIAN

SEQ ID NO: 117976 - protein, 27 aa, Artificial Sequence
  Cyclic GFR-binding peptide
DENEKVVEYKFKVVKDYEDLYLMSIPE

SEQ ID NO: 117977 - protein, 27 aa, Artificial Sequence
  Cyclic GFR-binding peptide
DENEKVVPIKGYVVNKNEDFYLINIPS

SEQ ID NO: 117978 - protein, 27 aa, Artificial Sequence
  Cyclic GFR-binding peptide
DENEKVVPIKGYIKPTKGIFYLINIPS

SEQ ID NO: 117979 - protein, 27 aa, Artificial Sequence
  Cyclic GFR-binding peptide
DENEKVVEYKFKVVNNAADLYLISIPE

SEQ ID NO: 117980 - protein, 27 aa, Artificial Sequence
  Cyclic GFR-binding peptide
DENEKVVRHKRLYTVVGKDYYLISTAS

SEQ ID NO: 117981 - protein, 27 aa, Artificial Sequence
  Cyclic GFR-binding peptide
DENEKVVRYKKLIKPTKGIFYLISIAN

SEQ ID NO: 117982 - protein, 27 aa, Artificial Sequence
  Cyclic GFR-binding peptide
DENEKVVPIKGYVVKDYEDFYLMNIPS

SEQ ID NO: 117983 - protein, 27 aa, Artificial Sequence
  Cyclic GFR-binding peptide
DENEKVVEYKFKVVNNASDLYLISIPE

SEQ ID NO: 117984 - protein, 27 aa, Artificial Sequence
  Cyclic GFR-binding peptide
DENEKVVRYKKLVKPTRGVFYLISIAN

SEQ ID NO: 117985 - protein, 27 aa, Artificial Sequence
  Cyclic GFR-binding peptide
DENEKVVRHKRLVVKENEDYYLMSTAS

SEQ ID NO: 117986 - protein, 27 aa, Artificial Sequence
  Cyclic GFR-binding peptide
DENEKVVYHYKLIKPTKGIKYLISIPS

SEQ ID NO: 117987 - protein, 27 aa, Artificial Sequence
  Cyclic GFR-binding peptide
DENEKVVYHYKLVVKENEDKYLMSIPS

SEQ ID NO: 117988 - protein, 27 aa, Artificial Sequence
  Cyclic GFR-binding peptide
DENEKVVRHKRLIIQQKDNYYLMSTAS

SEQ ID NO: 117989 - protein, 27 aa, Artificial Sequence
  Cyclic GFR-binding peptide
DENEKVVRYKKLVVKENEDFYLMSIAN

SEQ ID NO: 117990 - protein, 27 aa, Artificial Sequence
  Cyclic GFR-binding peptide
DENEKVVRYKKLVVNNAADFYLISIAN

SEQ ID NO: 117991 - protein, 27 aa, Artificial Sequence
  Cyclic GFR-binding peptide
DENEKVVEYKFKIIQQKDNLYLMSIPE

SEQ ID NO: 117992 - protein, 27 aa, Artificial Sequence
  Cyclic GFR-binding peptide
DENEKVVRYKKLTPVGMDDFYLVSIAN

SEQ ID NO: 117993 - protein, 27 aa, Artificial Sequence
  Cyclic GFR-binding peptide
DENEKVVYHYKLVVNNAADKYLISIPS

SEQ ID NO: 117994 - protein, 27 aa, Artificial Sequence
  Cyclic GFR-binding peptide
DENEKVVPIKGYIVNNSSDFYLVNIPS

SEQ ID NO: 117995 - protein, 27 aa, Artificial Sequence
  Cyclic GFR-binding peptide
DENEKVVPIKGYVKPKRGVFYLINIPS

SEQ ID NO: 117996 - protein, 27 aa, Artificial Sequence
  Cyclic GFR-binding peptide
DENEKVVRYKKLIIQQKDNFYLMSIAN

SEQ ID NO: 117997 - protein, 27 aa, Artificial Sequence
  Cyclic GFR-binding peptide
DENEKVVPIKGYIIQQKDNFYLMNIPS

SEQ ID NO: 117998 - protein, 27 aa, Artificial Sequence
  Cyclic GFR-binding peptide
DENEKVVRYKKLIVNNSSDFYLVSIAN

SEQ ID NO: 117999 - protein, 27 aa, Artificial Sequence
  Cyclic GFR-binding peptide
DENEKVVPIKGYVVNNAADFYLINIPS

SEQ ID NO: 118000 - protein, 27 aa, Artificial Sequence
  Cyclic GFR-binding peptide
DENEKVVRHKRLVKPTRGVYYLISTAS

SEQ ID NO: 118001 - protein, 27 aa, Artificial Sequence
  Cyclic GFR-binding peptide
DENEKVVEYKFKIVNNSSDLYLVSIPE

SEQ ID NO: 118002 - protein, 27 aa, Artificial Sequence
  Cyclic GFR-binding peptide
DENEKVVRHKRLVVNNASDYYLISTAS

SEQ ID NO: 118003 - protein, 27 aa, Artificial Sequence
  Cyclic GFR-binding peptide
DENEKVVRHKRLTPVGMDDYYLVSTAS

SEQ ID NO: 118004 - protein, 27 aa, Artificial Sequence
  Cyclic GFR-binding peptide
DENEKVVYHYKLIVNNSSDKYLVSIPS

SEQ ID NO: 118005 - protein, 27 aa, Artificial Sequence
  Cyclic GFR-binding peptide
DENEKVVYHYKLVVNNASDKYLISIPS

SEQ ID NO: 118006 - protein, 27 aa, Artificial Sequence
  Cyclic GFR-binding peptide
DENEKVVEYKFKIVNSSDDLYLVSIPE

SEQ ID NO: 118007 - protein, 27 aa, Artificial Sequence
  Cyclic GFR-binding peptide
DENEKVVEYKFKVKPKRGVLYLISIPE

SEQ ID NO: 118008 - protein, 27 aa, Artificial Sequence
  Cyclic GFR-binding peptide
DENEKVVRHKRLVVKDYEDYYLMSTAS

SEQ ID NO: 118009 - protein, 27 aa, Artificial Sequence
  Cyclic GFR-binding peptide
DENEKVVEYKFKVVKENEDLYLMSIPE

SEQ ID NO: 118010 - protein, 27 aa, Artificial Sequence
  Cyclic GFR-binding peptide
DENEKVVEYKFKYTVVGKDLYLISIPE

SEQ ID NO: 118011 - protein, 27 aa, Artificial Sequence
  Cyclic GFR-binding peptide
DENEKVVPIKGYVVNNASDFYLINIPS

SEQ ID NO: 118012 - protein, 27 aa, Artificial Sequence
  Cyclic GFR-binding peptide
DENEKVVYHYKLIIQQKDNKYLMSIPS

SEQ ID NO: 118013 - protein, 27 aa, Artificial Sequence
  Cyclic GFR-binding peptide
DENEKVVRYKKLVVNNASDFYLISIAN

SEQ ID NO: 118014 - protein, 27 aa, Artificial Sequence
  Cyclic GFR-binding peptide
DENEKVVRHKRLVVNNAADYYLISTAS
